(19) United States
(12) Patent Application Publication
(10) Pub. No.: US 2017/0114356 A1
(43) Pub. Date: Apr. 27, 2017

(54) NOVEL ALTERNATIVELY SPLICED TRANSCRIPTS AND USES THEREOF FOR IMPROVEMENT OF AGRONOMIC CHARACTERISTICS IN CROP PLANTS

(71) Applicant: E I DU PONT DE NEMOURS AND COMPANY, Wilmington, DE (US)

(72) Inventors: BAILIN LI, HOCKESSIN, DE (US); SHAWN THATCHER, NEWARK, DE (US)

(21) Appl. No.: 15/047,804

(22) Filed: Feb. 19, 2016

Related U.S. Application Data
(60) Provisional application No. 62/257,774, filed on Nov. 20, 2015.
(60) Provisional application No. 62/118,576, filed on Feb. 20, 2015.

(51) Int. Cl. C12N 15/82; C07K 14/415; C12Q 1/68

(52) U.S. Cl. CPC C12N 15/8261; C12Q 1/6895; C07K 14/415; C12Y 301/00; C12Q 2600/158; C12Q 2600/13; C12Q 2600/156

(57) ABSTRACT

Computational analysis of hundreds of RNA-seq libraries enabled the identification of novel transcripts in maize. The novel transcripts are provided herein, as are recombinant DNA constructs comprising such, transgenic plants or cell thereof comprising the recombinant DNA constructs, and methods for generating transgenic seed and plants with improved agronomic characteristics.

### CROSS REFERENCE TO RELATED APPLICATIONS

[0001] This application claims the benefit of U.S. Provisional Application No. 62/118,576, filed Feb. 20, 2015, and U.S. Provisional Application No. 62/257,774, filed Nov. 20, 2015, the entire contents of which are herein incorporated by reference.

### INCORPORATION OF SEQUENCE LISTING

[0002] Two copies of the sequence listing (Seq. Listing Copy 1 and Seq. Listing Copy 2) and a computer-readable form of the sequence listing, all on CD-ROMs, each containing the file named
[0003] 20160217_BB2527USNP_SequenceListing_ST25.txt, which is 592,118 kbs (measured in MS-DOS) and was created on Feb. 17, 2016, are herein incorporated by reference.

### FIELD

[0004] The field relates to plant breeding and genetics and, in particular, to recombinant DNA constructs useful for production of transgenic plants with improved agronomic characteristics.

### BACKGROUND

[0005] The ability to develop transgenic plants with improved agronomic characteristics depends in part on the identification of genes that are useful for production of transformed plants for expression of novel polypeptides.

### SUMMARY

[0006] Novel polynucleotides identified in maize and the polypeptides encoded by such are provided herein. The polynucleotide sequences are represented by SEQ ID NOs:1-157,066 and 198,539-222,468. Novel polypeptides encoded by polynucleotides disclosed herein are represented by SEQ ID NOs:157,067-198,538 and 222,469-228,453. The polynucleotides are useful for improvement of one or more agronomic characteristics in crop plants.

[0007] Recombinant DNA constructs comprising the polynucleotides disclosed herein are also provided. A recombinant DNA construct may comprise a polynucleotide operably linked to at least one regulatory sequence wherein said polynucleotide comprises (a) a nucleic acid sequence of at least 95% sequence identity, based on the Clustal V method of alignment, when compared to any of SEQ ID NOs:1-157,066 and 198,539-222,468; (b) a nucleic acid sequence encoding an amino acid sequence of at least 95% sequence identity, based on the Clustal V method of alignment, when compared to any of SEQ ID NOs:157,067-198,538 and 222,469-228,453; or (c) a nucleic acid sequence that is transcribed into an RNA molecule that suppresses the level of an endogenous polypeptide having an amino acid sequence of at least 95% sequence identity, based on the Clustal V method of alignment, when compared to any of SEQ ID NOs:157,067-198,538 and 222,469-228,453. The regulatory sequence may be a promoter functional in a plant cell.

[0008] Such constructs are useful for production of transgenic plants having one or more improved agronomic characteristics as the result of increased or decreased expression of a polypeptide disclosed herein.

[0009] Methods for producing a transgenic plant with an improved agronomic characteristic are provided in which a plant cell is transformed with a recombinant DNA construct disclosed herein and a plant is regenerated from the transformed plant cell.

[0010] Transgenic plant cells, transgenic plants comprising the plant cells, and seed produced from the transgenic plants, e.g. transgenic crop plants such as maize, soybean, sunflower, sorghum, canola, wheat, alfalfa, cotton, rice, barley, millet, sugar cane, and switchgrass, which comprise a recombinant DNA construct disclosed herein, are also provided.

[0011] Methods for introducing any of the polynucleotides disclosed herein into a target site in the genome of a plant cell are also provided. The methods comprise (a) introducing into a plant cell one recombinant DNA construct capable of expressing a guide RNA and another recombinant DNA construct capable of expressing a Cas endonuclease, wherein said guide RNA and Cas endonuclease are capable of forming a complex that enables the Cas endonuclease to introduce a double strand break at said target site; (b) contacting the plant cell with a donor DNA comprising a polynucleotide of interest, wherein said polynucleotide of interest is any of the polynucleotides disclosed herein; and (c) identifying at least one plant cell that has the polynucleotide of interest integrated into the target site. The polynucleotide of interest may be a nucleic acid sequence of at least 95% sequence identity, based on the Clustal V method of alignment, when compared to any of SEQ ID NOs:1-157,066 and 198,539-222,468; or a nucleic acid sequence encoding an amino acid sequence of at least 95% sequence identity, based on the Clustal V method of alignment, when compared to any of SEQ ID NOs:157,067-198,538 and 222,469-228,453.

[0012] Methods of marker assisted selection of a maize plant are also provided in which the methods include: analyzing for expression of one or more transcripts selected from a group consisting of nucleotide sequences, wherein the nucleotide sequences encode alternatively spliced isoforms; correlating one or more transcripts with an improved agronomic characteristic; and selecting for the improved agronomic characteristic in a maize plant by assaying one or more markers that detect the one or more transcripts associated with the improved agronomic characteristic. The expression analysis may be performed with a plurality of isoform-specific probes derived from the group consisting of sequences SEQ ID NOs:1-157,066 and 198,539-222,468.

[0013] Methods for enhancing expression of a transgene in a plant are provided in which a nucleotide sequence of a transgene or an amino acid sequence of a transgene are obtained; the sequences are compared to a collection of nucleotide sequences of alternatively spliced isoforms or to a collection of amino acid sequences encoded by the alternatively spliced isoforms; one or more alternatively spliced isoform sequences corresponding to a transgene are selected; and the one or more alternatively spliced isoform sequences in the plant are expressed, thereby enhancing expression of the transgene. The selected isoform sequence may be expressed under its native promoter or a constitutive or tissue-preferred promoter.

[0014] Methods of identifying alternatively spliced isoforms of one or more genes involved in an agronomic trait are also provided in which a plurality of transcripts that are expressed under an abiotic stress condition are sequenced and the sequenced transcripts are compared to transcript sequences that are expressed in a non-stressed condition. Genes with splicing patterns that differ between the abiotic stress condition and non-stressed condition are then detected.

[0015] Methods of increasing yield in a plant are provided in which a spliced isoform is expressed or its expression is reduced, wherein the nucleotide for expression or a silencing element to reduce the expression of the spliced isoform is derived from a sequence selected from the group consisting of SEQ ID NOs: 1-157,066 and 198,539-222,468. The plant may be maize.

[0016] Methods of genome editing are provided in which one or more heterologous splice sites are introduced into one or more genomic loci of a plant, or one or more splice sites of the plant are selectively eliminated. The methods include identifying one or more alternatively spliced isoforms; determining one or more splice sites in the genomic region for the alternatively spliced isoforms; and introducing a splice site in the genomic loci that lacks the one or more splice sites or changing one or more nucleotides in a preexisting splice site to render the preexisting splice site non-functional. The alternatively spliced isoforms may be selected from the group consisting of SEQ ID NOs: 1-157,066 and 198,539-222,468.

[0017] Computer systems comprising: a relational database having records containing a) information about one or more sequences of spliced isoforms represented by SEQ ID NOs: 1-157,066 and 198,539-222,468 or amino acid sequences of 157,067-198,538 and 222,469-228,453; b) information identifying known SNPs or QTLs known to be associated with one or more traits of interest; and c) a user interface allowing a user to access the information contained in the records, are also provided.

[0018] Computer programs comprising: a computer-usable medium having computer-readable program code embodied thereon relating to generating a relational database having records containing a) information about one or more sequences of spliced isoforms represented by SEQ ID NOS: 1-157,066 and 198,539-222,468 or amino acid sequences of 157,067-198,538 and 222,469-228,453; b) information identifying known SNPs or QTLs known to be associated with one or more traits of interest; and c) a user interface allowing a user to access the information contained in the records, are also provided.

[0019] Methods for comparing a plurality of spliced isoforms among two or more plant populations, comprising: (a) accessing, by a computer system, a database of genetic information comprising spliced isoform sequences obtained from a plurality of plant tissues; (b) categorizing, by a computer system, the data in the database into a plurality of groups of spliced isoforms, such that one or more spliced isoforms for a particular gene are in the same group, and each group represents a different set of spliced isoforms; and (c) inputting data into a computer system, the data comprising sequences of one or more transcripts obtained from the two or more plant populations, are also provided. The plant populations may comprise inbred populations. The database may further comprise QTL information associated with one or more spliced isoforms.

[0020] Nucleotide constructs that express one or more guide RNAs, wherein a guide RNA targets a genomic sequence that encodes a polypeptide selected the group consisting of amino acid sequences of SEQ ID NOs: 157,067-198,538 and 222,469-228,453, are also provided.

### BRIEF DESCRIPTION OF THE SEQUENCE LISTING

[0021] The disclosure can be more fully understood from the following detailed description and the accompanying Sequence Listing which forms a part of this application.

[0022] SEQ ID NOs:1-157,066 and 198,539-222,468 are the cDNA sequences corresponding to the transcripts identified herein. SEQ ID NOs:157,067-198,538 and 222,469-228,453 are the amino acid sequences of polypeptides encoded by polynucleotides disclosed herein. Table 3 provides the isoform identifier associated with each SEQ ID NO:.

[0023] The sequence descriptions and Sequence Listing attached hereto comply with the rules governing nucleotide and/or amino acid sequence disclosures in patent applications as set forth in 37 C.F.R. §1.821 1.825.

[0024] The Sequence Listing contains the one letter code for nucleotide sequence characters and the three letter codes for amino acids as defined in conformity with the IUPAC IUBMB standards described in Nucleic Acids Res. 13:3021 3030 (1985) and in the Biochemical J. 219 (No. 2):345 373 (1984) which are herein incorporated by reference. The symbols and format used for nucleotide and amino acid sequence data comply with the rules set forth in 37 C.F.R. §1.822.

### DETAILED DESCRIPTION

[0025] The disclosure of each reference set forth herein is hereby incorporated by reference in its entirety.

[0026] As used herein and in the appended claims, the singular forms “a”, “an”, and “the” include plural reference unless the context clearly dictates otherwise. Thus, for example, reference to “a plant” includes a plurality of such plants, reference to “a cell” includes one or more cells and equivalents thereof known to those skilled in the art, and so forth.

[0027] As used herein:

[0028] The terms “monocot” and “monocotyledonous plant” are used interchangeably herein. A monocot as used herein includes the Gramineae.

[0029] The terms “dicot” and “dicotyledonous plant” are used interchangeably herein. A dicot as used herein includes the following families: Brassicaceae, Leguminosae, and Solanaceae.

[0030] The terms “full complement” and “full-length complement” are used interchangeably herein, and refer to a complement of a given nucleotide sequence, wherein the complement and the nucleotide sequence consist of the same number of nucleotides and are 100% complementary.

[0031] A “trait” refers to a physiological, morphological, biochemical, or physical characteristic of a plant or a particular plant material or cell. In some instances, this characteristic is visible to the human eye, such as seed or plant size, or can be measured by biochemical techniques, such as detecting the protein, starch, or oil content of seed or leaves, or by observation of a metabolic or physiological process, e.g. by measuring tolerance to water deprivation or particular salt or sugar concentrations, or by the observation of the expression level of a gene or genes, or by agricultural observations such as osmotic stress tolerance or yield.

[0032] “Agronomic characteristic” is a measurable parameter including but not limited to, abiotic stress tolerance, greenness, yield, growth rate, biomass, fresh weight at maturation, dry weight at maturation, fruit yield, seed yield, total plant nitrogen content, fruit nitrogen content, seed nitrogen content, nitrogen content in a vegetative tissue, total plant free amino acid content, fruit free amino acid content, seed free amino acid content, free amino acid content in a vegetative tissue, total plant protein content, fruit protein content, seed protein content, protein content in a vegetative tissue, drought tolerance, nitrogen uptake, root lodging, harvest index, stalk lodging, plant height, ear height, ear length, salt tolerance, early seedling vigor and seedling emergence under low temperature stress.

[0033] Abiotic stress may be at least one condition selected from the group consisting of: drought, water deprivation, flood, high light intensity, high temperature, low temperature, salinity, etiolation, defoliation, heavy metal toxicity, anaerobiosis, nutrient deficiency (such as for example nitrogen deficiency), nutrient excess, UV irradiation, atmospheric pollution (e.g., ozone) and exposure to chemicals (e.g., paraquat) that induce production of reactive oxygen species (ROS).

[0034] “Increased stress tolerance” of a plant is measured relative to a reference or control plant, and is a trait of the plant to survive under stress conditions over prolonged periods of time, without exhibiting the same degree of physiological or physical deterioration relative to the reference or control plant grown under similar stress conditions.

[0035] A plant with “increased stress tolerance” can exhibit increased tolerance to one or more different stress conditions.

[0036] “Transgenic” refers to any cell, cell line, callus, tissue, plant part or plant, the genome of which has been altered by the presence of a heterologous nucleic acid, such as a recombinant DNA construct, including those initial transgenic events as well as those created by sexual crosses or asexual propagation from the initial transgenic event. The term “transgenic” as used herein does not encompass the alteration of the genome (chromosomal or extra-chromosomal) by conventional plant breeding methods or by naturally occurring events such as random cross-fertilization, non-recombinant viral infection, non-recombinant bacterial transformation, non-recombinant transposition, or spontaneous mutation.

[0037] “Genome” as it applies to plant cells encompasses not only chromosomal DNA found within the nucleus, but organelle DNA found within subcellular components (e.g., mitochondrial, plastid) of the cell.

[0038] “Plant” includes reference to whole plants, plant organs, plant tissues, plant propagules, seeds and plant cells and progeny of same. Plant cells include, without limitation, cells from seeds, suspension cultures, embryos, meristematic regions, callus tissue, leaves, roots, shoots, gametophytes, sporophytes, pollen, and microspores.

[0039] “Propagule” includes all products of meiosis and mitosis able to propagate a new plant, including but not limited to, seeds, spores and parts of a plant that serve as a means of vegetative reproduction, such as corms, tubers, offsets, or runners. Propagule also includes grafts where one portion of a plant is grafted to another portion of a different plant (even one of a different species) to create a living organism. Propagule also includes all plants and seeds produced by cloning or by bringing together meiotic products, or allowing meiotic products to come together to form an embryo or fertilized egg (naturally or with human intervention).

[0040] “Progeny” comprises any subsequent generation of a plant.

[0041] “Transgenic plant” includes reference to a plant which comprises within its genome a heterologous polynucleotide. For example, the heterologous polynucleotide is stably integrated within the genome such that the polynucleotide is passed on to successive generations. The heterologous polynucleotide may be integrated into the genome alone or as part of a recombinant DNA construct.

[0042] The commercial development of genetically improved germplasm has also advanced to the stage of introducing multiple traits into crop plants, often referred to as a gene stacking approach. In this approach, multiple genes conferring different characteristics of interest can be introduced into a plant. Gene stacking can be accomplished by many means including but not limited to co-transformation, retransformation, and crossing lines with different transgenes.

[0043] “Transgenic plant” also includes reference to plants which comprise more than one heterologous polynucleotide within their genome. Each heterologous polynucleotide may confer a different trait to the transgenic plant.

[0044] “Heterologous” with respect to sequence means a sequence that originates from a foreign species, or, if from the same species, is substantially modified from its native form in composition and/or genomic locus by deliberate human intervention. “Polynucleotide”, “nucleic acid sequence”, “nucleotide sequence”, or “nucleic acid fragment” are used interchangeably and is a polymer of RNA or DNA that is single or double-stranded, optionally containing synthetic, non-natural or altered nucleotide bases. Nucleotides (usually found in their 5′ monophosphate form) are referred to by their single letter designation as follows: “A” for adenylate or deoxyadenylate (for RNA or DNA, respectively), “C” for cytidylate or deoxycytidylate, “G” for guanylate or deoxyguanylate, “U” for uridylate, “T” for deoxythymidylate, “R” for purines (A or G), “Y” for pyrimidines (C or T), “K” for G or T, “H” for A or C or T, “I” for inosine, and “N” for any nucleotide.

[0045] “Polypeptide”, “peptide”, “amino acid sequence” and “protein” are used interchangeably herein to refer to a polymer of amino acid residues. The terms apply to amino acid polymers in which one or more amino acid residue is an artificial chemical analogue of a corresponding naturally occurring amino acid, as well as to naturally occurring amino acid polymers. The terms “polypeptide”, “peptide”, “amino acid sequence”, and “protein” are also inclusive of modifications including, but not limited to, glycosylation, lipid attachment, sulfation, gamma-carboxylation of glutamic acid residues, hydroxylation and ADP-ribosylation.

[0046] “Messenger RNA (mRNA)” refers to the RNA that is without introns and that can be translated into protein by the cell.

[0047] “cDNA” refers to a DNA that is complementary to and synthesized from a mRNA template using the enzyme reverse transcriptase. The cDNA can be single-stranded or converted into the double-stranded form using the Klenow fragment of DNA polymerase I.

[0048] “Coding region” refers to the portion of a messenger RNA (or the corresponding portion of another nucleic acid molecule such as a DNA molecule) which encodes a protein or polypeptide. “Non-coding region” refers to all portions of a messenger RNA or other nucleic acid molecule that are not a coding region, including but not limited to, for example, the promoter region, 5′ untranslated region (“UTR”), 3′ UTR, intron and terminator. The terms “coding region” and “coding sequence” are used interchangeably herein. The terms “non-coding region” and “non-coding sequence” are used interchangeably herein.

[0049] “Mature” protein refers to a post-translationally processed polypeptide; i.e., one from which any pre- or pro-peptides present in the primary translation product have been removed.

[0050] “Precursor” protein refers to the primary product of translation of mRNA; i.e., with pre- and pro-peptides still present. Pre- and pro-peptides may be and are not limited to intracellular localization signals.

[0051] “Isolated” refers to materials, such as nucleic acid molecules and/or proteins, which are substantially free or otherwise removed from components that normally accompany or interact with the materials in a naturally occurring environment. Isolated polynucleotides may be purified from a host cell in which they naturally occur. Conventional nucleic acid purification methods known to skilled artisans may be used to obtain isolated polynucleotides. The term also embraces recombinant polynucleotides and chemically synthesized polynucleotides.

[0052] “Recombinant” refers to an artificial combination of two otherwise separated segments of sequence, e.g., by chemical synthesis or by the manipulation of isolated segments of nucleic acids by genetic engineering techniques. “Recombinant” also includes reference to a cell or vector, that has been modified by the introduction of a heterologous nucleic acid or a cell derived from a cell so modified, but does not encompass the alteration of the cell or vector by naturally occurring events (e.g., spontaneous mutation, natural transformation/transduction/transposition) such as those occurring without deliberate human intervention.

[0053] “Recombinant DNA construct” refers to a combination of nucleic acid fragments that are not normally found together in nature. Accordingly, a recombinant DNA construct may comprise regulatory sequences and coding sequences that are derived from different sources, or regulatory sequences and coding sequences derived from the same source, but arranged in a manner different than that normally found in nature. The terms “recombinant DNA construct” and “recombinant construct” are used interchangeably herein.

[0054] “Regulatory sequences” refer to nucleotide sequences located upstream (5′ non-coding sequences), within, or downstream (3′ non-coding sequences) of a coding sequence, and which influence the transcription, RNA processing or stability, or translation of the associated coding sequence. Regulatory sequences may include, but are not limited to, promoters, translation leader sequences, introns, and polyadenylation recognition sequences. The terms “regulatory sequence” and “regulatory element” are used interchangeably herein.

[0055] “Promoter” refers to a nucleic acid fragment capable of controlling transcription of another nucleic acid fragment.

[0056] “Promoter functional in a plant” is a promoter capable of controlling transcription in plant cells whether or not its origin is from a plant cell.

[0057] “Tissue-specific promoter” and “tissue-preferred promoter” are used interchangeably, and refer to a promoter that is expressed predominantly but not necessarily exclusively in one tissue or organ, but that may also be expressed in one specific cell.

[0058] “Developmentally regulated promoter” refers to a promoter whose activity is determined by developmental events.

[0059] “Operably linked” refers to the association of nucleic acid fragments in a single fragment so that the function of one is regulated by the other. For example, a promoter is operably linked with a nucleic acid fragment when it is capable of regulating the transcription of that nucleic acid fragment.

[0060] “Expression” refers to the production of a functional product. For example, expression of a nucleic acid fragment may refer to transcription of the nucleic acid fragment (e.g., transcription resulting in mRNA or functional RNA) and/or translation of mRNA into a precursor or mature protein.

[0061] “Phenotype” means the detectable characteristics of a cell or organism.

[0062] “Introduced” in the context of inserting a nucleic acid fragment (e.g., a recombinant DNA construct) into a cell, means “transfection” or “transformation” or “transduction” and includes reference to the incorporation of a nucleic acid fragment into a eukaryotic or prokaryotic cell where the nucleic acid fragment may be incorporated into the genome of the cell (e.g., chromosome, plasmid, plastid or mitochondrial DNA), converted into an autonomous replicon, or transiently expressed (e.g., transfected m RNA).

[0063] A “transformed cell” is any cell into which a nucleic acid fragment (e.g., a recombinant DNA construct) has been introduced.

[0064] “Transformation” as used herein refers to both stable transformation and transient transformation.

[0065] “Stable transformation” refers to the introduction of a nucleic acid fragment into a genome of a host organism resulting in genetically stable inheritance. Once stably transformed, the nucleic acid fragment is stably integrated in the genome of the host organism and any subsequent generation.

[0066] “Transient transformation” refers to the introduction of a nucleic acid fragment into the nucleus, or DNA-containing organelle, of a host organism resulting in gene expression without genetically stable inheritance.

[0067] As used herein, the terms “target site”, “target sequence”, “genomic target site” and “genomic target sequence” are used interchangeably herein and refer to a polynucleotide sequence in the genome of a plant cell or yeast cell that comprises a recognition site for a double-strand-break-inducing agent.

[0068] An “endonuclease” refers to an enzyme that cleaves the phosphodiester bond within a polynucleotide chain.

[0069] Endonucleases include restriction endonucleases that cleave DNA at specific sites without damaging the bases. Restriction endonucleases include Type I, Type II, Type III, and Type IV endonucleases, which further include subtypes. In the Type I and Type III systems, both the methylase and restriction activities are contained in a single complex.

[0070] Type I and Type III restriction endonucleases recognize specific recognition sites, but typically cleave at a variable position from the recognition site, which can be hundreds of base pairs away from the recognition site. In Type II systems the restriction activity is independent of any methylase activity, and cleavage typically occurs at specific sites within or near to the recognition site. Most Type II enzymes cut palindromic sequences, however Type IIa enzymes recognize non-palindromic recognition sites and cleave outside of the recognition site, Type IIb enzymes cut sequences twice with both sites outside of the recognition site, and Type IIs enzymes recognize an asymmetric recognition site and cleave on one side and at a defined distance of about 1-20 nucleotides from the recognition site. Type IV restriction enzymes target methylated DNA. Restriction enzymes are further described and classified, for example in the REBASE database (webpage at rebase.neb.com; Roberts et al., (2003) Nucleic Acids Res 31:418-20), Roberts et al., (2003) Nucleic Acids Res 31:1805-12, and Belfort et al., (2002) in Mobile DNA II, pp. 761-783, Eds. Craigie et al., (ASM Press, Washington, D.C.).

[0071] A “meganuclease” refers to a homing endonuclease, which like restriction endonucleases, bind and cut at a specific recognition site, however the recognition sites for meganucleases are typically longer, about 18 by or more. In some embodiments of the invention, the meganuclease has been engineered (or modified) to cut a specific endogenous recognition sequence, wherein the endogenous target sequence prior to being cut by the engineered double-strand-break-inducing agent was not a sequence that would have been recognized by a native (non-engineered or non-modified) endonuclease.

[0072] A “meganuclease polypeptide” refers to a polypeptide having meganuclease activity and thus capable of producing a double-strand break in the recognition sequence.

[0073] Meganucleases have been classified into four families based on conserved sequence motifs, the families are the LAGLIDADG, GIY-YIG, H-N-H, and His-Cys box families. These motifs participate in the coordination of metal ions and hydrolysis of phosphodiester bonds. HEases are notable for their long recognition sites, and for tolerating some sequence polymorphisms in their DNA substrates. The naming convention for meganuclease is similar to the convention for other restriction endonuclease. Meganucleases are also characterized by prefix F- , I- , or PI- for enzymes encoded by free-standing open reading frames, introns, and inteins, respectively. For example, intron- , intein- , and freestanding gene encoded meganuclease from Saccharomyces cerevisiae are denoted I-SceI, PI-SceI, and F-SceII, respectively. Meganuclease domains, structure and function are known, see for example, Guhan and Muniyappa (2003) Crit Rev Biochem Mol Biol 38:199-248; Lucas et al., (2001) Nucleic Acids Res 29:960-9; Jurica and Stoddard, (1999) Cell Mol Life Sci 55:1304-26; Stoddard, (2006) Q Rev Biophys 38:49-95; and Moure et al., (2002) Nat Struct Biol 9:764. In some examples a naturally occurring variant, and/or engineered derivative meganuclease is used. Methods for modifying the kinetics, cofactor interactions, expression, optimal conditions, and/or recognition site specificity, and screening for activity are known, see for example, Epinat et al., (2003) Nucleic Acids Res 31:2952-62; Chevalier et al., (2002) Mol Cell 10:895-905; Gimble et al., (2003) Mol Biol 334:993-1008; Seligman et al., (2002) Nucleic Acids Res 30:3870-9; Sussman et al., (2004) J Mol Biol 342:31-41; Rosen et al., (2006) Nucleic Acids Res 34:4791-800; Chames et al., (2005) Nucleic Acids Res 33:e178; Smith et al., (2006) Nucleic Acids Res 34:e149; Gruen et al., (2002) Nucleic Acids Res 30:e29; Chen and Zhao, (2005) Nucleic Acids Res 33:e154; WO2005105989; WO2003078619; WO2006097854; WO2006097853; WO2006097784; and WO2004031346.

[0074] Any meganuclease can be used herein, including, but not limited to, I-SceI, I-SceII, I-SceIII, I-SceIV, I-SceV, I-SceVI, I-SceVII, I-CeuI, I-CeuAIIP, I-CreI, I-CrepsbIP, I-CrepsbIIP, I-CrepsbIIIP, I-CrepsbIVP, I-TliI, I-PpoI, PI-PspI, F-SceI, F-SceII, F-SuvI, F-TevI, F-TevII, I-AmaI, I-AniI, I-ChuI, I-CmoeI, I-CpaI, I-CpaII, I-CsmI, I-CvuI, I-CvuAIP, I-DdiI, I-DdiII, I-DirI, I-DmoI, I-HmuI, I-HmuII, I-HsNIP, I-LlaI, I-MsoI, I-NaaI, I-NanI, I-NcIIP, I-NgrIP, I-NitI, I-NjaI, I-Nsp236IP, I-PakI, I-PboIP, I-PcuIP, I-PcuAI, I-PcuVI, I-PgrIP, I-PobIP, I-PorI, I-PorIIP, I-PbpIP, I-SpBetaIP, I-ScaI, I-SexIP, I-SneIP, I-SpomI, I-SpomCP, I-SpomIP, I-SpomIIP, I-SquIP, I-Ssp6803I, I-SthPhiJP, I-SthPhiST3P, I-SthPhiSTe3bP, I-TdeIP, I-TevI, I-TevII, I-TevIII, I-UarAP, I-UarHGPAIP, I-UarHGPA13P, I-VinIP, I-ZbiIP, PI-MtuI, PI-MtuHIP PI-MtuHIIP, PI-PfuI, PI-PfuII, PI-PkoI, PI-PkoII, PI-Rma43812IP, PI-SpBetaIP, PI-SceI, PI-TfuI, PI-TfuII, PI-ThyI, PI-TliI, PI-TliII, or any active variants or fragments thereof.

[0075] TAL effector nucleases are a new class of sequence-specific nucleases that can be used to make double-strand breaks at specific target sequences in the genome of a plant or other organism. TAL effector nucleases are created by fusing a native or engineered transcription activator-like (TAL) effector, or functional part thereof, to the catalytic domain of an endonuclease, such as, for example, FokI. The unique, modular TAL effector DNA binding domain allows for the design of proteins with potentially any given DNA recognition specificity. Thus, the DNA binding domains of the TAL effector nucleases can be engineered to recognize specific DNA target sites and thus, used to make double-strand breaks at desired target sequences. See, WO 2010/079430; Morbitzer et al. (2010) PNAS 10.1073/pnas.1013133107; Scholze & Boch (2010) Virulence 1:428-432; Christian et al. Genetics (2010) 186:757-761; Li et al. (2010) Nuc. Acids Res. (2010) doi:10.1093/nar/gkq704; and Miller et al. (2011) Nature Biotechnology 29:143-148; all of which are herein incorporated by reference.

[0076] As used herein, the term “Cas gene” refers to a gene that is generally coupled, associated or close to or in the vicinity of flanking CRISPR loci.

[0077] CRISPR loci (Clustered Regularly Interspaced Short Palindromic Repeats) (also known as SPIDRs—SPacer Interspersed Direct Repeats) constitute a family of recently described DNA loci. CRISPR loci consist of short and highly conserved DNA repeats (typically 24 to 40 bps, repeated from 1 to 140 times-also referred to as CRISPR-repeats) which are partially palindromic. The repeated sequences (usually specific to a species) are interspaced by variable sequences of constant length (typically 20 to 58 by depending on the CRISPR locus (WO2007/024097published Mar. 1, 2007).

[0078] CRISPR loci were first recognized in E. coli (Ishino et al. (1987) J. Bacterial. 169:5429-5433; Nakata et al. (1989) J. Bacterial. 171:3553-3556). Similar interspersed short sequence repeats have been identified in Haloferax mediterranei, Streptococcus pyogenes, Anabaena, and Mycobacterium tuberculosis (Groenen et al. (1993) Mol. Microbiol. 10:1057-1065; Hoe et al. (1999) Emerg. Infect. Dis. 5:254-263; Masepohl et al. (1996) Biochim. Biophys. Acta 1307:26-30; Mojica et al. (1995) Mol. Microbiol. 17:85-93). The CRISPR loci differ from other SSRs by the structure of the repeats, which have been termed short regularly spaced repeats (SRSRs) (Janssen et al. (2002) OMICS J. Integ. Biol. 6:23-33; Mojica et al. (2000) Mol. Microbiol. 36:244-246). The repeats are short elements that occur in clusters, that are always regularly spaced by variable sequences of constant length (Mojica et al. (2000) Mol. Microbiol. 36:244-246). \

[0079] The terms “Cas gene”, “CRISPR-associated (Cas) gene” are used interchangeably herein. A comprehensive review of the Cas protein family is presented in Haft et al. (2005) Computational Biology, PLoS Comput Biol 1(6): e60. doi:10.1371/journal.pcbi.0010060. As described therein, 41 CRISPR-associated (Cas) gene families are described, in addition to the four previously known gene families. It shows that CRISPR systems belong to different classes, with different repeat patterns, sets of genes, and species ranges. The number of Cas genes at a given CRISPR locus can vary between species.

[0080] As used herein, the term “guide RNA” refers to a synthetic fusion of two RNA molecules, a crRNA (CRISPR RNA) comprising a variable targeting domain, and a tracrRNA. The guide RNA may comprise a variable targeting domain of 12 to 30 nucleotide sequences and a RNA fragment that can interact with a Cas endonuclease.

[0081] The term “variable targeting domain” refers to a nucleotide sequence 5 -prime of the GUUUU sequence motif in the guide RNA, that is complementary to one strand of a double strand DNA target site in the genome of a plant cell, plant or seed. In one embodiment, the variable targeting domain is 12 to 30 nucleotides in length.

[0082] Sequence alignments and percent identity calculations may be determined using a variety of comparison methods designed to detect homologous sequences including, but not limited to, the Megalign® program of the LASERGENE® bioinformatics computing suite (DNASTAR® Inc., Madison, Wis.). Unless stated otherwise, multiple alignment of the sequences provided herein were performed using the Clustal V method of alignment (Higgins and Sharp (1989) CABIOS. 5:151 153) with the default parameters (GAP PENALTY=10, GAP LENGTH PENALTY=10). Default parameters for pairwise alignments and calculation of percent identity of protein sequences using the Clustal V method are KTUPLE=1, GAP PENALTY=3, WINDOW=5 and DIAGONALS SAVED=5. For nucleic acids the parameters are KTUPLE=2, GAP PENALTY=5, WINDOW=4 and DIAGONALS SAVED=4. After alignment of the sequences, using the Clustal V program, it is possible to obtain “percent identity” and “divergence” values by viewing the “sequence distances” table on the same program; unless stated otherwise, percent identities and divergences provided and claimed herein were calculated in this manner.

[0083] Alternatively, the Clustal W method of alignment may be used. The Clustal W method of alignment (described by Higgins and Sharp, CABIOS. 5:151-153 (1989); Higgins, D. G. et al., i Comput. Appl. Biosci. 8:189-191 (1992)) can be found in the MegAlign™ v6.1 program of the LASERGENE® bioinformatics computing suite (DNASTAR® Inc., Madison, Wis.). Default parameters for multiple alignment correspond to GAP PENALTY=10, GAP LENGTH PENALTY=0.2, Delay Divergent Sequences=30%, DNA Transition Weight=0.5, Protein Weight Matrix=Gonnet Series, DNA Weight Matrix=IUB. For pairwise alignments the default parameters are Alignment=Slow-Accurate, Gap Penalty=10.0, Gap Length=0.10, Protein Weight Matrix=Gonnet 250 and DNA Weight Matrix=IUB. After alignment of the sequences using the Clustal W program, it is possible to obtain “percent identity” and “divergence” values by viewing the “sequence distances” table in the same program.

[0084] Standard recombinant DNA and molecular cloning techniques used herein are well known in the art and are described more fully in Sambrook, J., Fritsch, E. F. and Maniatis, T. Molecular Cloning: A Laboratory Manual; Cold Spring Harbor Laboratory Press: Cold Spring Harbor, 1989 (hereinafter “Sambrook”).

[0085] 180,996 novel transcripts resulting in 47,457 novel proteins have been identified herein. Analysis of previously identified alternative transcripts (in U.S. application Ser. No. 14/628,469, filed Feb. 23, 2015) has shown that (1) newly identified transcripts may be truncated at their N or C terminus; (2) newly identified transcripts may be extensions at either terminus, thereby gaining new functional domains; (3) proteins encoded by the newly identified transcripts may have internal domains added, removed, or substituted without shifting their reading frames, in comparison to their most similar annotated transcripts; (4) proteins encoded by the newly identified transcripts could have less than 25% identity with their most similar annotated transcripts and could have a distinct function; and (5) newly identified transcripts may encode proteins that are identical to those generated by their most similar known transcripts but the transcripts possess different UTRs. In addition, the newly identified transcripts may result in new genes and isoforms which are potential miRNA targets or new genes and isoforms that have lost their target site.

[0086] Embodiments include isolated polynucleotides and polypeptides, recombinant DNA constructs useful for improving one or more agronomic characteristics in a plant, compositions (such as plants or seeds) comprising the recombinant DNA constructs, and methods utilizing the recombinant DNA constructs.

### Isolated Polynucleotides and Polypeptides:

[0087] Computational analysis of hundreds of RNA-seq libraries enabled the identification of novel transcripts in maize. Polynucleotides corresponding to the novel transcripts are provided herein, as are the polypeptides encoded by the polynucleotides. The polynucleotide sequences are represented by SEQ ID NOs:1-157,066 and 198,539-222,468, and the polypeptide sequences are represented by SEQ ID NOs:157,067-198,538 and 222,469-228,453.

[0088] An isolated polynucleotide comprising: (i) a nucleic acid sequence encoding a polypeptide having an amino acid sequence of at least 50%, 51%, 52%, 53%, 54%, 55%, 56%, 57%, 58%, 59%, 60%, 61%, 62%, 63%, 64%, 65%, 66%, 67%, 68%, 69%, 70%, 71%, 72%, 73%, 74%, 75%, 76%, 77%, 78%, 79%, 80%, 81%, 82%, 83%, 84%, 85%, 86%, 87%, 88%, 89%, 90%, 91%, 92%, 93%, 94%, 95%, 96%, 97%, 98%, 99%, or 100% sequence identity, based on the Clustal V method of alignment, when compared to any of SEQ ID NOs:157,067-198,538 and 222,469-228,453; or (ii) a full complement of the nucleic acid sequence of (i), wherein the full complement and the nucleic acid sequence of (i) consist of the same number of nucleotides and are 100% complementary. Any of the foregoing isolated polynucleotides may be utilized in any recombinant DNA constructs disclosed herein.

[0089] An isolated polypeptide having an amino acid sequence of at least 50%, 51%, 52%, 53%, 54%, 55%, 56%, 57%, 58%, 59%, 60%, 61%, 62%, 63%, 64%, 65%, 66%, 67%, 68%, 69%, 70%, 71%, 72%, 73%, 74%, 75%, 76%, 77%, 78%, 79%, 80%, 81%, 82%, 83%, 84%, 85%, 86%, 87%, 88%, 89%, 90%, 91%, 92%, 93%, 94%, 95%, 96%, 97%, 98%, 99%, or 100% sequence identity, based on the Clustal V method of alignment, when compared to any of SEQ ID NOs: 157,067-198,538 and 222,469-228,453.

[0090] An isolated polynucleotide comprising (i) a nucleic acid sequence of at least 50%, 51%, 52%, 53%, 54%, 55%, 56%, 57%, 58%, 59%, 60%, 61%, 62%, 63%, 64%, 65%, 66%, 67%, 68%, 69%, 70%, 71%, 72%, 73%, 74%, 75%, 76%, 77%, 78%, 79%, 80%, 81%, 82%, 83%, 84%, 85%, 86%, 87%, 88%, 89%, 90%, 91%, 92%, 93%, 94%, 95%, 96%, 97%, 98%, 99%, or 100% sequence identity, based on the Clustal V method of alignment, when compared to any of SEQ ID NOs:1-157,066 and 198,539-222,468; or (ii) a full complement of the nucleic acid sequence of (i). Any of the foregoing isolated polynucleotides may be utilized in any recombinant DNA constructs disclosed herein.

[0091] An isolated polynucleotide comprising a nucleotide sequence, wherein the nucleotide sequence is hybridizable under stringent conditions with a DNA molecule comprising the full complement of any of SEQ ID NOs:1-157,066 and 198,539-222,468.

[0092] An isolated polynucleotide comprising a nucleotide sequence, wherein the nucleotide sequence is derived from any of SEQ ID NOs:1-157,066 and 198,539-222,468 by alteration of one or more nucleotides by at least one method selected from the group consisting of: deletion, substitution, addition and insertion.

[0093] An isolated polynucleotide comprising a nucleotide sequence, wherein the nucleotide sequence corresponds to an allele of SEQ ID NOs:1-157,066 and 198,539-222,468.

[0094] Also of interest are fragments of the disclosed polynucleotides consisting of oligonucleotides of at least 15, preferably at least 16 or 17, more preferably at least 18 or 19, and even more preferably at least 20 or more, consecutive nucleotides. Such oligonucleotides are fragments of any of the larger polynucleotide sequences of SEQ ID NOs:1-157,066 and 198,539-222,468, and may find use, for example as probes and primers for detection of the polynucleotides disclosed herein.

[0095] It is understood, as those skilled in the art will appreciate, that the disclosure encompasses more than the specific exemplary sequences. Alterations in a nucleic acid fragment which result in the production of a chemically equivalent amino acid at a given site, but do not affect the functional properties of the encoded polypeptide, are well known in the art. For example, a codon for the amino acid alanine, a hydrophobic amino acid, may be substituted by a codon encoding another less hydrophobic residue, such as glycine, or a more hydrophobic residue, such as valine, leucine, or isoleucine. Similarly, changes which result in substitution of one negatively charged residue for another, such as aspartic acid for glutamic acid, or one positively charged residue for another, such as lysine for arginine, can also be expected to produce a functionally equivalent product. Nucleotide changes which result in alteration of the N terminal and C terminal portions of the polypeptide molecule would also not be expected to alter the activity of the polypeptide. Each of the proposed modifications is well within the routine skill in the art, as is determination of retention of biological activity of the encoded products.

[0096] A protein disclosed herein may also be a protein which comprises an amino acid sequence comprising a deletion, substitution, insertion and/or addition of one or more amino acids in an amino acid sequence presented in any of SEQ ID NOs:157,067-198,538 and 222,469-228,453. The substitution may be conservative, which means the replacement of a certain amino acid residue by another residue having similar physical and chemical characteristics. Non-limiting examples of conservative substitution include replacement between aliphatic group-containing amino acid residues such as Ile, Val, Leu or Ala, and replacement between polar residues such as Lys-Arg, Glu-Asp or Gln-Asn replacement.

[0097] Proteins derived by amino acid deletion, substitution, insertion and/or addition can be prepared when DNAs encoding their wild-type proteins are subjected to, for example, well-known site-directed mutagenesis (see, e.g., Nucleic Acid Research, Vol. 10, No. 20, p.6487-6500, 1982, which is hereby incorporated by reference in its entirety). As used herein, the term “one or more amino acids” is intended to mean a possible number of amino acids which may be deleted, substituted, inserted and/or added by site-directed mutagenesis.

[0098] Techniques for allowing deletion, substitution, insertion and/or addition of one or more amino acids in the amino acid sequences of biologically active peptides such as enzymes while retaining their activity include site-directed mutagenesis mentioned above, as well as other techniques such as those for treating a gene with a mutagen, and those in which a gene is selectively cleaved to remove, substitute, insert or add a selected nucleotide or nucleotides, and then ligated.

[0099] A protein disclosed herein may also be a protein which is encoded by a nucleic acid comprising a nucleotide sequence comprising a deletion, substitution, insertion and/or addition of one or more nucleotides in the nucleotide sequence of any of SEQ ID NOs:1-157,066 and 198,539-222,468. Nucleotide deletion, substitution, insertion and/or addition may be accomplished by site-directed mutagenesis or other techniques as mentioned above.

[0100] A protein disclosed herein may also be a protein which is encoded by a nucleic acid comprising a nucleotide sequence hybridizable under stringent conditions with the complementary strand of the nucleotide sequence of any of SEQ ID NOs:1-157,066 and 198,539-222,468.

[0101] The term “under stringent conditions” means that two sequences hybridize under moderately or highly stringent conditions. More specifically, moderately stringent conditions can be readily determined by those having ordinary skill in the art, e.g., depending on the length of DNA. The basic conditions are set forth by Sambrook et al., Molecular Cloning: A Laboratory Manual, third edition, chapters 6 and 7, Cold Spring Harbor Laboratory Press, 2001 and include the use of a prewashing solution for nitrocellulose filters 5×SSC, 0.5% SDS, 1.0 mM EDTA (pH 8.0), hybridization conditions of about 50% formamide, 2×SSC to 6×SSC at about 40-50° C. (or other similar hybridization solutions, such as Stark's solution, in about 50% formamide at about 42° C.) and washing conditions of, for example, about 40-60° C., 0.5-6×SSC, 0.1% SDS. Preferably, moderately stringent conditions include hybridization (and washing) at about 50° C. and 6×SSC. Highly stringent conditions can also be readily determined by those skilled in the art, e.g., depending on the length of DNA.

[0102] Generally, such conditions include hybridization and/or washing at higher temperature and/or lower salt concentration (such as hybridization at about 65° C., 6×SSC to 0.2×SSC, preferably 6×SSC, more preferably 2×SSC, most preferably 0.2×SSC), compared to the moderately stringent conditions. For example, highly stringent conditions may include hybridization as defined above, and washing at approximately 65-68° C., 0.2×SSC, 0.1% SDS. SSPE (1×SSPE is 0.15 M NaCl, 10 mM NaH2PO4, and 1.25 mM EDTA, pH 7.4) can be substituted for SSC (1×SSC is 0.15 M NaCl and 15 mM sodium citrate) in the hybridization and washing buffers; washing is performed for 15 minutes after hybridization is completed.

[0103] It is also possible to use a commercially available hybridization kit which uses no radioactive substance as a probe. Specific examples include hybridization with an ECL direct labeling & detection system (Amersham). Stringent conditions include, for example, hybridization at 42° C. for 4 hours using the hybridization buffer included in the kit, which is supplemented with 5% (w/v) Blocking reagent and 0.5 M NaCl, and washing twice in 0.4% SDS, 0.5×SSC at 55° C. for 20 minutes and once in 2×SSC at room temperature for 5 minutes.

### Recombinant DNA Constructs:

[0104] Recombinant DNA constructs comprising polynucleotides disclosed herein are also provided.

[0105] In one embodiment, a recombinant DNA construct comprises a polynucleotide operably linked to at least one regulatory sequence (e.g., a promoter functional in a plant), wherein the polynucleotide comprises (i) a nucleic acid sequence encoding an amino acid sequence of at least 50%, 51%, 52%, 53%, 54%, 55%, 56%, 57%, 58%, 59%, 60%, 61%, 62%, 63%, 64%, 65%, 66%, 67%, 68%, 69%, 70%, 71%, 72%, 73%, 74%, 75%, 76%, 77%, 78%, 79%, 80%, 81%, 82%, 83%, 84%, 85%, 86%, 87%, 88%, 89%, 90%, 91%, 92%, 93%, 94%, 95%, 96%, 97%, 98%, 99%, or 100% sequence identity, based on the Clustal V method of alignment, when compared to any of SEQ ID NOs:157,067-198,538 and 222,469-228,453; or (ii) a full complement of the nucleic acid sequence of (i).

[0106] In another embodiment, a recombinant DNA construct comprises a polynucleotide operably linked to at least one regulatory sequence (e.g., a promoter functional in a plant), wherein said polynucleotide comprises (i) a nucleic acid sequence of at least 50%, 51%, 52%, 53%, 54%, 55%, 56%, 57%, 58%, 59%, 60%, 61%, 62%, 63%, 64%, 65%, 66%, 67%, 68%, 69%, 70%, 71%, 72%, 73%, 74%, 75%, 76%, 77%, 78%, 79%, 80%, 81%, 82%, 83%, 84%, 85%, 86%, 87%, 88%, 89%, 90%, 91%, 92%, 93%, 94%, 95%, 96%, 97%, 98%, 99%, or 100% sequence identity, based on the Clustal V method of alignment, when compared to any of SEQ ID NOs:1-157,066 and 198,539-222,468; or (ii) a full complement of the nucleic acid sequence of (i).

[0107] In another embodiment, a recombinant DNA construct comprises a polynucleotide operably linked to at least one regulatory sequence (e.g., a promoter functional in a plant), wherein said polynucleotide comprises (i) a nucleic acid sequence that is transcribed into an RNA molecule that suppresses the level of an endogenous polypeptide having an amino acid sequence of at least 50%, 51%, 52%, 53%, 54%, 55%, 56%, 57%, 58%, 59%, 60%, 61%, 62%, 63%, 64%, 65%, 66%, 67%, 68%, 69%, 70%, 71%, 72%, 73%, 74%, 75%, 76%, 77%, 78%, 79%, 80%, 81%, 82%, 83%, 84%, 85%, 86%, 87%, 88%, 89%, 90%, 91%, 92%, 93%, 94%, 95%, 96%, 97%, 98%, 99%, or 100% sequence identity, based on the Clustal V method of alignment, when compared to any of SEQ ID NOs:157,067-198,538 and 222,469-228,453.

[0108] It is understood, as those skilled in the art will appreciate, that the disclosure encompasses more than the specific exemplary sequences. Alterations in a nucleic acid fragment which result in the production of a chemically equivalent amino acid at a given site, but do not affect the functional properties of the encoded polypeptide, are well known in the art. For example, a codon for the amino acid alanine, a hydrophobic amino acid, may be substituted by a codon encoding another less hydrophobic residue, such as glycine, or a more hydrophobic residue, such as valine, leucine, or isoleucine. Similarly, changes which result in substitution of one negatively charged residue for another, such as aspartic acid for glutamic acid, or one positively charged residue for another, such as lysine for arginine, can also be expected to produce a functionally equivalent product. Nucleotide changes which result in alteration of the N terminal and C terminal portions of the polypeptide molecule would also not be expected to alter the activity of the polypeptide. Each of the proposed modifications is well within the routine skill in the art, as is determination of retention of biological activity of the encoded products.

[0109] The recombinant DNA construct may be a suppression DNA construct and may comprise a cosuppression construct, antisense construct, viral-suppression construct, hairpin suppression construct, stem-loop suppression construct, double-stranded RNA-producing construct, RNAi construct, or small RNA construct (e.g., an sRNA construct or an miRNA construct).

[0110] “Suppression DNA construct” is a recombinant DNA construct which when transformed or stably integrated into the genome of the plant, results in “silencing” of a target gene in the plant. The target gene may be endogenous or transgenic to the plant. “Silencing,” as used herein with respect to the target gene, refers generally to the suppression of levels of mRNA or protein/enzyme expressed by the target gene, and/or the level of the enzyme activity or protein functionality. The terms “suppression”, “suppressing” and “silencing”, used interchangeably herein, include lowering, reducing, declining, decreasing, inhibiting, eliminating or preventing. “Silencing” or “gene silencing” does not specify mechanism and is inclusive, and not limited to, anti-sense, cosuppression, viral-suppression, hairpin suppression, stem-loop suppression, RNAi-based approaches, and small RNA-based approaches.

[0111] A suppression DNA construct may comprise a region derived from a target gene of interest and may comprise all or part of the nucleic acid sequence of the sense strand (or antisense strand) of the target gene of interest. Depending upon the approach to be utilized, the region may be 100% identical or less than 100% identical (e.g., at least 50%, 51%, 52%, 53%, 54%, 55%, 56%, 57%, 58%, 59%, 60%, 61%, 62%, 63%, 64%, 65%, 66%, 67%, 68%, 69%, 70%, 71%, 72%, 73%, 74%, 75%, 76%, 77%, 78%, 79%, 80%, 81%, 82%, 83%, 84%, 85%, 86%, 87%, 88%, 89%, 90%, 91%, 92%, 93%, 94%, 95%, 96%, 97%, 98%, or 99% identical) to all or part of the sense strand (or antisense strand) of the gene of interest.

[0112] A suppression DNA construct may comprise 100, 200, 300, 400, 500, 600, 700, 800, 900 or 1000 contiguous nucleotides of the sense strand (or antisense strand) of the gene of interest.

[0113] Suppression DNA constructs are well-known in the art, are readily constructed once the target gene of interest is selected, and include, without limitation, cosuppression constructs, antisense constructs, viral-suppression constructs, hairpin suppression constructs, stem-loop suppression constructs, double-stranded RNA-producing constructs, and more generally, RNAi (RNA interference) constructs and small RNA constructs such as sRNA (short interfering RNA) constructs and miRNA (microRNA) constructs.

[0114] Suppression of gene expression may also be achieved by use of artificial miRNA precursors, ribozyme constructs and gene disruption. A modified plant miRNA precursor may be used, wherein the precursor has been modified to replace the miRNA encoding region with a sequence designed to produce a miRNA directed to the nucleotide sequence of interest. Gene disruption may be achieved by use of transposable elements or by use of chemical agents that cause site-specific mutations.

[0115] “Antisense inhibition” refers to the production of antisense RNA transcripts capable of suppressing the expression of the target gene or gene product. “Antisense RNA” refers to an RNA transcript that is complementary to all or part of a target primary transcript or mRNA and that blocks the expression of a target isolated nucleic acid fragment (U.S. Pat. No. 5,107,065). The complementarity of an antisense RNA may be with any part of the specific gene transcript, i.e., at the 5′ non-coding sequence, 3′ non-coding sequence, introns, or the coding sequence.

[0116] “Cosuppression” refers to the production of sense RNA transcripts capable of suppressing the expression of the target gene or gene product. “Sense” RNA refers to RNA transcript that includes the mRNA and can be translated into protein within a cell or in vitro. Cosuppression constructs in plants have been previously designed by focusing on overexpression of a nucleic acid sequence having homology to a native mRNA, in the sense orientation, which results in the reduction of all RNA having homology to the overexpressed sequence (see Vaucheret et al., Plant J. 16:651-659 (1998); and Gura, Nature 404:804-808 (2000)).

[0117] Another variation describes the use of plant viral sequences to direct the suppression of proximal mRNA encoding sequences (PCT Publication No. WO 98/36083 published on August 20, 1998).

[0118] RNA interference refers to the process of sequence-specific post-transcriptional gene silencing in animals mediated by short interfering RNAs (siRNAs) (Fire et al., Nature 391:806 (1998)). The corresponding process in plants is commonly referred to as post-transcriptional gene silencing (PTGS) or RNA silencing and is also referred to as quelling in fungi. The process of post-transcriptional gene silencing is thought to be an evolutionarily-conserved cellular defense mechanism used to prevent the expression of foreign genes and is commonly shared by diverse flora and phyla (Fire et al., Trends Genet. 15:358 (1999)).

[0119] Small RNAs play an important role in controlling gene expression. Regulation of many developmental processes, including flowering, is controlled by small RNAs. It is now possible to engineer changes in gene expression of plant genes by using transgenic constructs which produce small RNAs in the plant.

[0120] Small RNAs appear to function by base-pairing to complementary RNA or DNA target sequences. When bound to RNA, small RNAs trigger either RNA cleavage or translational inhibition of the target sequence. When bound to DNA target sequences, it is thought that small RNAs can mediate DNA methylation of the target sequence. The consequence of these events, regardless of the specific mechanism, is that gene expression is inhibited.

[0121] MicroRNAs (miRNAs) are noncoding RNAs of about 19 to about 24 nucleotides (nt) in length that have been identified in both animals and plants (Lagos-Quintana et al., Science 294:853-858 (2001), Lagos-Quintana et al., Curr. Biol. 12:735-739 (2002); Lau et al., Science 294:858-862 (2001); Lee and Ambros, Science 294:862-864 (2001); Llave et al., Plant Cell 14:1605-1619 (2002); Mourelatos et al., Genes Dev. 16:720-728 (2002); Park et al., Curr. Biol. 12:1484-1495 (2002); Reinhart et al., Genes. Dev. 16:1616-1626 (2002)). They are processed from longer precursor transcripts that range in size from approximately 70 to 200 nt, and these precursor transcripts have the ability to form stable hairpin structures.

[0122] The terms “miRNA-star sequence” and “miRNA*sequence” are used interchangeably herein and they refer to a sequence in the miRNA precursor that is highly complementary to the miRNA sequence. The miRNA and miRNA*sequences form part of the stem region of the miRNA precursor hairpin structure.

[0123] In one embodiment, there is provided a method for the suppression of a target sequence comprising introducing into a cell a nucleic acid construct encoding a miRNA substantially complementary to the target. In some embodiments the miRNA comprises about 19, 20, 21, 22, 23, 24 or 25 nucleotides. In some embodiments the miRNA comprises 21 nucleotides. In some embodiments the nucleic acid construct encodes the miRNA. In some embodiments the nucleic acid construct encodes a polynucleotide precursor which may form a double-stranded RNA, or hairpin structure comprising the miRNA.

[0124] In some embodiments, the nucleic acid construct comprises a modified endogenous plant miRNA precursor, wherein the precursor has been modified to replace the endogenous miRNA encoding region with a sequence designed to produce a miRNA directed to the target sequence. The plant miRNA precursor may be full-length of may comprise a fragment of the full-length precursor. In some embodiments, the endogenous plant miRNA precursor is from a dicot or a monocot. In some embodiments the endogenous miRNA precursor is from Arabidopsis, tomato, maize, soybean, sunflower, sorghum, canola, wheat, alfalfa, cotton, rice, barley, millet, sugar cane or switchgrass.

[0125] In some embodiments, the miRNA template, (i.e. the polynucleotide encoding the miRNA), and thereby the miRNA, may comprise some mismatches relative to the target sequence. In some embodiments the miRNA template has >1 nucleotide mismatch as compared to the target sequence, for example, the miRNA template can have 1, 2, 3, 4, 5, or more mismatches as compared to the target sequence. This degree of mismatch may also be described by determining the percent identity of the miRNA template to the complement of the target sequence. For example, the miRNA template may have a percent identity including about at least 70%, 75%, 77%, 78%, 79%, 80%, 81%, 82%, 83%, 84%, 85%, 86%, 87%, 88%, 89%, 90%, 91%, 92%, 93%, 94%, 95%, 96%, 97%, 98%, 99%, or 100% as compared to the complement of the target sequence.

[0126] In some embodiments, the miRNA template, (i.e. the polynucleotide encoding the miRNA) and thereby the miRNA, may comprise some mismatches relative to the miRNA-star sequence. In some embodiments the miRNA template has >1 nucleotide mismatch as compared to the miRNA-star sequence, for example, the miRNA template can have 1, 2, 3, 4, 5, or more mismatches as compared to the miRNA-star sequence. This degree of mismatch may also be described by determining the percent identity of the miRNA template to the complement of the miRNA-star sequence. For example, the miRNA template may have a percent identity including about at least 70%, 75%, 77%, 78%, 79%, 80%, 81%, 82%, 83%, 84%, 85%, 86%, 87%, 88%, 89%, 90%, 91%, 92%, 93%, 94%, 95%, 96%, 97%, 98%, 99%, or 100% as compared to the complement of the miRNA-star sequence.

[0127] In some embodiments, the nucleic acid constructs express one or more guide RNAs, wherein a guide RNA targets a genomic sequence that encodes a polypeptide having any of the amino acid sequences set forth in SEQ ID NOs: 157,067-198,538 and 222,469-228,453.

### Regulatory Sequences:

[0128] A recombinant DNA construct as disclosed herein may comprise at least one regulatory sequence.

[0129] A regulatory sequence may be a promoter.

[0130] A number of promoters can be used in recombinant DNA constructs disclosed herein. The promoters can be selected based on the desired outcome, and may include constitutive, tissue-specific, inducible, or other promoters for expression in the host organism.

[0131] Promoters that cause a gene to be expressed in most cell types at most times are commonly referred to as “constitutive promoters”.

[0132] High level, constitutive expression of the candidate gene under control of the 35S or UBI promoter may have pleiotropic effects, although candidate gene efficacy may be estimated when driven by a constitutive promoter. Use of tissue-specific and/or stress-specific promoters may eliminate undesirable effects but retain the ability to enhance drought tolerance. This effect has been observed in Arabidopsis (Kasuga et al. (1999) Nature Biotechnol. 17:287-91).

[0133] Suitable constitutive promoters for use in a plant host cell include, for example, the core promoter of the Rsyn7 promoter and other constitutive promoters disclosed in WO 99/43838 and U.S. Pat. No. 6,072,050; the core CaMV 35S promoter (Odell et al., Nature 313:810-812 (1985)); rice actin (McElroy et al., Plant Cell 2:163-171 (1990)); ubiquitin (Christensen et al., Plant Mol. Biol. 12:619-632 (1989) and Christensen et al., Plant Mol. Biol. 18:675-689 (1992)); pEMU (Last et al., Theor. Appl. Genet. 81:581-588 (1991)); MAS (Velten et al., EMBO J. 3:2723-2730 (1984)); ALS promoter (U.S. Pat. No. 5,659,026), the constitutive synthetic core promoter SCP1 (International Publication No. 03/033651) and the like. Other constitutive promoters include, for example, those discussed in U.S. Pat. Nos. 5,608,149; 5,608,144; 5,604,121; 5,569,597; 5,466,785; 5,399,680; 5,268,463; 5,608,142; and 6,177,611.

[0134] In choosing a promoter to use in the methods disclosed herein, it may be desirable to use a tissue-specific or developmentally regulated promoter.

[0135] A tissue-specific or developmentally regulated promoter is a DNA sequence which regulates the expression of a DNA sequence selectively in the cells/tissues of a plant critical to tassel development, seed set, or both, and limits the expression of such a DNA sequence to the period of tassel development or seed maturation in the plant. Any identifiable promoter may be used in the methods disclosed herein which causes the desired temporal and spatial expression.

[0136] Promoters which are seed or embryo-specific and may include soybean Kunitz trypsin inhibitor (Kti3, Jofuku and Goldberg, Plant Cell 1:1079-1093 (1989)), patatin (potato tubers) (Rocha-Sosa, M., et al. (1989) EMBO J. 8:23-29), convicilin, vicilin, and legumin (pea cotyledons) (Rerie, W. G., et al. (1991) Mol. Gen. Genet. 259:149-157; Newbigin, E. J., et al. (1990) Planta 180:461-470; Higgins, T. J. V., et al. (1988) Plant. Mol. Biol. 11:683-695), zein (maize endosperm) (Schemthaner, J. P., et al. (1988) EMBO J. 7:1249-1255), phaseolin (bean cotyledon) (Segupta-Gopalan, C., et al. (1985) Proc. Natl. Acad. Sci. U.S.A. 82:3320-3324), phytohemagglutinin (bean cotyledon) (Voelker, T. et al. (1987) EMBO J. 6:3571-3577), B-conglycinin and glycinin (soybean cotyledon) (Chen, Z-L, et al. (1988) EMBO J. 7:297-302), glutelin (rice endosperm), hordein (barley endosperm) (Marris, C., et al. (1988) Plant Mol. Biol. 10:359-366), glutenin and gliadin (wheat endosperm) (Colot, V., et al. (1987) EMBO J. 6:3559-3564), and sporamin (sweet potato tuberous root) (Hattori, T., et al. (1990) Plant Mol. Biol. 14:595-604). Promoters of seed-specific genes operably linked to heterologous coding regions in chimeric gene constructions maintain their temporal and spatial expression pattern in transgenic plants. Such examples include Arabidopsis thaliana 2S seed storage protein gene promoter to express enkephalin peptides in Arabidopsis and Brassica napus seeds (Vanderkerckhove et al., Bio/Technology 7:L929-932 (1989)), bean lectin and bean beta-phaseolin promoters to express luciferase (Riggs et al., Plant Sci. 63:47-57 (1989)), and wheat glutenin promoters to express chloramphenicol acetyl transferase (Colot et al., EMBO J 6:3559-3564 (1987)).

[0137] Inducible promoters selectively express an operably linked DNA sequence in response to the presence of an endogenous or exogenous stimulus, for example by chemical compounds (chemical inducers) or in response to environmental, hormonal, chemical, and/or developmental signals. Inducible or regulated promoters include, for example, promoters regulated by light, heat, stress, flooding or drought, phytohormones, wounding, or chemicals such as ethanol, jasmonate, salicylic acid, or safeners.

[0138] Promoters that can be used in the context of the current disclosure may include the following: 1) the stress-inducible RD29A promoter (Kasuga et al. (1999) Nature Biotechnol. 17:287-91); 2) the barley promoter, B22E; expression of B22E is specific to the pedicel in developing maize kernels (“Primary Structure of a Novel Barley Gene Differentially Expressed in Immature Aleurone Layers”. Klemsdal, S. S. et al., Mol. Gen. Genet. 228(1/2):9-16 (1991)); and 3) maize promoter, Zag2 (“Identification and molecular characterization of ZAG1, the maize homolog of the Arabidopsis floral homeotic gene AGAMOUS”, Schmidt, R. J. et al., Plant Cell 5(7):729-737 (1993); “Structural characterization, chromosomal localization and phylogenetic evaluation of two pairs of AGAMOUS-like MADS-box genes from maize”, Theissen et al. Gene 156(2):155-166 (1995); NCBI GenBank Accession No. X80206)). Zag2 transcripts can be detected 5 days prior to pollination to 7 to 8 days after pollination (“DAP”), and directs expression in the carpel of developing female inflorescences and CimI which is specific to the nucleus of developing maize kernels. CimI transcript is detected 4 to 5 days before pollination to 6 to 8 DAP. Other useful promoters include any promoter which can be derived from a gene whose expression is maternally associated with developing female florets.

[0139] Additional promoters for regulating the expression of the nucleotide sequences disclosed herein may include stalk-specific promoters such as the alfalfa S2A promoter (GenBank Accession No. EF030816; Abrahams et al., Plant Mol. Biol. 27:513-528 (1995)) and S2B promoter (GenBank Accession No. EF030817) and the like, herein incorporated by reference.

[0140] Promoters may be derived in their entirety from a native gene, or be composed of different elements derived from different promoters found in nature, or even comprise synthetic DNA segments.

[0141] In one embodiment the at least one regulatory element may be an endogenous promoter operably linked to at least one enhancer element; e.g., a 35S, nos or ocs enhancer element.

[0142] Promoters for use herein may include: RIP2, mLIP15, ZmCOR1, Rab17, CaMV 35S, RD29A, B22E, Zag2, SAM synthetase, ubiquitin, CaMV 19S, nos, Adh, sucrose synthase, R-allele, the vascular tissue preferred promoters S2A (Genbank accession number EF030816) and S2B (Genbank accession number EF030817), and the constitutive promoter GOS2 from Zea mays. Other promoters include root preferred promoters, such as the maize NAS2 promoter, the maize Cyclo promoter (US 2006/0156439, published Jul. 13, 2006), the maize ROOTMET2 promoter (WO05063998, published Jul. 14, 2005), the CR1BIO promoter (WO06055487, published May 26, 2006), the CRWAQ81 (WO05035770, published Apr. 21, 2005) and the maize ZRP2.47 promoter (NCBI accession number: U38790; GI No. 1063664),

[0143] Recombinant DNA constructs as disclosed herein may also include other regulatory sequences, including but not limited to, translation leader sequences, introns, and polyadenylation recognition sequences. In another embodiment, a recombinant DNA construct disclosed herein may further comprise an enhancer or silencer.

[0144] An intron sequence can be added to the 5′ untranslated region, the protein-coding region or the 3′ untranslated region to increase the amount of the mature message that accumulates in the cytosol. Inclusion of a spliceable intron in the transcription unit in both plant and animal expression constructs has been shown to increase gene expression at both the mRNA and protein levels up to 1000-fold. Buchman and Berg, Mol. Cell Biol. 8:4395-4405 (1988); Callis et al., Genes Dev. 1:1183-1200 (1987).

[0145] Any plant can be selected for the identification of regulatory sequences and genes to be used in recombinant DNA constructs, other compositions (e.g. transgenic plants, seeds and cells), and methods as disclosed herein. Examples of suitable plants for the isolation of genes and regulatory sequences and for compositions and methods disclosed herein may include but are not limited to alfalfa, apple, apricot, Arabidopsis, artichoke, arugula, asparagus, avocado, banana, barley, beans, beet, blackberry, blueberry, broccoli, brussels sprouts, cabbage, canola, cantaloupe, carrot, cassava, castorbean, cauliflower, celery, cherry, chicory, cilantro, citrus, clementines, clover, coconut, coffee, corn, cotton, cranberry, cucumber, Douglas fir, eggplant, endive, escarole, eucalyptus, fennel, figs, garlic, gourd, grape, grapefruit, honey dew, jicama, kiwifruit, lettuce, leeks, lemon, lime, Loblolly pine, linseed, mango, melon, mushroom, nectarine, nut, oat, oil palm, oil seed rape, okra, olive, onion, orange, an ornamental plant, palm, papaya, parsley, parsnip, pea, peach, peanut, pear, pepper, persimmon, pine, pineapple, plantain, plum, pomegranate, poplar, potato, pumpkin, quince, radiata pine, radicchio, radish, rapeseed, raspberry, rice, rye, sorghum, Southern pine, soybean, spinach, squash, strawberry, sugarbeet, sugarcane, sunflower, sweet potato, sweetgum, switchgrass, tangerine, tea, tobacco, tomato, triticale, turf, turnip, a vine, watermelon, wheat, yams, and zucchini.

### Compositions:

[0146] A composition as disclosed herein may include a transgenic microorganism, cell, plant, or seed comprising the recombinant DNA construct. The cell may be eukaryotic, e.g., a yeast, insect or plant cell, or prokaryotic, e.g., a bacterial cell.

[0147] A composition disclosed herein may be a plant comprising in its genome any of the polynucleotide sequences and/or recombinant DNA constructs disclosed herein. Compositions also include any progeny of the plant, and any seed obtained from the plant or its progeny, wherein the progeny or seed comprises within its genome the recombinant DNA construct. Progeny includes subsequent generations obtained by self-pollination or out-crossing of a plant. Progeny also includes hybrids and inbreds.

[0148] In hybrid seed propagated crops, mature transgenic plants can be self-pollinated to produce a homozygous inbred plant. The inbred plant produces seed containing the newly introduced recombinant DNA construct. These seeds can be grown to produce plants that would exhibit an improved agronomic characteristic, or used in a breeding program to produce hybrid seed, which can be grown to produce plants that would exhibit such an improved agronomic characteristic. The seeds may be maize seeds.

[0149] The plant may be a monocotyledonous or dicotyledonous plant, for example, a maize or soybean plant. The plant may also be sunflower, sorghum, canola, wheat, alfalfa, cotton, rice, barley, millet, sugar cane or switchgrass. The plant may be a hybrid plant or an inbred plant.

[0150] The recombinant DNA construct may be stably integrated into the genome of the plant.

[0151] Any of the polynucleotides described herein may be stably integrated into the genome of a plant using genome editing. Thus, a plant comprising a heterologous regulatory element operably linked to any of the polynucleotide sequences presented herein (SEQ ID NOs:1-157,066 and 198,539-222,468) is also provided.

[0152] In any of the embodiments described herein, the recombinant DNA construct may comprise at least a promoter functional in a plant as a regulatory sequence.

[0153] In any of the embodiments described herein, the at least one agronomic characteristic may be selected from the group consisting of: abiotic stress tolerance, greenness, yield, growth rate, biomass, fresh weight at maturation, dry weight at maturation, fruit yield, seed yield, total plant nitrogen content, fruit nitrogen content, seed nitrogen content, nitrogen content in a vegetative tissue, total plant free amino acid content, fruit free amino acid content, seed free amino acid content, free amino acid content in a vegetative tissue, total plant protein content, fruit protein content, seed protein content, protein content in a vegetative tissue, drought tolerance, nitrogen uptake, root lodging, harvest index, stalk lodging, plant height, ear height, ear length, salt tolerance, early seedling vigor and seedling emergence under low temperature stress.

[0154] One of ordinary skill in the art would readily recognize a suitable control or reference plant to be utilized when assessing or measuring an agronomic characteristic or phenotype of a transgenic plant in any embodiment described herein in which a control plant is utilized (e.g., compositions or methods as described herein). For example, by way of non-limiting illustrations:
[0155] 1. Progeny of a transformed plant which is hemizygous with respect to a recombinant DNA construct, such that the progeny are segregating into plants either comprising or not comprising the recombinant DNA construct: the progeny comprising the recombinant DNA construct would be typically measured relative to the progeny not comprising the recombinant DNA construct (i.e., the progeny not comprising the recombinant DNA construct is the control or reference plant).
[0156] 2. Introgression of a recombinant DNA construct into an inbred line, such as in maize, or into a variety, such as in soybean: the introgressed line would typically be measured relative to the parent inbred or variety line (i.e., the parent inbred or variety line is the control or reference plant).
[0157] 3. Two hybrid lines, where the first hybrid line is produced from two parent inbred lines, and the second hybrid line is produced from the same two parent inbred lines except that one of the parent inbred lines contains a recombinant DNA construct: the second hybrid line would typically be measured relative to the first hybrid line (i.e., the first hybrid line is the control or reference plant).
[0158] 4. A plant comprising a recombinant DNA construct: the plant may be assessed or measured relative to a control plant not comprising the recombinant DNA construct but otherwise having a comparable genetic background to the plant (e.g., sharing at least 90%, 91%, 92%, 93%, 94%, 95%, 96%, 97%, 98%, 99%, or 100% sequence identity of nuclear genetic material compared to the plant comprising the recombinant DNA construct). There are many laboratory-based techniques available for the analysis, comparison and characterization of plant genetic backgrounds; among these are Isozyme Electrophoresis, Restriction Fragment Length Polymorphisms (RFLPs), Randomly Amplified Polymorphic DNAs (RAPDs), Arbitrarily Primed Polymerase Chain Reaction (AP-PCR), DNA Amplification Fingerprinting (DAF), Sequence Characterized Amplified Regions (SCARs), Amplified Fragment Length Polymorphisms (AFLP®s), and Simple Sequence Repeats (SSRs) which are also referred to as Microsatellites.

[0159] Furthermore, one of ordinary skill in the art would readily recognize that a suitable control or reference plant to be utilized when assessing or measuring an agronomic characteristic or phenotype of a transgenic plant would not include a plant that had been previously selected, via mutagenesis or transformation, for the desired agronomic characteristic or phenotype.

### Methods:

[0160] Polynucleotides presented herein can be used to improve agronomic characteristics by providing for enhanced protein activity in a transgenic organism, preferably a transgenic plant, although in some cases, improved properties are obtained by providing for reduced protein activity in a transgenic plant. Reduced protein activity and enhanced protein activity are measured by reference to a wild type cell or organism, and can be determined by direct or indirect measurement. Direct measurement of protein activity might include an analytical assay for the protein, per se, or enzymatic product of protein activity. Indirect assay might include measurement of a property affected by the protein. Enhanced protein activity can be achieved in a number of ways, for example by overproduction of mRNA encoding the protein or by gene shuffling. One skilled in the art will know methods to achieve overproduction of mRNA, for example by providing increased copies of the native gene or by introducing a construct having a heterologous promoter linked to the gene into a target cell or organism. Reduced protein activity can be achieved by a variety of mechanisms including antisense, mutation or knockout. Antisense RNA will reduce the level of expressed protein resulting in reduced protein activity as compared to wild type activity levels. A mutation in the gene encoding a protein may reduce the level of expressed protein and/or interfere with the function of expressed protein to cause reduced protein activity.

[0161] The polypeptides may be involved in one or more important biological properties in plants. Such polypeptides may be produced in transgenic plants to provide plants having improved agronomic characteristics. In some cases, decreased expression of such polypeptides may be desired, such decreased expression being obtained by use of the polynucleotide sequences provided herein, for example in antisense or cosuppression methods.

[0162] Methods include but are not limited to methods for improving at least one agronomic characteristic in a plant, methods for determining an alteration of an agronomic characteristic in a plant, and methods for producing seed. The plant may be a monocotyledonous or dicotyledonous plant, for example, a maize or soybean plant. The plant may also be sunflower, sorghum, canola, wheat, alfalfa, cotton, rice, barley, millet, sugar cane or sorghum. The seed may be a maize or soybean seed, for example, a maize hybrid seed or maize inbred seed.

[0163] A method for transforming a cell (or microorganism) comprising transforming a cell (or microorganism) with any of the isolated polynucleotides or recombinant DNA constructs disclosed herein is provided. The cell (or microorganism) transformed by this method is also included. In particular embodiments, the cell is eukaryotic cell, e.g., a yeast, insect or plant cell, or prokaryotic, e.g., a bacterial cell. The microorganism may be Agrobacterium, e.g. Agrobacterium tumefaciens or Agrobacterium rhizogenes.

[0164] A method for producing a transgenic plant comprising transforming a plant cell with any of the isolated polynucleotides or recombinant DNA constructs disclosed herein and regenerating a transgenic plant from the transformed plant cell is also provided. A transgenic plant produced by this method, which may have at least one improved agronomic characteristic, and transgenic seed obtained from this transgenic plant are also provided. The transgenic plant obtained by this method may be used in other methods disclosed herein.

[0165] A method for isolating a polypeptide disclosed herein from a cell or culture medium of the cell, wherein the cell comprises a recombinant DNA construct comprising a polynucleotide disclosed herein operably linked to at least one regulatory sequence, and wherein the transformed host cell is grown under conditions that are suitable for expression of the recombinant DNA construct is provided.

[0166] A method of altering the level of expression of a polypeptide disclosed herein in a host cell is provided herein. The method comprises: (a) transforming a host cell with a recombinant DNA construct disclosed herein; and (b) growing the transformed host cell under conditions that are suitable for expression of the recombinant DNA construct wherein expression of the recombinant DNA construct results in production of altered levels of the polypeptide in the transformed host cell.

[0167] A method of selecting for (or identifying) an alteration of an agronomic characteristic in a plant, comprising (a) obtaining a transgenic plant, wherein the transgenic plant comprises in its genome a recombinant DNA construct comprising a polynucleotide operably linked to at least one regulatory sequence (for example, a promoter functional in a plant), wherein said polynucleotide encodes a polypeptide having an amino acid sequence of at least 50%, 51%, 52%, 53%, 54%, 55%, 56%, 57%, 58%, 59%, 60%, 61%, 62%, 63%, 64%, 65%, 66%, 67%, 68%, 69%, 70%, 71%, 72%, 73%, 74%, 75%, 76%, 77%, 78%, 79%, 80%, 81%, 82%, 83%, 84%, 85%, 86%, 87%, 88%, 89%, 90%, 91%, 92%, 93%, 94%, 95%, 96%, 97%, 98%, 99%, or 100% sequence identity, based on the Clustal V method of alignment, when compared to any of the SEQ ID NOs:157,067-198,538 and 222,469-228,453; (b) obtaining a progeny plant derived from said transgenic plant, wherein the progeny plant comprises in its genome the recombinant DNA construct; and (c) selecting (or identifying) the progeny plant that exhibits an alteration in at least one agronomic characteristic when compared to a control plant not comprising the recombinant DNA construct.

[0168] In another embodiment, a method of selecting for (or identifying) an alteration of at least one agronomic characteristic in a plant, comprising: (a) obtaining a transgenic plant, wherein the transgenic plant comprises in its genome a recombinant DNA construct comprising a polynucleotide operably linked to at least one regulatory element, wherein said polynucleotide encodes a polypeptide having an amino acid sequence of at least 50%, 51%, 52%, 53%, 54%, 55%, 56%, 57%, 58%, 59%, 60%, 61%, 62%, 63%, 64%, 65%, 66%, 67%, 68%, 69%, 70%, 71%, 72%, 73%, 74%, 75%, 76%, 77%, 78%, 79%, 80%, 81%, 82%, 83%, 84%, 85%, 86%, 87%, 88%, 89%, 90%, 91%, 92%, 93%, 94%, 95%, 96%, 97%, 98%, 99%, or 100% sequence identity, based on the Clustal V method of alignment, when compared to any of SEQ ID NOs:157,067-198,538 and 222,469-228,453, wherein the transgenic plant comprises in its genome the recombinant DNA construct; (b) growing the transgenic plant of part (a) under conditions wherein the polynucleotide is expressed; and (c) selecting (or identifying) the transgenic plant of part (b) that exhibits an alteration of at least one agronomic characteristic when compared to a control plant not comprising the recombinant DNA construct.

[0169] A method of selecting for (or identifying) an alteration of an agronomic characteristic in a plant, comprising (a) obtaining a transgenic plant, wherein the transgenic plant comprises in its genome a recombinant DNA construct comprising a polynucleotide operably linked to at least one regulatory element, wherein said polynucleotide comprises a nucleotide sequence, wherein the nucleotide sequence is: (i) hybridizable under stringent conditions with a DNA molecule comprising the full complement of any of SEQ ID NOs:1-157,066 and 198,539-222,468; or (ii) derived from any of SEQ ID NOs:1-157,066 and 198,539-222,468 by alteration of one or more nucleotides by at least one method selected from the group consisting of: deletion, substitution, addition and insertion; (b) obtaining a progeny plant derived from said transgenic plant, wherein the progeny plant comprises in its genome the recombinant DNA construct; and (c) selecting (or identifying) the progeny plant that exhibits an alteration in at least one agronomic characteristic when compared to a control plant not comprising the recombinant DNA construct.

[0170] A method of selecting for (or identifying) an alteration of an agronomic characteristic in a plant, comprising (a) obtaining a transgenic plant, wherein the transgenic plant comprises in its genome a suppression DNA construct comprising at least one regulatory sequence (for example, a promoter functional in a plant) operably linked to all or part of (i) a nucleic acid sequence encoding a polypeptide having an amino acid sequence of at least 50%, 51%, 52%, 53%, 54%, 55%, 56%, 57%, 58%, 59%, 60%, 61%, 62%, 63%, 64%, 65%, 66%, 67%, 68%, 69%, 70%, 71%, 72%, 73%, 74%, 75%, 76%, 77%, 78%, 79%, 80%, 81%, 82%, 83%, 84%, 85%, 86%, 87%, 88%, 89%, 90%, 91%, 92%, 93%, 94%, 95%, 96%, 97%, 98%, 99%, or 100% sequence identity, based on the Clustal V method of alignment, when compared to any of SEQ ID NOs:157,067-198,538 and 222,469-228,453, or (ii) a full complement of the nucleic acid sequence of (i); (b) obtaining a progeny plant derived from said transgenic plant, wherein the progeny plant comprises in its genome the suppression DNA construct; and (c) selecting (or identifying) the progeny plant that exhibits an alteration in at least one agronomic characteristic when compared to a control plant not comprising the suppression DNA construct. A method of producing seed comprising any of the preceding methods, and further comprising obtaining seeds from said progeny plant, wherein said seeds comprise in their genome said recombinant DNA construct (or suppression DNA construct).

[0171] A method for enhancing expression of a transgene in a plant are provided in which a nucleotide sequence of a transgene or an amino acid sequence of a transgene are obtained; the sequences are compared to a collection of nucleotide sequences of alternatively spliced isoforms or to a collection of amino acid sequences encoded by the alternatively spliced isoforms; one or more alternatively spliced isoform sequences corresponding to a transgene are selected; and the one or more alternatively spliced isoform sequences in the plant are expressed, thereby enhancing expression of the transgene. The selected isoform sequence may be expressed under its native promoter or a constitutive or tissue-preferred promoter.

[0172] A method for introducing any of the polynucleotides disclosed herein into a target site in the genome of a plant cell is also provided. The method comprises (a) introducing into a plant cell one recombinant DNA construct capable of expressing a guide RNA and another recombinant DNA construct capable of expressing a Cas endonuclease, wherein said guide RNA and Cas endonuclease are capable of forming a complex that enables the Cas endonuclease to introduce a double strand break at said target site; (b) contacting the plant cell with a donor DNA comprising a polynucleotide of interest, wherein said polynucleotide of interest is any of the polynucleotides disclosed herein; and (c) identifying at least one plant cell that has the polynucleotide of Interest integrated into the target site.

[0173] A method of editing a genome to alter splice sites is also provided herein. The method may involve introducing one or more heterologous splice sites or eliminating one or more splice sites. The method includes identifying one or more alternatively spliced isoforms; determining one or more splice sites in the genomic region for the alternatively spliced isoforms; and introducing a splice site in the genomic loci that lacks the one or more splice sites or changing one or more nucleotides in a preexisting splice site to render the preexisting splice site non-functional. The alternatively spliced isoforms may be selected from the group consisting of SEQ ID NOs: 1-157,066 and 198,539-222,468.

[0174] Other methods to modify or alter the host endogenous genomic DNA are also available. This includes altering the host native DNA sequence or a pre-existing transgenic sequence including regulatory elements, coding and non-coding sequences. These methods are also useful in targeting nucleic acids to pre-engineered target recognition sequences in the genome. As an example, the genetically modified cell or plant described herein, is generated using “custom” or engineered endonucleases such as meganucleases produced to modify plant genomes (see e.g., WO 2009/114321; Gao et al. (2010) Plant Journal 1:176-187). Another site-directed engineering is through the use of zinc finger domain recognition coupled with the restriction properties of restriction enzyme. See e.g., Urnov, et al., (2010) Nat Rev Genet. 11(9):636-46; Shukla, et al., (2009) Nature 459 (7245):437-41. A transcription activator-like (TAL) effector-DNA modifying enzyme (TALE or TALEN) is also used to engineer changes in plant genome. See e.g., US20110145940, Cermak et al., (2011) Nucleic Acids Res. 39(12) and Boch et al., (2009), Science 326(5959): 1509-12.

[0175] In any of the preceding methods or any other embodiments of methods disclosed herein, in said introducing step said regenerable plant cell may comprise a callus cell, an embryogenic callus cell, a gametic cell, a meristematic cell, or a cell of an immature embryo. The regenerable plant cells may derive from an inbred maize plant.

[0176] In any of the preceding methods or any other embodiments of methods disclosed herein, said regenerating step may comprise the following: (i) culturing said transformed plant cells in a media comprising an embryogenic promoting hormone until callus organization is observed; (ii) transferring said transformed plant cells of step (i) to a first media which includes a tissue organization promoting hormone; and (iii) subculturing said transformed plant cells after step (ii) onto a second media, to allow for shoot elongation, root development or both.

[0177] In any of the preceding methods or any other embodiments of methods disclosed herein, the at least one agronomic characteristic may be selected from the group consisting of: abiotic stress tolerance, greenness, yield, growth rate, biomass, fresh weight at maturation, dry weight at maturation, fruit yield, seed yield, total plant nitrogen content, fruit nitrogen content, seed nitrogen content, nitrogen content in a vegetative tissue, total plant free amino acid content, fruit free amino acid content, seed free amino acid content, amino acid content in a vegetative tissue, total plant protein content, fruit protein content, seed protein content, protein content in a vegetative tissue, drought tolerance, nitrogen uptake, root lodging, harvest index, stalk lodging, plant height, ear height, ear length, salt tolerance, early seedling vigor and seedling emergence under low temperature stress. The agronomic characteristic may be abiotic stress tolerance, such as for example, tolerance to nutrient deprivation (e.g. nitrogen) or to drought.

[0178] In any of the preceding methods or any other embodiments of methods disclosed herein, alternatives exist for introducing into a regenerable plant cell a recombinant DNA construct comprising a polynucleotide operably linked to at least one regulatory sequence. For example, one may introduce into a regenerable plant cell a regulatory sequence (such as one or more enhancers, optionally as part of a transposable element), and then screen for an event in which the regulatory sequence is operably linked to an endogenous gene encoding a polypeptide disclosed herein.

[0179] The introduction of recombinant DNA constructs disclosed herein into plants may be carried out by any suitable technique, including but not limited to direct DNA uptake, chemical treatment, electroporation, microinjection, cell fusion, infection, vector-mediated DNA transfer, bombardment, or Agrobacterium-mediated transformation. Techniques for plant transformation and regeneration have been described in International Patent Publication WO 2009/006276, the contents of which are herein incorporated by reference.

[0180] The development or regeneration of plants containing the foreign, exogenous isolated nucleic acid fragment that encodes a protein of interest is well known in the art. The regenerated plants may be self-pollinated to provide homozygous transgenic plants. Otherwise, pollen obtained from the regenerated plants is crossed to seed-grown plants of agronomically important lines. Conversely, pollen from plants of these important lines is used to pollinate regenerated plants. A transgenic plant disclosed herein that contains a desired polypeptide can be cultivated using methods well known to one skilled in the art.

### Other Methods of Interest

[0181] A method of marker assisted selection of a maize plant is also provided herein. The method involves: analyzing for expression of one or more transcripts selected from a group consisting of nucleotide sequences, wherein the nucleotide sequences encode alternatively spliced isoforms; correlating one or more transcripts with an improved agronomic characteristic; and selecting for the improved agronomic characteristic in a maize plant by assaying one or more markers that detect the one or more transcripts associated with the improved agronomic characteristic. The expression analysis may be performed with a plurality of isoform-specific probes derived from the group consisting of sequences SEQ ID NOs:1-157,066 and 198,539-222,468.

[0182] A method of identifying alternatively spliced isoforms of one or more genes involved in an agronomic trait are also provided in which a plurality of transcripts that are expressed under an abiotic stress condition are sequenced and the sequenced transcripts are compared to transcript sequences that are expressed in a non-stressed condition. Genes with splicing patterns that differ between the abiotic stress condition and non-stressed condition are then detected.

[0183] A method for comparing a plurality of spliced isoforms among two or more plant populations, comprising: (a) accessing, by a computer system, a database of genetic information comprising spliced isoform sequences obtained from a plurality of plant tissues; (b) categorizing, by a computer system, the data in the database into a plurality of groups of spliced isoforms, such that one or more spliced isoforms for a particular gene are in the same group, and each group represents a different set of spliced isoforms; and (c) inputting data into a computer system, the data comprising sequences of one or more transcripts obtained from the two or more plant populations, is also provided. The plant populations may comprise inbred populations. The database may further comprise QTL information associated with one or more spliced isoforms.

### Computer Systems and Programs

[0184] Computer systems comprising: a relational database having records containing a) information about one or more sequences of spliced isoforms represented by SEQ ID NOs: 1-157,066 and 198,539-222,468 or amino acid sequences of 157,067-198,538 and 222,469-228,453; b) information identifying known SNPs or QTLs known to be associated with one or more traits of interest; and c) a user interface allowing a user to access the information contained in the records, are also provided.

[0185] Computer programs comprising: a computer-usable medium having computer-readable program code embodied thereon relating to generating a relational database having records containing a) information about one or more sequences of spliced isoforms represented by SEQ ID NOS: 1-157,066 and 198,539-222,468 or amino acid sequences of 157,067-198,538 and 222,469-228,453; b) information identifying known SNPs or QTLs known to be associated with one or more traits of interest; and c) a user interface allowing a user to access the information contained in the records, are also provided.

### EXAMPLES

[0186] The present invention is further illustrated in the following Examples, in which parts and percentages are by weight and degrees are Celsius, unless otherwise stated. It should be understood that the Examples, while indicating embodiments of the invention, are given by way of illustration only. From the above discussion and the Examples, one skilled in the art can ascertain the essential characteristics of this invention, and without departing from the spirit and scope thereof, can make various changes and modifications of the invention to adapt it to various usages and conditions. Thus, various modifications of the invention in addition to those shown and described herein will be apparent to those skilled in the art from the foregoing description. Such modifications are also intended to fall within the scope of the appended claims.

### Example 1

### Prediction of Novel Transcripts

[0187] In order to discover and map novel transcripts in maize, 94 paired-end RNA seq libraries were constructed from 5 week old leaves of three B73, three Mo17 and 88 intermated B73×Mo17 (IBM) Syn10 double haploid (DH) lines. The IBM mapping population was originally created through ten generations of B73 and Mo17 intermating, followed by double haploid generation and resulted in a population containing highly recombinant fixed alleles (Hussain et al. 2007. Journal of Plant Registrations 1:81). More than six billion genome-matched reads were obtained (Table 1).

[0188] Transcript discovery was also augmented by the inclusion of 142 publically available B73 RNA seq libraries originating from 14 different tissue types, totaling over two billion genome-matched reads (Table 2). All libraries were genome matched using Tophat2 (Kim et al. 2013. Genome Biology 14(4):R36), followed by novel isoform discovery using the Cufflinks pipeline (Trapnell et al. 2010. Nature Biotech 28(5):511-515) with a working set of 137,000 annotated public maize (Gramene release 5a).

TABLE 1
Summary statistics for B73, Mo17, and IBM RNA seq libraries

| Description | Genotype | Libraries | Total Reads | Genome Matched |
|---|---|---|---|---|
| B73 | B73 | 3 | 252,961,366 | 249,428,288 |
| Mo17 | Mo17 | 3 | 405,071,583 | 393,962,382 |
| IBM | IBM | 88 | 5,795,253,356 | 5,599,170,515 |

TABLE 2
Summary statistics for RNA seq libraries

| Description | Genotype | Libraries | Total Reads | Genome Matched |
|---|---|---|---|---|
| Anther | B73 | 1 | 38,074,756 | 36,554,492 |
| Ear | B73 | 4 | 104,293,259 | 98,987,393 |
| Embryo | B73 | 7 | 60,710,425 | 55,861,189 |
| Endosperm | B73 | 13 | 144,540,885 | 131,347,944 |
| Leaf | B73 | 42 | 664,025,044 | 618,671,115 |
| Ovule | B73 | 1 | 36,964,181 | 35,379,281 |
| Pollen | B73 | 1 | 38,623,695 | 37,342,145 |
| Root | B73 | 18 | 296,713,582 | 272,807,740 |
| SAM | B73 | 10 | 148,544,984 | 135,325,790 |
| Seed | B73 | 20 | 346,866,162 | 320,235,834 |
| Seedling | B73 | 2 | 23,661,408 | 22,675,374 |
| Shoot | B73 | 14 | 136,391,616 | 121,490,509 |
| Silk | B73 | 1 | 24,398,322 | 23,372,552 |
| Tassel | B73 | 8 | 175,790,705 | 166,472,788 |

[0189] Isoform prediction from public data and the IBM population were initially carried out as two separate analyses, yet generated a novel isoform set with a high degree of overlap. The entire content of U.S. application number Ser. No. 14/628,469, filed Feb. 23, 2015 is hereby incorporated by reference.

### Example 2

### Comparison of Novel Transcripts with an Artificial Randomly Generated Set

[0190] In order to assess the quality and ideal abundance cutoff for novel isoforms, a set of artificial isoforms based on known transcripts was created. One artificial isoform was randomly generated for each annotated transcript by modification of the known transcript based on alternative splicing categories: intron retention, exon skipping, alternative donor, alternative acceptor and alternative position. The 137,000 artificial transcripts each differed from a known transcript by one random splicing modification, making them an ideal set to compare against.

[0191] To determine an abundance cutoff for novel isoforms, known and randomly generated transcripts were quantified using Cuffdiff (Roberts et al. 2011. Bioinformatics 27(17):2325-2329) in the fourteen public libraries, as well as B73, Mo17 parents and IBM DH lines. Cutoffs ranging from 0.01 to 10 FPKM (Fragments Per Kilobase of transcript per Million mapped reads) were applied and the fraction of transcripts having expression above each cutoff in at least one tissue was determined. At an extremely low expression cutoff of 0.01 FPKM, 72% of known transcripts were expressed in at least one tissue, while 57% of artificially generated transcripts were similarly expressed. Taking 0.01 as the basal expression level, the loss of known transcripts as the abundance cutoff increased (false negatives) was then plotted against the loss of artificial transcripts (i.e. false positives). To increase the number of novel isoforms identified, a relaxed filter of 0.5 FPKM was utilized, resulting in the cDNA sequences represented by SEQ ID NOs:1-157,066. The novel proteins encoded by the newly identified isoforms/genes using the 0.5 FPKM filter are represented by SEQ ID NOs:157,067-198,538. Table 3 provides the SEQ ID NO: for each isoform identified using 0.5 FPKM as the expression cutoff.

### Example 3

### mRNA Seq Library Preparation and Sequencing

[0192] In addition to the experiments shown in Examples 1 and 2, total RNA was isolated from frozen maize tissues with Qiagen RNeasy kit for total RNA isolation (Qiagen, Valencia, Calif. USA). Libraries from total RNA were then prepared using the TruSeq mRNA-Seq kit and protocol from Illumina, Inc. (San Diego, Calif., USA) and sequenced on the Illumina HiSeq 2500 system with Illumina TruSeq SBS v3 reagents. On average, 18 million reads were generated from each library (Table 4). Resulting sequences were trimmed based on quality scores (Phred score >13) and mapped to the maize B73 reference genome sequence V2 and maize working gene set V5a with Tophat2 version 2.0.14 (Kim et al., 2013 supra) using several modifications from default parameters; maximum intron size: 100,000, minimum intron size: 20, up to two mismatches allowed. Reads which aligned to multiple locations were assigned heuristically based on the abundance of surrounding regions (Kim et al., 2013 supra). Libraries with less than 5,000,000 genome-matched reads (one biological replicate of well-watered R1 tassel, and one biological replicate of drought-stressed R1 tassel) were excluded from down later downstream analysis.

TABLE 4
Summary statistics for RNA seq libraries

| Description | Condition | Stages | Libraries | Total Reads | Genome Matched | Uniquely Mapped | Percent Mapped |
|---|---|---|---|---|---|---|---|
| Ear | watered | 4 | 16 | 286,248,214 | 261,827,251 | 233,864,244 | 91% |
| Tassel | watered | 4 | 16 | 215,381,271 | 205,082,097 | 180,285,669 | 95% |
| Leaf | watered | 4 | 16 | 230,210,634 | 204,178,390 | 183,473,272 | 89% |
| Ear | drought | 4 | 16 | 299,932,575 | 256,161,636 | 229,619,752 | 86% |
| Tassel | drought | 4 | 14 | 207,741,601 | 197,232,548 | 173,040,626 | 95% |
| Leaf | drought | 4 | 16 | 241,874,221 | 224,097,862 | 202,057,363 | 93% |
| Seed | watered | 21 | 28 | 381,174,028 | 336,649,861 | 309,166,899 | 88% |
| Endosperm | watered | 17 | 21 | 332,421,896 | 300,859,239 | 267,102,578 | 91% |
| Embryo | watered | 15 | 16 | 217,398,766 | 197,532,915 | 189,422,320 | 91% |

### Example 4

### Computational Prediction of Novel Isoforms

[0193] Genome-matched reads from each library then were assembled with Cufflinks version 2.1.1 (Trapnell et al., 2010 supra) using several modifications from default parameters; maximum intron size: 100,000, minimum intron size: 20. Cuffmerge version 2.1.1 (Roberts et al., 2011 supra) was then used to merge individual transcript assemblies into a single transcript set. Annotation of novel junctions required at least 10 reads spanning them and any new transcripts needed to represent at least 10% of the total gene abundance in at least one library. Known and novel transcripts were quantified in each tissue and genotype with Cuffnorm version 2.1.1 (Roberts et al., 2011 supra) using default parameters. Novel transcripts with expression less than 1.3 FPKM in all tissues and stages were filtered out. Table 5 provides the SEQ ID NO: for each novel transcript identified (SEQ ID NOs:198,539-222,468 represent the cDNAs; SEQ ID NOs:222,469-228,453 represent the polypeptides).

The application's sequence listing, which the Patent Office published only in electronic form, follows.

SEQUENCE LISTING (228453 sequences)

SEQ ID NO: 1 - DNA, 3034 bp, Zea Mays
attccaaagccaaagattgcatcagttctgctgctatttcctcctatcattctttctgatgttgaaaatgatattaagcctaggattcgtgaatgggagaaggctggcattgaacaagactatgttagtaggatgttgttgaagtatccatggattctttcaacgagtgtgatagagaactacagtcaaatgctgttgtttttcaaccaaaaaaggatttccagtacagtcctcgctattgctgtgaaaagttggcctcatattcttggctcctcttcaaaaagaatgaattcagttttggagctgtttcatgttctgggcatcagtaaaaaaatggtggttccagtcattacatcaagtccacagttattactgagaaaacctgatcagtttatgcagaatgttttgtttttcagagaaatgggtgttgataagaaaacaacaggaaaaattctgtgtcgttcgcctgaaatatttgcttcaaacgtggataacaccctcaagaagaaaatcgattttcttaccaactttggtgtttctaaacatcatcttcctcgcatcattcggaagtatccagaacttttattgttggacataaattgtacattgctccctaggtatgactgcaacttggtgtgatataaaatacagtacaaggagagatttggttttacaaaacttagtgtgcctcataattgtgccatgttctacttttaacttctcttcaagctgcaaatttttggtgcacttattgttaattttgttggttccctacaacctacatttatggctccatcttttggagataccttttgcaatattggaaggatctgtagtcattgcagttaatgccatattccattttcattgtctgtttcttacccgtggtacttaatttctaattcaaccatttattgacatacttcactagttaagtatggagtatatcaacaaaatcctgttataagtgtttgatgcatttaactttattccaatgtttacaggatgaactacttattggagatgggtttgtctaagaaagatctgtgctcaatgatctttagattttccccacttctaggttacagtattgaacttgttatgaaaccaaagcttgagtttctgctaagaaccatgaagaagccacttaaagcagttgtagaatacccaaggtacttcagttattcactcgaggggaagatcaaaccgcggttctgggtattgcagagtagaaacatagactgcactctgacagagatgttagcaaagaacgatgaactctttgctgaagagtacttgggacttggaggattgctcgagaaacctctacaatcaagcataggcagttaatttctggacttataagattgaaccatgcagtgcactatgccgaagctgtacagctttatgcttggattggtgaggctgtttttcagatgggaggtcacttttttttgaaaacggaggagatgtgtcgctggctgttcttgctatggtacccgcaaaaataattaaaacaaggactgtggctgacgcactctcaaacaacagttgggtttcagatattaaaggaggactgtccatgattggtctgttcgaaattttcagctatgggacaccacacatggagtttctttaaccactgacaatgatcgccatatctggagattctctggttggggtgaattctcgtcgaaatcggcctacagagtcttcttccatggtttggtctcctttgatccttggaagcgtatttggaaaacttggactccacctaattgcaagattttcttttggatacctgtccgaaatcgctgttggactgcggaccgattggctcggagaggactggcacacctagtccattgaattctttgcgaccaggaagaggagaatattaatcacaatttgttttcctatgttttcttgagggaattctggtttagagttttctcctggctggtgtatgttgaccgtgtgccggggtcccaggagcaatcgcttgcagattggtggtgaaaggcttgcaaacatctcccaaaagaaaaaaagggaagggcatgaattcgatgattatgttgggagcttggatcctatggaagcatcgcaatgcctgcgtcttcgaaggtttgcagctgagtatgtggaatgttctgcatgctctcgaagatgaacagcatctctggtgtctcgccggagtgcaaggactgcagagtttaggcctgggctccctgagcggttaggtggcatttcctggtctggtctcaccatttctatttgctgtaagagttttgttcttgtaagcacagcccctcacggctcgggctcggtccggaatgaggggtaaaacttgtacgggaggccacttttctggtgcttagtattaaaaaggtaatacttgttctcatgaaagtgacctaacaaaagttataggtacaaatatagactggagtgatgttgttaactcaataccaaaacagcaaagcattgggttttgagaatacttcattcaaggtttaagaagaaattgcaaagatgcggtttcaaactaggaaacggagtgaaggatgccccacacctttgagtggatgcgcgcaggaaccaatgcaagctgtagtaaggccttgaagtataaggcaacccaagtctgccatcatctctttctcgttgaactgaagcctgtccatgcctccatggcccagtccagcatcatcgccaatcagagctgagggcagccgcagagccagcggtagctagtcggctagtccattgactggccggtgcaggggtcacggactcacggttctgcatttcatattttcgtttaggtgtcgtttggatccgtttattttggaggaattagaatctatttaatagagtaggctatttagcttggaatttgacattccaccactttacaatgttaaaaaataagttatctcaaatttatagaatggaattgactttatgtatcttcaaactacgtttctactctacaatttataacatgtttttttggctcgctcctttacag

SEQ ID NO: 2 - DNA, 2612 bp, Zea Mays
attccaaagccaaagattgcatcagttctgctgctatttcctcctatcattctttctgatgttgaaaatgatattaagcctaggattcgtgaatgggagaaggctggcattgaacaagactatgttagtaggatgttgttgaagtatccatggattctttcaacgagtgtgatagagaactacagtcaaatgctgttgtttttcaaccaaaaaaggatttccagtacagtcctcgctattgctgtgaaaagttggcctcatattcttggctcctcttcaaaaagaatgaattcagttttggagctgtttcatgttctgggcatcagtaaaaaaatggtggttccagtcattacatcaagtccacagttattactgagaaaacctgatcagtttatgcagaatgttttgtttttcagagaaatgggtgttgataagaaaacaacaggaaaaattctgtgtcgttcgcctgaaatatttgcttcaaacgtggataacaccctcaagaagaaaatcgattttcttaccaactttggtgtttctaaacatcatcttcctcgcatcattcggaagtatccagaacttttattgttggacataaattgtacattgctccctaggatgaactacttattggagatgggtttgtctaagaaagatctgtgctcaatgatctttagattttccccacttctaggttacagtattgaacttgttatgaaaccaaagcttgagtttctgctaagaaccatgaagaagccacttaaagcagttgtagaatacccaaggtacttcagttattcactcgaggggaagatcaaaccgcggttctgggtattgcagagtagaaacatagactgcactctgacagagatgttagcaaagaacgatgaactctttgctgaagagtacttgggacttggaggattgctcgagaaacctctacaatcaagcataggcagttaatttctggacttataagattgaaccatgcagtgcactatgccgaagctgtacagctttatgcttggattggtgaggctgtttttcagatgggaggtcacttttttttgaaaacggaggtgagttgtgtttctttgtattcaaatgccgcagctctgataaccactcttttctggaccaataaatggctgcttggttcctctataggagatgtgtcgctggctgttcttgctatggtacccgcaaaaataattaaaacaaggactgtggctgacgcactctcaaacaacagttgggtttcagatattaaaggaggactgtccatgattggtctgttcgaaattttcagctatgggacaccacacatggagtttctttaaccactgacaatgatcgccatatctggagattctctggttggggtgaattctcgtcgaaatcggcctacagagtcttcttccatggtttggtctcctttgatccttggaagcgtatttggaaaacttggactccacctaattgcaagattttcttttggatacctgtccgaaatcgctgttggactgcggaccgattggctcggagaggactggcacacctagtccattgaattctttgcgaccaggaagaggagaatattaatcacaatttgttttcctatgttttcttgagggaattctggtttagagttttctcctggctggtgtatgttgaccgtgtgccggggtcccaggagcaatcgcttgcagattggtggtgaaaggcttgcaaacatctcccaaaagaaaaaaagggaagggcatgaattcgatgattatgttgggagcttggatcctatggaagcatcgcaatgcctgcgtcttcgaaggtttgcagctgagtatgtggaatgttctgcatgctctcgaagatgaacagcatctctggtgtctcgccggagtgcaaggactgcagagtttaggcctgggctccctgagcggttaggtggcatttcctggtctggtctcaccatttctatttgctgtaagagttttgttcttgtaagcacagcccctcacggctcgggctcggtccggaatgaggggtaaaacttgtacgggaggccacttttctggtgcttagtattaaaaaggtttaagaagaaattgcaaagatgcggtttcaaactaggaaacggagtgaaggatgccccacacctttgagtggatgcgcgcaggaaccaatgcaagctgtagtaaggccttgaagtataaggcaacccaagtctgccatcatctctttctcgttgaactgaagcctgtccatgcctccatggcccagtccagcatcatcgccaatcagagctgagggcagccgcagagccagcggtagctagtcggctagtccattgactggccggtgcaggggtcacggactcacggttctgcatttcatattttcgtttaggtgtcgtttggatccgtttattttggaggaattagaatctatttaatagagtaggctatttagcttggaatttgacattccaccactttacaatgttaaaaaataagttatctcaaatttatagaatggaattgactttatgtatcttcaaactacgtttctactctacaatttataacatgtttttttggctcgctcctttacag

SEQ ID NO: 3 - DNA, 2204 bp, Zea Mays
gttcatctatttatagacgtgggacgcagcccatgtaaaattacattcatgtccactacatttgctaatgacttatggggatctgtcaaggcctaagtagtcttttcatctttaagtcggttcccctttctgccaccatgccgaagctcccctgcgcatagcttcggctatgcaccatccttcgtacagcttggtgatcagcccgtccttcatctcaatcctccttcgtctagcttaagcttcgtcctgatcgtacttcatgttcataatctgagtccgaagatacctgttcatacatttcacttggaaaatattgtcaaatcatgtttttgaggaccttcggaggacgaaggcccccaacatttatgcctttatttcaaaatttacgatgcattccactgtgttttttctttaaatcccaatgatcgtaaatctgagcctatcctatccacggccaccacgttgcagcgggatacggcaaggaccaccaatcgtgcgcgtaatttaagccgtggactgggaacgactgcccgctataatgacagaagcatttgacagaacatacagcaaggaccaccaatcctgatgcatttgacagaagcaatgcgattgacctcactgataatttaaaaataatgacaaggcagagatctgaagtgaacaataaattgatgtctggacacaatatggacacaagggccgcaaaaagctgagaacagacagatttggcaggacttggttctacagcccgaatgtcatgcaaacagcagcaattgttctgaagttagcttatcagaccgcaacaacaaaggaaaaggaattatttgttcctgtaggccctgtattttttgttctttttgatgttgtagacctttggtaattattacttgtatcaatgttttgtgtaaagtgcatctggggaaaaaaaaagacatgcaggggtccattgatttaagaaccagccgatttaagaaccagacatgtgttatgaaggaaccaaagcagttattctttgtagcgcatggattttctctacttttcaaaacaaaattatatatcagctaccctgaagacaataagaatagacatctgccagcagacatgtacttcgacttgcgtcacgtgccacctgaattaactatgtatcaattccctgaatatacaaaagggtgcagtgcaattaagagatttgtttgccagcttatgtataatagcgttcagtgggtttgacagatttttcacagttattctatcatgggataataaactggagtgagggagttaatgtcactttttttacagaagaacgtgcgcaggtcgacaaaatgaggtgctatctaacaaaatgcattacaaacgtcagccattaggagccatactaatttatgtaacaaatgcttctaagaaatagaaagcaaacatagaacaacaaaaacagatatgcaataagatgctgactacatcaaccaaaatatacgccgagtaaaaaataaatcaaaccaagcaaatagtctaataattgactgagtatggtgagttgcataattgatcgaacaactgacctgcagttaggcccgctgctccatccgccgcaggaatgctccctccatccacggttccatcttctgcagagatgggagggctgtagcagaagatgtcgactgagctacagccgatacacagctgaaaatggcggcggcgccacgccggagatggacaccagcggcgtcgtttctttgagttggctccagtgctgctgcttcggcctccctcatggcggcgcgcaccgtgtcccacatggccgacatggacaacgtgatggtctgcgctgctgcctcccccgctcccgccgtaggccgcttcagccccatcgccggcgccgtggagggtcagcgtggctaggggttgctgcttccgtttccggcgaggcgcgggtggcttcttcaccacgaagcgaatcgttgtgggggcgagtggatcgttgggggcgaggcggcggcgagggcgtcgcgagacgatggggaagggggattggagcggacggatctgcgcgtacgtgtggtagggcaatggtgaatcgaaaggatgggggcgtgggggaaaacgtgggttgggtgaccggggcggattggagcggacggatctgcgcgtacgtgtgctagggcaatggtgaatcgaacggatgggggcgtgggggaaccaga

SEQ ID NO: 4 - DNA, 699 bp, Zea Mays
ctagcttaagcttcgtcctgatcgtacttcatgttcataatctgagtccgaagatacctgcagttaggcccgctgctccatccgccgcaggaatgctccctccatccacggttccatcttctgcagagatgggagggctgtagcagaagatgtcgactgagctacagccgatacacagctgaaaatggcggcggcgccacgccggagatggacaccagcggcgtcgtttctttgagttggctccagtgctgctgcttcggcctccctcatggcggcgcgcaccgtgtcccacatggccgacatggacaacgtgatggtctgcgctgctgcctcccccgctcccgccgtaggccgcttcagccccatcgccggcgccgtggagggtcagcgtggctaggggttgctgcttccgtttccggcgaggcgcgggtggcttcttcaccacgaagcgaatcgttgtgggggcgagtggatcgttgggggcgaggcggcggcgagggcgtcgcgagacgatggggaagggggattggagcggacggatctgcgcgtacgtgtggtagggcaatggtgaatcgaaaggatgggggcgtgggggaaaacgtgggttgggtgaccggggcggattggagcggacggatctgcgcgtacgtgtgctagggcaatggtgaatcgaacggatgggggcgtgggggaaccaga

SEQ ID NO: 5 - DNA, 507 bp, Zea Mays
atacaaacagttgatctcaatgctatctatataaaaaaagagtcgatcacacgtcttctcacacaaatagctacatttgcacgtgttataatccactgttgacatggaacaggcaacgatcaggttttgacatgctcaaatgttgttgaactttctagaactgattaatatcaatatacatataggatcatgattcatgaaaggcaagcgtgggaatcataactaacaaggaagaagaatgatgaaatgggttgtttaatccacctttggtcgctatcagcggcgtcagggctcgcctcgcaagcagattcttccttgtcgccaccgttgagcttcccctccagagcaaacccactgctcagcttgagctactctcctgtcagcggccaaggaatcacattgatcagtaatatttgagatatggtttggtttaccgaagtgaccaacgaacgcgtgctcctcctccgcgacacataccggactctagtggcgactcgactgccatgg

SEQ ID NO: 6 - DNA, 3338 bp, Zea Mays
gccacgggttttcttctaggatcttgtaactgttgcctcagcgacattgaatagactgcacaacccacaacagaaatgaaaatgaagatcccatacttatgcacagtcaagtttgaagtactcaactaatcatccactaaccaatttccccaactcaccttatcctggtactcaatcgctgccttgtctcctcgccagctaaattgtccgcgtgaggatactcaacagcaagcttgaaaattgcattcaacaactccttctcatcagtggcatttaaaaacaacctctatcccttgtgtccttgacaatcttttgccaaacaaaattgctgttgaacagagtggttccattccccacaatccataagcaatgcctacaacaaattgttaaaaattaaatagttttattatcatgcaccagataaaagattatgaagtaattgaagtgaaatttaaatgctcagtgcagaacttacttggcccttgttaacaatatatagtatagatatgtgcccgtgcgttgcgatggaagtaaaagatttgtatgaaacattgatacggaacaacaaacatcactataatatgcaaaatacgtgtggaaaacattatcaataccacacaaattaattataaaaagttaatttagaatttttaattacagacaaatgtgtcgacaactctcgattaatttcgagaagatttcgctgccgtcacaagacaactcagcaggcaatcaaacattcagcttgtatatgaatgtgcgtatttttttaggttaaatcactatatgtaaaaaacctgtacaaggatgttactcaagaaggacgatacatcaggcactgctgctgtggttgcaccagctgcccctcctgttactcaagaaggtgtatacggcataggccatttcctttttatggccgtggcggttggcgtgccaccctcttcatcattgggacagtgtaaatataagaaggacgatacatcagcacctaaaggaggtccattgctcccaagttataccccacttggattcttgttaatacattagtttacagagaagaaatggttcgatcaatgtgtgcttacaacataaacattgatcaggttcgatgaatgtttcttgttaatacacctgctacatctacgcttatcaaatgtcacaaggcacatgtattttatttagtatctgtggctcttgaatttgggaagagacaggcatagagaatctaggtgagaagagtatctctgttttaggagtttctgcgaaaatttctttggtccttgcagcattttcatctcctcatcttagatcttaagagcagttctctgaacaaactgttgcagtggtatttccttgttgatttccttcatatatttccttggtttttggcagaccgcagcctgcagggcagcagcctgtgcccatgacttcgcctccaccgccacagaaaactaacctcagccgcagtacaaccatgatgcagacgccaactgatgctggaaactgtactttatagtggttagttttttcactgtgcgtctcgtgtctgtaacacaggcttaataacagcgcaaagtggcagatgtggcagaaaaactatgctactacagcacactttggcttgtgctttctagtgccatggctctttgcttcaagcagaaaaactatgctactgcagcacactttggctatggatgcttcttgagaacaaccctcaagaggctcaaacaaggaaggctcgacaggtgttaaggctcgacaggaaggttggacaggtgctaaggttaatctcatagatattattgttagttgtggtcgtcagttgtcaggtgctacgcttaatcatagaaatgtgttcagtttattggttacaattttaaccgtttctatgtcttttctatttttacgttcagctaaaatgtgcaaccaaatgcaaccccatttctattaaacttaaatcttgataacttcatttggttgcacataacaatacaactataaatcttgaacccattagggtagagtgctcatttgactttctagatcggtatggcatcctttgatcaatacattgcagtttgcaaggaagattaatgacctgtattttttcgtgatgccaatattactctaggattaggctctagaaggtgcgaaagatgcaccaccacatgaaaaatttagcatttcttatcttttccattaatctgaacctattgttccgcatatataggtgcatgtttgtaactgaacattatcatctatttgctacaatcaacccatctacgttctgaatgtgtgattgttagttttattagacaagatgagtaaagtttcaatattggtagataacttttaagattacaggtacaacacaccggtatccaaagccatgaagtatgtctcatgtgaagtgatatttgtgctaaccttattgattgttatattgtagatgaatctaattcgtgtctgccagctgggccatccaaagcgaaaggattatgtcccttggttctatggcttgacacaaacattaaagagcataaggattcaggctacattggacttgttcatgagaaaggggtactttcttgccttgcataacttctgcaaaagttattgaatgtatccactacaggtgattcatatctcacagaataaagcatggttgttgattgaaatggtcaacggaaattgaggaaacttcctgtgttatctctgggaaggatggctaaatcttcttccctcccagattcaagaaccatatgcaacgaacgggcacaaacagctcctgcaaccagtgccaaaagtaccactgctgcccctcaaaagcctttgtacaagtttttaatatatggcaggactggatggattggtggcctccttggtaagatttgtgacaagcaagggataccatataagtatgggaaaggatgtttggaggagcgctttgagctgttggaggagatcagaaaggtgaagccaactcaagtttgtaatgctgccggagtaactgggagaccaaatgatgacttgtgtgagacccataaacaggacacgtattggtccttatcttaaaattagcatcaaccgatatgtaccggaagaatgcatataaagtttattataccccaataaaaaaccccaatacacacaagcaatgaaactgagcgataaattcaataacatatcaagcaacgaatttatgctagtgaatatgcataattgaaatgttataactgaatagaaaaaagaatcacatgcaaaatgtaaactcacgagactactgtgatgctcctcttctccactgcttggtcaccggtgtgttgtcggtttcctcc

SEQ ID NO: 7 - DNA, 216 bp, Zea Mays
caagactttacttatttgagtttccttatatatgttttattgtactcatttcagattaaggcaagtgttttagtagttcatcaggattattgtacacatttcagatcaaggaatgttactcatttgaagttgtaaatgcctccactaagtattcaagctttatatctttgttgccaatctccactcgtataagatcatacctgcattgaaaagaaa

SEQ ID NO: 8 - DNA, 456 bp, Zea Mays
ttcctctccctcccattattgcgcagcaagcgcatttttctcaccgaaaccgtcgccggcgccattcatggcggtaatgaggccgccggacctccctctccctctcccggcgttctctctccctttctcctccccatgctctataaaacgaagctccgtgcccgactgcccgtggtgccggttccctgcaatcccgagctcgccctcacgctctcgtcctccctgctcgcgccgaccgccgccggtgccctgctcactgccgccggagcctcggagccgccacccggagacctcggcgccgtcctcatcgaccccgccgccgtccgacgtcgaccagcgctgccgaggacctcgacatcgcccttgccgacccctctgctcagtcgatcaccgtcgcccctcccgtgctcgctcccagcccccctacgcgcaaggaacagaggaagaagctgattg

SEQ ID NO: 9 - DNA, 802 bp, Zea Mays
agttcctgtgctttgcctcgacgtggtaaccatgcagcaaaggagtagtacttgttagctcatagttacctctgtgttgagtccagttaagccacccgaggtctagtttccttttggacttcatgttggggtagttaaatcctcactgtgccttgtcaagtccagtgacttccagggctggttctttgtgtcctgccactccttcacacctgtattcactctccaatcatccctgaccccggttgtgttgcccaagtctaaactcgggcctgaagcatgctggtggtgaccaccctcgctgtgatcctcggttcaccgcggccaaggtagaccgaaacgtggccgcgacgccatcggccgacgccgtgaactacccttagcgtggaccaatccactcattgcttctccgagcgaatcttgaacacctagaagaagaagttgatgtggaagtagaaggagaacagattcctccaccagaagcttctacatttgaagttcctccagaaggtccttctgaagaacctcctcctgagaacagggcttattttgatatctgcgatgaggtggtagagtctcctccctatcaaggagaggtgatcgacacgttttacttctgctaggcgtgtccttttacgtttatgctcttatgtttcttagtgtggttgtgggaagttgaaactttcctggttgttgtaataaagttgcactttggtactactctgggcatgtaaaaattaagtactcggttttgtaaactaaaattgctaatgtttattatgttattgtaaaagtctttcgctcc

SEQ ID NO: 10 - DNA, 602 bp, Zea Mays
cactccttcacacctgtattcactctccaatcatccctgaccccggttgtgttgcccaagtctaaactcgggcctgaagcatgctggtggtgaccaccctcgctgtgatcctcggttcaccgcggccaagaccgaaacgtggccgcgacgccatcggccgacgccgtgaactacccttagcgtggaccaatccactcattgcttctccgagcgaatcttgaacacctagaagaagaagttgatgtggaagtagaaggagaacagattcctccaccagaagcttctacatttgaagttcctccagaaggtccttctgaagaacctcctcctgagaacagggcttattttgatatctgcgatgaggtggtagagtctcctccctatcaaggagaggtgatcgacacgttttacttctgctaggcgtgtccttttacgtttatgctcttatgtttcttagtgtggttgtgggaagttgaaactttcctggttgttgtaataaagttgcactttggtactactctgggcatgtaaaaattaagtactcggttttgtaaactaaaattgctaatgtttattatgttattgtaaaagtctttcgctcc

SEQ ID NO: 11 - DNA, 2237 bp, Zea Mays
attttgttctatattgaaaaacttcctgctcctttggaagaggatgcgctttgaaaatgataaaatgttttacaaaatagccctgcatcaaaaattgctttttctgcaaaaatatcctgagctccacatactccatgcattatatctgatttccccatttcgtgggtgaaggtgggctgctggatacgtaagtactcactcttgcttatttgttgtttttcagagaaggagatcgctgatcgggtaagaggtacgcctgtttcccaaccatgcctgtggctgttagaccgctgatttgcttcgctgtgtatatcgggctgcttcagccccactttgatgatatgtcccgagttgtggaccagctcttaaagttgatcgccacctttataggtttgtctcgtttaagcagatctggaaccatctgatgtataaatgtgtatactagcctcctgggactagtatttgaatcacatttgagtcccagaggattgggacgcttcatacatcatctctccagtcccgacgattgacctccctgcctctggagtcttcagcacgatcacacttctctccaattggagccccatagctccatacaaactctctgcgcgacttgcgattaggaggtcctcccttggtgtccctccctcagatgaatgagaggtcttcaactacttcaatgtgattacgcaggttgtacacatggcctttcttcggatcagtaggttcatcatgctgagctccagcaagtggcagggggatgttggttggtggcagctccctgtctggttcagtcaccgtgagataaacctccttcggaatctcacaagggtcccgcaaaaagggtatcaacttcatggctgttaccatcatatgagcaaaccacagccttgttgatgagttcgtctctgcggcgtcggatgttgcttgtcactgagatcgcacaaaacgctctggacggtcttgctcttgggtcaccgggataacgggctgccatgtcttgatttccttgagcggcttcaaggtatgacttgctgttgtgtctggggaggaggttgtgtggttgtctttggagttgttcatgtcccttttgaagagcagtggtgctaggtctgtgctgttgtacagtatgggtggtgttgttggctccctggcaatgaattggcctgagtgaatgcttcagcgaatcatggtggttgttttttgaattggacttcactaaattgattttgtcaggacagctctccgccttatgaccagatcgtaggcagcaccagcatctagggggtgcccaacaacggaaagcatagtgttctgttaataaatagttgtagcatttaccctgaaatttctttttgaagaaactggccctcttgacctcatcttcctggtggaataaattgcccccatggttgatgatcttcccgcgccaccagaatcgaggtttgactacaacccaaccctcctcctccattgaggacattgagaacttgcctgcagagggatgacttgtgcggtgctgcccattgcctgccgagccaaagaggttcacctcgccgaaccccacggaaggagccttcaacgcactccggacccgaacggccttgaggcatggcgggtcgttgtctactgtccatttcatcttctcagaggctgggattctcttccgcaaaatcgtattatgtggatcttctcttaaagcttgctctgcgactccgtctccattactgcttgcattgaagtctctttccgcagtcaggttggctctgtctttgtgacgaaggttaggggcagccgctccctgctgcgataggggaggtccatgaccgtgaaggtgcacatcctggaccagattctcaaggaccctcctggcatgcccctgcaattccggattgatcttgcgcggacttaccagaatggatgagctgagagccttccccgcctgaaaggcctccacatcccggagactgccatagtgaatccccttggaaagtagatcgagagatggtgcttcaggatttgtggattgaatcgcgtgatttcgcgttgtttttggtggatttggatttggggcaattttggtggcgcttggttcggggtgggggaggggaggggagccatacctgccgtccactccgagagccttcgcccagctgggagtagatgtaccatgagagtggggatggagcacttctggttctttaaacgagaaaactgtatgcttaaaataattcgat

SEQ ID NO: 12 - DNA, 1758 bp, Zea Mays
caaggacatagaccggcggcggctcgaagacctacggatgcaagtgacataggccgaggaaggaggaggaaaagactgttatcggatatgttttgaactggtttggatttaattgagacccaaacatcgattaggagtttaagaggcactttaaaagtttgtgaaccggaataacgcagcccgataaatttaaagaccgaaaatatactttactcaaagaagattatattactcattttatttggcttctttggtttattacttacaattttaacttttttctaatagtattcataagtaaacctatcatttaaaatagtactctgacatcttttcaatcatttttattttttattatttatcaccatttaaattaatcgtgctcactacttttcctctctccctccgcgtctctattcatcacgaatgcatgccttgagctagctacctatcgcaggtgtagcccctagatgcatcaataatgcatcgtttggatgtcgatattggagggtatggaattgaattgggttcaatatcaaatcagccatgatattgaaatgagatgtgattccaattctattgtttggatgtcgttgaattggagtttggaattgtgcggtctaattcccggcaatacagaggggtgacgctctgtattgggagagggaatttctagttatagtccaattccagggaattgggtctctgatttcaaatttcaattctgtgtgcaaccaaacaacagaatttaggaaagttgatttcaattcccaattttgtgctccaatatcgacatccaaacaggctataagtgtaatccccaaatacatcaagtgtgatcatatttattactagcaaactgaccagttaggttatatatcacagtagttatcattcacctgacctggctgactaactccaagcgatcctcttgtctgttgttccttttccatctccatgccaaatttaattaacatacaagaacgctatctaccttgacaagaacgctctaacagttgcttgtgactctcaggcctcagcccgccaataacatccaagcaagcaacacatatatttagcaatttgcagttatccatgagtttgttcaattccagctagaaccaatagagcggtatggttaatttaggtggtgaaaataaaaaaataaaatgaaaacaattaaaaataggtcagagtaccattttaaaggatagattcacttatgagtactattaaagagaagataaagttgaaagtaatagaagagagaagcctaataaaatgagtactataatagcaaatagctcttgatctgttgtgcaagttgctgatgtgtgggattggaatgatatcccaagtcaacatctgctccaggattcgaaaggtggccttcagatttataacctacaaaggacctggatgtgctgccaccatgatggccaccacaaaggaggccaagttgatgagtggactgctgaggaacagatgtagggaaaataatggtccattttcaaggagtgtctttatcaggaaatggacctttgcagctatgttcagaatatgtgaggaatgttctcctgtggaagagtctacagggggctacactgctactaaattgatacttgatggatctgatgacaagaatccttgtgataaggaactagttaataaggacaacctgctgcagaggaacaagataaatcaaaaataccaagatctcctctgaggaggaggaactaccaaaagaaaaccacctgg

SEQ ID NO: 13 - DNA, 3818 bp, Zea Mays
ccttatcctctccgatgagctcaacttccacgtactcctctccctagaaaaatcctgccgccctccccttgtctaatttttttcagccggcgttatctccctgctcggcagcccttccctgtgcttgttcttcatgccgcgtgctcctcaaattcccagctccggctcatcttccaccaacgcgcgctgctccagcctttagctccctggtcgccgcgcagaggagctccctcagctcgttcctcctgtgtcgcgccccagcccctggttcggctctgctcctccctgtgcccatctcccatggcggctctctctgtccggccaccggcgcctttgttttcctctctcctctacgctgtcgctgtttccttgtgcagcgccggttgtcctcgcgctcggctcccagctcgcccagctttggtggtcgtcgtctccacctcgacctgagcatcgccgtggagtccctgcttcttcggctggccgcggcgctctctcccgggcgcgctcgtctgcccctgctccactgcgccgagcagttcccagccgagctcctatccagccatgctgcgccctccctactccctcctgcaactcggtgcctctcccagctcgctggtcgtcgagtccttctccctagcgcatggatcaagttgttgcccccagccatgtcttcatctccctcaactgacactttctgctcggccacatgccatggagctcgccctgcccctgtttccatgaccggcgtccccaagctcctcccatgtgcgtcgcgattttccctggcacagctcgctcactgttcgccgcacgctctgggatcctccctgcaccgcgccatggcaaccgttggaccggtcgttccctgcgcgccaacttccctgtgcgcgcctctgttcctcgtcgtggtggggtcgtggtgtggcaacgtcgtgtgcattgcgacagccgtcctgaccgcaaagcagtccgcgcaataaagttcgcccggtcgcgacctctctttgctctctgcgtcgttgttcgccgggtcaagcctcatgttgtcacgtcctgttttctgcttgacagtgcgccctctcggctcgctcggctttaattcccaatcacgtcgtcgaacgacacgaccttatcattcgtcgtcacgtcgttcgccgtcaagcctcactgccattcatgttgtgcctcgcttccgatgtgttcgattaaatgacggaccaagaatccaagacgtcgctcctccttgctatgaaatcctcacgctcaccattctctattcgatctcgtcgtcaagctgaaggccgtcgtcgttcaggcaactaccaaatcgagttgtgatgtggtgagccgattcgctatttttactctcggttttctgatcgtaaaataagacgctttgtatacgtatacgattaagttagaaataccagtaatgcgaggtgtgcgcttggtaattatggctcaatctgttattatgtcgttaggttgtgtgatgttatggggtcgatgatagaagtggaattctagctgttgagcgatgacgggaaggacattgttcaatcgcatgcttaatgtttgatggatagtccgaacgggaatcatcgtcgttctcatgaattttgtatcaactagtaatagtacactggattcgctagtttttattattagttcaaagcttggattaattagttatattagttgcgtcagttctccggacggtagtaaccgtgtgttgtggttgtattaattgtttattaaaatgcttcatcatatatagtgtattggtttatacatatatatacatatgagatgtgtaggtgatgagtaggataggtttagtgttctaattaattaattgataagttgtgtttaggctaattatattaaatatgtattgtttgttgtttagtgatgtttgcgttagattcggttaatctagagaagcgtaattattgcactcagtcgtacgtcgataactagtgttttcggataaaatagtacaacgcctcgccactaggtgtttaattcgctatcgcgtagcactatttagatttgtgttattcctgcttatatgcattcatgtgcataatgcattccattcaggtacgttaattaatcgcgtgatgcggaagacaagccaagtcgaccccaagcgcgggctaatccgcaggataatgcggatggatgaaccggaagatggataatctgatcaagtgctaggccaaggatgatcgtcaagtggacgtcacctaacaacactaacctagtgttacccaggcaagccccggtgcatacaaccccttccttgtgtttttaaattatttttacacactttaagtctagtgaatgtgcattaggtttataggagttgtttggaaaccctttgatgcattgccttccttgatatccatacctttatagatacttctggtgaagtatcaaaacatgatttacaaaaatgcttagccctgctcagatcttgtggatagaggttgtcttttgcattacggcctagctcaggggttatcctgaggaaagatgacttctacctacaagaatattttcattgagagcgtggtgggatcttactacaaagttccctttgatgctcttttcatcctaaggaatacaaacaatcctaagggtggaagtacttaaatcgggacttgggctaggaacaggtgatgctccgcccgggtcaattaaggattggatgcgtatgtaggcctgatagatcaaggactatcttaactggccacatgccctggaaatgggacagggtaagcttgaacccggctattccatacgtgaaaagacaaccgcgcactgggcgtgggagatggtgggagtagcgtgtgccctcctggctagaggctggatggaggagtactgtgctcccgggtagcgcggaccggttcacgttgtggaggatctgtgggaacggttgacatatgcaagggttaagtgctacatatgtcgtgtggttagagatcctcagctgagtaaatcaattcggatcgttgttatatccccggagagtggagacttgatcactgacctgcaacctaagtcaggatgtgaatctcatgaataaaaatgatgttgtattgatgagatggtgaaagtagaccatatgcaaacaggtctattaatatttaatttggcgttaaaatattgaaagtaaggactcactttagtaagctatttctgcaaaagtatctaagttgattcttgttaaagcctctccttgattcccaaatccagcatacccttgagagtcttttctttagtcgggtaagacttgctgagtaattccatactcagggttttattccctgttgtttttcaggttttaactttgtgttgttgtttatggtgttaagtgccggtgggctcagccttcttataagtctaagtaactcttctatacttcttattgaggatggtcacttaatctagcatatgtttcaaacttataaacaatttataaagttcaaagttattcctttgaatcactttttgtaatcactccaatcatgtacatataaaacttgatgtaacttgtaaaatttggtaataagatttccgctgcaaactgtcgatgtgtgtgatttgtgtttacttaatcctgcggttctggttgtaagtggtttatccgatgtccttggggcaatcgaatggatcctattaagttatctggtgcacatgcatagcagtctgaggtctttgagacaaggacaggtgcatgtgggcccaataacttggaaggttctgccacagctagtggaagactaccttacccgaaaggggcaagggca

SEQ ID NO: 14 - DNA, 862 bp, Zea Mays
gaagctagtggaactttgtaaaggtctcgtagtggatccctagtcattcacctctgtagtgtctaaggtccttgcaaaccctggcgacatgggatacacgacttgtgggtacagggtacaacctctgcagagtgtaaaactagtatactagccgagctcatggtcatgagcggctctggactctcgcatgattaaatatggaacctaaactcaatttgtcatatgcattgcatgggtttattattaattttgttctattattattattattatggtttgatatttacttacatttagtaactgctaataaaatttgaccaaattattaaaagcaatgctcaagtttaacccctattgttgatcagccttacacatcacatgaactcccacctttggtgagttcatgccacattattccccacaacttgttgagcgatgaacatgtgtgagctcacccttgctgtctcacaccccccacaggagaagtacaggtggttcaagtggagccacgtatcgaggagttcgatttgatctaggtggcgtctcccagttgactttctggcgccaaggatggattttagatcctgttatatttatattttattttgtaagacttccgctatgtaataaatactctgattattgtgacatttatctctatacactctgttattatatatgttgtcttctttggcgcatgtatgagatgcacctggctttgtcccttaaagcccggggtgttacaccctggtactcatttccctgctctccctagttcttccactggttgcttcaattgtggaaagtccgaacacttcatcaaggactgcccatacccgaagcaaaataaaaccaatttcta

SEQ ID NO: 15 - DNA, 6920 bp, Zea Mays
cgcaaccagctcagggcatttatatactttgactctaaatggaaatatttagagggttacccttagcatccatccatcaatgctttctagcatgtattgtcagtggggaggtgaaagttgtgagatagcatacttgctggaagtaaatgttgtatcgaagaagcccccggcactctccagcaccctagttttcacaagttgaagcccatcctcagttagaccagcgggaatctttgacaagagttcatcaattgcatttgagacctcatgctcctgaaactggaatcaaaatatataccatcttagcaaatactagaagagatttgaacaggaaagacatgtgatgaggtggaacaaaagatgaaaacagaccaggatttcggcagaatggccacataaagcacgagcatgctgatcgcagatccttagctgtagaagctgtgacttaattttgtagagaagaagaaacaagacgaccggtacagcgttagtagatacgcatgtgccttagggctactttgggagcccagatccctggggggcccgcaaattccctgggccaagaaacccggtgccaatctcccatgggccaattttttgtgccatttggacggaagcccacaaactcagggatcgaaactcgcttccattccttttccacgcggaagaaaactgcgagtcaagaggcgggagggcttccctaacccccgtcgacttgttcatgctcacacggcatgtgagtcgcaaggctgctgccactgtcaccctagtatcccgtggtcagcgcatacccagtggctggtgactagcggcgcaccttttcctatggtaggtgacacatctcctagtcctagcgctcggcttgttcatgctcatgcagcttgtgaatcgcaaggctgctgccgctgtcaccctagtatcctgtggtcagcgcatacccagtggctggtgactagcggcgcgcctttcccgacggtcggtgacacatctcccagcgctcggcgatcacgttgctcccgaaatccactgctccatgtcgatctctagaaatcacataggcaactcaccccgaccactgccaccttgctcctccactgtcatcgcttcaccatccgtctctggaggtcaatcctcctccgcctgcattcccttccccaacagtaatttctcgatacgctagggtttcacccagatttccattgtttcttgaagatcttggagctatcggtacgtgagtcaagacaccgcttctgctcccattgtcccgttcggggtaacacaacgctgtggagctacaggttagttctctgcctgctacggattcgttgcattctgtttcagtggtcggacatgggttcatggcagtctgatgtgctgctgtagttttctgtgttgtagcttcatgtgcagtgtaggaggtggtcaatttgtttgtgattctttattttgttaacaaaaaaattggagcaagtccagggtagttcgagccaaatttattgctatacttgtgatcttttattttgttgatatattggatcagtacaactgtccttgttgaaggaatgagagaattggtataatgtgtgggatgtattgcattgagcctctagggagaatatataggagtacatgacttggagggcaagaagcgtattctagagataagaaaggttatcctagatataaggaaggttatctcgagattacaatcaatcctaaaccaaccatatcaggagttgcctaatatactctaacatacctaatatactctaacatccccccgcactcgtagcgttagcaaaacgaacggacagactggagaataatggagatatccccccatagtcagaatgccggtgcgaatgctgctactggagtagcccatgcagatgatagccctttgtgccgataatgttgaggtagctaagtgcaagggcgtcgagccgtcgtcgaggtgccatgcgtagggttgctgtggtcgaggaagctgtcgaggacatcatagaagacaagccgcacaagtcgcaggcgctggtgcggcacgcgggaaggcccgcagcgcaccagagtacgccgtggtgacagtggcgctgagaaaaatctccagcatccttggttttggtcgcagatggtgtaatctgatcagtttgttgttgttcacatcctctaccagaattttaatcaatggtgaacctaggaattgcatctcccaccatcgaggccttcatcaagggaaccccctatcacccatgctatttattctggtcatggaagtcctgaattccatttttacttttgcaactcaagagcatctcttgcagcccattgctcatcagcaggccaaacatcgcatttctttttatgcggatggcgtagtattgttcctccggccactaaaatctgatctccttatggtcactcggctccttgatatttcggggcattctacaggcctcaagacaaacatttccaaaagttcagtcacacctatccagtgtggggatgaagagctggtcattatctctgagttgttgccttgtgagttaaaggagtttccatgtaattacctgggacttcccctgtcaattcgaaaaccaacaaatgccgagttgcagccccttgtcgataaggtatccaataaattgtccgattgtcgggctagaaaacatcgctcatgagtcaagcaggccgccctgtgatgatgagagtggttttatctttcatccctatgtactctatgctagcacctccctaaatgggtgctcaaataaatcgataaaagaagtgggttcatgtggaaagggcaggaaaaagcaaatgggggtagctgtcttgtttcctgggagtgtgttcaacgacctttgctgtttggaggcctagccgcctaggtatacttaacatggagctgttcagtggggccttgcgtattcgttggttgtggttgcagaagacggatgcatctcgcccttgggctggcctccccttcaaactacctcctcatgcgcaagctttgtttgacattgttgttgttactgttgtgggcaatggagaatcaactaaatcttggaccgatggctgcaaggaaaatctgtttcggactgggcccccaatttgttcctgttgatgcccaaaagggctaagaggcaaagaacagtggcacaagggttgcaaaaccatagttgggtctctgatttaaggggtgccttgtcagtgcaagtgcttgtggaatatttacagctctggaacctcgttgataacctggagctccaacaggacatccctgatcagcacttatggtggctaaccaatcatggggactacaccatccagaggggacataataacaaagtctgtggatgcatcaagtgaagttcatgatgcatttatgctagctgatttattagggaagaaaattgaagagattgggaaagaaaaagtggttcaggttatcactgataatggggctaactacaaggcagcaggtaggatacttatggagaggtttccttcacttttttggagcccatgcgctgcacattgcttagatcttatgctagaagacataggaaacttgaaggaatttaagaagcccactgtacgtgcaagacgtgtcacaactttcatctataggcacggtagaattcttagtttaatgagagagaagacaggtggggcagatcttgtgagagctgcagccactagatttgccactgctttccttactttgaaaagtttgtacaagcacaaggatcctttgaaggccctatttcttagtgaagaatggaatggaaacaagttggcaaaaactgctgcaggtaaggaggcttgtgatattgtgctctctgtggagttttggaataaagttgaagattgtcttagagcttcagcccctctcctcattgtacttagagtggttgatggtgatgagaaacttaagagaatcatagacatcattgagaaacgatggatgaaacaaatggaccatcctttgtatggggctgctctttatttgaatccaggaaaattgcatcctctcattcgagatgatgatgatgcaactgttggccaactaagaggttgtttccttgatgtgcttgcaagaatgcaagtttatacattaacatctaaatttatgttgtatttcacatttggcaatcaagttgattggtggcgttcatatggtgggcgtgctattgagattcaaaggtttgctaggcgtattgttggtctttgtgcttcatcatcgggttgtgagagaaactggagtagatttgagtttcctcaaggtgctcgtgggtgtgattgtggtgaggatgagaatggccttacatgggaacttgttgatcaagctgtgggtgcatcaagctcgctgcgaggccgaaatcttccaaggaatgccaacaagcgtgcaagagtttcacactcaaggtttgactttgaagaagattttggttcagccaatgaagaagaggaggaccaagatccacatgatgatgttgatgtgactgattctgaagatgcacatgatgatgttggtggagaaaacactgaggctgctccagatgagttcgaagatggatattgactcactaagagttggctgatttcagatttgcagcttacctaattttgtgcagtgcttcaatgcttcactgcttgtgctcttaatcaactagtcttttaatcttttgattgatctatgtcgctaagtcattatggggctggactggaactaatttaattatgccactaagactagcagtctagcatatgttgctgctgctattttattcccaccaatgtattgtgggtttaatttgatatacatgtctgctgcttactgttttaatatgtcaatattcaaaggttaatgtagcttgcagcttgaaagaaaagaagaggggttggatcttcgataagagagatggatcatggatgctacaagaacaacaaagagaagggcagagtacataccaaagcatggacaacaaaaaagcttgtattgtattctctaaccttaccaattttgttattgcaagtgttagattgttaggattttttttgcatatcctcgcctaggcgatcctcatatggcgtcgcctcgccgcacgcctaactcgcctaggcgtttggaagggggtcggtcgccatgtctcgccttaacgccttaataaccttggttgtgtgttcgtgtgggaggttcccaacatgtcatgattagttgtgtgttcgcgtgggaggtttggacttcaatcctcaatattttggggttgattgccctcgcacctcagcttggatgttgtcgttttttggctgtggtgtacagctaccaaggcagttcccaaagagttgaaaaagggttttaatcccctcatcatttcggtcaccggggagatttggaagcatcagaatgcctgcgtgttcgaaggaaaaaagccatgtgttcggtctgtccttgcaaactgtggccattgaatgtgctctttggagtgtggcgggtgcctctcgcctttgagagctgctcacccgccaattcatcccaggggattagcctaggcccagggtggctagtagtgttgtggtcgtgtgtgtgtgtgtgtgtgtgtgtgtgtgtgtgtggcgagttagtgtaggaaggaaggattgcgtataatgtgttggatgtattgcattaagcctctagggagaatatataggagtacatgacttggagggcaagaaggctatcctagagataaggtaggttatcctagatacaaggaaggttatcccgggattacaatcaatcctaaaccaaccataccaggagttatctaatatactctaacatgcctaatatactctaacagttagttcctaacctgccttgtacacggcgttatctttccagtcgcgccgtttgtttttgttttctcctcttaatgaaatgactagcagctctcctgcgacgttcaaaaaaaaattcgacctgaataatataatttggttctcggtgccgtaagatgcccatagtcctcattatcttaccttgtgtttacttgtagagagagctcttgctggaagcattgtatgatttgagaagaaaaacgcagctgcagttcctatctgagaagcttatgcaaaggatttttttcttggacactgactatgaaaaggagttaaaccatttttatttttgattatgccttggatatctggatggagatgatctgtaacttggtgacgaatgggttagctaggttgaatttgccacttgaattaattttttctttgcactggactatgtcaaataattattattccaaattcttatgtgagcttctaatgttactcaattatttgcattatttaggtcttgtgattttccatgcattgttttcatgaaaatgttgtggttgacattgatatgtggtgacttccttatattattatttctttatttttctaagacattgttttcaatttactaagacgtacccaggttcaaacctgctgccaaactctggacagcctcagcgcaatcaaagtttcaaaaaaaatccacatgtagggttatcttcccagggtttccctctcctgccaaagtgagagaaagagagaaggaaagtgcattacaatcttgttagctctttgaatgagcagtccatcctctatgcatgctttgccgtgcctcttgaacccctggacgcactccaactcgccgtccacacatcgcccgttcggagggcaaggttgacacgaatctgcgcatgccttgccttagctttgctatacttttgatacaaatagtgagcaaggagagcatgcagaggagttaaaaaagctgtagaaggagatggccgtaccgtcggcgtagtcatcgggccactggggagagtcgcagaagggctcagggcggcggttgaggacgctacaggccg

SEQ ID NO: 16 - DNA, 6927 bp, Zea Mays
ggtggaacaaaagatgaaaacagaccaggatttcggcagaatggccacataaagcacgagcatgctgatcgcagatccttagctgtagaagctgtgacttaattttgtagagaagaagaaacaagacgaccggtacagcgttagtagatacgcatgtgccttagggctactttgggagcccagatccctggggggcccgcaaattccctgggccaagaaacccggtgccaatctcccatgggccaattttttgtgccatttggacggaagcccacaaactcagggatcgaaactcgcttccattccttttccacgcggaagaaaactgcgagtcaagaggcgggagggcttccctaacccccgtcgacttgttcatgctcacacggcatgtgagtcgcaaggctgctgccactgtcaccctagtatcccgtggtcagcgcatacccagtggctggtgactagcggcgcaccttttcctatggtaggtgacacatctcctagtcctagcgctcggcttgttcatgctcatgcagcttgtgaatcgcaaggctgctgccgctgtcaccctagtatcctgtggtcagcgcatacccagtggctggtgactagcggcgcgcctttcccgacggtcggtgacacatctcccagcgctcggcgatcacgttgctcccgaaatccactgctccatgtcgatctctagaaatcacataggcaactcaccccgaccactgccaccttgctcctccactgtcatcgcttcaccatccgtctctggaggtcaatcctcctccgcctgcattcccttccccaacagtaatttctcgatacgctagggtttcacccagatttccattgtttcttgaagatcttggagctatcggtacgtgagtcaagacaccgcttctgctcccattgtcccgttcggggtaacacaacgctgtggagctacaggttagttctctgcctgctacggattcgttgcattctgtttcagtggtcggacatgggttcatggcagtctgatgtgctgctgtagttttctgtgttgtagcttcatgtgcagtgtaggaggtggtcaatttgtttgtgattctttattttgttaacaaaaaaattggagcaagtccagggtagttcgagccaaatttattgctatacttgtgatcttttattttgttgatatattggatcagtacaactgtccttgttgaaggaatgagagaattggtataatgtgtgggatgtattgcattgagcctctagggagaatatataggagtacatgacttggagggcaagaagcgtattctagagataagaaaggttatcctagatataaggaaggttatctcgagattacaatcaatcctaaaccaaccatatcaggagttgcctaatatactctaacatacctaatatactctaacatccccccgcactcgtagcgttagcaaaacgaacggacagactggagaataatggagatatccccccatagtcagaatgccggtgcgaatgctgctactggagtagcccatgcagatgatagccctttgtgccgataatgttgaggtagctaagtgcaagggcgtcgagccgtcgtcgaggtgccatgcgtagggttgctgtggtcgaggaagctgtcgaggacatcatagaagacaagccgcacaagtcgcaggcgctggtgcggcacgcgggaaggcccgcagcgcaccagagtacgccgtggtgacagtggcgctgagaaaaatctccagcatccttggttttggtcgcagatggtgtaatctgatcagtttgttgttgttcacatcctctaccagaattttaatcaatggtgaacctaggaattgcatctcccaccatcgaggccttcatcaagggaaccccctatcacccatgctatttattctggtcatggaagtcctgaattccatttttacttttgcaactcaagagcatctcttgcagcccattgctcatcagcaggccaaacatcgcatttctttttatgcggatggcgtagtattgttcctccggccactaaaatctgatctccttatggtcactcggctccttgatatttcggggcattctacaggcctcaagacaaacatttccaaaagttcagtcacacctatccagtgtggggatgaagagctggtcattatctctgagttgttgccttgtgagttaaaggagtttccatgtaattacctgggacttcccctgtcaattcgaaaaccaacaaatgccgagttgcagccccttgtcgataaggtatccaataaattgtccgattgtcgggctagaaaacatcgctcatgagtcaagcaggccgccctgtgatgatgagagtggttttatctttcatccctatgtactctatgctagcacctccctaaatgggtgctcaaataaatcgataaaagaagtgggttcatgtggaaagggcaggaaaaagcaaatgggggtagctgtcttgtttcctgggagtgtgttcaacgacctttgctgtttggaggcctagccgcctaggtatacttaacatggagctgttcagtggggccttgcgtattcgttggttgtggttgcagaagacggatgcatctcgcccttgggctggcctccccttcaaactacctcctcatgcgcaagctttgtttgacattgttgttgttactgttgtgggcaatggagaatcaactaaatcttggaccgatggctgcaaggaaaatctgtttcggactgggcccccaatttgttcctgttgatgcccaaaagggctaagaggcaaagaacagtggcacaagggttgcaaaaccatagttgggtctctgatttaaggggtgccttgtcagtgcaagtgcttgtggaatatttacagctctggaacctcgttgataacctggagctccaacaggacatccctgatcagcacttatggtggctaaccaatcatggggactacaccatccagaggggacataataacaaagtctgtggatgcatcaagtgaagttcatgatgcatttatgctagctgatttattagggaagaaaattgaagagattgggaaagaaaaagtggttcaggttatcactgataatggggctaactacaaggcagcaggtaggatacttatggagaggtttccttcacttttttggagcccatgcgctgcacattgcttagatcttatgctagaagacataggaaacttgaaggaatttaagaagcccactgtacgtgcaagacgtgtcacaactttcatctataggcacggtagaattcttagtttaatgagagagaagacaggtggggcagatcttgtgagagctgcagccactagatttgccactgctttccttactttgaaaagtttgtacaagcacaaggatcctttgaaggccctatttcttagtgaagaatggaatggaaacaagttggcaaaaactgctgcaggtaaggaggcttgtgatattgtgctctctgtggagttttggaataaagttgaagattgtcttagagcttcagcccctctcctcattgtacttagagtggttgatggtgatgagaaacctgcaatgccagaggtcgcggcactaatgaaacatgcaaaagagaagatcaagctaagctttgctattgatagcaagaaaagcttacttaagagaatcatagacatcattgagaaacgatggatgaaacaaatggaccatcctttgtatggggctgctctttatttgaatccaggaaaattgcatcctctcattcgagatgatgatgatgcaactgttggccaactaagaggttgtttccttgatgtgcttgcaagaatgcaagtttatacattaacatctaaatttatgttgtatttcacatttggcaatcaagttgattggtggcgttcatatggtgggcgtgctattgagattcaaaggtttgctaggcgtattgttggtctttgtgcttcatcatcgggttgtgagagaaactggagtagatttgagtttgtgagtattgttgtctttgtctaattgtttaattcttagcttgtgtctagaatttaagccaacaaattattcttttgtagatccatacaaagaaacgtaataggttgctgcataagagattgaatgatattgtctatgtttcctacaaccgaaggatgaagactaggtttcaaataaggcgtgagaagaaagggaaaggtttttgaccctttggtcattgaagagttcgattgggataatgagtgggctgattcctcctatgtgcagcctcaaggtgctcgtgggtgtgattgtggtgaggatgagaatggccttacatgggaacttgttgatcaagctgtgggtgcatcaagctcgctgcgaggccgaaatcttccaaggaatgccaacaagcgtgcaagagtttcacactcaaggtttgactttgaagaagattttggttcagccaatgaagaagaggaggaccaagatccacatgatgatgttgatgtgactgattctgaagatgcacatgatgatgttggtggagaaaacactgaggctgctccagatgagttcgaagatggatattgactcactaagagttggctgatttcagatttgcagcttacctaattttgtgcagtgcttcaatgcttcactgcttgtgctcttaatcaactagtcttttaatcttttgattgatctatgtcgctaagtcattatggggctggactggaactaatttaattatgccactaagactagcagtctagcatatgttgctgctgctattttattcccaccaatgtattgtgggtttaatttgatatacatgtctgctgcttactgttttaatatgtcaatattcaaaggttaatgtagcttgcagcttgaaagaaaagaagaggggttggatcttcgataagagagatggatcatggatgctacaagaacaacaaagagaagggcagagtacataccaaagcatggacaacaaaaaagcttgtattgtattctctaaccttaccaattttgttattgcaagtgttagattgttaggattttttttgcatatcctcgcctaggcgatcctcatatggcgtcgcctcgccgcacgcctaactcgcctaggcgtttggaagggggtcggtcgccatgtctcgccttaacgccttaataaccttggttgtgtgttcgtgtgggaggttcccaacatgtcatgattagttgtgtgttcgcgtgggaggtttggacttcaatcctcaatattttggggttgattgccctcgcacctcagcttggatgttgtcgttttttggctgtggtgtacagctaccaaggcagttcccaaagagttgaaaaagggttttaatcccctcatcatttcggtcaccggggagatttggaagcatcagaatgcctgcgtgttcgaaggaaaaaagccatgtgttcggtctgtccttgcaaactgtggccattgaatgtgctctttggagtgtggcgggtgcctctcgcctttgagagctgctcacccgccaattcatcccaggggattagcctaggcccagggtggctagtagtgttgtggtcgtgtgtgtgtgtgtgtgtgtgtgtgtgtgtgtgtggcgagttagtgtaggaaggaaggattgcgtataatgtgttggatgtattgcattaagcctctagggagaatatataggagtacatgacttggagggcaagaaggctatcctagagataaggtaggttatcctagatacaaggaaggttatcccgggattacaatcaatcctaaaccaaccataccaggagttatctaatatactctaacatgcctaatatactctaacagttagttcctaacctgccttgtacacggcgttatctttccagtcgcgccgtttgtttttgttttctcctcttaatgaaatgactagcagctctcctgcgacgttcaaaaaaaaattcgacctgaataatataatttggttctcggtgccgtaagatgcccatagtcctcattatcttaccttgtgtttacttgtagagagagctcttgctggaagcattgtatgatttgagaagaaaaacgcagctgcagttcctatctgagaagcttatgcaaaggatttttttcttggacactgactatgaaaaggagttaaaccatttttatttttgattatgccttggatatctggatggagatgatctgtaacttggtgacgaatgggttagctaggttgaatttgccacttgaattaattttttctttgcactggactatgtcaaataattattattccaaattcttatgtgagcttctaatgttactcaattatttgcattatttaggtcttgtgattttccatgcattgttttcatgaaaatgttgtggttgacattgatatgtggtgacttccttatattattatttctttatttttctaagacattgttttcaatttactaagacgtacccaggttcaaacctgctgccaaactctggacagcctcagcgcaatcaaagtttcaaaaaaaatccacatgtagggttatcttcccagggtttccctctcctgccaaagtgagagaaagagagaaggaaagtgcattacaatcttgttagctctttgaatgagcagtccatcctctatgcatgctttgccgtgcctcttgaacccctggacgcactccaactcgccgtccacacatcgcccgttcggagggcaaggttgacacgaatctgcgcatgccttgccttagctttgctatacttttgatacaaatagtgagcaaggagagcatgcagaggagttaaaaaagctgtagaaggagatggccgtaccgtcggcgtagtcatcgggccactggggagagtcgcagaagggctcagggcggcggttgaggacgctacaggccg

SEQ ID NO: 17 - DNA, 572 bp, Zea Mays
caagaacctactagctgctccactcatctatttcttttgaatcattgtatactagctagctagctagccagagcttgtatggccactgctcatcatgcggatgaccatcgtgcagggagaagaagcgaggccgtcggagagaactacatgaggggcctctacggcgacgatgactacaacgccacccactacggtcaccagcagcagcagcggccgccgcccgcgcccatggcggtggccaaggcgttagccacagccacggcagccttctccatgttgttgttgtcggggctggcggtgacgggcacggtgctggcgctcatcgtggcgacgccattgatggtgatcttcagccccgtgctggtgccggcggccatcacggtggcgctgctcacggtaggcatcgtttcgtcgggagggttcggcgtggctgcggtggctgtgctggcgtgggtgtaccgctaccttcagaccacgacctcgtcgtcgggtcagcagccgcacatcgtcaaggactgggcgcagcagcaccgtctggagcagacacgcgcgcactgaaataaaaaaaagcg

SEQ ID NO: 18 - DNA, 2145 bp, Zea Mays
gcggtgatgattgcgatgacgattattaatccattgccagccggttcgttgaccgccacgtcaccgtcgtcgtcttccttgcgtccgtccgtccgtcctctccatcaattgcaattggttggaaggttggagagatttgatttgctggttgtactactgtcgaaccccagcccgtccgtaccctacgcatcttcctctcccatccatccactctttgcttcatcgatccccactgctgtgctgtgctgtgctgcgtagcttatccgaggggacaggtgagggagtcgagggggacggcgcatgaaagaaagagaccgagggggaggcggcgagagcgagaaggcaccgccgacggcgagacctaggatgcagacaaggccaaatccacatcgatggagccaagcccgatggccgttggtgttggcggcccaaagaggaggtggacgcgcagtcggaggcggaggtgcgtatgcccatcgtcgccatctagctgcgcctccttatatgcccctccggctccgattagcttacctccatcgatctccccaccatggacgccaacgccaatgccctcggcatggacgctatcaccaacgaaaccgtcgacctggagcatgtccctgtggaggaggtcttcgagcatctcaaatgcacccgcgacggcctaacctccgccgctgcccaggataggatcgacgcctttggctacaacaagctggaagagaagcaggaaagcaaagtgctcaagttcctgggcttcatgtggaaccccctttcctgggtcatggaggcagcagccataatggctatcgcccttgctcatggcggcagagatgttaggggaaagccaatggggatagactaccatgactttgtcggaattatgttactgctcattatcaattccaccattagcttcatagaggaaaacaatgccgggaatgctgctgctgcgcttatggcccgcctcgcaccaaaatccaaggttttacgtgatggaacctggagtgaaatggacgcatctttgttggtgcccggtgacataatcagcattaaacttggagacatcattccggcagatgcgcgtcttctcgagggagatccgctgaaaattgaccagtctgcacttacgggagaatcgctacctgtaaccaaacaacctggtgacgggatctactctggttcaacctgtaagcaaggtgaaatagaagcagttgttattgccactggaatccatactttcttcggaaaagcagctcatctggttgagtcaaccactcatgttggccactttcagaaggttctcacatcaattggaaacttctgcatttgctcaattgctgctggaatgactattgagttaatcgtgatgtacgctattcatgcaagagaataccgtcagattgttgataacctcctagtgcttcttatcggaggaattccaattgccatgcccacggttctctctgtcactatggctattggatcacacaaactagcacagcagggtgccattaccaagaggatgactgccatagaagaaatggctggaatggatgtcctttgcagtgacaaaacaggaactctgacactcaacaaactaagcgttgacaagaatttaattgaggtttttgctcgaggcatggagaaggatgacgttgtcttaatggccgcaagagcttctagactagagaatcaagatgctattgattttgctattgtttcaatgttgccagatccgaaagaggcgcgtgccggcattcaagaagttcatttcctcccattcaatccaactgacaagagaacagcacttacatacttagacgctaggggtaaaatgcacagggttagcaaaggcgctcctgaacagatcctgaacctagcatcgaacaagtctgagattgaaaggaaggtccatcattctattggcaattatgcagagagagggctacgatcgcttgctgttgcctatcaggaagtacctgaagggactaaggaaagttctggtgggccttggcaatttattggtcttctcccactctttgatcctcctcgccatgacagtgctgaaactatacgcagagctcttgaccttggagtcagtgtaaaaatgattacaggcttggagtgctaaaaagattgggc

SEQ ID NO: 19 - DNA, 3740 bp, Zea Mays
gcggtgatgattgcgatgacgattattaatccattgccagccggttcgttgaccgccacgtcaccgtcgtcgtcttccttgcgtccgtccgtccgtcctctccatcaattgcaattggttggaaggttggagagatttgatttgctggttgtactactgtcgaaccccagcccgtccgtaccctacgcatcttcctctcccatccatccactctttgcttcatcgatccccactgctgtgctgtgctgtgctgcgtagcttatccgaggggacaggtgagggagtcgagggggacggcgcatgaaagaaagagaccgagggggaggcggcgagagcgagaaggcaccgccgacggcgagacctaggatgcagacaaggccaaatccacatcgatggagccaagcccgatggccgttggtgttggcggcccaaagaggaggtggacgcgcagtcggaggcggaggtgcgtatgcccatcgtcgccatctagctgcgcctccttatatgcccctccggctccgattagcttacctccatcgatctccccaccatggacgccaacgccaatgccctcggcatggacgctatcaccaacgaaaccgtcgacctggagcatgtccctgtggaggaggtcttcgagcatctcaaatgcacccgcgacggcctaacctccgccgctgcccaggataggatcgacgcctttggctacaacaagctggaagagaagcaggaaagcaaagtgctcaagttcctgggcttcatgtggaaccccctttcctgggtcatggaggcagcagccataatggctatcgcccttgctcatggcggcagagatgttaggggaaagccaatggggatagactaccatgactttgtcggaattatgttactgctcattatcaattccaccattagcttcatagaggaaaacaatgccgggaatgctgctgctgcgcttatggcccgcctcgcaccaaaatccaaggttttacgtgatggaacctggagtgaaatggacgcatctttgttggtgcccggtgacataatcagcattaaacttggagacatcattccggcagatgcgcgtcttctcgagggagatccgctgaaaattgaccagtctgcacttacgggagaatcgctacctgtaaccaaacaacctggtgacgggatctactctggttcaacctgtaagcaaggtgaaatagaagcagttgttattgccactggaatccatactttcttcggaaaagcagctcatctggttgagtcaaccactcatgttggccactttcagaaggttctcacatcaattggaaacttctgcatttgctcaattgctgctggaatgactattgagttaatcgtgatgtacgctattcatgcaagagaataccgtcagattgttgataacctcctagtgcttcttatcggaggaattccaattgccatgcccacggttctctctgtcactatggctattggatcacacaaactagcacagcagggtgccattaccaagaggatgactgccatagaagaaatggctggaatggatgtcctttgcagtgacaaaacaggaactctgacactcaacaaactaagcgttgacaagaatttaattgaggtttttgctcgaggcatggagaaggatgacgttgtcttaatggccgcaagagcttctagactagagaatcaagatgctattgattttgctattgtttcaatgttgccagatccgaaagaggcgcgtgccggcattcaagaagttcatttcctcccattcaatccaactgacaagagaacagcacttacatacttagacgctaggggtaaaatgcacagggttagcaaaggcgctcctgaacagatcctgaacctagcatcgaacaagtctgagattgaaaggaaggtccatcattctattggcaattatgcagagagagggctacgatcgcttgctgttgcctatcagtacctgaagggactaaggaaagttctggtgggccttggcaatttattggtcttctcccactctttgatcctcctcgccatgacagtgctgaaactatacgcagagctcttgaccttggagtcagtgtaaaaatgattacaggtgatcagttggctatagctaaggagactggccggagactaggaatgggcacaaacatgtatccttcttcatcattgctgggtgacaaaaaaggtgacatcgcagttctaccagtggacgaattgattgagcaagcggatggatttgctggagttttcccagagcacaaatacgagattgtgcagaggttgcaagccagaaagcacatatgtgggatgactggagatggagttaatgatgcacctgctttgaagatagcagatattggtattgctgtggctgatgctactgatgctgctcgaggtgcttctgacatagttctgacggaacctggattgagtgtcatcatcagtgctgtactaaccagtcgggcaattttccaaagaatgaagaattatactatatatgctgtatctataaccatacgtattgtgcttgggtttttgctcttggcatgcttttggaagtttgacttccctccgatgcttgttcttgtgatagctattcttaatgatggaactattatgactatatccaaagacaaggtgaggccatctccccatccggacagttggaagctagcagagatatttgcaactggagtgatcattggggcgtatttggctgtaaccacggtgctgttcttttgggtaatttacaagacggagttttttgtgagggttttccacgttagaacaatgaatagaaaaaagatcgaagaaacaggagaccagaatctacttgccgacaacatggagatgctggcctctgcagtgtaccttcaagtgagcaccattagccaggcgttgatatttgtgacgaggtcgaggggttggtccttcatggagaggcctggcctgctgctgatggccgcattcgtgatagctcagctgatcgcgtctgtgcttgctgccatggtgagctgggagcttgctggcatcaaaggcatcgggtggcgttggaccggcgtgatctggctgtacaacttggttgtgtacctgctgctggacccgatcaagttcgcggtgcggtacgggctgagcggcaaggcctggaacctggtgatcgaccacaaggtggccttcacgaaccgcaaggactttgggaaggaggcccgggaggcggcatgggcgcacgagcagcgcacactgcatgggctggagagcgccgggacccctggggagaaagcggcgtcggtggagctggggcagatggcggaggacgcccggcggcgcgcggagatcgccaggctgcgggagctgcacaccctcaagggcaaggtggaatcggtggtgaagctcaaagggctggacctggaggacatcaacaaccagcactacacggtgtaagtgtaaccgccgtgattgattcgtcatagcctccttatcttagagagagggatataaagtaataattggatgcaataaccatctgattggttgcccccactatcttgtcctaaactatcacatgcgttgattttatcttaaacttctgtttggttctttgtacgtgaaagacgtaagttgcatatcatttttgttgcacccgtagataggaaacaaatcattttctgtttgatataaagtagtaattggatcgttagtaaccggtctgatttgct

SEQ ID NO: 20 - DNA, 3597 bp, Zea Mays
gcggtgatgattgcgatgacgattattaatccattgccagccggttcgttgaccgccacgtcaccgtcgtcgtcttccttgcgtccgtccgtccgtcctctccatcaattgcaattggttggaaggttggagagatttgatttgctggttgtactactgtcgaaccccagcccgtccgtaccctacgcatcttcctctcccatccatccactctttgcttcatcgatccccactgctgtgctgtgctgtgctgcgtagcttatccgaggggacaggtgagggagtcgagggggacggcgcatgaaagaaagagaccgagggggaggcggcgagagcgagaaggcaccgccgacggcgagacctaggatgcagacaaggccaaatccacatcgatggagccaagcccgatggccgttggtgttggcggcccaaagaggaggtggacgcgcagtcggaggcggaggagcatgtccctgtggaggaggtcttcgagcatctcaaatgcacccgcgacggcctaacctccgccgctgcccaggataggatcgacgcctttggctacaacaagctggaagagaagcaggaaagcaaagtgctcaagttcctgggcttcatgtggaaccccctttcctgggtcatggaggcagcagccataatggctatcgcccttgctcatggcggcagagatgttaggggaaagccaatggggatagactaccatgactttgtcggaattatgttactgctcattatcaattccaccattagcttcatagaggaaaacaatgccgggaatgctgctgctgcgcttatggcccgcctcgcaccaaaatccaaggttttacgtgatggaacctggagtgaaatggacgcatctttgttggtgcccggtgacataatcagcattaaacttggagacatcattccggcagatgcgcgtcttctcgagggagatccgctgaaaattgaccagtctgcacttacgggagaatcgctacctgtaaccaaacaacctggtgacgggatctactctggttcaacctgtaagcaaggtgaaatagaagcagttgttattgccactggaatccatactttcttcggaaaagcagctcatctggttgagtcaaccactcatgttggccactttcagaaggttctcacatcaattggaaacttctgcatttgctcaattgctgctggaatgactattgagttaatcgtgatgtacgctattcatgcaagagaataccgtcagattgttgataacctcctagtgcttcttatcggaggaattccaattgccatgcccacggttctctctgtcactatggctattggatcacacaaactagcacagcagggtgccattaccaagaggatgactgccatagaagaaatggctggaatggatgtcctttgcagtgacaaaacaggaactctgacactcaacaaactaagcgttgacaagaatttaattgaggtttttgctcgaggcatggagaaggatgacgttgtcttaatggccgcaagagcttctagactagagaatcaagatgctattgattttgctattgtttcaatgttgccagatccgaaagaggcgcgtgccggcattcaagaagttcatttcctcccattcaatccaactgacaagagaacagcacttacatacttagacgctaggggtaaaatgcacagggttagcaaaggcgctcctgaacagatcctgaacctagcatcgaacaagtctgagattgaaaggaaggtccatcattctattggcaattatgcagagagagggctacgatcgcttgctgttgcctatcaggaagtacctgaagggactaaggaaagttctggtgggccttggcaatttattggtcttctcccactctttgatcctcctcgccatgacagtgctgaaactatacgcagagctcttgaccttggagtcagtgtaaaaatgattacaggtgatcagttggctatagctaaggagactggccggagactaggaatgggcacaaacatgtatccttcttcatcattgctgggtgacaaaaaaggtgacatcgcagttctaccagtggacgaattgattgagcaagcggatggatttgctggagttttcccagagcacaaatacgagattgtgcagaggttgcaagccagaaagcacatatgtgggatgactggagatggagttaatgatgcacctgctttgaagatagcagatattggtattgctgtggctgatgctactgatgctgctcgaggtgcttctgacatagttctgacggaacctggattgagtgtcatcatcagtgctgtactaaccagtcgggcaattttccaaagaatgaagaattatactatatatgctgtatctataaccatacgtattgtgcttgggtttttgctcttggcatgcttttggaagtttgacttccctccgatgcttgttcttgtgatagctattcttaatgatggaactattatgactatatccaaagacaaggtgaggccatctccccatccggacagttggaagctagcagagatatttgcaactggagtgatcattggggcgtatttggctgtaaccacggtgctgttcttttgggtaatttacaagacggagttttttgtgagggttttccacgttagaacaatgaatagaaaaaagatcgaagaaacaggagaccagaatctacttgccgacaacatggagatgctggcctctgcagtgtaccttcaagtgagcaccattagccaggcgttgatatttgtgacgaggtcgaggggttggtccttcatggagaggcctggcctgctgctgatggccgcattcgtgatagctcagctgatcgcgtctgtgcttgctgccatggtgagctgggagcttgctggcatcaaaggcatcgggtggcgttggaccggcgtgatctggctgtacaacttggttgtgtacctgctgctggacccgatcaagttcgcggtgcggtacgggctgagcggcaaggcctggaacctggtgatcgaccacaaggtggccttcacgaaccgcaaggactttgggaaggaggcccgggaggcggcatgggcgcacgagcagcgcacactgcatgggctggagagcgccgggacccctggggagaaagcggcgtcggtggagctggggcagatggcggaggacgcccggcggcgcgcggagatcgccaggctgcgggagctgcacaccctcaagggcaaggtggaatcggtggtgaagctcaaagggctggacctggaggacatcaacaaccagcactacacggtgtaagtgtaaccgccgtgattgattcgtcatagcctccttatcttagagagagggatataaagtaataattggatgcaataaccatctgattggttgcccccactatcttgtcctaaactatcacatgcgttgattttatcttaaacttctgtttggttctttgtacgtgaaagacgtaagttgcatatcatttttgttgcacccgtagataggaaacaaatcattttctgtttgatataaagtagtaattggatcgttagtaaccggtctgatttgct

SEQ ID NO: 21 - DNA, 3744 bp, Zea Mays
gcggtgatgattgcgatgacgattattaatccattgccagccggttcgttgaccgccacgtcaccgtcgtcgtcttccttgcgtccgtccgtccgtcctctccatcaattgcaattggttggaaggttggagagatttgatttgctggttgtactactgtcgaaccccagcccgtccgtaccctacgcatcttcctctcccatccatccactctttgcttcatcgatccccactgctgtgctgtgctgtgctgcgtagcttatccgaggggacaggtgagggagtcgagggggacggcgcatgaaagaaagagaccgagggggaggcggcgagagcgagaaggcaccgccgacggcgagacctaggatgcagacaaggccaaatccacatcgatggagccaagcccgatggccgttggtgttggcggcccaaagaggaggtggacgcgcagtcggaggcggaggtgcgtatgcccatcgtcgccatctagctgcgcctccttatatgcccctccggctccgattagcttacctccatcgatctccccaccatggacgccaacgccaatgccctcggcatggacgctatcaccaacgaaaccgtcgacctggagcatgtccctgtggaggaggtcttcgagcatctcaaatgcacccgcgacggcctaacctccgccgctgcccaggataggatcgacgcctttggctacaacaagctggaagagaagcaggaaagcaaagtgctcaagttcctgggcttcatgtggaaccccctttcctgggtcatggaggcagcagccataatggctatcgcccttgctcatggcggcagagatgttaggggaaagccaatggggatagactaccatgactttgtcggaattatgttactgctcattatcaattccaccattagcttcatagaggaaaacaatgccgggaatgctgctgctgcgcttatggcccgcctcgcaccaaaatccaaggttttacgtgatggaacctggagtgaaatggacgcatctttgttggtgcccggtgacataatcagcattaaacttggagacatcattccggcagatgcgcgtcttctcgagggagatccgctgaaaattgaccagtctgcacttacgggagaatcgctacctgtaaccaaacaacctggtgacgggatctactctggttcaacctgtaagcaaggtgaaatagaagcagttgttattgccactggaatccatactttcttcggaaaagcagctcatctggttgagtcaaccactcatgttggccactttcagaaggttctcacatcaattggaaacttctgcatttgctcaattgctgctggaatgactattgagttaatcgtgatgtacgctattcatgcaagagaataccgtcagattgttgataacctcctagtgcttcttatcggaggaattccaattgccatgcccacggttctctctgtcactatggctattggatcacacaaactagcacagcagggtgccattaccaagaggatgactgccatagaagaaatggctggaatggatgtcctttgcagtgacaaaacaggaactctgacactcaacaaactaagcgttgacaagaatttaattgaggtttttgctcgaggcatggagaaggatgacgttgtcttaatggccgcaagagcttctagactagagaatcaagatgctattgattttgctattgtttcaatgttgccagatccgaaagaggcgcgtgccggcattcaagaagttcatttcctcccattcaatccaactgacaagagaacagcacttacatacttagacgctaggggtaaaatgcacagggttagcaaaggcgctcctgaacagatcctgaacctagcatcgaacaagtctgagattgaaaggaaggtccatcattctattggcaattatgcagagagagggctacgatcgcttgctgttgcctatcaggaagtacctgaagggactaaggaaagttctggtgggccttggcaatttattggtcttctcccactctttgatcctcctcgccatgacagtgctgaaactatacgcagagctcttgaccttggagtcagtgtaaaaatgattacaggtgatcagttggctatagctaaggagactggccggagactaggaatgggcacaaacatgtatccttcttcatcattgctgggtgacaaaaaaggtgacatcgcagttctaccagtggacgaattgattgagcaagcggatggatttgctggagttttcccagagcacaaatacgagattgtgcagaggttgcaagccagaaagcacatatgtgggatgactggagatggagttaatgatgcacctgctttgaagatagcagatattggtattgctgtggctgatgctactgatgctgctcgaggtgcttctgacatagttctgacggaacctggattgagtgtcatcatcagtgctgtactaaccagtcgggcaattttccaaagaatgaagaattatactatatatgctgtatctataaccatacgtattgtgcttgggtttttgctcttggcatgcttttggaagtttgacttccctccgatgcttgttcttgtgatagctattcttaatgatggaactattatgactatatccaaagacaaggtgaggccatctccccatccggacagttggaagctagcagagatatttgcaactggagtgatcattggggcgtatttggctgtaaccacggtgctgttcttttgggtaatttacaagacggagttttttgtgagggttttccacgttagaacaatgaatagaaaaaagatcgaagaaacaggagaccagaatctacttgccgacaacatggagatgctggcctctgcagtgtaccttcaagtgagcaccattagccaggcgttgatatttgtgacgaggtcgaggggttggtccttcatggagaggcctggcctgctgctgatggccgcattcgtgatagctcagctgatcgcgtctgtgcttgctgccatggtgagctgggagcttgctggcatcaaaggcatcgggtggcgttggaccggcgtgatctggctgtacaacttggttgtgtacctgctgctggacccgatcaagttcgcggtgcggtacgggctgagcggcaaggcctggaacctggtgatcgaccacaaggtggccttcacgaaccgcaaggactttgggaaggaggcccgggaggcggcatgggcgcacgagcagcgcacactgcatgggctggagagcgccgggacccctggggagaaagcggcgtcggtggagctggggcagatggcggaggacgcccggcggcgcgcggagatcgccaggctgcgggagctgcacaccctcaagggcaaggtggaatcggtggtgaagctcaaagggctggacctggaggacatcaacaaccagcactacacggtgtaagtgtaaccgccgtgattgattcgtcatagcctccttatcttagagagagggatataaagtaataattggatgcaataaccatctgattggttgcccccactatcttgtcctaaactatcacatgcgttgattttatcttaaacttctgtttggttctttgtacgtgaaagacgtaagttgcatatcatttttgttgcacccgtagataggaaacaaatcattttctgtttgatataaagtagtaattggatcgttagtaaccggtctgatttgct

SEQ ID NO: 22 - DNA, 3489 bp, Zea Mays
gcggtgatgattgcgatgacgattattaatccattgccagccggttcgttgaccgccacgtcaccgtcgtcgtcttccttgcgtccgtccgtccgtcctctccatcaattgcaattggttggaaggttggagagatttgatttgctggttgtactactgtcgaaccccagcccgtccgtaccctacgcatcttcctctcccatccatccactctttgcttcatcgatccccactgctgtgctgtgctgtgctgcgtagcttatccgaggggacaggtgagggagtcgagggggacggcgcatgaaagaaagagaccgagggggaggcggcgagagcgagaaggcaccgccgacggcgagacctaggatgcagacaaggccaaatccacatcgatggagccaagcccgatggccgttggtgttggcggcccaaagaggaggtggacgcgcagtcggaggcggaggtgcgtatgcccatcgtcgccatctagctgcgcctccttatatgcccctccggctccgattagcttacctccatcgatctccccaccatggacgccaacgccaatgccctcggcatggacgctatcaccaacgaaaccgtcgacctggagcatgtccctgtggaggaggtcttcgagcatctcaaatgcacccgcgacggcctaacctccgccgctgcccaggataggatcgacgcctttggctacaacaagctggaagagaagcaggaaagcaaagtgctcaagttcctgggcttcatgtggaaccccctttcctgggtcatggaggcagcagccataatggctatcgcccttgctcatggcggcagagatgttaggggaaagccaatggggatagactaccatgactttgtcggaattatgttactgctcattatcaattccaccattagcttcatagaggaaaacaatgccgggaatgctgctgctgcgcttatggcccgcctcgcaccaaaatccaaggttttacgtgatggaacctggagtgaaatggacgcatctttgttggtgcccggtgacataatcagcattaaacttggagacatcattccggcagatgcgcgtcttctcgagggagatccgctgaaaattgaccagtctgcacttacgggagaatcgctacctgtaaccaaacaacctggtgacgggatctactctggttcaacctgtaagcaaggtgaaatagaagcagttgttattgccactggaatccatactttcttcggaaaagcagctcatctggttgagtcaaccactcatgttggccactttcagaaggttctcacatcaattggaaacttctgcatttgctcaattgctgctggaatgactattgagttaatcgtgatgtacgctattcatgcaagagaataccgtcagattgttgataacctcctagtgcttcttatcggaggaattccaattgccatgcccacggttctctctgtcactatggctattggatcacacaaactagcacagcagggtgccattaccaagaggatgactgccatagaagaaatggctggaatggatgtcctttgcagtgacaaaacaggaactctgacactcaacaaactaagcgttgacaagaatttaattgaggtttttgctcgaggcatggagaaggatgacgttgtcttaatggccgcaagagcttctagactagagaatcaagatgctattgattttgctattgtttcaatgttgccagatccgaaagaggcgcgtgccggcattcaagaagttcatttcctcccattcaatccaactgacaagagaacagcacttacatacttagacgctaggggtaaaatgcacagggttagcaaaggcgctcctgaacagatcctgaacctagcatcgaacaagtctgagattgaaaggaaggtccatcattctattggcaattatgcagagagagggctacgatcgcttgctgttgcctatcaggaagtacctgaagggactaaggaaagttctggtgggccttggcaatttattggtcttctcccactctttgatcctcctcgccatgacagtgctgaaactatacgcagagctcttgaccttggagtcagtgtaaaaatgattacaggtgatcagttggctatagctaaggagactggccggagactaggaatgggcacaaacatgtatccttcttcatcattgctgggtgacaaaaaaggtgacatcgcagttctaccagtggacgaattgattgagcaagcggatggatttgctggagttttcccagagcacaaatacgagattgtgcagaggttgcaagccagaaagcacatatgtgggatgactggagatggagttaatgatgcacctgctttgaagatagcagatattggtattgctgtggctgatgctactgatgctgctcgaggtgcttctgacatagttctgacggaacctggattgagtgtcatcatcagtgctgtactaaccagtcgggcaattttccaaagaatgaagaattatactatatatgctgtatctataaccatacgtattgtgcttgggtttttgctcttggcatgcttttggaagtttgacttccctccgatgcttgttcttgtgatagctattcttaatgatggaactattatgactatatccaaagacaaggtgaggccatctccccatccggacagttggaagctagcagagatatttgcaactggagtgatcattggggcgtatttggctgtaaccacggtgctgttcttttgggtaatttacaagacggagttttttgtgagggttttccacgttagaacaatgaatagaaaaaagatcgaagaaacaggagaccagaatctacttgccgacaacatggagatgctggcctctgcagtgtaccttcaagtgagcaccattagccaggcgttgatatttgtgacgaggtcgaggggttggtccttcatggagaggcctggcctgctgctgatggccgcattcgtgatagctcagctgatcgcgtctgtgcttgctgccatggtgagctgggagcttgctggcatcaaaggcatcgggtggcgttggaccggcgtgatctggctgtacaacttggttgtgtacctgctgctggacccgatcaagttcgcggtgcggtacgggctgagcggcaaggcctggaacctggtgatcgaccacaaggtggccttcacgaaccgcaaggactttgggaaggaggcccgggaggcggcatgggcgcacgagcagcgcacactgcatgggctggagagcgccgggacccctggggagaaagcggcgtcggtggagctggggcagatggcggaggacgcccggcggcgcgcggagatcgccaggctgcgggagctgcacaccctcaagggcaaggtggaatcggtggtgaagctcaaagggctggacctggaggacatcaacaaccagcactacacggtgtccggtcgtactggtgatactga

SEQ ID NO: 23 - DNA, 1862 bp, Zea Mays
cctactttattactgtacctgacgtccatggcatggagtatggctttggagctcatgaataccccaccagcggagtcttccaagtagaacccaaaagctgccccgggtttatcttcaggcgctctgtgtgtgtgggtgtaactcacatgtcccgttcccaagtccgcacttccatagaggatctcgccgaggattatcatggggacacttatcatttgattctcaagaactgcaatcatttcacagcagatgtctgcgagcgtttgaccgggaagccagtacctggatgggtgaatcgactcgccagattaggtcccatatcatttcacaatcaatctgttgctccttgatgctgattcattctcaactccttcagccgtcatcctgttggaattgcaggttccttcttcaattgtgtattgcctgacagcatcaaggtttcagcagtcagagatgtaaatgcacatccagatttttctggtactctacctacacccagtttaactacttgtaccttcacattcacatcacatggttggaatttgaccttacagaatcctgtaccactttattaaagattgagacagacattgcttccaacagtagagtggtctgcgtcgcataagtggctgtatttagctaaaaaaagataaagcaaattatcttatgtttatatggtcttgcatttcaatgaagacattgaaacaaccttgaattgtttaaaacttatattatgtagcctgccaacacagaattgttaggaaattatctgatatgtctcatcttttcttgaaagtaagaaggacagacctggtgcagtggtgagagccgtcttattgagtcaatcgggttgcggattcaaagcagcctttttgcatttgcggaaaaggcccttcccagacccgactcatgtaggagcctctggcactaggtctgcccatcttttcttggaaatggaaagaccaagtttcagatgtgttccttttcacatctgaaagggtgtcaacaaaagttgatatgcttcatccatcttcccattctgaacatgatgctcattgcttgtctccgactcctctgcaaaccatgaattccatcactgctcctgaaatttcgctgggccttcgtttgttggtattgctgcagatgatggcttggggtccaatgcctcgatccttgagggaagtgatgacgatgatttagaccaactcctaagaacacctaacagcgacactgtgtcttcaagggacaagacattaactcctggcagggatagtctctaattgttctcctttgatagcaaaatagaggcaagtgctttgatgttcacgtctcatggtggtatggggttggcctgatcatatcatcatctgctgtcaaaatttggtggcgcgctagtctggggtgatgaaggattgtttgatattgttgctattatcagttgttgaggttgatatagctgcctatagtgttaatgtgatcatactttgttgtggtattatcatgtggcgaaggccaagttaaccagcatgtcatggttgtttgtgtgcgccggtgtttgtagtgtggcatattgtctgagtaagtagagggtttggctagtcatctcacgtgacctttcctttgaaacgatgatggtgtgtataagtgatttcttctgtacaaaaattattgacagagtttgaaatggttttccagatatattatttgtgatctgaactcaggcatggactcgcacgtaacctatcctctactggagcgaataccgttcccgttcagtaacacacacatagtttaaaaagccatttatttatgcatgccgctgatttcagctatcaattacaatacaagctatattacgtaag

SEQ ID NO: 24 - DNA, 758 bp, Zea Mays
cttcccagacccgactcatgtaggagcctctggcactagatgatggcttggggtccaatgcctcgatccttgagggaagtgatgacgatgatttagaccaactcctaagaacacctaacagcgacactgtgtcttcaagggacaagacattaactcctggcagggatagtctctaattgttctcctttgatagcaaaatagaggcaagtgctttgatgttcacgtctcatggtggtatggggttggcctgatcatatcatcatctgctgtcaaaatttggtggcgcgctagtctggggtgatgaaggattgtttgatattgttgctattatcagttgttgaggttgatatagctgcctatagtgttaatgtgatcatactttgttgtggtattatcatgtggcgaaggccaagttaaccagcatgtcatggttgtttgtgtgcgccggtgtttgtagtgtggcatattgtctgagtaagtagagggtttggctagtcatctcacgtgacctttcctttgaaacgatgatggtgtgtataagtgatttcttctgtacaaaaattattgacagagtttgaaatggttttccagatatattatttgtgatctgaactcaggcatggactcgcacgtaacctatcctctactggagcgaataccgttcccgttcagtaacacacacatagtttaaaaagccatttatttatgcatgccgctgatttcagctatcaattacaatacaagctatattacgtaag

SEQ ID NO: 25 - DNA, 559 bp, Zea Mays
ggggaaaggaaaaggggaagttctcgccagcgtgctgccttgcaagctgctaactagaataggaatccgacgtcgcccccgcccccccctgtgaaaattcgtgatgcggagaacagctaccgccgccctcgtcctcgtccccctcctcgctgcggcggtacagacctccgccctgcctttcatcgtcctgcacgggattggggaccagtgcgtcaaccatggcgttgccaagttcactaaacttctcgccgattggtccggctccgacggctactgcctagagattggcagaggaacatgggactcttgggtcatgcctcttcaacaacaggctgatataatctgcaacaaggtcaaggaaatgaaacaactgagaggtggctacaacatagttggtctgtctcaggggaacttgattggtcgagcagtggttgagtactgtgatgatggaccgccggtcaagaatttcatctctctaggaggtcctcatgctggtaccgcttcagtgcctctttgtggtcctgtatgattcagttgatatctgtatattatatatgca

SEQ ID NO: 26 - DNA, 2019 bp, Zea Mays
ggggaaaggaaaaggggaagttctcgccagcgtgctgccttgcaagctgctaactagaataggaatccgacgtcgcccccgcccccccctgtgaaaattcgtgatgcggagaacagctaccgccgccctcgtcctcgtccccctcctcgctgcggcggtacagacctccgccctgcctttcatcgtcctgcacgggattggggaccagtgcgtcaaccatggcgttgccaagttcactaaacttctcgccgattggtccggctccgacggctactgcctagagattggcagaggaacatgggactcttgggtcatgcctcttcaacaacaggctgatataatctgcaacaaggtcaaggaaatgaaacaactgagaggtggctacaacatagttggtctgtctcaggggaacttgattggtcgagcagtggttgagtactgtgatgatggaccgccgttatgatccagatcgcacctggcaggtcaagaatttcatctctctaggaggtcctcatgctggtaccgcttcagtgcctctttgtggttctggatttttttgcattattgttgatgctctgatcaaattggagatctactcagactatgtgcaggaacatcttgcacctagtggctacctcaaaatcccaactgatatggcagattatctgaagagttgtaggtttcttccaaaacttaacaatgaaattccagataaaagaaatgccacctacaaggaaagattcagtagcttagagaatttggttctgattatgtttcaggatgatgcagtcctgataccacgagaaacggcatggtttggttactaccctgatggagcctttgatccagttctaccacctcagaagacgaaactgtatgaggaagactggattggtttgaagacactggatgaagcagggcgggtgaagtttgtgtctgtgccgggaggtcatcttggtatctccaaaggtgacatgaagaagtacattgtgccttacctgacaaacaaaaaggcatcggtgacggtttctgatttgctagttgccatttggcacgctgtgcttgggctggcactggcagagggtgatgacgctgttttgatttgatgcatgggcttccgacagtggcttggattgttacgctgcctctgcttggttggcttggcactcagtcacaaataagattcatctcatctcatattctgttctgttggaaggccctttgattcatggtcacagaaataacagaatgcatgcatgcatgcatccaactagctagctagcttatagtcggagacaatctgtgcggtgcagctagttaattatctatctatacagggcaggcccatgccatgagtattgttgatgatgactatgttgtggtggacgtggacgacagagctatggttcctgctgcttcctctctcggttgctcccctgctgcatcttcgtctacaatccttttccaaaaccagtgggtcctccagacctgttccatctgctccatgggcagctgcttggtctccggcaggaagaaatacacgaagagcgtcatgacgcacacccagccgccgaagaggaagaaggtgccgaacttgaggtggcacagcatcgccaggaaggtctggccgatgaggaaggtgacgaagaagatgacggcgatgacgacgctctgccccgccgacctgatctccagcgggcagatctcggtgggcaccaggtaggtgagagggccccaggaccaggcgaagcccgcgacgaagacgcacatgatgacgagcaccaggtacgcgtactccttctccatccctccgtgctcctggaacttggcggccagcaccgctcccaccatggcctgcgacaggatcatctgcacgccgcccaccaggaagagcttccggcggccgaacctgtccacgaccaccatggccaccacgttggcggccgtggcgcagacgcgcgtgaccacggccgacatgagggacgcgctctccttgagcccgatggtccggaacatgac

SEQ ID NO: 27 - DNA, 1984 bp, Zea Mays
ggggaaaggaaaaggggaagttctcgccagcgtgctgccttgcaagctgctaactagaataggaatccgacgtcgcccccgcccccccctgtgaaaattcgtgatgcggagaacagctaccgccgccctcgtcctcgtccccctcctcgctgcggcggtacagacctccgccctgcctttcatcgtcctgcacgggattggggaccagtgcgtcaaccatggcgttgccaagttcactaaacttctcgccgattggtccggctccgacggctactgcctagagattggcagaggaacatgggactcttgggtcatgcctcttcaacaacaggctgatataatctgcaacaaggtcaaggaaatgaaacaactgagaggtggctacaacatagttggtctgtctcaggggaacttgattggtcgagcagtggttgagtactgtgatgatggaccgccggtcaagaatttcatctctctaggaggtcctcatgctggtaccgcttcagtgcctctttgtggttctggatttttttgcattattgttgatgctctgatcaaattggagatctactcagactatgtgcaggaacatcttgcacctagtggctacctcaaaatcccaactattatctgaagagttgtaggtttcttccaaaacttaacaatgaaattccagataaaagaaatgccacctacaaggaaagattcagtagcttagagaatttggttctgattatgtttcaggatgatgcagtcctgataccacgagaaacggcatggtttggttactaccctgatggagcctttgatccagttctaccacctcagaagacgaaactgtatgaggaagactggattggtttgaagacactggatgaagcagggcgggtgaagtttgtgtctgtgccgggaggtcatcttggtatctccaaaggtgacatgaagaagtacattgtgccttacctgacaaacaaaaaggcatcggtgacggtttctgatttgctagttgccatttggcacgctgtgcttgggctggcactggcagagggtgatgacgctgttttgatttgatgcatgggcttccgacagtggcttggattgttacgctgcctctgcttggttggcttggcactcagtcacaaataagattcatctcatctcatattctgttctgttggaaggccctttgattcatggtcacagaaataacagaatgcatgcatgcatgcatccaactagctagctagcttatagtcggagacaatctgtgcggtgcagctagttaattatctatctatacagggcaggcccatgccatgagtattgttgatgatgactatgttgtggtggacgtggacgacagagctatggttcctgctgcttcctctctcggttgctcccctgctgcatcttcgtctacaatccttttccaaaaccagtgggtcctccagacctgttccatctgctccatgggcagctgcttggtctccggcaggaagaaatacacgaagagcgtcatgacgcacacccagccgccgaagaggaagaaggtgccgaacttgaggtggcacagcatcgccaggaaggtctggccgatgaggaaggtgacgaagaagatgacggcgatgacgacgctctgccccgccgacctgatctccagcgggcagatctcggtgggcaccaggtaggtgagagggccccaggaccaggcgaagcccgcgacgaagacgcacatgatgacgagcaccaggtacgcgtactccttctccatccctccgtgctcctggaacttggcggccagcaccgctcccaccatggcctgcgacaggatcatctgcacgccgcccaccaggaagagcttccggcggccgaacctgtccacgaccaccatggccaccacgttggcggccgtggcgcagacgcgcgtgaccacggccgacatgagggacgcgctctccttgagcccgatggtccggaacatgac

SEQ ID NO: 28 - DNA, 1883 bp, Zea Mays
agcagactgctcttcatgatcaaacagtgtactcgaaaagtgtgatccctccctagtactcctaccaacgtatcctaatcttcgattcaactattaagccctatccggcacctctgtccagttcaagggaaaacatgagtataaaggatccgataaactatttagcacaatcgatgcttcaagattaaatcaccacaaaaatggttagtgagatagccagaccaacaaagcaacaactgaattattgcttgcacacaaaaacacagagttcatttgtccagcgacaatattagcagaagacaactgctattctcgttggacagaaaaacgacatgtcccttcatttccaacgatagacctatgcagaaagttagaatcttttaatggtatagatccaattattctattttaaaatgttagaacaatgctaggtgggctatagtgttatcatttcttaattttggtagcagcaaggcacaaaataacaactgaatatctacaagtaatataaacagatttaggctgcaacaaccatggcaaggagttcttcactcaacaagcaagcaatttttcaagattcagaccaccatataatatatgtcaatatgaaaactacgtgcatattatctgcaaatcgaaagttgaaacatgaatgtgatccaaactgtttaaataaaaaactgaaaaatgaaaatctaaaatctggaaactgggcgtcaaatttcagcttataagctgaaaatctgaaaatatgatgtgatccaaactgactaagtttttagatttgaacaggatgcctagcccgttgtatgagtcacattcagttttcagcatgtcttggatgaaatgaaatgtatgtgctaactgaaaatatgaaaaagtatgggcttaatgttatccaaacaaaaatctggaaactaaaatgtatggactggataccgggaactgtatttgatcaaagcagagtacggacatgaactgaaacaatgatgtctgagctgtttgtagggatatttgttcagctatttctgcttggtgtgttatccaagtagtaaacgaagtatgcttgatcggctataatcttgtaacaaagacgtgctactactttaacaccccataatttataactgcttattaacacagaataaacacccacgcctaataatgaagtaggaacaagtatatattagatgactaacaataatgaagtaaaattagaagtactcgtaggtcaaaacattaaacacccactcccacccaccttattctcaaaattgtcatgactattttctagctttttcaaaaatagtagtggtaactttatgtgtacaataaaatagttcattttcagaaacaaacgttatattaaggaccatgataataatctgtgaactttgacatgttcaattttagccaaaagcttttttcatgccatctatcgggtactggccctcacacacatttgaaaatcgaggaataaactgagcttcctaatgagtaggagacatatgccaagaaataacaaatgaagcaccccagagcacatcagcaaaacaaactcacgcccttgcatttcgcctttctagttttcagcaacgttgtcacgttaaaactatcaagcaattaaaatacgagagcaaatgctattgacatcgtcattccacattagcatctaattcacggaggtgcaccagccatgatttctatttactgctattgaaacgacctccgcgacaaaatgagcggctgaacaaaatttgagcggcacaagagtggaggaaagaagaataccatcttggagagtctcttcttgcgcttggtgtttttcttggcgagcaagtgttgcttcccagcgcaccgccgcatgatcttgtccttccttg

SEQ ID NO: 29 - DNA, 3505 bp, Zea Mays
taccgtgaaacattactacctactatttagttaccatgattggactatcctcctctttctggttataaacatggagaacttaaatcatctgaaaagaacacatgggagggatgagaataatcacaggaaaataatgcaagaaaactatatacacacctccttcctcccgttagcacggtcagagagcatactatggcagcctcaaatcctacagtgttaagcagagtcactaagttacttaacatccttttttcgaaagcatattcatgtttagcaaccttaccatggtatccaactcaactcgtacatataactattcaaaatgacaccaaaattgaaatgagtttaggtcaaggtccaagtttgatgagctgttcagaaaatttagttttaagtacaataatatatctatttcctaaaatttataagatggttgtcataatttttctgattaaaaacccatcagatttaatcacagatgcacataccaacagctgacttaggtttccctcatccatacgaatttatcaagtattaccatcatatgccagtagcttattagaacaaccccatactgtaataaaaaataagacctgaattcttggaggtcatttccaaataaaagcatcagatgtcctgtaaaagtagcccaggagttgtgaagatgtcatgcttgcaaatatctagacagatttaacaaattgagctagggcgatagattctatctggccatgataaggtgtataagattggtatccgcatatctggccatcccaattgagctaaagcagatgaatcctgggaaaatagaagaacatgaataacaagcctaataaagatcagcccaggccatctgatacacagatttaacaaatttatctccatattgcaatttaagcacaatccacctataaaattaatccagcagttacttttaaatggtagcagtagattatctagcttttaacaatctggcacactaatctctagtgtcatatagatagtacaagtttttgtgtattgaacacatttatccaatctaaccctaccagataagtcatagaccatagattcacaaatggcagattccaatcaacatgacattgtaaccaactgagccaaatttagcctgagtgtggaataagtgttgtagtaaaaaactgtgcaaccataggcgcctatttcagaactgtgcagatgctcacctagcaaactgaagcctttggcccacagatcggcgaacatctcctgcagaaattgacacacaccaaaaagcaaaacaacacaccactacatcttaaccatttggataactatatgtgagatagtcaactaaatggaactccctattagctacaagtaaatagccagctgaaacaagtgtttccaagtgaatataattctcagtgtaataactaaaccgtctaagctagaagatgaataaaacgccacaaagtgatgaaacctatccttaggaccaactcaggaacaagctagcctagatctccatcgtcaaaaatatcataatagaattgtcactcaccaaaaaggtcactgattttcttattacaagatatatgtatcatggtttgaggaacattgctcgaaagaatagcaagaacaataatatttactgtcagctaactttaatgcactgatccaggtgatccctccctagtactcctaccaacgtatcctaatcttcgattcaactattaagccctatccggcacctctgtccagttcaagggaaaacatgagtataaaggatccgataaactatttagcacaatcgatgcttcaagattaaatcaccacaaaaatggttagtgagatagccagaccaacaaagcaacaactgaattattgcttgcacacaaaaacacagagttcatttgtccagcgacaatattagcagaagacaactgctattctcgttggacagaaaaacgacatgtcccttcatttccaacgatagacctatgcagaaagttagaatcttttaatggtatagatccaattattctattttaaaatgttagaacaatgctaggtgggctatagtgttatcatttcttaattttggtagcagcaaggcacaaaataacaactgaatatctacaagtaatataaacagatttaggctgcaacaaccatggcaaggagttcttcactcaacaagcaagcaatttttcaagattcagaccaccatataatatatgtcaatatgaaaactacgtgcatattatctgcaaatcgaaagttgaaacatgaatgtgatccaaactgtttaaataaaaaactgaaaaatgaaaatctaaaatctggaaactgggcgtcaaatttcagcttataagctgaaaatctgaaaatatgatgtgatccaaactgactaagtttttagatttgaacaggatgcctagcccgttgtatgagtcacattcagttttcagcatgtcttggatgaaatgaaatgtatgtgctaactgaaaatatgaaaaagtatgggcttaatgttatccaaacaaaaatctggaaactaaaatgtatggactggataccgggaactgtatttgatcaaagcagagtacggacatgaactgaaacaatgatgtctgagctgtttgtagggatatttgttcagctatttctgcttggtgtgttatccaagtagtaaacgaagtatgcttgatcggctataatcttgtaacaaagacgtgctactactttaacaccccataatttataactgcttattaacacagaataaacacccacgcctaataatgaagtaggaacaagtatatattagatgactaacaataatgaagtaaaattagaagtactcgtaggtcaaaacattaaacacccactcccacccaccttattctcaaaattgtcatgactattttctagctttttcaaaaatagtagtggtaactttatgtgtacaataaaatagttcattttcagaaacaaacgttatattaaggaccatgataataatctgtgaactttgacatgttcaattttagccaaaagcttttttcatgccatctatcgggtactggccctcacacacatttgaaaatcgaggaataaactgagcttcctaatgagtaggagacatatgccaagaaataacaaatgaagcaccccagagcacatcagcaaaacaaactcacgcccttgcatttcgcctttctagttttcagcaacgttgtcacgttaaaactatcaagcaattaaaatacgagagcaaatgctattgacatcgtcattccacattagcatctaattcacggaggtgcaccagccatgatttctatttactgctattgaaacgacctccgcgacaaaatgagcggctgaacaaaatttgagcggcacaagagtggaggaaagaagaataccatcttggagagtctcttcttgcgcttggtgtttttcttggcgagcaagtgttgcttcccagcgcaccgccgcatgatcttgtccttccttg

SEQ ID NO: 30 - DNA, 2606 bp, Zea Mays
gatctattttacctgaacttttgaatactggggatgctttggagagataccaacaggttgcccaaaagctggaagccttgattgctaatgatggcaaagatgtggaaattcaggtgtgttagccgtgatgaggctgcattagcagtagcacaaaaggttttcaagagtttgtacgataacacatcaaataccacttatgtctcctggcttctagcaaccttagttgcaatacgagatgtctgcaagcttgttgtcaaagagttaacaagttgggtaatatattcagatgaagagaagaagtttaacattgatatcatttttggccttattcgttcggagttgctgaatattggggagtacaatgttcatttggcaaagttaattgatgggggaagaaataaggttgcaacggagtttgcaatgtcccttgtccaagcattgtttgctcatgatcctgttggcttcacagagtttcagaatgttcttgatgcactatcgaagcatacaaagagaccaggttcacctgaatcgttgcaacaattgattgaaatcgcaaggaataatgtgagcaccactactggttttgttgctgtgaaggatgaaaaggtcaaactgccgaaggataaaaaggttttagctacccgggcaaacaaggaggaaaacactgctaatgaaattacactagttgatccaaatcaggtggcagtcctgttttctgaatggtgtcagatgtgtaatcatgtaagtgctagtgatgcggcatacactcgttttgtcacacagttgcagcaagatggtctgctgaagggggatgatatctctgaacgcttcttccgtattctcacggaacttgctgttacacactctctagtctccgagcagatcgttgctcctggtggatcatctcagcaatcaccacagcaacctcacatttcatatttctccattgattcatatgcaaagcttgtggttatggttctcaagtactcagtggagataacaccaaataaagccagtatactttccaagatcctatctgttacagtgaggtccattcagaaagatgctgaggaaaagaaagcttcatttaatcctcgaccatacttccgattgtttataaattggctctatgatcttactactaccgatggtcaccatgatagttctaattttcaggttttgactgcatttgcaaatgcattccacatgctacaacccttgagagttcctgcctggagctttgcttggcttgagctggtgagtcacaggagcttcatgccaaaactgctgatgtgcaattcacagaaaggttggccattttttcagcgactgcttgttgctcttctcaagttcatggaaccatatctgagaaatgctgaactcccagaggcgatggaccttttatacaagggaactatgcgagttctgcttgtactactgcatgactttcctgaatttctttgtgattatcacttcagtttctgcgatgtgattccttcaagttgcattcaaatgcgcaatgtcattcttagtgcttttccacgtaacatgagactgccagacccttctacccctaatctaaagattgatttgttggctgaaatttcaatagcaccacgaatcatgtcggatgttgatggtgcccttaaatcaaagcagttgaagactgaggttgatgaatatctcaagaggccggaaggctcttcctttttaagtgacctgaaccaaaaattgctgctgcctcagaatgaagcaagtgttgctgggacacgctacaacgtgcctctgatcaattcacttgttttttatgttggcatccaagctgtgcaacaactgcaactgaacaaggctaatccgtctgcatcagtacagcagattaaccatatatctccgatggacattttccagattggaacagctaccgatatattcaggagtcttataacaagtttggatacagagggccgctaccttctgttgaatgcaatcgctaaccaactgcgctatccaaatagccatacacactactactccttcatcactctgtatctattttccgaggctacccaggaaattacccaggagcaaatcacaagggttcttctggagcgtctcatagtgaaccgcccccatccttgggggttacttattactttcattgaattgataaagaatccgcgttacaacttttggagccggtcttttacacactgtgcacctgagatagagaaactgttcgagtcggtggcaaggtcatgtggcgcaaaagttgtggacgaaggaatcagcgtgcaggatggcagccactaaagccatctgctttgttcaagtgttgtttttgtgctatttcttctctggcactggaaattttctgtgcttgtacagatcgtctgtatagtaaagctgttagtcacacgtgtcggtgcactgccaaaccttagcaggtgcctgggagaatgcttttgtttgtatgaattttagtcagcaatatggatggtttgcaatatcgctcgctgctacttcgcgccagtacaacagatccaggtttcattgaagaaaatgcctcatccataactgtaacctaactctctctctctctctctctc

SEQ ID NO: 31 - DNA, 2574 bp, Zea Mays
gatctattttacctgaacttttgaatactggggatgctttggagagataccaacaggttgcccaaaagctggaagccttgattgctaatgatggcaaagatgtggaaattcagtctgttattatggaagttcctgatatcttgcgtaggtgtgttagccgtgatgaggctgcattagcagtagcacaaaaggttttcaagagtttgtacgataacacatcaaataccacttatgtctcctggcttctagcaaccttagttgcaatacgagatgtctgcaagcttgttgtcaaagagttaacaagttgggtaatatattcagatgaagagaagaagtttaacattgatatcatttttggccttattcgttcggagttgctgaatattggggagtacaatgttcatttggcaaagttaattgatgggggaagaaataaggttgcaacggagtttgcaatgtcccttgtccaagcattgtttgctcatgatcctgttggcttcacagagtttcagaatgttcttgatgcactatcgaagcatacaaagagaccaggttcacctgaatcgttgcaacaattgattgaaatcgcaaggaataatgtgagcaccactactggttttgttgctgtgaaggatgaaaaggtcaaactgccgaaggataaaaaggttttagctacccgggcaaacaaggaggaaaacactgctaatgaaattacactagttgatccaaatcaggtggcagtcctgttttctgaatggtgtcagatgtgtaatcatgtaagtgctagtgatgcggcatacactcgttttgtcacacagttgcagcaagatggtctgctgaagggggatgatatctctgaacgcttcttccgtattctcacggaacttgctgttacacactctctagtctccgagcagatcgttgctcctggtggatcatctcagcaatcaccacagcaacctcacatttcatatttctccattgattcatatgcaaagcttgtggttatggttctcaagtactcagtggagataacaccaaataaagccagtatactttccaagatcctatctgttacagtgaggtccattcagaaagatgctgaggaaaagaaagcttcatttaatcctcgaccatacttccgattgtttataaattggctctatgatcttactactaccgatggtcaccatgatagttctaattttcaggttttgactgcatttgcaaatgcattccacatgctacaacccttgagagttcctgcctggagaaaggttggccattttttcagcgactgcttgttgctcttctcaagttcatggaaccatatctgagaaatgctgaactcccagaggcgatggaccttttatacaagggaactatgcgagttctgcttgtactactgcatgactttcctgaatttctttgtgattatcacttcagtttctgcgatgtgattccttcaagttgcattcaaatgcgcaatgtcattcttagtgcttttccacgtaacatgagactgccagacccttctacccctaatctaaagattgatttgttggctgaaatttcaatagcaccacgaatcatgtcggatgttgatggtgcccttaaatcaaagcagttgaagactgaggttgatgaatatctcaagaggccggaaggctcttcctttttaagtgacctgaaccaaaaattgctgctgcctcagaatgaagcaagtgttgctgggacacgctacaacgtgcctctgatcaattcacttgttttttatgttggcatccaagctgtgcaacaactgcaactgaacaaggctaatccgtctgcatcagtacagcagattaaccatatatctccgatggacattttccagattggaacagctaccgatatattcaggagtcttataacaagtttggatacagagggccgctaccttctgttgaatgcaatcgctaaccaactgcgctatccaaatagccatacacactactactccttcatcactctgtatctattttccgaggctacccaggaaattacccaggagcaaatcacaagggttcttctggagcgtctcatagtgaaccgcccccatccttgggggttacttattactttcattgaattgataaagaatccgcgttacaacttttggagccggtcttttacacactgtgcacctgagatagagaaactgttcgagtcggtggcaaggtcatgtggcgcaaaagttgtggacgaaggaatcagcgtgcaggatggcagccactaaagccatctgctttgttcaagtgttgtttttgtgctatttcttctctggcactggaaattttctgtgcttgtacagatcgtctgtatagtaaagctgttagtcacacgtgtcggtgcactgccaaaccttagcaggtgcctgggagaatgcttttgtttgtatgaattttagtcagcaatatggatggtttgcaatatcgctcgctgctacttcgcgccagtacaacagatccaggtttcattgaagaaaatgcctcatccataactgtaacctaactctctctctctctctctctc

SEQ ID NO: 32 - DNA, 2553 bp, Zea Mays
gatctattttacctgaacttttgaatactggggatgctttggagagataccaacaggttgcccaaaagctggaagccttgattgctaatgatggcaaagatgtggaaattcagtctgttattatggaagttcctgatatcttgcgtaggtgtgttagccgtgatgaggctgcattagcagtagcacaaaaggttttcaagagtttgtacgataacacatcaaataccacttatgtctcctggcttctagcaaccttagttgcaatacgagatgtctgcaagcttgttgtcaaagagttaacaagttgggtaatatattcagatgaagagaagaagtttaacattgatatcatttttggccttattcgttcggagttgctgaatattggggagtacaatgttcatttggcaaagttaattgatgggggaagaaataaggttgcaacggagtttgcaatgtcccttgtccaagcattgtttgctcatgatcctgttggcttcacagagtttcagaatgttcttgatgcactatcgaagcatacaaagagaccaggttcacctgaatcgttgcaacaattgattgaaatcgcaaggaataatgtgagcaccactactggttttgttgctgtgaaggatgaaaaggtcaaactgccgaaggataaaaaggttttagctacccgggcaaacaaggaggaaaacactgctaatgaaattacactagttgatccaaatcaggtggcagtcctgttttctgaatggtgtcagatgtgtaatcatgtaagtgctagtgatgcggcatacactcgttttgtcacacagttgcagcaagatggtctgctgaagggggatgatatctctgaacgcttcttccgtattctcacggaacttgctgttacacactctctagtctccgagcagatcgttgctcctggtggatcatctcagcaatcaccacagcaacctcacatttcatatttctccattgattcatatgcaaagcttgtggttatggttctcaagtactcagtggagataacaccaaataaagccagtatactttccaagatcctatctgttacagtgaggtccattcagaaagatgctgaggaaaagaaagcttcatttaatcctcgaccatacttccgattgtttataaattggctctatgatcttactactaccgatggtcaccatgatagttctaattttcaggttttgactgcatttgcaaatgcattccacatgctacaacccttgagagttcctgcctggagcgactgcttgttgctcttctcaagttcatggaaccatatctgagaaatgctgaactcccagaggcgatggaccttttatacaagggaactatgcgagttctgcttgtactactgcatgactttcctgaatttctttgtgattatcacttcagtttctgcgatgtgattccttcaagttgcattcaaatgcgcaatgtcattcttagtgcttttccacgtaacatgagactgccagacccttctacccctaatctaaagattgatttgttggctgaaatttcaatagcaccacgaatcatgtcggatgttgatggtgcccttaaatcaaagcagttgaagactgaggttgatgaatatctcaagaggccggaaggctcttcctttttaagtgacctgaaccaaaaattgctgctgcctcagaatgaagcaagtgttgctgggacacgctacaacgtgcctctgatcaattcacttgttttttatgttggcatccaagctgtgcaacaactgcaactgaacaaggctaatccgtctgcatcagtacagcagattaaccatatatctccgatggacattttccagattggaacagctaccgatatattcaggagtcttataacaagtttggatacagagggccgctaccttctgttgaatgcaatcgctaaccaactgcgctatccaaatagccatacacactactactccttcatcactctgtatctattttccgaggctacccaggaaattacccaggagcaaatcacaagggttcttctggagcgtctcatagtgaaccgcccccatccttgggggttacttattactttcattgaattgataaagaatccgcgttacaacttttggagccggtcttttacacactgtgcacctgagatagagaaactgttcgagtcggtggcaaggtcatgtggcgcaaaagttgtggacgaaggaatcagcgtgcaggatggcagccactaaagccatctgctttgttcaagtgttgtttttgtgctatttcttctctggcactggaaattttctgtgcttgtacagatcgtctgtatagtaaagctgttagtcacacgtgtcggtgcactgccaaaccttagcaggtgcctgggagaatgcttttgtttgtatgaattttagtcagcaatatggatggtttgcaatatcgctcgctgctacttcgcgccagtacaacagatccaggtttcattgaagaaaatgcctcatccataactgtaacctaactctctctctctctctctctc

SEQ ID NO: 33 - DNA, 2006 bp, Zea Mays
ctgctattgaggtttgtgttgtgcggcatgattgatgtattatagtgtcaaatccgttctgttctatttagctgcattatcatggtacttgagtaacatttgagctattagttgagctgggtatcattggagtcatatctggtagggacctttatattgcttaattattaagttaattttttctctagaagggtaattccttattctccttgagttattggcaaatggtatacctgctaagattgataaaacttatgtcaagtattattaatttcttgcttgttgtttgtactcagtactcagtggagataacaccaaataaagccagtatactttccaaggttcgttttacaaattggttatggctttggaacatatacatgtattgatagttcatgaaacaagtgttttccaacttgtcctgtccagatcctatctgttacagtgaggtccattcagaaagatgctgaggaaaagaaagcttcatttaatcctcgaccatacttccgattgtttataaattggctctatgatcttactactaccgatggtcaccatgatagttctaattttcaggttttgactgcatttgcaaatgcattccacatgctacaacccttgagagttcctgcctggagctttgcttggcttgagctggtgagtcacaggagcttcatgccaaaactgctgatgtgcaattcacagaaaggttggccattttttcagcgactgcttgttgctcttctcaagttcatggaaccatatctgagaaatgctgaactcccagaggcgatggaccttttatacaagggaactatgcgagttctgcttgtactactgcatgactttcctgaatttctttgtgattatcacttcagtttctgcgatgtgattccttcaagttgcattcaaatgcgcaatgtcattcttagtgcttttccacgtaacatgagactgccagacccttctacccctaatctaaagattgatttgttggctgaaatttcaatagcaccacgaatcatgtcggatgttgatggtgcccttaaatcaaagcagttgaagactgaggttgatgaatatctcaagaggccggaaggctcttcctttttaagtgacctgaaccaaaaattgctgctgcctcagaatgaagcaagtgttgctgggacacgctacaacgtgcctctgatcaattcacttgttttttatgttggcatccaagctgtgcaacaactgcaactgaacaaggctaatccgtctgcatcagtacagcagattaaccatatatctccgatggacattttccagattggaacagctaccgatatattcaggagtcttataacaagtttggatacagagggccgctaccttctgttgaatgcaatcgctaaccaactgcgctatccaaatagccatacacactactactccttcatcactctgtatctattttccgaggctacccaggaaattacccaggagcaaatcacaagggttcttctggagcgtctcatagtgaaccgcccccatccttgggggttacttattactttcattgaattgataaagaatccgcgttacaacttttggagccggtcttttacacactgtgcacctgagatagagaaactgttcgagtcggtggcaaggtcatgtggcgcaaaagttgtggacgaaggaatcagcgtgcaggatggcagccactaaagccatctgctttgttcaagtgttgtttttgtgctatttcttctctggcactggaaattttctgtgcttgtacagatcgtctgtatagtaaagctgttagtcacacgtgtcggtgcactgccaaaccttagcaggtgcctgggagaatgcttttgtttgtatgaattttagtcagcaatatggatggtttgcaatatcgctcgctgctacttcgcgccagtacaacagatccaggtttcattgaagaaaatgcctcatccataactgtaacctaactctctctctctctctctctc

SEQ ID NO: 34 - DNA, 1750 bp, Zea Mays
atttcagattatttttttcccacttccccactaccctttcaagtttcctagaaattacccaccattgtcattataatccacctaatcgtttttgcgcctagtactagtcaatttggagatgaagaaggtgacatgaatgccttccgtgataatattgctaatgcaatatttgccaatgtcaattgaattattttttttcatatatgagtttcaacctagtacaaatatagagggtattcttgtcttcctcatacaaaagaatcctattaacaactcaaataatctgggtaaacaaacaggactactcagattatataatccagattatataatccagattatataatcctccaaaaataatccagattatataatccatgggggtaaacaaacaggcccttaggctccaggtcgatggaagtaagagaaggaaacccagacgttccaattccatggattggagtgtattgaaataggtctggatagattttgaattgctatatatttaaaccgactcaataccaccaattccattccaatagcaattcaaaatccatcccgatccattctaatacactacaatctatatagaactggaataggtggcatcgcagacctaagcttcagaggttctccctctcaccttctgtatctgacaaaaagaaaaataacaaacagtgatgatgtgatctatcgtatctggtctgaacgaacatgcctatatataataagaaagctaaaaaaaaagaaaagagaaaactttggtaagccaatacatgaagaaccttccctaaacaaggataccaattgcttaaaagttagatgagagaaccaggaaccgacatgataaattctctcctgtacagtaactgtaccatggaatcgactaagatattgctttgtttttgaaaaaaaaaatatatatatatatagcactagttttatacaagaagagaaaggctcatgattttttttatataggtatcttaatgtcgcatcctgattgagcaaccaaattctggtttcatttgattcatggaaatgatcggcagtgcattgcgaccatattttagcagtatacatcagtaaagcaggatggggagtggggaatatataggggatccctcaaaagatgtaacagcagctgtatatctacactaaaccacatgtcttccgtgaggcatctgacaaacgagagaaaaggagatgctcttttaccttggcgacgaaggtttctcctattttaagcacggcaatcgcttgcccatctatattaaatatgtacagatactgatatatatatatatagagagagagagagagatataataaatagataatatatttatatacagatatattgaaggatgggaatctcaggcaaagaaaaagctgtagataatggggctaaaggtaatatataagacatgcacattgtttgtttgattgatagggttgctaggtccagtccaccacaactgggcaggtgcaccggagaatgacatgcaatacgtattgcctgcataattgcattccacatgacaaggaaggccacaaaaaataaagaagctgaatacggaagggcacatgtttgcgggacgcgtatgtatcaggtttttgtatgtgtgagacttgcacacaaggggatcagaacccttacgtatgaacagaggccaacaccacaagacaacacgctactcattactaatgttgcaagcaaccgtgtacgctgaatgaaatcatgtcagac

SEQ ID NO: 35 - DNA, 343 bp, Zea Mays
ggctgatgatatataagagagatgacgatatgattggaggtagtcttagcttcgtccattcacaagaaaactggctcctcctactttatttcccccccttctattcaacatctcaacagtacattatgaaccttactgcctgctagaatctaacactccatgcaagtatgaaatcctaaaaggaaaatatgaacatcaagacaaatcataaacaatgcaatgggttcttcaatgcctggtggctacactacactcttccgatgggagaaaaaggcgggtcaagcagaacagacggaggaggcgccttttctctactccgcttcttcttcttcttctcttcagc

SEQ ID NO: 36 - DNA, 1014 bp, Zea Mays
cacaaactgccctctcccgttctccttcatagaaaggacggggagctcttctttgctaccctgtttcagcaaatgatcagccaacgaacaagccttaaattatatagtttacaaatagttctatagctagagagaactactgcaaaaataaagtggataattgttttcagcagcaagttacttctacaaagaaaacaatctggtccttcgccttgggacaccacagtatcctcatagattaccaaaagaataggtacctgaacaaagagctccatgggatgtttcacattggtagctatagactcagcccagctattatcatatgtgttgccaataacgtcgatggggcaagccatgtcccatccgccacagtcgcaacccccaccgtacctccatctatctagcaagggagatgggccgccggcttcatcgtcactcggcgaaccatgcagtccactaggtgcaacaactttgacagtacaaggagatgaaccattcttcacctcttcggacttgtatctgctaaacggaacctctatcacagtcgccgcaatctccaaataaggatgaaggtcttcttcggaccacgggcaagatgtcgatacatctgagttatttctcccagtcttgttctcttccgtcagactagtcctctgtggctgttgaagtgcccctgtcttctcctcaacaatccgcctcgcatgaccaatgtcgtacgaaacaaactcggtgacgacagagttattcaccgtaccgtcttttccaacttcagagcataagtatgatgaaacctgcacctgcccaacgattgggggtaaatcccagcctccatctttggagatccttccagcagcactggaccgtttcccgccactatggaaggtgtatatagagctcaactcatcaccgtttttccaattcctggcggaaatggattctcctgggccgtcaacacagaattcaaaaacctggacaccgttcttggaatccaatctaagaaccgcttggagatga

SEQ ID NO: 37 - DNA, 3086 bp, Zea Mays
ggctggttggcctgtctgctcggcccgccgtcgtctcagctcttgtgttttctgttacggaaaaaaaaagaagaaaaaacaagccggggacgacggcggcgaggacgacgacgacgagagggacggaactggaccagcgcacgtgccgagatggcggcgctggatgacaaggccatgacggacctggagacgctggaggaggaggaagtgctgcgccggttaggcacagcggaggaggcgggcctcaccgacaacgaggccgcgcgacgcctccgtctccacggccccaacgtcgtcgtcctctcgcaccacgagggcagcatgcttcatggattcctaatggcgctcttctcgctctggggatgggatcatgtcttccccaagtacaataacatggtccgggtcatacttaactccatgtcgtgggttacagtactgactatagttgtgtctcttgctatcacctcagctggccaaagatcatgcgagctggccatcataattttcgtagtagctacatgcctcatagcatgctttactgcaatgcttgttttagagtatgctaaggctccgctggaggccaaagcccacgcaccaagggccaaggttctgagagatgggaattggagagatgtacatgcagcaaatctggtcccaggggatatcatatttctcaaagttggggacattgtcccagccaatgctcgcatactccgatttcagaaaatcgacacaatgacttgctgggccaaaaggtctgttgattgtgcgcatggcttcctcctatactatgcttggactgtttcctgtggccaaggaactgccgttgtcattgcaactggacgtggcattcccagaagtacattgcggctctacccacaacgttatgctcgacctgggcagcttaaagaaggagccatgcttactggctgcttctgtgcttccctggtacttgttggcacttttgctgagatagtcttaagatttttgttccaaaaacaaaattacagaggcatgccactcgacgcccattttatgccattgattggtggaatcccgatggcaatgcctacttttttttacctggcattggcattgggatctgtaaggctttgttttctggggattgctagccggggaacagttgcacttgaagatctagcaagtgtggatgtaatcctcttcaacatgactggtactttaacgtgtaatcagccctgttttgtacgggacaagattgagatgtttgcagatagcgttaataaagaccatgccatagttttagctgcacgggcatcaagatctcaacatgagttgtacattgaaccaattgatgcagctattctaagcctccttgatgatccggagcaggcacgactcggtgttcaagtcttagagcatcatgccagtttctttgttgcactgaaactgatgttccagactacatacatcgacgaaggcaatagattcaagtgttgcgtattcaaaggccatagctgtaggacatcaagtagactcttgttgggactttattgcccttctgccttacacagatgaccttagaagcgatagtgctgatgttgtcgatagccttatcgatctaggtttagatataagagtcctcacaggtcattctgttgtgcatatcgccatatcctgctgtcgagatttttgctattgtcattttctatgataaacatgtcttcatcatatatgtatattgttttgtcctctctacagaaagtccattgtcgaccacaaagcaggtttgtggaaagcttggaaaactaggtaccaatgtggtacctgcacatatagtgtttgagttagctcgcaataacagagaagtccattcaaacatcaacgggatttctgatctctttccaggtctatctttatcttctatgtacctcctgcaaagttttgtttttgcaagttcttgttaccattttgctatcttcatatcttagtacagaggacaaaagcgatatagtaagaagactaagaaatttcggttgtcattgtgcaatggttgggtatgaatttcttgatcatgatgccataggagagagccatattgggatttcagttgctgatgcaactgattacacaaaaagtgaatctgatcttgttttgactcagcctgcactgatgcctgtttcttcagcagtgcaaatcagtaggaagatttgtcagatgctaagaagctacactatattcaccatttcatcaactgtccatctttttggtgtccgtgtcattttacatttatggaactttgacttgtcaaatatcctggctttcatgattacagcttgtaattactgtacgtcctttgcaatgttatttgaaagggtggaattgaacaagtcaccagataaatggagagttcagaaaatcattacaagcggtgctgcttttggaagctacatagttcttactactgccattttttatagggttgcaacaactgcaaacccttttgcatgtaaattcaaacatatatcactgatgggcagtgatgaggaaatcagatctgctttgttccttcagattagcacagtaaaccaggctattgcactctttgttcattctgatggttgctgtatcataagatggcctggaccttttgtcacatttgcctttgttgtttctcaaacggtggcaacacaaaaagttgtccatggcgacttgaattttgcactaacaaagggtattggctgtgttagggccggattgatatggttgtataacttagtcctacttttggccctggttttagtttgtcgcaaatggagacacgcaaagatgactagtgaaaagttgttgacaatatgcttgcgttcagctatcctacacatagttcttacctggtttctgtacgtaatacttgatgttagggtgcaacagccagtctctagtagatagatcgaacacatagttagggctttttccttctgcagtgtcatctgtaaaactctcaagttaattaatatcttgcataatagattttgcagttggttggcccttcatgattcagaacttgcaactgtgagaccactatattattttaagttaaaactttg

SEQ ID NO: 38 - DNA, 2770 bp, Zea Mays
ggctggttggcctgtctgctcggcccgccgtcgtctcagctcttgtgttttctgttacggaaaaaaaaagaagaaaaaacaagccggggacgacggcggcgaggacgacgacgacgagagggacggaactggaccagcgcacgtgccgagatggcggcgctggatgacaaggccatgacggacctggagacgctggaggaggaggaagtgctgcgccggttaggcacagcggaggaggcgggcctcaccgacaacgaggccgcgcgacgcctccgtctccacggccccaacgtcgtcgtcctctcgcaccacgagggcagcatgcttcatggattcctaatggcgctcttctcgctctggggatgggatcatgtcttccccaagtacaataacatggtccgggtcatacttaactccatgtcgtgggttacagtactgactatagttgtgtctcttgctatcacctcagctggccaaagatcatgcgagctggccatcataattttcgtagtagctacatgcctcatagcatgctttactgcaatgcttgttttagagtatgctaaggctccgctggaggccaaagcccacgcaccaagggccaaggttctgagagatgggaattggagagatgtacatgcagcaaatctggtcccaggggatatcatatttctcaaagttggggacattgtcccagccaatgctcgcatactccgatttcagaaaatcgacacaatgacttgctgggccaaaaggtctgttgattgtgcgcatggcttcctcctatactatgcttggactgtttcctgtggccaaggaactgccgttgtcattgcaactggacgtggcattcccagaagtacattgcggctctacccacaacgttatgctcgacctgggcagcttaaagaaggagccatgcttactggctgcttctgtgcttccctggtacttgttggcacttttgctgagatagtcttaagatttttgttccaaaaacaaaattacagaggcatgccactcgacgcccattttatgccattgattggtggaatcccgatggcaatgcctacttttttttacctggcattggcattgggatctgtaaggctttgttttctggggattgctagccggggaacagttgcacttgaagatctagcaagtgtggatgtaatcctcttcaacatgactggtactttaacgtgtaatcagccctgttttgtacgggacaagattgagatgtttgcagatagcgttaataaagaccatgccatagttttagctgcacgggcatcaagatctcaacatgagttgtacattgaaccaattgatgcagctattctaagcctccttgatgatccggagcaggttgctcatcactgtggcagcagcaaagaagttaaagagaaaataagcatgataatggatgaacttgcccttgatggatatcaggccatagctgtaggacatcaagtagactcttgttgggactttattgcccttctgccttacacagatgaccttagaagcgatagtgctgatgttgtcgatagccttatcgatctaggtttagatataagagtcctcacagaaagtccattgtcgaccacaaagcagaggacaaaagcgatatagtaagaagactaagaaatttcggttgtcattgtgcaatggttgggtatgaatttcttgatcatgatgccataggagagagccatattgggatttcagttgctgatgcaactgattacacaaaaagtgaatctgatcttgttttgactcagcctgcactgatgcctgtttcttcagcagtgcaaatcagtaggaagatttgtcagatgctaagaagctacactatattcaccatttcatcaactgtccatcttgatcctgcaggtctaactccaatcttaattgtaatgaagtttggtgtccgtgtcattttacatttatggaactttgacttgtcaaatatcctggctttcatgattacagcttgtaattactgtacgtcctttgcaatgttatttgaaagggtggaattgaacaagtcaccagataaatggagagttcagaaaatcattacaagcggtgctgcttttggaagctacatagttcttactactgccattttttatagggttgcaacaactgcaaacccttttgcatgtaaattcaaacatatatcactgatgggcagtgatgaggaaatcagatctgctttgttccttcagattagcacagtaaaccaggctattgcactctttgttcattctgatggttgctgtatcataagatggcctggaccttttgtcacatttgcctttgttgtttctcaaacggtggcaacacaaaaagttgtccatggcgacttgaattttgcactaacaaagggtattggctgtgttagggccggattgatatggttgtataacttagtcctacttttggccctggttttagtttgtcgcaaatggagacacgcaaagatgactagtgaaaagttgttgacaatatgcttgcgttcagctatcctacacatagttcttacctggtttctgtacgtaatacttgatgttagggtgcaacagccagtctctagtagatagatcgaacacatagttagggctttttccttctgcagtgtcatctgtaaaactctcaagttaattaatatcttgcataatagattttgcagttggttggcccttcatgattcagaacttgcaactgtgagaccactatattattttaagttaaaactttg

SEQ ID NO: 39 - DNA, 3217 bp, Zea Mays
ggttggcctgtctgctcggcccgccgtcgtctcagctcttgtgttttctgttacggaaaaaaaaagaagaaaaaacaagccggggacgacggcggcgaggacgacgacgacgagagggacggaactggaccagcgcacgtgccgagatggcggcgctggatgacaaggccatgacggacctggagacgctggaggaggaggaagtgctgcgccggttaggcacagcggaggaggcgggcctcaccgacaacgaggccgcgcgacgcctccgtctccacggccccaacgtcgtcgtcctctcgcaccacgtacgtctccactctagatccctcctcctgcatgttgattcctccaccatttgccgcttttcaattgtcaaacctacaagagggcagcatgcttcatggattcctaatggcgctcttctcgctctggggatgggatcatgtcttccccaagtacaataacatggtccgggtcatacttaactccatgtcgtgggttacagtactgactatagttgtgtctcttgctatcacctcagctggccaaagatcatgcgagctggccatcataattttcgtagtagctacatgcctcatagcatgctttactgcaatgcttgttttagagtatgctaaggctccgctggaggccaaagcccacgcaccaagggccaaggttctgagagatgggaattggagagatgtacatgcagcaaatctggtcccaggggatatcatatttctcaaagttggggacattgtcccagccaatgctcgcatactccgatttcagaaaatcgacacaatgacttgctgggccaaaaggtctgttgattgtgcgcatggcttcctcctatactatgcttggactgtttcctgtggccaaggaactgccgttgtcattgcaactggacgtggcattcccagaagtacattgcggctctacccacaacgttatgctcgacctgggcagcttaaagaaggagccatgcttactggctgcttctgtgcttccctggtacttgttggcacttttgctgagatagtcttaagatttttgttccaaaaacaaaattacagaggcatgccactcgacgcccattttatgccattgattggtggaatcccgatggcaatgcctacttttttttacctggcattggcattgggatctgtaaggctttgttttctggggattgctagccggggaacagttgcacttgaagatctagcaagtgtggatgtaatcctcttcaacatgactggtactttaacgtgtaatcagccctgttttgtacgggacaagattgagatgtttgcagatagcgttaataaagaccatgccatagttttagctgcacgggcatcaagatctcaacatgagttgtacattgaaccaattgatgcagctattctaagcctccttgatgatccggagcaggcacgactcggtgttcaagtcttagagcatcatgccagtttctttgttgcactgaaactgatgttccagactacatacatcgacgaaggcaatagattcaagtgttgcgtattcaaaggtgatcctgcaaaggttgctcatcactgtggcagcagcaaagaagttaaagagaaaataagcatgataatggatgaacttgcccttgatggatatcaggccatagctgtaggacatcaagtagactcttgttgggactttattgcccttctgccttacacagatgaccttagaagcgatagtgctgatgttgtcgatagccttatcgatctaggtttagatataagagtcctcacagaaagtccattgtcgaccacaaagcagacagaggacaaaagcgatatagtaagaagactaagaaatttcggttgtcattgtgcaatggttgggtatgaatttcttgatcatgatgccataggagagagccatattgggatttcagttgctgatgcaactgattacacaaaaagtgaatctgatcttgttttgactcagcctgcactgatgcctgtttcttcagcagtgcaaatcagtaggaagatttgtcagatgctaagaagctacactgtaggtcattctgatgcatttagaggcttgatttctgacaagatgttttatatctggatcataataaatggatattaacttgcagtatgttgctgttttgcagatattcaccatttcatcaactgtccatcttgtgagttcaatttatgattattttctataatccttctaaagtacaggatcctgcaggtctaactccaatcttaattgtaatgaagtttggtgtccgtgtcattttacatttatggaactttgacttgtcaaatatcctggctttcatgattacagcttgtaattactgtgagcatcagttccaaaaggacaccaccattatttgcaatatgtattttctttttttattttccttgtttctatttttattttcaggtacgtcctttgcaatgttatttgaaagggtggaattgaacaagtcaccagataaatggagagttcagaaaatcattacaagcggtgctgcttttggaagctacatagttcttactactgccattttttatagggttgcaacaactgcaaacccttttgcatgtaaattcaaacatatatcactgatgggcagtgatgaggaaatcagatctgctttgttccttcagattagcacagtaaaccaggctattgcactctttgttcattctgatggttgctgtatcataagatggcctggaccttttgtcacatttgcctttgttgtttctcaaacggtggcaacacaaaaagttgtccatggcgacttgaattttgcactaacaaagggtattggctgtgttagggccggattgatatggttgtataacttagtcctacttttggccctggttttagtttgtcgcaaatggagacacgcaaagatgactagtgaaaagttgttgacaatatgcttgcgttcagctatcctacacatagttcttacctggtttctgtacgtaatacttgatgttagggtgcaacagccagtctctagtagatagatcgaacacatagttagggctttttccttctgcagtgtcatctgtaaaactctcaagttaattaatatcttgcataatagattttgcagttggttggcccttcatgattcagaacttgcaactgtgagaccactatattattttaagttaaaactttg

SEQ ID NO: 40 - DNA, 2583 bp, Zea Mays
ggttggcctgtctgctcggcccgccgtcgtctcagctcttgtgttttctgttacggaaaaaaaaagaagaaaaaacaagccggggacgacggcggcgaggacgacgacgacgagagggacggaactggaccagcgcacgtgccgagatggcggcgctggatgacaaggccatgacggacctggagacgctggaggaggaggaagtgctgcgccggttaggcacagcggaggaggcgggcctcaccgacaacgaggccgcgcgacgcctccgtctccacggccccaacgtcgtcgtcctctcgcaccacgagggcagcatgcttcatggattcctaatggcgctcttctcgctctggggatgggatcatgtcttccccaagtacaataacatggtccgggtcatacttaactccatgtcgtgggttacagtactgactatagttgtgtctcttgctatcacctcagctggccaaagatcatgcgagctggccatcataattttcgtagtagctacatgcctcatagcatgctttactgcaatgcttgttttagagtatgctaaggctccgctggaggccaaagcccacgcaccaagggccaaggttctgagagatgggaattggagagatgtacatgcagcaaatctggtcccaggggatatcatatttctcaaagttggggacattgtcccagccaatgctcgcatactccgatttcagaaaatcgacacaatgacttgctgggccaaaaggtctgttgattgtgcgcatggcttcctcctatactatgcttggactgtttcctgtggccaaggaactgccgttgtcattgcaactggacgtggcattcccagaagtacattgcggctctacccacaacgttatgctcgacctgggcagcttaaagaaggagccatgcttactggctgcttctgtgcttccctggtacttgttggcacttttgctgagatagtcttaagatttttgttccaaaaacaaaattacagaggcatgccactcgacgcccattttatgccattgattggtggaatcccgatggcaatgcctacttttttttacctggcattggcattgggatctgtaaggctttgttttctggggattgctagccggggaacagttgcacttgaagatctagcaagtgtggatgtaatcctcttcaacatgactggtactttaacgtgtaatcagccctgttttgtacgggacaagattgagatgtttgcagatagcgttaataaagaccatgccatagttttagctgcacgggcatcaagatctcaacatgagttgtacattgaaccaattgatgcagctattctaagcctccttgatgatccggagcaggttgctcatcactgtggcagcagcaaagaagttaaagagaaaataagcatgataatggatgaacttgcccttgatggatatcaggccatagctgtaggacatcaagtagactcttgttgggactttattgcccttctgccttacacagatgaccttagaagcgatagtgctgatgttgtcgatagccttatcgatctaggtttagatataagagtcctcacagaaagtccattgtcgaccacaaagcaggtttgtggaaagcttggaaaactaggtaccaatgtggtacctgcacatatagtgtttgagttagctcgcaataacagagaagtccattcaaacatcaacgggatttctgatctctttccagatattcaccatttcatcaactgtccatcttgtgagttcaatttatgattattttctataatccttctaaagtacaggatcctgcaggtacgtcctttgcaatgttatttgaaagggtggaattgaacaagtcaccagataaatggagagttcagaaaatcattacaagcggtgctgcttttggaagctacatagttcttactactgccattttttatagggttgcaacaactgcaaacccttttgcatgtaaattcaaacatatatcactgatgggcagtgatgaggaaatcagatctgctttgttccttcagattagcacagtaaaccaggctattgcactctttgttcattctgatggttgctgtatcataagatggcctggaccttttgtcacatttgcctttgttgtttctcaaacggtggcaacacaaaaagttgtccatggcgacttgaattttgcactaacaaagggtattggctgtgttagggccggattgatatggttgtataacttagtcctacttttggccctggttttagtttgtcgcaaatggagacacgcaaagatgactagtgaaaagttgttgacaatatgcttgcgttcagctatcctacacatagttcttacctggtttctgtacgtaatacttgatgttagggtgcaacagccagtctctagtagatagatcgaacacatagttagggctttttccttctgcagtgtcatctgtaaaactctcaagttaattaatatcttgcataatagattttgcagttggttggcccttcatgattcagaacttgcaactgtgagaccactatattattttaagttaaaactttg

SEQ ID NO: 41 - DNA, 3135 bp, Zea Mays
ggttggcctgtctgctcggcccgccgtcgtctcagctcttgtgttttctgttacggaaaaaaaaagaagaaaaaacaagccggggacgacggcggcgaggacgacgacgacgagagggacggaactggaccagcgcacgtgccgagatggcggcgctggatgacaaggccatgacggacctggagacgctggaggaggaggaagtgctgcgccggttaggcacagcggaggaggcgggcctcaccgacaacgaggccgcgcgacgcctccgtctccacggccccaacgtcgtcgtcctctcgcaccacgagggcagcatgcttcatggattcctaatggcgctcttctcgctctggggatgggatcatgtcttccccaagtacaataacatggtccgggtcatacttaactccatgtcgtgggttacagtactgactatagttgtgtctcttgctatcacctcagctggccaaagatcatgcgagctggccatcataattttcgtagtagctacatgcctcatagcatgctttactgcaatgcttgttttagagtatgctaaggctccgctggaggccaaagcccacgcaccaagggccaaggttctgagagatgggaattggagagatgtacatgcagcaaatctggtcccaggggatatcatatttctcaaagttggggacattgtcccagccaatgctcgcatactccgatttcagaaaatcgacacaatgacttgctgggccaaaaggtctgttgattgtgcgcatggcttcctcctatactatgcttggactgtttcctgtggccaaggaactgccgttgtcattgcaactggacgtggcattcccagaagtacattgcggctctacccacaacgttatgctcgacctgggcagcttaaagaaggagccatgcttactggctgcttctgtgcttccctggtacttgttggcacttttgctgagatagtcttaagatttttgttccaaaaacaaaattacagaggcatgccactcgacgcccattttatgccattgattggtggaatcccgatggcaatgcctacttttttttacctggcattggcattgggatctgtaaggctttgttttctggggattgctagccggggaacagttgcacttgaagatctagcaagtgtggatgtaatcctcttcaacatgactggtactttaacgtgtaatcagccctgttttgtacgggacaagattgagatgtttgcagatagcgttaataaagaccatgccatagttttagctgcacgggcatcaagatctcaacatgagttgtacattgaaccaattgatgcagctattctaagcctccttgatgatccggagcagtcttagagcatcatgccagtttctttgttgcactgaaactgatgttccagactacatacatcgacgaaggcaatagattcaagtgttgcgtattcaaaggtgatcctgcaaaggttgctcatcactgtggcagcagcaaagaagttaaagagaaaataagcatgataatggatgaacttgcccttgatggatatcaggccatagctgtaggacatcaagtagactcttgttgggactttattgcccttctgccttacacagatgaccttagaagcgatagtgctgatgttgtcgatagccttatcgatctaggtttagatataagagtcctcacaggtcattctgttgtgcatatcgccatatcctgctgtcgagatttttgctattgtcattttctatgataaacatgtcttcatcatatatgtatattgttttgtcctctctacagaaagtccattgtcgaccacaaagcaggtttgtggaaagcttggaaaactaggtaccaatgtggtacctgcacatatagtgtttgagttagctcgcaataacagagaagtccattcaaacatcaacgggatttctgatctctttccaggtctatctttatcttctatgtacctcctgcaaagttttgtttttgcaagttcttgttaccattttgctatcttcatatcttagtacagaggacaaaagcgatatagtaagaagactaagaaatttcggttgtcattgtgcaatggttgggtatgaatttcttgatcatgatgccataggagagagccatattgggatttcagttgctgatgcaactgattacacaaaaagtgaatctgatcttgttttgactcagcctgcactgatgcctgtttcttcagcagtgcaaatcagtaggaagatttgtcagatgctaagaagctacactatattcaccatttcatcaactgtccatcttgtgagttcaatttatgattattttctataatccttctaaagtacaggatcctgcaggtacgtcctttgcaatgttatttgaaagggtggaattgaacaagtcaccagataaatggagagttcagaaaatcattacaagcggtgctgcttttggaagctacatagttcttactactgccattttttatagggttgcaacaactgcaaacccttttgcatgtaaattcaaacatatatcactgatgggcagtgatgaggaaatcagatctgctttgttccttcagattagcacagtaaaccaggctattgcactctttgttcattctgatggttgctgtatcataagatggcctggaccttttgtcacatttgcctttgttgtttctcaaacggtggcaacacaaaaagttgtccatggcgacttgaattttgcactaacaaagggtattggctgtgttagggccggattgatatggttgtataacttagtcctacttttggccctggttttagtttgtcgcaaatggagacacgcaaagatgactagtgaaaagttgttgacaatatgcttgcgttcagctatcctacacatagttcttacctggtttctgtacgtaatacttgatgttagggtgcaacagccagtctctagtagatagatcgaacacatagttagggctttttccttctgcagtgtcatctgtaaaactctcaagttaattaatatcttgcataatagattttgcagttggttggcccttcatgattcagaacttgcaactgtgagaccactatattattttaagttaaaactttg

SEQ ID NO: 42 - DNA, 2701 bp, Zea Mays
ggttggcctgtctgctcggcccgccgtcgtctcagctcttgtgttttctgttacggaaaaaaaaagaagaaaaaacaagccggggacgacggcggcgaggacgacgacgacgagagggacggaactggaccagcgcacgtgccgagatggcggcgctggatgacaaggccatgacggacctggagacgctggaggaggaggaagtgctgcgccggttaggcacagcggaggaggcgggcctcaccgacaacgaggccgcgcgacgcctccgtctccacggccccaacgtcgtcgtcctctcgcaccacgagggcagcatgcttcatggattcctaatggcgctcttctcgctctggggatgggatcatgtcttccccaagtacaataacatggtccgggtcatacttaactccatgtcgtgggttacagtactgactatagttgtgtctcttgctatcacctcagctggccaaagatcatgcgagctggccatcataattttcgtagtagctacatgcctcatagcatgctttactgcaatgcttgttttagagtatgctaaggctccgctggaggccaaagcccacgcaccaagggccaaggttctgagagatgggaattggagagatgtacatgcagcaaatctggtcccaggggatatcatatttctcaaagttggggacattgtcccagccaatgctcgcatactccgatttcagaaaatcgacacaatgacttgctgggccaaaaggtctgttgattgtgcgcatggcttcctcctatactatgcttggactgtttcctgtggccaaggaactgccgttgtcattgcaactggacgtggcattcccagaagtacattgcggctctacccacaacgttatgctcgacctgggcagcttaaagaaggagccatgcttactggctgcttctgtgcttccctggtacttgttggcacttttgctgagatagtcttaagatttttgttccaaaaacaaaattacagaggcatgccactcgacgcccattttatgccattgattggtggaatcccgatggcaatgcctacttttttttacctggcattggcattgggatctgtaaggctttgttttctggggattgctagccggggaacagttgcacttgaagatctagcaagtgtggatgtaatcctcttcaacatgactggtactttaacgtgtaatcagccctgttttgtacgggacaagattgagatgtttgcagatagcgttaataaagaccatgccatagttttagctgcacgggcatcaagatctcaacatgagttgtacattgaaccaattgatgcagctattctaagcctccttgatgatccggagcaggttgctcatcactgtggcagcagcaaagaagttaaagagaaaataagcatgataatggatgaacttgcccttgatggatatcaggccatagctgtaggacatcaagtagactcttgttgggactttattgcccttctgccttacacagatgaccttagaagcgatagtgctgatgttgtcgatagccttatcgatctaggtttagatataagagtcctcacagaaagtccattgtcgaccacaaagcagaggacaaaagcgatatagtaagaagactaagaaatttcggttgtcattgtgcaatggttgggtatgaatttcttgatcatgatgccataggagagagccatattgggatttcagttgctgatgcaactgattacacaaaaagtgaatctgatcttgttttgactcagcctgcactgatgcctgtttcttcagcagtgcaaatcagtaggaagatttgtcagatgctaagaagctacactatattcaccatttcatcaactgtccatcttgtgagttcaatttatgattattttctataatccttctaaagtacaggatcctgcaggtacgtcctttgcaatgttatttgaaagggtggaattgaacaagtcaccagataaatggagagttcagaaaatcattacaagcggtgctgcttttggaagctacatagttcttactactgccattttttatagggttgcaacaactgcaaacccttttgcatgtaaattcaaacatatatcactgatgggcagtgatgaggaaatcagatctgctttgttccttcagattagcacagtaaaccaggctattgcactctttgttcattctgatggttgctgtatcataagatggcctggaccttttgtcacatttgcctttgttgtttctcaaacggtggcaacacaaaaagttgtccatggcgacttgaattttgcactaacaaagggtattggctgtgttagggccggattgatatggttgtataacttagtcctacttttggccctggttttagtttgtcgcaaatggagacacgcaaagatgactagtgaaaagttgttgacaatatgcttgcgttcagctatcctacacatagttcttacctggtttctgtacgtaatacttgatgttagggtgcaacagccagtctctagtagatagatcgaacacatagttagggctttttccttctgcagtgtcatctgtaaaactctcaagttaattaatatcttgcataatagattttgcagttggttggcccttcatgattcagaacttgcaactgtgagaccactatattattttaagttaaaactttg

SEQ ID NO: 43 - DNA, 2854 bp, Zea Mays
ggttggcctgtctgctcggcccgccgtcgtctcagctcttgtgttttctgttacggaaaaaaaaagaagaaaaaacaagccggggacgacggcggcgaggacgacgacgacgagagggacggaactggaccagcgcacgtgccgagatggcggcgctggatgacaaggccatgacggacctggagacgctggaggaggaggaagtgctgcgccggttaggcacagcggaggaggcgggcctcaccgacaacgaggccgcgcgacgcctccgtctccacggccccaacgtcgtcgtcctctcgcaccacgagggcagcatgcttcatggattcctaatggcgctcttctcgctctggggatgggatcatgtcttccccaagtacaataacatggtccgggtcatacttaactccatgtcgtgggttacagtactgactatagttgtgtctcttgctatcacctcagctggccaaagatcatgcgagctggccatcataattttcgtagtagctacatgcctcatagcatgctttactgcaatgcttgttttagagtatgctaaggctccgctggaggccaaagcccacgcaccaagggccaaggttctgagagatgggaattggagagatgtacatgcagcaaatctggtcccaggggatatcatatttctcaaagttggggacattgtcccagccaatgctcgcatactccgatttcagaaaatcgacacaatgacttgctgggccaaaaggtctgttgattgtgcgcatggcttcctcctatactatgcttggactgtttcctgtggccaaggaactgccgttgtcattgcaactggacgtggcattcccagaagtacattgcggctctacccacaacgttatgctcgacctgggcagcttaaagaaggagccatgcttactggctgcttctgtgcttccctggtacttgttggcacttttgctgagatagtcttaagatttttgttccaaaaacaaaattacagaggcatgccactcgacgcccattttatgccattgattggtggaatcccgatggcaatgcctacttttttttacctggcattggcattgggatctgtaaggctttgttttctggggattgctagccggggaacagttgcacttgaagatctagcaagtgtggatgtaatcctcttcaacatgactggtactttaacgtgtaatcagccctgttttgtacgggacaagattgagatgtttgcagatagcgttaataaagaccatgccatagttttagctgcacgggcatcaagatctcaacatgagttgtacattgaaccaattgatgcagctattctaagcctccttgatgatccggagcaggttgctcatcactgtggcagcagcaaagaagttaaagagaaaataagcatgataatggatgaacttgcccttgatggatatcaggccatagctgtaggacatcaagtagactcttgttgggactttattgcccttctgccttacacagatgaccttagaagcgatagtgctgatgttgtcgatagccttatcgatctaggtttagatataagagtcctcacagaaagtccattgtcgaccacaaagcaggtctatctttatcttctatgtacctcctgcaaagttttgtttttgcaagttcttgttaccattttgctatcttcatatcttagtacagaggacaaaagcgatatagtaagaagactaagaaatttcggttgtcattgtgcaatggttgggtatgaatttcttgatcatgatgccataggagagagccatattgggatttcagttgctgatgcaactgattacacaaaaagtgaatctgatcttgttttgactcagcctgcactgatgcctgtttcttcagcagtgcaaatcagtaggaagatttgtcagatgctaagaagctacactatattcaccatttcatcaactgtccatcttgatcctgcaggtctaactccaatcttaattgtaatgaagtttggtgtccgtgtcattttacatttatggaactttgacttgtcaaatatcctggctttcatgattacagcttgtaattactgtacgtcctttgcaatgttatttgaaagggtggaattgaacaagtcaccagataaatggagagttcagaaaatcattacaagcggtgctgcttttggaagctacatagttcttactactgccattttttatagggttgcaacaactgcaaacccttttgcatgtaaattcaaacatatatcactgatgggcagtgatgaggaaatcagatctgctttgttccttcagattagcacagtaaaccaggctattgcactctttgttcattctgatggttgctgtatcataagatggcctggaccttttgtcacatttgcctttgttgtttctcaaacggtggcaacacaaaaagttgtccatggcgacttgaattttgcactaacaaagggtattggctgtgttagggccggattgatatggttgtataacttagtcctacttttggccctggttttagtttgtcgcaaatggagacacgcaaagatgactagtgaaaagttgttgacaatatgcttgcgttcagctatcctacacatagttcttacctggtttctgtacgtaatacttgatgttagggtgcaacagccagtctctagtagatagatcgaacacatagttagggctttttccttctgcagtgtcatctgtaaaactctcaagttaattaatatcttgcataatagattttgcagttggttggcccttcatgattcagaacttgcaactgtgagaccactatattattttaagttaaaactttg

SEQ ID NO: 44 - DNA, 5018 bp, Zea Mays
gacaagcgggatctcgcctcagaaatctcgcaacccacagcctggcctgctgtcatgtgctgctgctgcctaacggagtcagcatcgccaaccgcagctccacctcccgatcccagccccaatctaggaggaggaggaggaggagaaggccactttcaggattctgacgaagccctccctccctcggccgcatcgcatgctaccacgactgaccaccaccagcagcagcagcagcagcagcaggaggaggagggcaggatgttcaagcttcaccgccaccgctcctccgaccgcgtcggcgagcgcttcgacttcagattctccaacttccgcgccgtccaggtccctgcagtgtcagacaggctcttcctttccatagtttcagtcgacagcggaaggacaattgcaaagtccagcaaagtagcttctcggagtgggatatgccagtggcctgacacaatcttggaacccatatggttctccaaggacgaagtctccaaagaattcgaagattgccagtacaagattattgtttccttgggatcgacaaaatctggcattcttggggagatttttctaaatctgtctaattttctgaatatagtcgatccaaccgcaatctctttgccactgaagagatgcaacgccggaacagttttacagcttaaggtccaatgtcttggcacaaagtctaagctgagtggtgtcagatcactgagggacatggctccccgtctcgatgaccgtagtccaacgccaaccaatgatgagatggacaataagtcagattgctctgatggtatgttcaacaggagtgttcgttcttcatccgaaaatcatctggttggaacttatcaagatgaatctggaaacagggaaacaagtttctctgcaccagggtcccatcggagttctaattctggagatagtactgcggatagaacaaacttctctcctagagacaactctagtggaggactttatgtgggaaggcaggattctgctagttcctatgctagttatgttagtgctggtcgtggcgatgatgggcttagatccaataattcatcttttagttctcgggcttcaggcccaaatttgctgcaagggaatactccaaaaatattttcaaatggcctttctcaattatctatgggggcatctgactcatctaaagatcttcttgaagctgctgaagaaacaattgaggagctccgtgatgaggcaaaaatgtgggaacgccactctcgtaagttgaaggctgatctagagatgctaaaaaaggagtgttctgaaaaatcaaagcaacatgctgagctagcaggcgagctatctgctgcacaagctgaacgggattcctataggcatgaaatagaagaattgaagtcatccttacaagatgtaaacacacggcaaacaattacaggaacacctaaacgttcagactggatagacctgcagaaggaacttgaaggtgaggtgaagtttcttagagaatcgaatgcggacttaaccatacaactaaacaggactcaagagtcaaatatagagcttctttctattcttcaggaactggaggaaaccattgaagaacagagagttgaaatatctaagatttcgaaggtcaagcagactgctgatcctgagaatgggcttttagtaaaagaagacaaagaatgggctaagaaactgtcaatgaaagacgatgaaatcacagttctgagggagaaattggatcgggctctcaacattggaaatgcaggtggtgctggttccaatgccatttatcttgaattggagaaagaaaatgaaattttaagggctaaaatacaagagcttgagaaggactgctctgaactaacagatgaaaatttggagcttatatataagctgaaagaaaatgggctcacaaaaggtcaggttccacgtatttcaaacaacaatgagctgcaatttgaaaagcttacatcccggattcgtcaactggaggaggaacttaggaataaggaaatgttaagagacgacagtttttctgagtcatcaacgtctaatgcagatgagttacagagaaaatgtgctgaccttgagctgaagctgctaaattttaggtctcaaacctgtgagctggaagaaaagttccaaaaaagccaagaggaactggaacaaagaaatctcgagttatccgaactgagaagaaagctaaacggtttacattctactgaactggaagtttttgaatctggtgcgacatggaagtaccaatctagaacagcagatctagaggatactgaacctgagacagatacgctaaaggctagatttgaactgcaactacaggaaaatgatgaccttcgaagttccaaggttgagatggaaaattttatttctgagattcaggcagagaagagtcagcttgaggaacgcctgtccgtgtcgcttaaagaaagcagcatcacatctaaatgcttggatgaagtgcggaaagatatccttgtgctttccagcagtatagattcccatgtttcagctaataaggttcttgagaggaacataattgagctagagagctgcaaagctgaactagagttgcatgtatcagagctggaacaggaaaacatagagttgtcagaacggatatctggactggaagcacaattgacttatctgacaaatgaaaaggagtcaagcgagctacagattcatgactccagatcgctcatcattaatctcaaagataaagtagagcggcagcaatccgagatggaaactcaaaggctcgagtttaagcagaaacaacaagaatctcaaagaagattgtcagaaacacaggatgattctgaagttctgagaagatctaattctaaactacaatctactgttgagagccttattgaagagtgcagttctcttcagaatctaactgctgatctgaaaaggcagaagttggaaatgcatggtcatcttacgcaaaaagagcaggaactggatgagtcgaaaaaaaggaactttgagtttagcaaaacagtggaattccttgaggcaaagctttcgtcactacataaggacgtttcttctaaagagcaatctttattgtcagaattggagagtatattccaggagcacatggaacaagaagaaagaattaatcgcgcgcatttcatgctcaataagatcgagaaggaaaagactcttgaagtagagaacctcaagagggaggtcgtcagcctcactgcacaggtctcctccacacatgaggagcgagaaagtgccactctggatgctattagagaggtatctgtcctacgagcagacaaggctaaacttgaggctaatcttcaagatgtcagtacacaattgagacattacgagtctcaattggaagacctccgaaaggagtctaaaaataagattaaagggttggttgattcccttaatgcctccaaacaaagcgaggaaatgttgacatcagatgctgaacatatgaaaaagttgatggaagctgctagatccaatgaagacacgttaaggaagacttctaatgaactagaattgaagcttaaatccagtgattatgagaaacaacaaatgctggaagaaatatctggcctgaaactgcaggtccagaaaataatgaatcttcaagatgaggttttcaaacttcagagttctcttgatgaggccaagttcggaaaagggaaactggaggagattctacgctcggtgaccgaggaatgtgaagaactaaaagcacagaaggctatgctaacagataaagtttctgatatgcaggagactttgagaaatggtgaagaagaaaaacgaaacagaatagctatgcaggcaaagctcgtgaggctggagagtgatctgtcagcatcagaagcatcacatgtacatgaagcagaattaaagaacgaactcagcaggatcaagagatcaaacagtgagtaccagaggaagatacaatctcttgagcaggaaaatgaggatctcactagaagagttcaaactatggaaaagggatttgagcaaatgtcccacgttaaagagaaccttggaaagcaggagcttggaggagataaccaggcagccattcagtcaaaaattgagttattggaaacgaagctcgcagaggcattggaggaaaacaagatgtacagagctcaacagaagagtccgatgcctgaggggcaaccttctgcgggagcgggagacggcaaggagggcaataccgataggattttgcaattggaaggagagctaagagatatgaaggaacggttactgaacatgagcttgcagtatgcagaggtggaggctcagagggagcggttagtgatggagctcaaagccatgaagaaaggcaggtggttttagcaatgatggagaactgttgcctgacataaaacagacacaggctgactgacagcacagatgggcatgtcatgtgagagcaagcaaagcaaatgcaagtgatgcagagcctggacctgctaactggtgctggaagatgtgtatcccaagacgacactgaaggtccctgtgaccacccagcgcccctacatgacatgatgatccaattgttattggtatttatttttaatggcgtgccttttcatcttgtatataatatacgccggtttgtgaggagcttgactggtcagttgttgatatgattactgagatcgatgactccgatctctctattttacacccttaattgtcgataaatgtagttactctattctttctttctttcttttttgagacagcagtggagtggctgggttagtgggtagcagtcattatgttgcactcatacaatattgttttagtttgggtgtagaataatgtgacgaagggagacccatttgttcatgtaagtttgtttgtttgtttgtttgtttgtttttacagcgtagatcacggataataatgaagtttccgttgtgcggttgtggtacgtgcatcgcattattgatgaaacttttaacctcaggagggcaaagtgttgccag

SEQ ID NO: 45 - DNA, 4734 bp, Zea Mays
cagaaatctcgcaacccacagcctggcctgctgtcatgtgctgctgctgcctaacggagtccctgcagtgtcagacaggctcttcctttccatagtttcagtcgacagcggaaggacaattgcaaagtccagcaaagtagcttctcggagtgggatatgccagtggcctgacacaatcttggaacccatatggttctccaaggacgaagtctccaaagaattcgaagattgccagtacaagattattgtttccttgggatcgacaaaatctggcattcttggggagatttttctaaatctgtctaattttctgaatatagtcgatccaaccgcaatctctttgccactgaagagatgcaacgccggaacagttttacagcttaaggtccaatgtcttggcacaaagtctaagctgagtggtgtcagatcactgagggacatggctccccgtctcgatgaccgtagtccaacgccaaccaatgatgagatggacaataagtcagattgctctgatggtatgttcaacaggagtgttcgttcttcatccgaaaatcatctggttggaacttatcaagatgaatctggaaacagggaaacaagtttctctgcaccagggtcccatcggagttctaattctggagatagtactgcggatagaacaaacttctctcctagagacaactctagtggaggactttatgtgggaaggcaggattctgctagttcctatgctagttatgttagtgctggtcgtggcgatgatgggcttagatccaataattcatcttttagttctcgggcttcaggcccaaatttgctgcaagggaatactccaaaaatattttcaaatggcctttctcaattatctatgggggcatctgactcatctaaagatcttcttgaagctgctgaagaaacaattgaggagctccgtgatgaggcaaaaatgtgggaacgccactctcgtaagttgaaggctgatctagagatgctaaaaaaggagtgttctgaaaaatcaaagcaacatgctgagctagcaggcgagctatctgctgcacaagctgaacgggattcctataggcatgaaatagaagaattgaagtcatccttacaagatgtaaacacacggcaaacaattacaggaacacctaaacgttcagactggatagacctgcagaaggaacttgaaggtgaggtgaagtttcttagagaatcgaatgcggacttaaccatacaactaaacaggactcaagagtcaaatatagagcttctttctattcttcaggaactggaggaaaccattgaagaacagagagttgaaatatctaagatttcgaaggtcaagcagactgctgatcctgagaatgggcttttagtaaaagaagacaaagaatgggctaagaaactgtcaatgaaagacgatgaaatcacagttctgagggagaaattggatcgggctctcaacattggaaatgcaggtggtgctggttccaatgccatttatcttgaattggagaaagaaaatgaaattttaagggctaaaatacaagagcttgagaaggactgctctgaactaacagatgaaaatttggagcttatatataagctgaaagaaaatgggctcacaaaaggtcaggttccacgtatttcaaacaacaatgagctgcaatttgaaaagcttacatcccggattcgtcaactggaggaggaacttaggaataaggaaatgttaagagacgacagtttttctgagtcatcaacgtctaatgcagatgagttacagagaaaatgtgctgaccttgagctgaagctgctaaattttaggtctcaaacctgtgagctggaagaaaagttccaaaaaagccaagaggaactggaacaaagaaatctcgagttatccgaactgagaagaaagctaaacggtttacattctactgaactggaagtttttgaatctggtgcgacatggaagtaccaatctagaacagcagatctagaggatactgaacctgagacagatacgctaaaggctagatttgaactgcaactacaggaaaatgatgaccttcgaagttccaaggttgagatggaaaattttatttctgagattcaggcagagaagagtcagcttgaggaacgcctgtccgtgtcgcttaaagaaagcagcatcacatctaaatgcttggatgaagtgcggaaagatatccttgtgctttccagcagtatagattcccatgtttcagctaataaggttcttgagaggaacataattgagctagagagctgcaaagctgaactagagttgcatgtatcagagctggaacaggaaaacatagagttgtcagaacggatatctggactggaagcacaattgacttatctgacaaatgaaaaggagtcaagcgagctacagattcatgactccagatcgctcatcattaatctcaaagataaagtagagcggcagcaatccgagatggaaactcaaaggctcgagtttaagcagaaacaacaagaatctcaaagaagattgtcagaaacacaggatgattctgaagttctgagaagatctaattctaaactacaatctactgttgagagccttattgaagagtgcagttctcttcagaatctaactgctgatctgaaaaggcagaagttggaaatgcatggtcatcttacgcaaaaagagcaggaactggatgagtcgaaaaaaaggaactttgagtttagcaaaacagtggaattccttgaggcaaagctttcgtcactacataaggacgtttcttctaaagagcaatctttattgtcagaattggagagtatattccaggagcacatggaacaagaagaaagaattaatcgcgcgcatttcatgctcaataagatcgagaaggaaaagactcttgaagtagagaacctcaagagggaggtcgtcagcctcactgcacaggtctcctccacacatgaggagcgagaaagtgccactctggatgctattagagaggtatctgtcctacgagcagacaaggctaaacttgaggctaatcttcaagatgtcagtacacaattgagacattacgagtctcaattggaagacctccgaaaggagtctaaaaataagattaaagggttggttgattcccttaatgcctccaaacaaagcgaggaaatgttgacatcagatgctgaacatatgaaaaagttgatggaagctgctagatccaatgaagacacgttaaggaagacttctaatgaactagaattgaagcttaaatccagtgattatgagaaacaacaaatgctggaagaaatatctggcctgaaactgcaggtccagaaaataatgaatcttcaagatgaggttttcaaacttcagagttctcttgatgaggccaagttcggaaaagggaaactggaggagattctacgctcggtgaccgaggaatgtgaagaactaaaagcacagaaggctatgctaacagataaagtttctgatatgcaggagactttgagaaatggtgaagaagaaaaacgaaacagaatagctatgcaggcaaagctcgtgaggctggagagtgatctgtcagcatcagaagcatcacatgtacatgaagcagaattaaagaacgaactcagcaggatcaagagatcaaacagtgagtaccagaggaagatacaatctcttgagcaggaaaatgaggatctcactagaagagttcaaactatggaaaagggatttgagcaaatgtcccacgttaaagagaaccttggaaagcaggagcttggaggagataaccaggcagccattcagtcaaaaattgagttattggaaacgaagctcgcagaggcattggaggaaaacaagatgtacagagctcaacagaagagtccgatgcctgaggggcaaccttctgcgggagcgggagacggcaaggagggcaataccgataggattttgcaattggaaggagagctaagagatatgaaggaacggttactgaacatgagcttgcagtatgcagaggtggaggctcagagggagcggttagtgatggagctcaaagccatgaagaaaggcaggtggttttagcaatgatggagaactgttgcctgacataaaacagacacaggctgactgacagcacagatgggcatgtcatgtgagagcaagcaaagcaaatgcaagtgatgcagagcctggacctgctaactggtgctggaagatgtgtatcccaagacgacactgaaggtccctgtgaccacccagcgcccctacatgacatgatgatccaattgttattggtatttatttttaatggcgtgccttttcatcttgtatataatatacgccggtttgtgaggagcttgactggtcagttgttgatatgattactgagatcgatgactccgatctctctattttacacccttaattgtcgataaatgtagttactctattctttctttctttcttttttgagacagcagtggagtggctgggttagtgggtagcagtcattatgttgcactcatacaatattgttttagtttgggtgtagaataatgtgacgaagggagacccatttgttcatgtaagtttgtttgtttgtttgtttgtttgtttttacagcgtagatcacggataataatgaagtttccgttgtgcggttgtggtacgtgcatcgcattattgatgaaacttttaacctcaggagggcaaagtgttgccag

SEQ ID NO: 46 - DNA, 2217 bp, Zea Mays
caaaaccccacgcgccatcgcaattcgccaaaaggaaaatctcgccgtcacgccgtcactctacaggaccagttggctgcatatggaggtcgaggacctcgaggatctctacaacatcgacgcgtcgtacgaccaagacgacccggatgacgctcgaggatccagcgccgacgaggaagaggatgaagaagacgacgaagaggaggaggaggaggagccggagggggcgcggttggtcgcgggcgattgcggaccatccccacgagctagggtttccgagtttgcggcggctgccggcgccgccgtggagcgggcccacacggccaactgccccgtctgtatggacccgtggacctcccaagttgtatcccatgtgggcatgtctatgggagatcttgcctagagaagtggttaacccagcgcgggaaccgaagtgcgacgtgccctcagtgtggcaaaaggtttaaacataaggacatcatcaacctctatgcacaagaggttgctgttcctaatagtgaacttgagaaggaaatttcatacttaaggcgggaaatctgttctctgaagaagatggttgtgcaccatgataaaatgtttgaggagatgatcaagaggcagaatgatggtgttcgctcaaagagacagaaagtggctgagcactcatatgaagccgcaaatctggtggcatctaccccagccacaataagttttagcttacagaacgaattacctgtggctggagctcgagtcatcagcatagacacatctaacaaaataatacttgtttctggaagggcaaatgctataggtgctgaatatgttgttaccaagattagcatgctgtccaaccgtgaagtacgcaaaatccatcttcctcctgaaaccaaagctgttagggatatgtgtatcctgcctggtggctctgctatttttacatcactaggaaggaggctatcacttttcagcatggcaactgacagcattgttcttaactgggatttgccggctcctggttggtcgtgtgcagtaggtgcatctggttcacatcatatttatgctggattgcagaacgggatggttgtggtatttgatatccgtcaaactgtgaggcccttgcgttgtatggtggggctatctgcaaatccggttcatactctccactctgtcattgataacaacggttccaggaaggttctttcagcttctgctataggtccctgcatgtgggatgctgatagcaaccaaagcaggccgcatttgctaactgggacgggagatgagcgtgtctgcatatctcttgcatgtgccgctccatggagtgaccttttggtggcttccttccggcccagagttgatccatcaggagatgcagttgccgcatcccaagtttatctatcacaaacgcctacacggtctgggcaggggaaaccagggcagcacacccttatcaggaggaggacgggtaacacctgcttcgctgaaggcacgacttgctatgccaacgtgagcgagctgcgcatgtcaaaatcggccatcataccttacggatacggaggccaccagcagaagcacctgttctcctacggagacgagtcgctgcgtggggtccggacctggcaactgccttcgtttgggatgcatgctgacctctgcacccaccgggagcccatccttgatttaaggtacgctgctgaaactgaaggaccaggtgggtaccttggttgcttaagcgaggagaagctgcaggtgttcagagttaattaattgttaggtagcttagctggtcagtgagggagcagcttctttttgacttttggtagctcagctcagctaattgctaggtaacataacatcactgtgaaggtcgtgcttgtttggtgaagctgctgtgtacatacagggcaacagctgaaattgcctagttttggtgctgctggctgtttgtttgtgtcactgactggagtgaagaccatctccagcaattcctcccatatttcactgactagagagagtagcatagaaagtgtacataaatacacaatgcattccagagacgctacgcatgtgtattatacaagttgacaggtacgcaaacacatacatggagtgttcatacgtaatagcatctggacactggtgatcggtgggacggggataaataaggttgccaaggtcagcctcgccgccggccaccacgtacggccgtgctccgtc

SEQ ID NO: 47 - DNA, 2371 bp, Zea Mays
cgcgccatcgcaattcgccaaaaggaaaatctcgccgtcacgccgtcactctacaggaccagttggctgcatatggaggtcgaggacctcgaggatctctacaacatcgacgcgtcgtacgaccaagacgacccggatgaggacgagggggagcagcagagcgaggatgaccaagagatggacatgctaggaggagcggtggcggaggaggacggggcggatgacgctcgaggatccagcgccgacgaggaagaggatgaagaagacgacgaagaggaggaggaggaggagccggagggggcgcggttggtcgcgggcgattgcggaccatccccacgagctagggtttccgagtttgcggcggctgccggcgccgccgtggagcgggcccacacggccaactgccccgtctgtatggacccgtggacctcccaagttgtatcccatgtgggcatgtctatgggagatcttgcctagagaagtggttaacccagcgcgggaaccgaagtgcgacgtgccctcagtgtggcaaaaggtttaaacataaggacatcatcaacctctatgcacaagaggttgctgttcctaatagtgaacttgagaaggaaatttcatacttaaggcgggaaatctgttctctgaagaagatggttgtgcaccatgataaaatgtttgaggagatgatcaagaggcagaatgatggtgttcgctcaaagagacagaaagtggctgagcactcatatgaagccgcaaatctggtggcatctaccccagccacaataagttttagcttacaggtggcccgtgagaaaacgctcaagcccaacatgacacaaagacacacgcagcacaacgctcccggatagtaccacctcgctagctgaaggagaacgagcgagctataaaaaaaggagcagaacgaattacctgtggctggagctcgagtcatcagcatagacacatctaacaaaataatacttgtttctggaagggcaaatgctataggtgctgaatatgttgttaccaagattagcatgctgtccaaccgtgaagtacgcaaaatccatcttcctcctgaaaccaaagctgttagggatatgtgtatcctgcctggtggctctgctatttttacatcactaggaaggaggctatcacttttcaggctcctggttggtcgtgtgcagtaggtgcatctggttcacatcatatttatgctggattgcagaacgggatggttgtggtatttgatatccgtcaaactgtgaggcccttgcgttgtatggtggggctatctgcaaatccggttcatactctccactctgtcattgataacaacggttccaggaaggttctttcagcttctgctataggtccctgcatgtgggatgctgatagcaaccaaagcaggccgcatttgctaactgggacgggagatgagcgtgtctgcatatctcttgcatgtgccgctccatggagtgaccttttggtggcttccttccggcccagagttgatccatcaggagatgcagttgccgcatcccaagtttatctatcacaaacgcctacacggtctgggcaggggaaaccagggcagcacacccttatcaggaggaggacgggtaacacctgcttcgctgaaggcacgacttgctatgccaacgtgagcgagctgcgcatgtcaaaatcggccatcataccttacggatacggaggccaccagcagaagcacctgttctcctacggagacgagtcgctgcgtggggtccggacctggcaactgccttcgtttgggatgcatgctgacctctgcacccaccgggagcccatccttgatttaaggtacgctgctgaaactgaaggaccaggtgggtaccttggttgcttaagcgaggagaagctgcaggtgttcagagttaattaattgttaggtagcttagctggtcagtgagggagcagcttctttttgacttttggtagctcagctcagctaattgctaggtaacataacatcactgtgaaggtcgtgcttgtttggtgaagctgctgtgtacatacagggcaacagctgaaattgcctagttttggtgctgctggctgtttgtttgtgtcactgactggagtgaagaccatctccagcaattcctcccatatttcactgactagagagagtagcatagaaagtgtacataaatacacaatgcattccagagacgctacgcatgtgtattatacaagttgacaggtacgcaaacacatacatggagtgttcatacgtaatagcatctggacactggtgatcggtgggacggggataaataaggttgccaaggtcagcctcgccgccggccaccacgtacggccgtgctccgtc

SEQ ID NO: 48 - DNA, 2333 bp, Zea Mays
caattcgccaaaaggaaaatctcgccgtcacgccgtcactctacaggaccagttggctgcatatggaggtcgaggacctcgaggatctctacaacatcgacgcgtcgtacgaccaagacgacccggatgacgctcgaggatccagcgccgacgaggaagaggatgaagaagacgacgaagaggaggaggaggaggagccggagggggcgcggttggtcgcgggcgattgcggaccatccccacgagctagggtttccgagtttgcggcggctgccggcgccgccgtggagcgggcccacacggccaactgccccgtctgtatggacccgtggacctcccaaggtccgcatcgcatcagttgtatcccatgtgggcatgtctatgggagatcttgcctagagaagtggttaacccagcgcgggaaccgaagtgcgacgtgccctcagtgtggcaaaaggtttaaacataaggacatcatcaacctctatgcacaagaggttgctgttcctaatagtgaacttgagaaggaaatttcatacttaaggcgggaaatctgttctctgaagaagatggttgtgcaccatgataaaatgtttgaggagatgatcaagaggcagaatgatggtgttcgctcaaagagacagaaagtggctgagcactcatatgaagccgcaaatctggtggcatctaccccagccacaataagttttagcttacaggtggcccgtgagaaaacgctcaagcccaacatgacacaaagacacacgcagcacaacgctcccggatagtaccacctcgctagctgaaggagaacgagcgagctataaaaaaaggagcagaacgaattacctgtggctggagctcgagtcatcagcatagacacatctaacaaaataatacttgtttctggaagggcaaatgctataggtgctgaatatgttgttaccaagattagcatgctgtccaaccgtgaagtacgcaaaatccatcttcctcctgaaaccaaagctgttagggatatgtgtatcctgcctggtggctctgctatttttacatcactaggaaggaggctatcacttttcagcatggcaactgacagcattgttcttaactgggatttgccggctcctggttggtcgtgtgcagtaggtgcatctggttcacatcatatttatgctggattgcagaacgggatggttgtggtatttgatatccgtcaaactgtgaggcccttgcgttgtatggtggggctatctgcaaatccggttcatactctccactctgtcattgataacaacggttccaggaaggttctttcagcttctgctataggtccctgcatgtgggatgctgatagcaaccaaagcaggccgcatttgctaactgggacgggagatgagcgtgtctgcatatctcttgcatgtgccgctccatggagtgaccttttggtggcttccttccggcccagagttgatccatcaggagatgcagttgccgcatcccaagtttatctatcacaaacgcctacacggtctgggcaggggaaaccagggcagcacacccttatcaggaggaggacgggtaacacctgcttcgctgaaggcacgacttgctatgccaacgtgagcgagctgcgcatgtcaaaatcggccatcataccttacggatacggaggccaccagcagaagcacctgttctcctacggagacgagtcgctgcgtggggtccggacctggcaactgccttcgtttgggatgcatgctgacctctgcacccaccgggagcccatccttgatttaaggtacgctgctgaaactgaaggaccaggtgggtaccttggttgcttaagcgaggagaagctgcaggtgttcagagttaattaattgttaggtagcttagctggtcagtgagggagcagcttctttttgacttttggtagctcagctcagctaattgctaggtaacataacatcactgtgaaggtcgtgcttgtttggtgaagctgctgtgtacatacagggcaacagctgaaattgcctagttttggtgctgctggctgtttgtttgtgtcactgactggagtgaagaccatctccagcaattcctcccatatttcactgactagagagagtagcatagaaagtgtacataaatacacaatgcattccagagacgctacgcatgtgtattatacaagttgacaggtacgcaaacacatacatggagtgttcatacgtaatagcatctggacactggtgatcggtgggacggggataaataaggttgccaaggtcagcctcgccgccggccaccacgtacggccgtgctccgtc

SEQ ID NO: 49 - DNA, 2441 bp, Zea Mays
ctcgccgtcacgccgtcactctacaggaccagttggctgcatatggaggtcgaggacctcgaggatctctacaacatcgacgcgtcgtacgaccaagacgacccggatgacgctcgaggatccagcgccgacgaggaagaggatgaagaagacgacgaagaggaggaggaggaggagccggagggggcgcggttggtcgcgggcgattgcggaccatccccacgagctagggtttccgagtttgcggcggctgccggcgccgccgtggagcgggcccacacggccaactgccccgtctgtatggacccgtggacctcccaaggtccgcatcgcatcagttgtatcccatgtgggcatgtctatgggagatcttgcctagagaagtggttaacccagcgcgggaaccgaagtgcgacgtgccctcagtgtggcaaaaggtttaaacataaggacatcatcaacctctatgcacaagaggttgctgttcctaatagtgaacttgagaaggaaatttcatacttaaggcgggaaatctgttctctgaagaagatggttgtgcaccatgataaaatgtttgaggagatgatcaagaggcagaatgatggtgttcgctcaaagagacagaaagtggctgagcactcatatgaagccgcaaatctggtggcatctaccccagccacaataagttttagcttacagaacgaattacctgtggctggagctcgagtcatcagcatagacacatctaacaaaataatacttgtttctggaagggcaaatgctataggtgctgaatatgttgttaccaagattagcatgctgtccaaccgtgaagtacgcaaaatccatcttcctcctgaaaccaaagctgttagggatatgtgtatcctgcctggtggctctgctatttttacatcactaggaaggaggctatcacttttcagcatggcaactgacagcattgttcttaactgggatttgccggtaatgatctcagctggcttgtaaacacttgcacctaatgctattgcctcccttttattgatccaagatgcccctgtaaaatatgttgtacaataaatgagtaaacgtaccacctcaaaatttgactcatgtgacctgtaaaatctacaacagaatatataagcatatgggagtacgttgggttgggatctctcctaccatctttgtgttgatttaaaattgaagacatttgacttttttcagccttggctcctggttggtcgtgtgcagtaggtgcatctggttcacatcatatttatgctggattgcagaacgggatggttgtggtatttgatatccgtcaaactgtgaggcccttgcgttgtatggtggggctatctgcaaatccggttcatactctccactctgtcattgataacaacggttccaggaaggttctttcagcttctgctataggtccctgcatgtgggatgctgatagcaaccaaagcaggccgcatttgctaactgggacgggagatgagcgtgtctgcatatctcttgcatgtgccgctccatggagtgaccttttggtggcttccttccggcccagagttgatccatcaggagatgcagttgccgcatcccaagtttatctatcacaaacgcctacacggtctgggcaggggaaaccagggcagcacacccttatcaggaggaggacgggtaacacctgcttcgctgaaggcacgacttgctatgccaacgtgagcgagctgcgcatgtcaaaatcggccatcataccttacggatacggaggccaccagcagaagcacctgttctcctacggagacgagtcgctgcgtggggtccggacctggcaactgccttcgtttgggatgcatgctgacctctgcacccaccgggagcccatccttgatttaaggtacgctgctgaaactgaaggaccaggtgggtaccttggttgcttaagcgaggagaagctgcaggtgttcagagttaattaattgttaggtagcttagctggtcagtgagggagcagcttctttttgacttttggtagctcagctcagctaattgctaggtaacataacatcactgtgaaggtcgtgcttgtttggtgaagctgctgtgtacatacagggcaacagctgaaattgcctagttttggtgctgctggctgtttgtttgtgtcactgactggagtgaagaccatctccagcaattcctcccatatttcactgactagagagagtagcatagaaagtgtacataaatacacaatgcattccagagacgctacgcatgtgtattatacaagttgacaggtacgcaaacacatacatggagtgttcatacgtaatagcatctggacactggtgatcggtgggacggggataaataaggttgccaaggtcagcctcgccgccggccaccacgtacggccgtgctccgtc

SEQ ID NO: 50 - DNA, 2189 bp, Zea Mays
ctcgccgtcacgccgtcactctacaggaccagttggctgcatatggaggtcgaggacctcgaggatctctacaacatcgacgcgtcgtacgaccaagacgacccggatgacgctcgaggatccagcgccgacgaggaagaggatgaagaagacgacgaagaggaggaggaggaggagccggagggggcgcggttggtcgcgggcgattgcggaccatccccacgagctagggtttccgagtttgcggcggctgccggcgccgccgtggagcgggcccacacggccaactgccccgtctgtatggacccgtggacctcccaaggtccgcatcgcatcagttgtatcccatgtgggcatgtctatgggagatcttgcctagagaagtggttaacccagcgcgggaaccgaagtgcgacgtgccctcagtgtggcaaaaggtttaaacataaggacatcatcaacctctatgcacaagaggttgctgttcctaatagtgaacttgagaaggaaatttcatacttaaggcgggaaatctgttctctgaagaagatggttgtgcaccatgataaaatgtttgaggagatgatcaagaggcagaatgatggtgttcgctcaaagagacagtggctgagcactcatatgaagccgcaaatctggtggcatctaccccagccacaataagttttagcttacagaacgaattacctgtggctggagctcgagtcatcagcatagacacatctaacaaaataatacttgtttctggaagggcaaatgctataggtgctgaatatgttgttaccaagattagcatgctgtccaaccgtgaagtacgcaaaatccatcttcctcctgaaaccaaagctgttagggatatgtgtatcctgcctggtggctctgctatttttacatcactaggaaggaggctatcacttttcagcatggcaactgacagcattgttcttaactgggatttgccggctcctggttggtcgtgtgcagtaggtgcatctggttcacatcatatttatgctggattgcagaacgggatggttgtggtatttgatatccgtcaaactgtgaggcccttgcgttgtatggtggggctatctgcaaatccggttcatactctccactctgtcattgataacaacggttccaggaaggttctttcagcttctgctataggtccctgcatgtgggatgctgatagcaaccaaagcaggccgcatttgctaactgggacgggagatgagcgtgtctgcatatctcttgcatgtgccgctccatggagtgaccttttggtggcttccttccggcccagagttgatccatcaggagatgcagttgccgcatcccaagtttatctatcacaaacgcctacacggtctgggcaggggaaaccagggcagcacacccttatcaggaggaggacgggtaacacctgcttcgctgaaggcacgacttgctatgccaacgtgagcgagctgcgcatgtcaaaatcggccatcataccttacggatacggaggccaccagcagaagcacctgttctcctacggagacgagtcgctgcgtggggtccggacctggcaactgccttcgtttgggatgcatgctgacctctgcacccaccgggagcccatccttgatttaaggtacgctgctgaaactgaaggaccaggtgggtaccttggttgcttaagcgaggagaagctgcaggtgttcagagttaattaattgttaggtagcttagctggtcagtgagggagcagcttctttttgacttttggtagctcagctcagctaattgctaggtaacataacatcactgtgaaggtcgtgcttgtttggtgaagctgctgtgtacatacagggcaacagctgaaattgcctagttttggtgctgctggctgtttgtttgtgtcactgactggagtgaagaccatctccagcaattcctcccatatttcactgactagagagagtagcatagaaagtgtacataaatacacaatgcattccagagacgctacgcatgtgtattatacaagttgacaggtacgcaaacacatacatggagtgttcatacgtaatagcatctggacactggtgatcggtgggacggggataaataaggttgccaaggtcagcctcgccgccggccaccacgtacggccgtgctccgtc

SEQ ID NO: 51 - DNA, 2153 bp, Zea Mays
ctcgccgtcacgccgtcactctacaggaccagttggctgcatatggaggtcgaggacctcgaggatctctacaacatcgacgcgtcgtacgaccaagacgacccggatgacgctcgaggatccagcgccgacgaggaagaggatgaagaagacgacgaagaggaggaggaggaggagccggagggggcgcggttggtcgcgggcgattgcggaccatccccacgagctagggtttccgagtttgcggcggctgccggcgccgccgtggagcgggcccacacggccaactgccccgtctgtatggacccgtggacctcccaaggtccgcatcgcatcagttgtatcccatgtgggcatgtctatgggagatcttgcctagagaagtggttaacccagcgcgggaaccgaagtgcgacgtgccctcagtgtggcaaaaggtttaaacataaggacatcatcaacctctatgcacaagaggttgctgttcctaatagtgaacttgagaaggaaatttcatacttaaggcgggaaatctgttctctgaagaagatggttgtgcaccatgataaaatgtttgaggagatgatcaagaggcagaatgatggtgttcgctcaaagagacagaaagtggctgagcactcatatgaagccgcaaatctggtggcatctaccccagccacaataagttttagcttacagaacgaattacctgtggctggagctcgagtcatcagcatagacacatctaacaaaataatacttgtttctggaagggcaaatgctataggtgctgaatatgttgttaccaagattagcatgctgtccaaccgtgaagtacgcaaaatccatcttcctcctgaaaccaaagctgttagggatatgtgtatcctgcctggtggctctgctatttttacatcactaggaaggaggctatcacttttcaggctcctggttggtcgtgtgcagtaggtgcatctggttcacatcatatttatgctggattgcagaacgggatggttgtggtatttgatatccgtcaaactgtgaggcccttgcgttgtatggtggggctatctgcaaatccggttcatactctccactctgtcattgataacaacggttccaggaaggttctttcagcttctgctataggtccctgcatgtgggatgctgatagcaaccaaagcaggccgcatttgctaactgggacgggagatgagcgtgtctgcatatctcttgcatgtgccgctccatggagtgaccttttggtggcttccttccggcccagagttgatccatcaggagatgcagttgccgcatcccaagtttatctatcacaaacgcctacacggtctgggcaggggaaaccagggcagcacacccttatcaggaggaggacgggtaacacctgcttcgctgaaggcacgacttgctatgccaacgtgagcgagctgcgcatgtcaaaatcggccatcataccttacggatacggaggccaccagcagaagcacctgttctcctacggagacgagtcgctgcgtggggtccggacctggcaactgccttcgtttgggatgcatgctgacctctgcacccaccgggagcccatccttgatttaaggtacgctgctgaaactgaaggaccaggtgggtaccttggttgcttaagcgaggagaagctgcaggtgttcagagttaattaattgttaggtagcttagctggtcagtgagggagcagcttctttttgacttttggtagctcagctcagctaattgctaggtaacataacatcactgtgaaggtcgtgcttgtttggtgaagctgctgtgtacatacagggcaacagctgaaattgcctagttttggtgctgctggctgtttgtttgtgtcactgactggagtgaagaccatctccagcaattcctcccatatttcactgactagagagagtagcatagaaagtgtacataaatacacaatgcattccagagacgctacgcatgtgtattatacaagttgacaggtacgcaaacacatacatggagtgttcatacgtaatagcatctggacactggtgatcggtgggacggggataaataaggttgccaaggtcagcctcgccgccggccaccacgtacggccgtgctccgtc

SEQ ID NO: 52 - DNA, 2870 bp, Zea Mays
gtttcacttgcagcacgcttggttaaactccgggcgatggccgagcaaggacgcacccgggattggacctatcgacggtggcagcccgcagcccatcggtttcgccgaccggcgcctcgttcgcatcgactccacctcctcctcctcgcacgctataaactagactagagcaatacccgtggtggatgttccaccgcctgctccgccgcgcgatgccgctcccgccgccgcagtccccgcttcctgctccccggatgccgggggtcaccggcgggcgcctcttcgcttcgctgccgtcgccgccgcccctccagtctcgaagagaggtgcatgtgtggtatcttttgcctgatgagttgaaggatgcctcccaactcaagatgtacacggagctcctttccccttctgaaaggaagactgctttgtctatgaacggggaaaagttgcagaaaggtgccgtgctgtcccgtgcactgctgcgcaccaccctctcgagatatacagattgcaaagttgatccaagatcatttgagtttaagaaaaacaagtttggcaaacctgaggtactgtggcgatctgatgacagcaggatggaatggcctttacatttcaatatttcacacacatcatctttgattgtctgtggcataaccatggatactcctattggcattgacgttgaagagaagacacgaaagacagccaagaatattttatctcttgctcgccgttatttcaccccatctgaaattgattatctagctaaaattccagatcctgatgctcagcaaaaggagttcgtaaaactatggactcttaaagttagtgaactttcgtaagcaattgatttgtgtttttgtattatcattatttagaacactggtcagtagtacctttcttatgcaaagcttaagattcttaactgaactagtcacctaccacttgaagcatactaggaccaaggagacatgagggtagcatggaagtgtatttcatgatttatatatgaaggatcacacttttttttatcgaacactcagcagatgatcacacttaactgtgggtggtaagaaacccagtgcgcgcgcgcgcacgctacagggaactcaatcatctgctagctccaaactggaaacagcagcaggaagcacgcctgcaacacatgcagacacccctacacctaccgaagctaacccggaggactctgggcttgaaggaaatccccttggcaccagccaaagaccacaaaaggcttccgccttggccaacctaacaaccacaaccaaattcggaggagttccttgaaagacaataacatttctgtgtttccacaacatccaagctctcaggacaaccagagtcaaattcttttttgctcagcccactcatacgagcactattgaagcaccaccactgatcaaaatcattctcacccagccctggatggaggttctgcattccaaagggcctgagcagctcaaatcaaaactgccgcacatacaccttttatctagttcatttaaatcgtcattggatttcttagtcaacatttccttcctaagtcagagacttacatgttacaataataattttgattacatgtatcgttgatgtcttaattttgtaggaagcatatgtaaaagctcttggaagggggttttcaggcgcccctttcaacaaattctcgattatattggcagcaaatggcagaatccaaatttctgtggtatactatttccctctttgtgctcatgcttgtcagtataattcttatactacttgcatgaatttatggaatcggtcagtataattttgggtggactggtcccttagaccaacaaatttctatgggttccttttaactcttgatcacacagtgaaaaacatcttctttggattctttgtgacgttacgaattttttgaagaaaaaaaagtatcatgttcttttgtgaccacacttgcaagctctactgctccacaaatgcaacctaataattaagtgtttttgccaaagaaagcaagaaaaattctgaattgtcttcaatcctttggagtttccaggcaccaaaagtatcgaacggttctgactctatccatgactgtctgtccgagaattggcagtttgcacttgctgaactaaacagttctcattacatggcaatctgtatagaggatgactcaacaagttcagattctggaaacggtagactgccactaggattgaaagtatggaagaccactccgttcgtggaagatatacttgtttctggaacggaagctgtaaaacttgtcagttaagtatgtgagaggatatctgccattggtcaagtgatttcgccagatgacaatgtgatgcaacgaatgtatttggacgaagtatgcgctgtgcagggaggctgaacggttttcttcgagcatactgcatgcattgatgaactgaccactgacactgtgtgctttagttaagatttggaaatgcaatgacatacactttggagtcctgatattcatattagcatatcacgacactgtttcgaaaggaataaacatttatctctctcttgtgtgtgtgtgtggggtaattttagacgtattttgtactgattggtccttgttatctgacggatcattggaagaaatattcatgcatcagcatgcttctatcggtggcataggaattctgctattggtcttggtgctgcgttccaatgcgattcgaagctgcaggtgtttgtcatatttggcagaacataatgctgttgaataggattagattatagctcagaatagtaaccgaaagaaactgctctgctgattgcaggctccagcatcatcgttcggatgaggtccttgccgccgtatgtcggag

SEQ ID NO: 53 - DNA, 1523 bp, Zea Mays
gcacgcttggttaaactccgggcgatggccgagcaaggacgcacccgggattggacctatcgacggtggcagcccgcagcccatcggtttcgccgaccggcgcctcgttcgcatcgactccacctcctcctcctcgcacgctataaactagactagagcaatacccgtggtggatgttccaccgcctgctccgccgcgcgatgccgctcccgccgccgcagtccccgcttcctgctccccggatgccgggggtcaccggcgggcgcctcttcgcttcgctgccgtcgccgccgcccctccagtctcgaagagaggtgcatgtgtggtatcttttgcctgatgagttgaaggatgcctcccaactcaagatgtacacggagctcctttccccttctgaaaggaagactgctttgtctatgaacggggaaaagttgcagaaaggtgccgtgctgtcccgtgcactgctgcgcaccaccctctcgagatattgcaaagttgatccaagatcatttgagtttaagaaaaacaagtttggcaaacctgaggtactgtggcgatctgatgacagcaggatggaatggcctttacatttcaatatttcacacacatcatctttgattgtctgtggcataaccatggatactcctattggcattgacgttgaagagaagacacgaaagacagccaagaatattttatctcttgctcgccgttatttcaccccatctgaaattgattatctagctaaaattccagatcctgatgctcagcaaaaggagttcgtaaaactatggactcttaaagttagtgaactttcgtaagcaattgatttgtgtttttgtattatcattatttagaacactggtcagtagtacctttcttatgcaaagcttaagattcttaactgaactagtcacctaccacttgaagcatactaggaccaaggagacatgagggtagcatggaagtgtatttcatgatttatatatgaaggatcacacttttttttatcgaacactcagcagatgatcacacttaactgtgggtggtaagaaacccagtgcgcgcgcgcgcacgctacagggaactcaatcatctgctagctccaaactggaaacagcagcaggaagcacgcctgcaacacatgcagacacccctacacctaccgaagctaacccggaggactctgggcttgaaggaaatccccttggcaccagccaaagaccacaaaaggcttccgccttggccaacctaacaaccacaaccaaattcggaggagttccttgaaagacaataacatttctgtgtttccacaacatccaagctctcaggacaaccagagtcaaattcttttttgctcagcccactcatacgagcactattgaagcaccaccactgatcaaaatcattctcacccagccctggatggaggttctgcattccaaagggcctgagcagctcaaatcaaaactgccgcacatacaccttttatctagttcatttaaatcgtcattggatttctt

SEQ ID NO: 54 - DNA, 2863 bp, Zea Mays
gcacgcttggttaaactccgggcgatggccgagcaaggacgcacccgggattggacctatcgacggtggcagcccgcagcccatcggtttcgccgaccggcgcctcgttcgcatcgactccacctcctcctcctcgcacgctataaactagactagagcaatacccgtggtggatgttccaccgcctgctccgccgcgcgatgccgctcccgccgccgcagtccccgcttcctgctccccggatgccgggggtcaccggcgggcgcctcttcgcttcgctgccgtcgccgccgcccctccagtctcgaagagaggtgcatgtgtggtatcttttgcctgatgagttgaaggatgcctcccaactcaagatgtacacggagctcctttccccttctgaaaggaagactgctttgtctatgaacggggaaaagttgcagaaaggtgccgtgctgtcccgtgcactgctgcgcaccaccctctcgagatactagatacagattgcaaagttgatccaagatcatttgagtttaagaaaaacaagtttggcaaacctgaggtactgtggcgatctgatgacagcaggatggaatggcctttacatttcaatatttcacacacatcatctttgattgtctgtggcataaccatggatactcctattggcattgacgttgaagagaagacacgaaagacagccaagaatattttatctcttgctcgccgttatttcaccccatctgaaattgattatctagctaaaattccagatcctgatgctcagcaaaaggagttcgtaaaactatggactcttaaagttagtgaactttcgtaagcaattgatttgtgtttttgtattatcattatttagaacactggtcagtagtacctttcttatgcaaagcttaagattcttaactgaactagtcacctaccacttgaagcatactaggaccaaggagacatgagggtagcatggaagtgtatttcatgatttatatatgaaggatcacacttttttttatcgaacactcagcagatgatcacacttaactgtgggtggtaagaaacccagtgcgcgcgcgcgcacgctacagggaactcaatcatctgctagctccaaactggaaacagcagcaggaagcacgcctgcaacacatgcagacacccctacacctaccgaagctaacccggaggactctgggcttgaaggaaatccccttggcaccagccaaagaccacaaaaggcttccgccttggccaacctaacaaccacaaccaaattcggaggagttccttgaaagacaataacatttctgtgtttccacaacatccaagctctcaggacaaccagagtcaaattcttttttgctcagcccactcatacgagcactattgaagcaccaccactgatcaaaatcattctcacccagccctggatggaggttctgcattccaaagggcctgagcagctcaaatcaaaactgccgcacatacaccttttatctagttcatttaaatcgtcattggatttcttagtcaacatttccttcctaagtcagagacttacatgttacaataataattttgattacatgtatcgttgatgtcttaattttgtaggaagcatatgtaaaagctcttggaagggggttttcaggcgcccctttcaacaaattctcgattatattggcagcaaatggcagaatccaaatttctgtggtatactatttccctctttgtgctcatgcttgtcagtataattcttatactacttgcatgaatttatggaatcggtcagtataattttgggtggactggtcccttagaccaacaaatttctatgggttccttttaactcttgatcacacagtgaaaaacatcttctttggattctttgtgacgttacgaattttttgaagaaaaaaaagtatcatgttcttttgtgaccacacttgcaagctctactgctccacaaatgcaacctaataattaagtgtttttgccaaagaaagcaagaaaaattctgaattgtcttcaatcctttggagtttccaggcaccaaaagtatcgaacggttctgactctatccatgactgtctgtccgagaattggcagtttgcacttgctgaactaaacagttctcattacatggcaatctgtatagaggatgactcaacaagttcagattctggaaacggtagactgccactaggattgaaagtatggaagaccactccgttcgtggaagatatacttgtttctggaacggaagctgtaaaacttgtcagttaagtatgtgagaggatatctgccattggtcaagtgatttcgccagatgacaatgtgatgcaacgaatgtatttggacgaagtatgcgctgtgcagggaggctgaacggttttcttcgagcatactgcatgcattgatgaactgaccactgacactgtgtgctttagttaagatttggaaatgcaatgacatacactttggagtcctgatattcatattagcatatcacgacactgtttcgaaaggaataaacatttatctctctcttgtgtgtgtgtgtggggtaattttagacgtattttgtactgattggtccttgttatctgacggatcattggaagaaatattcatgcatcagcatgcttctatcggtggcataggaattctgctattggtcttggtgctgcgttccaatgcgattcgaagctgcaggtgtttgtcatatttggcagaacataatgctgttgaataggattagattatagctcagaatagtaaccgaaagaaactgctctgctgattgcaggctccagcatcatcgttcggatgaggtccttgccgccgtatgtcggag

SEQ ID NO: 55 - DNA, 1624 bp, Zea Mays
gcacgcttggttaaactccgggcgatggccgagcaaggacgcacccgggattggacctatcgacggtggcagcccgcagcccatcggtttcgccgaccggcgcctcgttcgcatcgactccacctcctcctcctcgcacgctataaactagactagagcaatacccgtggtggatgttccaccgcctgctccgccgcgcgatgccgctcccgccgccgcagtccccgcttcctgctccccggatgccgggggtcaccggcgggcgcctcttcgcttcgctgccgtcgccgccgcccctccagtctcgaagagaggtgcatgtgtggtatcttttgcctgatgagttgaaggatgcctcccaactcaagatgtacacggagctcctttccccttctgaaaggaagactgctttgtctatgaacggggaaaagttgcagaaaggtgccgtgctgtcccgtgcactgctgcgcaccaccctctcgagatatacagattgcaaagttgatccaagatcatttgagtttaagaaaaacaagtttggcaaacctgaggtactgtggcgatctgatgacagcaggatggaatggcctttacatttcaatatttcacacacatcatctttgattgtctgtggcataaccatggatactcctattggcattgacgttgaagagaagacacgaaagacagccaagaatattttatctcttgctcgccgttatttcaccccatctgaaattgattatctagctaaaattccagatcctgatgctcagcaaaaggagttcgtaaaactatggactcttaaatttccaggcaccaaaagtatcgaacggttctgactctatccatgactgtctgtccgagaattggcagtttgcacttgctgaactaaacagttctcattacatggcaatctgtatagaggatgactcaacaagttcagattctggaaacggtagactgccactaggattgaaagtatggaagaccactccgttcgtggaagatatacttgtttctggaacggaagctgtaaaacttgtcagttaagtatgtgagaggatatctgccattggtcaagtgatttcgccagatgacaatgtgatgcaacgaatgtatttggacgaagtatgcgctgtgcagggaggctgaacggttttcttcgagcatactgcatgcattgatgaactgaccactgacactgtgtgctttagttaagatttggaaatgcaatgacatacactttggagtcctgatattcatattagcatatcacgacactgtttcgaaaggaataaacatttatctctctcttgtgtgtgtgtgtggggtaattttagacgtattttgtactgattggtccttgttatctgacggatcattggaagaaatattcatgcatcagcatgcttctatcggtggcataggaattctgctattggtcttggtgctgcgttccaatgcgattcgaagctgcaggtgtttgtcatatttggcagaacataatgctgttgaataggattagattatagctcagaatagtaaccgaaagaaactgctctgctgattgcaggctccagcatcatcgttcggatgaggtccttgccgccgtatgtcggag

SEQ ID NO: 56 - DNA, 2052 bp, Zea Mays
gcacgcttggttaaactccgggcgatggccgagcaaggacgcacccgggattggacctatcgacggtggcagcccgcagcccatcggtttcgccgaccggcgcctcgttcgcatcgactccacctcctcctcctcgcacgctataaactagactagagcaatacccgtggtggatgttccaccgcctgctccgccgcgcgatgccgctcccgccgccgcagtccccgcttcctgctccccggatgccgggggtcaccggcgggcgcctcttcgcttcgctgccgtcgccgccgcccctccagtctcgaagagaggtgcatgtgtggtatcttttgcctgatgagttgaaggatgcctcccaactcaagatgtacacggagctcctttccccttctgaaaggaagactgctttgtctatgaacggggaaaagttgcagaaaggtgccgtgctgtcccgtgcactgctgcgcaccaccctctcgagatatacagattgcaaagttgatccaagatcatttgagtttaagaaaaacaagtttggcaaacctgaggtactgtggcgatctgatgacagcaggatggaatggcctttacatttcaatatttcacacacatcatctttgattgtctgtggcataaccatggatactcctattggcattgacgttgaagagaagacacgaaagacagccaagaatattttatctcttgctcgccgttatttcaccccatctgaaattgattatctagctaaaattccagatcctgatgctcagcaaaaggagttcgtaaaactatggactcttaaagaagcatatgtaaaagctcttggaagggggttttcaggcgcccctttcaacaaattctcgattatattggcagcaaatggcagaatccaaatttctgtggtatactatttccctctttgtgctcatgcttgtcagtataattcttatactacttgcatgaatttatggaatcggtcagtataattttgggtggactggtcccttagaccaacaaatttctatgggttccttttaactcttgatcacacagtgaaaaacatcttctttggattctttgtgacgttacgaattttttgaagaaaaaaaagtatcatgttcttttgtgaccacacttgcaagctctactgctccacaaatgcaacctaataattaagtgtttttgccaaagaaagcaagaaaaattctgaattgtcttcaatcctttggagtttccaggcaccaaaagtatcgaacggttctgactctatccatgactgtctgtccgagaattggcagtttgcacttgctgaactaaacagttctcattacatggcaatctgtatagaggatgactcaacaagttcagattctggaaacggtagactgccactaggattgaaagtatggaagaccactccgttcgtggaagatatacttgtttctggaacggaagctgtaaaacttgtcagttaagtatgtgagaggatatctgccattggtcaagtgatttcgccagatgacaatgtgatgcaacgaatgtatttggacgaagtatgcgctgtgcagggaggctgaacggttttcttcgagcatactgcatgcattgatgaactgaccactgacactgtgtgctttagttaagatttggaaatgcaatgacatacactttggagtcctgatattcatattagcatatcacgacactgtttcgaaaggaataaacatttatctctctcttgtgtgtgtgtgtggggtaattttagacgtattttgtactgattggtccttgttatctgacggatcattggaagaaatattcatgcatcagcatgcttctatcggtggcataggaattctgctattggtcttggtgctgcgttccaatgcgattcgaagctgcaggtgtttgtcatatttggcagaacataatgctgttgaataggattagattatagctcagaatagtaaccgaaagaaactgctctgctgattgcaggctccagcatcatcgttcggatgaggtccttgccgccgtatgtcggag

SEQ ID NO: 57 - DNA, 2046 bp, Zea Mays
gcacgcttggttaaactccgggcgatggccgagcaaggacgcacccgggattggacctatcgacggtggcagcccgcagcccatcggtttcgccgaccggcgcctcgttcgcatcgactccacctcctcctcctcgcacgctataaactagactagagcaatacccgtggtggatgttccaccgcctgctccgccgcgcgatgccgctcccgccgccgcagtccccgcttcctgctccccggatgccgggggtcaccggcgggcgcctcttcgcttcgctgccgtcgccgccgcccctccagtctcgaagagaggtgcatgtgtggtatcttttgcctgatgagttgaaggatgcctcccaactcaagatgtacacggagctcctttccccttctgaaaggaagactgctttgtctatgaacggggaaaagttgcagaaaggtgccgtgctgtcccgtgcactgctgcgcaccaccctctcgagatattgcaaagttgatccaagatcatttgagtttaagaaaaacaagtttggcaaacctgaggtactgtggcgatctgatgacagcaggatggaatggcctttacatttcaatatttcacacacatcatctttgattgtctgtggcataaccatggatactcctattggcattgacgttgaagagaagacacgaaagacagccaagaatattttatctcttgctcgccgttatttcaccccatctgaaattgattatctagctaaaattccagatcctgatgctcagcaaaaggagttcgtaaaactatggactcttaaagaagcatatgtaaaagctcttggaagggggttttcaggcgcccctttcaacaaattctcgattatattggcagcaaatggcagaatccaaatttctgtggtatactatttccctctttgtgctcatgcttgtcagtataattcttatactacttgcatgaatttatggaatcggtcagtataattttgggtggactggtcccttagaccaacaaatttctatgggttccttttaactcttgatcacacagtgaaaaacatcttctttggattctttgtgacgttacgaattttttgaagaaaaaaaagtatcatgttcttttgtgaccacacttgcaagctctactgctccacaaatgcaacctaataattaagtgtttttgccaaagaaagcaagaaaaattctgaattgtcttcaatcctttggagtttccaggcaccaaaagtatcgaacggttctgactctatccatgactgtctgtccgagaattggcagtttgcacttgctgaactaaacagttctcattacatggcaatctgtatagaggatgactcaacaagttcagattctggaaacggtagactgccactaggattgaaagtatggaagaccactccgttcgtggaagatatacttgtttctggaacggaagctgtaaaacttgtcagttaagtatgtgagaggatatctgccattggtcaagtgatttcgccagatgacaatgtgatgcaacgaatgtatttggacgaagtatgcgctgtgcagggaggctgaacggttttcttcgagcatactgcatgcattgatgaactgaccactgacactgtgtgctttagttaagatttggaaatgcaatgacatacactttggagtcctgatattcatattagcatatcacgacactgtttcgaaaggaataaacatttatctctctcttgtgtgtgtgtgtggggtaattttagacgtattttgtactgattggtccttgttatctgacggatcattggaagaaatattcatgcatcagcatgcttctatcggtggcataggaattctgctattggtcttggtgctgcgttccaatgcgattcgaagctgcaggtgtttgtcatatttggcagaacataatgctgttgaataggattagattatagctcagaatagtaaccgaaagaaactgctctgctgattgcaggctccagcatcatcgttcggatgaggtccttgccgccgtatgtcggag

SEQ ID NO: 58 - DNA, 1723 bp, Zea Mays
gcacgcttggttaaactccgggcgatggccgagcaaggacgcacccgggattggacctatcgacggtggcagcccgcagcccatcggtttcgccgaccggcgcctcgttcgcatcgactccacctcctcctcctcgcacgctataaactagactagagcaatacccgtggtggatgttccaccgcctgctccgccgcgcgatgccgctcccgccgccgcagtccccgcttcctgctccccggatgccgggggtcaccggcgggcgcctcttcgcttcgctgccgtcgccgccgcccctccagtctcgaagagaggtgcatgtgtggtatcttttgcctgatgagttgaaggatgcctcccaactcaagatgtacacggagctcctttccccttctgaaaggaagactgctttgtctatgaacggggaaaagttgcagaaaggtgccgtgctgtcccgtgcactgctgcgcaccaccctctcgagatatacagattgcaaagttgatccaagatcatttgagtttaagaaaaacaagtttggcaaacctgaggtactgtggcgatctgatgacagcaggatggaatggcctttacatttcaatatttcacacacatcatctttgattgtctgtggcataaccatggatactcctattggcattgacgttgaagagaagacacgaaagacagccaagaatattttatctcttgctcgccgttatttcaccccatctgaaattgattatctagctaaaattccagatcctgatgctcagcaaaaggagttcgtaaaactatggactcttaaagaagcatatgtaaaagctcttggaagggggttttcaggcgcccctttcaacaaattctcgattatattggcagcaaatggcagaatccaaatttctgtgtttccaggcaccaaaagtatcgaacggttctgactctatccatgactgtctgtccgagaattggcagtttgcacttgctgaactaaacagttctcattacatggcaatctgtatagaggatgactcaacaagttcagattctggaaacggtagactgccactaggattgaaagtatggaagaccactccgttcgtggaagatatacttgtttctggaacggaagctgtaaaacttgtcagttaagtatgtgagaggatatctgccattggtcaagtgatttcgccagatgacaatgtgatgcaacgaatgtatttggacgaagtatgcgctgtgcagggaggctgaacggttttcttcgagcatactgcatgcattgatgaactgaccactgacactgtgtgctttagttaagatttggaaatgcaatgacatacactttggagtcctgatattcatattagcatatcacgacactgtttcgaaaggaataaacatttatctctctcttgtgtgtgtgtgtggggtaattttagacgtattttgtactgattggtccttgttatctgacggatcattggaagaaatattcatgcatcagcatgcttctatcggtggcataggaattctgctattggtcttggtgctgcgttccaatgcgattcgaagctgcaggtgtttgtcatatttggcagaacataatgctgttgaataggattagattatagctcagaatagtaaccgaaagaaactgctctgctgattgcaggctccagcatcatcgttcggatgaggtccttgccgccgtatgtcggag

SEQ ID NO: 59 - DNA, 1387 bp, Zea Mays
aagaccttggcgcccctgcggtgcaagatctttatctggatgacgggatgctgggcaaagcaaggtctgcagcacccagcccattgtcttctgtgcgaccaagcggacgagatgatcggccaatcctggtgaattgcatcttctccaggccaatttgatacagattgcaaagttgatccaagatcatttgagtttaagaaaaacaagtttggcaaacctgaggtactgtggcgatctgatgacagcaggatggaatggcctttacatttcaatatttcacacacatcatctttgattgtctgtggcataaccatggatactcctattggcattgacgttgaagagaagacacgaaagacagccaagaatattttatctcttgctcgccgttatttcaccccatctgaaattgattatctagctaaaattccagatcctgatgctcagcaaaaggagttcgtaaaactatggactcttaaagaagcatatgtaaaagctcttggaagggggttttcaggcgcccctttcaacaaattctcgattatattggcagcaaatggcagaatccaaatttctgtggcaccaaaagtatcgaacggttctgactctatccatgactgtctgtccgagaattggcagtttgcacttgctgaactaaacagttctcattacatggcaatctgtatagaggatgactcaacaagttcagattctggaaacggtagactgccactaggattgaaagtatggaagaccactccgttcgtggaagatatacttgtttctggaacggaagctgtaaaacttgtcagttaagtatgtgagaggatatctgccattggtcaagtgatttcgccagatgacaatgtgatgcaacgaatgtatttggacgaagtatgcgctgtgcagggaggctgaacggttttcttcgagcatactgcatgcattgatgaactgaccactgacactgtgtgctttagttaagatttggaaatgcaatgacatacactttggagtcctgatattcatattagcatatcacgacactgtttcgaaaggaataaacatttatctctctcttgtgtgtgtgtgtggggtaattttagacgtattttgtactgattggtccttgttatctgacggatcattggaagaaatattcatgcatcagcatgcttctatcggtggcataggaattctgctattggtcttggtgctgcgttccaatgcgattcgaagctgcaggtgtttgtcatatttggcagaacataatgctgttgaataggattagattatagctcagaatagtaaccgaaagaaactgctctgctgattgcaggctccagcatcatcgttcggatgaggtccttgccgccgtatgtcggag

SEQ ID NO: 60 - DNA, 2085 bp, Zea Mays
gatcggccaatcctggtgaattgcatcttctccaggccaatttgactagatacagattgcaaagttgatccaagatcatttgagtttaagaaaaacaagtttggcaaacctgaggtactgtggcgatctgatgacagcaggatggaatggcctttacatttcaatatttcacacacatcatctttgattgtctgtggcataaccatggatactcctattggcattgacgttgaagagaagacacgaaagacagccaagaatattttatctcttgctcgccgttatttcaccccatctgaaattgattatctagctaaaattccagatcctgatgctcagcaaaaggagttcgtaaaactatggactcttaaagttagtgaactttcgtaagcaattgatttgtgtttttgtattatcattatttagaacactggtcagtagtacctttcttatgcaaagcttaagattcttaactgaactagtcacctaccacttgaagcatactaggaccaaggagacatgagggtagcatggaagtgtatttcatgatttatatatgaaggatcacacttttttttatcgaacactcagcagatgatcacacttaactgtgggtggtaagaaacccagtgcgcgcgcgcgcacgctacagggaactcaatcatctgctagctccaaactggaaacagcagcaggaagcacgcctgcaacacatgcagacacccctacacctaccgaagctaacccggaggactctgggcttgaaggaaatccccttggcaccagccaaagaccacaaaaggcttccgccttggccaacctaacaaccacaaccaaattcggaggagttccttgaaagacaataacatttctgtgtttccacaacatccaagctctcaggacaaccagagtcaaattcttttttgctcagcccactcatacgagcactattgaagcaccaccactgatcaaaatcattctcacccagccctggatggaggttctgcattccaaagggcctgagcagctcaaatcaaaactgccgcacatacaccttttatctagttcatttaaatcgtcattggatttcttagtcaacatttccttcctaagtcagagacttacatgttacaataataattttgattacatgtatcgttgatgtcttaattttgtaggaagcatatgtaaaagctcttggaagggggttttcaggcgcccctttcaacaaattctcgattatattggcagcaaatggcagaatccaaatttctgtggcaccaaaagtatcgaacggttctgactctatccatgactgtctgtccgagaattggcagtttgcacttgctgaactaaacagttctcattacatggcaatctgtatagaggatgactcaacaagttcagattctggaaacggtagactgccactaggattgaaagtatggaagaccactccgttcgtggaagatatacttgtttctggaacggaagctgtaaaacttgtcagttaagtatgtgagaggatatctgccattggtcaagtgatttcgccagatgacaatgtgatgcaacgaatgtatttggacgaagtatgcgctgtgcagggaggctgaacggttttcttcgagcatactgcatgcattgatgaactgaccactgacactgtgtgctttagttaagatttggaaatgcaatgacatacactttggagtcctgatattcatattagcatatcacgacactgtttcgaaaggaataaacatttatctctctcttgtgtgtgtgtgtggggtaattttagacgtattttgtactgattggtccttgttatctgacggatcattggaagaaatattcatgcatcagcatgcttctatcggtggcataggaattctgctattggtcttggtgctgcgttccaatgcgattcgaagctgcaggtgtttgtcatatttggcagaacataatgctgttgaataggattagattatagctcagaatagtaaccgaaagaaactgctctgctgattgcaggctccagcatcatcgttcggatgaggtccttgccgccgtatgtcggag

SEQ ID NO: 61 - DNA, 2065 bp, Zea Mays
gtgaattgcatcttctccaggccaatttgatacagattgcaaagttgatccaagatcatttgagtttaagaaaaacaagtttggcaaacctgaggtactgtggcgatctgatgacagcaggatggaatggcctttacatttcaatatttcacacacatcatctttgattgtctgtggcataaccatggatactcctattggcattgacgttgaagagaagacacgaaagacagccaagaatattttatctcttgctcgccgttatttcaccccatctgaaattgattatctagctaaaattccagatcctgatgctcagcaaaaggagttcgtaaaactatggactcttaaagttagtgaactttcgtaagcaattgatttgtgtttttgtattatcattatttagaacactggtcagtagtacctttcttatgcaaagcttaagattcttaactgaactagtcacctaccacttgaagcatactaggaccaaggagacatgagggtagcatggaagtgtatttcatgatttatatatgaaggatcacacttttttttatcgaacactcagcagatgatcacacttaactgtgggtggtaagaaacccagtgcgcgcgcgcgcacgctacagggaactcaatcatctgctagctccaaactggaaacagcagcaggaagcacgcctgcaacacatgcagacacccctacacctaccgaagctaacccggaggactctgggcttgaaggaaatccccttggcaccagccaaagaccacaaaaggcttccgccttggccaacctaacaaccacaaccaaattcggaggagttccttgaaagacaataacatttctgtgtttccacaacatccaagctctcaggacaaccagagtcaaattcttttttgctcagcccactcatacgagcactattgaagcaccaccactgatcaaaatcattctcacccagccctggatggaggttctgcattccaaagggcctgagcagctcaaatcaaaactgccgcacatacaccttttatctagttcatttaaatcgtcattggatttcttagtcaacatttccttcctaagtcagagacttacatgttacaataataattttgattacatgtatcgttgatgtcttaattttgtaggaagcatatgtaaaagctcttggaagggggttttcaggcgcccctttcaacaaattctcgattatattggcagcaaatggcagaatccaaatttctgtggcaccaaaagtatcgaacggttctgactctatccatgactgtctgtccgagaattggcagtttgcacttgctgaactaaacagttctcattacatggcaatctgtatagaggatgactcaacaagttcagattctggaaacggtagactgccactaggattgaaagtatggaagaccactccgttcgtggaagatatacttgtttctggaacggaagctgtaaaacttgtcagttaagtatgtgagaggatatctgccattggtcaagtgatttcgccagatgacaatgtgatgcaacgaatgtatttggacgaagtatgcgctgtgcagggaggctgaacggttttcttcgagcatactgcatgcattgatgaactgaccactgacactgtgtgctttagttaagatttggaaatgcaatgacatacactttggagtcctgatattcatattagcatatcacgacactgtttcgaaaggaataaacatttatctctctcttgtgtgtgtgtgtggggtaattttagacgtattttgtactgattggtccttgttatctgacggatcattggaagaaatattcatgcatcagcatgcttctatcggtggcataggaattctgctattggtcttggtgctgcgttccaatgcgattcgaagctgcaggtgtttgtcatatttggcagaacataatgctgttgaataggattagattatagctcagaatagtaaccgaaagaaactgctctgctgattgcaggctccagcatcatcgttcggatgaggtccttgccgccgtatgtcggag

SEQ ID NO: 62 - DNA, 851 bp, Zea Mays
gtcagtataattcttatactacttgcatgaatttatggaatcggcaccaaaagtatcgaacggttctgactctatccatgactgtctgtccgagaattggcagtttgcacttgctgaactaaacagttctcattacatggcaatctgtatagaggatgactcaacaagttcagattctggaaacggtagactgccactaggattgaaagtatggaagaccactccgttcgtggaagatatacttgtttctggaacggaagctgtaaaacttgtcagttaagtatgtgagaggatatctgccattggtcaagtgatttcgccagatgacaatgtgatgcaacgaatgtatttggacgaagtatgcgctgtgcagggaggctgaacggttttcttcgagcatactgcatgcattgatgaactgaccactgacactgtgtgctttagttaagatttggaaatgcaatgacatacactttggagtcctgatattcatattagcatatcacgacactgtttcgaaaggaataaacatttatctctctcttgtgtgtgtgtgtggggtaattttagacgtattttgtactgattggtccttgttatctgacggatcattggaagaaatattcatgcatcagcatgcttctatcggtggcataggaattctgctattggtcttggtgctgcgttccaatgcgattcgaagctgcaggtgtttgtcatatttggcagaacataatgctgttgaataggattagattatagctcagaatagtaaccgaaagaaactgctctgctgattgcaggctccagcatcatcgttcggatgaggtccttgccgccgtatgtcggag

SEQ ID NO: 63 - DNA, 1932 bp, Zea Mays
aaaagaggcccaggtagatgcggacggacagctgatcctgatccgacggctggcgcaccacagaccacacgctgcttcgtcctctctcttcttccttcccctcccccgctcgccaatcgccatcggtcactcttcctcaccttcaccttcaccttccgaaaagagagaccgaggaggatcacaggaggacatccagataagcaggaatagaacaaccccataaaccatatcggaccatacatttgcaaaagcttgtcggttttctagcctccaatcgtccctcaactcaagcctgatgaaagaagaggaggtgaatccttaagagcaagcagactttgctgactgaacaagacatgtgacttggcaagaaagcatggtccttaaccatctgcagcttctggctgcgcctcacatcaagtaactcagctgcaagcggcaccttctggacatacctgacatcattagtggggctttgcccggataaagctgatcctgaccagaaggctgacgcggcagcttctctcccaaccacactctcttcagtcttcactcctctcctctccccgctccagtcggtctctccagtctcctctcctcaccttgccaggaacccaggaggaggagggatacagcctgaataacctaggtgcaaaggcatggtgtggaatgtgcaaatctcttaaaagaatcccttcagtccgcagagactatagggaaaaatattggcattagcacgactccaaccaggttgtctgccatagttttgctggagggacaaaaacagaagcgttcctgactctacctcaaggatgagagctgcgtcctccacggtttaccctgtctaccttagcctccaccgccaccccaacagccaccaagcctcttttcgtccctcgagagcaaaccatgacaacacccataaatgtaccaagccacccaaagttcttagacggtctctcttctccctgcctgcctcatttcttctcctccacacatcctcctcccttgccgtagatgacgcaaacatgccatctacctcaacaattgacaccacgatcacagatcgcatcttcatggacttcagcgtctgtccaagctactttcgctcagacagacctctaggagctgagctttcctcgtgccctgattccgagcctcttggtcgtgtcgtctttggtctctatggccggcttctccccgtcactactgccaatttcaaagctacgtgtactgcagctgcatataggggcacccttgtccacaagctccttcagggacagttttttgctgctggtcgacaaggtcctcggcatgacaagggcatgcaaggcctggcacgctttcgttatgccttggacagaatgacgatgatgacgacatcaagctcaaccccaattatcacaatcttgaattcttggttactacagggccaggaccctgtcctgagcttgatggccagaacatcgtctttgggactgtattggaaggaatggatgtcatcaccagcatcgcaaccatacctacctacaaaccagctgaaaggatccgcctcttcaacggctttgcgcagttgattggtgatggaagggctcaaactgcccgggctatgtgggaccgcccgcttaagaccgtgtatatcagcgactgcggggagctgacagtaaccaaaccatctctttcccctccaagcttgccatgactgccagtgtaatgacactacccacatagccagttttctgtctctgttgcttgggtcctctttctgtactctatatatgcagtgtatatattacctgtgttattaaacttatgcatgttccatgagctgtatatatatcgcttccgttgttaatttatgcatgttccctttgacaatgactgtacttgatgagtacatggatgttaattatatggtcaaggcctaatcaatta

SEQ ID NO: 64 - DNA, 1850 bp, Zea Mays
aaaagaggcccaggtagatgcggacggacagctgatcctgatccgacggctggcgcaccacagaccacacgctgcttcgtcctctctcttcttccttcccctcccccgctcgccaatcgccatcggtcactcttcctcaccttcaccttcaccttccgaaaagagagaccgaggaggatcacaggaggacatccagataagcaggaatagaacaaccccataaaccatatcggaccatacatttgcaaaagcttgtcggttttctagcctccaatcgtccctcaactcaagcctgatgaaagaagaggaggtgaatccttaagagcaagcagactttgctgactgaacaagacatgtgacttggcaagaaagcatggtccttaaccatctgcagcttctggctgcgcctcacatcaagtaactcagctgcaagcggcaccttctggacatacctgacatcattagtggggctttgcccggataaagctgatcctgaccagaaggctgacgcggcagcttctctcccaaccacactctcttcagtcttcactcctctcctctccccgctccagtcggtctctccagtctcctctcctcaccttgccaggaacccaggaggaggagggatacaggaaaaatattggcattagcacgactccaaccaggttgtctgccatagttttgctggagggacaaaaacagaagcgttcctgactctacctcaaggatgagagctgcgtcctccacggtttaccctgtctaccttagcctccaccgccaccccaacagccaccaagcctcttttcgtccctcgagagcaaaccatgacaacacccataaatgtaccaagccacccaaagttcttagacggtctctcttctccctgcctgcctcatttcttctcctccacacatcctcctcccttgccgtagatgacgcaaacatgccatctacctcaacaattgacaccacgatcacagatcgcatcttcatggacttcagcgtctgtccaagctactttcgctcagacagacctctaggagctgagctttcctcgtgccctgattccgagcctcttggtcgtgtcgtctttggtctctatggccggcttctccccgtcactactgccaatttcaaagctacgtgtactgcagctgcatataggggcacccttgtccacaagctccttcagggacagttttttgctgctggtcgacaaggtcctcggcatgacaagggcatgcaaggcctggcacgctttcgttatgccttggacagaatgacgatgatgacgacatcaagctcaaccccaattatcacaatcttgaattcttggttactacagggccaggaccctgtcctgagcttgatggccagaacatcgtctttgggactgtattggaaggaatggatgtcatcaccagcatcgcaaccatacctacctacaaaccagctgaaaggatccgcctcttcaacggctttgcgcagttgattggtgatggaagggctcaaactgcccgggctatgtgggaccgcccgcttaagaccgtgtatatcagcgactgcggggagctgacagtaaccaaaccatctctttcccctccaagcttgccatgactgccagtgtaatgacactacccacatagccagttttctgtctctgttgcttgggtcctctttctgtactctatatatgcagtgtatatattacctgtgttattaaacttatgcatgttccatgagctgtatatatatcgcttccgttgttaatttatgcatgttccctttgacaatgactgtacttgatgagtacatggatgttaattatatggtcaaggcctaatcaatta

SEQ ID NO: 65 - DNA, 850 bp, Zea Mays
cagaccacacgctgcttcgtcctctctcttcttccttcccctcccccgctcgccaatcgccatcggtcactcttcctcaccttcaccttcaccttccgaaaagagagaccgaggaggatcacaggaggacatccagataagcaggaatagaacaaccccataaaccatatcggaccatacatttgcaaaagcttgtcggttttctagcctccaatcgtccctcaactcaagcctgatgaaagaagaggaggtgaatccttaagagcaagcagactttgctgactgaacaagacatgtgacttggcaagaaagcatggtccttaaccatctgcagcttctggctgcgcctcacatcaagtaactcagctgcaagcggcaccttctggacatacctgacatcattaggaatggatgtcatcaccagcatcgcaaccatacctacctacaaaccagctgaaaggatccgcctcttcaacggctttgcgcagttgattggtgatggaagggctcaaactgcccgggctatgtgggaccgcccgcttaagaccgtgtatatcagcgactgcggggagctgacagtaaccaaaccatctctttcccctccaagcttgccatgactgccagtgtaatgacactacccacatagccagttttctgtctctgttgcttgggtcctctttctgtactctatatatgcagtgtatatattacctgtgttattaaacttatgcatgttccatgagctgtatatatatcgcttccgttgttaatttatgcatgttccctttgacaatgactgtacttgatgagtacatggatgttaattatatggtcaaggcctaatcaatta

SEQ ID NO: 66 - DNA, 1614 bp, Zea Mays
cgctgcttcgtcctctctcttcttccttcccctcccccgctcgccaatcgccatcggtcactcttcctcaccttcaccttcaccttccgaaaagagagaccgaggaggatcacaggaggacatccagataagcaggaatagaacaaccccataaaccatatcggaccatacatttgcaaaagcttgtcggttttctagcctccaatcgtccctcaactcaagcctgatgaaagaagaggaggtgaatccttaagagcaagcagactttgctgactgaacaagacatgtgacttggcaagaaagcatggtccttaaccatctgcagcttctggctgcgcctcacatcaagtaactcagctgcaagcggcaccttctggacatacctgacatcattaggaaaaatattggcattagcacgactccaaccaggttgtctgccatagttttgctggagggacaaaaacagaagcgttcctgactctacctcaaggatgagagctgcgtcctccacggtttaccctgtctaccttagcctccaccgccaccccaacagccaccaagcctcttttcgtccctcgagagcaaaccatgacaacacccataaatgtaccaagccacccaaagttcttagacggtctctcttctccctgcctgcctcatttcttctcctccacacatcctcctcccttgccgtagatgacgcaaacatgccatctacctcaacaattgacaccacgatcacagatcgcatcttcatggacttcagcgtctgtccaagctactttcgctcagacagacctctaggagctgagctttcctcgtgccctgattccgagcctcttggtcgtgtcgtctttggtctctatggccggcttctccccgtcactactgccaatttcaaagctacgtgtactgcagctgcatataggggcacccttgtccacaagctccttcagggacagttttttgctgctggtcgacaaggtcctcggcatgacaagggcatgcaaggcctggcacgctttcgttatgccttggacagaatgacgatgatgacgacatcaagctcaaccccaattatcacaatcttgaattcttggttactacagggccaggaccctgtcctgagcttgatggccagaacatcgtctttgggactgtattggaaggaatggatgtcatcaccagcatcgcaaccatacctacctacaaaccagctgaaaggatccgcctcttcaacggctttgcgcagttgattggtgatggaagggctcaaactgcccgggctatgtgggaccgcccgcttaagaccgtgtatatcagcgactgcggggagctgacagtaaccaaaccatctctttcccctccaagcttgccatgactgccagtgtaatgacactacccacatagccagttttctgtctctgttgcttgggtcctctttctgtactctatatatgcagtgtatatattacctgtgttattaaacttatgcatgttccatgagctgtatatatatcgcttccgttgttaatttatgcatgttccctttgacaatgactgtacttgatgagtacatggatgttaattatatggtcaaggcctaatcaatta

SEQ ID NO: 67 - DNA, 1900 bp, Zea Mays
cgctgcttcgtcctctctcttcttccttcccctcccccgctcgccaatcgccatcggtcactcttcctcaccttcaccttcaccttccgaaaagagagaccgaggaggatcacaggaggacatccagataagcaggaatagaacaaccccataaaccatatcggaccatacatttgcaaaagcttgtcggttttctagcctccaatcgtccctcaactcaagcctgatgaaagaagaggaggtgaatccttaagagcaagcagactttgctgactgaacaagacatgtgacttggcaagaaagcatggtccttaaccatctgcagcttctggctgcgcctcacatcaagtaactcagctgcaagcggcaccttctggacatacctgacatcattaggtgcaaaggcatggtgtggaatgtgcaaatctcttaaaagaatcccttcagtccgcagagactatagggaaaaatattggcattagcacgactccaaccaggttgtctgccatagttttgctggagggacaaaaacagaagcgttcctgactctacctcaaggatgagagctgcgtcctccacggtttaccctgtctaccttagcctccaccgccaccccaacagccaccaagcctcttttcgtccctcgagagcaaaccatgacaacacccataaatgtaccaagccacccaaagttcttagacggtctctcttctccctgcctgcctcatttcttctcctccacacatcctcctcccttgccgtagatgacgcaaacatgccatctacctcaacaattgacaccacgatcacagatcgcatcttcatggacttcagcgtctgtccaagctactttcgctcagacagacctctaggagctgagctttcctcgtgccctgattccgagcctcttggtcgtgtcgtctttggtctctatggccggcttctccccgtcactactgccaatttcaaagctacgtgtactgcagctgcatataggggcacccttgtccacaagctccttcagggacagttttttgctgctggtcgacaaggtcctcggcatgacaagggtgaggtccagcctccctctggcctcgttaggaattctgagactgttaaccctaaagcgttcgagctaaggcatgcaaggcctggcacgctttcgttatgccttggacagaatgacgatgatgacgacatcaagctcaaccccaattatcacaatcttgaattcttggttactacagggccaggaccctgtcctgagcttgatggccagaacatcgtctttgggactgtattggaaggggtttcctctttcatgaagaaaccatcgttcttggtgattggcaatttatgtggacacaaacatattttatgcatgaataacaaacaaacaatatggatatggatatgcattcactgatctcgtctgtcaagtgcaaatggcacaaggaatggatgtcatcaccagcatcgcaaccatacctacctacaaaccagctgaaaggatccgcctcttcaacggctttgcgcagttgattggtgatggaagggctcaaactgcccgggctatgtgggaccgcccgcttaagaccgtgtatatcagcgactgcggggagctgacagtaaccaaaccatctctttcccctccaagcttgccatgactgccagtgtaatgacactacccacatagccagttttctgtctctgttgcttgggtcctctttctgtactctatatatgcagtgtatatattacctgtgttattaaacttatgcatgttccatgagctgtatatatatcgcttccgttgttaatttatgcatgttccctttgacaatgactgtacttgatgagtacatggatgttaattatatggtcaaggcctaatcaatta

SEQ ID NO: 68 - DNA, 572 bp, Zea Mays
cgctgcttcgtcctctctcttcttccttcccctcccccgctcgccaatcgccatcggtcactcttcctcaccttcaccttcaccttccgaaaagagagaccgaggaggatcacaggaggacatccaggaatggatgtcatcaccagcatcgcaaccatacctacctacaaaccagctgaaaggatccgcctcttcaacggctttgcgcagttgattggtgatggaagggctcaaactgcccgggctatgtgggaccgcccgcttaagaccgtgtatatcagcgactgcggggagctgacagtaaccaaaccatctctttcccctccaagcttgccatgactgccagtgtaatgacactacccacatagccagttttctgtctctgttgcttgggtcctctttctgtactctatatatgcagtgtatatattacctgtgttattaaacttatgcatgttccatgagctgtatatatatcgcttccgttgttaatttatgcatgttccctttgacaatgactgtacttgatgagtacatggatgttaattatatggtcaaggcctaatcaatta

SEQ ID NO: 69 - DNA, 1415 bp, Zea Mays
cgctgcttcgtcctctctcttcttccttcccctcccccgctcgccaatcgccatcggtcactcttcctcaccttcaccttcaccttccgaaaagagagaccgaggaggatcacaggaggacatccaggaaaaatattggcattagcacgactccaaccaggttgtctgccatagttttgctggagggacaaaaacagaagcgttcctgactctacctcaaggatgagagctgcgtcctccacggtttaccctgtctaccttagcctccaccgccaccccaacagccaccaagcctcttttcgtccctcgagagcaaaccatgacaacacccataaatgtaccaagccacccaaagttcttagacggtctctcttctccctgcctgcctcatttcttctcctccacacatcctcctcccttgccgtagatgacgcaaacatgccatctacctcaacaattgacaccacgatcacagatcgcatcttcatggacttcagcgtctgtccaagctactttcgctcagacagacctctaggagctgagctttcctcgtgccctgattccgagcctcttggtcgtgtcgtctttggtctctatggccggcttctccccgtcactactgccaatttcaaagctacgtgtactgcagctgcatataggggcacccttgtccacaagctccttcagggacagttttttgctgctggtcgacaaggtcctcggcatgacaagggtgaggtccagcctccctctggcctcgttaggaattctgagactgttaaccctaaagcgttcgagctaaggcatgcaaggcctggcacgctttcgttatgccttggacagaatgacgatgatgacgacatcaagctcaaccccaattatcacaatcttgaattcttggttactacagggccaggaccctgtcctgagcttgatggccagaacatcgtctttgggactgtattggaaggaatggatgtcatcaccagcatcgcaaccatacctacctacaaaccagctgaaaggatccgcctcttcaacggctttgcgcagttgattggtgatggaagggctcaaactgcccgggctatgtgggaccgcccgcttaagaccgtgtatatcagcgactgcggggagctgacagtaaccaaaccatctctttcccctccaagcttgccatgactgccagtgtaatgacactacccacatagccagttttctgtctctgttgcttgggtcctctttctgtactctatatatgcagtgtatatattacctgtgttattaaacttatgcatgttccatgagctgtatatatatcgcttccgttgttaatttatgcatgttccctttgacaatgactgtacttgatgagtacatggatgttaattatatggtcaaggcctaatcaatta

SEQ ID NO: 70 - DNA, 1405 bp, Zea Mays
actcctctcctctccccgctccagtcggtctctccagtctcctctcctcaccttgccaggaacccaggaggaggagggatacagcggacaatttggagaaccaagcctgaataacctaggtgcaaaggcatggtgtggaatgtgcaaatctcttaaaagaatcccttcagtccgcagagactatagggaaaaatattggcattagcacgactccaaccaggttgtctgccatagttttgctggagggacaaaaacagaagcgttcctgactctacctcaaggatgagagctgcgtcctccacggtttaccctgtctaccttagcctccaccgccaccccaacagccaccaagcctcttttcgtccctcgagagcaaaccatgacaacacccataaatgtaccaagccacccaaagttcttagacggtctctcttctccctgcctgcctcatttcttctcctccacacatcctcctcccttgccgtagatgacgcaaacatgccatctacctcaacaattgacaccacgatcacagatcgcatcttcatggacttcagcgtctgtccaagctactttcgctcagacagacctctaggagctgagctttcctcgtgccctgattccgagcctcttggtcgtgtcgtctttggtctctatggccggcttctccccgtcactactgccaatttcaaagctacgtgtactgcagctgcatataggggcacccttgtccacaagctccttcagggacagttttttgctgctggtcgacaaggtcctcggcatgacaagggcatgcaaggcctggcacgctttcgttatgccttggacagaatgacgatgatgacgacatcaagctcaaccccaattatcacaatcttgaattcttggttactacagggccaggaccctgtcctgagcttgatggccagaacatcgtctttgggactgtattggaaggaatggatgtcatcaccagcatcgcaaccatacctacctacaaaccagctgaaaggatccgcctcttcaacggctttgcgcagttgattggtgatggaagggctcaaactgcccgggctatgtgggaccgcccgcttaagaccgtgtatatcagcgactgcggggagctgacagtaaccaaaccatctctttcccctccaagcttgccatgactgccagtgtaatgacactacccacatagccagttttctgtctctgttgcttgggtcctctttctgtactctatatatgcagtgtatatattacctgtgttattaaacttatgcatgttccatgagctgtatatatatcgcttccgttgttaatttatgcatgttccctttgacaatgactgtacttgatgagtacatggatgttaattatatggtcaaggcctaatcaatta

SEQ ID NO: 71 - DNA, 2699 bp, Zea Mays
tggcatttgagcaccaaccaatccacgcactgacgcacgctgcacggctgcagctcaaaagggaagaaggctccgcggctggcgcgcgaccttctctccccaccacattctcccccctcctctcttcttctccaatccatctctctgtttgtctcctatcctttcctctctcccacttatcgacggacttcctgcgaggaacacagagggccatccaggcacttcctctgcatcacacacctatgctgcggctgcgtgatggaggaagctaacgccccagtgacgaccagccacccctcctccaccgctcctgatgcgcctccggacccggcggctgttccatccagttctgaccaaggctcccaatcctgtcaggcccagcagcaacaggtccaccagctggatgaaacgcgagagccggcgggcagcagctacgaagcgtcagagatcgccggccgcttcaacgaggccatcgatcccaaggccggcatcgacgctgcggcgcccatcgtcgattccgtcaagggcgccgtcagcaaattcggagctgtaggggttgttgattggagagagaaacgcaagcatgtccaggatgagctcgacaaggtgcgggaagaggtcacggagtaccagaagagagcacaggaggcggaggccggcagagcgcaagctctgcgggagctgggaaccgtcgtgaccgctgccgacgagctgggcctgggcctggagatggcgcgggccgagcaagcccaggcgcggcggcaggtggagctcgccgagctgcagctcgaggaggtgcggcgcggcgcaaaggcggagctcgacaccgtcagggaacgccgcacggccgcgctcgctgacctgcgggcggcgcgagcggaggtggagtcgctggagaaggtgcgcgcgcgcgccgcggccgaagcaggcgcggcggtggcgcgggagcgggaggccgccgcggcgtcgcgggaggctgggaaggccgtcgaggacctcaccgccgagctcgtcgcgctgaaaggggagctggagtcctcgcacgccgcccatgtcgcggcggagcagaagaggatgggcctggcggtcgcgtgggaggaagacaaggcgcggtggcagatggagctggaggaagccgagcaggaggccaaggggctgcgagagaagctcgtggttgcctgcgacgtcgagacgaaggcggtggcggcttcccagctcatggcgagcctaaaagctgagctgttcgcttacgccgtcgagagaacaacactgggacaggaggaggaggcgacagcgatcagcgaccggttgatgctggagaagaccaagaaagagctcgacgacgtgaaagcgagcgtcgagatggccaagcacgaggccaagtgcctgcgcgtcgccgccgcctcgatgcgcgatgagctggagaaggagaaggcagggctcaccgcgctgcggcggaaggaaagggaaaggcaagggctctcgtcagcgtccatcccttacctcgaggaggagttgaggtgggtgaccgccgagctcgccgaggcacgagcgaagaggggcagcgacgagagcgagatggccgagcgtgtagccgaggcacggcgagaagcggaggaagccaaggcgaaggcccggtcggctcgagaaaaggtcgccagggccaaggaagttgcgggcgtggccaaggccgccgtcgccgccatggaggcgcggctggaggcggtgacgcgggagatactcgccgcgaacaagtcggccgagaccgccacggcctcggccggcgcgctgctgcaagaaagcaagccgtcgagcgataaggacgtggaagcaggcgtgaccgtgacgctgacggtgcaggagtacgccgagctgagccggagagcgcaggagacagaggaggccgccggcatgcgggtggtcgaggcggtgaagctgatcaaggaggccaaggacgcggaggtgaggaggctggagaaggtggcgcggctggacaagcagaccgagcagaggcggctggcgctggaggccgcgacgctggaggccgaggaggcggagttcgacaagctgtcagcggagcgggagctgaggcagtggcgcgccgagcacgagcagcggcgcgcgcccggcgacaccgactcgccccgcccgggcctcgccgagatctccgtgctccacgaccagggcaccggcgaggggcgcgggaacccgcacatagtcagcccgagggcaggctacatgccgcggacggagctggtgatgacgggatcggcggcggatgcggatgcggatgcggacgcgaggcagaggaagaccttcttcccgcggattgtcatgttcttcgcgcgaaagagaactcagtcttggaagtgatgcacaacaaccggcttccttttgaaatttcttttggggcttgcttctggtacgtggctttctcggatggagcagatcaaatatgacgacacaagtgtaaaatgtgtattgatcataattttttttttcgttttcactcggagttgtgatccatgcttggaaatatggaccggcttgaatcttgatagttggtaaggtcttgttcttttgtccaatccaaaaatcatttcagctgatcaaaacttatactccctccgtctcagattagtattcgctttggattttagtttttatcgtttagctttaatcaatacattcaactgttt

SEQ ID NO: 72 - DNA, 2565 bp, Zea Mays
gcgaggaacacagagggccatccagcatcatccgtggctgctgaattcctgatacgtctctgtttgatgcacattggtcgtcaggcacttcctctgcatcacacacctatgctgcggctgcgtgatggaggaagctaacgccccagtgacgaccagccacccctcctccaccgctcctgatgcgcctccggacccggcggctgttccatccagttctgaccaaggctcccaatcctgtcaggcccagcagcaacaggtccaccagctggatgaaacgcgagagccggcgggcagcagctacgaagcgtcagagatcgccggccgcttcaacgaggccatcgatcccaaggccggcatcgacgctgcggcgcccatcgtcgattccgtcaagggcgccgtcagcaaattcggagctgtaggggttgttgattggagagagaaacgcaagcatgtccaggatgagctcgacaaggtgcgggaagaggtcacggagtaccagaagagagcacaggaggcggaggccggcagagcgcaagctctgcgggagctgggaaccgtcgtgaccgctgccgacgagctgggcctgggcctggagatggcgcgggccgagcaagcccaggcgcggcggcaggtggagctcgccgagctgcagctcgaggaggtgcggcgcggcgcaaaggcggagctcgacaccgtcagggaacgccgcacggccgcgctcgctgacctgcgggcggcgcgagcggaggtggagtcgctggagaaggtgcgcgcgcgcgccgcggccgaagcaggcgcggcggtggcgcgggagcgggaggccgccgcggcgtcgcgggaggctgggaaggccgtcgaggacctcaccgccgagctcgtcgcgctgaaaggggagctggagtcctcgcacgccgcccatgtcgcggcggagcagaagaggatgggcctggcggtcgcgtgggaggaagacaaggcgcggtggcagatggagctggaggaagccgagcaggaggccaaggggctgcgagagaagctcgtggttgcctgcgacgtcgagacgaaggcggtggcggcttcccagctcatggcgagcctaaaagctgagctgttcgcttacgccgtcgagagaacaacactgggacaggaggaggaggcgacagcgatcagcgaccggttgatgctggagaagaccaagaaagagctcgacgacgtgaaagcgagcgtcgagatggccaagcacgaggccaagtgcctgcgcgtcgccgccgcctcgatgcgcgatgagctggagaaggagaaggcagggctcaccgcgctgcggcggaaggaaagggaaaggcaagggctctcgtcagcgtccatcccttacctcgaggaggagttgaggtgggtgaccgccgagctcgccgaggcacgagcgaagaggggcagcgacgagagcgagatggccgagcgtgtagccgaggcacggcgagaagcggaggaagccaaggcgaaggcccggtcggctcgagaaaaggtcgccagggccaaggaagttgcgggcgtggccaaggccgccgtcgccgccatggaggcgcggctggaggcggtgacgcgggagatactcgccgcgaacaagtcggccgagaccgccacggcctcggccggcgcgctgctgcaagaaagcaagccgtcgagcgataaggacgtggaagcaggcgtgaccgtgacgctgacggtgcaggagtacgccgagctgagccggagagcgcaggagacagaggaggccgccggcatgcgggtggtcgaggcggtgaagctgatcaaggaggccaaggacgcggaggtgaggaggctggagaaggtggcgcggctggacaagcagaccgagcagaggcggctggcgctggaggccgcgacgctggaggccgaggaggcggagttcgacaagctgtcagcggagcgggagctgaggcagtggcgcgccgagcacgagcagcggcgcgcgcccggcgacaccgactcgccccgcccgggcctcgccgagatctccgtgctccacgaccagggcaccggcgaggggcgcgggaacccgcacatagtcagcccgagggcaggctacatgccgcggacggagctggtgatgacgggatcggcggcggatgcggatgcggatgcggacgcgaggcagaggaagaccttcttcccgcggattgtcatgttcttcgcgcgaaagagaactcagtcttggaagtgatgcacaacaaccggcttccttttgaaatttcttttggggcttgcttctggtacgtggctttctcggatggagcagatcaaatatgacgacacaagtgtaaaatgtgtattgatcataattttttttttcgttttcactcggagttgtgatccatgcttggaaatatggaccggcttgaatcttgatagttggtaaggtcttgttcttttgtccaatccaaaaatcatttcagctgatcaaaacttatactccctccgtctcagattagtattcgctttggattttagtttttatcgtttagctttaatcaatacattcaactgttt

SEQ ID NO: 73 - DNA, 2335 bp, Zea Mays
gggccatccaggcccagcagcaacaggtccaccagctggatgaaacgcgagagccggcgggcagcagctacgaagcgtcagagatcgccggccgcttcaacgaggccatcgatcccaaggccggcatcgacgctgcggcgcccatcgtcgattccgtcaagggcgccgtcagcaaattcggagctgtaggggttgttgattggagagagaaacgcaagcatgtccaggatgagctcgacaaggtgcgggaagaggtcacggagtaccagaagagagcacaggaggcggaggccggcagagcgcaagctctgcgggagctgggaaccgtcgtgaccgctgccgacgagctgggcctgggcctggagatggcgcgggccgagcaagcccaggcgcggcggcaggtggagctcgccgagctgcagctcgaggaggtgcggcgcggcgcaaaggcggagctcgacaccgtcagggaacgccgcacggccgcgctcgctgacctgcgggcggcgcgagcggaggtggagtcgctggagaaggtgcgcgcgcgcgccgcggccgaagcaggcgcggcggtggcgcgggagcgggaggccgccgcggcgtcgcgggaggctgggaaggccgtcgaggacctcaccgccgagctcgtcgcgctgaaaggggagctggagtcctcgcacgccgcccatgtcgcggcggagcagaagaggatgggcctggcggtcgcgtgggaggaagacaaggcgcggtggcagatggagctggaggaagccgagcaggaggccaaggggctgcgagagaagctcgtggttgcctgcgacgtcgagacgaaggcggtggcggcttcccagctcatggcgagcctaaaagctgagctgttcgcttacgccgtcgagagaacaacactgggacaggaggaggaggcgacagcgatcagcgaccggttgatgctggagaagaccaagaaagagctcgacgacgtgaaagcgagcgtcgagatggccaagcacgaggccaagtgcctgcgcgtcgccgccgcctcgatgcgcgatgagctggagaaggagaaggcagggctcaccgcgctgcggcggaaggaaagggaaaggcaagggctctcgtcagcgtccatcccttacctcgaggaggagttgaggtgggtgaccgccgagctcgccgaggcacgagcgaagaggggcagcgacgagagcgagatggccgagcgtgtagccgaggcacggcgagaagcggaggaagccaaggcgaaggcccggtcggctcgagaaaaggtcgccagggccaaggaagttgcgggcgtggccaaggccgccgtcgccgccatggaggcgcggctggaggcggtgacgcgggagatactcgccgcgaacaagtcggccgagaccgccacggcctcggccggcgcgctgctgcaagaaagcaagccgtcgagcgataaggacgtggaagcaggcgtgaccgtgacgctgacggtgcaggagtacgccgagctgagccggagagcgcaggagacagaggaggccgccggcatgcgggtggtcgaggcggtgaagctgatcaaggaggccaaggacgcggaggtgaggaggctggagaaggtggcgcggctggacaagcagaccgagcagaggcggctggcgctggaggccgcgacgctggaggccgaggaggcggagttcgacaagctgtcagcggagcgggagctgaggcagtggcgcgccgagcacgagcagcggcgcgcgcccggcgacaccgactcgccccgcccgggcctcgccgagatctccgtgctccacgaccagggcaccggcgaggggcgcgggaacccgcacatagtcagcccgagggcaggctacatgccgcggacggagctggtgatgacgggatcggcggcggatgcggatgcggatgcggacgcgaggcagaggaagaccttcttcccgcggattgtcatgttcttcgcgcgaaagagaactcagtcttggaagtgatgcacaacaaccggcttccttttgaaatttcttttggggcttgcttctggtacgtggctttctcggatggagcagatcaaatatgacgacacaagtgtaaaatgtgtattgatcataattttttttttcgttttcactcggagttgtgatccatgcttggaaatatggaccggcttgaatcttgatagttggtaaggtcttgttcttttgtccaatccaaaaatcatttcagctgatcaaaacttatactccctccgtctcagattagtattcgctttggattttagtttttatcgtttagctttaatcaatacattcaactgttt

SEQ ID NO: 74 - DNA, 1982 bp, Zea Mays
cacagctcgtccgtttccttcctctctctctctctctctctctctctctctcttctggggcttgcagcagaatcgcagcgaccgcgtcgtccccacgcggtgcggccgctgcgcattgcgggccgggagagcgagaacggagtggggaagatggagacggtgaagagccttctgaagccgaagccgacgccgcagcagcagctgcgcgagtggcagcgccgcctccgcaacgagggccgcaacatcgaccggcagatccgaggtccaggctgtcgccctcgacctcgatgtgctgcagatgtgcagagggaggagaagaaggtggagaaggccatcagggaggccgccaagcgcaacgacatgggatccgccaaggcgctggccatggaggtggtgcgctcgaggaaggcagtcaaccgcctgtacgagaacaaggcccagctcaactccatctccatgcaccttggcgaaatcgttggtactaataactaactatcccacccgttggtactaggcaaacaaggttgtgactgaactgaatcgaccttccttccatgtttggtatttacattttttggaatgctatgtgattatgacttaaccgaccactgcacttgtccactggttggatgccatgttcccatctaatacttgtctcggtgtctcaggctgaagcctaattaaccttatttatttctacgtataggtgtatataagtgtagaaatagatgaagtgaaacgtcatgtgccaattccttgtatgccatcggaaaatatactcgttccttgtgtgccactggctccacatgtcatacacacaaaaaatgttggctccacatgtcatacacacaaaaaatgtatctatatgccactcagtggcacacaagggaatgagtataaaatctgatagcataccaggaatttttccaagaaaatttttagtagaatacctcctactgacaagaactataaccttgtgtgtgttcctcgttacctaacgtcggactagcttccctctgttcctttctttcaaccactgacatagatcatgtggatcattctttattgtgtccttatccgtaaacatggtaatgacactcataagtgcaatatagtaatcgcagtatgattgtatgaaacttagaggttgtacaagctgtactgacaataagctgggaataccgtaatctttcagctacagctaggacagtaggccacttgtccaagagcactgaagtgatgaaacttgtcaacggcctcatgaaagcccccgaggtcgcagccacaatgcaggaattcagcaaagagatgacaaaggctggtgtgatggaagaaatggtcaacgatgctttagattcaacgctggacagcgaggacatggaggaggaaattgaagaggaggttgacaaggtcctcactgcaatcgctggggagaccgcctctgagctcccggatgctgtcaggaaggaaaaggagaagatgaagcagccttcaacaagtgtacctgaggagagaactgctatagcagaggctgttgatgacggtgagctagaccagataagggaaaggcttgccagagtgaggtcatagaagatagctgaacaaggtcagatcattgaggtgttacggcacatgacatctcacttgataatgtatacacgtatcacacacaatcactgtgattagcagaccgatttccccacatccagcaatgtgattttgtccaggccctgttgtaacctgtatgggtcatgatttctaatatatatcacgtattatatgtttggaagcaccgtgtttaatactctgaataatccatacatttcattgcactgcgacgaagtggaaagagaagagaagtggggtcacagcactagtatgatttcaagttcattgcagaaccgtccagaccgttgccaaactgcagtaaaagtagcccagcatcccagtactagttcattgcgctgatgattctaaaggat

SEQ ID NO: 75 - DNA, 1375 bp, Zea Mays
acagctcgtccgtttccttcctctctctctctctctctctctctctctctcttctggggcttgcagcagaatcgcagcgaccgcgtcgtccccacgcggtgcggccgctgcgcattgcgggccgggagagcgagaacggagtggggaagatggagacggtgaagagccttctgaagccgaagccgacgccgcagcagcagctgcgcgagtggcagcgccgcctccgcaacgagggccgcaacatcgaccggcagatccgaggcgaggcagcccgcttctcccattctccggacccagactcaccctcgccgagtgtggactaacgaagtccaggctgtcgccctcgacctcgatgtgctgcagatgtgcagagggaggagaagaaggtggagaaggccatcagggaggccgccaagcgcaacgacatgggatccgccaaggcgctggccatggaggtggtgcgctcgaggaaggcagtcaaccgcctgtacgagaacaaggcccagctcaactccatctccatgcaccttggcgaaatcgttggtactaataactaactatcccacccgttggtactaggcaaacaagctacagctaggacagtaggccacttgtccaagagcactgaagtgatgaaacttgtcaacggcctcatgaaagcccccgaggtcgcagccacaatgcaggaattcagcaaagagatgacaaaggctggtgtgatggaagaaatggtcaacgatgctttagattcaacgctggacagcgaggacatggaggaggaaattgaagaggaggttgacaaggtcctcactgcaatcgctggggagaccgcctctgagctcccggatgctgtcaggaaggaaaaggagaagatgaagcagccttcaacaagtgtacctgaggagagaactgctatagcagaggctgttgatgacggtgagctagaccagataagggaaaggcttgccagagtgaggtcatagaagatagctgaacaaggtcagatcattgaggtgttacggcacatgacatctcacttgataatgtatacacgtatcacacacaatcactgtgattagcagaccgatttccccacatccagcaatgtgattttgtccaggccctgttgtaacctgtatgggtcatgatttctaatatatatcacgtattatatgtttggaagcaccgtgtttaatactctgaataatccatacatttcattgcactgcgacgaagtggaaagagaagagaagtggggtcacagcactagtatgatttcaagttcattgcagaaccgtccagaccgttgccaaactgcagtaaaagtagcccagcatcccagtactagttcattgcgctgatgattctaaaggat

SEQ ID NO: 76 - DNA, 2781 bp, Zea Mays
cctccggcgatcgatgcgaggcgccgcgggaggcggctcgggctcgggcaggctcaagggaaccaatggctgcagcggtggcgatgcgagggggaagcagcgacagcggaggatttgacaaggttcccgggatggactcggggaaatacgtgcgctacaccccggagcaagttgaggtgctcgagcggctctacatcgattgccccaagccaagctcctcacggcgccagcaactgctgcgcgagtgtcctatactctccaacattgagccgaagcagatcaaggtctggttccagaaccgaaggtgccgcgataagcagcggaaggagtcttcgcggcttcaggctgtcaacagaaagctgacggcaatgaacaagcttcttatggaagagaatgagcgtcttcagaagcaagtctctcagttggttcatgaaaatgcgcacatgcggcagcagctgcagaacacttcattggccaatgatacaagctgtgaatcaaatgtcactgcccctccaaacgctataagggatgcaagtaacccttctggactccttgcgattgcggaggagaccttcacagagttcctctcaaaggctactgggacagctattgattgggtccagatgcctgggatgaagcctggtccggattcggttggtattgtggccatttcgcatggttgccgtggcgttgctgcccgcgcctgtggtttggtgaatctagaaccaacaaaagtcatagaaatcttgaaagatcgtccctcttggttccgtgattgtcgaagtctggaagtgtttacaatgtttccagctggaaatgggggaacaattgaacttatctacatgcagatgtacgccccaacaactttagttcctgcacgtgacttttggacgttgcgatacacgacaacaatggaagatggcagccttgtggtctgtgagagatccttgactggttctggaggcggtccaaatgcagcttctgcacagcaatttgttagggctgagatgcttccaagtgggtatttagtgcgcccatgcgaaggtggaggttcgattgtgcatatagtggaccatctagatctcgaggcatggagtgttcctgaagtgcttcgaccactatatgagtcttctagagtagttgctcagaaaatgactactgtggcactgcgccaccttagacaaattgctcaagaaacaagtggagaagtagtgtatgccttgggaaggcaacctgcagttctacggacctttagtcaaagactaagcagggggtttaatgatgccattagtggtttcaacgatgatggttggtctgtaatggggggagatggcattgaagacgttgttgttgcttgcaactcaaccaagaaaattaggaataatagcaatgctgggattacatttggagcgcctggaggcattatttgtgcgaaggcatccatgttactgcagagcgtcccaccggcagtactggtccgatttctgagggagcatagatctgaatgggctgattacaatattgatgcgtatttggcttcatcactgaagaccagtgcgtgctcacttcctgggttgcgacccatgagattttctggggggcagatgatcatgccacttgctcacacagtggagaacgaggagattcttgaagttgtccgccttgaaggacaacctcttactcatgatgaagcccttctttcaagggacatccaccttctccagctttgcactggaatagatgagaaatctgtgggttcctccttccagcttgtgtttgcaccaattgatgagcattttccggatgatgctccattgatttcctctggctttcgtgtcataccacttgatatgaaaacagacagtgttgctactatggcccgtcaatatgtgcgtagtgttgtttctgctgtgcaaagggtgtcgatggctatatctccctcccaatctggtctaaatgctgggcagaggatgctttctggcttccctgaagctgccacacttgctagatgggtttgccagagttatcactaccatctaggtgtggaattactcaatcaatcagatgaagctggtgaagcattgttgaaaatgctctggcatcatccagatgctgttctgtgctgctcttttaaggagaaacctatgtttacgtttgcaaacaaggcagggctcgacatgttagaaacatctcttattgcgctgcaagacctgacgctagacaagatcttcgacgagtcaggaaggaaagcaatattctcagatatctcaaaactaatggaacagggctacgcgtacctgccgtcgggcgtgtgcatgtcaggaatgggtcggcatgtctcattcgaccaagctgtagcgtggaaggtgctcggcgaggacagcagcgtccactgcctggcgttctgcttcgtcaactggtccttcgtttgacacgccatcccatggcctgtgtgatgagcaggccaatttttttgtatggtgatcccaatatggggaaaccatcagctgtgacagaaggctttatgttgcatgcactagttgtacgtcttgaatcgagtgtatttatgaagaaattggatactgcgcaaagtctggtgccacttacgtttgactgcctgcccggcaacaggctgtttgtctatctcaccggccaaccgaaacgatgcttattccattcagatgttacttgctgatgttaaggtatggttcaaaccagacagcaacaaaagtcggctgtttccaagtggtggaatggcatagcgacgctacacactcgtat

SEQ ID NO: 77 - DNA, 3104 bp, Zea Mays
aggagcctgtccgctcgctgcgtcgtgcgcctgccttcctctcacggtcggcctcgccgcgcgtttgctttcccgcccacgcagggatcttcgcgagcggggagttgaagcgcgagatttgcgcggctacgattctgcgttgccgagggagcaagggaaccaatggctgcagcggtggcgatgcgagggggaagcagcgacagcggaggatttgacaaggttcccgggatggactcggggaaatacgtgcgctacaccccggagcaagttgaggtgctcgagcggctctacatcgattgccccaagccaagctcctcacggcgccagcaactgctgcgcgagtgtcctatactctccaacattgagccgaagcagatcaaggtctggttccagaaccgaaggtgccgcgataagcagcggaaggagtcttcgcggcttcaggctgtcaacagaaagctgacggcaatgaacaagcttcttatggaagagaatgagcgtcttcagaagcaagtctctcagttggttcatgaaaatgcgcacatgcggcagcagctgcagaacacttcattggccaatgatacaagctgtgaatcaaatgtcactgcccctccaaacgctataagggatgcaagtaacccttctggactccttgcgattgcggaggagaccttcacagagttcctctcaaaggctactgggacagctattgattgggtccagatgcctgggatgaagcctggtccggattcggttggtattgtggccatttcgcatggttgccgtggcgttgctgcccgcgcctgtggtttggtgaatctagaaccaacaaaagtcatagaaatcttgaaagatcgtccctcttggttccgtgattgtcgaagtctggaagtgtttacaatgtttccagctggaaatgggggaacaattgaacttatctacatgcagatgtacgccccaacaactttagttcctgcacgtgacttttggacgttgcgatacacgacaacaatggaagatggcagccttgtggtctgtgagagatccttgactggttctggaggcggtccaaatgcagcttctgcacagcaatttgttagggctgagatgcttccaagtgggtatttagtgcgcccatgcgaaggtggaggttcgattgtgcatatagtggaccatctagatctcgaggcatggagtgttcctgaagtgcttcgaccactatatgagtcttctagagtagttgctcagaaaatgactactgtggcactgcgccaccttagacaaattgctcaagaaacaagtggagaagtagtgtatgccttgggaaggcaacctgcagttctacggacctttagtcaaagactaagcagggggtttaatgatgccattagtggtttcaacgatgatggttggtctgtaatggggggagatggcattgaagacgttgttgttgcttgcaactcaaccaagaaaattaggaataatagcaatgctgggattacatttggagcgcctggaggcattatttgtgcgaaggcatccatgttactgcagagcgtcccaccggcagtactggtccgatttctgagggagcatagatctgaatgggctgattacaatattgatgcgtatttggcttcatcactgaagaccagtgcgtgctcacttcctgggttgcgacccatgagattttctggggggcagatgatcatgccacttgctcacacagtggagaacgaggagattcttgaagttgtccgccttgaaggacaacctcttactcatgatgaagcccttctttcaagggacatccaccttctccagctttgcactggaatagatgagaaatctgtgggttcctccttccagcttgtgtttgcaccaattgatgagcattttccggatgatgctccattgatttcctctggctttcgtgtcataccacttgatatgaaaacagatggtgtatcctctggtaggacgctagatttggcatctagtcttgatgtgggttctgctgcaccccaagcctcaggggatgcacctccagatgactgtaatttgagatctgtgctgacaatcgcctttcaattcccttatgagatgcaccttcaggacagtgttgctactatggcccgtcaatatgtgcgtagtgttgtttctgctgtgcaaagggtgtcgatggctatatctccctcccaatctggtctaaatgctgggcagaggatgctttctggcttccctgaagctgccacacttgctagatgggtttgccagagttatcactaccatctaggtgtggaattactcaatcaatcagatgaagctggtgaagcattgttgaaaatgctctggcatcatccagatgctgttctgtgctgctcttttaaggtaccagaagagttgtactcaagtccgcaatattccaatcttctaaagcagaggcagatccctttgacaagagaaacctatgtttacgtttgcaaacaaggcagggctcgacatgttagaaacatctcttattgcgctgcaagacctgacgctagacaagatcttcgacgagtcaggaaggaaagcaatattctcagatatctcaaaactaatggaacagggctacgcgtacctgccgtcgggcgtgtgcatgtcaggaatgggtcggcatgtctcattcgaccaagctgtagcgtggaaggtgctcggcgaggacagcagcgtccactgcctggcgttctgcttcgtcaactggtccttcgtttgacacgccatcccatggcctgtgtgatgagcaggccaatttttttgtatggtgatcccaatatggggaaaccatcagctgtgacagaaggctttatgttgcatgcactagttgtacgtcttgaatcgagtgtatttatgaagaaattggatactgcgcaaagtctggtgccacttacgtttgactgcctgcccggcaacaggctgtttgtctatctcaccggccaaccgaaacgatgcttattccattcagatgttacttgctgatgttaaggtatggttcaaaccagacagcaacaaaagtcggctgtttccaagtggtggaatggcatagcgacgctacacactcgtat

SEQ ID NO: 78 - DNA, 3032 bp, Zea Mays
gagcctgtccgctcgctgcgtcgtgcgcctgccttcctctcacggtcggcctcgccgcgcgtttgctttcccgcccacgcagggatcttcgcgagcggggagttgaagcgcgagatttgcgcggctacgattctgcgttgccgagggagcaagggaaccaatggctgcagcggtggcgatgcgagggggaagcagcgacagcggaggatttgacaaggttcccgggatggactcggggaaatacgtgcgctacaccccggagcaagttgaggtgctcgagcggctctacatcgattgccccaagccaagctcctcacggcgccagcaactgctgcgcgagtgtcctatactctccaacattgagccgaagcagatcaaggtctggttccagaaccgaaggtgccgcgataagcagcggaaggagtcttcgcggcttcaggctgtcaacagaaagctgacggcaatgaacaagcttcttatggaagagaatgagcgtcttcagaagcaagtctctcagttggttcatgaaaatgcgcacatgcggcagcagctgcagaacacttcattggccaatgatacaagctgtgaatcaaatgtcactgcccctccaaacgctataagggatgcaagtaacccttctggactccttgcgattgcggaggagaccttcacagagttcctctcaaaggctactgggacagctattgattgggtccagatgcctgggatgaagcctggtccggattcggttggtattgtggccatttcgcatggttgccgtggcgttgctgcccgcgcctgtggtttggtgaatctagaaccaacaaaagtcatagaaatcttgaaagatcgtccctcttggttccgtgattgtcgaagtctggaagtgtttacaatgtttccagctggaaatgggggaacaattgaacttatctacatgcagatgtacgccccaacaactttagttcctgcacgtgacttttggacgttgcgatacacgacaacaatggaagatggcagccttgtggtctgtgagagatccttgactggttctggaggcggtccaaatgcagcttctgcacagcaatttgttagggctgagatgcttccaagtgggtatttagtgcgcccatgcgaaggtggaggttcgattgtgcatatagtggaccatctagatctcgaggcatggagtgttcctgaagtgcttcgaccactatatgagtcttctagagtagttgctcagaaaatgactactgtggcactgcgccaccttagacaaattgctcaagaaacaagtggagaagtagtgtatgccttgggaaggcaacctgcagttctacggacctttagtcaaagactaagcagggggtttaatgatgccattagtggtttcaacgatgatggttggtctgtaatggggggagatggcattgaagacgttgttgttgcttgcaactcaaccaagaaaattaggaataatagcaatgctgggattacatttggagcgcctggaggcattatttgtgcgaaggcatccatgttactgcagagcgtcccaccggcagtactggtccgatttctgagggagcatagatctgaatgggctgattacaatattgatgcgtatttggcttcatcactgaagaccagtgcgtgctcacttcctgggttgcgacccatgagattttctggggggcagatgatcatgccacttgctcacacagtggagaacgaggagattcttgaagttgtccgccttgaaggacaacctcttactcatgatgaagcccttctttcaagggacatccaccttctccagctttgcactggaatagatgagaaatctgtgggttcctccttccagcttgtgtttgcaccaattgatgagcattttccggatgatgctccattgatttcctctggctttcgtgtcataccacttgatatgaaaacagatggtgtatcctctggtaggacgctagatttggcatctagtcttgatgtgggttctgctgcaccccaagcctcaggggatgcacctccagatgactgtaatttgagatctgtgctgacaatcgcctttcaattcccttatgagatgcaccttcaggacagtgttgctactatggcccgtcaatatgtgcgtagtgttgtttctgctgtgcaaagggtgtcgatggctatatctccctcccaatctggtctaaatgctgggcagaggatgctttctggcttccctgaagctgccacacttgctagatgggtttgccagagttatcactaccatctaggtgtggaattactcaatcaatcagatgaagctggtgaagcattgttgaaaatgctctggcatcatccagatgctgttctgtgctgctcttttaaggagaaacctatgtttacgtttgcaaacaaggcagggctcgacatgttagaaacatctcttattgcgctgcaagacctgacgctagacaagatcttcgacgagtcaggaaggaaagcaatattctcagatatctcaaaactaatggaacagggctacgcgtacctgccgtcgggcgtgtgcatgtcaggaatgggtcggcatgtctcattcgaccaagctgtagcgtggaaggtgctcggcgaggacagcagcgtccactgcctggcgttctgcttcgtcaactggtccttcgtttgacacgccatcccatggcctgtgtgatgagcaggccaatttttttgtatggtgatcccaatatggggaaaccatcagctgtgacagaaggctttatgttgcatgcactagttgtacgtcttgaatcgagtgtatttatgaagaaattggatactgcgcaaagtctggtgccacttacgtttgactgcctgcccggcaacaggctgtttgtctatctcaccggccaaccgaaacgatgcttattccattcagatgttacttgctgatgttaaggtatggttcaaaccagacagcaacaaaagtcggctgtttccaagtggtggaatggcatagcgacgctacacactcgtat

SEQ ID NO: 79 - DNA, 3537 bp, Zea Mays
tgcgtcgtgcgcctgccttcctctcacggtcggcctcgccgcgcgtttgctttcccgcccacgcagggatcttcgcgagcggggagttgaagcgcgagatttgcgcggctacgattctgcgttgccgagggagcaagggaaccaatggctgcagcggtggcgatgcgagggggaagcagcgacagcggaggatttgacaaggttcccgggatggactcggggaaatacgtgcgctacaccccggagcaagttgaggtgctcgagcggctctacatcgattgccccaagccaagctcctcacggcgccagcaactgctgcgcgagtgtcctatactctccaacattgagccgaagcagatcaaggtctggttccagaaccgaaggtgccgcgataagcagcggaaggagtcttcgcggcttcaggctgtcaacagaaagctgacggcaatgaacaagcttcttatggaagagaatgagcgtcttcagaagcaagtctctcagttggttcatgaaaatgcgcacatgcggcagcagctgcagaacacttcattggccaatgatacaagctgtgaatcaaatgtcactgcccctccaaacgctataagggatgcaagtaacccttctggactccttgcgattgcggaggagaccttcacagagttcctctcaaaggctactgggacagctattgattgggtccagatgcctgggatgaagcctggtccggattcggttggtattgtggccatttcgcatggttgccgtggcgttgctgcccgcgcctgtggtttggtgaatctagaaccaacaaaagtcatagaaatcttgaaagatcgtccctcttggttccgtgattgtcgaagtctggaagtgtttacaatgtttccagctggaaatgggggaacaattgaacttatctacatgcagatgtacgccccaacaactttagttcctgcacgtgacttttggacgttgcgatacacgacaacaatggaagatggcagccttgtggtctgtgagagatccttgactggttctggaggcggtccaaatgcagcttctgcacagcaatttgttagggctgagatgcttccaagtgggtatttagtgcgcccatgcgaaggtggaggttcgattgtgcatatagtggaccatctagatctcgaggcatggagtgttcctgaagtgcttcgaccactatatgagtcttctagagtagttgctcagaaaatgactactgtggcactgcgccaccttagacaaattgctcaagaaacaagtggagaagtagtgtatgccttgggaaggcaacctgcagttctacggacctttagtcaaagactaagcagggggtttaatgatgccattagtggtttcaacgatgatggttggtctgtaatggggggagatggcattgaagacgttgttgttgcttgcaactcaaccaagaaaattaggaataatagcaatgctgggattacatttggagcgcctggaggcattatttgtgcgaaggcatccatgttactgcagagcgtcccaccggcagtactggtccgatttctgagggagcatagatctgaatgggctgattacaatattgatgcgtatttggcttcatcactgaagaccagtgcgtgctcacttcctgggttgcgacccatgagattttctggggggcagatgatcatgccacttgctcacacagtggagaacgaggagattcttgaagttgtccgccttgaaggacaacctcttactcatgatgaagcccttctttcaagggacatccaccttctccagctttgcactggaatagatgagaaatctgtgggttcctccttccagcttgtgtttgcaccaattgatgagcattttccggatgatgctccattgatttcctctggctttcgtgtcataccacttgatatgaaaacagttaagcatcactaacaacattaccttttctttttcgttgcttgggcggtcgcttcatttccttgtctattatgtttacaattatcttaagactttctccagtagtttactcatcttcatcttctattttaaacttcactatgtaaacagtgcagtctatattgcacaacagtgttttgcacggccatatgcacgatttgctagcaaagactaacatgtcacttggtttggaatttggatcaagagtataagtgttcatctgacacttcgaattatgttagaatgatagtttgttagccatattatcatacattcaagaggattgtaatatttttaaagaacatatggcgttatgttctagctagctatgatttgttacctagtcatttagctgtctgctgctaaaatatgtattcttgaatgcagtttttgaccattatatctcatgcaggatggtgtatcctctggtaggacgctagatttggcatctagtcttgatgtgggttctgctgcaccccaagcctcaggggatgcacctccagatgactgtaatttgagatctgtgctgacaatcgcctttcaattcccttatgagatgcaccttcaggacagtgttgctactatggcccgtcaatatgtgcgtagtgttgtttctgctgtgcaaagggtgtcgatggctatatctccctcccaatctggtctaaatgctgggcagaggatgctttctggcttccctgaagctgccacacttgctagatgggtttgccagagttatcactaccatctaggtgtggaattactcaatcaatcagatgaagctggtgaagcattgttgaaaatgctctggcatcatccagatgctgttctgtgctgctcttttaaggtaccagaagagttgtactcaagtccgcaatattccaatcttctaaagcagaggcagatccctttgacaagagaaacctatgtttacgtttgcaaacaaggcagggctcgacatgttagaaacatctcttattgcgctgcaagacctgacgctagacaagatcttcgacgagtcaggaaggaaagcaatattctcagatatctcaaaactaatggaacagggctacgcgtacctgccgtcgggcgtgtgcatgtcaggaatgggtcggcatgtctcattcgaccaagctgtagcgtggaaggtgctcggcgaggacagcagcgtccactgcctggcgttctgcttcgtcaactggtccttcgtttgacacgccatcccatggcctgtgtgatgagcaggccaatttttttgtatggtgatcccaatatggggaaaccatcagctgtgacagaaggctttatgttgcatgcactagttgtacgtcttgaatcgagtgtatttatgaagaaattggatactgcgcaaagtctggtgccacttacgtttgactgcctgcccggcaacaggctgtttgtctatctcaccggccaaccgaaacgatgcttattccattcagatgttacttgctgatgttaaggtatggttcaaaccagacagcaacaaaagtcggctgtttccaagtggtggaatggcatagcgacgctacacactcgtat

SEQ ID NO: 80 - DNA, 3155 bp, Zea Mays
ggatctacctaccttgccttcccgcttgcttttgcaatttgctctcctctcgtcccgtctgtgctgcgtggatctgtgccgcttttggtgtctgtctgcgcgtgcccactgatgcttccggtttcatcgcttcagggatcttcgcgagcggggagttgaagcgcgagatttgcgcggctacgattctgcgttgccgagggagcaagggaaccaatggctgcagcggtggcgatgcgagggggaagcagcgacagcggaggatttgacaaggttcccgggatggactcggggaaatacgtgcgctacaccccggagcaagttgaggtgctcgagcggctctacatcgattgccccaagccaagctcctcacggcgccagcaactgctgcgcgagtgtcctatactctccaacattgagccgaagcagatcaaggtctggttccagaaccgaaggtgccgcgataagcagcggaaggagtcttcgcggcttcaggctgtcaacagaaagctgacggcaatgaacaagcttcttatggaagagaatgagcgtcttcagaagcaagtctctcagttggttcatgaaaatgcgcacatgcggcagcagctgcagaacacttcattggccaatgatacaagctgtgaatcaaatgtcactgcccctccaaacgctataagggatgcaagtaacccttctggactccttgcgattgcggaggagaccttcacagagttcctctcaaaggctactgggacagctattgattgggtccagatgcctgggatgaagcctggtccggattcggttggtattgtggccatttcgcatggttgccgtggcgttgctgcccgcgcctgtggtttggtgaatctagaaccaacaaaagtcatagaaatcttgaaagatcgtccctcttggttccgtgattgtcgaagtctggaagtgtttacaatgtttccagctggaaatgggggaacaattgaacttatctacatgcagatgtacgccccaacaactttagttcctgcacgtgacttttggacgttgcgatacacgacaacaatggaagatggcagccttgtggtctgtgagagatccttgactggttctggaggcggtccaaatgcagcttctgcacagcaatttgttagggctgagatgcttccaagtgggtatttagtgcgcccatgcgaaggtggaggttcgattgtgcatatagtggaccatctagatctcgaggcatggagtgttcctgaagtgcttcgaccactatatgagtcttctagagtagttgctcagaaaatgactactgtggcactgcgccaccttagacaaattgctcaagaaacaagtggagaagtagtgtatgccttgggaaggcaacctgcagttctacggacctttagtcaaagactaagcagggggtttaatgatgccattagtggtttcaacgatgatggttggtctgtaatggggggagatggcattgaagacgttgttgttgcttgcaactcaaccaagaaaattaggaataatagcaatgctgggattacatttggagcgcctggaggcattatttgtgcgaaggcatccatgttactgcagagcgtcccaccggcagtactggtccgatttctgagggagcatagatctgaatgggctgattacaatattgatgcgtatttggcttcatcactgaagaccagtgcgtgctcacttcctgggttgcgacccatgagattttctggggggcagatgatcatgccacttgctcacacagtggagaacgaggagattcttgaagttgtccgccttgaaggacaacctcttactcatgatgaagcccttctttcaagggacatccaccttctccagctttgcactggaatagatgagaaatctgtgggttcctccttccagcttgtgtttgcaccaattgatgagcattttccggatgatgctccattgatttcctctggctttcgtgtcataccacttgatatgaaaacagatggtgtatcctctggtaggacgctagatttggcatctagtcttgatgtgggttctgctgcaccccaagcctcaggggatgcacctccagatgactgtaatttgagatctgtgctgacaatcgcctttcaattcccttatgagatgcaccttcaggacagtgttgctactatggcccgtcaatatgtgcgtagtgttgtttctgctgtgcaaagggtgtcgatggctatatctccctcccaatctggtctaaatgctgggcagaggatgctttctggcttccctgaagctgccacacttgctagatgggtttgccagagttatcactaccatctaggtgtggaattactcaatcaatcagatgaagctggtgaagcattgttgaaaatgctctggcatcatccagatgctgttctgtgctgctcttttaaggtaccagaagagttgtactcaagtccgcaatattccaatcttctaaagcagaggcagatccctttgacaagagaaacctatgtttacgtttgcaaacaaggcagggctcgacatgttagaaacatctcttattgcgctgcaagacctgacgctagacaagatcttcgacgagtcaggaaggaaagcaatattctcagatatctcaaaactaatggaacagggctacgcgtacctgccgtcgggcgtgtgcatgtcaggaatgggtcggcatgtctcattcgaccaagctgtagcgtggaaggtgctcggcgaggacagcagcgtccactgcctggcgttctgcttcgtcaactggtccttcgtttgacacgccatcccatggcctgtgtgatgagcaggccaatttttttgtatggtgatcccaatatggggaaaccatcagctgtgacagaaggctttatgttgcatgcactagttgtacgtcttgaatcgagtgtatttatgaagaaattggatactgcgcaaagtctggtgccacttacgtttgactgcctgcccggcaacaggctgtttgtctatctcaccggccaaccgaaacgatgcttattccattcagatgttacttgctgatgttaaggtatggttcaaaccagacagcaacaaaagtcggctgtttccaagtggtggaatggcatagcgacgctacacactcgtat

SEQ ID NO: 81 - DNA, 3073 bp, Zea Mays
gctgcgtggatctgtgccgcttttggtgtctgtctgcgcgtgcccactgatgcttccggtttcatcgcttcagggatcttcgcgagcggggagttgaagcgcgagatttgcgcggctacgattctgcgttgccgagggagcaagggaaccaatggctgcagcggtggcgatgcgagggggaagcagcgacagcggaggatttgacaaggttcccgggatggactcggggaaatacgtgcgctacaccccggagcaagttgaggtgctcgagcggctctacatcgattgccccaagccaagctcctcacggcgccagcaactgctgcgcgagtgtcctatactctccaacattgagccgaagcagatcaaggtgccgcgataagcagcggaaggagtcttcgcggcttcaggctgtcaacagaaagctgacggcaatgaacaagcttcttatggaagagaatgagcgtcttcagaagcaagtctctcagttggttcatgaaaatgcgcacatgcggcagcagctgcagaacacttcattggccaatgatacaagctgtgaatcaaatgtcactgcccctccaaacgctataagggatgcaagtaacccttctggactccttgcgattgcggaggagaccttcacagagttcctctcaaaggctactgggacagctattgattgggtccagatgcctgggatgaagcctggtccggattcggttggtattgtggccatttcgcatggttgccgtggcgttgctgcccgcgcctgtggtttggtgaatctagaaccaacaaaagtcatagaaatcttgaaagatcgtccctcttggttccgtgattgtcgaagtctggaagtgtttacaatgtttccagctggaaatgggggaacaattgaacttatctacatgcagatgtacgccccaacaactttagttcctgcacgtgacttttggacgttgcgatacacgacaacaatggaagatggcagccttgtggtctgtgagagatccttgactggttctggaggcggtccaaatgcagcttctgcacagcaatttgttagggctgagatgcttccaagtgggtatttagtgcgcccatgcgaaggtggaggttcgattgtgcatatagtggaccatctagatctcgaggcatggagtgttcctgaagtgcttcgaccactatatgagtcttctagagtagttgctcagaaaatgactactgtggcactgcgccaccttagacaaattgctcaagaaacaagtggagaagtagtgtatgccttgggaaggcaacctgcagttctacggacctttagtcaaagactaagcagggggtttaatgatgccattagtggtttcaacgatgatggttggtctgtaatggggggagatggcattgaagacgttgttgttgcttgcaactcaaccaagaaaattaggaataatagcaatgctgggattacatttggagcgcctggaggcattatttgtgcgaaggcatccatgttactgcagagcgtcccaccggcagtactggtccgatttctgagggagcatagatctgaatgggctgattacaatattgatgcgtatttggcttcatcactgaagaccagtgcgtgctcacttcctgggttgcgacccatgagattttctggggggcagatgatcatgccacttgctcacacagtggagaacgaggagattcttgaagttgtccgccttgaaggacaacctcttactcatgatgaagcccttctttcaagggacatccaccttctccagctttgcactggaatagatgagaaatctgtgggttcctccttccagcttgtgtttgcaccaattgatgagcattttccggatgatgctccattgatttcctctggctttcgtgtcataccacttgatatgaaaacagatggtgtatcctctggtaggacgctagatttggcatctagtcttgatgtgggttctgctgcaccccaagcctcaggggatgcacctccagatgactgtaatttgagatctgtgctgacaatcgcctttcaattcccttatgagatgcaccttcaggacagtgttgctactatggcccgtcaatatgtgcgtagtgttgtttctgctgtgcaaagggtgtcgatggctatatctccctcccaatctggtctaaatgctgggcagaggatgctttctggcttccctgaagctgccacacttgctagatgggtttgccagagttatcactaccatctaggtgtggaattactcaatcaatcagatgaagctggtgaagcattgttgaaaatgctctggcatcatccagatgctgttctgtgctgctcttttaaggtaccagaagagttgtactcaagtccgcaatattccaatcttctaaagcagaggcagatccctttgacaagagaaacctatgtttacgtttgcaaacaaggcagggctcgacatgttagaaacatctcttattgcgctgcaagacctgacgctagacaagatcttcgacgagtcaggaaggaaagcaatattctcagatatctcaaaactaatggaacagggctacgcgtacctgccgtcgggcgtgtgcatgtcaggaatgggtcggcatgtctcattcgaccaagctgtagcgtggaaggtgctcggcgaggacagcagcgtccactgcctggcgttctgcttcgtcaactggtccttcgtttgacacgccatcccatggcctgtgtgatgagcaggccaatttttttgtatggtgatcccaatatggggaaaccatcagctgtgacagaaggctttatgttgcatgcactagttgtacgtcttgaatcgagtgtatttatgaagaaattggatactgcgcaaagtctggtgccacttacgtttgactgcctgcccggcaacaggctgtttgtctatctcaccggccaaccgaaacgatgcttattccattcagatgttacttgctgatgttaaggtatggttcaaaccagacagcaacaaaagtcggctgtttccaagtggtggaatggcatagcgacgctacacactcgtat

SEQ ID NO: 82 - DNA, 1898 bp, Zea Mays
ctcacacttgacatccgttatgggtcgcagcccatgcacagcccagggagttttcaggagcgcgttgtctaggaacgaacccccggaaacattttcccttcagacggttcaggaagcaattaaacctcagaaggaaaccgtgttggttctagaggagaatcagtccttggaaaatgctcttcgaactttgctgcaggagcttgtgtcatctgcggtccaatcggataaaaagattatgcagtacgggaattctttggatagcggagaaagtaactgcctgataactcgccttcttgatattgtgctttacctttgcgaaagagggcatgttgaaggtggtatggtattccagctgttagaagacctaactgaaatgtcaacaatcaaagactgcaaagatatctttgggtatattgagagccagcaagatgtattggggaagcaagaactttttggacgtggcaaactagttatgctaaggacttgcaaccaacttcttcgcagactatcgaaggcaaatgatgtggtgttctgtgggcgcattattatgtttcttgcacattttttcccattatcggagcgttcagctctcaacattaaaggggttttcaatacatcaaatgtaacaaagtacgaaaaggatgctatggatggaatctctgttgatttcaacttctacaagaccctctggagtctacaggaacatttcagcaacccagctttgacttctacaaatccggcaaaatggcaaaagttctcttctaatctggcggttgtgttgaacacatttgaagctcaacctcttagcgatgatgatggaaaacttaacaatctgaacgaggaggaagatgctgctttcaatattaagtacctgactagcagtaaattaatgggtttggagttgaaggacccaagttttcgacgccacatccttgttcagtgtcttatattttttgactatctcaaggcacctgggaaaaatgacaaagaaggtccaacagggagcatgatagaggaaattaaatcttgtgaagagcatgttaagaagcttctggaaattattccccccaaagggaaggaatttctgaaaagcattgaacatattcttgagcgggagaaaaattgggaagccaaggtggagactgggaagcaaagagctcagccaactttggaaatgggcagaacaaaaccccaatgtcttgactgatcctgaccgtgtccgcatgccatcaattacagaatattggaaaccacttgcagaagatatggatccatctgctggaattgaagaggagtatcaccacaaaagtaatcgggtgtactgttggaaaggactacggttttcggccaggcaggacttggatggattcgcgcggttttcagactacgggatcgaaggggttgtaccttcagaactgctgccacctgaagtaaatgccaagttttcttctaaacccgccgagaaggttaagcggacgagaaaggaagattcaaaaagcgtgtcagctcatcagcccagagagcatcaggttgctgcgacacctgaaaccgacggcggtgtcgacccggaagaaggcgaaggcgcggcgccaatggattccgacaacggcgcggtgggggatagccagaaacggagcccgggggaggtctctggccctgaaagcgggcagtgcgagcctgaggcggacgctgatgataacgtgaggacggaaactaccagtagggatgctcgtgccggagagatgaaatgaaacagtggcatgaagaggaaccagattttgtcgactcactgacattgaaccagattttgaacagctgagatacattctcttgttggtgtgtactgtgtagtagacatcagtagccatccatttgaaggaaatgcttcccgctaggtc

SEQ ID NO: 83 - DNA, 1940 bp, Zea Mays
atgggtcgcagcccatgcacagcccagggagttttcaggagcgcgttgtctaggaacgaacccccggaaacattttcccttcagacggttcaggaagcaattaaacctcagaaggaaaccgtgttggttctagaggagaatcagtccttggaaaatgctcttcgaactttgctgcaggagcttgtgtcatctgcggtccaatcggataaaaagattatgcagtacgggaattctttggatagcggagaaagtaactgcctgataactcgccttcttgatattgtgctttacctttgcgaaagagggcatgttgaaggtggtatggtattccagctgttagaagacctaactgaaatgtcaacaatcaaagactgcaaagatatctttgggtatattgagagccagcaagatgtattggggaagcaagaactttttggacgtggcaaactagttatgctaaggacttgcaaccaacttcttcgcagactatcgaaggcaaatgatgtggtgttctgtgggcgcattattatgtttcttgcacattttttcccattatcggagcgttcagctctcaacattaaaggggttttcaatacatcaaatgtaacaaagtacgaaaaggatgctatggatggaatctctgttgatttcaacttctacaagaccctctggagtctacaggaacatttcagcaacccagctttgacttctacaaatccggcaaaatggcaaaagttctcttctaatctggcggttgtgttgaacacatttgaagctcaacctcttagcgatgatgatggaaaacttaacaatctgaacgaggaggaagatgctgctttcaatattaagtacctgactagcagtaaattaatgggtttggagttgaaggacccaagttttcgacgccacatccttgttcagtgtcttatattttttgactatctcaaggcacctgggaaaaatgacaaagaaggtccaacagggagcatgatagaggaaattaaatcttgtgaagagcatgttaagaagcttctggaaattattccccccaaagggaaggaatttctgaaaagcattgaacatattcttgagcgggagaaaaattgggtttggtggaagcgagatgggtgtctcgcatttgaaaagccaccctttgaaaagaaaccaggaagccaaggtggagactgggaagcaaagagctcagccaactttggaaatgggcagaacaaaaccccaatgtcttgactgatcctgaccgtgtccgcatgccatcaattacagaatattggaaaccacttgcagaagatatggatccatctgctggaattgaagaggagtatcaccacaaaagtaatcgggtgtactgttggaaaggactacggttttcggccaggcaggacttggatggattcgcgcggttttcagactacgggatcgaaggggttgtaccttcagaactgctgccacctgaagtaaatgccaagttttcttctaaacccgccgagaaggttaagcggacgagaaaggaagattcaaaaagcgtgtcagctcatcagcccagagagcatcaggttgctgcgacacctgaaaccgacggcggtgtcgacccggaagaaggcgaaggcgcggcgccaatggattccgacaacggcgcggtgggggatagccagaaacggagcccgggggaggtctctggccctgaaagcgggcagtgcgagcctgaggcggacgctgatgataacgtgaggacggaaactaccagtagggatgctcgtgccggagagatgaaatgaaacagtggcatgaagaggaaccagattttgtcgactcactgacattgaaccagattttgaacagctgagatacattctcttgttggtgtgtactgtgtagtagacatcagtagccatccatttgaaggaaatgcttcccgctaggtc

SEQ ID NO: 84 - DNA, 1955 bp, Zea Mays
atgggtcgcagcccatgcacagcccagggagttttcaggagcgcgttgtctaggaacgaacccccggaaacattttcccttcagacggttcaggaagcaattaaacctcagaaggaaaccgtgttggttctagaggagaatcagtccttggaaaatgctcttcgaactttgctgcaggagcttgtgtcatctgcggtccaatcggataaaaagattatgcagtacgggaattctttggatagcggagaaagtaactgcctgataactcgccttcttgatattgtgctttacctttgcgaaagagggcatgttgaaggtggtatggtattccagctgttagaagacctaactgaaatgtcaacaatcaaagactgcaaagatatctttgggtatattgagagccagcaagatgtattggggaagcaagaactttttggacgtggcaaactagttatgctaaggacttgcaaccaacttcttcgcagactatcgaaggcaaatgatgtggtgttctgtgggcgcattattatgtttcttgcacattttttcccattatcggagcgttcagctctcaacattaaaggggttttcaatacatcaaatgtaacaaagtacgaaaaggatgctatggatggaatctctgttgatttcaacttctacaagaccctctggagtctacaggaacatttcagcaacccagctttgacttctacaaatccggcaaaatggcaaaagttctcttctaatctggcggttgtgttgaacacatttgaagctcaacctcttagcgatgatgatggaaaacttaacaatctgaacgaggaggaagatgctgctttcaatattaagtacctgactagcagtaaattaatgggtttggagttgaaggacccaagttttcgacgccacatccttgttcagtgtcttatattttttgactatctcaaggcacctgggaaaaatgacaaagaaggtccaacagggagcatgatagaggaaattaaatcttgtgaagagcatgttaagaagcttctggaaattattccccccaaagggaaggaatttctgaaaagcattgaacatattcttgagcgggagaaaaattgggtttggtggaagcgagatgggtgtctcgcatttgaaaagccaccctttgaaaagaaaccaggtcaggctggtgccagaaaacggaagccaaggtggagactgggaagcaaagagctcagccaactttggaaatgggcagaacaaaaccccaatgtcttgactgatcctgaccgtgtccgcatgccatcaattacagaatattggaaaccacttgcagaagatatggatccatctgctggaattgaagaggagtatcaccacaaaagtaatcgggtgtactgttggaaaggactacggttttcggccaggcaggacttggatggattcgcgcggactacgggatcgaaggggttgtaccttcagaactgctgccacctgaagtaaatgccaagttttcttctaaacccgccgagaaggttaagcggacgagaaaggaagattcaaaaagcgtgtcagctcatcagcccagagagcatcaggttgctgcgacacctgaaaccgacggcggtgtcgacccggaagaaggcgaaggcgcggcgccaatggattccgacaacggcgcggtgggggatagccagaaacggagcccgggggaggtctctggccctgaaagcgggcagtgcgagcctgaggcggacgctgatgataacgtgaggacggaaactaccagtagggatgctcgtgccggagagatgaaatgaaacagtggcatgaagaggaaccagattttgtcgactcactgacattgaaccagattttgaacagctgagatacattctcttgttggtgtgtactgtgtagtagacatcagtagccatccatttgaaggaaatgcttcccgctaggtc

SEQ ID NO: 85 - DNA, 1890 bp, Zea Mays
atgggtcgcagcccatgcacagcccagggagttttcaggagcgcgttgtctaggaacgaacccccggaaacattttcccttcagacggttcaggaagcaattaaacctcagaaggaaaccgtgttggttctagaggagaatcagtccttggaaaatgctcttcgaactttgctgcaggagcttgtgtcatctgcggtccaatcggataaaaagattatgcagtacgggaattctttggatagcggagaaagtaactgcctgataactcgccttcttgatattgtgctttacctttgcgaaagagggcatgttgaaggtggtatggtattccagctgttagaagacctaactgaaatgtcaacaatcaaagactgcaaagatatctttgggtatattgagagccagcaagatgtattggggaagcaagaactttttggacgtggcaaactagttatgctaaggacttgcaaccaacttcttcgcagactatcgaaggcaaatgatgtggtgttctgtgggcgcattattatgtttcttgcacattttttcccattatcggagcgttcagctctcaacattaaaggggttttcaatacatcaaatgtaacaaagtacgaaaaggatgctatggatggaatctctgttgatttcaacttctacaagaccctctggagtctacaggaacatttcagcaacccagctttgacttctacaaatccggcaaaatggcaaaagttctcttctaatctggcggttgtgttgaacacatttgaagctcaacctcttagcgatgatgatggaaaacttaacaatctgaacgaggaggaagatgctgctttcaatattaagtacctgactagcagtaaattaatgggtttggagttgaaggacccaagttttcgacgccacatccttgttcagtgtcttatattttttgactatctcaaggcacctgggaaaaatgacaaagaaggtccaacagggagcatgatagaggaaattaaatcttgtgaagagcatgttaagaagcttctggaaattattccccccaaagggaaggaatttctgaaaagcattgaacatattcttgagcgggagaaaaattgggtttggtggaagcgagatgggtgtctcgcatttgaaaagccaccctttgaaaagaaaccaggtcaggctggtgccagaaaacggaagccaaggtggagactgggaagcaaagagctcagccaactttggaaatgggcagaacaaaaccccatggatccatctgctggaattgaagaggagtatcaccacaaaagtaatcgggtgtactgttggaaaggactacggttttcggccaggcaggacttggatggattcgcgcggttttcagactacgggatcgaaggggttgtaccttcagaactgctgccacctgaagtaaatgccaagttttcttctaaacccgccgagaaggttaagcggacgagaaaggaagattcaaaaagcgtgtcagctcatcagcccagagagcatcaggttgctgcgacacctgaaaccgacggcggtgtcgacccggaagaaggcgaaggcgcggcgccaatggattccgacaacggcgcggtgggggatagccagaaacggagcccgggggaggtctctggccctgaaagcgggcagtgcgagcctgaggcggacgctgatgataacgtgaggacggaaactaccagtagggatgctcgtgccggagagatgaaatgaaacagtggcatgaagaggaaccagattttgtcgactcactgacattgaaccagattttgaacagctgagatacattctcttgttggtgtgtactgtgtagtagacatcagtagccatccatttgaaggaaatgcttcccgctaggtc

SEQ ID NO: 86 - DNA, 2369 bp, Zea Mays
atgggtcgcagcccatgcacagcccaggttcgcggtccatctgtcttgtgtttctccttcctcattcctcagctcgagctcctcgacggctcgccagtctgccgccgcgcacggcgcatctgttccttctgctctgcgacggcgagcctctcccctccctccgtgctcgtatcgtagcctattttcgccgccgcagcttgcccagtgctgttatcttgtgttcggcaccgcgtcaaaggctgaccctctccaggcgcctggtagatcgcccagactcaaccgggtaagccttaccgcgcacgccaccatggccgagccctcgccgcctccggtgtcgaacgctggcctccgtatcctcctgtcgaaggaccggccggctccctcccctccacccaccgccgctgtctccagccacgccgaccgcgaccgcatcatcggagttttcaggagcgcgttgtctaggaacgaacccccggaaacattttcccttcagacggttcaggaagcaattaaacctcagaaggaaaccgtgttggttctagaggagaatcagtccttggaaaatgctcttcgaactttgctgcaggagcttgtgtcatctgcggtccaatcggataaaaagattatgcagtacgggaattctttggatagcggagaaagtaactgcctgataactcgccttcttgatattgtgctttacctttgcgaaagagggcatgttgaaggtggtatggtattccagctgttagaagacctaactgaaatgtcaacaatcaaagactgcaaagatatctttgggtatattgagagccagcaagatgtattggggaagcaagaactttttggacgtggcaaactagttatgctaaggacttgcaaccaacttcttcgcagactatcgaaggcaaatgatgtggtgttctgtgggcgcattattatgtttcttgcacattttttcccattatcggagcgttcagctcaacattaaaggggttttcaatacatcaaatgtaacaaagtacgaaaaggatgctatggatggaatctctgttgatttcaacttctacaagaccctctggagtctacaggaacatttcagcaacccagctttgacttctacaaatccggcaaaatggcaaaagttctcttctaatctggcggttgtgttgaacacatttgaagctcaacctcttagcgatgatgatggaaaacttaacaatctgaacgaggaggaagatgctgctttcaatattaagtacctgactagcagtaaattaatgggtttggagttgaaggacccaagttttcgacgccacatccttgttcagtgtcttatattttttgactatctcaaggcacctgggaaaaatgacaaagaaggtccaacagggagcatgatagaggaaattaaatcttgtgaagagcatgttaagaagcttctggaaattattccccccaaagggaaggaatttctgaaaagcattgaacatattcttgagcgggagaaaaattgggtttggtggaagcgagatgggtgtctcgcatttgaaaagccaccctttgaaaagaaaccaggtcaggctggtgccagaaaacggaagccaaggtggagactgggaagcaaagagctcagccaactttggaaatgggcagaacaaaaccccaatgtcttgactgatcctgaccgtgtccgcatgccatcaattacagaatattggaaaccacttgcagaagatatggatccatctgctggaattgaagaggagtatcaccacaaaagtaatcgggtgtactgttggaaaggactacggttttcggccaggcaggacttggatggattcgcgcggttttcagactacgggatcgaaggggttgtaccttcagaactgctgccacctgaagtaaatgccaagttttcttctaaacccgccgagaaggttaagcggacgagaaaggaagattcaaaaagcgtgtcagctcatcagcccagagagcatcaggttgctgcgacacctgaaaccgacggcggtgtcgacccggaagaaggcgaaggcgcggcgccaatggattccgacaacggcgcggtgggggatagccagaaacggagcccgggggaggtctctggccctgaaagcgggcagtgcgagcctgaggcggacgctgatgataacgtgaggacggaaactaccagtagggatgctcgtgccggagagatgaaatgaaacagtggcatgaagaggaaccagattttgtcgactcactgacattgaaccagattttgaacagctgagatacattctcttgttggtgtgtactgtgtagtagacatcagtagccatccatttgaaggaaatgcttcccgctaggtc

SEQ ID NO: 87 - DNA, 1926 bp, Zea Mays
atgggtcgcagcccatgcacagcccagggagttttcaggagcgcgttgtctaggaacgaacccccggaaacattttcccttcagacggttcaggaagcaattaaacctcagaaggaaaccgtgttggttctagaggagaatcagtccttggaaaatgctcttcgaactttgctgcaggagcttgtgtcatctgcggtccaatcggataaaaagattatgcagtacgggaattctttggatagcggagaaagtaactgcctgataactcgccttcttgatattgtgctttacctttgcgaaagagggcatgttgaaggtggtatggtattccagctgttagaagacctaactgaaatgtcaacaatcaaagactgcaaagatatctttgggtatattgagagccagcaagatgtattggggaagcaagaactttttggacgtggcaaactagttatgctaaggacttgcaaccaacttcttcgcagactatcgaaggcaaatgatgtggtgttctgtgggcgcattattatgtttcttgcacattttttcccattatcggagcgttcagctctcaacattaaaggggttttcaatacatcaaatgtaacaaagtacgaaaaggatgctatggatggaatctctgttgatttcaacttctacaagaccctctggagtctacaggaacatttcagcaacccagctttgacttctacaaatccggcaaaatggcaaaagttctcttctaatctggcggttgtgttgaacacatttgaagctcaacctcttagcgatgatgatggaaaacttaacaatctgaacgaggaggaagatgctgctttcaatattaagtacctgactagcagtaaattaatgggtttggagttgaaggacccaagttttcgacgccacatccttgttcagtgtcttatattttttgactatctcaaggcacctgggaaaaatgacaaagaaggtccaacagggagcatgatagaggaaattaaatcttgtgaagagcatgttaagaagcttctggaaattattccccccaaagggaaggaatttctgaaaagcattgaacatattcttgagcgggagaaaaattgggtttggtggaagcgagatgggtgtctcgcatttgaaaagccaccctttgaaaagaaaccaggtcaggctggtgccagaaaacggaagccaaggtggagactgggaagcaaagagctcagccaactttggaaatgggcagaacaaaaccccaatgtcttgactgatcctgaccgtgtccgcatgccatcaattacagaatattggaaaccacttgcagaagatatggatccatctgctggaattgaagaggagtatcaccacaaaagtaatcgggtgtactgttggaaaggactacggttttcggccaggcaggacttggatggattcgcgcggttttcagactacgggatcgaaggggttgtaccttcagaactgctgccacctgaagtaaatgccaagttttcttctaaacccgccgagaaggttaagcggacgagaaaggaagattcaaaaagcgtgtcagctcatcagcccagagagcatcaggttgctgcgacacctgaaaccgacggcggtgtcgacccggaagaaggcgaaggcgcggcgccaatggattccgacaacggcgcggtgggggatagccagaaacggagcccgggggaggtctctggccctgaaagcgggcagtgcgagcctgaggcggacgctgatgataacgtgaggacggaaactaccagtagggatgctcgtgccggagagatgaaatgaaacagtggcatgaagaggaaccagattttgtcgactcactgacattgaaccagattttgaacagctgagatacattctcttgttgtacgtgtttcaacgatgctgaccgac

SEQ ID NO: 88 - DNA, 1214 bp, Zea Mays
ctatctctctcgcttccacgcacgcacgaccatcataattcataacacaacaccgcgcgctcaatctgttatttactgcattgcatttacatgccaagaacgaatcaatcgcgccttaatggcgaatacagtgccattttgcctgattcattttttatataaaaaaaccgtttatttcttctcttatctgataaagtgattactgccatgcgttcaacccgctcgactctgtcaacagttgtgcccgattctggcctcagtttgacttcctggatgcgtgtacaagtagagcacatgatctggtccgtgtggcagtaatggtccatttccacaataatgtttacaggtcaaaatcactagcctcgaggttggcaggtttggccacacaccggtgagagaatggactaaaaatgctgcttccctggacccgctccttaaacttaaaccaccacggagcacagtttcgccatccatgagccttctactacaggggtgccatggcctgacgccggctccaaagggggacctgaacctgaccgatgaatgcgctcaaggccatcacaggaaagccggaagcttatcgagcaccttgttgccgaggagagccgggcaagggctggccctgaggccaaagtctggcggtcgggcagacacgaacggcatccagcaggatctgttggctgcgtgggtgccctcgtacggggacgggttgcgcgcggtgaagagatcgtcgagcgctccggagttccaggattcggacagcgtcagcctcgcctcggcgtggctgaagagcaagtggaacctgaaaccggattatgccttcaccctggcgctgttcgacggcatctccaagcctctcctggacagcatccccaagcctctcctcgacaacatccccaactcgatcgttgcttggagaaacaaggcggccagagattagcagcttcgtttcgtctctttacagccaacaaaaaaaaaggcctcgaacggttggacacactgtgctgaaatggcgtgacggatacagtgacacattacttgcacatacatactgtgctgaatctattgtgccaaagcagcagcagcagcagattgggagctgggagatgagcctgggggtgtattcttttcatttttgtacgtacacatctaggaatgaaggcaaacgcctggcagcattcccatgacctaataaagaaatagcttgttcatcc

SEQ ID NO: 89 - DNA, 2435 bp, Zea Mays
gtttggcgggcgccgcgcgtatgtttctcgttgcgacttggaggagaaggagattcgccgtctcaccccttccctgcctgctccctcgtctaagaaaagcgggcagagcagagacggcggcggcaggccatcgcggactcccgctcaccctcgtctgccaccgcctcccaggtcaggggccgacggcgacgggtggggaggggcggcagaggtagtccgaggggaggctgtggagcggagggcggagagaggccacgccgtccggagtctccagttccgtcgccacagcttcctgccgcgcctgggccgaggtaaacgagagggatcgaggaagaagtatcccccggagccccttcccccgaacccgaaggctccggaatggcgcactgggttagcgacagtgatggcagtgacaactttgaatgggatagtgatggcaatggggaggagccagcgaacttcaatgctgctggtgccggttcatcagctctgagatcaacgaacactgatgctccaggtccatcaacacgggttgctaatggcaatgggaaggctgggccatctgcctccttggttcaaaagtatatggacatgggtttcacggaagagattgttcggaaggccatgaaggacaatggggataatggagcagattcattagttgagcttcttcttacttaccaggaactaggcaatgacctcaaagtggataacggcttcgcttctggttgtgccccccaaactgttgatgatagtgatgatgacgacattctagaaaactgggatgatgaggatgctgatggtgggagaagcaccagggttgctaactctattgatgattctgaagacgaggatttcttaaatgagatgtcacagaaggacaagaaagttgattccttagttaaaatggggtttcctgaagacgaggctgcactggctattactagatgcggatgcatctatttctgttctggtggattccatatatgcttcacagaccgcaggagatggttactgtggcaatttgtctgactacgagggtaattccaatggagggagaaacaaaggaaggttcatggacgggaacaaaaaaaagagaaaaagatatggaggtcaagcacagggaaatagaggcccattagatggtagctgtgaagaacccatgcctctcccaaatccaatggttggatttaatttgccggaccattggacaagaccagtagacagatcgctgcctacacaagctattggaccaccatacttctactacgagaatgttgctcttgctccaaagggtgtctggactaccatatctagattcttgtacgatattcagccggagtttgtggactccaagtacttctgcgctgctgccaggaaaagaggctacatacacaatctaccacttgagagaaggtcgcctctcctccccttacctccgaagacaatatttgaagcatttcctcgtaccaagaggtggtggccttcatgggacccaaggcggcagttcaattgcctccagacttgtacgtctagcgcaaaactgttagagaggattcgtgtaacccttgcaaacagttcggatccaccacctccattagttcagaagtttgtgctggaggagtgtaggaaatggaatctggcttgggttggcctaaacaaggttgctcccctagagcctgatgagatggagttcctgcttggctttcccaaggatcacaccagaggtatcagcaggacagagaggtaccgatctcttggaaactcgtttcaggttgacactgttgcttaccatctctcagtcctcaaggataggtacccacaaggcatgaacgtgttgtctctattcactggcatcggaggagccgaggtggctctccataggctcggtatacgcatgaacacagtcgtttcagtagagaagtctgaggtgaacaggactattctgaagagctggtgggatcagacacagactggtaccttgattgagatcaatgatgtgcagacgctgacagctgataggatcgaggcatatattagacgaattggcggctttgatctcgtgataggtggaagcccatgcaacaatctcgctgggagcaaccgccaccacagagatggcttggagggcgaacattcttcattgttttaccattattttaggatcttggactccgtcaagtccatcatggagcgcctgtagtttttagaaacttttgatgttctggttcgtagaattgtagccgtctttccctgtgatcaaacttgtgaatgatttgaaggtcgactggtgtaatattcatgtcactctaatttaggctactttcgttaattacctcttgtgatcaatgcaaattgaaaggcaggtttcatttcttaagtttgtatttctcaatgcgagatctagtatctttgtcgaaaaaaaaaacctaaaa

SEQ ID NO: 90 - DNA, 2340 bp, Zea Mays
gtttggcgggcgccgcgcgtatgtttctcgttgcgacttggaggagaaggagattcgccgtctcaccccttccctgcctgctccctcgtctaagaaaagcgggcagagcagagacggcggcggcaggccatcgcggactcccgctcaccctcgtctgccaccgcctcccaggtcaggggccgacggcgacgggtggggaggggcggcagaggtagtccgaggggaggctgtggagcggagggcggagagaggccacgccgtccggagtctccagttccgtcgccacagcttcctgccgcgcctgggccgaggtaaacgagagggatcgaggaagaagtatcccccggagccccttcccccgaacccgaaggctccggaatggcgcactgggttagcgacagtgatggcagtgacaactttgaatgggatagtgatggcaatggggaggagccagcgaacttcaatgctgctggtgccggttcatcagctctgagatcaacgaacactgatgctccaggtccatcaacacgggttgctaatggcaatgggaaggctgggccatctgcctccttggttcaaaagtatatggacatgggtttcacggaagagattgttcggaaggccatgaaggacaatggggataatggagcagattcattagttgagcttcttcttacttaccaggaactaggcaatgacctcaaagtggataacggcttcgcttctggttgtgccccccaaactgttgatgatagtgatgatgacgacattctagaaaactgggatgatgaggatgctgatggtgggagaagcaccagggttgctaactctattgatgattctgaagacgagggcaggatgcatctatttctgttctggtggattccatatatgcttcacagaccgcaggagatggttactgtggcaatttgtctgactacgagggtaattccaatggagggagaaacaaaggaaggttcatggacgggaacaaaaaaaagagaaaaagatatggaggtcaagcacagggaaatagaggcccattagatggtagctgtgaagaacccatgcctctcccaaatccaatggttggatttaatttgccggaccattggacaagaccagtagacagatcgctgcctacacaagctattggaccaccatacttctactacgagaatgttgctcttgctccaaagggtgtctggactaccatatctagattcttgtacgatattcagccggagtttgtggactccaagtacttctgcgctgctgccaggaaaagaggctacatacacaatctaccacttgagagaaggtcgcctctcctccccttacctccgaagacaatatttgaagcatttcctcgtaccaagaggtggtggccttcatgggacccaaggcggcagttcaattgcctccagacttgtacgtctagcgcaaaactgttagagaggattcgtgtaacccttgcaaacagttcggatccaccacctccattagttcagaagtttgtgctggaggagtgtaggaaatggaatctggcttgggttggcctaaacaaggttgctcccctagagcctgatgagatggagttcctgcttggctttcccaaggatcacaccagaggtatcagcaggacagagaggtaccgatctcttggaaactcgtttcaggttgacactgttgcttaccatctctcagtcctcaaggataggtacccacaaggcatgaacgtgttgtctctattcactggcatcggaggagccgaggtggctctccataggctcggtatacgcatgaacacagtcgtttcagtagagaagtctgaggtgaacaggactattctgaagagctggtgggatcagacacagactggtaccttgattgagatcaatgatgtgcagacgctgacagctgataggatcgaggcatatattagacgaattggcggctttgatctcgtgataggtggaagcccatgcaacaatctcgctgggagcaaccgccaccacagagatggcttggagggcgaacattcttcattgttttaccattattttaggatcttggactccgtcaagtccatcatggagcgcctgtagtttttagaaacttttgatgttctggttcgtagaattgtagccgtctttccctgtgatcaaacttgtgaatgatttgaaggtcgactggtgtaatattcatgtcactctaatttaggctactttcgttaattacctcttgtgatcaatgcaaattgaaaggcaggtttcatttcttaagtttgtatttctcaatgcgagatctagtatctttgtcgaaaaaaaaaacctaaaa

SEQ ID NO: 91 - DNA, 1058 bp, Zea Mays
gagccaactactagcttgtttgttaagccattcacttcccttgtttgttaagagctgagctacatttattctcttcttcttgagcccctggcctccccctcctgccaggctgcgcattctttctccagctctctgataagctagccagcgtcgtcgtcgtgtcttgttagttattagctctatctcgccgccctgcagctgctgatcgagtgagggaattcagcagcagcagcagcaggtagcatagcatagatatgacggcggcggaggtggaggccgccaaggacatcgccgaggagaaggccgtcgtgccgttgccaccgtcgcccgccaagccggccgacgacgactccaaggccatcgtcgctcttgtcgtcaaggatgcttacctcgccaagatcgtgtccgagaagaggctgagtctgatcaccgcctgggaggagagccagaaggcgagagccgacaacagggctgccaagaagcttgccttcatcacgtcctgggagaacgccaagaaagcggagatggaggcggagctcagaaagatcgaggagcaactgcagaagaagaaggcggcgtacgaggagaagctcaagaacaagctggcgatgctgcacaggacggcggaggagaggagggcgcagacggaggccaggcgcggcgaggagaccatcctggcggaggagatggccgccaagtaccgcgccaagggcgagggccccaccaagctctttggcctcttgaaagcgtgacctctgctatggagaatgccctgtttcgtgcgtgtattaatttcgtattctcaacaagtgcacttggtgtgtgtgctgtttgttattttctctcttgtattccaaggcttgcttgacaatatctgttgtattgtatttgtataggagtgcagtgcagtgcagtgctattctttcttctcgcttctcttttgatgattggcaaccgccttcttctctgctgcattttcttcgtttgatggacggaaacaaaacgtactctctcgacacacaccctgtttctccacgctggaatctgattgtataggt

SEQ ID NO: 92 - DNA, 1030 bp, Zea Mays
gagccaactactagcttgtttgttaagccattcacttcccttgtttgttaagagctgagctacatttattctcttcttcttgagcccctggcctccccctcctgccaggctgcgcattctttctccagctctctgataagctagccagcgtcgtcgtcgtgtcttgttagttattagctctatctcgccgccctgcagctgctgatcgagtgagggaattcagcagcagcagcagcaggtagcatagcatagatatgacggcggcggaggtggaggccgccaaggacatcgccgaggagaaggccgtcgtgccgttgccaccgtcgcccgccaagccggccgacgacgactccaaggccatcgtcgctcttgtcgtcaaggacgctgctgctgggaaaccttctacagctattattggaggctcaactgaaagagatgcttacctcgccaagatcgtgtccgagaagaggctgagtctgatcaccgcctgggaggagagccagaaggcgagagccgacaacaggagcaactgcagaagaagaaggcggcgtacgaggagaagctcaagaacaagctggcgatgctgcacaggacggcggaggagaggagggcgcagacggaggccaggcgcggcgaggagaccatcctggcggaggagatggccgccaagtaccgcgccaagggcgagggccccaccaagctctttggcctcttgaaagcgtgacctctgctatggagaatgccctgtttcgtgcgtgtattaatttcgtattctcaacaagtgcacttggtgtgtgtgctgtttgttattttctctcttgtattccaaggcttgcttgacaatatctgttgtattgtatttgtataggagtgcagtgcagtgcagtgctattctttcttctcgcttctcttttgatgattggcaaccgccttcttctctgctgcattttcttcgtttgatggacggaaacaaaacgtactctctcgacacacaccctgtttctccacgctggaatctgattgtataggt

SEQ ID NO: 93 - DNA, 4206 bp, Zea Mays
atttttccacgcagtcactccaaatattttcccacgcagtcttaagactttaatccgaagcgcacagtatttttccacgcagaaaccttccagaaacgagcggaaaagcgtcccccaacccagcacacgctgacgacacaccggcgaggcagacaggcagatcagccgcacctccccagtcccccttccccacctacgacgaccgccgcggacgaatcaaaaaagcttcctcctcccggcgtcgcctccgcgcgtggaggcgacgatccattccgccccccgtaggattttgctcctcccgatccggacgtcagatctcgagtggcggcacgcggatctgggggtttctctagaggcggcggcggcggccggaacaggggcagatggcgctctcggggatgcgggggctctcggtcttcatcagcgacatacgcaactgccacaacaaggagcaggagcgcctccgcgtcgacaaggagctcggcaacatccgcacgcggttcaaaaacgagaagagctgcgtgcgaggcatgagcgctatgggcctaaggctgcagagcagcgtgagtgcagaaccatcgatggagacttgcggtgcgtctgtggcagagctgaagagtgagacagcgtcgtggacggatgggaggtggggtgagttggacaggaagcagggcttatcaccatacgagaagaaaaaatatgtatggaaaatgctttacatttatatgctgggttatgatgttgattttgggcatatggaaactgtctcgttgatatctgcaccaaagtatcctgagaagcaggttgggtatattgtgacatcttgcttactgaatgagaataatgatttcttaagaatggtaataaatacagtaaggaatgacataatcggacgaaatgagaccttccagtgcttagcattgacaatggtaggtaacattggtggtaaagaattttctgagtcactagccccagatgtccagaaacttcttatttcaagcagttgccgtcctgttgtcagaaagaaggctgctctatgccttctgcggctttataggaagaatcctgatgttgtgaatattgatggctgggctgaccgaatggcacaacttctagatgagcgtgatttaggtgtgctgacatctgtcacgagtctttttgtttcactagtatccaacaatgttgaagcatattggaattgtcttcctaaatgtgtgagaatattggagaggttagcaagaaatcaagatattccacaagagtacacttactatggaattccatctccttggcttcaggttaagacaatgagagctcttcagtacttccctaccattgaagatcccaacgcaagacgagctttgtttgaggttttacagcgcattttgatgggtactgatgttgttaaaaacgttaacaagaacaatgcctcacatgctgttctctttgaagctcttgctctggtcatgcatctggatgctgaaaaggagatgatgtcacagtgtgtggctcttcttgggaagtttattgcagtccgggagccaaacattcggtaccttggtctggaaaacatgactaggatgctgttagtaacagatgtgcaggatatcattaaaaggcaccaggctcagatcatcacatctttgaaggatccagatatcagcattaggagaagggctcttgatttattatatggcatgtgtgatgttacaaacgcgaaggaaattgtggaggagttgttgcagtaccttgatacagcagaatttgcaatgcgtgaagagttgtctctgaaggcagctattcttgcagaaaaatttgctccgcaactattgtggtatgttgatgttattcttcaacttatagacaaagctggagattttgtaagtgatgatatatggtatcgagtggtacaatttgttacgaacaacgaagacctacagtcatacgctgcaactaaagcgagagaatatcttgacaagcctgctttacatgagacgatggtcaaggtgagtgcctaccttcttggggagtatggacatcttttggcccggagacctggctgtagccctaaggaattgtttgctattataaatgataaacttcctacagtatcggcaagtactgtagctattcttctctcaacctatgccaagatattgatgcacactcaacctcctgatgttggactgcaacaacaaatcctcacaatatttaaaaagtacgagagctatattgatgttgaaatacaacagagagcagttgaatattttgaactaagcaggaaaggtcctgctttggcagatgtgttggctgaaatgccaaaattccctgaacgtgagtctgcactgttgaagaaggctgaagacgctgaaattgacacagcagagcaaagtgccataaagctacgcagtcagcaacaaacatctagtgctcttgttgtagctgatcacccccctgcaaatggatttgcaccaccagttaataatctcactcttgtgaagatgccaagtcaaactgtttctgacactcaggagagtggagtaagttatgaagaagctcctaagcctcctgttgaagctcccaaagaaaatgggactcctgtcgaagtgcagaacagggacacaaacattactgaaatcaacaatgagattaaagctgaacctccctctacatcccattctacctctcccggagacctcctcctggcagatcttttgggtcctcttgcgatagaaggccctcctgctgtagagcaaaatcctgcccaaggattgaatgctaatcaaagtccagctggtgacttggcacttgctacccttgatgatcagtccaactcagttcagccaattgtcaacgtcgaggagaagtttcatattttgtgcacaaaagatagtggggtgctgtacgaggatccttacatccagattggcttgaaagcggagtggcgtgcccatcatggccgtcttgttcttttcctgggtaacaaaaatacttcagcccttacgtcagtgcgggcgctgattttgcctcctagtcatttgaaaatggaactttcgtcagttcctgatactattcctccaagagcgcaggtgcaagttccccttgaggttgcgaatctccttgcaagtagagatgttgcggttctagatttctcgtatgcttttgggacttcactggtggatgccaaacttcgactccctgttgtattgaataaatttttgcagactataactcttacccctgaagaatttttctcccagtggaaagcgcttactgttcattcgctgaaggttcaagaagtggttaaaggtgtgaaacccatgcctctttctgagatggctaatcttttcatgagccttcacttggcggtcgctcctggacttgataacaacccgaacaatctggttgcatgcacgacattcttttctgaagcaacacgtgccatgctttgtctgatacgagttgaaacagatccacaagacaggacccaactgcggctaacagttgcctcgggcgaccaatatttgacattcgagttgaaagagttcatcaaagaacatctggttgatatcccaaggactcaggtcgccccacctcgcgcagcagtccagccacagttgcctactacagcacctgccacatacaatgaccctgttatttaatacgaggatctaacatctccacaagcatcttgctgccaagacgtacacgtggagcaaccaagaaagagctggcggagtgtagtctccatgaggattctaaaccgagaaagagcttagattctttttgtgcggtttgaaggccccctccctctccatgtagcagttgccgtattgtgtaagcgtaacttgttgtttctcattattatcatccccttttggtccatttgtataacctgtatcgcccatgtctggtggtggacaatcggtagtttttgtgtgttaatataaggtgctaggttttcccaccatgccgattgtaaagttgccctggtgcgcattgcactgcgatttgtacggaatagggaaggaaaaatttataggttttgctttgtgcatgttctatggtttgcatagctcccatctcttgatttcctttttcttctgctgctatgtggtggtgtgtgatggttcacgaggctcgattgtataatgtaacctggttggaaccggtgctccttttcttttggagttcccaattcatgga

SEQ ID NO: 94 - DNA, 4037 bp, Zea Mays
cagaaaccttccagaaacgagcggaaaagcgtcccccaacccagcacacgctgacgacacaccggcgaggcagacaggcagatcagccgcacctccccagtcccccttccccacctacgacgaccgccgcggacgaatcaaaaaagcttcctcctcccggcgtcgcctccgcgcgtggaggcgacgatccattccgccccccgtaggattttgctcctcccgatccggacgtcagatctcgagtggcggcacgcggatctgggggtttctctagaggcggcggcggcggccggaacaggggcagatggcgctctcggggatgcgggggctctcggtcttcatcagcgacatacgcaactgccacaacaaggagcaggagcgcctccgcgtcgacaaggagctcggcaacatccgcacgcggttcaaaaacgagaagggcttatcaccatacgagaagaaaaaatatgtatggaaaatgctttacatttatatgctgggttatgatgttgattttgggcatatggaaactgtctcgttgatatctgcaccaaagtatcctgagaagcaggttgggtatattgtgacatcttgcttactgaatgagaataatgatttcttaagaatggtaataaatacagtaaggaatgacataatcggacgaaatgagaccttccagtgcttagcattgacaatggtaggtaacattggtggtaaagaattttctgagtcactagccccagatgtccagaaacttcttatttcaagcagttgccgtcctgttgtcagaaagaaggctgctctatgccttctgcggctttataggaagaatcctgatgttgtgaatattgatggctgggctgaccgaatggcacaacttctagatgagcgtgatttaggtgtgctgacatctgtcacgagtctttttgtttcactagtatccaacaatgttgaagcatattggaattgtcttcctaaatgtgtgagaatattggagaggttagcaagaaatcaagatattccacaagagtacacttactatggaattccatctccttggcttcaggttaagacaatgagagctcttcagtacttccctaccattgaagatcccaacgcaagacgagctttgtttgaggttttacagcgcattttgatgggtactgatgttgttaaaaacgttaacaagaacaatgcctcacatgctgttctctttgaagctcttgctctggtcatgcatctggatgctgaaaaggagatgatgtcacagtgtgtggctcttcttgggaagtttattgcagtccgggagccaaacattcggtaccttggtctggaaaacatgactaggatgctgttagtaacagatgtgcaggatatcattaaaaggcaccaggctcagatcatcacatctttgaaggatccagatatcagcattaggagaagggctcttgatttattatatggcatgtgtgatgttacaaacgcgaaggaaattgtggaggagttgttgcagtaccttgatacagcagaatttgcaatgcgtgaagagttgtctctgaaggcagctattcttgcagaaaaatttgctccgcaactattgtggtatgttgatgttattcttcaacttatagacaaagctggagattttgtaagtgatgatatatggtatcgagtggtacaatttgttacgaacaacgaagacctacagtcatacgctgcaactaaagcgagagaatatcttgacaagcctgctttacatgagacgatggtcaaggtgagtgcctaccttcttggggagtatggacatcttttggcccggagacctggctgtagccctaaggaattgtttgctattataaatgataaacttcctacagtatcggcaagtactgtagctattcttctctcaacctatgccaagatattgatgcacactcaacctcctgatgttggactgcaacaacaaatcctcacaatatttaaaaagtacgagagctatattgatgttgaaatacaacagagagcagttgaatattttgaactaagcaggaaaggtcctgctttggcagatgtgttggctgaaatgccaaaattccctgaacgtgagtctgcactgttgaagaaggctgaagacgctgaaattgacacagcagagcaaagtgccataaagctacgcagtcagcaacaaacatctagtgctcttgttgtagctgatcacccccctgcaaatggatttgcaccaccagttaataatctcactcttgtgaagatgccaagtcaaactgtttctgacactcaggagagtggagtaagttatgaagaagctcctaagcctcctgttgaagctcccaaagaaaatgggactcctgtcgaagtgcagaacagggacacaaacattactgaaatcaacaatgagattaaagctgaacctccctctacatcccattctacctctcccggagacctcctcctggcagatcttttgggtcctcttgcgatagaaggccctcctgctgtagagcaaaatcctgcccaaggattgaatgctaatcaaagtccagctggtgacttggcacttgctacccttgatgatcagtccaactcagttcagccaattgtcaacgtcgaggagaagtttcatattttgtgcacaaaagatagtggggtgctgtacgaggatccttacatccagattggcttgaaagcggagtggcgtgcccatcatggccgtcttgttcttttcctgggtaacaaaaatacttcagcccttacgtcagtgcgggcgctgattttgcctcctagtcatttgaaaatggaactttcgtcagttcctgatactattcctccaagagcgcaggtgcaagttccccttgaggttgcgaatctccttgcaagtagagatgttgcggttctagatttctcgtatgcttttgggacttcactggtggatgccaaacttcgactccctgttgtattgaataaatttttgcagactataactcttacccctgaagaatttttctcccagtggaaagcgcttactgttcattcgctgaaggttcaagaagtggttaaaggtgtgaaacccatgcctctttctgagatggctaatcttttcatgagccttcacttggcggtcgctcctggacttgataacaacccgaacaatctggttgcatgcacgacattcttttctgaagcaacacgtgccatgctttgtctgatacgagttgaaacagatccacaagacaggacccaactgcggctaacagttgcctcgggcgaccaatatttgacattcgagttgaaagagttcatcaaagaacatctggttgatatcccaaggactcaggtcgccccacctcgcgcagcagtccagccacagttgcctactacagcacctgccacatacaatgaccctggtaccatgcttgctggattgctatgagaagtaacccgaaggaatagtgttttgatgtacatgacagttatttaatacgaggatctaacatctccacaagcatcttgctgccaagacgtacacgtggagcaaccaagaaagagctggcggagtgtagtctccatgaggattctaaaccgagaaagagcttagattctttttgtgcggtttgaaggccccctccctctccatgtagcagttgccgtattgtgtaagcgtaacttgttgtttctcattattatcatccccttttggtccatttgtataacctgtatcgcccatgtctggtggtggacaatcggtagtttttgtgtgttaatataaggtgctaggttttcccaccatgccgattgtaaagttgccctggtgcgcattgcactgcgatttgtacggaatagggaaggaaaaatttataggttttgctttgtgcatgttctatggtttgcatagctcccatctcttgatttcctttttcttctgctgctatgtggtggtgtgtgatggttcacgaggctcgattgtataatgtaacctggttggaaccggtgctccttttcttttggagttcccaattcatgga

SEQ ID NO: 95 - DNA, 4143 bp, Zea Mays
cagaaacgagcggaaaagcgtcccccaacccagcacacgctgacgacacaccggcgaggcagacaggcagatcagccgcacctccccagtcccccttccccacctacgacgaccgccgcggacgaatcaaaaaagcttcctcctcccggcgtcgcctccgcgcgtggaggcgacgatccattccgccccccgtaggattttgctcctcccgatccggacgtcagatctcgagtggcggcacgcggatctgggggtttctctagaggcggcggcggcggccggaacaggggcagatggcgctctcggggatgcgggggctctcggtcttcatcagcgacatacgcaactgccacaacaaggagcaggagcgcctccgcgtcgacaaggagctcggcaacatccgcacgcggttcaaaaacgagaagagctgcgtgcgaggcatgagcgctatgggcctaaggctgcagagcagcgtgagtgcagaaccatcgatggagacttgcggtgcgtctgtggcagagctgaagagtgagacagcgtcgtggacggatgggaggtggggtgagttggacaggaagcagggcttatcaccatacgagaagaaaaaatatgtatggaaaatgctttacatttatatgctgggttatgatgttgattttgggcatatggaaactgtctcgttgatatctgcaccaaagtatcctgagaagcaggttgggtatattgtgacatcttgcttactgaatgagaataatgatttcttaagaatggtaataaatacagtaaggaatgacataatcggacgaaatgagaccttccagtgcttagcattgacaatggtaggtaacattggtggtaaagaattttctgagtcactagccccagatgtccagaaacttcttatttcaagcagttgccgtcctgttgtcagaaagaaggctgctctatgccttctgcggctttataggaagaatcctgatgttgtgaatattgatggctgggctgaccgaatggcacaacttctagatgagcgtgatttaggtgtgctgacatctgtcacgagtctttttgtttcactagtatccaacaatgttgaagcatattggaattgtcttcctaaatgtgtgagaatattggagaggttagcaagaaatcaagatattccacaagagtacacttactatggaattccatctccttggcttcaggttaagacaatgagagctcttcagtacttccctaccattgaagatcccaacgcaagacgagctttgtttgaggttttacagcgcattttgatgggtactgatgttgttaaaaacgttaacaagaacaatgcctcacatgctgttctctttgaagctcttgctctggtcatgcatctggatgctgaaaaggagatgatgtcacagtgtgtggctcttcttgggaagtttattgcagtccgggagccaaacattcggtaccttggtctggaaaacatgactaggatgctgttagtaacagatgtgcaggatatcattaaaaggcaccaggctcagatcatcacatctttgaaggatccagatatcagcattaggagaagggctcttgatttattatatggcatgtgtgatgttacaaacgcgaaggaaattgtggaggagttgttgcaggctgaatcctcttctcttacctcacagtaccttgatacagcagaatttgcaatgcgtgaagagttgtctctgaaggcagctattcttgcagaaaaatttgctccgcaactattgtggtatgttgatgttattcttcaacttatagacaaagctggagattttgtaagtgatgatatatggtatcgagtggtacaatttgttacgaacaacgaagacctacagtcatacgctgcaactaaagcgagagaatatcttgacaagcctgctttacatgagacgatggtcaaggtgagtgcctaccttcttggggagtatggacatcttttggcccggagacctggctgtagccctaaggaattgtttgctattataaatgataaacttcctacagtatcggcaagtactgtagctattcttctctcaacctatgccaagatattgatgcacactcaacctcctgatgttggactgcaacaacaaatcctcacaatatttaaaaagtacgagagctatattgatgttgaaatacaacagagagcagttgaatattttgaactaagcaggaaaggtcctgctttggcagatgtgttggctgaaatgccaaaattccctgaacgtgagtctgcactgttgaagaaggctgaagacgctgaaattgacacagcagagcaaagtgccataaagctacgcagtcagcaacaaacatctagtgctcttgttgtagctgatcacccccctgcaaatggatttgcaccaccagttaataatctcactcttgtgaagatgccaagtcaaactgtttctgacactcaggagagtggagtaagttatgaagaagctcctaagcctcctgttgaagctcccaaagaaaatgggactcctgtcgaagtgcagaacagggacacaaacattactgaaatcaacaatgagattaaagctgaacctccctctacatcccattctacctctcccggagacctcctcctggcagatcttttgggtcctcttgcgatagaaggccctcctgctgtagagcaaaatcctgcccaaggattgaatgctaatcaaagtccagctggtgacttggcacttgctacccttgatgatcagtccaactcagttcagccaattgtcaacgtcgaggagaagtttcatattttgtgcacaaaagatagtggggtgctgtacgaggatccttacatccagattggcttgaaagcggagtggcgtgcccatcatggccgtcttgttcttttcctgggtaacaaaaatacttcagcccttacgtcagtgcgggcgctgattttgcctcctagtcatttgaaaatggaactttcgtcagttcctgatactattcctccaagagcgcaggtgcaagttccccttgaggttgcgaatctccttgcaagtagagatgttgcggttctagatttctcgtatgcttttgggacttcactggtggatgccaaacttcgactccctgttgtattgaataaatttttgcagactataactcttacccctgaagaatttttctcccagtggaaagcgcttactgttcattcgctgaaggttcaagaagtggttaaaggtgtgaaacccatgcctctttctgagatggctaatcttttcatgagccttcacttggcggtcgctcctggacttgataacaacccgaacaatctggttgcatgcacgacattcttttctgaagcaacacgtgccatgctttgtctgatacgagttgaaacagatccacaagacaggacccaactgcggctaacagttgcctcgggcgaccaatatttgacattcgagttgaaagagttcatcaaagaacatctggttgatatcccaaggactcaggtcgccccacctcgcgcagcagtccagccacagttgcctactacagcacctgccacatacaatgaccctgttatttaatacgaggatctaacatctccacaagcatcttgctgccaagacgtacacgtggagcaaccaagaaagagctggcggagtgtagtctccatgaggattctaaaccgagaaagagcttagattctttttgtgcggtttgaaggccccctccctctccatgtagcagttgccgtattgtgtaagcgtaacttgttgtttctcattattatcatccccttttggtccatttgtataacctgtatcgcccatgtctggtggtggacaatcggtagtttttgtgtgttaatataaggtgctaggttttcccaccatgccgattgtaaagttgccctggtgcgcattgcactgcgatttgtacggaatagggaaggaaaaatttataggttttgctttgtgcatgttctatggtttgcatagctcccatctcttgatttcctttttcttctgctgctatgtggtggtgtgtgatggttcacgaggctcgattgtataatgtaacctggttggaaccggtgctccttttcttttggagttcccaattcatgga

SEQ ID NO: 96 - DNA, 3708 bp, Zea Mays
cacgcttcatcatcgacagcttcgcctcgctgcctcactctcggccctggtgttctctgcccactaccgcctgagcctgaagcaccggttcctcacgacggagtaagggcttatcaccatacgagaagaaaaaatatgtatggaaaatgctttacatttatatgctgggttatgatgttgattttgggcatatggaaactgtctcgttgatatctgcaccaaagtatcctgagaagcaggttgggtatattgtgacatcttgcttactgaatgagaataatgatttcttaagaatggtaataaatacagtaaggaatgacataatcggacgaaatgagaccttccagtgcttagcattgacaatggtaggtaacattggtggtaaagaattttctgagtcactagccccagatgtccagaaacttcttatttcaagcagttgccgtcctgttgtcagaaagaaggctgctctatgccttctgcggctttataggaagaatcctgatgttgtgaatattgatggctgggctgaccgaatggcacaacttctagatgagcgtgatttaggtgtgctgacatctgtcacgagtctttttgtttcactagtatccaacaatgttgaagcatattggaattgtcttcctaaatgtgtgagaatattggagaggttagcaagaaatcaagatattccacaagagtacacttactatggaattccatctccttggcttcaggttaagacaatgagagctcttcagtacttccctaccattgaagatcccaacgcaagacgagctttgtttgaggttttacagcgcattttgatgggtactgatgttgttaaaaacgttaacaagaacaatgcctcacatgctgttctctttgaagctcttgctctggtcatgcatctggatgctgaaaaggagatgatgtcacagtgtgtggctcttcttgggaagtttattgcagtccgggagccaaacattcggtaccttggtctggaaaacatgactaggatgctgttagtaacagatgtgcaggatatcattaaaaggcaccaggctcagatcatcacatctttgaaggatccagatatcagcattaggagaagggctcttgatttattatatggcatgtgtgatgttacaaacgcgaaggaaattgtggaggagttgttgcagtaccttgatacagcagaatttgcaatgcgtgaagagttgtctctgaaggcagctattcttgcagaaaaatttgctccgcaactattgtggtatgttgatgttattcttcaacttatagacaaagctggagattttgtaagtgatgatatatggtatcgagtggtacaatttgttacgaacaacgaagacctacagtcatacgctgcaactaaagcgagagaatatcttgacaagcctgctttacatgagacgatggtcaaggtgagtgcctaccttcttggggagtatggacatcttttggcccggagacctggctgtagccctaaggaattgtttgctattataaatgataaacttcctacagtatcggcaagtactgtagctattcttctctcaacctatgccaagatattgatgcacactcaacctcctgatgttggactgcaacaacaaatcctcacaatatttaaaaagtacgagagctatattgatgttgaaatacaacagagagcagttgaatattttgaactaagcaggaaaggtcctgctttggcagatgtgttggctgaaatgccaaaattccctgaacgtgagtctgcactgttgaagaaggctgaagacgctgaaattgacacagcagagcaaagtgccataaagctacgcagtcagcaacaaacatctagtgctcttgttgtagctgatcacccccctgcaaatggatttgcaccaccagttaataatctcactcttgtgaagatgccaagtcaaactgtttctgacactcaggagagtggagtaagttatgaagaagctcctaagcctcctgttgaagctcccaaagaaaatgggactcctgtcgaagtgcagaacagggacacaaacattactgaaatcaacaatgagattaaagctgaacctccctctacatcccattctacctctcccggagacctcctcctggcagatcttttgggtcctcttgcgatagaaggccctcctgctgtagagcaaaatcctgcccaaggattgaatgctaatcaaagtccagctggtgacttggcacttgctacccttgatgatcagtccaactcagttcagccaattgtcaacgtcgaggagaagtttcatattttgtgcacaaaagatagtggggtgctgtacgaggatccttacatccagattggcttgaaagcggagtggcgtgcccatcatggccgtcttgttcttttcctgggtaacaaaaatacttcagcccttacgtcagtgcgggcgctgattttgcctcctagtcatttgaaaatggaactttcgtcagttcctgatactattcctccaagagcgcaggtgcaagttccccttgaggttgcgaatctccttgcaagtagagatgttgcggttctagatttctcgtatgcttttgggacttcactggtggatgccaaacttcgactccctgttgtattgaataaatttttgcagactataactcttacccctgaagaatttttctcccagtggaaagcgcttactgttcattcgctgaaggttcaagaagtggttaaaggtgtgaaacccatgcctctttctgagatggctaatcttttcatgagccttcacttggcggtcgctcctggacttgataacaacccgaacaatctggttgcatgcacgacattcttttctgaagcaacacgtgccatgctttgtctgatacgagttgaaacagatccacaagacaggacccaactgcggctaacagttgcctcgggcgaccaatatttgacattcgagttgaaagagttcatcaaagaacatctggttgatatcccaaggactcaggtcgccccacctcgcgcagcagtccagccacagttgcctactacagcacctgccacatacaatgaccctggtaccatgcttgctggattgctatgagaagtaacccgaaggaatagtgttttgatgtacatgacagttatttaatacgaggatctaacatctccacaagcatcttgctgccaagacgtacacgtggagcaaccaagaaagagctggcggagtgtagtctccatgaggattctaaaccgagaaagagcttagattctttttgtgcggtttgaaggccccctccctctccatgtagcagttgccgtattgtgtaagcgtaacttgttgtttctcattattatcatccccttttggtccatttgtataacctgtatcgcccatgtctggtggtggacaatcggtagtttttgtgtgttaatataaggtgctaggttttcccaccatgccgattgtaaagttgccctggtgcgcattgcactgcgatttgtacggaatagggaaggaaaaatttataggttttgctttgtgcatgttctatggtttgcatagctcccatctcttgatttcctttttcttctgctgctatgtggtggtgtgtgatggttcacgaggctcgattgtataatgtaacctggttggaaccggtgctccttttcttttggagttcccaattcatgga

SEQ ID NO: 97 - DNA, 3419 bp, Zea Mays
ctttctgaaacagattcgctgtcaaaaatctggaatcccaaccaaagaggtaggtaacattggtggtaaagaattttctgagtcactagccccagatgtccagaaacttcttatttcaagcagttgccgtcctgttgtcagaaagaaggctgctctatgccttctgcggctttataggaagaatcctgatgttgtgaatattgatggctgggctgaccgaatggcacaacttctagatgagcgtgatttaggtgtgctgacatctgtcacgagtctttttgtttcactagtatccaacaatgttgaagcatattggaattgtcttcctaaatgtgtgagaatattggagaggttagcaagaaatcaagatattccacaagagtacacttactatggaattccatctccttggcttcaggttaagacaatgagagctcttcagtacttccctaccattgaagatcccaacgcaagacgagctttgtttgaggttttacagcgcattttgatgggtactgatgttgttaaaaacgttaacaagaacaatgcctcacatgctgttctctttgaagctcttgctctggtcatgcatctggatgctgaaaaggagatgatgtcacagtgtgtggctcttcttgggaagtttattgcagtccgggagccaaacattcggtaccttggtctggaaaacatgactaggatgctgttagtaacagatgtgcaggatatcattaaaaggcaccaggctcagatcatcacatctttgaaggatccagatatcagcattaggagaagggctcttgatttattatatggcatgtgtgatgttacaaacgcgaaggaaattgtggaggagttgttgcaggctgaatcctcttctcttacctcacagtaccttgatacagcagaatttgcaatgcgtgaagagttgtctctgaaggcagctattcttgcagaaaaatttgctccgcaactattgtggtatgttgatgttattcttcaacttatagacaaagctggagattttgtaagtgatgatatatggtatcgagtggtacaatttgttacgaacaacgaagacctacagtcatacgctgcaactaaagcgagagaatatcttgacaagcctgctttacatgagacgatggtcaaggtgagtgcctaccttcttggggagtatggacatcttttggcccggagacctggctgtagccctaaggaattgtttgctattataaatgataaacttcctacagtatcggcaagtactgtagctattcttctctcaacctatgccaagatattgatgcacactcaacctcctgatgttggactgcaacaacaaatcctcacaatatttaaaaagtacgagagctatattgatgttgaaatacaacagagagcagttgaatattttgaactaagcaggaaaggtcctgctttggcagatgtgttggctgaaatgccaaaattccctgaacgtgagtctgcactgttgaagaaggctgaagacgctgaaattgacacagcagagcaaagtgccataaagctacgcagtcagcaacaaacatctagtgctcttgttgtagctgatcacccccctgcaaatggatttgcaccaccagttaataatctcactcttgtgaagatgccaagtcaaactgtttctgacactcaggagagtggagtaagttatgaagaagctcctaagcctcctgttgaagctcccaaagaaaatgggactcctgtcgaagtgcagaacagggacacaaacattactgaaatcaacaatgagattaaagctgaacctccctctacatcccattctacctctcccggagacctcctcctggcagatcttttgggtcctcttgcgatagaaggccctcctgctgtagagcaaaatcctgcccaaggattgaatgctaatcaaagtccagctggtgacttggcacttgctacccttgatgatcagtccaactcagttcagccaattgtcaacgtcgaggagaagtttcatattttgtgcacaaaagatagtggggtgctgtacgaggatccttacatccagattggcttgaaagcggagtggcgtgcccatcatggccgtcttgttcttttcctgggtaacaaaaatacttcagcccttacgtcagtgcgggcgctgattttgcctcctagtcatttgaaaatggaactttcgtcagttcctgatactattcctccaagagcgcaggtgcaagttccccttgaggttgcgaatctccttgcaagtagagatgttgcggttctagatttctcgtatgcttttgggacttcactggtggatgccaaacttcgactccctgttgtattgaataaatttttgcagactataactcttacccctgaagaatttttctcccagtggaaagcgcttactgttcattcgctgaaggttcaagaagtggttaaaggtgtgaaacccatgcctctttctgagatggctaatcttttcatgagccttcacttggcggtcgctcctggacttgataacaacccgaacaatctggttgcatgcacgacattcttttctgaagcaacacgtgccatgctttgtctgatacgagttgaaacagatccacaagacaggacccaactgcggctaacagttgcctcgggcgaccaatatttgacattcgagttgaaagagttcatcaaagaacatctggttgatatcccaaggactcaggtcgccccacctcgcgcagcagtccagccacagttgcctactacagcacctgccacatacaatgaccctggtaccatgcttgctggattgctatgagaagtaacccgaaggaatagtgttttgatgtacatgacagttatttaatacgaggatctaacatctccacaagcatcttgctgccaagacgtacacgtggagcaaccaagaaagagctggcggagtgtagtctccatgaggattctaaaccgagaaagagcttagattctttttgtgcggtttgaaggccccctccctctccatgtagcagttgccgtattgtgtaagcgtaacttgttgtttctcattattatcatccccttttggtccatttgtataacctgtatcgcccatgtctggtggtggacaatcggtagtttttgtgtgttaatataaggtgctaggttttcccaccatgccgattgtaaagttgccctggtgcgcattgcactgcgatttgtacggaatagggaaggaaaaatttataggttttgctttgtgcatgttctatggtttgcatagctcccatctcttgatttcctttttcttctgctgctatgtggtggtgtgtgatggttcacgaggctcgattgtataatgtaacctggttggaaccggtgctccttttcttttggagttcccaattcatgga

SEQ ID NO: 98 - DNA, 1023 bp, Zea Mays
gacctcaattgtattgttgaggataggaaagggcagcatggtgggcggtggcggttaaaggtgtgaaacccatgcctctttctgagatggctaatcttttcatgagccttcacttggcggtcgctcctggacttgataacaacccgaacaatctggttgcatgcacgacattcttttctgaagcaacacgtgccatgctttgtctgatacgagttgaaacagatccacaagacaggacccaactgcggctaacagttgcctcgggcgaccaatatttgacattcgagttgaaagagttcatcaaagaacatctggttgatatcccaaggactcaggtcgccccacctcgcgcagcagtccagccacagttgcctactacagcacctgccacatacaatgaccctggtaccatgcttgctggattgctatgagaagtaacccgaaggaatagtgttttgatgtacatgacagttatttaatacgaggatctaacatctccacaagcatcttgctgccaagacgtacacgtggagcaaccaagaaagagctggcggagtgtagtctccatgaggattctaaaccgagaaagagcttagattctttttgtgcggtttgaaggccccctccctctccatgtagcagttgccgtattgtgtaagcgtaacttgttgtttctcattattatcatccccttttggtccatttgtataacctgtatcgcccatgtctggtggtggacaatcggtagtttttgtgtgttaatataaggtgctaggttttcccaccatgccgattgtaaagttgccctggtgcgcattgcactgcgatttgtacggaatagggaaggaaaaatttataggttttgctttgtgcatgttctatggtttgcatagctcccatctcttgatttcctttttcttctgctgctatgtggtggtgtgtgatggttcacgaggctcgattgtataatgtaacctggttggaaccggtgctccttttcttttggagttcccaattcatgga

SEQ ID NO: 99 - DNA, 994 bp, Zea Mays
gtgcggagtcgccttctgaatgatgttaaaggtgtgaaacccatgcctctttctgagatggctaatcttttcatgagccttcacttggcggtcgctcctggacttgataacaacccgaacaatctggttgcatgcacgacattcttttctgaagcaacacgtgccatgctttgtctgatacgagttgaaacagatccacaagacaggacccaactgcggctaacagttgcctcgggcgaccaatatttgacattcgagttgaaagagttcatcaaagaacatctggttgatatcccaaggactcaggtcgccccacctcgcgcagcagtccagccacagttgcctactacagcacctgccacatacaatgaccctggtaccatgcttgctggattgctatgagaagtaacccgaaggaatagtgttttgatgtacatgacagttatttaatacgaggatctaacatctccacaagcatcttgctgccaagacgtacacgtggagcaaccaagaaagagctggcggagtgtagtctccatgaggattctaaaccgagaaagagcttagattctttttgtgcggtttgaaggccccctccctctccatgtagcagttgccgtattgtgtaagcgtaacttgttgtttctcattattatcatccccttttggtccatttgtataacctgtatcgcccatgtctggtggtggacaatcggtagtttttgtgtgttaatataaggtgctaggttttcccaccatgccgattgtaaagttgccctggtgcgcattgcactgcgatttgtacggaatagggaaggaaaaatttataggttttgctttgtgcatgttctatggtttgcatagctcccatctcttgatttcctttttcttctgctgctatgtggtggtgtgtgatggttcacgaggctcgattgtataatgtaacctggttggaaccggtgctccttttcttttggagttcccaattcatgga

SEQ ID NO: 100 - DNA, 844 bp, Zea Mays
aaaactatgaaaaacagcaaagattagatacgagttgaaacagatccacaagacaggacccaactgcggctaacagttgcctcgggcgaccaatatttgacattcgagttgaaagagttcatcaaagaacatctggttgatatcccaaggactcaggtcgccccacctcgcgcagcagtccagccacagttgcctactacagcacctgccacatacaatgaccctggtaccatgcttgctggattgctatgagaagtaacccgaaggaatagtgttttgatgtacatgacagttatttaatacgaggatctaacatctccacaagcatcttgctgccaagacgtacacgtggagcaaccaagaaagagctggcggagtgtagtctccatgaggattctaaaccgagaaagagcttagattctttttgtgcggtttgaaggccccctccctctccatgtagcagttgccgtattgtgtaagcgtaacttgttgtttctcattattatcatccccttttggtccatttgtataacctgtatcgcccatgtctggtggtggacaatcggtagtttttgtgtgttaatataaggtgctaggttttcccaccatgccgattgtaaagttgccctggtgcgcattgcactgcgatttgtacggaatagggaaggaaaaatttataggttttgctttgtgcatgttctatggtttgcatagctcccatctcttgatttcctttttcttctgctgctatgtggtggtgtgtgatggttcacgaggctcgattgtataatgtaacctggttggaaccggtgctccttttcttttggagttcccaattcatgga

SEQ ID NO: 101 - DNA, 8091 bp, Zea Mays
cagcgcccctaccttccgtccattccgttccagtccacctccattcccacggagaggcagccaggcagcaccagcagctcgctcgctcgctcgcgagctggtccacagcgccccggattagaccgtcgcggcggacgacgaggaagcagactcgtcctcgtccccgtccttccccgcctcccacccaccccggcggtcgacgaccaccgctcccacgcttctcggccgcgggccctaaaccctcccgatccatggaggccgccgcgcccgatggggccgcgcaggcgtccccgccccccgcggaggccgaccgcccgcccgagcctcgccccccgccgctgccagccgcggggacgcacgatccgcacttcctgagctcgatcataggggacgcggcgcccccgcccccgccgccgccgctcgggcagaagcggaagcgggggaggccgcccaagaggaaggacggcgcggccgtggccgcggggccggtggtgccggcgccggcgccggcgctcgcccgggccgcccggagaaggcaggacgaggaggaggtcgtctgcttcatctgcttcgacgggggaaacctcgtcgtctgcgataggaggggttgccccaaggtctaccatccggcgtgcatcaagcgtgacgaggcattcttccagtcccggagcaagtggaactgcggctggcacatatgcagcagctgcgaaaaggcagtgcactacatgtgctacacttgtacatactccctctgcaaagtgtgcatcaagcaagatctgaaagggaagctttcattaacattggaagaactcactactgccaagaatagatggaatgttcctagcacttctgctaggaaagaaaaagaggagtcgtctgatgacctgtatgatgctaataatgatgatgatgctggttctgactgctcctcaggaaaacgaaggcgaactaattcaaggaaaaagggtcaaaaacgccgaaagactcttctgcttgattatatcaagaagaataaccttcgtgatcctcaaaggaaaagccagattatttgtgactcgagacttcacttcttgttcaggaaagcacgagttgctcactttgagatgttaaagcttttggaaatgcattttcttacgaatgagacttcaacagtaactaatagtagccaagtgactatcaatctcaattcagctcatgtagataccaatggacacaatgacacggctgcaaaagtttcccctgataagaggaggaggatctatagaaagatggaaagagatacacaagttaatcttgaggattatgcagcaattgacatgcataacataaatttgatttacatgaggcgcagcctaatggaggatttagttgatgatgtcaaattctcagataaaattcacggtggttttgtgaggataaaaatttctgatgtttgtcaaaaacaagacatataccgtctcgtaaaagttattggaacacataaggttccagaaaagtatagtattggaaagaagatgacaaatgttgcacttgagatattgaatttaaacaaaaaggagattattacaatggatacaatatctaatcatgattttacagaggaggagtgcaaacgtttaaggcagagcatgaagtgtgatttaattagcagactaaaagtgggtgatatcctagagaaagccaagatattgcaatatgtaagagtgaatgattggtttgaaaatgaaaagcagaggcttgggcatcttcgtgaccgtgcaagtgaaactgggcgcagaaaggaacttagagaatatgtagaaaagctgcagcttctcaacgattctgaggaaagaactcgcaggattattgaaattctggaattgcatgttgactcacatatggatcctaattatgagtctgctgaagaaacagatgagaaaggaactgttggaaagtcggtaaatcagacaagaccagatacaaccatatcacgaaggatatcgagatatcttagcactgtgcaaaaccatcctaaaaaagtttctgattctagccaccttccaaaaagcttgtccacagaaagtgcaatatgtggatcaggagcaagaagtttggagaacagcacagcaaacagaactatgtatggagctggaccactttcatcttctgtagtaacaatgacaaacgacacagagccagagaaagtctggcactacaaggatccttctgggaatgttcagggtccatttactcttttgcaactttcaaattggacaagttacttcccacgtgatctgagagtatggcttacatttgagagtgaagagagatcattgctgttgactgaagtgctttcaaaacagcagaaagattttactcaggctgcatcacatacaagtagcaaggcaacactggttggcactggacatacaaggaacaaccctagtgtggatcagaccaatgctttctcccctgttggtcatagcgtggttagttcttctggaatacctgttcagtataataagtattctgttccagaaagggaaagtgtgtactctccagatgatagcttgtcgctgtcaactagttcggttccaccaaaggatgcttatactgtgaatagccaagcacactgccagaataagcattctgttttcattcaatctcctgggagttcatatgggcacacagacttgaaccatgatggaatacagggaggatgctctggtgaatcaaaccaccatcacagcagtagagccctatggagtcctacagtggcacatgtgagttgtggacgtggtaacgtggaatctcatcagaatcagcatgtttcctggtcagaaagtcaacatgaatctaaaaatggttcacaaggaggatttgttaaagatctgaattcaaggcaggatctatcgaaaaacctacctgctcaacgtattgggaaagatgtttccagtcctttgtttgcttggagtccggccgagtcgaggacagcttcaagtcaacaggaagggtcttgcttaagttcaacaactaacccaagctttctcgatgaacttcattcttctattgcttctgcaaagcctaagagctgcgctccagcaacccccattgaagacagaggttctagttcaccatcagatatgctaagtcatgaagaaagagttccaatctgcagtccacaatcagcccctttagcatctgcttctgatatgtgcaagatggaggagatcatgaatcagcaaagaacacttgtggtggatacatcgaatgcttcagttaaccagtctcctgaatcaagggcttttcctgtatcctctcctgataaccaagatattgaccgcgagtttcctagtccagttccaagatctgagaataaggacattgctgtggacagctcagaattagcaccagcgtcacctgaaaatattactacgaatttgcctgtttcagatacatgcaagatggaggaggtagtgagtcaacaacaagtaattggggctgttgtatcgaattcttcagataaccattctcctcaatctaaagtttcccctgtatcttctaataatgaagatacgaaacataaataccccagttcaaccccaaggcccgagaataagaatcctgcggtggatagtttactttcaacgtcagctgctcctgaaaatctaacgacaacttcaacccatgattctgatacatgcaaaatggaggtagtgaatcagccaaaaacatttgaagcggatgcatcaaatgctccacttcatcaacttcctcattctcacagtttcctggtaccttctgacaatcaagatattgagtgtgaatgtccaggtccaactccaagatctgacagtgaggaagctcttatgaacaactcagcgacaactgcatcagcctctgatacaagcaaaatggaggagtttgtgaatcagcaaaaaacccttgaagcagattcatcaaatgctccacttaatcaatctcctcattctcacattttctcagtaccttctgacaagcaagatattgagcgtgaatgtccaggcccaactcaaagatctgacactaaggaacctcttatgaacaactccgtgttaacatcaggaccatctgaaattcagacgacagcctctgcagcctctgatacatgcaaaatggaggagtcagtggatcagccaaaagcgcttgaagcagatgcatcaaatgctccacttaatcatcatcctcattctcacattttccgtgtatcttctgataatcaagacaatcagtgtgaacatcctagcccaaatccaaaatctgacagtaaggaacctcttgtggacaactcagtattaacatcagtggtgcctggaatgctagcgacaacttctgcctctgataaatgcaaaatggaggagtttgcgaatcagcaaaaagcacttgaagtggatgcatcgaatgcttcatttaatcagcctcacattttcgctgtatcttccgataatcaagatatggagcgtgaacgtcctagcccaactccaaggtctgaatgcaaggaatcacttacggagaactcagtattaacatccttggcgcctgaaattctagcaagatcttctgcctctgcttctgataaatgcaaaacggaggagtttgtgaatcagcaaaaaccaattgaagcggatgcatcaaatgcttcacttaatcagcctcatgtttttgctgtaccttccgataatcaagatatagagcgtgagtgtcctagtccaactccaaggtctgaatgcaaggaatcttttatggagaactcagtattaacatcagcggtgcctgaaattgcaagatcttctgtatccgcttctgatacatgcaaaatggagtttgtgaatcagcaaagaccaattgaagcagatgcatcgaatgcttcacttaaccagcctcgcattttcgctatatcttctgataataaagatatagagcgtgaatgtcctaacccaactccaaggtctgaatgcaaggaatctattatggagaactcagtattaacatcagcggcgcctgaaattcttgcaatatcttctgcatccgcttctgatacatgcaaaatggagtttgtgaatcagcaaagaccaattgaagcagatgcatcgaatgcttcacttaaccagcctcacattttcgctatatcttctgataataaagatatagagcgcgaatgtcctagcccaactccaaggtctgaatgcaaggaatctcttatggagaactcagtattaacaccagcgacgcctgaaattcttgcaagatcttctgcatccgcttctgatacatgcaaaatggaggagtttgtgaagcagcaaagaccaaatgaagcggacgcatcgaatgcttcacttaaccagcctcacattttcactgtatcttctgataataaagatatagagcgtgaatgtcctagcccaactccaaggtctgaatgcaaggaatcccttatggagaactcagtattaacatcagcggcacctgaaagatcttctgcatccgcttctgatacatgcaaaatggagtttgtgaatcagcaaagaccaattgaagcagatgcaccaaatgcttcacttaatcagtgtcgcactttcgctgtatcttctgatactaaagatatagagcgtgaatgtcctagcccaactccaaggtctgaatgcaaggaatcccttatggagaattcagtattaacatcagcggcgcctgaaattcttgcaagatcttctgcatctgcttctgatacatgcaaaatggaggagtttgtgaatcagcaaagactaattgaagcggatgcatcaaatgcttcacttaatcagcctcacattttcgctgtatcttctgataataaagatatagagcgtgaatgtcctagcccaactccaaggtctgaatgcaaggaatctcttatggagaactcagtattaacatcagcggcgcctgaaattcttgtaagatcttctgcatccgcttctgatacatgcaaaatggaggagtttgtgaatcagcaaagaccaattgaagtggatgcatcgaatgcttcacttaatcagcctcctcgttgtcacattttcactgcttcttccaataatcaagatattgagcgtgaatgtcctagctcaactccaaggtctgacagtaaggaaccttttgtggacaacttagtgttaacatcagcagtgcctggaaatctactgacaagttctgcagttgcctctgatacatgcaagatggagatcttgaataagaaaataacacttgaagcagatgcatcaaatgctccacttaatcagcctcctctctctagcgttttcgcttcatcttctggtgatgaccaagataatgtgtgtggacgtcctagtccaaatccaagacctgagggtgagcagcctctcatgggtaactcagggttaatatcaacagtgcctcgaaatctaacttctacttctgcatctgcttccgacatatgcaaaatggagatcttgaatgagaaaagaacacttgaagcaaacccatcaaatggtttgattactcaatctcctcaacccaaggttttccttgtaccatctcctgatatcctagagtgtgaattttctagtgaaacacctaggcatgagtttaaggaacctgttgcggacagctctgggttaacttcagcagcacatgaaaatttagggactaagccacatgtccactcaccagatgcctttgtaccaccaaagtctggtgctctaactggggaattaggtgacacgaaatcagattttaaaggtgaagaaactattcaaaaagagcaatattttggaagtgaatctattgccgctacaagagagaatttgttaattgatccttcctctggtgttgagtcgatagatgtgtcagatgtactggattctttaatggaagaaaggagtggaacttcgtacatgccaggatcaatagaggacttcctagccgaagaagaaccacaatactctagccctatcgcattatctccttggggtgaacctagttactaccaaggtgatgctgttgattctgcgctatggggtactcaagatttgatcaatgatatgtggtcattgctttcaccaagacctatgctccaaccttcatctggtattggaactgaggggaaggaaacttttgatatcaacgaggtggctgtgacccatgttagtagtgattattttcaaaaaggatcaatgtttggggaggaaaatgtgaaccaggcaaacttgagtgctgctgcagactggatgctgcctgagcaggtcccatcaataccaaatggtatgtcaacatcgtcagtagatgagagcaccatagttttaggttctcagccatcaaccaatcagagcttagactggggtggtactacatggagtattggccagaatgccagcgtgtatagcaatgaaaaagcagagccctcgagtaaaagctattgggaagaaccaaggaagcaggaaaccgccaaatccagtgtttctatttcaggacaggccattggaaacaacaagggcttggaccctcgtgataatgctgctaatcggggcagccggctgagtcatcatcaccgtggcaggtactcccaaatcagtgaatcttggctacttagttcaagtcactctaggagtaggtctgatagatttggcagcggtgggtcatcaagatcaacttcaaaggggcaatctaggggctaatgtaaattgtcaagtgcaggagagaaatgatgcatcttgtagctaacctgcatccttgatctctgcagcaggaatagttttctttttaaaattctttgtcatatctttgcagtttgtataggctaattacagtttagtccactcagactgtagcaaggagcatatatgtttagcatagaggtatttgactgcccattgcccaaggagtagattcagctcttgggcatggtctgtatcatcctgacattctgttggatggagctccaattgtaccaccggcatctctgttgacaccgaaacgcctgatgcgttggaaacaattatatctgattgattggtttaacttcgtggaatccctattttcgaagatcacgaaacgaca

SEQ ID NO: 102 - DNA, 8259 bp, Zea Mays
cagtccacctccattcccacggagaggcagccaggcagcaccagcagctcgctcgctcgctcgcgagctggtccacagcgccccggattagaccgtcgcggcggacgacgaggaagcagactcgtcctcgtccccgtccttccccgcctcccacccaccccggcggtcgacgaccaccgctcccacgcttctcggccgcgggccctaaaccctcccgatccatggaggccgccgcgcccgatggggccgcgcaggcgtccccgccccccgcggaggccgaccgcccgcccgagcctcgccccccgccgctgccagccgcggggacgcacgatccgcacttcctgagctcgatcataggggacgcggcgcccccgcccccgccgccgccgctcgggcagaagcggaagcgggggaggccgcccaagaggaaggacggcgcggccgtggccgcggggccggtggtgccggcgccggcgccggcgctcgcccgggccgcccggagaaggcaggacgaggaggaggtcgtctgcttcatctgcttcgacgggggaaacctcgtcgtctgcgataggaggggttgccccaaggtctaccatccggcgtgcatcaagcgtgacgaggcattcttccagtcccggagcaagtggaactgcggctggcacatatgcagcagctgcgaaaaggcagtgcactacatgtgctacacttgtacatactccctctgcaaagtgtgcatcaagcaagatctgaaagggaagctttcattaacattggaagaactcactactgccaagaatagatggaatgttcctagcacttctgctaggaaagaaaaagaggagtcgtctgatgacctgtatgatgctaataatgatgatgatgctggttctgactgctcctcaggaaaacgaaggcgaactaattcaaggaaaaagggtcaaaaacgccgaaaggtaaatagagattgtagcattcttgaaaaaaaggtcgagcttccacttagaaatactgagagcattccggtggaagtgccaaatgaacgggtgccatatccggtacacacaaaagtaccaaatggacgagtacccatgccagtagacacaaaagtaccaaatgaaccagtgtccttggcagcaaacacaaaatgggcatcaccagagctattggagtttataggacacatgagaaatggcgatcaatctttcatttctcaatttgatgttcagactcttctgcttgattatatcaagaagaataaccttcgtgatcctcaaaggaaaagccagattatttgtgactcgagacttcacttcttgttcaggaaagcacgagttgctcactttgagatgttaaagcttttggaaatgcattttcttacgaatgagacttcaacagtaactaatagtagccaagtgactatcaatctcaattcagctcatgtagataccaatggacacaatgacacggctgcaaaagtttcccctgataagaggaggaggatctatagaaagatggaaagagatacacaagttaatcttgaggattatgcagcaattgacatgcataacataaatttgatttacatgaggcgcagcctaatggaggatttagttgatgatgtcaaattctcagataaaattcacggtggttttgtgaggataaaaatttctgatgtttgtcaaaaacaagacatataccgtctcgtaaaagttattggaacacataaggttccagaaaagtatagtattggaaagaagatgacaaatgttgcacttgagatattgaatttaaacaaaaaggagattattacaatggatacaatatctaatcatgattttacagagggtgatatcctagagaaagccaagatattgcaatattggtttgaaaatgaaaagcagaggcttgggcatcttcgtgaccgtgcaagtgaaactgggcgcagaaaggaacttagagaatatgtagaaaagctgcagcttctcaacgattctgaggaaagaactcgcaggattattgaaattctggaattgcatgttgactcacatatggatcctaattatgagtctgctgaagaaacagatgagaaaggaactgttggaaagtcggtaaatcagacaagaccagatacaaccatatcacgaaggatatcgagatatcttagcactgtgcaaaaccatcctaaaaaagtttctgattctagccaccttccaaaaagcttgtccacagaaagtgcaatatgtggatcaggagcaagaagtttggagaacagcacagcaaacagaactatgtatggagctggaccactttcatcttctgtagtaacaatgacaaacgacacagagccagagaaagtctggcactacaaggatccttctgggaatgttcagggtccatttactcttttgcaactttcaaattggacaagttacttcccacgtgatctgagagtatggcttacatttgagagtgaagagagatcattgctgttgactgaagtgctttcaaaacagcagaaagattttactcaggctgcatcacatacaagtagcaaggcaacactggttggcactggacatacaaggaacaaccctagtgtggatcagaccaatgctttctcccctgttggtcatagcgtggttagttcttctggaatacctgttcagtataataagtattctgttccagaaagggaaagtgtgtactctccagatgatagcttgtcgctgtcaactagttcggttccaccaaaggatgcttatactgtgaatagccaagcacactgccagaataagcattctgttttcattcaatctcctgggagttcatatgggcacacagacttgaaccatgatggaatacagggaggatgctctggtgaatcaaaccaccatcacagcagtagagccctatggagtcctacagtggcacatgtgagttgtggacgtggtaacgtggaatctcatcagaatcagcatgtttcctggtcagaaagtcaacatgaatctaaaaatggttcacaaggaggatttgttaaagatctgaattcaaggcaggatctatcgaaaaacctacctgctcaacgtattgggaaagatgtttccagtcctttgtttgcttggagtccggccgagtcgaggacagcttcaagtcaacaggaagggtcttgcttaagttcaacaactaacccaagctttctcgatgaacttcattcttctattgcttctgcaaagcctaagagctgcgctccagcaacccccattgaagacagaggttctagttcaccatcagatatgctaagtcatgaagaaagagttccaatctgcagtccacaatcagcccctttagcatctgcttctgatatgtgcaagatggaggagatcatgaatcagcaaagaacacttgtggtggatacatcgaatgcttcagttaaccagtctcctgaatcaagggcttttcctgtatcctctcctgataaccaagatattgaccgcgagtttcctagtccagttccaagatctgagaataaggacattgctgtggacagctcagaattagcaccagcgtcacctgaaaatattactacgaatttgcctgtttcagatacatgcaagatggaggaggtagtgagtcaacaacaagtaattggggctgttgtatcgaattcttcagataaccattctcctcaatctaaagtttcccctgtatcttctaataatgaagatacgaaacataaataccccagttcaaccccaaggcccgagaataagaatcctgcggtggatagtttactttcaacgtcagctgctcctgaaaatctaacgacaacttcaacccatgattctgatacatgcaaaatggaggtagtgaatcagccaaaaacatttgaagcggatgcatcaaatgctccacttcatcaacttcctcattctcacagtttcctggtaccttctgacaatcaagatattgagtgtgaatgtccaggtccaactccaagatctgacagtgaggaagctcttatgaacaactcagcgacaactgcatcagcctctgatacaagcaaaatggaggagtttgtgaatcagcaaaaaacccttgaagcagattcatcaaatgctccacttaatcaatctcctcattctcacattttctcagtaccttctgacaagcaagatattgagcgtgaatgtccaggcccaactcaaagatctgacactaaggaacctcttatgaacaactccgtgttaacatcaggaccatctgaaattcagacgacagcctctgcagcctctgatacatgcaaaatggaggagtcagtggatcagccaaaagcgcttgaagcagatgcatcaaatgctccacttaatcatcatcctcattctcacattttccgtgtatcttctgataatcaagacaatcagtgtgaacatcctagcccaaatccaaaatctgacagtaaggaacctcttgtggacaactcagtattaacatcagtggtgcctggaatgctagcgacaacttctgcctctgataaatgcaaaatggaggagtttgcgaatcagcaaaaagcacttgaagtggatgcatcgaatgcttcatttaatcagcctcacattttcgctgtatcttccgataatcaagatatggagcgtgaacgtcctagcccaactccaaggtctgaatgcaaggaatcacttacggagaactcagtattaacatccttggcgcctgaaattctagcaagatcttctgcctctgcttctgataaatgcaaaacggaggagtttgtgaatcagcaaaaaccaattgaagcggatgcatcaaatgcttcacttaatcagcctcatgtttttgctgtaccttccgataatcaagatatagagcgtgagtgtcctagtccaactccaaggtctgaatgcaaggaatcttttatggagaactcagtattaacatcagcggtgcctgaaattgcaagatcttctgtatccgcttctgatacatgcaaaatggagtttgtgaatcagcaaagaccaattgaagcagatgcatcgaatgcttcacttaaccagcctcgcattttcgctatatcttctgataataaagatatagagcgtgaatgtcctaacccaactccaaggtctgaatgcaaggaatctattatggagaactcagtattaacatcagcggcgcctgaaattcttgcaatatcttctgcatccgcttctgatacatgcaaaatggagtttgtgaatcagcaaagaccaattgaagcagatgcatcgaatgcttcacttaaccagcctcacattttcgctatatcttctgataataaagatatagagcgcgaatgtcctagcccaactccaaggtctgaatgcaaggaatctcttatggagaactcagtattaacaccagcgacgcctgaaattcttgcaagatcttctgcatccgcttctgatacatgcaaaatggaggagtttgtgaagcagcaaagaccaaatgaagcggacgcatcgaatgcttcacttaaccagcctcacattttcactgtatcttctgataataaagatatagagcgtgaatgtcctagcccaactccaaggtctgaatgcaaggaatcccttatggagaactcagtattaacatcagcggcacctgaaagatcttctgcatccgcttctgatacatgcaaaatggagtttgtgaatcagcaaagaccaattgaagcagatgcaccaaatgcttcacttaatcagtgtcgcactttcgctgtatcttctgatactaaagatatagagcgtgaatgtcctagcccaactccaaggtctgaatgcaaggaatcccttatggagaattcagtattaacatcagcggcgcctgaaattcttgcaagatcttctgcatctgcttctgatacatgcaaaatggaggagtttgtgaatcagcaaagactaattgaagcggatgcatcaaatgcttcacttaatcagcctcacattttcgctgtatcttctgataataaagatatagagcgtgaatgtcctagcccaactccaaggtctgaatgcaaggaatctcttatggagaactcagtattaacatcagcggcgcctgaaattcttgtaagatcttctgcatccgcttctgatacatgcaaaatggaggagtttgtgaatcagcaaagaccaattgaagtggatgcatcgaatgcttcacttaatcagcctcctcgttgtcacattttcactgcttcttccaataatcaagatattgagcgtgaatgtcctagctcaactccaaggtctgacagtaaggaaccttttgtggacaacttagtgttaacatcagcagtgcctggaaatctactgacaagttctgcagttgcctctgatacatgcaagatggagatcttgaataagaaaataacacttgaagcagatgcatcaaatgctccacttaatcagcctcctctctctagcgttttcgcttcatcttctggtgatgaccaagataatgtgtgtggacgtcctagtccaaatccaagacctgagggtgagcagcctctcatgggtaactcagggttaatatcaacagtgcctcgaaatctaacttctacttctgcatctgcttccgacatatgcaaaatggagatcttgaatgagaaaagaacacttgaagcaaacccatcaaatggtttgattactcaatctcctcaacccaaggttttccttgtaccatctcctgatatcctagagtgtgaattttctagtgaaacacctaggcatgagtttaaggaacctgttgcggacagctctgggttaacttcagcagcacatgaaaatttagggactaagccacatgtccactcaccagatgcctttgtaccaccaaagtctggtgctctaactggggaattaggtgacacgaaatcagattttaaaggtgaagaaactattcaaaaagagcaatattttggaagtgaatctattgccgctacaagagagaatttgttaattgatccttcctctggtgttgagtcgatagatgtgtcagatgtactggattctttaatggaagaaaggagtggaacttcgtacatgccaggatcaatagaggacttcctagccgaagaagaaccacaatactctagccctatcgcattatctccttggggtgaacctagttactaccaaggtgatgctgttgattctgcgctatggggtactcaagatttgatcaatgatatgtggtcattgctttcaccaagacctatgctccaaccttcatctggtattggaactgaggggaaggaaacttttgatatcaacgaggtggctgtgacccatgttagtagtgattattttcaaaaaggatcaatgtttggggaggaaaatgtgaaccaggcaaacttgagtgctgctgcagactggatgctgcctgagcaggtcccatcaataccaaatggtatgtcaacatcgtcagtagatgagagcaccatagttttaggttctcagccatcaaccaatcagagcttagactggggtggtactacatggagtattggccagaatgccagcgtgtatagcaatgaaaaagcagagccctcgagtaaaagctattgggaagaaccaaggaagcaggaaaccgccaaatccagtgtttctatttcaggacaggccattggaaacaacaagggcttggaccctcgtgataatgctgctaatcggggcagccggctgagtcatcatcaccgtggcaggtactcccaaatcagtgaatcttggctacttagttcaagtcactctaggagtaggtctgatagatttggcagcggtgggtcatcaagatcaacttcaaaggggcaatctaggggctaatgtaaattgtcaagtgcaggagagaaatgatgcatcttgtagctaacctgcatccttgatctctgcagcaggaatagttttctttttaaaattctttgtcatatctttgcagtttgtataggctaattacagtttagtccactcagactgtagcaaggagcatatatgtttagcatagaggtatttgactgcccattgcccaaggagtagattcagctcttgggcatggtctgtatcatcctgacattctgttggatggagctccaattgtaccaccggcatctctgttgacaccgaaacgcctgatgcgttggaaacaattatatctgattgattggtttaacttcgtggaatccctattttcgaagatcacgaaacgaca

SEQ ID NO: 103 - DNA, 8263 bp, Zea Mays
atggaggccgccgcgcccgatggggccgcgcaggcgtccccgccccccgcggaggccgaccgcccgcccgagcctcgccccccgccgctgccagccgcggggacgcacgatccgcacttcctgagctcgatcataggggacgcggcgcccccgcccccgccgccgccgctcgggcagaagcggaagcgggggaggccgcccaagaggaaggacggcgcggccgtggccgcggggccggtggtgccggcgccggcgccggcgctcgcccgggccgcccggagaaggcaggacgaggaggaggtcgtctgcttcatctgcttcgacgggggaaacctcgtcgtctgcgataggaggggttgccccaaggtctaccatccggcgtgcatcaagcgtgacgaggcattcttccagtcccggagcaagtggaactgcggctggcacatatgcagcagctgcgaaaaggcagtgcactacatgtgctacacttgtacatactccctctgcaaagtgtgcatcaagcaaggtaaattcttcagtgtcagggggacaaagggcttctgcgacacatgttatgggactatacttttgatagaatgcaaagatgaaagcgcaacaaaggttgattttgatgacatactcagctgggagtacctgttcaagctatattggctagatctgaaagggaagctttcattaacattggaagaactcactactgccaagaatagatggaatgttcctagcacttctgctaggaaagaaaaagaggagtcgtctgatgacctgtatgatgctaataatgatgatgatgctggttctgactgctcctcaggaaaacgaaggcgaactaattcaaggaaaaagggtcaaaaacgccgaaaggtaaatagagattgtagcattcttgaaaaaaaggtcgagcttccacttagaaatactgagagcattccggtggaagtgccaaatgaacgggtgccatatccggtacacacaaaagtaccaaatggacgagtacccatgccagtagacacaaaagtaccaaatgaaccagtgtccttggcagcaaacacaaaatgggcatcaccagagctattggagtttataggacacatgagaaatggcgatcaatctttcatttctcaatttgatgttcagactcttctgcttgattatatcaagaagaataaccttcgtgatcctcaaaggaaaagccagattatttgtgactcgagacttcacttcttgttcaggaaagcacgagttgctcactttgagatgttaaagcttttggaaatgcattttcttacgaatgagacttcaacagtaactaatagtagccaagtgactatcaatctcaattcagctcatgtagataccaatggacacaatgacacggctgcaaaagtttcccctgataagaggaggaggatctatagaaagatggaaagagatacacaagttaatcttgaggattatgcagcaattgacatgcataacataaatttgatttacatgaggcgcagcctaatggaggatttagttgatgatgtcaaattctcagataaaattcacggtggttttgtgaggataaaaatttctgatgtttgtcaaaaacaagacatataccgtctcgtaaaagttattggaacacataaggttccagaaaagtatagtattggaaagaagatgacaaatgttgcacttgagatattgaatttaaacaaaaaggagattattacaatggatacaatatctaatcatgattttacagaggaggagtgcaaacgtttaaggcagagcatgaagtgtgatttaattagcagactaaaagtgggtgatatcctagagaaagccaagatattgcaatatgtaagagtgaatgattggtttgaaaatgaaaagcagaggcttgggcatcttcgtgaccgtgcaagtgaaactgggcgcagaaaggaacttagagaatatgtagaaaagctgcagcttctcaacgattctgaggaaagaactcgcaggattattgaaattctggaattgcatgttgactcacatatggatcctaattatgagtctgctgaagaaacagatgagaaaggaactgttggaaagtcggtaaatcagacaagaccagatacaaccatatcacgaaggatatcgagatatcttagcactgtgcaaaaccatcctaaaaaagtttctgattctagccaccttccaaaaagcttgtccacagaaagtgcaatatgtggatcaggagcaagaagtttggagaacagcacagcaaacagaactatgtatggagctggaccactttcatcttctgtagtaacaatgacaaacgacacagagccagagaaagtctggcactacaaggatccttctgggaatgttcagggtccatttactcttttgcaactttcaaattggacaagttacttcccacgtgatctgagagtatggcttacatttgagagtgaagagagatcattgctgttgactgaagtgctttcaaaacagcagaaagattttactcaggctgcatcacatacaagtagcaaggcaacactggttggcactggacatacaaggaacaaccctagtgtggatcagaccaatgctttctcccctgttggtcatagcgtggttagttcttctggaatacctgttcagtataataagtattctgttccagaaagggaaagtgtgtactctccagatgatagcttgtcgctgtcaactagttcggttccaccaaaggatgcttatactgtgaatagccaagcacactgccagaataagcattctgttttcattcaatctcctgggagttcatatgggcacacagacttgaaccatgatggaatacagggaggatgctctggtgaatcaaaccaccatcacagcagtagagccctatggagtcctacagtggcacatgtgagttgtggacgtggtaacgtggaatctcatcagaatcagcatgtttcctggtcagaaagtcaacatgaatctaaaaatggttcacaaggaggatttgttaaagatctgaattcaaggcaggatctatcgaaaaacctacctgctcaacgtattgggaaagatgtttccagtcctttgtttgcttggagtccggccgagtcgaggacagcttcaagtcaacaggaagggtcttgcttaagttcaacaactaacccaagctttctcgatgaacttcattcttctattgcttctgcaaagcctaagagctgcgctccagcaacccccattgaagacagaggttctagttcaccatcagatatgctaagtcatgaagaaagagttccaatctgcagtccacaatcagcccctttagcatctgcttctgatatgtgcaagatggaggagatcatgaatcagcaaagaacacttgtggtggatacatcgaatgcttcagttaaccagtctcctgaatcaagggcttttcctgtatcctctcctgataaccaagatattgaccgcgagtttcctagtccagttccaagatctgagaataaggacattgctgtggacagctcagaattagcaccagcgtcacctgaaaatattactacgaatttgcctgtttcagatacatgcaagatggaggaggtagtgagtcaacaacaagtaattggggctgttgtatcgaattcttcagataaccattctcctcaatctaaagtttcccctgtatcttctaataatgaagatacgaaacataaataccccagttcaaccccaaggcccgagaataagaatcctgcggtggatagtttactttcaacgtcagctgctcctgaaaatctaacgacaacttcaacccatgattctgatacatgcaaaatggaggtagtgaatcagccaaaaacatttgaagcggatgcatcaaatgctccacttcatcaacttcctcattctcacagtttcctggtaccttctgacaatcaagatattgagtgtgaatgtccaggtccaactccaagatctgacagtgaggaagctcttatgaacaactcagcgacaactgcatcagcctctgatacaagcaaaatggaggagtttgtgaatcagcaaaaaacccttgaagcagattcatcaaatgctccacttaatcaatctcctcattctcacattttctcagtaccttctgacaagcaagatattgagcgtgaatgtccaggcccaactcaaagatctgacactaaggaacctcttatgaacaactccgtgttaacatcaggaccatctgaaattcagacgacagcctctgcagcctctgatacatgcaaaatggaggagtcagtggatcagccaaaagcgcttgaagcagatgcatcaaatgctccacttaatcatcatcctcattctcacattttccgtgtatcttctgataatcaagacaatcagtgtgaacatcctagcccaaatccaaaatctgacagtaaggaacctcttgtggacaactcagtattaacatcagtggtgcctggaatgctagcgacaacttctgcctctgataaatgcaaaatggaggagtttgcgaatcagcaaaaagcacttgaagtggatgcatcgaatgcttcatttaatcagcctcacattttcgctgtatcttccgataatcaagatatggagcgtgaacgtcctagcccaactccaaggtctgaatgcaaggaatcacttacggagaactcagtattaacatccttggcgcctgaaattctagcaagatcttctgcctctgcttctgataaatgcaaaacggaggagtttgtgaatcagcaaaaaccaattgaagcggatgcatcaaatgcttcacttaatcagcctcatgtttttgctgtaccttccgataatcaagatatagagcgtgagtgtcctagtccaactccaaggtctgaatgcaaggaatcttttatggagaactcagtattaacatcagcggtgcctgaaattgcaagatcttctgtatccgcttctgatacatgcaaaatggagtttgtgaatcagcaaagaccaattgaagcagatgcatcgaatgcttcacttaaccagcctcgcattttcgctatatcttctgataataaagatatagagcgtgaatgtcctaacccaactccaaggtctgaatgcaaggaatctattatggagaactcagtattaacatcagcggcgcctgaaattcttgcaatatcttctgcatccgcttctgatacatgcaaaatggagtttgtgaatcagcaaagaccaattgaagcagatgcatcgaatgcttcacttaaccagcctcacattttcgctatatcttctgataataaagatatagagcgcgaatgtcctagcccaactccaaggtctgaatgcaaggaatctcttatggagaactcagtattaacaccagcgacgcctgaaattcttgcaagatcttctgcatccgcttctgatacatgcaaaatggaggagtttgtgaagcagcaaagaccaaatgaagcggacgcatcgaatgcttcacttaaccagcctcacattttcactgtatcttctgataataaagatatagagcgtgaatgtcctagcccaactccaaggtctgaatgcaaggaatcccttatggagaactcagtattaacatcagcggcacctgaaagatcttctgcatccgcttctgatacatgcaaaatggagtttgtgaatcagcaaagaccaattgaagcagatgcaccaaatgcttcacttaatcagtgtcgcactttcgctgtatcttctgatactaaagatatagagcgtgaatgtcctagcccaactccaaggtctgaatgcaaggaatcccttatggagaattcagtattaacatcagcggcgcctgaaattcttgcaagatcttctgcatctgcttctgatacatgcaaaatggaggagtttgtgaatcagcaaagactaattgaagcggatgcatcaaatgcttcacttaatcagcctcacattttcgctgtatcttctgataataaagatatagagcgtgaatgtcctagcccaactccaaggtctgaatgcaaggaatctcttatggagaactcagtattaacatcagcggcgcctgaaattcttgtaagatcttctgcatccgcttctgatacatgcaaaatggaggagtttgtgaatcagcaaagaccaattgaagtggatgcatcgaatgcttcacttaatcagcctcctcgttgtcacattttcactgcttcttccaataatcaagatattgagcgtgaatgtcctagctcaactccaaggtctgacagtaaggaaccttttgtggacaacttagtgttaacatcagcagtgcctggaaatctactgacaagttctgcagttgcctctgatacatgcaagatggagatcttgaataagaaaataacacttgaagcagatgcatcaaatgctccacttaatcagcctcctctctctagcgttttcgcttcatcttctggtgatgaccaagataatgtgtgtggacgtcctagtccaaatccaagacctgagggtgagcagcctctcatgggtaactcagggttaatatcaacagtgcctcgaaatctaacttctacttctgcatctgcttccgacatatgcaaaatggagatcttgaatgagaaaagaacacttgaagcaaacccatcaaatggtttgattactcaatctcctcaacccaaggttttccttgtaccatctcctgatatcctagagtgtgaattttctagtgaaacacctaggcatgagtttaaggaacctgttgcggacagctctgggttaacttcagcagcacatgaaaatttagggactaagccacatgtccactcaccagatgcctttgtaccaccaaagtctggtgctctaactggggaattaggtgacacgaaatcagattttaaaggtgaagaaactattcaaaaagagcaatattttggaagtgaatctattgccgctacaagagagaatttgttaattgatccttcctctggtgttgagtcgatagatgtgtcagatgtactggattctttaatggaagaaaggagtggaacttcgtacatgccaggatcaatagaggacttcctagccgaagaagaaccacaatactctagccctatcgcattatctccttggggtgaacctagttactaccaaggtgatgctgttgattctgcgctatggggtactcaagatttgatcaatgatatgtggtcattgctttcaccaagacctatgctccaaccttcatctggtattggaactgaggggaaggaaacttttgatatcaacgaggtggctgtgacccatgttagtagtgattattttcaaaaaggatcaatgtttggggaggaaaatgtgaaccaggcaaacttgagtgctgctgcagactggatgctgcctgagcaggtcccatcaataccaaatggtatgtcaacatcgtcagtagatgagagcaccatagttttaggttctcagccatcaaccaatcagagcttagactggggtggtactacatggagtattggccagaatgccagcgtgtatagcaatgaaaaagcagagccctcgagtaaaagctattgggaagaaccaaggaagcaggaaaccgccaaatccagtgtttctatttcaggacaggccattggaaacaacaagggcttggaccctcgtgataatgctgctaatcggggcagccggctgagtcatcatcaccgtggcaggtactcccaaatcagtgaatcttggctacttagttcaagtcactctaggagtaggtctgatagatttggcagcggtgggtcatcaagatcaacttcaaaggggcaatctaggggctaatgtaaattgtcaagtgcaggagagaaatgatgcatcttgtagctaacctgcatccttgatctctgcagcaggaatagttttctttttaaaattctttgtcatatctttgcagtttgtataggctaattacagtttagtccactcagactgtagcaaggagcatatatgtttagcatagaggtatttgactgcccattgcccaaggagtagattcagctcttgggcatggtctgtatcatcctgacattctgttggatggagctccaattgtaccaccggcatctctgttgacaccgaaacgcctgatgcgttggaaacaattatatctgattgattggtttaacttcgtggaatccctattttcgaagatcacgaaacgaca

SEQ ID NO: 104 - DNA, 8101 bp, Zea Mays
atggaggccgccgcgcccgatggggccgcgcaggcgtccccgccccccgcggaggccgaccgcccgcccgagcctcgccccccgccgctgccagccgcggggacgcacgatccgcacttcctgagctcgatcataggggacgcggcgcccccgcccccgccgccgccgctcgggcagaagcggaagcgggggaggccgcccaagaggaaggacggcgcggccgtggccgcggggccggtggtgccggcgccggcgccggcgctcgcccgggccgcccggagaaggcaggacgaggaggaggtcgtctgcttcatctgcttcgacgggggaaacctcgtcgtctgcgataggaggggttgccccaaggtctaccatccggcgtgcatcaagcgtgacgaggcattcttccagtcccggagcaagtggaactgcggctggcacatatgcagcagctgcgaaaaggcagtgcactacatgtgctacacttgtacatactccctctgcaaagtgtgcatcaagcaaggtaaattcttcagtgtcagggggacaaagggcttctgcgacacatgttatgggactatacttttgatagaatgcaaagatgaaagcgcaacaaaggttgattttgatgacatactcagctgggagtacctgttcaagctatattggctagatctgaaagggaagctttcattaacattggaagaactcactactgccaagaatagatggaatgttcctagcacttctgctaggaaagaaaaagaggagtcgtctgatgacctgtatgatgctaataatgatgatgatgctggttctgactgctcctcaggaaaacgaaggcgaactaattcaaggaaaaagggtcaaaaacgccgaaaggtaaatagagattgtagcattcttgaaaaaaaggtcgagcttccacttagaaatactgagagcattccggtggaagtgccaaatgaacgggtgccatatccggtacacacaaaagtaccaaatggacgagtacccatgccagtagacacaaaagtaccaaatgaaccagtgtccttggcagcaaacacaaaatgggcatcaccagagctattggagtttataggacacatgagaaatggcgatcaatctttcatttctcaatttgatgttcagactcttctgcttgattatatcaagaagaataaccttcgtgatcctcaaaggaaaagccagattatttgtgactcgagacttcacttcttgttcaggaaagcacgagttgctcactttgagatgttaaagcttttggaaatgcattttcttacgaatgagacttcaacagtaactaatagtagccaagtgactatcaatctcaattcagctcatgtagataccaatggacacaatgacacggctgcaaaagtttcccctgataagaggaggaggatctatagaaagatggaaagagatacacaagttaatcttgaggattatgcagcaattgacatgcataacataaatttgatttacatgaggcgcagcctaatggaggatttagttgatgatgtcaaattctcagataaaattcacggtggttttgtgaggataaaaatttctgatgtttgtcaaaaacaagacatataccgtctcgtaaaagttattggaacacataaggttccagaaaagtatagtattggaaagaagatgacaaatgttgcacttgagatattgaatttaaacaaaaaggagattattacaatggatacaatatctaatcatgattttacagagggtgatatcctagagaaagccaagatattgcaatatgtaagagtgaatgattggtttgaaaatgaaaagcagaggcttgggcatcttcgtgaccgtgcaagtgaaactgggcgcagaaaggaacttagagaatatgtagaaaagctgcagcttctcaacgattctgaggaaagaactcgcaggattattgaaattctggaattgcatgttgactcacatatggatcctaattatgagtctgctgaagaaacagatgagaaaggaactgttggaaagtcggtaaatcagacaagaccagatacaaccatatcacgaaggatatcgagatatcttagcactgtgcaaaaccatcctaaaaaagtttctgattctagccaccttccaaaaagcttgtccacagaaagtgcaatatgtggatcaggagcaagaagtttggagaacagcacagcaaacagaactatgtatggagctggaccactttcatcttctgtagtaacaatgacaaacgacacagagccagagaaagtctggcactacaaggatccttctgggaatgttcagggtccatttactcttttgcaactttcaaattggacaagttacttcccacgtgatctgagagtatggcttacatttgagagtgaagagagatcattgctgttgactgaagtgctttcaaaacagcagaaagattttactcaggctgcatcacatacaagtagcaaggcaacactggttggcactggacatacaaggaacaaccctagtgtggatcagaccaatgctttctcccctgttggtcatagcgtggttagttcttctggaatacctgttcagtataataagtattctgttccagaaagggaaagtgtgtactctccagatgatagcttgtcgctgtcaactagttcggttccaccaaaggatgcttatactgtgaatagccaagcacactgccagaataagcattctgttttcattcaatctcctgggagttcatatgggcacacagacttgaaccatgatggaatacagggaggatgctctggtgaatcaaaccaccatcacagcagtagagccctatggagtcctacagtggcacatgtgagttgtggacgtggtaacgtggaatctcatcagaatcagcatgtttcctggtcagaaagtcaacatgaatctaaaaatggttcacaaggaggatttgttaaagatctgaattcaaggcaggatctatcgaaaaacctacctgctcaacgtattgggaaagatgtttccagtcctttgtttgcttggagtccggccgagtcgaggacagcttcaagtcaacaggaagggtcttgcttaagttcaacaactaacccaagctttctcgatgaacttcattcttctattgcttctgcaaagcctaagagctgcgctccagcaacccccattgaagacagaggttctagttcaccatcagatatgctaagtcatgaagaaagagttccaatctgcagtccacaatcagcccctttagcatctgcttctgatatgtgcaagatggaggagatcatgaatcagcaaagaacacttgtggtggatacatcgaatgcttcagttaaccagtctcctgaatcaagggcttttcctgtatcctctcctgataaccaagatattgaccgcgagtttcctagtccagttccaagatctgagaataaggacattgctgtggacagctcagaattagcaccagcgtcacctgaaaatattactacgaatttgcctgtttcagatacatgcaagatggaggaggtagtgagtcaacaacaagtaattggggctgttgtatcgaattcttcagataaccattctcctcaatctaaagtttcccctgtatcttctaataatgaagatacgaaacataaataccccagttcaaccccaaggcccgagaataagaatcctgcggtggatagtttactttcaacgtcagctgctcctgaaaatctaacgacaacttcaacccatgattctgatacatgcaaaatggaggtagtgaatcagccaaaaacatttgaagcggatgcatcaaatgctccacttcatcaacttcctcattctcacagtttcctggtaccttctgacaatcaagatattgagtgtgaatgtccaggtccaactccaagatctgacagtgaggaagctcttatgaacaactcagcgacaactgcatcagcctctgatacaagcaaaatggaggagtttgtgaatcagcaaaaaacccttgaagcagattcatcaaatgctccacttaatcaatctcctcattctcacattttctcagtaccttctgacaagcaagatattgagcgtgaatgtccaggcccaactcaaagatctgacactaaggaacctcttatgaacaactccgtgttaacatcaggaccatctgaaattcagacgacagcctctgcagcctctgatacatgcaaaatggaggagtcagtggatcagccaaaagcgcttgaagcagatgcatcaaatgctccacttaatcatcatcctcattctcacattttccgtgtatcttctgataatcaagacaatcagtgtgaacatcctagcccaaatccaaaatctgacagtaaggaacctcttgtggacaactcagtattaacatcagtggtgcctggaatgctagcgacaacttctgcctctgataaatgcaaaatggaggagtttgcgaatcagcaaaaagcacttgaagtggatgcatcgaatgcttcatttaatcagcctcacattttcgctgtatcttccgataatcaagatatggagcgtgaacgtcctagcccaactccaaggtctgaatgcaaggaatcacttacggagaactcagtattaacatccttggcgcctgaaattctagcaagatcttctgcctctgcttctgataaatgcaaaacggaggagtttgtgaatcagcaaaaaccaattgaagcggatgcatcaaatgcttcacttaatcagcctcatgtttttgctgtaccttccgataatcaagatatagagcgtgagtgtcctagtccaactccaaggtctgaatgcaaggaatcttttatggagaactcagtattaacatcagcggtgcctgaaattgcaagatcttctgtatccgcttctgatacatgcaaaatggagtttgtgaatcagcaaagaccaattgaagcagatgcatcgaatgcttcacttaaccagcctcgcattttcgctatatcttctgataataaagatatagagcgtgaatgtcctaacccaactccaaggtctgaatgcaaggaatctattatggagaactcagtattaacatcagcggcgcctgaaattcttgcaatatcttctgcatccgcttctgatacatgcaaaatggagtttgtgaatcagcaaagaccaattgaagcagatgcatcgaatgcttcacttaaccagcctcacattttcgctatatcttctgataataaagatatagagcgcgaatgtcctagcccaactccaaggtctgaatgcaaggaatctcttatggagaactcagtattaacaccagcgacgcctgaaattcttgcaagatcttctgcatccgcttctgatacatgcaaaatggaggagtttgtgaagcagcaaagaccaaatgaagcggacgcatcgaatgcttcacttaaccagcctcacattttcactgtatcttctgataataaagatatagagcgtgaatgtcctagcccaactccaaggtctgaatgcaaggaatcccttatggagaactcagtattaacatcagcggcacctgaaagatcttctgcatccgcttctgatacatgcaaaatggagtttgtgaatcagcaaagaccaattgaagcagatgcaccaaatgcttcacttaatcagtgtcgcactttcgctgtatcttctgatactaaagatatagagcgtgaatgtcctagcccaactccaaggtctgaatgcaaggaatcccttatggagaattcagtattaacatcagcggcgcctgaaattcttgcaagatcttctgcatctgcttctgatacatgcaaaatggaggagtttgtgaatcagcaaagactaattgaagcggatgcatcaaatgcttcacttaatcagcctcacattttcgctgtatcttctgataataaagatatagagcgtgaatgtcctagcccaactccaaggtctgaatgcaaggaatctcttatggagaactcagtattaacatcagcggcgcctgaaattcttgtaagatcttctgcatccgcttctgatacatgcaaaatggaggagtttgtgaatcagcaaagaccaattgaagtggatgcatcgaatgcttcacttaatcagcctcctcgttgtcacattttcactgcttcttccaataatcaagatattgagcgtgaatgtcctagctcaactccaaggtctgacagtaaggaaccttttgtggacaacttagtgttaacatcagcagtgcctggaaatctactgacaagttctgcagttgcctctgatacatgcaagatggagatcttgaataagaaaataacacttgaagcagatgcatcaaatgctccacttaatcagcctcctctctctagcgttttcgcttcatcttctggtgatgaccaagataatgtgtgtggacgtcctagtccaaatccaagacctgagggtgagcagcctctcatgggtaactcagggttaatatcaacagtgcctcgaaatctaacttctacttctgcatctgcttccgacatatgcaaaatggagatcttgaatgagaaaagaacacttgaagcaaacccatcaaatggtttgattactcaatctcctcaacccaaggttttccttgtaccatctcctgatatcctagagtgtgaattttctagtgaaacacctaggcatgagtttaaggaacctgttgcggacagctctgggttaacttcagcagcacatgaaaatttagggactaagccacatgtccactcaccagatgcctttgtaccaccaaagtctggtgctctaactggggaattaggtgacacgaaatcagattttaaagatgtgtcagatgtactggattctttaatggaagaaaggagtggaacttcgtacatgccaggatcaatagaggacttcctagccgaagaagaaccacaatactctagccctatcgcattatctccttggggtgaacctagttactaccaaggtgatgctgttgattctgcgctatggggtactcaagatttgatcaatgatatgtggtcattgctttcaccaagacctatgctccaaccttcatctggtattggaactgaggggaaggaaacttttgatatcaacgaggtggctgtgacccatgttagtagtgattattttcaaaaaggatcaatgtttggggaggaaaatgtgaaccaggcaaacttgagtgctgctgcagactggatgctgcctgagcaggtcccatcaataccaaatggtatgtcaacatcgtcagtagatgagagcaccatagttttaggttctcagccatcaaccaatcagagcttagactggggtggtactacatggagtattggccagaatgccagcgtgtatagcaatgaaaaagcagagccctcgagtaaaagctattgggaagaaccaaggaagcaggaaaccgccaaatccagtgtttctatttcaggacaggccattggaaacaacaagggcttggaccctcgtgataatgctgctaatcggggcagccggctgagtcatcatcaccgtggcaggtactcccaaatcagtgaatcttggctacttagttcaagtcactctaggagtaggtctgatagatttggcagcggtgggtcatcaagatcaacttcaaaggggcaatctaggggctaatgtaaattgtcaagtgcaggagagaaatgatgcatcttgtagctaacctgcatccttgatctctgcagcaggaatagttttctttttaaaattctttgtcatatctttgcagtttgtataggctaattacagtttagtccactcagactgtagcaaggagcatatatgtttagcatagaggtatttgactgcccattgcccaaggagtagattcagctcttgggcatggtctgtatcatcctgacattctgttggatggagctccaattgtaccaccggcatctctgttgacaccgaaacgcctgatgcgttggaaacaattatatctgattgattggtttaacttcgtggaatccctattttcgaagatcacgaaacgaca

SEQ ID NO: 105 - DNA, 6574 bp, Zea Mays
atggaggccgccgcgcccgatggggccgcgcaggcgtccccgccccccgcggaggccgaccgcccgcccgagcctcgccccccgccgctgccagccgcggggacgcacgatccgcacttcctgagctcgatcataggggacgcggcgcccccgcccccgccgccgccgctcgggcagaagcggaagcgggggaggccgcccaagaggaaggacggcgcggccgtggccgcggggccggtggtgccggcgccggcgccggcgctcgcccgggccgcccggagaaggcaggacgaggaggaggtcgtctgcttcatctgcttcgacgggggaaacctcgtcgtctgcgataggaggggttgccccaaggtctaccatccggcgtgcatcaagcgtgacgaggcattcttccagtcccggagcaagtggaactgcggctggcacatatgcagcagctgcgaaaaggcagtgcactacatgtgctacacttgtacatactccctctgcaaagtgtgcatcaagcaaggtaaattcttcagtgtcagggggacaaagggcttctgcgacacatgttatgggactatacttttgatagaatgcaaagatgaaagcgcaacaaaggttgattttgatgacatactcagctgggagtacctgttcaagctatattggctagatctgaaagggaagctttcattaacattggaagaactcactactgccaagaatagatggaatgttcctagcacttctgctaggaaagaaaaagaggagtcgtctgatgacctgtatgatgctaataatgatgatgatgctggttctgactgctcctcaggaaaacgaaggcgaactaattcaaggaaaaagggtcaaaaacgccgaaaggtaaatagagattgtagcattcttgaaaaaaaggtcgagcttccacttagaaatactgagagcattccggtggaagtgccaaatgaacgggtgccatatccggtacacacaaaagtaccaaatggacgagtacccatgccagtagacacaaaagtaccaaatgaaccagtgtccttggcagcaaacacaaaatgggcatcaccagagctattggagtttataggacacatgagaaatggcgatcaatctttcatttctcaatttgatgttcagactcttctgcttgattatatcaagaagaataaccttcgtgatcctcaaaggaaaagccagattatttgtgactcgagacttcacttcttgttcaggaaagcacgagttgctcactttgagatgttaaagcttttggaaatgcattttcttacgaatgagacttcaacagtaactaatagtagccaagtgactatcaatctcaattcagctcatgtagataccaatggacacaatgacacggctgcaaaagtttcccctgataagaggaggaggatctatagaaagatggaaagagatacacaagttaatcttgaggattatgcagcaattgacatgcataacataaatttgatttacatgaggcgcagcctaatggaggatttagttgatgatgtcaaattctcagataaaattcacggtggttttgtgaggataaaaatttctgatgtttgtcaaaaacaagacatataccgtctcgtaaaagttattggaacacataaggttccagaaaagtatagtattggaaagaagatgacaaatgttgcacttgagatattgaatttaaacaaaaaggagattattacaatggatacaatatctaatcatgattttacagagggtgatatcctagagaaagccaagatattgcaatattggtttgaaaatgaaaagcagaggcttgggcatcttcgtgaccgtgcaagtgaaactgggcgcagaaaggaacttagagaatatgtagaaaagctgcagcttctcaacgattctgaggaaagaactcgcaggattattgaaattctggaattgcatgttgactcacatatggatcctaattatgagtctgctgaagaaacagatgagaaaggaactgttggaaagtcggtaaatcagacaagaccagatacaaccatatcacgaaggatatcgagatatcttagcactgtgcaaaaccatcctaaaaaagtttctgattctagccaccttccaaaaagcttgtccacagaaagtgcaatatgtggatcaggagcaagaagtttggagaacagcacagcaaacagaactatgtatggagctggaccactttcatcttctgtagtaacaatgacaaacgacacagagccagagaaagtctggcactacaaggatccttctgggaatgttcagggtccatttactcttttgcaactttcaaattggacaagttacttcccacgtgatctgagagtatggcttacatttgagagtgaagagagatcattgctgttgactgaagtgctttcaaaacagcagaaagattttactcaggctgcatcacatacaagtagcaaggcaacactggttggcactggacatacaaggaacaaccctagtgtggatcagaccaatgctttctcccctgttggtcatagcgtggttagttcttctggaatacctgttcagtataataagtattctgttccagaaagggaaagtgtgtactctccagatgatagcttgtcgctgtcaactagttcggttccaccaaaggatgcttatactgtgaatagccaagcacactgccagaataagcattctgttttcattcaatctcctgggagttcatatgggcacacagacttgaaccatgatggaatacagggaggatgctctggtgaatcaaaccaccatcacagcagtagagccctatggagtcctacagtggcacatgtgagttgtggacgtggtaacgtggaatctcatcagaatcagcatgtttcctggtcagaaagtcaacatgaatctaaaaatggttcacaaggaggatttgttaaagatctgaattcaaggcaggatctatcgaaaaacctacctgctcaacgtattgggaaagatgtttccagtcctttgtttgcttggagtccggccgagtcgaggacagcttcaagtcaacaggaagggtcttgcttaagttcaacaactaacccaagctttctcgatgaacttcattcttctattgcttctgcaaagcctaagagctgcgctccagcaacccccattgaagacagaggttctagttcaccatcagatatgctaagtcatgaagaaagagttccaatctgcagtccacaatcagcccctttagcatctgcttctgatatgtgcaagatggaggagatcatgaatcagcaaagaacacttgtggtggatacatcgaatgcttcagttaaccagtctcctgaatcaagggcttttcctgtatcctctcctgataaccaagatattgaccgcgagtttcctagtccagttccaagatctgagaataaggacattgctgtggacagctcagaattagcaccagcgtcacctgaaaatattactacgaatttgcctgtttcagatacatgcaagatggaggaggtagtgagtcaacaacaagtaattggggctgttgtatcgaattcttcagataaccattctcctcaatctaaagtttcccctgtatcttctaataatgaagatacgaaacataaataccccagttcaaccccaaggcccgagaataagaatcctgcggtggatagtttactttcaacgtcagctgctcctgaaaatctaacgacaacttcaacccatgattctgatacatgcaaaatggagtttgtgaagcagcaaagaccaaatgaagcggacgcatcgaatgcttcacttaaccagcctcacattttcactgtatcttctgataataaagatatagagcgtgaatgtcctagcccaactccaaggtctgaatgcaaggaatcccttatggagaactcagtattaacatcagcggcacctgaaagatcttctgcatccgcttctgatacatgcaaaatggagtttgtgaatcagcaaagaccaattgaagcagatgcaccaaatgcttcacttaatcagtgtcgcactttcgctgtatcttctgatactaaagatatagagcgtgaatgtcctagcccaactccaaggtctgaatgcaaggaatcccttatggagaattcagtattaacatcagcggcgcctgaaattcttgcaagatcttctgcatctgcttctgatacatgcaaaatggaggagtttgtgaatcagcaaagactaattgaagcggatgcatcaaatgcttcacttaatcagcctcacattttcgctgtatcttctgataataaagatatagagcgtgaatgtcctagcccaactccaaggtctgaatgcaaggaatctcttatggagaactcagtattaacatcagcggcgcctgaaattcttgtaagatcttctgcatccgcttctgatacatgcaaaatggaggagtttgtgaatcagcaaagaccaattgaagtggatgcatcgaatgcttcacttaatcagcctcctcgttgtcacattttcactgcttcttccaataatcaagatattgagcgtgaatgtcctagctcaactccaaggtctgacagtaaggaaccttttgtggacaacttagtgttaacatcagcagtgcctggaaatctactgacaagttctgcagttgcctctgatacatgcaagatggagatcttgaataagaaaataacacttgaagcagatgcatcaaatgctccacttaatcagcctcctctctctagcgttttcgcttcatcttctggtgatgaccaagataatgtgtgtggacgtcctagtccaaatccaagacctgagggtgagcagcctctcatgggtaactcagggttaatatcaacagtgcctcgaaatctaacttctacttctgcatctgcttccgacatatgcaaaatggagatcttgaatgagaaaagaacacttgaagcaaacccatcaaatggtttgattactcaatctcctcaacccaaggttttccttgtaccatctcctgatatcctagagtgtgaattttctagtgaaacacctaggcatgagtttaaggaacctgttgcggacagctctgggttaacttcagcagcacatgaaaatttagggactaagccacatgtccactcaccagatgcctttgtaccaccaaagtctggtgctctaactggggaattaggtgacacgaaatcagattttaaaggtgaagaaactattcaaaaagagcaatattttggaagtgaatctattgccgctacaagagagaatttgttaattgatccttcctctggtgttgagtcgatagatgtgtcagatgtactggattctttaatggaagaaaggagtggaacttcgtacatgccaggatcaatagaggacttcctagccgaagaagaaccacaatactctagccctatcgcattatctccttggggtgaacctagttactaccaaggtgatgctgttgattctgcgctatggggtactcaagatttgatcaatgatatgtggtcattgctttcaccaagacctatgctccaaccttcatctggtattggaactgaggggaaggaaacttttgatatcaacgaggtggctgtgacccatgttagtagtgattattttcaaaaaggatcaatgtttggggaggaaaatgtgaaccaggcaaacttgagtgctgctgcagactggatgctgcctgagcaggtcccatcaataccaaatggtatgtcaacatcgtcagtagatgagagcaccatagttttaggttctcagccatcaaccaatcagagcttagactggggtggtactacatggagtattggccagaatgccagcgtgtatagcaatgaaaaagcagagccctcgagtaaaagctattgggaagaaccaaggaagcaggaaaccgccaaatccagtgtttctatttcaggacaggccattggaaacaacaagggcttggaccctcgtgataatgctgctaatcggggcagccggctgagtcatcatcaccgtggcaggtactcccaaatcagtgaatcttggctacttagttcaagtcactctaggagtaggtctgatagatttggcagcggtgggtcatcaagatcaacttcaaaggggcaatctaggggctaatgtaaattgtcaagtgcaggagagaaatgatgcatcttgtagctaacctgcatccttgatctctgcagcaggaatagttttctttttaaaattctttgtcatatctttgcagtttgtataggctaattacagtttagtccactcagactgtagcaaggagcatatatgtttagcatagaggtatttgactgcccattgcccaaggagtagattcagctcttgggcatggtctgtatcatcctgacattctgttggatggagctccaattgtaccaccggcatctctgttgacaccgaaacgcctgatgcgttggaaacaattatatctgattgattggtttaacttcgtggaatccctattttcgaagatcacgaaacgaca

SEQ ID NO: 106 - DNA, 8041 bp, Zea Mays
atggaggccgccgcgcccgatggggccgcgcaggcgtccccgccccccgcggaggccgaccgcccgcccgagcctcgccccccgccgctgccagccgcggggacgcacgatccgcacttcctgagctcgatcataggggacgcggcgcccccgcccccgccgccgccgctcgggcagaagcggaagcgggggaggccgcccaagaggaaggacggcgcggccgtggccgcggggccggtggtgccggcgccggcgccggcgctcgcccgggccgcccggagaaggcaggacgaggaggaggtcgtctgcttcatctgcttcgacgggggaaacctcgtcgtctgcgataggaggggttgccccaaggtctaccatccggcgtgcatcaagcgtgacgaggcattcttccagtcccggagcaagtggaactgcggctggcacatatgcagcagctgcgaaaaggcagtgcactacatgtgctacacttgtacatactccctctgcaaagtgtgcatcaagcaaggtaaattcttcagtgtcagggggacaaagggcttctgcgacacatgttatgggactatacttttgatagaatgcaaagatgaaagcgcaacaaaggttgattttgatgacatactcagctgggagtacctgttcaagctatattggctagatctgaaagggaagctttcattaacattggaagaactcactactgccaagaatagatggaatgttcctagcacttctgctaggaaagaaaaagaggagtcgtctgatgacctgtatgatgctaataatgatgatgatgctggttctgactgctcctcaggaaaacgaaggcgaactaattcaaggaaaaagggtcaaaaacgccgaaaggtaaatagagattgtagcattcttgaaaaaaaggtcgagcttccacttagaaatactgagagcattccggtggaagtgccaaatgaacgggtgccatatccggtacacacaaaagtaccaaatggacgagtacccatgccagtagacacaaaagtaccaaatgaaccagtgtccttggcagcaaacacaaaatgggcatcaccagagctattggagtttataggacacatgagaaatggcgatcaatctttcatttctcaatttgatgttcagactcttctgcttgattatatcaagaagaataaccttcgtgatcctcaaaggaaaagccagattatttgtgactcgagacttcacttcttgttcaggaaagcacgagttgctcactttgagatgttaaagcttttggaaatgcattttcttacgaatgagacttcaacagtaactaatagtagccaagtgactatcaatctcaattcagctcatgtagataccaatggacacaatgacacggctgcaaaagtttcccctgataagaggaggaggatctatagaaagatggaaagagatacacaagttaatcttgaggattatgcagcaattgacatgcataacataaatttgatttacatgaggcgcagcctaatggaggatttagttgatgatgtcaaattctcagataaaattcacggtggttttgtgaggataaaaatttctgatgtttgtcaaaaacaagacatataccgtctcgtaaaagttattggaacacataaggttccagaaaagtatagtattggaaagaagatgacaaatgttgcacttgagatattgaatttaaacaaaaaggagattattacaatggatacaatatctaatcatgattttacagaggaggagtgcaaacgtttaaggcagagcatgaagtgtgatttaattagcagactaaaagtgggtgatatcctagagaaagccaagatattgcaatatgtaagagtgaatgattggtttgaaaatgaaaagcagaggcttgggcatcttcgtgaccgtgcaagtgaaactgggcgcagaaaggaacttagagaatatgtagaaaagctgcagcttctcaacgattctgaggaaagaactcgcaggattattgaaattctggaattgcatgttgactcacatatggatcctaattatgagtctgctgaagaaacagatgagaaaggaactgttggaaagtcggtaaatcagacaagaccagatacaaccatatcacgaaggatatcgagatatcttagcactgtgcaaaaccatcctaaaaaagtttctgattctagccaccttccaaaaagcttgtccacagaaagtgcaatatgtggatcaggagcaagaagtttggagaacagcacagcaaacagaactatgtatggagctggaccactttcatcttctgtagtaacaatgacaaacgacacagagccagagaaagtctggcactacaaggatccttctgggaatgttcagggtccatttactcttttgcaactttcaaattggacaagttacttcccacgtgatctgagagtatggcttacatttgagagtgaagagagatcattgctgttgactgaagtgctttcaaaacagcagaaagattttactcaggctgcatcacatacaagtagcaaggcaacactggttggcactggacatacaaggaacaaccctagtgtggatcagaccaatgctttctcccctgttggtcatagcgtggttagttcttctggaatacctgttcagtataataagtattctgttccagaaagggaaagtgtgtactctccagatgatagcttgtcgctgtcaactagttcggttccaccaaaggatgcttatactgtgaatagccaagcacactgccagaataagcattctgttttcattcaatctcctgggagttcatatgggcacacagacttgaaccatgatggaatacagggaggatgctctggtgaatcaaaccaccatcacagcagtagagccctatggagtcctacagtggcacatgtgagttgtggacgtggtaacgtggaatctcatcagaatcagcatgtttcctggtcagaaagtcaacatgaatctaaaaatggttcacaaggaggatttgttaaagatctgaattcaaggcaggatctatcgaaaaacctacctgctcaacgtattgggaaagatgtttccagtcctttgtttgcttggagtccggccgagtcgaggacagcttcaagtcaacaggaagggtcttgcttaagttcaacaactaacccaagctttctcgatgaacttcattcttctattgcttctgcaaagcctaagagctgcgctccagcaacccccattgaagacagaggttctagttcaccatcagatatgctaagtcatgaagaaagagttccaatctgcagtccacaatcagcccctttagcatctgcttctgatatgtgcaagatggaggagatcatgaatcagcaaagaacacttgtggtggatacatcgaatgcttcagttaaccagtctcctgaatcaagggcttttcctgtatcctctcctgataaccaagatattgaccgcgagtttcctagtccagttccaagatctgagaataaggacattgctgtggacagctcagaattagcaccagcgtcacctgaaaatattactacgaatttgcctgtttcagatacatgcaagatggaggaggtagtgagtcaacaacaagtaattggggctgttgtatcgaattcttcagataaccattctcctcaatctaaagtttcccctgtatcttctaataatgaagatacgaaacataaataccccagttcaaccccaaggcccgagaataagaatcctgcggtggatagtttactttcaacgtcagctgctcctgaaaatctaacgacaacttcaacccatgattctgatacatgcaaaatggaggtagtgaatcagccaaaaacatttgaagcggatgcatcaaatgctccacttcatcaacttcctcattctcacagtttcctggtaccttctgacaatcaagatattgagtgtgaatgtccaggtccaactccaagatctgacagtgaggaagctcttatgaacaactcagcgacaactgcatcagcctctgatacaagcaaaatggaggagtttgtgaatcagcaaaaaacccttgaagcagattcatcaaatgctccacttaatcaatctcctcattctcacattttctcagtaccttctgacaagcaagatattgagcgtgaatgtccaggcccaactcaaagatctgacactaaggaacctcttatgaacaactccgtgttaacatcaggaccatctgaaattcagacgacagcctctgcagcctctgatacatgcaaaatggaggagtcagtggatcagccaaaagcgcttgaagcagatgcatcaaatgctccacttaatcatcatcctcattctcacattttccgtgtatcttctgataatcaagacaatcagtgtgaacatcctagcccaaatccaaaatctgacagtaaggaacctcttgtggacaactcagtattaacatcagtggtgcctggaatgctagcgacaacttctgcctctgataaatgcaaaatggaggagtttgcgaatcagcaaaaagcacttgaagtggatgcatcgaatgcttcatttaatcagcctcacattttcgctgtatcttccgataatcaagatatggagcgtgaacgtcctagcccaactccaaggtctgaatgcaaggaatcacttacggagaactcagtattaacatccttggcgcctgaaattctagcaagatcttctgcctctgcttctgataaatgcaaaacggaggagtttgtgaatcagcaaaaaccaattgaagcggatgcatcaaatgcttcacttaatcagcctcatgtttttgctgtaccttccgataatcaagatatagagcgtgagtgtcctagtccaactccaaggtctgaatgcaaggaatcttttatggagaactcagtattaacatcagcggtgcctgaaattgcaagatcttctgtatccgcttctgatacatgcaaaatggagtttgtgaatcagcaaagaccaattgaagcagatgcatcgaatgcttcacttaaccagcctcgcattttcgctatatcttctgataataaagatatagagcgtgaatgtcctaacccaactccaaggtctgaatgcaaggaatctattatggagaactcagtattaacatcagcggcgcctgaaattcttgcaatatcttctgcatccgcttctgatacatgcaaaatggagtttgtgaatcagcaaagaccaattgaagcagatgcatcgaatgcttcacttaaccagcctcacattttcgctatatcttctgataataaagatatagagcgcgaatgtcctagcccaactccaaggtctgaatgcaaggaatctcttatggagaactcagtattaacaccagcgacgcctgaaattcttgcaagatcttctgcatccgcttctgatacatgcaaaatggaggagtttgtgaagcagcaaagaccaaatgaagcggacgcatcgaatgcttcacttaaccagcctcacattttcactgtatcttctgataataaagatatagagcgtgaatgtcctagcccaactccaaggtctgaatgcaaggaatcccttatggagaactcagtattaacatcagcggcgcctgaaattcttgcaagatcttctgcatctgcttctgatacatgcaaaatggaggagtttgtgaatcagcaaagactaattgaagcggatgcatcaaatgcttcacttaatcagcctcacattttcgctgtatcttctgataataaagatatagagcgtgaatgtcctagcccaactccaaggtctgaatgcaaggaatctcttatggagaactcagtattaacatcagcggcgcctgaaattcttgtaagatcttctgcatccgcttctgatacatgcaaaatggaggagtttgtgaatcagcaaagaccaattgaagtggatgcatcgaatgcttcacttaatcagcctcctcgttgtcacattttcactgcttcttccaataatcaagatattgagcgtgaatgtcctagctcaactccaaggtctgacagtaaggaaccttttgtggacaacttagtgttaacatcagcagtgcctggaaatctactgacaagttctgcagttgcctctgatacatgcaagatggagatcttgaataagaaaataacacttgaagcagatgcatcaaatgctccacttaatcagcctcctctctctagcgttttcgcttcatcttctggtgatgaccaagataatgtgtgtggacgtcctagtccaaatccaagacctgagggtgagcagcctctcatgggtaactcagggttaatatcaacagtgcctcgaaatctaacttctacttctgcatctgcttccgacatatgcaaaatggagatcttgaatgagaaaagaacacttgaagcaaacccatcaaatggtttgattactcaatctcctcaacccaaggttttccttgtaccatctcctgatatcctagagtgtgaattttctagtgaaacacctaggcatgagtttaaggaacctgttgcggacagctctgggttaacttcagcagcacatgaaaatttagggactaagccacatgtccactcaccagatgcctttgtaccaccaaagtctggtgctctaactggggaattaggtgacacgaaatcagattttaaaggtgaagaaactattcaaaaagagcaatattttggaagtgaatctattgccgctacaagagagaatttgttaattgatccttcctctggtgttgagtcgatagatgtgtcagatgtactggattctttaatggaagaaaggagtggaacttcgtacatgccaggatcaatagaggacttcctagccgaagaagaaccacaatactctagccctatcgcattatctccttggggtgaacctagttactaccaaggtgatgctgttgattctgcgctatggggtactcaagatttgatcaatgatatgtggtcattgctttcaccaagacctatgctccaaccttcatctggtattggaactgaggggaaggaaacttttgatatcaacgaggtggctgtgacccatgttagtagtgattattttcaaaaaggatcaatgtttggggaggaaaatgtgaaccaggcaaacttgagtgctgctgcagactggatgctgcctgagcaggtcccatcaataccaaatggtatgtcaacatcgtcagtagatgagagcaccatagttttaggttctcagccatcaaccaatcagagcttagactggggtggtactacatggagtattggccagaatgccagcgtgtatagcaatgaaaaagcagagccctcgagtaaaagctattgggaagaaccaaggaagcaggaaaccgccaaatccagtgtttctatttcaggacaggccattggaaacaacaagggcttggaccctcgtgataatgctgctaatcggggcagccggctgagtcatcatcaccgtggcaggtactcccaaatcagtgaatcttggctacttagttcaagtcactctaggagtaggtctgatagatttggcagcggtgggtcatcaagatcaacttcaaaggggcaatctaggggctaatgtaaattgtcaagtgcaggagagaaatgatgcatcttgtagctaacctgcatccttgatctctgcagcaggaatagttttctttttaaaattctttgtcatatctttgcagtttgtataggctaattacagtttagtccactcagactgtagcaaggagcatatatgtttagcatagaggtatttgactgcccattgcccaaggagtagattcagctcttgggcatggtctgtatcatcctgacattctgttggatggagctccaattgtaccaccggcatctctgttgacaccgaaacgcctgatgcgttggaaacaattatatctgattgattggtttaacttcgtggaatccctattttcgaagatcacgaaacgaca

SEQ ID NO: 107 - DNA, 8006 bp, Zea Mays
gtaaattcttcagtgtcagggggacaaagggcttctgcgacacatgttatgggactatacttttgatagaatgcaaagatgaaagcgcaacaaaggttgattttgatgacatactcagctgggagtacctgttcaagctatattggctagatctgaaagggaagctttcattaacattggaagaactcactactgccaagaatagatggaatgttcctagcacttctgctaggaaagaaaaagaggagtcgtctgatgacctgtatgatgctaataatgatgatgatgctggttctgactgctcctcaggaaaacgaaggcgaactaattcaaggaaaaagggtcaaaaacgccgaaaggtaaatagagattgtagcattcttgaaaaaaaggtcgagcttccacttagaaatactgagagcattccggtggaagtgccaaatgaacgggtgccatatccggtacacacaaaagtaccaaatggacgagtacccatgccagtagacacaaaagtaccaaatgaaccagtgtccttggcagcaaacacaaaatgggcatcaccagagctattggagtttataggacacatgagaaatggcgatcaatctttcatttctcaatttgatgttcagactcttctgcttgattatatcaagaagaataaccttcgtgatcctcaaaggaaaagccagattatttgtgactcgagacttcacttcttgttcaggaaagcacgagttgctcactttgagatgttaaagcttttggaaatgcattttcttacgaatgagacttcaacagtaactaatagtagccaagtgactatcaatctcaattcagctcatgtagataccaatggacacaatgacacggctgcaaaagtttcccctgataagaggaggaggatctatagaaagatggaaagagatacacaagttaatcttgaggattatgcagcaattgacatgcataacataaatttgatttacatgaggcgcagcctaatggaggatttagttgatgatgtcaaattctcagataaaattcacggtggttttgtgaggataaaaatttctgatgtttgtcaaaaacaagacatataccgtctcgtaaaagttattggaacacataaggttccagaaaagtatagtattggaaagaagatgacaaatgttgcacttgagatattgaatttaaacaaaaaggagattattacaatggatacaatatctaatcatgattttacagaggaggagtgcaaacgtttaaggcagagcatgaagtgtgatttaattagcagactaaaagtgggtgatatcctagagaaagccaagatattgcaatatgtaagagtgaatgataggcttgggcatcttcgtgaccgtgcaagtgaaactgggcgcagaaaggaatatcctattgactatactatggtgtggtgatgcctttattatcacttatattgtttctcatcgactactatgccgctgaattgctatttcttgattttatatcattatttgctcgttcccaaaaattggatcattatttaacttaggcaattgccattttcttgccatagctcaggaattgcggatgttcatgataatcaagtacacctttatttttcttatagaactatatgctactacttgtagtgcatgattcattattttgtgatccttgactgtatcatacacttagagaatatgtagaaaagctgcagcttctcaacgattctgaggaaagaactcgcaggattattgaaattctggaattgcatgttgactcacatatggatcctaattatgagtctgctgaagaaacagatgagaaaggaactgttggaaagtcggtaaatcagacaagaccagatacaaccatatcacgaaggatatcgagatatcttagcactgtgcaaaaccatcctaaaaaagtttctgattctagccaccttccaaaaagcttgtccacagaaagtgcaatatgtggatcaggagcaagaagtttggagaacagcacagcaaacagaactatgtatggagctggaccactttcatcttctgtagtaacaatgacaaacgacacagagccagagaaagtctggcactacaaggatccttctgggaatgttcagggtccatttactcttttgcaactttcaaattggacaagttacttcccacgtgatctgagagtatggcttacatttgagagtgaagagagatcattgctgttgactgaagtgctttcaaaacagcagaaagattttactcaggctgcatcacatacaagtagcaaggcaacactggttggcactggacatacaaggaacaaccctagtgtggatcagaccaatgctttctcccctgttggtcatagcgtggttagttcttctggaatacctgttcagtataataagtattctgttccagaaagggaaagtgtgtactctccagatgatagcttgtcgctgtcaactagttcggttccaccaaaggatgcttatactgtgaatagccaagcacactgccagaataagcattctgttttcattcaatctcctgggagttcatatgggcacacagacttgaaccatgatggaatacagggaggatgctctggtgaatcaaaccaccatcacagcagtagagccctatggagtcctacagtggcacatgtgagttgtggacgtggtaacgtggaatctcatcagaatcagcatgtttcctggtcagaaagtcaacatgaatctaaaaatggttcacaaggaggatttgttaaagatctgaattcaaggcaggatctatcgaaaaacctacctgctcaacgtattgggaaagatgtttccagtcctttgtttgcttggagtccggccgagtcgaggacagcttcaagtcaacaggaagggtcttgcttaagttcaacaactaacccaagctttctcgatgaacttcattcttctattgcttctgcaaagcctaagagctgcgctccagcaacccccattgaagacagaggttctagttcaccatcagatatgctaagtcatgaagaaagagttccaatctgcagtccacaatcagcccctttagcatctgcttctgatatgtgcaagatggaggagatcatgaatcagcaaagaacacttgtggtggatacatcgaatgcttcagttaaccagtctcctgaatcaagggcttttcctgtatcctctcctgataaccaagatattgaccgcgagtttcctagtccagttccaagatctgagaataaggacattgctgtggacagctcagaattagcaccagcgtcacctgaaaatattactacgaatttgcctgtttcagatacatgcaagatggaggaggtagtgagtcaacaacaagtaattggggctgttgtatcgaattcttcagataaccattctcctcaatctaaagtttcccctgtatcttctaataatgaagatacgaaacataaataccccagttcaaccccaaggcccgagaataagaatcctgcggtggatagtttactttcaacgtcagctgctcctgaaaatctaacgacaacttcaacccatgattctgatacatgcaaaatggaggtagtgaatcagccaaaaacatttgaagcggatgcatcaaatgctccacttcatcaacttcctcattctcacagtttcctggtaccttctgacaatcaagatattgagtgtgaatgtccaggtccaactccaagatctgacagtgaggaagctcttatgaacaactcagcgacaactgcatcagcctctgatacaagcaaaatggaggagtttgtgaatcagcaaaaaacccttgaagcagattcatcaaatgctccacttaatcaatctcctcattctcacattttctcagtaccttctgacaagcaagatattgagcgtgaatgtccaggcccaactcaaagatctgacactaaggaacctcttatgaacaactccgtgttaacatcaggaccatctgaaattcagacgacagcctctgcagcctctgatacatgcaaaatggaggagtcagtggatcagccaaaagcgcttgaagcagatgcatcaaatgctccacttaatcatcatcctcattctcacattttccgtgtatcttctgataatcaagacaatcagtgtgaacatcctagcccaaatccaaaatctgacagtaaggaacctcttgtggacaactcagtattaacatcagtggtgcctggaatgctagcgacaacttctgcctctgataaatgcaaaatggaggagtttgcgaatcagcaaaaagcacttgaagtggatgcatcgaatgcttcatttaatcagcctcacattttcgctgtatcttccgataatcaagatatggagcgtgaacgtcctagcccaactccaaggtctgaatgcaaggaatcacttacggagaactcagtattaacatccttggcgcctgaaattctagcaagatcttctgcctctgcttctgataaatgcaaaacggaggagtttgtgaatcagcaaaaaccaattgaagcggatgcatcaaatgcttcacttaatcagcctcatgtttttgctgtaccttccgataatcaagatatagagcgtgagtgtcctagtccaactccaaggtctgaatgcaaggaatcttttatggagaactcagtattaacatcagcggtgcctgaaattgcaagatcttctgtatccgcttctgatacatgcaaaatggagtttgtgaatcagcaaagaccaattgaagcagatgcatcgaatgcttcacttaaccagcctcgcattttcgctatatcttctgataataaagatatagagcgtgaatgtcctaacccaactccaaggtctgaatgcaaggaatctattatggagaactcagtattaacatcagcggcgcctgaaattcttgcaatatcttctgcatccgcttctgatacatgcaaaatggagtttgtgaatcagcaaagaccaattgaagcagatgcatcgaatgcttcacttaaccagcctcacattttcgctatatcttctgataataaagatatagagcgcgaatgtcctagcccaactccaaggtctgaatgcaaggaatctcttatggagaactcagtattaacaccagcgacgcctgaaattcttgcaagatcttctgcatccgcttctgatacatgcaaaatggaggagtttgtgaagcagcaaagaccaaatgaagcggacgcatcgaatgcttcacttaaccagcctcacattttcactgtatcttctgataataaagatatagagcgtgaatgtcctagcccaactccaaggtctgaatgcaaggaatcccttatggagaactcagtattaacatcagcggcacctgaaagatcttctgcatccgcttctgatacatgcaaaatggagtttgtgaatcagcaaagaccaattgaagcagatgcaccaaatgcttcacttaatcagtgtcgcactttcgctgtatcttctgatactaaagatatagagcgtgaatgtcctagcccaactccaaggtctgaatgcaaggaatcccttatggagaattcagtattaacatcagcggcgcctgaaattcttgcaagatcttctgcatctgcttctgatacatgcaaaatggaggagtttgtgaatcagcaaagactaattgaagcggatgcatcaaatgcttcacttaatcagcctcacattttcgctgtatcttctgataataaagatatagagcgtgaatgtcctagcccaactccaaggtctgaatgcaaggaatctcttatggagaactcagtattaacatcagcggcgcctgaaattcttgtaagatcttctgcatccgcttctgatacatgcaaaatggaggagtttgtgaatcagcaaagaccaattgaagtggatgcatcgaatgcttcacttaatcagcctcctcgttgtcacattttcactgcttcttccaataatcaagatattgagcgtgaatgtcctagctcaactccaaggtctgacagtaaggaaccttttgtggacaacttagtgttaacatcagcagtgcctggaaatctactgacaagttctgcagttgcctctgatacatgcaagatggagatcttgaataagaaaataacacttgaagcagatgcatcaaatgctccacttaatcagcctcctctctctagcgttttcgcttcatcttctggtgatgaccaagataatgtgtgtggacgtcctagtccaaatccaagacctgagggtgagcagcctctcatgggtaactcagggttaatatcaacagtgcctcgaaatctaacttctacttctgcatctgcttccgacatatgcaaaatggagatcttgaatgagaaaagaacacttgaagcaaacccatcaaatggtttgattactcaatctcctcaacccaaggttttccttgtaccatctcctgatatcctagagtgtgaattttctagtgaaacacctaggcatgagtttaaggaacctgttgcggacagctctgggttaacttcagcagcacatgaaaatttagggactaagccacatgtccactcaccagatgcctttgtaccaccaaagtctggtgctctaactggggaattaggtgacacgaaatcagattttaaaggtgaagaaactattcaaaaagagcaatattttggaagtgaatctattgccgctacaagagagaatttgttaattgatccttcctctggtgttgagtcgatagatgtgtcagatgtactggattctttaatggaagaaaggagtggaacttcgtacatgccaggatcaatagaggacttcctagccgaagaagaaccacaatactctagccctatcgcattatctccttggggtgaacctagttactaccaaggtgatgctgttgattctgcgctatggggtactcaagatttgatcaatgatatgtggtcattgctttcaccaagacctatgctccaaccttcatctggtattggaactgaggggaaggaaacttttgatatcaacgaggtggctgtgacccatgttagtagtgattattttcaaaaaggatcaatgtttggggaggaaaatgtgaaccaggcaaacttgagtgctgctgcagactggatgctgcctgagcaggtcccatcaataccaaatggtatgtcaacatcgtcagtagatgagagcaccatagttttaggttctcagccatcaaccaatcagagcttagactggggtggtactacatggagtattggccagaatgccagcgtgtatagcaatgaaaaagcagagccctcgagtaaaagctattgggaagaaccaaggaagcaggaaaccgccaaatccagtgtttctatttcaggacaggccattggaaacaacaagggcttggaccctcgtgataatgctgctaatcggggcagccggctgagtcatcatcaccgtggcaggtactcccaaatcagtgaatcttggctacttagttcaagtcactctaggagtaggtctgatagatttggcagcggtgggtcatcaagatcaacttcaaaggggcaatctaggggctaatgtaaattgtcaagtgcaggagagaaatgatgcatcttgtagctaacctgcatccttgatctctgcagcaggaatagttttctttttaaaattctttgtcatatctttgcagtttgtataggctaattacagtttagtccactcagactgtagcaaggagcatatatgtttagcatagaggtatttgactgcccattgcccaaggagtagattcagctcttgggcatggtctgtatcatcctgacattctgttggatggagctccaattgtaccaccggcatctctgttgacaccgaaacgcctgatgcgttggaaacaattatatctgattgattggtttaacttcgtggaatccctattttcgaagatcacgaaacgaca

SEQ ID NO: 108 - DNA, 7348 bp, Zea Mays
gggggacaaagggcttctgcgacacatgttatgggactatacttttgatagaatgcaaagatgaaagcgcaacaaaggttgattttgatgacatactcagctgggagtacctgttcaagctatattggctagatctgaaagggaagctttcattaacattggaagaactcactactgccaagaatagatggaatgttcctagcacttctgctaggaaagaaaaagaggagtcgtctgatgacctgtatgatgctaataatgatgatgatgctggttctgactgctcctcaggaaaacgaaggcgaactaattcaaggaaaaagggtcaaaaacgccgaaagactcttctgcttgattatatcaagaagaataaccttcgtgatcctcaaaggaaaagccagattatttgtgactcgagacttcacttcttgttcaggaaagcacgagttgctcactttgagatgttaaagcttttggaaatgcattttcttacgaatgagacttcaacagtaactaatagtagccaagtgactatcaatctcaattcagctcatgtagataccaatggacacaatgacacggctgcaaaagtttcccctgataagaggaggaggatctatagaaagatggaaagagatacacaagttaatcttgaggattatgcagcaattgacatgcataacataaatttgatttacatgaggcgcagcctaatggaggatttagttgatgatgtcaaattctcagataaaattcacggtggttttgtgaggataaaaatttctgatgtttgtcaaaaacaagacatataccgtctcgtaaaagttattggaacacataaggttccagaaaagtatagtattggaaagaagatgacaaatgttgcacttgagatattgaatttaaacaaaaaggagattattacaatggatacaatatctaatcatgattttacagaggaggagtgcaaacgtttaaggcagagcatgaagtgtgatttaattagcagactaaaagtggggtgatatcctagagaaagccaagatattgcaatatgtaagagtgaatgattggtttgaaaatgaaaagcagaggcttgggcatcttcgtgaccgtgcaagtgaaactgggcgcagaaaggaacttagagaatatgtagaaaagctgcagcttctcaacgattctgaggaaagaactcgcaggattattgaaattctggaattgcatgttgactcacatatggatcctaattatgagtctgctgaagaaacagatgagaaaggaactgttggaaagtcggtaaatcagacaagaccagatacaaccatatcacgaaggatatcgagatatcttagcactgtgcaaaaccatcctaaaaaagtttctgattctagccaccttccaaaaagcttgtccacagaaagtgcaatatgtggatcaggagcaagaagtttggagaacagcacagcaaacagaactatgtatggagctggaccactttcatcttctgtagtaacaatgacaaacgacacagagccagagaaagtctggcactacaaggatccttctgggaatgttcagggtccatttactcttttgcaactttcaaattggacaagttacttcccacgtgatctgagagtatggcttacatttgagagtgaagagagatcattgctgttgactgaagtgctttcaaaacagcagaaagattttactcaggctgcatcacatacaagtagcaaggcaacactggttggcactggacatacaaggaacaaccctagtgtggatcagaccaatgctttctcccctgttggtcatagcgtggttagttcttctggaatacctgttcagtataataagtattctgttccagaaagggaaagtgtgtactctccagatgatagcttgtcgctgtcaactagttcggttccaccaaaggatgcttatactgtgaatagccaagcacactgccagaataagcattctgttttcattcaatctcctgggagttcatatgggcacacagacttgaaccatgatggaatacagggaggatgctctggtgaatcaaaccaccatcacagcagtagagccctatggagtcctacagtggcacatgtgagttgtggacgtggtaacgtggaatctcatcagaatcagcatgtttcctggtcagaaagtcaacatgaatctaaaaatggttcacaaggaggatttgttaaagatctgaattcaaggcaggatctatcgaaaaacctacctgctcaacgtattgggaaagatgtttccagtcctttgtttgcttggagtccggccgagtcgaggacagcttcaagtcaacaggaagggtcttgcttaagttcaacaactaacccaagctttctcgatgaacttcattcttctattgcttctgcaaagcctaagagctgcgctccagcaacccccattgaagacagaggttctagttcaccatcagatatgctaagtcatgaagaaagagttccaatctgcagtccacaatcagcccctttagcatctgcttctgatatgtgcaagatggaggagatcatgaatcagcaaagaacacttgtggtggatacatcgaatgcttcagttaaccagtctcctgaatcaagggcttttcctgtatcctctcctgataaccaagatattgaccgcgagtttcctagtccagttccaagatctgagaataaggacattgctgtggacagctcagaattagcaccagcgtcacctgaaaatattactacgaatttgcctgtttcagatacatgcaagatggaggaggtagtgagtcaacaacaagtaattggggctgttgtatcgaattcttcagataaccattctcctcaatctaaagtttcccctgtatcttctaataatgaagatacgaaacataaataccccagttcaaccccaaggcccgagaataagaatcctgcggtggatagtttactttcaacgtcagctgctcctgaaaatctaacgacaacttcaacccatgattctgatacatgcaaaatggaggtagtgaatcagccaaaaacatttgaagcggatgcatcaaatgctccacttcatcaacttcctcattctcacagtttcctggtaccttctgacaatcaagatattgagtgtgaatgtccaggtccaactccaagatctgacagtgaggaagctcttatgaacaactcagcgacaactgcatcagcctctgatacaagcaaaatggaggagtttgtgaatcagcaaaaaacccttgaagcagattcatcaaatgctccacttaatcaatctcctcattctcacattttctcagtaccttctgacaagcaagatattgagcgtgaatgtccaggcccaactcaaagatctgacactaaggaacctcttatgaacaactccgtgttaacatcaggaccatctgaaattcagacgacagcctctgcagcctctgatacatgcaaaatggaggagtcagtggatcagccaaaagcgcttgaagcagatgcatcaaatgctccacttaatcatcatcctcattctcacattttccgtgtatcttctgataatcaagacaatcagtgtgaacatcctagcccaaatccaaaatctgacagtaaggaacctcttgtggacaactcagtattaacatcagtggtgcctggaatgctagcgacaacttctgcctctgataaatgcaaaatggaggagtttgcgaatcagcaaaaagcacttgaagtggatgcatcgaatgcttcatttaatcagcctcacattttcgctgtatcttccgataatcaagatatggagcgtgaacgtcctagcccaactccaaggtctgaatgcaaggaatcacttacggagaactcagtattaacatccttggcgcctgaaattctagcaagatcttctgcctctgcttctgataaatgcaaaacggaggagtttgtgaatcagcaaaaaccaattgaagcggatgcatcaaatgcttcacttaatcagcctcatgtttttgctgtaccttccgataatcaagatatagagcgtgagtgtcctagtccaactccaaggtctgaatgcaaggaatcttttatggagaactcagtattaacatcagcggtgcctgaaattgcaagatcttctgtatccgcttctgatacatgcaaaatggagtttgtgaatcagcaaagaccaattgaagcagatgcatcgaatgcttcacttaaccagcctcgcattttcgctatatcttctgataataaagatatagagcgtgaatgtcctaacccaactccaaggtctgaatgcaaggaatctattatggagaactcagtattaacatcagcggcgcctgaaattcttgcaatatcttctgcatccgcttctgatacatgcaaaatggagtttgtgaatcagcaaagaccaattgaagcagatgcatcgaatgcttcacttaaccagcctcacattttcgctatatcttctgataataaagatatagagcgcgaatgtcctagcccaactccaaggtctgaatgcaaggaatctcttatggagaactcagtattaacaccagcgacgcctgaaattcttgcaagatcttctgcatccgcttctgatacatgcaaaatggaggagtttgtgaagcagcaaagaccaaatgaagcggacgcatcgaatgcttcacttaaccagcctcacattttcactgtatcttctgataataaagatatagagcgtgaatgtcctagcccaactccaaggtctgaatgcaaggaatcccttatggagaactcagtattaacatcagcggcacctgaaagatcttctgcatccgcttctgatacatgcaaaatggagtttgtgaatcagcaaagaccaattgaagcagatgcaccaaatgcttcacttaatcagtgtcgcactttcgctgtatcttctgatactaaagatatagagcgtgaatgtcctagcccaactccaaggtctgaatgcaaggaatcccttatggagaattcagtattaacatcagcggcgcctgaaattcttgcaagatcttctgcatctgcttctgatacatgcaaaatggaggagtttgtgaatcagcaaagactaattgaagcggatgcatcaaatgcttcacttaatcagcctcacattttcgctgtatcttctgataataaagatatagagcgtgaatgtcctagcccaactccaaggtctgaatgcaaggaatctcttatggagaactcagtattaacatcagcggcgcctgaaattcttgtaagatcttctgcatccgcttctgatacatgcaaaatggaggagtttgtgaatcagcaaagaccaattgaagtggatgcatcgaatgcttcacttaatcagcctcctcgttgtcacattttcactgcttcttccaataatcaagatattgagcgtgaatgtcctagctcaactccaaggtctgacagtaaggaaccttttgtggacaacttagtgttaacatcagcagtgcctggaaatctactgacaagttctgcagttgcctctgatacatgcaagatggagatcttgaataagaaaataacacttgaagcagatgcatcaaatgctccacttaatcagcctcctctctctagcgttttcgcttcatcttctggtgatgaccaagataatgtgtgtggacgtcctagtccaaatccaagacctgagggtgagcagcctctcatgggtaactcagggttaatatcaacagtgcctcgaaatctaacttctacttctgcatctgcttccgacatatgcaaaatggagatcttgaatgagaaaagaacacttgaagcaaacccatcaaatggtttgattactcaatctcctcaacccaaggttttccttgtaccatctcctgatatcctagagtgtgaattttctagtgaaacacctaggcatgagtttaaggaacctgttgcggacagctctgggttaacttcagcagcacatgaaaatttagggactaagccacatgtccactcaccagatgcctttgtaccaccaaagtctggtgctctaactggggaattaggtgacacgaaatcagattttaaagatgtgtcagatgtactggattctttaatggaagaaaggagtggaacttcgtacatgccaggatcaatagaggacttcctagccgaagaagaaccacaatactctagccctatcgcattatctccttggggtgaacctagttactaccaaggtgatgctgttgattctgcgctatggggtactcaagatttgatcaatgatatgtggtcattgctttcaccaagacctatgctccaaccttcatctggtattggaactgaggggaaggaaacttttgatatcaacgaggtggctgtgacccatgttagtagtgattattttcaaaaaggatcaatgtttggggaggaaaatgtgaaccaggcaaacttgagtgctgctgcagactggatgctgcctgagcaggtcccatcaataccaaatggtatgtcaacatcgtcagtagatgagagcaccatagttttaggttctcagccatcaaccaatcagagcttagactggggtggtactacatggagtattggccagaatgccagcgtgtatagcaatgaaaaagcagagccctcgagtaaaagctattgggaagaaccaaggaagcaggaaaccgccaaatccagtgtttctatttcaggacaggccattggaaacaacaagggcttggaccctcgtgataatgctgctaatcggggcagccggctgagtcatcatcaccgtggcaggtactcccaaatcagtgaatcttggctacttagttcaagtcactctaggagtaggtctgatagatttggcagcggtgggtcatcaagatcaacttcaaaggggcaatctaggggctaatgtaaattgtcaagtgcaggagagaaatgatgcatcttgtagctaacctgcatccttgatctctgcagcaggaatagttttctttttaaaattctttgtcatatctttgcagtttgtataggctaattacagtttagtccactcagactgtagcaaggagcatatatgtttagcatagaggtatttgactgcccattgcccaaggagtagattcagctcttgggcatggtctgtatcatcctgacattctgttggatggagctccaattgtaccaccggcatctctgttgacaccgaaacgcctgatgcgttggaaacaattatatctgattgattggtttaacttcgtggaatccctattttcgaagatcacgaaacgaca

SEQ ID NO: 109 - DNA, 7670 bp, Zea Mays
caaagggcttctgcgacacatgttatgggactatacttttgatagaatgcaaagatgaaagcgcaacaaaggttgattttgatgacatactcagctgggagtacctgttcaagctatattggctagatctgaaagggaagctttcattaacattggaagaactcactactgccaagaatagatggaatgttcctagcacttctgctaggaaagaaaaagaggagtcgtctgatgacctgtatgatgctaataatgatgatgatgctggttctgactgctcctcaggaaaacgaaggcgaactaattcaaggaaaaagggtcaaaaacgccgaaagactcttctgcttgattatatcaagaagaataaccttcgtgatcctcaaaggaaaagccagattatttgtgactcgagacttcacttcttgttcaggaaagcacgagttgctcactttgagatgttaaagcttttggaaatgcattttcttacgaatgagacttcaacagtaactaatagtagccaagtgactatcaatctcaattcagctcatgtagataccaatggacacaatgacacggctgcaaaagtttcccctgataagaggaggaggatctatagaaagatggaaagagatacacaagttaatcttgaggattatgcagcaattgacatgcataacataaatttgatttacatgaggcgcagcctaatggaggatttagttgatgatgtcaaattctcagataaaattcacggtggttttgtgaggataaaaatttctgatgtttgtcaaaaacaagacatataccgtctcgtaaaagttattggaacacataaggttccagaaaagtatagtattggaaagaagatgacaaatgttgcacttgagatattgaatttaaacaaaaaggagattattacaatggatacaatatctaatcatgattttacagagggtgatatcctagagaaagccaagatattgcaatatgtaagagtgaatgattggtttgaaaatgaaaagcagaggcttgggcatcttcgtgaccgtgcaagtgaaactgggcgcagaaaggaatatcctattgactatactatggtgtggtgatgcctttattatcacttatattgtttctcatcgactactatgccgctgaattgctatttcttgattttatatcattatttgctcgttcccaaaaattggatcattatttaacttaggcaattgccattttcttgccatagctcaggaattgcggatgttcatgataatcaagtacacctttatttttcttatagaactatatgctactacttgtagtgcatgattcattattttgtgatccttgactgtatcatacacttagagaatatgtagaaaagctgcagcttctcaacgattctgaggaaagaactcgcaggattattgaaattctggaattgcatgttgactcacatatggatcctaattatgagtctgctgaagaaacagatgagaaaggaactgttggaaagtcggtaaatcagacaagaccagatacaaccatatcacgaaggatatcgagatatcttagcactgtgcaaaaccatcctaaaaaagtttctgattctagccaccttccaaaaagcttgtccacagaaagtgcaatatgtggatcaggagcaagaagtttggagaacagcacagcaaacagaactatgtatggagctggaccactttcatcttctgtagtaacaatgacaaacgacacagagccagagaaagtctggcactacaaggatccttctgggaatgttcagggtccatttactcttttgcaactttcaaattggacaagttacttcccacgtgatctgagagtatggcttacatttgagagtgaagagagatcattgctgttgactgaagtgctttcaaaacagcagaaagattttactcaggctgcatcacatacaagtagcaaggcaacactggttggcactggacatacaaggaacaaccctagtgtggatcagaccaatgctttctcccctgttggtcatagcgtggttagttcttctggaatacctgttcagtataataagtattctgttccagaaagggaaagtgtgtactctccagatgatagcttgtcgctgtcaactagttcggttccaccaaaggatgcttatactgtgaatagccaagcacactgccagaataagcattctgttttcattcaatctcctgggagttcatatgggcacacagacttgaaccatgatggaatacagggaggatgctctggtgaatcaaaccaccatcacagcagtagagccctatggagtcctacagtggcacatgtgagttgtggacgtggtaacgtggaatctcatcagaatcagcatgtttcctggtcagaaagtcaacatgaatctaaaaatggttcacaaggaggatttgttaaagatctgaattcaaggcaggatctatcgaaaaacctacctgctcaacgtattgggaaagatgtttccagtcctttgtttgcttggagtccggccgagtcgaggacagcttcaagtcaacaggaagggtcttgcttaagttcaacaactaacccaagctttctcgatgaacttcattcttctattgcttctgcaaagcctaagagctgcgctccagcaacccccattgaagacagaggttctagttcaccatcagatatgctaagtcatgaagaaagagttccaatctgcagtccacaatcagcccctttagcatctgcttctgatatgtgcaagatggaggagatcatgaatcagcaaagaacacttgtggtggatacatcgaatgcttcagttaaccagtctcctgaatcaagggcttttcctgtatcctctcctgataaccaagatattgaccgcgagtttcctagtccagttccaagatctgagaataaggacattgctgtggacagctcagaattagcaccagcgtcacctgaaaatattactacgaatttgcctgtttcagatacatgcaagatggaggaggtagtgagtcaacaacaagtaattggggctgttgtatcgaattcttcagataaccattctcctcaatctaaagtttcccctgtatcttctaataatgaagatacgaaacataaataccccagttcaaccccaaggcccgagaataagaatcctgcggtggatagtttactttcaacgtcagctgctcctgaaaatctaacgacaacttcaacccatgattctgatacatgcaaaatggaggtagtgaatcagccaaaaacatttgaagcggatgcatcaaatgctccacttcatcaacttcctcattctcacagtttcctggtaccttctgacaatcaagatattgagtgtgaatgtccaggtccaactccaagatctgacagtgaggaagctcttatgaacaactcagcgacaactgcatcagcctctgatacaagcaaaatggaggagtttgtgaatcagcaaaaaacccttgaagcagattcatcaaatgctccacttaatcaatctcctcattctcacattttctcagtaccttctgacaagcaagatattgagcgtgaatgtccaggcccaactcaaagatctgacactaaggaacctcttatgaacaactccgtgttaacatcaggaccatctgaaattcagacgacagcctctgcagcctctgatacatgcaaaatggaggagtcagtggatcagccaaaagcgcttgaagcagatgcatcaaatgctccacttaatcatcatcctcattctcacattttccgtgtatcttctgataatcaagacaatcagtgtgaacatcctagcccaaatccaaaatctgacagtaaggaacctcttgtggacaactcagtattaacatcagtggtgcctggaatgctagcgacaacttctgcctctgataaatgcaaaatggaggagtttgcgaatcagcaaaaagcacttgaagtggatgcatcgaatgcttcatttaatcagcctcacattttcgctgtatcttccgataatcaagatatggagcgtgaacgtcctagcccaactccaaggtctgaatgcaaggaatcacttacggagaactcagtattaacatccttggcgcctgaaattctagcaagatcttctgcctctgcttctgataaatgcaaaacggaggagtttgtgaatcagcaaaaaccaattgaagcggatgcatcaaatgcttcacttaatcagcctcatgtttttgctgtaccttccgataatcaagatatagagcgtgagtgtcctagtccaactccaaggtctgaatgcaaggaatcttttatggagaactcagtattaacatcagcggtgcctgaaattgcaagatcttctgtatccgcttctgatacatgcaaaatggagtttgtgaatcagcaaagaccaattgaagcagatgcatcgaatgcttcacttaaccagcctcgcattttcgctatatcttctgataataaagatatagagcgtgaatgtcctaacccaactccaaggtctgaatgcaaggaatctattatggagaactcagtattaacatcagcggcgcctgaaattcttgcaatatcttctgcatccgcttctgatacatgcaaaatggagtttgtgaatcagcaaagaccaattgaagcagatgcatcgaatgcttcacttaaccagcctcacattttcgctatatcttctgataataaagatatagagcgcgaatgtcctagcccaactccaaggtctgaatgcaaggaatctcttatggagaactcagtattaacaccagcgacgcctgaaattcttgcaagatcttctgcatccgcttctgatacatgcaaaatggaggagtttgtgaagcagcaaagaccaaatgaagcggacgcatcgaatgcttcacttaaccagcctcacattttcactgtatcttctgataataaagatatagagcgtgaatgtcctagcccaactccaaggtctgaatgcaaggaatcccttatggagaactcagtattaacatcagcggcacctgaaagatcttctgcatccgcttctgatacatgcaaaatggagtttgtgaatcagcaaagaccaattgaagcagatgcaccaaatgcttcacttaatcagtgtcgcactttcgctgtatcttctgatactaaagatatagagcgtgaatgtcctagcccaactccaaggtctgaatgcaaggaatcccttatggagaattcagtattaacatcagcggcgcctgaaattcttgcaagatcttctgcatctgcttctgatacatgcaaaatggaggagtttgtgaatcagcaaagactaattgaagcggatgcatcaaatgcttcacttaatcagcctcacattttcgctgtatcttctgataataaagatatagagcgtgaatgtcctagcccaactccaaggtctgaatgcaaggaatctcttatggagaactcagtattaacatcagcggcgcctgaaattcttgtaagatcttctgcatccgcttctgatacatgcaaaatggaggagtttgtgaatcagcaaagaccaattgaagtggatgcatcgaatgcttcacttaatcagcctcctcgttgtcacattttcactgcttcttccaataatcaagatattgagcgtgaatgtcctagctcaactccaaggtctgacagtaaggaaccttttgtggacaacttagtgttaacatcagcagtgcctggaaatctactgacaagttctgcagttgcctctgatacatgcaagatggagatcttgaataagaaaataacacttgaagcagatgcatcaaatgctccacttaatcagcctcctctctctagcgttttcgcttcatcttctggtgatgaccaagataatgtgtgtggacgtcctagtccaaatccaagacctgagggtgagcagcctctcatgggtaactcagggttaatatcaacagtgcctcgaaatctaacttctacttctgcatctgcttccgacatatgcaaaatggagatcttgaatgagaaaagaacacttgaagcaaacccatcaaatggtttgattactcaatctcctcaacccaaggttttccttgtaccatctcctgatatcctagagtgtgaattttctagtgaaacacctaggcatgagtttaaggaacctgttgcggacagctctgggttaacttcagcagcacatgaaaatttagggactaagccacatgtccactcaccagatgcctttgtaccaccaaagtctggtgctctaactggggaattaggtgacacgaaatcagattttaaaggtgaagaaactattcaaaaagagcaatattttggaagtgaatctattgccgctacaagagagaatttgttaattgatccttcctctggtgttgagtcgatagatgtgtcagatgtactggattctttaatggaagaaaggagtggaacttcgtacatgccaggatcaatagaggacttcctagccgaagaagaaccacaatactctagccctatcgcattatctccttggggtgaacctagttactaccaaggtgatgctgttgattctgcgctatggggtactcaagatttgatcaatgatatgtggtcattgctttcaccaagacctatgctccaaccttcatctggtattggaactgaggggaaggaaacttttgatatcaacgaggtggctgtgacccatgttagtagtgattattttcaaaaaggatcaatgtttggggaggaaaatgtgaaccaggcaaacttgagtgctgctgcagactggatgctgcctgagcaggtcccatcaataccaaatggtatgtcaacatcgtcagtagatgagagcaccatagttttaggttctcagccatcaaccaatcagagcttagactggggtggtactacatggagtattggccagaatgccagcgtgtatagcaatgaaaaagcagagccctcgagtaaaagctattgggaagaaccaaggaagcaggaaaccgccaaatccagtgtttctatttcaggacaggccattggaaacaacaagggcttggaccctcgtgataatgctgctaatcggggcagccggctgagtcatcatcaccgtggcaggtactcccaaatcagtgaatcttggctacttagttcaagtcactctaggagtaggtctgatagatttggcagcggtgggtcatcaagatcaacttcaaaggggcaatctaggggctaatgtaaattgtcaagtgcaggagagaaatgatgcatcttgtagctaacctgcatccttgatctctgcagcaggaatagttttctttttaaaattctttgtcatatctttgcagtttgtataggctaattacagtttagtccactcagactgtagcaaggagcatatatgtttagcatagaggtatttgactgcccattgcccaaggagtagattcagctcttgggcatggtctgtatcatcctgacattctgttggatggagctccaattgtaccaccggcatctctgttgacaccgaaacgcctgatgcgttggaaacaattatatctgattgattggtttaacttcgtggaatccctattttcgaagatcacgaaacgaca

SEQ ID NO: 110 - DNA, 6393 bp, Zea Mays
cagaggaggagtgcaaacgtttaaggcagagcatgaagtgtgatttaattagcagactaaaagtgggtgatatcctagagaaagccaagatattgcaatatgtaagagtgaatgattggtttgaaaatgaaaagcagaggcttgggcatcttcgtgaccgtgcaagtgaaactgggcgcagaaaggaacttagagaatatgtagaaaagctgcagcttctcaacgattctgaggaaagaactcgcaggattattgaaattctggaattgcatgttgactcacatatggatcctaattatgagtctgctgaagaaacagatgagaaaggaactgttggaaagtcggtaaatcagacaagaccagatacaaccatatcacgaaggatatcgagatatcttagcactgtgcaaaaccatcctaaaaaagtttctgattctagccaccttccaaaaagcttgtccacagaaagtgcaatatgtggatcaggagcaagaagtttggagaacagcacagcaaacagaactatgtatggagctggaccactttcatcttctgtagtaacaatgacaaacgacacagagccagagaaagtctggcactacaaggatccttctgggaatgttcagggtccatttactcttttgcaactttcaaattggacaagttacttcccacgtgatctgagagtatggcttacatttgagagtgaagagagatcattgctgttgactgaagtgctttcaaaacagcagaaagattttactcaggctgcatcacatacaagtagcaaggcaacactggttggcactggacatacaaggaacaaccctagtgtggatcagaccaatgctttctcccctgttggtcatagcgtggttagttcttctggaatacctgttcagtataataagtattctgttccagaaagggaaagtgtgtactctccagatgatagcttgtcgctgtcaactagttcggttccaccaaaggatgcttatactgtgaatagccaagcacactgccagaataagcattctgttttcattcaatctcctgggagttcatatgggcacacagacttgaaccatgatggaatacagggaggatgctctggtgaatcaaaccaccatcacagcagtagagccctatggagtcctacagtggcacatgtgagttgtggacgtggtaacgtggaatctcatcagaatcagcatgtttcctggtcagaaagtcaacatgaatctaaaaatggttcacaaggaggatttgttaaagatctgaattcaaggcaggatctatcgaaaaacctacctgctcaacgtattgggaaagatgtttccagtcctttgtttgcttggagtccggccgagtcgaggacagcttcaagtcaacaggaagggtcttgcttaagttcaacaactaacccaagctttctcgatgaacttcattcttctattgcttctgcaaagcctaagagctgcgctccagcaacccccattgaagacagaggttctagttcaccatcagatatgctaagtcatgaagaaagagttccaatctgcagtccacaatcagcccctttagcatctgcttctgatatgtgcaagatggaggagatcatgaatcagcaaagaacacttgtggtggatacatcgaatgcttcagttaaccagtctcctgaatcaagggcttttcctgtatcctctcctgataaccaagatattgaccgcgagtttcctagtccagttccaagatctgagaataaggacattgctgtggacagctcagaattagcaccagcgtcacctgaaaatattactacgaatttgcctgtttcagatacatgcaagatggaggaggtagtgagtcaacaacaagtaattggggctgttgtatcgaattcttcagataaccattctcctcaatctaaagtttcccctgtatcttctaataatgaagatacgaaacataaataccccagttcaaccccaaggcccgagaataagaatcctgcggtggatagtttactttcaacgtcagctgctcctgaaaatctaacgacaacttcaacccatgattctgatacatgcaaaatggaggtagtgaatcagccaaaaacatttgaagcggatgcatcaaatgctccacttcatcaacttcctcattctcacagtttcctggtaccttctgacaatcaagatattgagtgtgaatgtccaggtccaactccaagatctgacagtgaggaagctcttatgaacaactcagcgacaactgcatcagcctctgatacaagcaaaatggaggagtttgtgaatcagcaaaaaacccttgaagcagattcatcaaatgctccacttaatcaatctcctcattctcacattttctcagtaccttctgacaagcaagatattgagcgtgaatgtccaggcccaactcaaagatctgacactaaggaacctcttatgaacaactccgtgttaacatcaggaccatctgaaattcagacgacagcctctgcagcctctgatacatgcaaaatggaggagtcagtggatcagccaaaagcgcttgaagcagatgcatcaaatgctccacttaatcatcatcctcattctcacattttccgtgtatcttctgataatcaagacaatcagtgtgaacatcctagcccaaatccaaaatctgacagtaaggaacctcttgtggacaactcagtattaacatcagtggtgcctggaatgctagcgacaacttctgcctctgataaatgcaaaatggaggagtttgcgaatcagcaaaaagcacttgaagtggatgcatcgaatgcttcatttaatcagcctcacattttcgctgtatcttccgataatcaagatatggagcgtgaacgtcctagcccaactccaaggtctgaatgcaaggaatcacttacggagaactcagtattaacatccttggcgcctgaaattctagcaagatcttctgcctctgcttctgataaatgcaaaacggaggagtttgtgaatcagcaaaaaccaattgaagcggatgcatcaaatgcttcacttaatcagcctcatgtttttgctgtaccttccgataatcaagatatagagcgtgagtgtcctagtccaactccaaggtctgaatgcaaggaatcttttatggagaactcagtattaacatcagcggtgcctgaaattgcaagatcttctgtatccgcttctgatacatgcaaaatggagtttgtgaatcagcaaagaccaattgaagcagatgcatcgaatgcttcacttaaccagcctcgcattttcgctatatcttctgataataaagatatagagcgtgaatgtcctaacccaactccaaggtctgaatgcaaggaatctattatggagaactcagtattaacatcagcggcgcctgaaattcttgcaatatcttctgcatccgcttctgatacatgcaaaatggagtttgtgaatcagcaaagaccaattgaagcagatgcatcgaatgcttcacttaaccagcctcacattttcgctatatcttctgataataaagatatagagcgcgaatgtcctagcccaactccaaggtctgaatgcaaggaatctcttatggagaactcagtattaacaccagcgacgcctgaaattcttgcaagatcttctgcatccgcttctgatacatgcaaaatggaggagtttgtgaagcagcaaagaccaaatgaagcggacgcatcgaatgcttcacttaaccagcctcacattttcactgtatcttctgataataaagatatagagcgtgaatgtcctagcccaactccaaggtctgaatgcaaggaatcccttatggagaactcagtattaacatcagcggcacctgaaagatcttctgcatccgcttctgatacatgcaaaatggagtttgtgaatcagcaaagaccaattgaagcagatgcaccaaatgcttcacttaatcagtgtcgcactttcgctgtatcttctgatactaaagatatagagcgtgaatgtcctagcccaactccaaggtctgaatgcaaggaatcccttatggagaattcagtattaacatcagcggcgcctgaaattcttgcaagatcttctgcatctgcttctgatacatgcaaaatggaggagtttgtgaatcagcaaagactaattgaagcggatgcatcaaatgcttcacttaatcagcctcacattttcgctgtatcttctgataataaagatatagagcgtgaatgtcctagcccaactccaaggtctgaatgcaaggaatctcttatggagaactcagtattaacatcagcggcgcctgaaattcttgtaagatcttctgcatccgcttctgatacatgcaaaatggaggagtttgtgaatcagcaaagaccaattgaagtggatgcatcgaatgcttcacttaatcagcctcctcgttgtcacattttcactgcttcttccaataatcaagatattgagcgtgaatgtcctagctcaactccaaggtctgacagtaaggaaccttttgtggacaacttagtgttaacatcagcagtgcctggaaatctactgacaagttctgcagttgcctctgatacatgcaagatggagatcttgaataagaaaataacacttgaagcagatgcatcaaatgctccacttaatcagcctcctctctctagcgttttcgcttcatcttctggtgatgaccaagataatgtgtgtggacgtcctagtccaaatccaagacctgagggtgagcagcctctcatgggtaactcagggttaatatcaacagtgcctcgaaatctaacttctacttctgcatctgcttccgacatatgcaaaatggagatcttgaatgagaaaagaacacttgaagcaaacccatcaaatggtttgattactcaatctcctcaacccaaggttttccttgtaccatctcctgatatcctagagtgtgaattttctagtgaaacacctaggcatgagtttaaggaacctgttgcggacagctctgggttaacttcagcagcacatgaaaatttagggactaagccacatgtccactcaccagatgcctttgtaccaccaaagtctggtgctctaactggggaattaggtgacacgaaatcagattttaaagatgtgtcagatgtactggattctttaatggaagaaaggagtggaacttcgtacatgccaggatcaatagaggacttcctagccgaagaagaaccacaatactctagccctatcgcattatctccttggggtgaacctagttactaccaaggtgatgctgttgattctgcgctatggggtactcaagatttgatcaatgatatgtggtcattgctttcaccaagacctatgctccaaccttcatctggtattggaactgaggggaaggaaacttttgatatcaacgaggtggctgtgacccatgttagtagtgattattttcaaaaaggatcaatgtttggggaggaaaatgtgaaccaggcaaacttgagtgctgctgcagactggatgctgcctgagcaggtcccatcaataccaaatggtatgtcaacatcgtcagtagatgagagcaccatagttttaggttctcagccatcaaccaatcagagcttagactggggtggtactacatggagtattggccagaatgccagcgtgtatagcaatgaaaaagcagagccctcgagtaaaagctattgggaagaaccaaggaagcaggaaaccgccaaatccagtgtttctatttcaggacaggccattggaaacaacaagggcttggaccctcgtgataatgctgctaatcggggcagccggctgagtcatcatcaccgtggcaggtactcccaaatcagtgaatcttggctacttagttcaagtcactctaggagtaggtctgatagatttggcagcggtgggtcatcaagatcaacttcaaaggggcaatctaggggctaatgtaaattgtcaagtgcaggagagaaatgatgcatcttgtagctaacctgcatccttgatctctgcagcaggaatagttttctttttaaaattctttgtcatatctttgcagtttgtataggctaattacagtttagtccactcagactgtagcaaggagcatatatgtttagcatagaggtatttgactgcccattgcccaaggagtagattcagctcttgggcatggtctgtatcatcctgacattctgttggatggagctccaattgtaccaccggcatctctgttgacaccgaaacgcctgatgcgttggaaacaattatatctgattgattggtttaacttcgtggaatccctattttcgaagatcacgaaacgaca

SEQ ID NO: 111 - DNA, 6769 bp, Zea Mays
caaacgtttaaggcagagcatgaagtgtgatttaattagcagactaaaagtgggtgatatcctagagaaagccaagatattgcaatatgtaagagtgaatgattggtttgaaaatgaaaagcagaggcttgggcatcttcgtgaccgtgcaagtgaaactgggcgcagaaaggaatatcctattgactatactatggtgtggtgatgcctttattatcacttatattgtttctcatcgactactatgccgctgaattgctatttcttgattttatatcattatttgctcgttcccaaaaattggatcattatttaacttaggcaattgccattttcttgccatagctcaggaattgcggatgttcatgataatcaagtacacctttatttttcttatagaactatatgctactacttgtagtgcatgattcattattttgtgatccttgactgtatcatacacttagagaatatgtagaaaagctgcagcttctcaacgattctgaggaaagaactcgcaggattattgaaattctggaattgcatgttgactcacatatggatcctaattatgagtctgctgaagaaacagatgagaaaggaactgttggaaagtcggtaaatcagacaagaccagatacaaccatatcacgaaggatatcgagatatcttagcactgtgcaaaaccatcctaaaaaagtttctgattctagccaccttccaaaaagcttgtccacagaaagtgcaatatgtggatcaggagcaagaagtttggagaacagcacagcaaacagaactatgtatggagctggaccactttcatcttctgtagtaacaatgacaaacgacacagagccagagaaagtctggcactacaaggatccttctgggaatgttcagggtccatttactcttttgcaactttcaaattggacaagttacttcccacgtgatctgagagtatggcttacatttgagagtgaagagagatcattgctgttgactgaagtgctttcaaaacagcagaaagattttactcaggctgcatcacatacaagtagcaaggcaacactggttggcactggacatacaaggaacaaccctagtgtggatcagaccaatgctttctcccctgttggtcatagcgtggttagttcttctggaatacctgttcagtataataagtattctgttccagaaagggaaagtgtgtactctccagatgatagcttgtcgctgtcaactagttcggttccaccaaaggatgcttatactgtgaatagccaagcacactgccagaataagcattctgttttcattcaatctcctgggagttcatatgggcacacagacttgaaccatgatggaatacagggaggatgctctggtgaatcaaaccaccatcacagcagtagagccctatggagtcctacagtggcacatgtgagttgtggacgtggtaacgtggaatctcatcagaatcagcatgtttcctggtcagaaagtcaacatgaatctaaaaatggttcacaaggaggatttgttaaagatctgaattcaaggcaggatctatcgaaaaacctacctgctcaacgtattgggaaagatgtttccagtcctttgtttgcttggagtccggccgagtcgaggacagcttcaagtcaacaggaagggtcttgcttaagttcaacaactaacccaagctttctcgatgaacttcattcttctattgcttctgcaaagcctaagagctgcgctccagcaacccccattgaagacagaggttctagttcaccatcagatatgctaagtcatgaagaaagagttccaatctgcagtccacaatcagcccctttagcatctgcttctgatatgtgcaagatggaggagatcatgaatcagcaaagaacacttgtggtggatacatcgaatgcttcagttaaccagtctcctgaatcaagggcttttcctgtatcctctcctgataaccaagatattgaccgcgagtttcctagtccagttccaagatctgagaataaggacattgctgtggacagctcagaattagcaccagcgtcacctgaaaatattactacgaatttgcctgtttcagatacatgcaagatggaggaggtagtgagtcaacaacaagtaattggggctgttgtatcgaattcttcagataaccattctcctcaatctaaagtttcccctgtatcttctaataatgaagatacgaaacataaataccccagttcaaccccaaggcccgagaataagaatcctgcggtggatagtttactttcaacgtcagctgctcctgaaaatctaacgacaacttcaacccatgattctgatacatgcaaaatggaggtagtgaatcagccaaaaacatttgaagcggatgcatcaaatgctccacttcatcaacttcctcattctcacagtttcctggtaccttctgacaatcaagatattgagtgtgaatgtccaggtccaactccaagatctgacagtgaggaagctcttatgaacaactcagcgacaactgcatcagcctctgatacaagcaaaatggaggagtttgtgaatcagcaaaaaacccttgaagcagattcatcaaatgctccacttaatcaatctcctcattctcacattttctcagtaccttctgacaagcaagatattgagcgtgaatgtccaggcccaactcaaagatctgacactaaggaacctcttatgaacaactccgtgttaacatcaggaccatctgaaattcagacgacagcctctgcagcctctgatacatgcaaaatggaggagtcagtggatcagccaaaagcgcttgaagcagatgcatcaaatgctccacttaatcatcatcctcattctcacattttccgtgtatcttctgataatcaagacaatcagtgtgaacatcctagcccaaatccaaaatctgacagtaaggaacctcttgtggacaactcagtattaacatcagtggtgcctggaatgctagcgacaacttctgcctctgataaatgcaaaatggaggagtttgcgaatcagcaaaaagcacttgaagtggatgcatcgaatgcttcatttaatcagcctcacattttcgctgtatcttccgataatcaagatatggagcgtgaacgtcctagcccaactccaaggtctgaatgcaaggaatcacttacggagaactcagtattaacatccttggcgcctgaaattctagcaagatcttctgcctctgcttctgataaatgcaaaacggaggagtttgtgaatcagcaaaaaccaattgaagcggatgcatcaaatgcttcacttaatcagcctcatgtttttgctgtaccttccgataatcaagatatagagcgtgagtgtcctagtccaactccaaggtctgaatgcaaggaatcttttatggagaactcagtattaacatcagcggtgcctgaaattgcaagatcttctgtatccgcttctgatacatgcaaaatggagtttgtgaatcagcaaagaccaattgaagcagatgcatcgaatgcttcacttaaccagcctcgcattttcgctatatcttctgataataaagatatagagcgtgaatgtcctaacccaactccaaggtctgaatgcaaggaatctattatggagaactcagtattaacatcagcggcgcctgaaattcttgcaatatcttctgcatccgcttctgatacatgcaaaatggagtttgtgaatcagcaaagaccaattgaagcagatgcatcgaatgcttcacttaaccagcctcacattttcgctatatcttctgataataaagatatagagcgcgaatgtcctagcccaactccaaggtctgaatgcaaggaatctcttatggagaactcagtattaacaccagcgacgcctgaaattcttgcaagatcttctgcatccgcttctgatacatgcaaaatggaggagtttgtgaagcagcaaagaccaaatgaagcggacgcatcgaatgcttcacttaaccagcctcacattttcactgtatcttctgataataaagatatagagcgtgaatgtcctagcccaactccaaggtctgaatgcaaggaatcccttatggagaactcagtattaacatcagcggcacctgaaagatcttctgcatccgcttctgatacatgcaaaatggagtttgtgaatcagcaaagaccaattgaagcagatgcaccaaatgcttcacttaatcagtgtcgcactttcgctgtatcttctgatactaaagatatagagcgtgaatgtcctagcccaactccaaggtctgaatgcaaggaatcccttatggagaattcagtattaacatcagcggcgcctgaaattcttgcaagatcttctgcatctgcttctgatacatgcaaaatggaggagtttgtgaatcagcaaagactaattgaagcggatgcatcaaatgcttcacttaatcagcctcacattttcgctgtatcttctgataataaagatatagagcgtgaatgtcctagcccaactccaaggtctgaatgcaaggaatctcttatggagaactcagtattaacatcagcggcgcctgaaattcttgtaagatcttctgcatccgcttctgatacatgcaaaatggaggagtttgtgaatcagcaaagaccaattgaagtggatgcatcgaatgcttcacttaatcagcctcctcgttgtcacattttcactgcttcttccaataatcaagatattgagcgtgaatgtcctagctcaactccaaggtctgacagtaaggaaccttttgtggacaacttagtgttaacatcagcagtgcctggaaatctactgacaagttctgcagttgcctctgatacatgcaagatggagatcttgaataagaaaataacacttgaagcagatgcatcaaatgctccacttaatcagcctcctctctctagcgttttcgcttcatcttctggtgatgaccaagataatgtgtgtggacgtcctagtccaaatccaagacctgagggtgagcagcctctcatgggtaactcagggttaatatcaacagtgcctcgaaatctaacttctacttctgcatctgcttccgacatatgcaaaatggagatcttgaatgagaaaagaacacttgaagcaaacccatcaaatggtttgattactcaatctcctcaacccaaggttttccttgtaccatctcctgatatcctagagtgtgaattttctagtgaaacacctaggcatgagtttaaggaacctgttgcggacagctctgggttaacttcagcagcacatgaaaatttagggactaagccacatgtccactcaccagatgcctttgtaccaccaaagtctggtgctctaactggggaattaggtgacacgaaatcagattttaaaggtgaagaaactattcaaaaagagcaatattttggaagtgaatctattgccgctacaagagagaatttgttaattgatccttcctctggtgttgagtcgatagatgtgtcagatgtactggattctttaatggaagaaaggagtggaacttcgtacatgccaggatcaatagaggacttcctagccgaagaagaaccacaatactctagccctatcgcattatctccttggggtgaacctagttactaccaaggtgatgctgttgattctgcgctatggggtactcaagatttgatcaatgatatgtggtcattgctttcaccaagacctatgctccaaccttcatctggtattggaactgaggggaaggaaacttttgatatcaacgaggtggctgtgacccatgttagtagtgattattttcaaaaaggatcaatgtttggggaggaaaatgtgaaccaggcaaacttgagtgctgctgcagactggatgctgcctgagcaggtcccatcaataccaaatggtatgtcaacatcgtcagtagatgagagcaccatagttttaggttctcagccatcaaccaatcagagcttagactggggtggtactacatggagtattggccagaatgccagcgtgtatagcaatgaaaaagcagagccctcgagtaaaagctattgggaagaaccaaggaagcaggaaaccgccaaatccagtgtttctatttcaggacaggccattggaaacaacaagggcttggaccctcgtgataatgctgctaatcggggcagccggctgagtcatcatcaccgtggcaggtactcccaaatcagtgaatcttggctacttagttcaagtcactctaggagtaggtctgatagatttggcagcggtgggtcatcaagatcaacttcaaaggggcaatctaggggctaatgtaaattgtcaagtgcaggagagaaatgatgcatcttgtagctaacctgcatccttgatctctgcagcaggaatagttttctttttaaaattctttgtcatatctttgcagtttgtataggctaattacagtttagtccactcagactgtagcaaggagcatatatgtttagcatagaggtatttgactgcccattgcccaaggagtagattcagctcttgggcatggtctgtatcatcctgacattctgttggatggagctccaattgtaccaccggcatctctgttgacaccgaaacgcctgatgcgttggaaacaattatatctgattgattggtttaacttcgtggaatccctattttcgaagatcacgaaacgaca

SEQ ID NO: 112 - DNA, 5390 bp, Zea Mays
gctcctcgagtttacgatctcacgggccttcggccttccaacgctctgtcccacgagcccactaaaaaagtgctttggctaggcctgcggcaccgatggcccaagaagcacatgccaactgaagctcgactcccaacggtcggccgtagtatgagttgtttcacttgttcaaattccaatcgcggggcaagcaaaggaggaaagcaaccaaaggcatttcgcttctcctccgacaaatccatatccagaagatagcaccagtgcgtctcctcccaagctctcggatccaacccaatggaaggcgcggaggcgcttttccccggcgacggatgcggcggtgaccccatggacttctcgtggaccgctgacggggagaagcacccggacccggcggcttgcgccagccccggccgcgacgacgaggctacctcggcctcgaccccggttccttcgccgcaggagatggcggagtccatgattctcgtgcccgggccgcgcgtcgtcatgtctggactcaggctggctgattgccgttcagatgactgtgttctcttcattaatgctggtggtggtgcaatcgaaagctgtgatccctgtgtgaaggtttctggtgattcattctttgaaggaggggatgtgatagaaacaaatgagagcatagccgaaggtggtgattgtccatttatttatcactcagcaagatacggcagtttcagctacaagttcgacggtcttgcccccggagcttattttctagatctgcattttgctgaaattctatacacgtgtgggccaaaaggaattagcatgttcgatgtcctggtgcaggacgagaagatactgtctcagctcgatgtatatgctgtagttggagggaacagggcccttcaagtgcgtgatattagggttactgttgagatgaatggtgctgttatgatcaatttcaaaggagtaagaggaagtcccatggtttgtggtatctgtattcgcaaagcaccacttttatcagcaaactcggttacaaatggcaatgtcttgtgcaaaagatgttcatctgatattgatgtctcaactacacagactaggacaagtaaactgatctcaaagtatgagaagcagattgaggagctcaccagccaatgcactatgaagtccaatgagtgctatatggcatggtcttcagtagacactaccaacgtggagcttgggagactgaaaatagagcttcaccaaaagggtgctgaaatggagaatcttgtgcaaactcttggtagagagagcgaccaactaagaaatgtttctcgtaagtacaaaaatgacaagaaattgtgggttgctgctatatctaatttggaaaggaaaataaaggccatgaaacaagagcagcaattgttgtcccttgaagcacatgattgcgcgaatgcaattcctgatttgagcaagatgatcggggctgttaagggcctagttgcacagtgtgaagatttaaagttgaagtactatgaagagatggataagaggaagaaacttcataatattgttcaagagacaaaaggaaatatcagggttttttgtagatgccggcccttaagcaaagatgaggtgtcatcgggtcagaaatgtgtagtggattttgatggatccagtgatggtgacattgtaattacaaatggcggaactaaaaagacctttaagtttgatagagtcttcacgccaaaggatgatcaagatattgtgtatgccgatgcgtctccactagtcacatctgtcttagatggctacaatgtatgcatctttgcttacggacagacgggaacaggaaagacttttaccatggaagggactgagagtaataggggtgttaactacagaactctggaagaactgttcaatattgcagaggagaggaaagaaagcgtcacatatgacttatctgttagcgttcttgaggtttacaatgaacaaatcagagaccttcttgccacgtctccatctaaaaagctggagatcaagccaaacagtgaaggacaaaatcatgtccctgggttagtggaggccaaaattgagaacataaatgaggtttggaaagttttgcaaactggaagcaatgcaagggctgttggttcaaacaatgttaatgagcacagcagtcgctcccactgcatgctatgcatcacggtgagggctaagaaccagcttaatggagagtgtacaagtagtaagctttggcttgtagatttggctggaagtgagcgtttagccaagactgacgtgcaaggcgaacgacttaaggaagcacaaaatattaacagatcactttctgcattgggtgatgtcatttcagctcttgctacaaaaaacagccatataccctacagaaattctaaattgacacacttgctgcaagattctctaggaggagactcaaaagcattgatgtttgtgcaaattagcccatccgataatgatgtttcggaaacattgagttcactaaacttcgctagccgtgttcggcgtattgaattgggaccagcaaagaaacatgttgatactgctgaacttcaaaagaccaaacagacgcttgaaagagctaagcaagaactcaggcttaaggatgattctttgagaaagctagaagaaaacttacaaaatttggagagcaaagccaaagggaaagagcaactttgcaaaaacttgcaagagaaggtgaaagagctcgagggtcagttagattccaaggcacagtgtcaaataacatcagagaaacagcaacggcagctttctggaaaactaaaagagaaggaagaaatgtgtaatgtacttcagcagaagattgcggacttagaatgcaagcttagacaaccacaacaatcagaatctgaggttgcacttcttaagcaaacgatccaagagttggaggtcaagttgaaggaacaacaacatgaccgatcagccatggaattaagtatcaaagagatggagctaaggttcaaggaagaagaacaccagcgatctgttgcagaactaaagatcaaagagctggagctgaagctgaaggaacaggaacaccagcgatcagttgcggaactaaaggcaagagaaataggacatgagctgctggagactcagagaaccgagtcaatgcttcagattaagctaagagaacttgaaagcaaggcgaaagagcaggacacaaacatgacggcagtggtggagtcccgcgtcgtcgtcgcgactcctgtaaacgcgaaggtgatgagcgagaaggagaaccacgtcctgaggatctcaaactccctgaacaagcagctggctcacgtggagaacactcctgaggcccctgaagcggcttgcaacgagaggaagaggaaaggcgaggcgaggaacgcgtccatcggcggcggcgagcaagagaacactaacaacggtgggaggaagaggagcctgccagccgagcgcgaggcgaggctgaagaggaagtcgacggagcctcctccccaggtgaagaatctggtgaggtcgacggcgtcgtccagggcggctgccaaggcggcggcggcggcggctccgagctccagagccggcggcgccaagcagcaaccgggcggcgggaacaagaccagagggtgggttaggtagacgagatgatgatggtgattgcgtgtgttgtatgtgcaccggtggctggctcaacttttggctgagtcccactcactacattgctgcggtgatgaattagccagcttgtttacattgctcctgtgtctatgctgctgcattgtcgtttgtgatacttttgtaaaatttgaaagctatgttgccgcaacaggaaacaacagtgcgtgtgcgtcggggaaaacagaatttggctccacgcggcgagggtccgctacggtggcaaggcaacgcgcgcatggcatggagggccggagtcgggcctggtggtgacatgtttcaggctcagtgcacacctgtcccgtgcagtcgggcacccagcctggacgacggtctctatcacgcagacgtcagctaaacgctgcccagcccagccccagccccagctgctgcaggcagagacaaaagtcgggaacccacagcaaaccaaaccgtgtgctcctcttcgtttcggccgactcagccacgaaaagaaaaccccgggcgccacgcggaaaaccacgggacgacccgacgcctacctcccccgcgctccgctttattagcaaaagatcccagcagcagagcacaagctgccttgcgcttcggtgatcacgaggacaccaccaagacgacgcaggttcactggttcagcgaccggtttccgcgatgtgccgcgccacggcgatagagggcggcttcctccgcccgcccccgtcccggcgcctcgacatccgcgctttctacctccgcctctcctcctgctccgccacgacgcccgcggagctcacgctggcctaccacccggccatcgggggcgcggcgctgggactcaacggccgcgcgctcccgccagccgcgcccgccaaggtcacgctccgccgggtcgccgccgacgcgtacgcgagcgccgaccgcgtcgccgccgccgagggcgcgcggttcgaggtgctcgccgccgccgccggggaggaggtcgcggcggagggcgtcttctccgcgcggcgcgagggggggtggcgcgtggagtgccgccgggcgccggcctcgccggaggtgtgcgtcgcggaggtggtggtgctcgcggagggcggcgtgctgatgcgggacagggcccgcgcggccggccggggccggatgcggtgcggagccacccggctggaggggataccggaggaggacgccaccacgggcctcggcggctggtgccgctgcgagtgcgacgacgacgggtgggaggtggtcggggacgcggaggaggaggaggagcaggaggtcgagatggagacggtgcggtgggcgatggaggtgggcgtgtgggccgtgtgcctcggcgttggcctcctcgccacggccaggcgtttccggcggaagcgcgccttctggtgaccgccggcgccttctttgcttcggctgtcgtgtagtttcggaaattttgtacatgtttcgcggagatttcacgggcgtgcttttttctttgtttccagagatgatcaaatgaaccaagaccaattcgttccttttctccatcttctgcgtgtaccagccagtcccactgtctgacttgctcaatcgatcatcgctggttaattaaatagtacaaatgaaagctgccgtccccgtccacagtttcacattccaagctaaccccaaagaaaagtaccctctggtttcgacctcaaaggctcaaaccatccgagttttcataaaattcttgcaactacggcaaggacgat

SEQ ID NO: 113 - DNA, 5206 bp, Zea Mays
gtttcacttgttcaaattccaatcgcggggcaagcaaaggaggaaagcaaccaaaggcatttcgcttctcctccgacaaatccatatccagaagatagcaccagtgcgtctcctcccaagctctcggatccaacccaatggaaggcgcggaggcgcttttccccggcgacggatgcggcggtgaccccatggacttctcgtggaccgctgacggggagaagcacccggacccggcggcttgcgccagccccggccgcgacgacgaggctacctcggcctcgaccccggttccttcgccgcaggagatggcggagtccatgattctcgtgcccgggccgcgcgtcgtcatgtctggactcaggctggctgattgccgttcagatgactgtgttctcttcattaatgctggtggtggtgcaatcgaaagctgtgatccctgtgtgaaggtttctggtgattcattctttgaaggaggggatgtgatagaaacaaatgagagcatagccgaaggtggtgattgtccatttatttatcactcagcaagatacggcagtttcagctacaagttcgacggtcttgcccccggagcttattttctagatctgcattttgctgaaattctatacacgtgtgggccaaaaggaattagcatgttcgatgtcctggtgcaggacgagaagatactgtctcagctcgatgtatatgctgtagttggagggaacagggcccttcaagtgcgtgatattagggttactgttgagatgaatggtgctgttatgatcaatttcaaaggaagtgataatcttggtcttacactcgtggcagcaaactcggttacaaatggcaatgtcttgtgcaaaagatgttcatctgatattgatgtctcaactacacagactaggacaagtaaactgatctcaaagtatgagaagcagattgaggagctcaccagccaatgcactatgaagtccaatgagtgctatatggcatggtcttcagtagacactaccaacgtggagcttgggagactgaaaatagagcttcaccaaaagggtgctgaaatggagaatcttgtgcaaactcttggtagagagagcgaccaactaagaaatgtttctcgtaagtacaaaaatgacaagaaattgtgggttgctgctatatctaatttggaaaggaaaataaaggccatgaaacaagagcagcaattgttgtcccttgaagcacatgattgcgcgaatgcaattcctgatttgagcaagatgatcggggctgttaagggcctagttgcacagtgtgaagatttaaagttgaagtactatgaagagatggataagaggaagaaacttcataatattgttcaagagacaaaaggaaatatcagggttttttgtagatgccggcccttaagcaaagatgaggtgtcatcgggtcagaaatgtgtagtggattttgatggatccagtgatggtgacattgtaattacaaatggcggaactaaaaagacctttaagtttgatagagtcttcacgccaaaggatgatcaagatattgtgtatgccgatgcgtctccactagtcacatctgtcttagatggctacaatgtatgcatctttgcttacggacagacgggaacaggaaagacttttaccatggaagggactgagagtaataggggtgttaactacagaactctggaagaactgttcaatattgcagaggagaggaaagaaagcgtcacatatgacttatctgttagcgttcttgaggtttacaatgaacaaatcagagaccttcttgccacgtctccatctaaaaagctggagatcaagccaaacagtgaaggacaaaatcatgtccctgggttagtggaggccaaaattgagaacataaatgaggtttggaaagttttgcaaactggaagcaatgcaagggctgttggttcaaacaatgttaatgagcacagcagtcgctcccactgcatgctatgcatcacggtgagggctaagaaccagcttaatggagagtgtacaagtagtaagctttggcttgtagatttggctggaagtgagcgtttagccaagactgacgtgcaaggcgaacgacttaaggaagcacaaaatattaacagatcactttctgcattgggtgatgtcatttcagctcttgctacaaaaaacagccatataccctacagaaattctaaattgacacacttgctgcaagattctctaggaggagactcaaaagcattgatgtttgtgcaaattagcccatccgataatgatgtttcggaaacattgagttcactaaacttcgctagccgtgttcggcgtattgaattgggaccagcaaagaaacatgttgatactgctgaacttcaaaagaccaaacagacgcttgaaagagctaagcaagaactcaggcttaaggatgattctttgagaaagctagaagaaaacttacaaaatttggagagcaaagccaaagggaaagagcaactttgcaaaaacttgcaagagaaggtgaaagagctcgagggtcagttagattccaaggcacagtgtcaaataacatcagagaaacagcaacggcagctttctggaaaactaaaagagaaggaagaaatgtgtaatgtacttcagcagaagattgcggacttagaatgcaagcttagacaaccacaacaatcagaatctgaggttgcacttcttaagcaaacgatccaagagttggaggtcaagttgaaggaacaacaacatgaccgatcagccatggaattaagtatcaaagagatggagctaaggttcaaggaagaagaacaccagcgatctgttgcagaactaaagatcaaagagctggagctgaagctgaaggaacaggaacaccagcgatcagttgcggaactaaaggcaagagaaataggacatgagctgctggagactcagagaaccgagtcaatgcttcagattaagctaagagaacttgaaagcaaggcgaaagagcaggacacaaacatgacggcagtggtggagtcccgcgtcgtcgtcgcgactcctgtaaacgcgaaggtgatgagcgagaaggagaaccacgtcctgaggatctcaaactccctgaacaagcagctggctcacgtggagaacactcctgaggcccctgaagcggcttgcaacgagaggaagaggaaaggcgaggcgaggaacgcgtccatcggcggcggcgagcaagagaacactaacaacggtgggaggaagaggagcctgccagccgagcgcgaggcgaggctgaagaggaagtcgacggagcctcctccccaggtgaagaatctggtgaggtcgacggcgtcgtccagggcggctgccaaggcggcggcggcggcggctccgagctccagagccggcggcgccaagcagcaaccgggcggcgggaacaagaccagagggtgggttaggtagacgagatgatgatggtgattgcgtgtgttgtatgtgcaccggtggctggctcaacttttggctgagtcccactcactacattgctgcggtgatgaattagccagcttgtttacattgctcctgtgtctatgctgctgcattgtcgtttgtgatacttttgtaaaatttgaaagctatgttgccgcaacaggaaacaacagtgcgtgtgcgtcggggaaaacagaatttggctccacgcggcgagggtccgctacggtggcaaggcaacgcgcgcatggcatggagggccggagtcgggcctggtggtgacatgtttcaggctcagtgcacacctgtcccgtgcagtcgggcacccagcctggacgacggtctctatcacgcagacgtcagctaaacgctgcccagcccagccccagccccagctgctgcaggcagagacaaaagtcgggaacccacagcaaaccaaaccgtgtgctcctcttcgtttcggccgactcagccacgaaaagaaaaccccgggcgccacgcggaaaaccacgggacgacccgacgcctacctcccccgcgctccgctttattagcaaaagatcccagcagcagagcacaagctgccttgcgcttcggtgatcacgaggacaccaccaagacgacgcaggttcactggttcagcgaccggtttccgcgatgtgccgcgccacggcgatagagggcggcttcctccgcccgcccccgtcccggcgcctcgacatccgcgctttctacctccgcctctcctcctgctccgccacgacgcccgcggagctcacgctggcctaccacccggccatcgggggcgcggcgctgggactcaacggccgcgcgctcccgccagccgcgcccgccaaggtcacgctccgccgggtcgccgccgacgcgtacgcgagcgccgaccgcgtcgccgccgccgagggcgcgcggttcgaggtgctcgccgccgccgccggggaggaggtcgcggcggagggcgtcttctccgcgcggcgcgagggggggtggcgcgtggagtgccgccgggcgccggcctcgccggaggtgtgcgtcgcggaggtggtggtgctcgcggagggcggcgtgctgatgcgggacagggcccgcgcggccggccggggccggatgcggtgcggagccacccggctggaggggataccggaggaggacgccaccacgggcctcggcggctggtgccgctgcgagtgcgacgacgacgggtgggaggtggtcggggacgcggaggaggaggaggagcaggaggtcgagatggagacggtgcggtgggcgatggaggtgggcgtgtgggccgtgtgcctcggcgttggcctcctcgccacggccaggcgtttccggcggaagcgcgccttctggtgaccgccggcgccttctttgcttcggctgtcgtgtagtttcggaaattttgtacatgtttcgcggagatttcacgggcgtgcttttttctttgtttccagagatgatcaaatgaaccaagaccaattcgttccttttctccatcttctgcgtgtaccagccagtcccactgtctgacttgctcaatcgatcatcgctggttaattaaatagtacaaatgaaagctgccgtccccgtccacagtttcacattccaagctaaccccaaagaaaagtaccctctggtttcgacctcaaaggctcaaaccatccgagttttcataaaattcttgcaactacggcaaggacgat

SEQ ID NO: 114 - DNA, 5171 bp, Zea Mays
caaccaaaggcatttcgcttctcctccgacaaatccatatccagaagatagcaccagtgcgtctcctcccaagctctcggatccaacccaatggaaggcgcggaggcgcttttccccggcgacggatgcggcggtgaccccatggacttctcgtggaccgctgacggggagaagcacccggacccggcggcttgcgccagccccggccgcgacgacgaggctacctcggcctcgaccccggttccttcgccgcaggagatggcggagtccatgattctcgtgcccgggccgcgcgtcgtcatgtctggactcaggctggctgattgccgttcagatgactgtgttctcttcattaatgctggtggtggtgcaatcgaaagctgtgatccctgtgtgaaggtttctggtgattcattctttgaaggaggggatgtgatagaaacaaatgagagcatagccgaaggtggtgattgtccatttatttatcactcagcaagatacggcagtttcagctacaagttcgacggtcttgcccccggagcttattttctagatctgcattttgctgaaattctatacacgtgtgggccaaaaggaattagcatgttcgatgtcctgatactgtctcagctcgatgtatatgctgtagttggagggaacagggcccttcaagtgcgtgatattagggttactgttgagatgaatggtgctgttatgatcaatttcaaaggagtaagaggaagtcccatggtttgtggtatctgtattcgcaaagcaccacttttatcagcaaactcggttacaaatggcaatgtcttgtgcaaaagatgttcatctgatattgatgtctcaactacacagactaggacaagtaaactgatctcaaagtatgagaagcagattgaggagctcaccagccaatgcactatgaagtccaatgagtgctatatggcatggtcttcagtagacactaccaacgtggagcttgggagactgaaaatagagcttcaccaaaagggtgctgaaatggagaatcttgtgcaaactcttggtagagagagcgaccaactaagaaatgtttctcgtaagtacaaaaatgacaagaaattgtgggttgctgctatatctaatttggaaaggaaaataaaggccatgaaacaagagcagcaattgttgtcccttgaagcacatgattgcgcgaatgcaattcctgatttgagcaagatgatcggggctgttaagggcctagttgcacagtgtgaagatttaaagttgaagtactatgaagagatggataagaggaagaaacttcataatattgttcaagagacaaaaggaaatatcagggttttttgtagatgccggcccttaagcaaagatgaggtgtcatcgggtcagaaatgtgtagtggattttgatggatccagtgatggtgacattgtaattacaaatggcggaactaaaaagacctttaagtttgatagagtcttcacgccaaaggatgatcaagatattgtgtatgccgatgcgtctccactagtcacatctgtcttagatggctacaatgtatgcatctttgcttacggacagacgggaacaggaaagacttttaccatggaagggactgagagtaataggggtgttaactacagaactctggaagaactgttcaatattgcagaggagaggaaagaaagcgtcacatatgacttatctgttagcgttcttgaggtttacaatgaacaaatcagagaccttcttgccacgtctccatctaaaaagctggagatcaagccaaacagtgaaggacaaaatcatgtccctgggttagtggaggccaaaattgagaacataaatgaggtttggaaagttttgcaaactggaagcaatgcaagggctgttggttcaaacaatgttaatgagcacagcagtcgctcccactgcatgctatgcatcacggtgagggctaagaaccagcttaatggagagtgtacaagtagtaagctttggcttgtagatttggctggaagtgagcgtttagccaagactgacgtgcaaggcgaacgacttaaggaagcacaaaatattaacagatcactttctgcattgggtgatgtcatttcagctcttgctacaaaaaacagccatataccctacagaaattctaaattgacacacttgctgcaagattctctaggaggagactcaaaagcattgatgtttgtgcaaattagcccatccgataatgatgtttcggaaacattgagttcactaaacttcgctagccgtgttcggcgtattgaattgggaccagcaaagaaacatgttgatactgctgaacttcaaaagaccaaacagacgcttgaaagagctaagcaagaactcaggcttaaggatgattctttgagaaagctagaagaaaacttacaaaatttggagagcaaagccaaagggaaagagcaactttgcaaaaacttgcaagagaaggtgaaagagctcgagggtcagttagattccaaggcacagtgtcaaataacatcagagaaacagcaacggcagctttctggaaaactaaaagagaaggaagaaatgtgtaatgtacttcagcagaagattgcggacttagaatgcaagcttagacaaccacaacaatcagaatctgaggttgcacttcttaagcaaacgatccaagagttggaggtcaagttgaaggaacaacaacatgaccgatcagccatggaattaagtatcaaagagatggagctaaggttcaaggaagaagaacaccagcgatctgttgcagaactaaagatcaaagagctggagctgaagctgaaggaacaggaacaccagcgatcagttgcggaactaaaggcaagagaaataggacatgagctgctggagactcagagaaccgagtcaatgcttcagattaagctaagagaacttgaaagcaaggcgaaagagcaggacacaaacatgacggcagtggtggagtcccgcgtcgtcgtcgcgactcctgtaaacgcgaaggtgatgagcgagaaggagaaccacgtcctgaggatctcaaactccctgaacaagcagctggctcacgtggagaacactcctgaggcccctgaagcggcttgcaacgagaggaagaggaaaggcgaggcgaggaacgcgtccatcggcggcggcgagcaagagaacactaacaacggtgggaggaagaggagcctgccagccgagcgcgaggcgaggctgaagaggaagtcgacggagcctcctccccaggtgaagaatctggtgaggtcgacggcgtcgtccagggcggctgccaaggcggcggcggcggcggctccgagctccagagccggcggcgccaagcagcaaccgggcggcgggaacaagaccagagggtgggttaggtagacgagatgatgatggtgattgcgtgtgttgtatgtgcaccggtggctggctcaacttttggctgagtcccactcactacattgctgcggtgatgaattagccagcttgtttacattgctcctgtgtctatgctgctgcattgtcgtttgtgatacttttgtaaaatttgaaagctatgttgccgcaacaggaaacaacagtgcgtgtgcgtcggggaaaacagaatttggctccacgcggcgagggtccgctacggtggcaaggcaacgcgcgcatggcatggagggccggagtcgggcctggtggtgacatgtttcaggctcagtgcacacctgtcccgtgcagtcgggcacccagcctggacgacggtctctatcacgcagacgtcagctaaacgctgcccagcccagccccagccccagctgctgcaggcagagacaaaagtcgggaacccacagcaaaccaaaccgtgtgctcctcttcgtttcggccgactcagccacgaaaagaaaaccccgggcgccacgcggaaaaccacgggacgacccgacgcctacctcccccgcgctccgctttattagcaaaagatcccagcagcagagcacaagctgccttgcgcttcggtgatcacgaggacaccaccaagacgacgcaggttcactggttcagcgaccggtttccgcgatgtgccgcgccacggcgatagagggcggcttcctccgcccgcccccgtcccggcgcctcgacatccgcgctttctacctccgcctctcctcctgctccgccacgacgcccgcggagctcacgctggcctaccacccggccatcgggggcgcggcgctgggactcaacggccgcgcgctcccgccagccgcgcccgccaaggtcacgctccgccgggtcgccgccgacgcgtacgcgagcgccgaccgcgtcgccgccgccgagggcgcgcggttcgaggtgctcgccgccgccgccggggaggaggtcgcggcggagggcgtcttctccgcgcggcgcgagggggggtggcgcgtggagtgccgccgggcgccggcctcgccggaggtgtgcgtcgcggaggtggtggtgctcgcggagggcggcgtgctgatgcgggacagggcccgcgcggccggccggggccggatgcggtgcggagccacccggctggaggggataccggaggaggacgccaccacgggcctcggcggctggtgccgctgcgagtgcgacgacgacgggtgggaggtggtcggggacgcggaggaggaggaggagcaggaggtcgagatggagacggtgcggtgggcgatggaggtgggcgtgtgggccgtgtgcctcggcgttggcctcctcgccacggccaggcgtttccggcggaagcgcgccttctggtgaccgccggcgccttctttgcttcggctgtcgtgtagtttcggaaattttgtacatgtttcgcggagatttcacgggcgtgcttttttctttgtttccagagatgatcaaatgaaccaagaccaattcgttccttttctccatcttctgcgtgtaccagccagtcccactgtctgacttgctcaatcgatcatcgctggttaattaaatagtacaaatgaaagctgccgtccccgtccacagtttcacattccaagctaaccccaaagaaaagtaccctctggtttcgacctcaaaggctcaaaccatccgagttttcataaaattcttgcaactacggcaaggacgat

SEQ ID NO: 115 - DNA, 5180 bp, Zea Mays
gcatttcgcttctcctccgacaaatccatatccagaagatagcaccagtgcgtctcctcccaagctctcggatccaacccaatggaaggcgcggaggcgcttttccccggcgacggatgcggcggtgaccccatggacttctcgtggaccgctgacggggagaagcacccggacccggcggcttgcgccagccccggccgcgacgacgaggctacctcggcctcgaccccggttccttcgccgcaggagatggcggagtccatgattctcgtgcccgggccgcgcgtcgtcatgtctggactcaggctggctgattgccgttcagatgactgtgttctcttcattaatgctggtggtggtgcaatcgaaagctgtgatccctgtgtgaaggtttctggtgattcattctttgaaggaggggatgtgatagaaacaaatgagagcatagccgaaggtggtgattgtccatttatttatcactcagcaagatacggcagtttcagctacaagttcgacggtcttgcccccggagcttattttctagatctgcattttgctgaaattctatacacgtgtgggccaaaaggaattagcatgttcgatgtcctggtgcaggacgagaagatactgtctcagctcgatgtatatgctgtagttggagggaacagggcccttcaagtgcgtgatattagggttactgttgagatgaatggtgctgttatgatcaatttcaaaggagtaagaggaagtcccatggtttgtggtatctgtattcgcaaagcaccacttttatcagcagcaaactcggttacaaatggcaatgtcttgtgcaaaagatgttcatctgatattgatgtctcaactacacagactaggacaagtaaactgatctcaaagtatgagaagcagattgaggagctcaccagccaatgcactatgaagtccaatgagtgctatatggcatggtcttcagtagacactaccaacgtggagcttgggagactgaaaatagagcttcaccaaaagggtgctgaaatggagaatcttgtgcaaactcttggtagagagagcgaccaactaagaaatgtttctcgtaagtacaaaaatgacaagaaattgtgggttgctgctatatctaatttggaaaggaaaataaaggccatgaaacaagagcagcaattgttgtcccttgaagcacatgattgcgcgaatgcaattcctgatttgagcaagatgatcggggctgttaagggcctagttgcacagtgtgaagatttaaagttgaagtactatgaagagatggataagaggaagaaacttcataatattgttcaagagacaaaaggaaatatcagggttttttgtagatgccggcccttaagcaaagatgaggtgtcatcgggtcagaaatgtgtagtggattttgatggatccagtgatggtgacattgtaattacaaatggcggaactaaaaagacctttaagtttgatagagtcttcacgccaaaggatgatcaagatattgtgtatgccgatgcgtctccactagtcacatctgtcttagatggctacaatgtatgcatctttgcttacggacagacgggaacaggaaagacttttaccatggaagggactgagagtaataggggtgttaactacagaactctggaagaactgttcaatattgcagaggagaggaaagaaagcgtcacatatgacttatctgttagcgttcttgaggtttacaatgaacaaatcagagaccttcttgccacgtctccatctaaaaagctggagatcaagccaaacagtgaaggacaaaatcatgtccctgggttagtggaggccaaaattgagaacataaatgaggtttggaaagttttgcaaactggaagcaatgcaagggctgttggttcaaacaatgttaatgagcacagcagtcgctcccactgcatgctatgcatcacggtgagggctaagaaccagcttaatggagagtgtacaagtagtaagctttggcttgtagatttggctggaagtgagcgtttagccaagactgacgtgcaaggcgaacgacttaaggaagcacaaaatattaacagatcactttctgcattgggtgatgtcatttcagctcttgctacaaaaaacagccatataccctacagaaattctaaattgacacacttgctgcaagattctctaggaggagactcaaaagcattgatgtttgtgcaaattagcccatccgataatgatgtttcggaaacattgagttcactaaacttcgctagccgtgttcggcgtattgaattgggaccagcaaagaaacatgttgatactgctgaacttcaaaagaccaaacagacgcttgaaagagctaagcaagaactcaggcttaaggatgattctttgagaaagctagaagaaaacttacaaaatttggagagcaaagccaaagggaaagagcaactttgcaaaaacttgcaagagaaggtgaaagagctcgagggtcagttagattccaaggcacagtgtcaaataacatcagagaaacagcaacggcagctttctggaaaactaaaagagaaggaagaaatgtgtaatgtacttcagcagaagattgcggacttagaatgcaagcttagacaaccacaacaatcagaatctgaggttgcacttcttaagcaaacgatccaagagttggaggtcaagttgaaggaacaacaacatgaccgatcagccatggaattaagtatcaaagagatggagctaaggttcaaggaagaagaacaccagcgatctgttgcagaactaaagatcaaagagctggagctgaagctgaaggaacaggaacaccagcgatcagttgcggaactaaaggcaagagaaataggacatgagctgctggagactcagagaaccgagtcaatgcttcagattaagctaagagaacttgaaagcaaggcgaaagagcaggacacaaacatgacggcagtggtggagtcccgcgtcgtcgtcgcgactcctgtaaacgcgaaggtgatgagcgagaaggagaaccacgtcctgaggatctcaaactccctgaacaagcagctggctcacgtggagaacactcctgaggcccctgaagcggcttgcaacgagaggaagaggaaaggcgaggcgaggaacgcgtccatcggcggcggcgagcaagagaacactaacaacggtgggaggaagaggagcctgccagccgagcgcgaggcgaggctgaagaggaagtcgacggagcctcctccccaggtgaagaatctggtgaggtcgacggcgtcgtccagggcggctgccaaggcggcggcggcggcggctccgagctccagagccggcggcgccaagcagcaaccgggcggcgggaacaagaccagagggtgggttaggtagacgagatgatgatggtgattgcgtgtgttgtatgtgcaccggtggctggctcaacttttggctgagtcccactcactacattgctgcggtgatgaattagccagcttgtttacattgctcctgtgtctatgctgctgcattgtcgtttgtgatacttttgtaaaatttgaaagctatgttgccgcaacaggaaacaacagtgcgtgtgcgtcggggaaaacagaatttggctccacgcggcgagggtccgctacggtggcaaggcaacgcgcgcatggcatggagggccggagtcgggcctggtggtgacatgtttcaggctcagtgcacacctgtcccgtgcagtcgggcacccagcctggacgacggtctctatcacgcagacgtcagctaaacgctgcccagcccagccccagccccagctgctgcaggcagagacaaaagtcgggaacccacagcaaaccaaaccgtgtgctcctcttcgtttcggccgactcagccacgaaaagaaaaccccgggcgccacgcggaaaaccacgggacgacccgacgcctacctcccccgcgctccgctttattagcaaaagatcccagcagcagagcacaagctgccttgcgcttcggtgatcacgaggacaccaccaagacgacgcaggttcactggttcagcgaccggtttccgcgatgtgccgcgccacggcgatagagggcggcttcctccgcccgcccccgtcccggcgcctcgacatccgcgctttctacctccgcctctcctcctgctccgccacgacgcccgcggagctcacgctggcctaccacccggccatcgggggcgcggcgctgggactcaacggccgcgcgctcccgccagccgcgcccgccaaggtcacgctccgccgggtcgccgccgacgcgtacgcgagcgccgaccgcgtcgccgccgccgagggcgcgcggttcgaggtgctcgccgccgccgccggggaggaggtcgcggcggagggcgtcttctccgcgcggcgcgagggggggtggcgcgtggagtgccgccgggcgccggcctcgccggaggtgtgcgtcgcggaggtggtggtgctcgcggagggcggcgtgctgatgcgggacagggcccgcgcggccggccggggccggatgcggtgcggagccacccggctggaggggataccggaggaggacgccaccacgggcctcggcggctggtgccgctgcgagtgcgacgacgacgggtgggaggtggtcggggacgcggaggaggaggaggagcaggaggtcgagatggagacggtgcggtgggcgatggaggtgggcgtgtgggccgtgtgcctcggcgttggcctcctcgccacggccaggcgtttccggcggaagcgcgccttctggtgaccgccggcgccttctttgcttcggctgtcgtgtagtttcggaaattttgtacatgtttcgcggagatttcacgggcgtgcttttttctttgtttccagagatgatcaaatgaaccaagaccaattcgttccttttctccatcttctgcgtgtaccagccagtcccactgtctgacttgctcaatcgatcatcgctggttaattaaatagtacaaatgaaagctgccgtccccgtccacagtttcacattccaagctaaccccaaagaaaagtaccctctggtttcgacctcaaaggctcaaaccatccgagttttcataaaattcttgcaactacggcaaggacgat

SEQ ID NO: 116 - DNA, 2750 bp, Zea Mays
ccagtccctcgcagccaccacccaccgccgagactgcctcacggaccccaccagtacggacccacacgtcatcgggagtaccgcaggatgatgtaagaaaggagactcaaactatgagcttgatagatcaccctaatgtcatcaggttgcatatcccgatggttttgaggagccaattattgcctctattctaaaggaaacactcaaagctctagactacctccataggcaaggacatattcatcgtgatgtgaaggcaggtaatatccttattgataatcctggtgtagtcaagctcggggactttggtgtctctgcttgcatgtttgatagaggcgatagacaaagggctaggaatacatttgttggaacaccatgctggatggcaccagaagttctccagcctggaactggatataatttcaaagctgatatatggtcgtttggaataactgcactagagctggcacatggacatgctcccttttcgaagtaccctcccatgaaggttcttctcatgacgctccaaaatgctcctccaggtcttgactatgaccgtgataaaagattttcaaagtccttcaaggaaatggttgcgatgtgcttggtgaaagatcaaacgaagaggccaacagctgaaaaattacttaagcattcttttttcaagaatgcaaaacctccggagctaactgttaagaacattttaactgatttgccccctctttgggaccgtgtaaaggcactccagctaaaggatgcagcacaactagctttgaagagaatgccttcttcagaacaagaagcactttctatgagtgagtaccaacgaggtgtcagtgcatggaacttcgatattgaggatctaaaggctcaggcatcactgatatgtgatgatgatccacctgaaataaaagaagacgatgacactggtagaataactgacattgataaggatacatcttctgacgattattttggaaagacagcaccatcgaatggaaataactgcagtgatcgttcttctgtgccagcaaatcctggtcaaaatggtcccgaaataaatgaaatattgtcttccaacaatgggaatgcctacagtgaaaggaagcctgatggacgtaaaaacccagaatcagaaaatgattcattgccctcgacgtcgaagcatgatgctgatgggaaagattatagatgtgatttcaggcaaaaacagaggacatactcaggtccagttctgcaatctggtccgaataatagttcgatgactgaaaggggccacattattgaaagggatgcaggagttcaatctgtatctgataaacaaaagaatggtacaagaagagccaataatcttagtggtcctttgtcacttccaactcgtgcttctgcaaatagtctttcaagagccaataatcttagtggccctctgtcacttccaactcgtgcttctgcaaatagtctttctgctcctattcgatcttctgcaggttatgtaggctctttgggtgataaacctaagcgcactatggtggaaattaaaggccgcttctcagtgacatctgagaatgtggatcttgcaaaggttcaagaaattccagggagcagtgcctcacgtaaattgcaagaggggccttcactgagaaaatcagccagtgttggtgattggtcagcgaatgataagacaacgtctactaatcatcaaaggaaggaactctgcaatagctctgtatctacatcaattctgattccgcatcttcaaaaccttgtgaagcaaactgcattccagcaagatctgattacgaacctactaagtagcttgcaacaaaatgagagagtcgatgcagctcagtcaagagtccagagcacgacgagtgatacagtggttgaagctgctactgctgagagagaacactcgttacttgttaaaatttttgagttacaatctaggatgatttctttgactgacgaattaattgcggcaaagctgaaacatgttcagctgcaagaagagctaaatgtactctactgccaagaagaaatcctggatatgagagaggacgagagcgaagaagcatgatgcggtggagcctgcccccctttttttactactactactgagggggactaaaagccacatgctctaagcccgtgcaattgaggcttggctaactggctgcatacaatacaaggactcgaaggatcattggccaactccgggtgcaatcgaagaacctgcaatgagtttgatggagcggggtttatgatcgttggcctcggatttgaactgttatgtatattcagtcgacccgttcgatttctgactcgggtttggtttgttcagtgagcttttaaggcgtcttgcgatgcgcatctacttgatcattaagatggctatgacgccagcctctaatatatactactagtggtagtaataggtatagcgtccgtatagtaccattgtacttgtacctcagaagtcagcaagactgcgacaataattgcatcgcgtctgtagacagcggaatgcatgagtagctactgtagtacaatggagtgtccccgcatccaggctttgggctgggaaccctgcctgtgctgctgtgagcagtcatgttgtcacctgcgcccattacccgtacatgcgcaatcataaacaaatcagctagctcatcaataatgcactcacggacgggagggaatccaccttgtgcagatggctgcgcaaccatccagcccagcccaggttcagc

SEQ ID NO: 117 - DNA, 2418 bp, Zea Mays
actccttttttctcctctcaatctcccccgtctcccccctccctctcccttgcttccctctccagtccccagcgcgcgcgacacgacacgggccaatcacccagccgccgccgccggcgatcgccggaactcggcgccggtgcttccgagcacgctccgctcggaaccatggtgaggagcgggagcatacggcggtccgcggtgcccgcgcctatgccggcgccggcgtttaccgtgtctcccgccgactacaggctgctggaggaagtgggatacggcgccaacgccgtcgtataccgcgcggagttcattcccaccggccggacggtcgctgtgaagtgtctggatctcgatcgggtcaacagtaacctcgatgatgtaagaaaggagactcaaactatgagcttgatagatcaccctaatgtcatcaggtcttactgctcatttgttgtgggtcataatctttgggtggtaatgccattcatgtcagagggttcatgcttgcacctaatgaaggttgcatatcccgatggttttgaggagccaattattgcctctattctaaaggaaacactcaaagctctagactacctccataggcaaggacatattcatcgtgatgtgaaggcaggtaatatccttattgataatcctggtgtagtcaagctcggggactttggtgtctctgcttgcatgtttgatagaggcgatagacaaagggctaggaatacatttgttggaacaccatgctggatggcaccagaagttctccagcctggaactggatataatttcaaagctgatatatggtcgtttggaataactgcactagagctggcacatggacatgctcccttttcgaagtaccctcccatgaaggttcttctcatgacgctccaaaatgctcctccaggtcttgactatgaccgtgataaaagattttcaaagtccttcaaggaaatggttgcgatgtgcttggtgaaagatcaaacgaagaggccaacagctgaaaaattacttaagcattcttttttcaagaatgcaaaacctccggagctaactgttaagaacattttaactgatttgccccctctttgggaccgtgtaaaggcactccagctaaaggatgcagcacaactagctttgaagagaatgccttcttcagaacaagaagcactttctatgagtgagtaccaacgaggtgtcagtgcatggaacttcgatattgaggatctaaaggctcaggcatcactgatatgtgatgatgatccacctgaaataaaagaagacgatgacactggtagaataactgacattgataaggatacatcttctgacgattattttggaaagacagcaccatcgaatggaaataactgcagtgatcgttcttctgtgccagcaaatcctggtcaaaatggtcccgaaataaatgaaatattgtcttccaacaatgggaatgcctacagtgaaaggaagcctgatggacgtaaaaacccagaatcagaaaatgattcattgccctcgacgtcgaagcatgatgctgatgggaaagattatagatgtgatttcaggcaaaaacagaggacatactcaggtccagttctgcaatctggtccgaataatagttcgatgactgaaaggggccacattattgaaagggatgcaggagttcaatctgtatctgataaacaaaagaatggtacaagaagagccaataatcttagtggtcctttgtcacttccaactcgtgcttctgcaaatagtctttcaagagccaataatcttagtggccctctgtcacttccaactcgtgcttctgcaaatagtctttctgctcctattcgatcttctgcaggttatgtaggctctttgggtgataaacctaagcgcactatggtggaaattaaaggccgcttctcagtgacatctgagaatgtggatcttgcaaaggttcaagaaattccagggagcagtgcctcacgtaaattgcaagaggggccttcactgagaaaatcagccagtgttggtgattggtcagcgaatgataagacaacgtctactaatcatcaaaggaaggaactctgcaatagctctgtatctacatcaattctgattccgcatcttcaaaaccttgtgaagcaaactgcattccagcaagatctgattacgaacctactaagtagcttgcaacaaaatgagagagtcgatgcagctcagtcaagagtccagagcacgacgagtgatacagtggttgaagctgctactgctgagagagaacactcgttacttgttaaaatttttgagttacaatctaggatgatttctttgactgacgaattaattgcggcaaagctgaaacatgttcagttgcttctagagatccttttcccagaccagtaagatactgcatccttg

SEQ ID NO: 118 - DNA, 2415 bp, Zea Mays
actccttttttctcctctcaatctcccccgtctcccccctccctctcccttgcttccctctccagtccccagcgcgcgcgacacgacacgggccaatcacccagccgccgccgccggcgatcgccggaactcggcgccggtgcttccgagcacgctccgctcggaaccatggtgaggagcgggagcatacggcggtccgcggtgcccgcgcctatgccggcgccggcgtttaccgtgtctcccgccgactacaggctgctggaggaagtgggatacggcgccaacgccgtcgtataccgcgcggagttcattcccaccggccggacggtcgctgtgaagtgtctggatctcgatcgggtcaacagtaacctcgatgatgtaagaaaggagactcaaactatgagcttgatagatcaccctaatgtcatcaggtcttactgctcatttgttgtgggtcataatctttgggtggtaatgccattcatgtcagagggttcatgcttgcacctaatgaaggttgcatatcccgatggttttgaggagccaattattgcctctattctaaaggaaacactcaaagctctagactacctccataggcaaggacatattcatcgtgatgtgaaggcaggtaatatccttattgataatcctggtgtagtcaagctcggggactttggtgtctctgcttgcatgtttgatagaggcgatagacaaagggctaggaatacatttgttggaacaccatgctggatggcaccagaagttctccagcctggaactggatataatttcaaagctgatatatggtcgtttggaataactgcactagagctggcacatggacatgctcccttttcgaagtaccctcccatgaaggttcttctcatgacgctccaaaatgctcctccaggtcttgactatgaccgtgataaaagattttcaaagtccttcaaggaaatggttgcgatgtgcttggtgaaagatcaaacgaagaggccaacagctgaaaaattacttaagcattcttttttcaagaatgcaaaacctccggagctaactgttaagaacattttaactgatttgccccctctttgggaccgtgtaaaggcactccagctaaaggatgcagcacaactagctttgaagagaatgccttcttcagaacaagaagcactttctatgagtgagtaccaacgaggtgtcagtgcatggaacttcgatattgaggatctaaaggctcaggcatcactgatatgtgatgatgatccacctgaaataaaagaagacgatgacactggtagaataactgacattgataaggatacatcttctgacgattattttggaaagacagcaccatcgaatggaaataactgcagtgatcgttcttctgtgccagcaaatcctggtcaaaatggtcccgaaataaatgaaatattgtcttccaacaatgggaatgcctacagtgaaaggaagcctgatggacgtaaaaacccagaatcagaaaatgattcattgccctcgacgtcgaagcatgatgctgatgggaaagattatagatgtgatttcaggcaaaaacagaggacatactcaggtccagttctgcaatctggtccgaataatagttcgatgactgaaaggggccacattattgaaagggatgcaggagttcaatctgtatctgataaacaaaagaatggtacaagaagagccaataatcttagtggtcctttgtcacttccaactcgtgcttctgcaaatagtctttcaagagccaataatcttagtggccctctgtcacttccaactcgtgcttctgcaaatagtctttctgctcctattcgatcttctgcaggttatgtaggctctttgggtgataaacctaagcgcactatggtggaaattaaaggccgcttctcagtgacatctgagaatgtggatcttgcaaaggttcaagaaattccagggagcagtgcctcacgtaaattgcaagaggggccttcactgagaaaatcagccagtgttggtgattggtcagcgaatgataagacaacgtctactaatcatcaaaggaaggaactctgcaatagctctgtatctacatcaattctgattccgcatcttcaaaaccttgtgaagcaaactgcattccagcaagatctgattacgaacctactaagtagcttgcaacaaaatgagagagtcgatgctcagtcaagagtccagagcacgacgagtgatacagtggttgaagctgctactgctgagagagaacactcgttacttgttaaaatttttgagttacaatctaggatgatttctttgactgacgaattaattgcggcaaagctgaaacatgttcagttgcttctagagatccttttcccagaccagtaagatactgcatccttg

SEQ ID NO: 119 - DNA, 3118 bp, Zea Mays
actccttttttctcctctcaatctcccccgtctcccccctccctctcccttgcttccctctccagtccccagcgcgcgcgacacgacacgggccaatcacccagccgccgccgccggcgatcgccggaactcggcgccggtgcttccgagcacgctccgctcggaaccatggtgaggagcgggagcatacggcggtccgcggtgcccgcgcctatgccggcgccggcgtttaccgtgtctcccgccgactacaggctgctggaggaagtgggatacggcgccaacgccgtcgtataccgcgcggagttcattcccaccggccggacggtcgctgtgaagtgtctggatctcgatcgggtcaacagtaacctcgatgatgtaagaaaggagactcaaactatgagcttgatagatcaccctaatgtcatcaggtcttactgctcatttgttgtgggtcataatctttgggtggtaatgccattcatgtcagagggttcatgcttgcacctaatgaaggttgcatatcccgatggttttgaggagccaattattgcctctattctaaaggaaacactcaaagctctagactacctccataggcaaggacatattcatcgtgatgtgaaggcaggtaatatccttattgataatcctggtgtagtcaagctcggggactttggtgtctctgcttgcatgtttgatagaggcgatagacaaagggctaggaatacatttgttggaacaccatgctggatggcaccagaagttctccagcctggaactggatataatttcaaagctgatatatggtcgtttggaataactgcactagagctggcacatggacatgctcccttttcgaagtaccctcccatgaaggttcttctcatgacgctccaaaatgctcctccaggtcttgactatgaccgtgataaaagattttcaaagtccttcaaggaaatggttgcgatgtgcttggtgaaagatcaaacgaagaggccaacagctgaaaaattacttaagcattcttttttcaagaatgcaaaacctccggagctaactgttaagaacattttaactgatttgccccctctttgggaccgtgtaaaggcactccagctaaaggatgcagcacaactagctttgaagagaatgccttcttcagaacaagaagcactttctatgagtgagtaccaacgaggtgtcagtgcatggaacttcgatattgaggatctaaaggctcaggcatcactgatatgtgatgatgatccacctgaaataaaagaagacgatgacactggtagaataactgacattgataaggatacatcttctgacgattattttggaaagacagcaccatcgaatggaaataactgcagtgatcgttcttctgtgccagcaaatcctggtcaaaatggtcccgaaataaatgaaatattgtcttccaacaatgggaatgcctacagtgaaaggaagcctgatggacgtaaaaacccagaatcagaaaatgattcattgccctcgacgtcgaagcatgatgctgatgggaaagattatagatgtgatttcaggcaaaaacagaggacatactcaggtccagttctgcaatctggtccgaataatagttcgatgactgaaaggggccacattattgaaagggatgcaggagttcaatctgtatctgataaacaaaagaatggtacaagaagagccaataatcttagtggtcctttgtcacttccaactcgtgcttctgcaaatagtctttcaagagccaataatcttagtggccctctgtcacttccaactcgtgcttctgcaaatagtctttctgctcctattcgatcttctgcaggttatgtaggctctttgggtgataaacctaagcgcactatggtggaaattaaaggccgcttctcagtgacatctgagaatgtggatcttgcaaaggttcaagaaattccagggagcagtgcctcacgtaaattgcaagaggggccttcactgagaaaatcagccagtgttggtgattggtcagcgaatgataagacaacgtctactaatcatcaaaggaaggaactctgcaatagctctgtatctacatcaattctgattccgcatcttcaaaaccttgtgaagcaaactgcattccagcaagatctgattacgaacctactaagtagcttgcaacaaaatgagagagtcgatgctcagtcaagagtccagagcacgacgagtgatacagtggttgaagctgctactgctgagagagaacactcgttacttgttaaaatttttgagttacaatctaggatgatttctttgactgacgaattaattgcggcaaagctgaaacatgttcagctgcaagaagagctaaatgtactctactgccaagaagaaatcctggatatgagagaggacgagagcgaagaagcatgatgcggtggagcctgcccccctttttttactactactactgagggggactaaaagccacatgctctaagcccgtgcaattgaggcttggctaactggctgcatacaatacaaggactcgaaggatcattggccaactccgggtgcaatcgaagaacctgcaatgagtttgatggagcggggtttatgatcgttggcctcggatttgaactgttatgtatattcagtcgacccgttcgatttctgactcgggtttggtttgttcagtgagcttttaaggcgtcttgcgatgcgcatctacttgatcattaagatggctatgacgccagcctctaatatatactactagtggtagtaataggtatagcgtccgtatagtaccattgtacttgtacctcagaagtcagcaagactgcgacaataattgcatcgcgtctgtagacagcggaatgcatgagtagctactgtagtacaatggagtgtccccgcatccaggctttgggctgggaaccctgcctgtgctgctgtgagcagtcatgttgtcacctgcgcccattacccgtacatgcgcaatcataaacaaatcagctagctcatcaataatgcactcacggacgggagggaatccaccttgtgcagatggctgcgcaaccatccagcccagcccaggttcagc

SEQ ID NO: 120 - DNA, 3046 bp, Zea Mays
actccttttttctcctctcaatctcccccgtctcccccctccctctcccttgcttccctctccagtccccagcgcgcgcgacacgacacgggccaatcacccagccgccgccgccggcgatcgccggaactcggcgccggtgcttccgagcacgctccgctcggaaccatggtgaggagcgggagcatacggcggtccgcggtgcccgcgcctatgccggcgccggcgtttaccgtgtctcccgccgactacaggctgctggaggaagtgggatacggcgccaacgccgtcgtataccgcgcggagttcattcccaccggccggacggtcgctgtgaagtgtctggatctcgatcgggtcaacagtaacctcgatgatgtaagaaaggagactcaaactatgagcttgatagatcaccctaatgtcatcaggtcttactgctcatttgttgtgggtcataatctttgggtggtaatgccattcatgtcagagggttcatgcttgcacctaatgaaggttgcatatcccgatggttttgaggagccaattattgcctctattctaaaggaaacactcaaagctctagactacctccataggcaaggacatattcatcgtgatgtgaaggcaggtaatatccttattgataatcctggtgtagtcaagctcggggactttggtgtctctgcttgcatgtttgatagaggcgatagacaaagggctaggaatacatttgttggaacaccatgctggatggcaccagaagttctccagcctggaactggatataatttcaaagctgatatatggtcgtttggaataactgcactagagctggcacatggacatgctcccttttcgaagtaccctcccatgaaggttcttctcatgacgctccaaaatgctcctccaggtcttgactatgaccgtgataaaagattttcaaagtccttcaaggaaatggttgcgatgtgcttggtgaaagatcaaacgaagaggccaacagctgaaaaattacttaagcattcttttttcaagaatgcaaaacctccggagctaactgttaagaacattttaactgatttgccccctctttgggaccgtgtaaaggcactccagctaaaggatgcagcacaactagctttgaagagaatgccttcttcagaacaagaagcactttctatgagtgagtaccaacgaggtgtcagtgcatggaacttcgatattgaggatctaaaggctcaggcatcactgatatgtgatgatgatccacctgaaataaaagaagacgatgacactggtagaataactgacattgataaggatacatcttctgacgattattttggaaagacagcaccatcgaatggaaataactgcagtgatcgttcttctgtgccagcaaatcctggtcaaaatggtcccgaaataaatgaaatattgtcttccaacaatgggaatgcctacagtgaaaggaagcctgatggacgtaaaaacccagaatcagaaaatgattcattgccctcgacgtcgaagcatgatgctgatgggaaagattatagatgtgatttcaggcaaaaacagaggacatactcaggagttcaatctgtatctgataaacaaaagaatggtacaagaagagccaataatcttagtggtcctttgtcacttccaactcgtgcttctgcaaatagtctttcaagagccaataatcttagtggccctctgtcacttccaactcgtgcttctgcaaatagtctttctgctcctattcgatcttctgcaggttatgtaggctctttgggtgataaacctaagcgcactatggtggaaattaaaggccgcttctcagtgacatctgagaatgtggatcttgcaaaggttcaagaaattccagggagcagtgcctcacgtaaattgcaagaggggccttcactgagaaaatcagccagtgttggtgattggtcagcgaatgataagacaacgtctactaatcatcaaaggaaggaactctgcaatagctctgtatctacatcaattctgattccgcatcttcaaaaccttgtgaagcaaactgcattccagcaagatctgattacgaacctactaagtagcttgcaacaaaatgagagagtcgatgctcagtcaagagtccagagcacgacgagtgatacagtggttgaagctgctactgctgagagagaacactcgttacttgttaaaatttttgagttacaatctaggatgatttctttgactgacgaattaattgcggcaaagctgaaacatgttcagctgcaagaagagctaaatgtactctactgccaagaagaaatcctggatatgagagaggacgagagcgaagaagcatgatgcggtggagcctgcccccctttttttactactactactgagggggactaaaagccacatgctctaagcccgtgcaattgaggcttggctaactggctgcatacaatacaaggactcgaaggatcattggccaactccgggtgcaatcgaagaacctgcaatgagtttgatggagcggggtttatgatcgttggcctcggatttgaactgttatgtatattcagtcgacccgttcgatttctgactcgggtttggtttgttcagtgagcttttaaggcgtcttgcgatgcgcatctacttgatcattaagatggctatgacgccagcctctaatatatactactagtggtagtaataggtatagcgtccgtatagtaccattgtacttgtacctcagaagtcagcaagactgcgacaataattgcatcgcgtctgtagacagcggaatgcatgagtagctactgtagtacaatggagtgtccccgcatccaggctttgggctgggaaccctgcctgtgctgctgtgagcagtcatgttgtcacctgcgcccattacccgtacatgcgcaatcataaacaaatcagctagctcatcaataatgcactcacggacgggagggaatccaccttgtgcagatggctgcgcaaccatccagcccagcccaggttcagc

SEQ ID NO: 121 - DNA, 3121 bp, Zea Mays
actccttttttctcctctcaatctcccccgtctcccccctccctctcccttgcttccctctccagtccccagcgcgcgcgacacgacacgggccaatcacccagccgccgccgccggcgatcgccggaactcggcgccggtgcttccgagcacgctccgctcggaaccatggtgaggagcgggagcatacggcggtccgcggtgcccgcgcctatgccggcgccggcgtttaccgtgtctcccgccgactacaggctgctggaggaagtgggatacggcgccaacgccgtcgtataccgcgcggagttcattcccaccggccggacggtcgctgtgaagtgtctggatctcgatcgggtcaacagtaacctcgatgatgtaagaaaggagactcaaactatgagcttgatagatcaccctaatgtcatcaggtcttactgctcatttgttgtgggtcataatctttgggtggtaatgccattcatgtcagagggttcatgcttgcacctaatgaaggttgcatatcccgatggttttgaggagccaattattgcctctattctaaaggaaacactcaaagctctagactacctccataggcaaggacatattcatcgtgatgtgaaggcaggtaatatccttattgataatcctggtgtagtcaagctcggggactttggtgtctctgcttgcatgtttgatagaggcgatagacaaagggctaggaatacatttgttggaacaccatgctggatggcaccagaagttctccagcctggaactggatataatttcaaagctgatatatggtcgtttggaataactgcactagagctggcacatggacatgctcccttttcgaagtaccctcccatgaaggttcttctcatgacgctccaaaatgctcctccaggtcttgactatgaccgtgataaaagattttcaaagtccttcaaggaaatggttgcgatgtgcttggtgaaagatcaaacgaagaggccaacagctgaaaaattacttaagcattcttttttcaagaatgcaaaacctccggagctaactgttaagaacattttaactgatttgccccctctttgggaccgtgtaaaggcactccagctaaaggatgcagcacaactagctttgaagagaatgccttcttcagaacaagaagcactttctatgagtgagtaccaacgaggtgtcagtgcatggaacttcgatattgaggatctaaaggctcaggcatcactgatatgtgatgatgatccacctgaaataaaagaagacgatgacactggtagaataactgacattgataaggatacatcttctgacgattattttggaaagacagcaccatcgaatggaaataactgcagtgatcgttcttctgtgccagcaaatcctggtcaaaatggtcccgaaataaatgaaatattgtcttccaacaatgggaatgcctacagtgaaaggaagcctgatggacgtaaaaacccagaatcagaaaatgattcattgccctcgacgtcgaagcatgatgctgatgggaaagattatagatgtgatttcaggcaaaaacagaggacatactcaggtccagttctgcaatctggtccgaataatagttcgatgactgaaaggggccacattattgaaagggatgcaggagttcaatctgtatctgataaacaaaagaatggtacaagaagagccaataatcttagtggtcctttgtcacttccaactcgtgcttctgcaaatagtctttcaagagccaataatcttagtggccctctgtcacttccaactcgtgcttctgcaaatagtctttctgctcctattcgatcttctgcaggttatgtaggctctttgggtgataaacctaagcgcactatggtggaaattaaaggccgcttctcagtgacatctgagaatgtggatcttgcaaaggttcaagaaattccagggagcagtgcctcacgtaaattgcaagaggggccttcactgagaaaatcagccagtgttggtgattggtcagcgaatgataagacaacgtctactaatcatcaaaggaaggaactctgcaatagctctgtatctacatcaattctgattccgcatcttcaaaaccttgtgaagcaaactgcattccagcaagatctgattacgaacctactaagtagcttgcaacaaaatgagagagtcgatgcagctcagtcaagagtccagagcacgacgagtgatacagtggttgaagctgctactgctgagagagaacactcgttacttgttaaaatttttgagttacaatctaggatgatttctttgactgacgaattaattgcggcaaagctgaaacatgttcagctgcaagaagagctaaatgtactctactgccaagaagaaatcctggatatgagagaggacgagagcgaagaagcatgatgcggtggagcctgcccccctttttttactactactactgagggggactaaaagccacatgctctaagcccgtgcaattgaggcttggctaactggctgcatacaatacaaggactcgaaggatcattggccaactccgggtgcaatcgaagaacctgcaatgagtttgatggagcggggtttatgatcgttggcctcggatttgaactgttatgtatattcagtcgacccgttcgatttctgactcgggtttggtttgttcagtgagcttttaaggcgtcttgcgatgcgcatctacttgatcattaagatggctatgacgccagcctctaatatatactactagtggtagtaataggtatagcgtccgtatagtaccattgtacttgtacctcagaagtcagcaagactgcgacaataattgcatcgcgtctgtagacagcggaatgcatgagtagctactgtagtacaatggagtgtccccgcatccaggctttgggctgggaaccctgcctgtgctgctgtgagcagtcatgttgtcacctgcgcccattacccgtacatgcgcaatcataaacaaatcagctagctcatcaataatgcactcacggacgggagggaatccaccttgtgcagatggctgcgcaaccatccagcccagcccaggttcagc

SEQ ID NO: 122 - DNA, 3114 bp, Zea Mays
actccttttttctcctctcaatctcccccgtctcccccctccctctcccttgcttccctctccagtccccagcgcgcgcgacacgacacgggccaatcacccagccgccgccgccggcgatcgccggaactcggcgccggtgcttccgagcacgctccgctcggaaccatggtgaggagcgggagcatacggcggtccgcggtgcccgcgcctatgccggcgccggcgtttaccgtgtctcccgccgactacaggctgctggaggaagtgggatacggcgccaacgccgtcgtataccgcgcggagttcattcccaccggccggacggtcgctgtgaagtgtctggatctcgatcgggtcaacagtaacctcgatgatgtaagaaaggagactcaaactatgagcttgatagatcaccctaatgtcatcaggtcttactgctcatttgttgtgggtcataatctttgggtggtaatgccattcatgtcagagggttcatgcttgcacctaatgaaggttgcatatcccgatggttttgaggagccaattattgcctctattctaaaggaaacactcaaagctctagactacctccataggcaaggacatattcatcgtgatgtgaaggtaatatccttattgataatcctggtgtagtcaagctcggggactttggtgtctctgcttgcatgtttgatagaggcgatagacaaagggctaggaatacatttgttggaacaccatgctggatggcaccagaagttctccagcctggaactggatataatttcaaagctgatatatggtcgtttggaataactgcactagagctggcacatggacatgctcccttttcgaagtaccctcccatgaaggttcttctcatgacgctccaaaatgctcctccaggtcttgactatgaccgtgataaaagattttcaaagtccttcaaggaaatggttgcgatgtgcttggtgaaagatcaaacgaagaggccaacagctgaaaaattacttaagcattcttttttcaagaatgcaaaacctccggagctaactgttaagaacattttaactgatttgccccctctttgggaccgtgtaaaggcactccagctaaaggatgcagcacaactagctttgaagagaatgccttcttcagaacaagaagcactttctatgagtgagtaccaacgaggtgtcagtgcatggaacttcgatattgaggatctaaaggctcaggcatcactgatatgtgatgatgatccacctgaaataaaagaagacgatgacactggtagaataactgacattgataaggatacatcttctgacgattattttggaaagacagcaccatcgaatggaaataactgcagtgatcgttcttctgtgccagcaaatcctggtcaaaatggtcccgaaataaatgaaatattgtcttccaacaatgggaatgcctacagtgaaaggaagcctgatggacgtaaaaacccagaatcagaaaatgattcattgccctcgacgtcgaagcatgatgctgatgggaaagattatagatgtgatttcaggcaaaaacagaggacatactcaggtccagttctgcaatctggtccgaataatagttcgatgactgaaaggggccacattattgaaagggatgcaggagttcaatctgtatctgataaacaaaagaatggtacaagaagagccaataatcttagtggtcctttgtcacttccaactcgtgcttctgcaaatagtctttcaagagccaataatcttagtggccctctgtcacttccaactcgtgcttctgcaaatagtctttctgctcctattcgatcttctgcaggttatgtaggctctttgggtgataaacctaagcgcactatggtggaaattaaaggccgcttctcagtgacatctgagaatgtggatcttgcaaaggttcaagaaattccagggagcagtgcctcacgtaaattgcaagaggggccttcactgagaaaatcagccagtgttggtgattggtcagcgaatgataagacaacgtctactaatcatcaaaggaaggaactctgcaatagctctgtatctacatcaattctgattccgcatcttcaaaaccttgtgaagcaaactgcattccagcaagatctgattacgaacctactaagtagcttgcaacaaaatgagagagtcgatgctcagtcaagagtccagagcacgacgagtgatacagtggttgaagctgctactgctgagagagaacactcgttacttgttaaaatttttgagttacaatctaggatgatttctttgactgacgaattaattgcggcaaagctgaaacatgttcagctgcaagaagagctaaatgtactctactgccaagaagaaatcctggatatgagagaggacgagagcgaagaagcatgatgcggtggagcctgcccccctttttttactactactactgagggggactaaaagccacatgctctaagcccgtgcaattgaggcttggctaactggctgcatacaatacaaggactcgaaggatcattggccaactccgggtgcaatcgaagaacctgcaatgagtttgatggagcggggtttatgatcgttggcctcggatttgaactgttatgtatattcagtcgacccgttcgatttctgactcgggtttggtttgttcagtgagcttttaaggcgtcttgcgatgcgcatctacttgatcattaagatggctatgacgccagcctctaatatatactactagtggtagtaataggtatagcgtccgtatagtaccattgtacttgtacctcagaagtcagcaagactgcgacaataattgcatcgcgtctgtagacagcggaatgcatgagtagctactgtagtacaatggagtgtccccgcatccaggctttgggctgggaaccctgcctgtgctgctgtgagcagtcatgttgtcacctgcgcccattacccgtacatgcgcaatcataaacaaatcagctagctcatcaataatgcactcacggacgggagggaatccaccttgtgcagatggctgcgcaaccatccagcccagcccaggttcagc

SEQ ID NO: 123 - DNA, 2388 bp, Zea Mays
atatttttggttggtccttgagctcacttggacagagtgcggcttgccgacccagcagtatgtgcaggtgcggcccggccgaagatttggcgcacgcacactcaggtagcccagtggctggctccactgccagacgcgctcggctcggctcggcgcaccaccaccccgaggacacggagtgagcccgactgcccgagcccgtataaatcgacgctgcgaggggtagcgagccgcaccgcaccgcaccgcaacgcgccaccgatccaccccgcgtcctcggcctccctccctccggcgagcggcggcgcgggcggccatggaggtgttctactacgtcgtgttcggcgcgctggccgccatcgtggcggggctcgagctcggcaagagcggcaaggaccgcgtcgccactacctccgccttcaactccttcaagaacaactacgtcctcgtctactccctcatgatgtccggggactggctgcagggcccctacgtctactacctctacagccagtacggcttcgacaagggcgacatcggccgcctcttcatcgccggcttcggatcctccatgctcttcggcaccatcgtcggctccctcgccgacaaacagccgcaagagggcctgcatcacctactgcatcagctacatcctcagctgcatcaccaagcactcccccgagtacagggtcctcatgatcggccgcatcctcggaggcatcgccacctcgctgctcttctccgccttcgagtcctggctcgtcgcagagcacaacaagagaggctttgacccgcagtggctgtccataacattctccaaagccatcttccttgggaatggcttaattgccattgtgtctgggctattcgcgaaccttcttgctgagaacttgggttttggtcccgtggctccatttgatgccgctgcatgctttctggcgattggcatggctgtcataatgtcctcatggagtgagaactatggagacccatctgatagtaaggacctgatggcccagttcaaggttgcagctaaggcaattgcttcagatgaaaagattgcattactgggagccatacagtcattgtttgagggctcgatgtacacatttgtcttcctatggactccagcgttgagcccaaatgaagaagacattcctcatggttttatttttgctacattcatgctgtcatccatgttgggtagctccgttgcgtcacgtctattagcccgaaagctcaaggttgaaggttacatgcagattgtgttctcgatatcggctgtcacccttgtcctccctgttgtcaccaacatcctagtgcccacatcttctgtgaaaggaggcagcatatcgattggaggttcccttcagcttcttggtttctgcaccttcgaggcctgtgttggcatattctggccatcaatcatgaagatgaggtctcagtacattcctgaggaagcaagaagcacaatcatgaatttcttccgcatcccgctcaacttatttgtttgtgtggtgctttacaatgtgaacgcattccctatcactgtcatgttcgggatgtgttctatcttcctcttcatggcagcaatcttgcagagacggctgatggttgtctcggatctacacaagtcatcaactaaagcacaagaaatgatcggggaagatgagccactaaatccttagacgtcgacagaaccatacgtgcaaatcagatacgaaggcggcatacacagagcaattcatttccacccgtgcaataagatggaagtcagaaccatgtagttgttttcgtttgtaattttctttctatagtgtaagatttgacaaggctgttagtttgcacctcggatctgcttatatccacagggcaatcgatagttcagcaagtattgagctatacctatgtcccgagaagattagatgagttggcgtcttggcgatcgatgtgggcttttcccgttgttgttccttgcaatttattttcgaaaaaaaaagaaacatgttcgctttaagctttacgatacggtatatattattcttggaagtgttatctactgcatgacaattctggctgatgtgcatatagcatgtgaaaagagtattgtgaaccagcgtagatatcttttttatggccgctgctctgatggctggtgacaaatctggtgctgctactgttactgttgtgggctctctctatctggccgccgctgctccgatggtcgcgcttctagctgttgttgtttgagcgccaggttgcaggattctatatcgtagcctcagttggcttctctggtctgtctcacacctagtagtgtcatgtttttgttttctgtagattttctttggtcgttgtaagaactattgcttcctaatgaagaaaaaa

SEQ ID NO: 124 - DNA, 2639 bp, Zea Mays
agtgggtgtccgccgtccaggacggcgcgcacgcacgatcgaggcggtcacgatctcgccgtgcggcgcaaggagccaaggaccgcaagtccggagccgtgccgcccggcccgtgcgcggcagtcaatgcccccaagaattgactgcgccgcgcgtgctcgctatccgctatttccattccacccatggcagccacgcttcgccttcgcttctcttctcttctcttctcttcgatgcgagcgatatgagagagagaaacagagctccccgaggtgtgtataaatgccaggtcggcgcgttaattctttctagttctactccccgctccccattcacgcactctcactctacctccctccctccctcgccggcgccgcgcgtgctcccgcgggatgctgcgtgcggcgcggtacctgctggggtcgccgggcgcgagcgggttcgggtccaggtcgacggcggaggaggtgaccccggacctgggcgcgacgacggccatcatcacgggcgccacgtccgggatcggcgccgagacggcgcgcgtgctggcgaagcgcggcgcgcgcgtggtgatcccggcgcggagcgccaaggcggcggaggacgtgcgcgcgcgcatcgtggccgagtgccccgccgccgccgtcctcgtgctcccgctcgacctcagctcgctcgcgtccgtgcgcgccttcgccgacagaaacaacgccggcaagttctcgcacgggcagctggcgctctcggaggacggcgtggagatgaccttcgccaccaactacctgggccacttcctgctgacgaagctgctggcggggcggatggcggagacggcggcggccacgggcgtgcagggccgcatcgtgaacgtgtcgtccagcgtgcacggctggttcgccggcgactgggccgagtacctgcacctcgtcacccgccgcaagataccctacgacgcgacgcaggcgtacgcggtgtccaagctcgccaacgtgctgcacacccgggagctcgccgcgcgcctgcaggaaatgggcgccaacgtgacggccaactgcgtccacccgggcatcgtcaggacgcgccttaaccgcgaccgcgacggcgtcctaaccgatctggtgttcctgctgctgtccaagctgctgaaaacgatccctcaggctgcggcgaccacgtgctacgtggcggcccacccgagagtggccggcgtgtccggccgctacttcgccgactgcaacgaggcgctgccgtcgccggccgccaccgaccgccacgaggccgcgcgcctctggcgggtctccgaggccatcatcgacggctgcaccaacagccaaccccagcgggactgcaccactgctcctctaccacgattactgccggcccagacgcagtcacagtcgccgacaggagcttcttcgtcgcctcgtcgtcgagcctgctgagctgatccggccgtccacctccagttccagtatatccgtcccttttgttctcgtccatgtgagatgcgtgtacaatacctagacattgtatgtatatccgatcgattatccccggccgtcctagcagcattataaatacagcatatactccttgtcccatatataacaggcactagcatgcagtagccaacgtagtgcagtagtagttctgtgtttgtgtgtgtctcaagtctggactctctctgaacattgaagctgtactgtaccattattacatggcctgtgctgcgtactttggtgtcgaccggtggcggaaggaacagtacgctagctacgacgtgcgcttgccttttgtcctcctgcaccaccacagcagtatgtcaccagcatggcatgcccatcatatgcactggtgtcggtgagatacgcgtgctctgcggctctgctccgtccaccgtctccgtcgccgggcgaggctctagtttattatccgctggtgtcaccaaacatgcacggcgcactggcagcatgcaatgcaagtaccagcacgcacgagttgagtggacgaattgtcttgttccgttggatgcatcgaccaggaggacacagcacaggccccgactaaaaggaagagcgggtaccatgactgagtgggcgatccttcccttccatcccattctgatgagtttctttctggtctcacgggcggggcgatgaccatgacccccgcccatcccaatcattgccaggcatttggatcctggcccttggatgggtgcccgtgtctccaggaactcgctgcttggctttgtgggacaccgggacggatggagagcgtgccgccgctatctgcaattcttccttcctcttgttgtgtttgtgcatgataaccacaccctatctaccacacaaaaaaaggtgataatcatgcattctgcgtcgggcagcggctaggcggcctatcaaaatgactgaacacctatgcttgcacgatacaaaaggccctctttgctaattatttgagagctacatctactatacacgggtctgctcaaacctaagctaagcgccaccgctaccaccaccagaaatggacagggtaacatataatataggacaattgttttaggttcagttcagcttgattcgatcctatcttttcctaacaccaagacgagtacgacttggttgcaggag

SEQ ID NO: 125 - DNA, 945 bp, Zea Mays
cccgctcacagtcacagcacaatccccagcgaccgaccgctaactgcctctgcccctagggtattttttaccgcacgcgggccattcgcgttcgcttccgagttccgacccgtcggcgtcgctggaggctatgctttcattccctttgaagatgagttcgatgcagaggatgctataaggcgacttgacaacgtgtcttttggttataacaggcgctgactctctgttggatggtccaggcaagttgaaccggtgccaaagagtcgtggtagacctactggggatgtaaaggcaacgagaaccctctttgttatcaattttgaccccatacacactaacattcgcgttcaaaggaactttgcgtttgtacagtatgagacgcaagaggaagctaatgctgctatcaagagcactgacaagagcaccatattggacagggtagtaactgttgaatatgccttctgggatgatgatggcgagagagatgacaggtacgggagccccaagcgaggttccttatgacaggtgtcgcggcagtgcctacatgcgctcacctagcccaaggtaccgacaggagtacagtccaaattgtgatcggcgcggacgctatcctgggtatgatcgtcgtgatggagcaatgtatgaaaggcgaagccctgtatatgatcgctacgacagcctgttgaatcaatattaaggtctggttgaatctggagcgaagccctgtatatgatcgctacgactacccgaaacattgaatcaatattcagcttgaatctggagcgttcaccgttcacaacttcggtttgttaaggtctggttgctccgttgttgcctggtgcatgctgttcagcctccgccgggctgcctcatctgtcaaaaaaatcaacaacgatcccattagctatagattaaattaataatacttgggtgtgaacatcccac

SEQ ID NO: 126 - DNA, 1143 bp, Zea Mays
ccgaccgctaactgcctctgcccctagggtattttttaccgcacgcgggccattcgcgttcgcttccgagttccgacccgtcggcgtcgctggaggctatgctttcattccctttgaagatgagttcgatgcagaggatgctataaggcgacttgacaacgtgtcttttggttataacaggcgctgactctctgttggatggtccaggcaagttgaaccggtgccaaagagtcgtggtagacctactggggatgtaaaggcaacgagaaccctctttgttatcaattttgaccccatacacactaacattcgcgttcaaaggaactttgcgtttgtacagtatgagacgcaagaggaagctaatgctgctatcaagagcactgacaagaggggatccacaaggtagtagctgagagagcgttgcacggacgctggatgtggggcccatactgcacggcgccgaggcaggagaaccagttgggactcgtgtggtgggcctagagcgtcagcgtggagggtgaagccgtcgaggcggggcacgttttggcgggcgaaccagtcgggacttgtgtggcgggcatagagcatcagcgcggatggtgaagccgtggtagcaccagcaccatattggacagggtagtaactgttgaatatgccttctgggatgatgatggcgagagagatgacaggtacgggagccccaagcgaggttccttatgacaggtgtcgcggcagtgcctacatgcgctcacctagcccaaggtaccgacaggagtacagtccaaattgtgatcggcgcggacgctatcctgggtatgatcgtcgtgatggagcaatgtatgaaaggcgaagccctgtatatgatcgctacgacagcctgttgaatcaatattaaggtctggttgaatctggagcgaagccctgtatatgatcgctacgactacccgaaacattgaatcaatattcagcttgaatctggagcgttcaccgttcacaacttcggtttgttaaggtctggttgctccgttgttgcctggtgcatgctgttcagcctccgccgggctgcctcatctgtcaaaaaaatcaacaacgatcccattagctatagattaaattaataatacttgggtgtgaacatcccac

SEQ ID NO: 127 - DNA, 1080 bp, Zea Mays
ctagggtattttttaccgcacgcgggccattcgcgttcgcttccgagttccgacccgtcggcgtcgctggagcgctagcgtcgccttgctccgaggggacaacaaggtttttttttttgttgggacgggcggggggaggttcaaagttctgccgcggaggaggcagcggagagacggataccatgaggccggtcttctgcggcaacttcgaccacgtcacccaccagtatagcccccatcagtcggatcgacatgaagttaggctatgctttcattccctttgaagatgagttcgatgcagaggatgctataaggcgacttgacaacgtgtcttttggttataacaggcgctgactctctgttggatggtccaggcaagttgaaccggtgccaaagagtcgtggtagacctactggggatgtaaaggcaacgagaaccctctttgttatcaattttgaccccatacacactaacattcgcgttcaaaggaactttgcgtttgtacagtatgagacgcaagaggaagctaatgctgctatcaagagcactgacaagagcaccatattggacagggtagtaactgttgaatatgccttctgggatgatgatggcgagagagatgacaggtacgggagccccaagcgaggttccttatgacaggtgtcgcggcagtgcctacatgcgctcacctagcccaaggtaccgacaggagtacagtccaaattgtgatcggcgcggacgctatcctgggtatgatcgtcgtgatggagcaatgtatgaaaggcgaagccctgtatatgatcgctacgacagcctgttgaatcaatattaaggtctggttgaatctggagcgaagccctgtatatgatcgctacgactacccgaaacattgaatcaatattcagcttgaatctggagcgttcaccgttcacaacttcggtttgttaaggtctggttgctccgttgttgcctggtgcatgctgttcagcctccgccgggctgcctcatctgtcaaaaaaatcaacaacgatcccattagctatagattaaattaataatacttgggtgtgaacatcccac

SEQ ID NO: 128 - DNA, 4982 bp, Zea Mays
gtttttttttgttaaaatggactacatgaagccgtaacataccaaattaccaagcacatactcgcactctgcgacggcacacgccgctccggcgtccagcaaatccacggccctgctgaatttgtctcgccgctcatcgaccctgtttcactatttggaactgaattatctcatccagcgattccaggtccccgtagcgccatgaacctgccgacgccgctcccgcccaccagctccccggccgcggctccccgcgccagccgtgcgcctgtcgtgcctgctgcccgacgcggcaccggccgccggcgtcggcggcagaaaccgtcttcgtccccgtccacccgcgagaccgaggccgagtacgagcagccggacgccctcgcccgcatcctccgcacagaggccgccatctcgggcgtctcccgcaaggctgcggccgcgcggcagcagtccacgaacctttggccccgcgccgtcctcgaggccctcgactccgctgtcgccgcctgccgctgggagtccgccctcgagatcttcgagctgctgcggaagcagcactggtacgagccgaggtcgcagacctacgcgcggttgctgatgatgctcggcaagtgccggcagcccggtcccgccgccggcctcttcagggagatgctctcggagcggctccggccgacggcagacgtgtacacggcgcttatcggcgcgtacggctacagcggcttgctggagcacgcgctggccgctgtcgagcagatgaaaggcgccgctgactgcaagccggacgggtacaccttctccgtcctcgttgattgctgcgccaagtcgcgccgcttcgatctgatccctgccgttctcgacgagatgtcgtacctggggatcgaatgcaattcggttatccacaacgcgataattgacgggtacggcaaggccgccatgttcgaggagatggagggtgcgctctccaccatgcttgagagtggtagcaatgtgccggacatttacaccatgaactccgtcgtcggggcgtatggcaaccatggaagaacagatgagatggagaagagttacagtgagtttcagctgatgggtgttgagccagataccaagacgttcaacatcatgatcaggtcttatgtaatagagtgtttcggacgtgctggcgacatcgaaaagatggagtactatttccgtcttatgaaaattcagggtgtcaaacccaaccccatcacctactgctcgctggttaacgggtacagcaaagccgggcttcttgataaggttgcgggggtcattcgacagaccgagaacactaatgttgtcttggacacaccattctttaactgtgtgataagcgcatatgccaagtctggggatatcaaaatcatggaggagatgctgcagcttatgaaggagaagaggtgcaagcctgacagaataacttatgccaccatgattcaggcatacactgcacacgggatggatgaagctgctatgttgctggagatagaagctgaaagatttgataaacggttgctgggatcggtttctgacattgatggcaaataatgcatacaaccattagtcctaatctaaggccggggaaaagatgttgctgcgcaagaggtgcttttggtggagatagcttggaatccatccacaaccggatctgaacaaaagggtcgggccaattggatgcagagccatgcagatagcaaggaaagcagatatctataaccctttctaaattcctggtccgataattagttccatgctcaggtaatccatctgtttggggctcatatttaggatcactgttcaacaagacatctggtcagtttggtcactatgttgtcaccactgatgtgctggatatatttcttattggcaaaccgaattctgttgccgcctccaagtgagactgggaggctggggatcgagagcatgaagcaagcagcatggatgacgctgtcagctcacgaacaaatcgctggtggaggcactcgcaggtcatgggatttgcgttgcaggcttggtccaagtgaaacgaactatatagatcttcaatggccgcagaagtggtaaaaccctgcaaggaattcatgttggagtcatcacatttgtctgtagtcactgaacatttatgtgctgatgaagtggtaaaaccatgcagatgaagtggtaaaaccatgcagaatgtagcgtccgcattctgtatctgttgttgatcaattatgtattcagatttgttttttgcgcctacttttgtgcaatgtaaaataagcagagtatcaagctatctgatcaatgcacgttcacgaacagagcagtgaagttgacatggccagagccagtgaaatccatgaaataaacctggtcgttccatacaggtttatgagtttattatccctctgtactcgaaccaataacttaacacgaaagggggaacatcttatatgaataataataaatgtagaaaaggaaaagaatcacagcttccagtttttttccttttataccctccttttcttcctaaattctgagttttcaccataaccatattgggatctttttcagacaaatccttactgagtcccgaattctgatctagtcgtgtatcctgagataagcagctcagctcttcttccactcctccgcggcgccgtcggtgcccgcgaggtaggccttcttcctcctctcggcacgcgcgcaggcgcacacgatggcgaagcaggcggcgtacacggcgtagacgcgccagttggcgcggggcgcctctcccgccgccgcgcggtggaagacggcggcgtagtagtgcagaccgacggcgaggcccaccaccatctgcgcaaggccgagcgccttggcagcgtccccgttgccttcgtcctcgggggaggcggcgtccgagaagacagcaacgaggtccaccatctggagcacgaggtagcccatgaagccgagggactgcgcggcctgcgtccaggcgtaggcggcgggggaggccgcgtggaagaagcgcagcggctccagccccgtggcggccgcggcgagcgcgagcgtggcaaagtagatggcgaggtacgcctgcgccagcagcagcgcgcggtggaggagcggcaggtacgggcccatccggcgcaccagcgcggtgagcatgaagagcggcagcagcagcaccgccaccgacgccgcggaggcggccaccgccgcccaccggccgcccaggatcgggcgcacgccgtcggcgatcccggcgttcgccgcggacaggtacgccttggagtggtgcgagaggcgcgccaggtccggcatcagcgtctcctgcagccgactgggtaggtcccggaattcggagatgagatcgtccgtgccctcccccgcctccttggccaacaccacctcctcctcatcctccatctccaccgtctccgtcgccgctgacttctccttgctcacgacggtcgcattcgccttcacctcggcgtcgacgaccaccggagccttcttgccggatttggccgtcttggcaccggcatccacggtcgaatttgccggcggcggtttctttgccttcccaaccgcggtggcagcctcagatttggccgtcttgggcggcttcaccgccttggcgcccgtcttggaaaccttggcaggcttggccgaatcggcgcccttggtcttggcaccagccgccgccgcagtcgccgccttgtccggcttcggcaccttggccttgtccgccttgggggtcttgggggccttggagaccttggcaatggcggcgtcaccacccgcagccgcagccgctttgccagcgggcttcttggcggcccctttcgccgcggcagctgactctggcttcttagccttggcaaccttggtctggttcttggaagtggcgtcgccggcgagcagcttctttttggtcttccccgccgcggccgacttgcccggcttggcggcgggcacctcgtcgccgtcgttgtccgcaagcagcgccttgcggctgccggagaccttgggcttgggcttgggtttccccggttcggcggaggagcagagcgcgacatgggagcacaggagcgcgagcagcaggagcagcaccagcgtcagcacgggccgccgcggccaaggcgccatttttgcttttgtgcaggcacaggctggcagtggcaggcggggagtacttcggcggtggagtgagagggagagtgcggcgcggcggcggtggatccggagtcaggagcccggacggacgggccgccggcgtgttatatacggagatctggggcggaagtttgtggcagtgtccgcgagtgagtgagtgagtaagtgggaggtgaaccacaccaccggcaggggagaagaggtatgggatggtcttggtttggcccagtccctcccagcccagctggtagcgtgagtgggaggcgaaccacaccaccgacggcagcggagaaggggattgtttggtacagctggtgcaaaacaaggtcacgtggtgcgtctccctccgtctccgtctcccatgggcaaatgccaagcggccaaactctaccgtaccgccgctagcgtggtaggatgatggggttggaaaatccttcgtcccaacataaatgtgcacgtcccatttctgatctcaatttttgagttaaaaatttaaaagtttaacttaaaattttaataacactatgaatacttacctctaaaagacagtattaatatttatatattcaaatatattttaaaagtatactccatactcaaatcaatctaataatatttattatacatcataagtgtttgtatatttatgcacttcccctatatttttttagatgtttggttttttagacgttttcaggtaacactctcgtacagctaattagtttaagtaatgtgtgatttatttttgtatcataacaattcatcattttttgtttttttaactataaacatatttttaaattgtctttgtg

SEQ ID NO: 129 - DNA, 2577 bp, Zea Mays
ctcatatcaaacccttgatatggacagacctttaaggcttgttgctttggacatgtgatttctaattttgaaattttcccttcaacatctatacactgcaaagtgtcttagtgttcttgcctccaacactattcacatctaagtcaatttctacaacttttatatcgttgttatatgatacaggagatgagaccagaaattgaagccatcaatgaagagatgcgaaattcaactgatccaaggtcaatggaagtggggaaacagaaactgggggagctattccttagacatggagtgactccattgacaccattgaagggtctattcatacagggacctatatttatgagctttttctttgctatatcaaatatggttgagaaagtcccttctatgaaaggaggtggtgtgtattggtttactgatttgacaactcctgataatttattaatcctcccagtgttaacatcactgacctttttggctacagtagagcttaatatgcaagatggcatggaagggaatcatatgttaaaaccaatgaaaaagttctcccggttttttggagttttgtttgttccatttacaataggctttccaaaggtacgtaaccgtgaaactactcaggtttttaagtaagcatcaattcactgttatgtttccctttatttacaatgaactttccagaggtacaaaactctgaaaacacttggccccatttggatccttggaattgacatccattctaataaacacaatttagacacagaccaattaagttaatatggccacatgcggaatatacttgtgtactgtcattagccacatgggggagatacttatgtcctgcagttctgttgtagaggagcaagccaaagagcatgctataagttacagaatagaaacatactcatcccatgaatttaagacaagcttattatctaaactatgaaaagttgtgaaatgtcaaattccaagccaaatagcctagtctatgaagtagattccatttgttccaaaatgaaaggatccaaacaggcccttataagaaattacatttaagggttcatttttttttgaataacatcaagttctcattctggctaccccctcctaaacgctagatgtggccttctcaaactaaataaatgaacattctatgggcttctttgattatgtacttccataacctattcttgtgcagacagtttggtttcggaaactgactaggttataccttgcctgggaaaatgtactcagtactaatctgaattagggttgtctatagttatctactatcagacaccatgacaggaagttgtggctgcctacttttgttaatacattcaaaattaagatgcacgacacctgaacttaaggtgaggtgtattgaatccttaaaatcatctgagagttagagaggtagtcttttttgtttttttcctcgaacaagtctcttttgtattttagatttggcgcatgtatttttgttttgctactgctctaggaactatggccaattgttttactccaaaatggtgtcaaaatatgctgcgctgaatgaaatgctggtggtaaccttaagggcagttcatactttgtagtgccgagtgtgcctgttgttctcacttccaaataaatttatgcttatgctgagggcaatccaaaatctactattcatctcatgtcaaatatgctcagctttgatgtcttgtggaactataacaccacaactcatgcatttgcgctgccattaatctttcatttctttggcaggcaattttcttttactgggtcacatcaaactttttctcacttgtttacggtgctgttctccggaatccggctgtaagactcttcttaaatcttcctcgcttggaatctcagcccacaactgcagaagtccagcccttaaacctatcgggcggaccagagccaagtcctggagtcgattctcctatcacagataaggaaactgagcagtcgagttctgtgctaagtcctggagtcgattctcctatagcagacaaggaatgtgagcagtcgagtcctgcggtgagtcctgaagtcaattctcctatggtggacaaggaaagtgagcagtcgagttctgtgttatgtgaccgtatcagagatcttgagatcagggctaaagcaacgggtgaatctcgagagtaaattcgtgatttgtccacatggaagtaagcaagcacatctcctttgggggtttctggtacttttttttttgttgggagcaaaggatacccagtagcgaggtataattttgaagagtccgcggtttttcgaaatataacggcccaccatgtttccgtgaataaattggtgtagtatattggcttgtaaaatcgttgcacggtatgatataaccttgtactactagctaacattagccatgatgttccttggattaagcatattgttgctattgagcggcacacgacatgtttgtctaatatttgcttcatgctgaaagctcaaatgagtgataactgtttctgtacatttgcgatgttgtcaattttcgagagctgaagttgtaatgtgacttttggtatt

SEQ ID NO: 130 - DNA, 1859 bp, Zea Mays
cgcgtttattaattcccaccccgccgctgctcacgtatcgcccgccgtcctctcctctcctccccggccccttcactccaccaacgaaccccacgcaggcagcagcacgcgcaagccgcaaggcaaggcacaaacactaggggccgggcatggcgacgcgggcggacgtggagaagggcgggccggcgaggaaggagcccggcaaggtgccgtcgccgctgtacccgcagcacgagggggagcgggagtgggtgccctggctcgtccccgtcatcttcgtcgccagcatcaccgtcttcgtcgtcaccatgtacgccaacaactgccccgcgcgcgacaccaacaagtgcgtcgcccgcttcctcggccgcttctccttccagccgctgcgacagaacccgctcttcgggccctcctccgccacgctcaccaagatgggggccctggtgtgggagaaggtggtgcaccgccaccagggctggcgcctcctctccagcatgtggctccacgccggcgtcatccacctggtcgccaacatgctctgcctcctcttcatcggcatgcgcctcgaacagcagttcggatacgtgaggatcggcgcgatctacgtgctctccggcgtgggcggcgccgtgctgtcgtcgctggtcgtccggaaccgcgtcaccgtgggggcctccggggcgctcttgggcctgctgggcgccatgctctcggagctgctcaccaactggaccatctacaccaacaaggcggcggccgtggccacgctcctgtccgtggccgccgtcaacctggtgctcggcgtcctgccccacgtcgacaacctggcgcacctcggcggcttcctcgcgggcttcctactcggcttcgtcgtgctcatgcgcccccacttgggctggatggagcgctacggactccccgccggcgcgccctgcaccgccaggaagtacctcgcgtaccagtggaccctcctcgccgtcgccatcatcatcctcctagtcgggtaagcaggacaggacatcctgattgatttatttatttatttattatatatatgcccttcgtagctggccaggccatttccttcgtccagcatgtacatataacaggagtaacgtgactggattctcctcttcctctctcatggctagccagcgtgttgacattgacaaccacgctgtgcacgatactctatgccgttttgtgtgcgctcatatataattcaaaagtctcaacaactcattattccttgcgtgtatggtttcctctctctgcagattcgcggccggcatggcgatgctcttccgcggcgccaacgccaacgacagctgccactggtgtcactacctcagctgcgtgcccaccgccagatggaactgcaccaactgatgatccatgcatagcggcagcagcacgagttggagttgccacccattttcatcttccgatccgtatagtctcgttactgtagatagcttctttgtcattcattcagatctcaacacacacgtcggtctcctgttcatttgattcattcttttacataatgatgcaatgcaattattgagatttcgaatctcgtcttgcgtgtctagtcagcatgcgccgcctttttcgaacccgtgcaaatgcgccaacgcacgcacaagagcaaccaccacgtgccttcccttctttttcttgacaacacatgtgtacgttctcaactgcacatgttcccaagataccaactatcacaggttggttggtgaaagtactacgcacagcgcatcacgaaggcccccccccccccccccccccccatgtcaacatcaacaatcgttaaacaacaaactatcctccactgcagtccaaac

SEQ ID NO: 131 - DNA, 2072 bp, Zea Mays
cgaggacctcggcaggcactcactcacccacccgcgtccgttcgccggaaagctccagaaaagaaaacacactcgcgagaccgcccgcccggccgggcgcaggcaggcaggcaggcaggcaaaagtggcctcgcaaaggaacggcgccccggaactcggctcggttcccccgcttcagttcccggtcccgaggccctctcccagcggcgggcgcccgcgcgcagcaacctgctccccccctgtcctgtggcatcggcttccaatccggtcgatgcgcccgatggagacggaggacagcgtcgggtgggacttcctcgactggctcggcccggacatctccaccaccatcttccagctcctcgacgaccccgcggacctcgcccgcgtcgccgccgtctcccgctcctggcgccgattcgtcgccgtgaacaaattcagcaagcacctgtgcaggcagatatgtccggaggccgccagcttcacccgcgcggtcgtggtggcccgattgccgccgccgccgccgccggcggcgcacgccgcgtgcgagtccagccaggtcgccgagtgcagggcccgcgatggggagcacgcggcctactcctacctcgccggcgcgctcgtctccggcaagcccgccacggacctcgtcatgcgctgcgtcggcgcctccagcaccgacaacttccccgacgagaccatcgagaacacgctcgtgccgcacgacatggttaacttccgcccctcctactggtccagcggcggcgaggacgaccccgatgtccccgagagcttgacctacacgctcgcctctgatctctgcgtcatcgaggagatcaggatacgcccgttcgaagctacttttcagcatggccatccgatttactcttcgaaggcggtgagaatccggctgggtcattccaagcttgaccctggaagagagacttttgtttcggatgaggatgagaacctgactgcgatcgctgatgagaactacatgtggacatacacgtcgccagagtttcctatgcttcaggaaaatgtgttgcaaaccttcaagcttccacgcccggctctttgcattggtggtatagtgaagattgaactactggggaggatacagaaacaatttacagatgataagtattacatatggtgagttctcaacttctgatgttggtgttggttggtcacctgttttttccttcatggttcccttcacgcgcgctcgttaacattgtctcaatccagttacaagaaggaaacatgcatggccgttaatttgttatatgaattttgaacttgcgtataatgtacagtttcgcgctgggatagaactaaaggagtgtgtgctacttattttcgctgcagcctaaaagtagtttgtctacagaagatcattctctatgtgatcctaattacctttcctgtaattttgtcttgatccttgtgtccaagcatggtttatgtattgcttgtctgtgcagacacatgccatcttggatggtgaaatttctttgtccacttataaagtagagttagctttctttagcacgtctgaagcattcccttggatatgcgtcatctctgcgacgttaacagctttgttttctttttgcacgctgacagtgtctgccatgtccaagtgacggggcgctcgctctcaccagatttaatgatagacctctccgatcctgctggttactcgaacctcaagtatctgccgggtgccggtacaggcagatgaggcaactggctatggtgtacatgctgcttggacccgtgcagttgcagtttatggatgaagacgaagctgacttgcagatgtaggctttgttttccctgaatccgatcttgtgtatcctaattgaacagagcttgctctgataaatatagcgagaaaagatatgtgtcgctgtttatgccttctggtttttcagctatgcttgaactcgatcatggcagagacaaaagagtttgcaaatagtgcattgataatttggaggcagccccctttatcttgcaaatagaccatattctgtatcatgattaataattaccatctggtggttttt

SEQ ID NO: 132 - DNA, 2160 bp, Zea Mays
ctcgatgtttggtaggtcacgaaaaaaaaacgacccagtttttgtttggaaataaaacaggagaccttcctggcttcattgtgtgccgatgcaaacgcgatgtaccggagctaggtacacgtacaaaggttccttatttgccatggccttcatgagaaatggcaaagtaacgcgcacacactaatgctatcaaacaaaaaaaaagtccagtgtgctactatgctatgtataaacgctttcagaatacaattagcccaagctaaaaaaaaatggcaggctactcatatctctcgacagctcgctctaatgcgcagtgcctctatagctaccaaatgcccacacacggtcatttccgagccctgaccacccgttccggctgaaaccccttgggatacacgagcaccgaatcgacacagaggccacctttcgtgtgggtgcagtcgatctgcgctaacgaaaacttgagcctggtcggctgaccagagctcggcggcgcgtcgaaatcgccgacgtggtacaggatccagcgtccaggctcgtccaggtagcactgggacacggcgtgctggccgtccgacgtggagagctggaaccgcacgggcttcttgtcccagccgtggacctgctccgagctgcagacccggcggccgaagcgcgtggaggacttgccgaggtggagcctgaagtagaggctgtaggccgtccccgccgggaagcagaagtccacctctcccaccacctcgaaccaccagatttgctgcaggtatgcagtggagtggaacctgcagtgcagtgcagtgcagggtcaagaacagagaaaggccatggctcagattggtttcgccatacacaaggcatgagtgcagacgtgtttcttaggtgccgccacgatggactggtattccaacgcacaggtaattccggaatttatctgtgccttttgtccaaaagaaaacaatttatttgcccataaaaatccggtggtcagagtcagatggtgctgaaaaatcacgacttcatagggaaatgaaggagatatatatactgagctgttgaaaatttcagacccacacatggtgctgttctctaccaattatatctcctgtcaatttttgctggcgtccatgcttacctcaccagtgtagcggctagcataaagttcatttccgaatttaattttttatcaagtcaatcgtaaaagagaataaaaggtttcacttttattgctttcgctattctcaactgtcgcaacaaggcattcattactgtgtcactcaccggtagccttcctctctctcacccctacggccctcactccatgtctcaccacgtcactacgatggtcatatacacgcactattgagctttgagcatggctccgacaataaacacgatacagccctagctaactgttcgtaaaaaaacgaagagggagtgaaatttcaatatggtagaagtcgaacaaaacgggaggaaaagaagtgagttcatattaatttacctagattcagatgttggcatgttaatccagtatcttctatcgtcaatcccagtaatgaccagcgctttcgacgacaaggccatgcagatcccaccttcgttcttctccagccagaattcctgcagcacaaagcagaaaagtacacgttgaaaaaactcctctgtgaacaaagcatgtctgcttgtgtcgtattcagttttgcttgcctacaaagcaacagagacttcatggtaatacttctccactagtcgtcgtattcagttttgcatggtggtaaagatagaatttatttttcaacaggaaccttcatagttccaagagaaccgacaattttcttatgtcgaacacgaaaaatcaaactggaaggcccggtgcccacctaaccagttgaaattcgatgaaacaaaattcaacgacgaataccataaaccttctgatttcgcgagggggaaaaggcttcattttgaatctaaagcaaataacttgacactcaccaatccacaaaactaattcgaagtggataaaattaaggctatactacaagttccgaattccaatcgtctccatgcccaaattgcttaacagtcgagtcgacaaagaaactcttgaacgtcacaaaatggaacttagttagaccgatcaaacaaacaaacaaaaaa

SEQ ID NO: 133 - DNA, 1349 bp, Zea Mays
tttgttgaatccaaaacttggtctttttattggctgagtgtgaaccttttacacctgtataatctatacacttgggcaaactagttagttcaaagatttgtgttgggcaattcaaccaccaaaattatttaggtactaggtgtaagcctaattccctttcatctatgttctctaccgaaacaaaatgtgattatgtgaataataatctagctgaatgttttaattcatggattaagaacataaaagacttgcccattgttgatttagttgacagattgaggcaaatgacaatggaattatgggaaaagaggagaaagattgcagataagctctctggcaatattcttcctgctattatgagtcaacttaaagctaagactagagctttggggcaaatgtcagtctgcaaaaatagacacaaggctgagatttttggcagttaccaggacatgacaccttggcgtcatgttgtggacttgcatgaacacacttgcagctgtagagcatgggaagtgactggaaagccttgtcgtcatgctctggctttcctacaaacggagagaaatgttgatttggactcatttgtccatgaatattactcagtggagaggttcaagattgcatatagtggtacaattccaacaataaccgacaagtctcaatggcctaaattaaacttgggtttcaagttactgccacccaaattgaaaattgggccaggaagaaaacgaaagaacagatttaaggcaagccatgaaccaggtgcaaggaaactggacaaatgcaaaacatgcgacgaagttggacagcatgatcccaactgtggtgttccaaaaaaaaaggaaggcaccttctaaaccaaagaatatggcggctaggccaaatatactacccgttgataatatttctccaagaagtattgtccgaagaaggatttctttgttaaagagagaccaagagtatgctgcaggaccatctactgccactaacccagtcaagcgcctctttgttctatctcaggaagaaggggttgcatcttcagttgggaaaaaaaatgatgccgtagtactacatcatcagcatggaatttgtgtgatattttgtgatccatgcagttagtagttcttttgagatgcctcaacaactaacatggttgagatgcagcttacctttccttttgttaagcatgtcgatgcttctttgatctgaaagaccctttagtttttgttgtaagggctcagctcatctgaatgtttatggctgcagtaacaatatgtgtattgtgcctatctgaacctttggtattctggaacatagatctctatataaatgcagcaagggcaatttgg

SEQ ID NO: 134 - DNA, 1229 bp, Zea Mays
atgattgcagtcttgatcgcggctctgctggggctggggctctgcgtcgccgtcgttgcggcggagaagaggcggcggctagtcggcgtcggcgccaccggcgacgaccacgcggcggcgtcggccggactaagccagggaactgtccaagtccaaggtatttgcactaagagatgcaggtaatctagctgaaaatgcgacggcctatgttagcttggagccctgcaaccactacgggagaacccctccgtgtactgaagcgctcataaatgcaaaagtgaaggaagttgtcgtggggatgactgacccaaatcctatcgtggcatccaaagggattgagaagctccaaggtgctgggataagtgtgagggtgggtgtggaggaagcgttatgccgcaaactaaacgaggcttatatccatcgtatgctcaccgggaaggcttttgcaactctgagagctacactctcaatgaatggaatcatcacgaaccagattgggaagggagctgatcagtcaggtgggtactactcgcagctgatgaaagaatacgacggagtcataatttcaagcgacctggccaagatgtcggccttacctttgtcgcgtgaagccggcacaaaccaacctctctgtatcatcatagcacagggtgaaagctcccggctacacatcccatctctcagccaagagcatgcatccagggccatagtccttgccgatagtccggtcactgtggagccagcaggagtggaagttgcagtttttcgtcagatagacctggagtctattctccagcttcttgcgcagcgagggctctgcagcgtgctggtggacttcagagaggccggcgaaagcttcgcgtcgcttctgaacgacttccaggaggacaagctggtgcagaaggtcgtcgttgaggtcctgcccttttggctcgcgagcgacgggctcagcaacctggcatttggtggcagccaatcgttcccgttgaagaacttggagctcagggatgtgaatgggagtgtgctgctggaaggctatgtgtaatagcctctcttctgtcggagattggcattgtttgttttccctcgtgtaaacagatagccctgtaatatacttgcagagccgcccacgagccatgtggggttttgcttttttatatatatagttgaaaatcaatgccatgcgtccttcattttgctgacatggaactgctgcccggtgatactcc

SEQ ID NO: 135 - DNA, 1548 bp, Zea Mays
agagggcacagggcagcgcagcacgggagccggcagcggcggtggagcagcgtgcgtggagggtgacggagctaggcttggctcgcacaggctcgctactggttgaaacttggcggccgccctcggattgggctcccctcccctcccgctcactcgccagtcgccaccgctcgctgcccacgcgcatggcgtcctcgctcgtctcgcgcccgcacctcacccagcgcccggtccgcgccgccacgctcgcctccgctacccgcccccgcctcgtggccggggccctcggcgggcgctgccaggcgcaggcggcgggggacttggacgacgcccactacatgcggcggtgcgtggagctggcgcgcaaggcggccggccacaccagccccaaccctatggtgggctgcgtcatcgtccgcgacggccgcgtcgtcggagaaggattccaccccaaggccggccaacctcatgccgaggtatttgcactaagagatgcaggtaatctagctgaaaatgcgacggcctatgttagcttggagccctgcaaccactacgggagaacccctccgtgtactgaagcgctcataaatgcaaaagtgaaggaagttgtcgtggggatgactgacccaaatcctatcgtggcatccaaagggattgagaagctccaaggtgctgggataagtgtgagggtgggtgtggaggaagcgttatgccgcaaactaaacgaggcttatatccatcgtatgctcaccgggaaggcttttgcaactctgagagctacactctcaatgaatggaatcatcacgaaccagattgggaagggagctgatcagtcaggtgggtactactcgcagctgatgaaagaatacgacggagtcataatttcaagcgacctggccaagatgtcggccttacctttgtcgcgtgaagccggcacaaaccaacctctctgtatcatcatagcacagggtgaaagctcccggctacacatcccatctctcagccaagagcatgcatccagggccatagtccttgccgatagtccggtcactgtggagccagcaggagtggaagttgcagtttttcgtcagatagacctggagtctattctccagcttcttgcgcagcgagggctctgcagcgtgctggtggacttcagagaggccggcgaaagcttcgcgtcgcttctgaacgacttccaggaggacaagctggtgcagaaggtcgtcgttgaggtcctgcccttttggctcgcgagcgacgggctcagcaacctggcatttggtggcagccaatcgttcccgttgaagaacttggagctcagggatgtgaatgggagtgtgctgctggaaggctatgtgtaatagcctctcttctgtcggagattggcattgtttgttttccctcgtgtaaacagatagccctgtaatatacttgcagagccgcccacgagccatgtggggttttgcttttttatatatatagttgaaaatcaatgccatgcgtccttcattttgctgacatggaactgctgcccggtgatactcc

SEQ ID NO: 136 - DNA, 799 bp, Zea Mays
aaagcccatgtgcttcatccattcgaagctacactctcaatgaatggaatcatcacgaaccagattgggaagggagctgatcagtcaggtgggtactactcgcagctgatgaaagaatacgacggagtcataatttcaagcgacctggccaagatgtcggccttacctttgtcgcgtgaagccggcacaaaccaacctctctgtatcatcatagcacagggtgaaagctcccggctacacatcccatctctcagccaagagcatgcatccagggccatagtccttgccgatagtccggtcactgtggagccagcaggagtggaagttgcagtttttcgtcagatagacctggagtctattctccagcttcttgcgcagcgagggctctgcagcgtgctggtggacttcagagaggccggcgaaagcttcgcgtcgcttctgaacgacttccaggaggacaagctggtgcagaaggtcgtcgttgaggtcctgcccttttggctcgcgagcgacgggctcagcaacctggcatttggtggcagccaatcgttcccgttgaagaacttggagctcagggatgtgaatgggagtgtgctgctggaaggctatgtgtaatagcctctcttctgtcggagattggcattgtttgttttccctcgtgtaaacagatagccctgtaatatacttgcagagccgcccacgagccatgtggggttttgcttttttatatatatagttgaaaatcaatgccatgcgtccttcattttgctgacatggaactgctgcccggtgatactcc

SEQ ID NO: 137 - DNA, 1403 bp, Zea Mays
atcggcatctcggcaagacgacaacacatgccacagccacacgcgacacacctgtctcggctgtggcgagcgcgatggccgcaaacgtggcgctggtgctgctatcctcctgctcgccctccacttccgccgccgccgcctcgctcctccctcgccgccgcttcctgccctcccgccgaagaagagcaagctcccgagccaccaccatcatgtcggcgttgggcgatgacccgatcagggaatggattcttacagaagggaaggccacgcagataaaagggatcaggtccattggtggtggctgcattaactccgctcagcgctatgataccgacgcgggccccttctttgtgaagaccaacagccgcattggtccagaaatgtttgaaggggaggctcttggtttgaaggcaatgtatgacacaaagtcgatccgtgttccgttgccatacaagtataggttggttctttacctacaggtggttcttttatcatcatggagtttattgaatttggtcgttcaaggggagaccagatttgggaaggaagcttgctgaaatgcataaggctgctaaatctgataaaggatatggtttcccggttgacaatactattggaagcactccacaaattaacacttggactgatgactggattgagttttactccaagcatagattgggttaccagttggagttggcatcgagacgatatggagattcggccatactcgaaaaaggtcagcggttgatcaagaatatccgcccactttttgatggagcggttattgagccatgcttgcttcatggtgatctgtggagcggaaacataagctctgatagcaatggggatcctgtaatattggatcctgcttgctactatggacacaacgaggcagagtttgggatgtcctggtgtgctggatttggtggggacttctacaacgcctattttcaggtgatgccgaaacagccagggtttgagaagaggagggacctctatctcctctaccactacctgaatcactacaatctctttggctctggctaccgttcatcagctatgtccataatcgaagactacctatatgtgctggcgatttagtctcttctgtctattcccacatggccacatggaaacgaaaaagatcttcatttgtgtaaataaatatctcactgcccatccatttggacacggttcggtggctcaaagaagaataatgtaatagtatagtggactctgattgaatttggcccgtcctactaaactaacaccaggaggcgcccgggggggctatattgttaacaacgttagtgaaaagcccatgtccctgtccgcgcacattcttaaaccaccgggtcgcccaggtccacccaacgtggcggcctcccattcgacccctg

SEQ ID NO: 138 - DNA, 1787 bp, Zea Mays
ccatccacctctccccccttctcatttaaacgcgcacccacgctgaacacacagcctcactgccctgccgccggccacttcttcttcttcgatcgctttcgcacgggatggcggcgagaggcgtgcaggcgccggcgccgcgacggccggtgacgctgcgggacttcctggagctcggctgcgactccagcagcgacggcttccgctcctacccgcgccgcctgctgcccctccctcccgacgccgtgctgcacctgcagcagcagcaggcgcccccgaccccgcgggcggaggccgcggccgcccagcggctgctcaggcggagctcgtcctcgctcgcgctcgcgctcttctcctcctccctccccggctccggctccggctccggcccagctggcgcgctcgccaggatctccagcatctccaggagcttctcgcggcggatcaaggaaggcttctggaggcgccgcgacgaggacgagggcgacggcgacggcgacgacgactacgacggcgactacttcgacgaccgggactcgtgcggcttcccctcgcctctcgtcagcagctgctccgcctccgactcggacgagtccgaggcggacgtgacgacggcgcccgagcgcaacaaagccaccgcttcctcctctacgtcgccgtcgccctccccaagctcggcggaccacgaccgcacgcgcacggacgccgccgttgctgacggggacaaggcggagacggcggcggtagaggacggcgactcgacgacgggtgcgcccagcacggtgggggacaagcagcaacagctcagccccgtgtccgttctggatttcgccttcgatgacaacgacggcgaggaggaagggagcgacgccggcaccagctgctcctgctcctcccccgccttccagttccagcgctgcacgccgccggcggtggacctccacgggacgaagccgcaggcgcagctgctgcacaagatcagacggtacgacggcgttgcgcagggaatcgaccccgtggacctcgacgcgcggttcacggcggccacctcggagtccggggagtccgccgacgccagcacgcgtctcgcaaccaccaccagcagctcgagcacggacaccagcagcagcagcagcagcagcgcggagacaacggcgccacagcacgacgacgaggaggcggagcaccagagcgccgagcgcgcgctctcgccctcgccctcgctccactaccaggcagaccaagaagagcccgacgacgagtaccgcctgctcgcgcggctgctggagcacgacgcggcggcggcggagtgcctggacgacgaggtcgcacgggtgctcgtcctcgacttcttcgcggagggcgccgaccgtcgtctcacccgttcggcggcggccggcggcaggccgctgcacgacgaccgaagcgagtcgctgctagtgagggccgccgccgcgtggctgcgtggcgcggggccgcggtggggcataggggacgtggcgcgctccggaaaggcggcgctggacgacatggagcgcagccggcggtggatgtgcgtgggcgaggaggagtgcgacgtcgccgcggacgtggagtgcgacgcggtcgacgccctcgtggacgagctggtcaccgagctagccatcgtgctgccccggtggccgcgctgtgacgtggccgtcgatgatgataatgtgctcgttgactgagtacgtgttgacgtcacaattcaatgacctcgccggcgaggtccagcgccagcaggcagtcgttcataccatacatac

SEQ ID NO: 139 - DNA, 1985 bp, Zea Mays
gggctgaaaggaacggagccgatgccgcagcagcagtgaggcccatacgtcattcgcgaatctctctcggcccattgttaactcagaggctggctcccgcgaccgcgccgcgagctaggcgcctaggcgtagcgtagctctctccaagtctccatttcccttcccgaaccctcgcgccgccgcctactccagcctccagcgtgatctgagtcctgaccaagccctaaacgccaccgccctcgcaaatctcctttcccttcgatccatggccgccgccgtcgccgcccccgcgccatcccgcaagacggagacctacaccgacaccaagcgccgcgacgacgtgcgcggcgccaacatcgccgctgcgcgcgccgtcgccgacgccgtgcgcacctcgctgggcccccgtggcatggataagatgatcgcttcgggcgaccaggctcaggaggtcatcatcaccaacgacggtgccaccatcctttcccgcatggcgctcctccagcccgccgcgcgcatgctcgccgagctatcccgctcccaggacgccgccgctggggacggcaccactaccgtcgtcgtcctcgctggatccctcctccgccgcgcccagtcgctcctctccgccggggctcaccccaccgccgctgccgacgccctccaccgtctcgccacgcgcgctgttgagatcctccacgccatggccatccccatcgagctatccgaccgggaatccctcgtcaagtctgcgtccacggctctcaactccaagaagcttggtggcaccgtggacgatactgagctcatccctggcctcatctttgacaagaaggctagccatgctgctgggggcccaactcggatggagaatgctaagatcgctgtcatacagttccaaatctcaccacccaagactgacattgagcagagtgtcattgtatccgactacgcacagatggaccgcatcctacgtgaggagcgcaattatatccttgggatggcaaagattctggtggtgaaggacgtggagagggatgagatggagttcatcaccaagaccctaaactgccttcccattgccaacattgagcacttccgcacggataagtttgggtatgcagatgttgttgaggaagtctctgttggagagggcaaggttgtgaagatcactggaatcaaggacatgggtaggaccgcaactgtacttgtcaggggatctaaccaattggttattgatgaagctgaacgcagtctccatgatgcactctgtgtcataaggtgcttggtcagcaagagatttttgattgctggtggtggtgctccagaaatagagatgtcaatgcagctggctgcttgggcaaaggagcttcgagggatggagagttactgcatcaaggagtttgctgaggcgcttgaggtcatcccttacacattggctgagaatgctgggctcaacccaatctccattgtcaccgaactcaggaatcgccatgccagaggtgagaagaacactggcatcaatgtgaggaaagggcagatcacaaacatcctggaggagaatgtcgtgcagccgttgctggtgagcacaagtgccattacgttagcctgcgagtgtgtcagaatgatcttgaagattgatgacattgtcactgttaggtaagagcgtgaagttggggtcatgtcagcctgctctgttctgtctggattgattattagttaggttactgcttaatgtaaaacttggttcatgggcgtgtttctacacttggttttgatgttagtactatccttgacatgaaactactaccagggttgcatctgcgatctctattttctttacattggccgtgtatgccttcgtttcggtcggccgcttacgcccatgggatttttttgagccggttgtgttgtaatctgttcttggctttatcagctattcagcttatatattttctttttgagaaatgggaagggtttcattcatt

SEQ ID NO: 140 - DNA, 2586 bp, Zea Mays
gacgaaagctgccgcagtcaaacagcgaataaaagccaaagccaccaggccagcaacaatagaagcgagcgagcgagcagcagtaggcagcggcgcgggcgaggagcagaccagcacccagcagccctcgtcggggggcggcagctgcagcttcaccagccgccgcctttccccgtctcctctgcctctgcctctccccctaacccccttccatttctccaccccaccccgctcccgcttccgcttcctcgccacttagttcgttccgcacccgcagccgcggctgcgttcgcattgggggcacgcaatggagcagtacgagaaggtggagaagatcggggagggcacgtacggggtggtgtacaaggcgctggacaaggccaccaacgagacgatcgcgctcaagaagatccgcctcgagcaggaggacgagggcgtcccgtccaccgccatccgcgagatctctctcctcaaggagatgaaccacggcaacatcgtcagattacatgatgttgtccacagcgagaagcgcatataccttgtcttcgagtacctggatctggacctcaagaagttcatggactcctgcccggagtttgctaagaatcccactttgatcaagtcatacctctaccagatactccacggtgttgcgtactgccattctcatagagttcttcatcgagacttgaaacctcaaaacttattgatagatcggcgcactaatgcactgaagcttgcagactttggtttagccagggcatttggaattcctgtccgtacatttactcatgaggtagtgacattatggtacagagctccagaaattctgcttggagcgcggcagtattccacaccagttgatgtgtggtctgtgggctgtatctttgcggaaatggtgaaccaaaagccactattccctggcgattctgagatcgacgaactttttaagatattcaggatactaggtacaccgaatgagcagagttggccaggagtcagttgtttgcctgacttcaagacagctttccccaggtggcaagctcaggacctggcaacagtagtcccaaatcttgaccctgctgggttggaccttctctctaaaatgcttcgatacgagccaagcaaaagaatcacagcgaggcaagcacttgagcatgagtacttcaaggaccttgaagtggattgctgacgttcgcatctccgcatcttccttggcaaagctccaccaaaggtacgaaagggggatagccacagcaaggcatatagcacggccatccacatatccccatcgcggaggaatgtcagaagcttccagaagtaccgcagccgcacctccgatggcaacaaatatgatcttcagccgtgaaggatgccgagtcatgacagcccacagtgcccataggagacactgagcaatgattatcacagtacaaaccttcatgttcaggcctgcagattttacaagcgtaaccgcgtaagccactaatacgtgctactccctatgtcctagtatataagatgtaagttacattcaaaaacaaaaaaaaatgtatttaattctctctatactactgcatcaatgtatacatgtctagaaagagcatgtcttatattatgaaactagaataaaaatcgttacgtctttatgtactaggatagagccatggagggagtacatccattcgctgttaaatctccatatcccatgaaaacaggaaagaaaatgtctagttataaggtaacaactaacaggttataagaccgtgtccagcagttcatccatatgatcacttaaaacattgttttgtactgttcacagagtgaagtttgaatatgagtatgagtatggataagcaggatagcctaaagcaccatgttacctacctaccatggaacaacaaacaaattcttgaccccattaattggcgagctttatctttggatgaactaaaattcaatttgaaacccctttggaacagacaaaaaaaatggaggaattataaaaagaacggaatcctaaaggtaaatttcctatgaagacctttagaacataagattgggtttcgatgaatcctacaaaaattccagtggaatagtttgtttcataagaattttggatgaattctaccaataggttgaacctcatggaaattggaacggttcctttgtgtcactctcattgaattcctgtattttttttctgtgctccatccagacattcaatcttgcaatttattgagggcctgtttggaacgcaggttaagggcctaagtattttcagtccatacgattcaagatgttggtgcattatattcctatgcttttcctattcctgtgtttgtagaatctcgcatttcaaagaggctgtattttttttgtacacataactcagtaatcaaccagtcaggtactaagattccaatctagcatactaatggaattttatatatcatataatctgggttacatacttagtgctggtaaaaaaacaaagtgtgcagaaacaataccgctatttttatagtgtcaggagtgcaagtatcagcggtcatgcccaagattacctttgtcaagttcgtagaa

SEQ ID NO: 141 - DNA, 3281 bp, Zea Mays
gacgaaagctgccgcagtcaaacagcgaataaaagccaaagccaccaggccagcaacaatagaagcgagcgagcgagcagcagtaggcagcggcgcgggcgaggagcagaccagcacccagcagccctcgtcggggggcggcagctgcagcttcaccagccgccgcctttccccgtctcctctgcctctgcctctccccctaacccccttccatttctccaccccaccccgctcccgcttccgcttcctcgccacttagttcgttccgcacccgcagccgcggctgcgttcgcattgggggcacgcaatggagcagtacgagaaggtggagaagatcggggagggcacgtacggggtggtgtacaaggcgctggacaaggccaccaacgagacgatcgcgctcaagaagatccgcctcgagcaggaggacgagggcgtcccgtccaccgccatccgcgagatctctctcctcaaggagatgaaccacggcaacatcgtcagattacatgatgttgtccacagcgagaagcgcatataccttgtcttcgagtacctggatctggacctcaagaagttcatggactcctgcccggagtttgctaagaatcccactttgatcaagtcatacctctaccagatactccacggtgttgcgtactgccattctcatagagttcttcatcgagacttgaaacctcaaaacttattgatagatcggcgcactaatgcactgaagcttgcagactttggtttagccagggcatttggaattcctgtccgtacatttactcatgaggtagtgacattatggtacagagctccagaaattctgcttggagcgcggcagtattccacaccagttgatgtgtggtctgtgggctgtatctttgcggaaatggtgaaccaaaagccactattccctggcgattctgagatcgacgaactttttaagatattcaggatactaggtacaccgaatgagcagagttggccaggagtcagttgtttgcctgacttcaagacagctttccccaggtggcaagctcaggacctggcaacagtagtcccaaatcttgaccctgctgggttggaccttctctctaaaatgcttcgatacgagccaagcaaaagaatcacagcgaggcaagcacttgagcatgagtacttcaaggaccttgaagtggtacagtgacctgctaaatgtgcttgacgttgcattgacatttgtatgagctgagtcgctcattcctttttatgaacgcctgtactcttctcattctctccctgcatttttgtcattcagctggatatttcgaatctggtgtgttttgagatgtattaaagaacgtcaaatagattaccgccttggtctctgtccattgaaagtaaatatccgtcatatgtttattttccccggaagcatctatggtttccttttatttctatgcgtcatgtaatgtcgataaatgtgtgcgatgcgttttaactttcattttttttttcaacaccagctttgtgagatgcactttgctcagcatctcacaaggaatagcaaacagttgcacacgcacacaaaaaaaagacattattatgatagccactcactgataacccatggtaacaatcttctgagattatagttgatgagcacgagcctaccaagtggcagttgctgtataaattaaagaatagaagtggccccttaaacaacatggccttctgaactgggacaagaacatcgtggaacaaaaataagacggtaattcacatgctaagttagtagttacctaagattacaagtgaaacttttatctttacaatggctgggcgcaggcatgaaattatcacacaggcgacttgttaacgtgccttcttcaggattgctgacgttcgcatctccgcatcttccttggcaaagctccaccaaaggtacgaaagggggatagccacagcaaggcatatagcacggccatccacatatccccatcgcggaggaatgtcagaagcttccagaagtaccgcagccgcacctccgatggcaacaaatatgatcttcagccgtgaaggatgccgagtcatgacagcccacagtgcccataggagacactgagcaatgattatcacagtacaaaccttcatgttcaggcctgcagattttacaagcgtaaccgcgtaagccactaatacgtgctactccctatgtcctagtatataagatgtaagttacattcaaaaacaaaaaaaaatgtatttaattctctctatactactgcatcaatgtatacatgtctagaaagagcatgtcttatattatgaaactagaataaaaatcgttacgtctttatgtactaggatagagccatggagggagtacatccattcgctgttaaatctccatatcccatgaaaacaggaaagaaaatgtctagttataaggtaacaactaacaggttataagaccgtgtccagcagttcatccatatgatcacttaaaacattgttttgtactgttcacagagtgaagtttgaatatgagtatgagtatggataagcaggatagcctaaagcaccatgttacctacctaccatggaacaacaaacaaattcttgaccccattaattggcgagctttatctttggatgaactaaaattcaatttgaaacccctttggaacagacaaaaaaaatggaggaattataaaaagaacggaatcctaaaggtaaatttcctatgaagacctttagaacataagattgggtttcgatgaatcctacaaaaattccagtggaatagtttgtttcataagaattttggatgaattctaccaataggttgaacctcatggaaattggaacggttcctttgtgtcactctcattgaattcctgtattttttttctgtgctccatccagacattcaatcttgcaatttattgagggcctgtttggaacgcaggttaagggcctaagtattttcagtccatacgattcaagatgttggtgcattatattcctatgcttttcctattcctgtgtttgtagaatctcgcatttcaaagaggctgtattttttttgtacacataactcagtaatcaaccagtcaggtactaagattccaatctagcatactaatggaattttatatatcatataatctgggttacatacttagtgctggtaaaaaaacaaagtgtgcagaaacaataccgctatttttatagtgtcaggagtgcaagtatcagcggtcatgcccaagattacctttgtcaagttcgtagaa

SEQ ID NO: 142 - DNA, 1845 bp, Zea Mays
aaaagcggcgctgccagtgtgtatattacacggcgcggaggacggggacgcggaggactcgcccggcccatcccgcaccccctacctccgaggctgcgatccgctcttgtaggctccctcgccaatccgctcctcctccctccctccaactgttgtgcgtgcagcggcgtcggagaagagatggcgtcggaggccaaggacgtgggcatcctcgccatggacatctacttcccgcccagctgcgtgctccaggaagagttggaaacacatgatggtgtgagcaaagggaagtacaccattgggcttgggcaggaaaatatggcattttgcactgaagttgaggatgttatttcgatgaggaatctggcaatactgatattgaaggagtggactcctcaaatgcgtgctatggtggaacagctgcattgtttaattgtgttaactgggttgaaagcaactcatgggatgggcgttatggacttgttgtttgcacagacagtgcggtttatgctgaaggtccggctcgtcctactggtggtgcagctgctattgcaatgctgattggaccaaatgctcctatttcttttgaaagcaaatataggggatctcatatggcccatgtatacgacttttacaagcctgatctcgcgagtgaatatccggtggttgatgggaagctatcacagacatgctacctcatggcattggactcctgctacaatgtattttgtaaaaagtacgaaaagcatgagggaaagcagttttcaatttttgatgcagattatgttgtgttccattctccatacaacaagcttgtacagaaaagctttgctcgtttgtactacaatgatttcttgagaaactgcagcacggttgatgaagagtcgagggaaaagttggcaccgtatgcaggcttgtcatctgaagaaagctaccagagtcgcgaccttgaaaaggcatctcagcaagttgcaaagaacctgtacgagtccaaggttcagccaacaacattgatcccaaagcaagttgggaatatgtatacagcatcactctatgctgctcttgcatcggttatacataatagacatgaaactctggcaggccagaggattgttatgttttcgtatggcagtgggttgacatcaacaatgttctctttcaagattaatgaaggccatcaccctttcagcttgctaaacattgcaaacataatggatgtttccaagaaattgaaggcaagacatgtggtcccgccaaagaaatttatcgaggtactgaaactgatggagcaccggtatggggcgaaagatttcgtgaccagtcaagacacaagtttgctatctgtaggcacatattatctcacgcatgttgactccaagtaccgaaggttctatgacgtgaaaggtgacggtgtcaccactactgcaatgtccaacggccactgatctgtcttctgcccggagctgcaacaagtcaaataacagaggcaggtgttcctaagcattctgattcttcttagattatctattaggaagggacgctggagcttagattaatctctgccaagttgtaaggttgtaaagttagttagagctgcgtcattgctgtaatgcttgcttggtaaaagttctggcgctcttcagttcttcagtgcttgcaaaattcaaatcaagctcactactagttgtaagaattctgaataatctgcagaatcactggttacatccaagttacgctgttgaatgcatgatttcatgtttaacacgattaatgcatctggattcagctgtgttgttggagtactcgtgtcgtgtcttgtacctttttaaaaagaagtttcttaca

SEQ ID NO: 143 - DNA, 1475 bp, Zea Mays
atggcacagcacagcgcggcgtgctccattttcttcctggcggccggcccagagccaaaacctaggactgggcacaacatgtctccatccgacgacggcgaggaaaccctcgccgcgctcatagaactgtctagaacgccggagggccgggagggtctcaccgacgtgctcatcgacaccctcttcctcctcccggcctccccgccgcgcctcttgctcctccgcctacgcctcctccgcaacctcctcgccggcgatgagctcaaccactacgccttcatcgagcactccggccccgccgccgtcgccgcctccgtgctctccttcccctcgctcgcccccgacgtggcgcgcgccgcgctccaggcgctcgggaacgccgcgctcgccggggagctccaccgcgacgccgtctggcaggcgctcttccctgaggcgctgcgggtgttcgcggggctcagggaccagggagtcctggatcccctgtgcatggttctcgacacgtgctgcggcggggaaggcggtcgcgggaggctccaggagctgtgtcacgaggagctgggcctgccaatcctcgtccaagctgtcactacggcgtcacaagtggagcacaaggaagagtggttagagtggcttctgttcaaagtctgtgctgaggagcagaagtttgagagcttgttctatgccttatgctctgctaatgatgtgggcgagtataatgctaagcatatttttcttctggatacgttgtcaaggtgtttgaatagccatcccgaagaagttaccgtctcagacagttttgcacatgatgtttttaatctacacaagcatgctgctgaaactgtgaattttacttaccgaggctggctttgtaaagcgccttctgagatacctaggtgagcttgagccaccaagtacaatcagaaaatcaatggcaggagcaggaggacaaggagataaccatccagctcttgaaaatgcaaaggtctgcccatacattggttacaggagagatttggttgcagtcattgctaattgcttacacagaaggaagaaggtgcaggatgagattaggcagttagatgggatcatgttgctgctgcagcaatgcgtcatcgatgaagataatccatacttgagggagtggggtcttctagctgttaagaacttgcttgaagaaaatgaagaaaatcaaaaggaggtttctgaacttgagatgcaaaaacctgttataactccagagattgctaacataggtctcaaggtggagatagacaaggaaacaggtcgtccgaaactagtcaatacttctgatacctgaactctgactacaggcactgccacaatcaaagttaatgttgatgctgtctgtggctaggaatccatgtgcttaggggtgacaatggactctaaattttaccctctaagatttagggatcggatcgaattaggattgggtcatatttgtattcatt

SEQ ID NO: 144 - DNA, 3404 bp, Zea Mays
ttccgatgcgtccgtccatcgtcgtcgatggggttctgctccttccgcggcctcgcctcccctttcgtcggatatcacctgtcgcgcgccctactagaatactaatccggaccccgatgctgcagtgtcccccctcgcccgcctcctaacactcgctgaaccgagttcgttccataatctcgacgcaccagtgtgcagctcatggtgaagaaacggaggttggggtcgattacgtggcgttgctccgcaacggatgaatcaatcagtggggagacaggtgcttgctcccggttcctggtagcggcggaactcggaggttcgcccggtgggcgtctacagaaagctaggtgatctcttgaatcgattcaggaaatatggagttttcttttctgctgatacaatgctgaaggtggggtcaatgtcactgcagtgacttgggtgacctataagcactgctcatattgtgaggttctcttggatattcaggaaggagccgcagatgttcccgccaagatctgggaatgtggcacacccagacagaggattcaccttgcccctggaatcgatgctgacggggtacttgagcaggtggcccttcatctcggtcacatggctggagatgaatttctcccagttctgctgtccgatgtgacgcacctgcctcgtgcactctaggctctccggtctggtgaagctctcctcaatggctccaatgtgctctgcccatagagacatcctgtacccgaaaatctgcaggtgaaagcacaccagattagcaaagctcatttgtctctatatgaaaatacaatattttgctgtgttgcctctatagggatgtacagtgttggctagtgagttagttttgtttagcatttagcactataatagaaaaaaactcgttagcactaggatctctttctgggtattcctagtttaacatatagtcccatttctgtaagcagcaaatgtttgtgccactggcttggcccacattgtgaactccattttcgtcttaaggaaaaaaatctcctaggtgttcttggaaggttggaagggaaataacacaatttgaattgtgatatgaacttctgtttttgtcattttgccacagaaaatatgatatacaaaacaaggtagcaatgtgacagtactgcaataccaagttaccaacttatcagaactgaggcatattacctgtccacgaggagcagaaagcatatttgcccatgtatgctggggttggtatgcagccattgcaatctctgtatctctagttccttccatggatctctggttgatgttagcggatccaattatcacatattcatcatccacaatcatgcctttcgagtgcacatacaccatgaatctcctattcttccgagcttggtcctgattggatatccaagttgcagcataattgtattttttggggaaatcagtacgtccttcagttttgggcatttctaaagtgtaccggaatcagcagcagaaaacagaacaatagtctgcagtctaacctgtgggttactggctgagaatggtccactagatgtgcaagtagtgtcctcagcttcacggttaccaaggcagaagaaattcaggtgaaatttgctcagggctcgaccatgaatgtcagaattatttattttgcagtgagttatggagccctttggtagacttacctgcacgtcccatctctctggatcatcgtcgtttgaatagatttcgtcgtcaatagcgataatatcaggacatcgtatgctgctggaccgtcgatcttggaatgcaagtcatgccatggctctcttgggccgcgagcatcttcaacctgagagtaaattatcggcacatgaggatctaacaaaatcgcgacaagcttcctgtctcctaataaaggaaaaacaaaatggaacgaagttccagaacaacaaggatggaattctttttgtggccattgcataaggttcttagtaaattcagtttgatacggtaaatgtggaaaaactactctcaccgcaaaatttgggttgtagtagtcttccttgtgaaatgtctgaagagttcgaaatagagtgtgctttggtgtatcatatcggcctccacatagatcaagtcctcccacaaaagcaacaatcttccttctatgattcccagcatcagcatccaagatcactgtcttctggtgatgagtaaagatagtgcctgtttcctggaaacgatggttattaccatcagtgcagattccagatggcagtgtgcttatgtggttgtcagatatcacaatagtttaagctgaagtataagacctgttgcttcacccagctgtgcctcttccctgcagatcgtgggcaaagcagtatctggaccgaagagtgcttgaaaaatctccgggtctcctcatcccttgtgcccatgtaaccttcctacaggcaagaatccaataagcaaacagtgttgtacaacagcatgggtactacggcgtgtaccatcttgatgccaaggagtctccgggacgtgggatcgtcccacacgagcagcagcacccgcacgccctcctgcgacttcctcctgagcaggtcgccgagcgccatgtcgtcgtggccgtcgcgcaccaggtggatggtgtggaacacggaccacccggtgatgtagatgagcctccgggcctggcatatggcgtcgtagacgtcgcgccagcactggccgtgccggtagcagtcgccgttgccgagccttacctccggcagcgttccgtcgggcacgtgcgcgtcctggtacagcgtgaccttcccgccccggcgcagcgggaagtaggtcctgggcacgccggcgaagtccgggcccggggtgacgccgtggtggtacatggtgagcctcgccacgggcacgtactgcacggacagccggagcacggcccccggcgcgcactccttgccgttgcgctccaggaccgggtacgcgccctcgaccatgtccccggcctgcagctggtcggcgcggacggcgacgacgccgatgagctccgcgcccacgacgtcgctgtccttgacgacgaagttgacggtggcggcctcgtgcgcgacgggcaccaggaactgctgcgcccacacggggttctcgtcgtcggggatgacgaaggtgcgcgccaccaccgcggaggcgacctgcaccgtcacgtacgggtcgctggtcatgccctccgacggcttgcacagcaggtcccgcatcctcttggacaggatgtccttgttgggaaggttcctcgcctcgtggatccagatgtccaggctgccgtgcagcagcaccgccggcgcgtccccggcggagccatgcaccaaccaagagacgctctcgtcgtcgtcctgcacgggcatcgtctgcctcgatccgatggcacgggg

SEQ ID NO: 145 - DNA, 2325 bp, Zea Mays
cggccttcagcactgcaaagtaggagtactggccatggagattctagacggagcaaaaggtaagctactgatacttaggttaggggtagtggtggactggtggttgtattttctaagaaggcaagcaacagacagatgatcgggtttgggggttttcgatgcgattaattatttccgccatttttttacatacggaacgaacgggcgccattgccattgcagctgagcttgctgcgtcgcagatgatcgggtaccctgcctccaccagcctatacaacagtcgcctgcctacttccttcgccatacgtacaccgggcgcactcacgattacctaaagctactgaatactgatgaccttcatcctcggagacacgacacgagctgagaacggtcctgccggccgtcaagcagattggattgggagctacgcctacgcggcggccttggccggcggtataacgatcgggctccggacgacgtgctcgctcgacacccacttcaggttcccctcggcgccggcgacggccggcggcccgttccaccgcaccgtcacggtgaagctctgcttctcgttcgccctggcgaaccgcagcaccgggggccgcaccaccacggacacggccctgggcatgtccaccacggccttgtacaccgagttggccttcccgacgttggtcacggtgcggcggacggtgatcggatgggacagcagcttcaccaccagcgacgggtagttgagctccgcctcggtgatggccttcagcttggcgcaggcgacgcggcgcccagttatctccttcacgccgtcgtccccgatgcccagcccgcagaggtaggcgatgtactcgccggcgccgaggtcgtacaccagccccgggtcgacggcgcgggacgggttcacgtagccggcgcccatgctgtagaagctcgcccgcctgtactgctcgtccttgatcggcacgcccgcgtggtccgccgtgcccgacgacgtcatgatcgccgacttgatcgccgcgggggaccagctcgggtgcaggctcttgatgatggccgcgatgccgctcaggtgcggcgtcgacatggacgtcccggactccatgaagaagggcaggctcacgtcgtccgcgaactccgggtgcatctcgctgggcgcccacgccgccaggatgttcattccgggcccggtgatgtcgggcttcaggatgcccgggctcgccttgttcggcccgcgcgacgagaagaaggagagcacgtcgacgccgtccttgacggcggcgtccaggccggcaacgatgtccatgatggagcaccggctccgcgtgcacaccttgtagatggccaggtgcgcgtgcggcgccatcccggacgccgtgccgtgcgcgttgccccgcacgtcggcgttctgcacgaagttgcccgccgccgtgctggccgtgtgcgtgccgtggcccgcgtcgtccacgggcggcgccgagtcgttgatggccgcgctcccgaacgcgcgcgcgccgatgaccttgttgctgcacccgccgccggcgatcgaccggaactggcaggcgcccttccacttcttgggcggcggcggcagcccggcgtcgccgaaggacgggtggctgggcaggatgccggtgtcgaggagcccaatcaccacgccgcggccgaagccggagcggctccagaagccgtccttgcccatgtggaggccgaggaagcccggcgagtgggtggtcgccagcggcaggaactcctctgggtacagccgcagacacccctccttgcgccgcagcgtctccgcctccgcgtcggtgaggcgggcagcgaagcccgtcagcacgtggctgtacgagtggatgatcctcggcccgtcgtccgccgccgagtccagcgtcgcctccggcaagaaggaccggtgccactcctccaacgaagcggtgctgccgccgtccctcggctcgagatgaaccacgtagttcttgcgctcctgcgcgtcggcgagcagcgcggcggcggaaagcaggagcaggggaaggaggcttctttgggtccgcatgactctggtaagcagccgccttggcgtttggtgctcggtagcgccgaatcgatttgaagcgagggagcagggtgcggggagggaagtggcgtggcaacaacggagggggtgccgggggtttatgtagggtggtggcaggcagcggcagtgtgcgccgggtggggggagtgagtgagtgagtgatgggcaggcagcgcagagcactggcggtgagctggcgagcagaatcgaagcagggggggaggaggaggaagaggactactgggccgatt

SEQ ID NO: 146 - DNA, 1530 bp, Zea Mays
taactatttatcatgtgaagcgccatctgcaggtacaattgtacaactaacaattgttttcgctgaaaatttagttctcccttctacgttttcattatagctttcattttctctcctacactcttgatatagaagtatcagcttgcgaaatattttcctgagcctaaagaaggtaagctaaaatcacgtgctcactgtgtacttttgtggtaacaacagctttttttgaaaagaatgaacatcttaaatccttagtctgtgtagataagaaggcttccttggaagatagagaagcacaatcaggaaagagcggcattgattcaagcaaaaacaagtgagactcctgtttacctaagaaggaaacatgcacataggcatcaaggtcttagttcacatcactttcctgttgttaggggaacaagatcatctgatgaagaattgtttcaaatatacactcattcagaaagatcgcaaccaaaattcacttatgcatcactgggcctcgatccaagagtgtgtgaataagttttgtggctgtatgtcctggattgagggtaggaatgcaagcagaaagacttttgaaaacaagctcactaatgcatactctttgtacaaagctgaggataaagataacaagtcatttcagttcatacactgctggaatgttttacgacttgaaccaaagtggaatgaaaagatgaatcaattagcttcaacaaaatctggttgcaagaaacagaaggcaacattttcagttatagatttgactggtaacttaaatggcgatgcaactccagagggtgatgcacctacaagacccattggcaggaagaaggctaagcaactattacgccgaggtggtgctgatggttacattgaggcattggataatttgtgggagaaaaagaaacaagctgatgtagacaaagaactgaagaagaaagattcaacgaatcactagaaattgagaaggagagacttgagatagagcgcacaagggttgcaaatgaacaaaaatgtatgcatatgaagagaatgctagagcctagaggaagaataatgaaagtgggcaatagcggaatggatgcagatcagcagcagtactacagaagcctacgaagtgagataaaccgtcgtcgtgggatcaacttttcattgtgatgatttgcttcatgtagtcgtagaatcagattgcttgaatcatataccacttcttttatcaaaatttgaacttcaaatttacttgttagatgacatttctgttaaataaattacttgttggatgacatttcttctaagtaaattagttgttggatgagaataatgtatgtgaatcatgtcaggttgcagctcatgcactgtatgataataatgcgatactgaacagagtttatgatcactaactaaagtttgagataaaacacaacctctgactcgacagacaaaatagctggtctggcctgattccattacctttcttctggtcatacctgcttgcagtcacataacctcagactcgacagacaaatg

SEQ ID NO: 147 - DNA, 2243 bp, Zea Mays
ctggcatgtggcgcctttcgacgcgcagtttgcacgacacgcccgcacacctagcagtccagtcgtcgcatcctctccgggctccgggctccggacttccgtttccgctgccttctccggttctcccctcaccccactagcccccctgctccgtttctctccccgcccacagctcgaacgccaccaccttcattgtccgcgcgcccgcggctttcgaaaccctagcaccgatccccgtcgccagtcgatcgcagacgcttggagacgttcggggcccatgacgagcggcctctgagcgcgcgagagactagactgctgggtgtgctctagctagatccgaggggcttccgccgatggcgagggcggaggccaactgggagcggctggtgcgcgcggccctgcgcggggagcggctcggcagcgcctacggccagccggtcaccggcatcgccgggaatgtcccgtcgtcgctcggcaacaacgtgcacatcgaggaggtgctccgcgccgccgacgagatccaggatgaagaccccaccatcgccaggatcctttgtgagcatggttacacgttagcccagagtttggatccgaacagcgaagggagaggagtattgcagttcaaaaccggtttaatgtcagtgatcaggcaaaaactagcgaagaggggaggtgctgctattgaccgaagtcaggatattgctaaattgcaagaattttacaagctttatagagaaaagcataaagtggatgagttgattgaagatgaaatgaagctgagggaatctgccgtgttcagcggtaaccttggcgagctagaacggaaaactaggaagcgcaaaaaagtacttgcgactttgaaggtcttatggtcagtaatagaggatatgacaaaggacatatcaccagaggatgcaaacaaattgatatctgaagagatgaaaagggtcatgcaaaaggatgcagcaaggacggaggatgttgttccatataatattattcctctagattccttgacttctaccactaatgcaattgtgaattttccagaggtgagggcagcaatatcaactctgcagtactatactgatctgcccaggcttcctggtaccttttcagtccctgatgctaggaattcagatatcctggatcttttgcaatgtgtatttggttttcagggggataatgtgaaaaaccaaagagagcatatcattcacctactggcgaatgaacaatctcgtgtgggaaaactatcaggaaacgaaccgaaaattgatgagggtgccgtgcatgctgtgttttctaaagcccttgataactatatcaaatggtgcaactatctgcctcttcgtcctgtctgggataacaatgattcgttgacaaaggaaaagaagttgctatatgtgtgtttatactacttgatgtggggagaagctgctaacgtgcgatttattccagagggcttatgctacatatttcatcatctagcaagagaattaggggtgattctgcagaaacaaactgcagagccagctgaaagctgcaattctggtggtggcgtatcgtttcttgacaatgtcatttatcctttctatgaaatcattgcagcggtaagtgtgcctgctggtgagctaataccagtcattatttttggtcctatatggttttcttaatgttgaatgtccgcaggaagcagccaataataaaaacgggcgtgcaccacattctgaatggagaaattatgatgatttcaatgagtttttctggtctcataagtgcttccacctacgatggccttggaacctgagcgacccgtttttctcgaagcccagtaggaaatataagggcttgctcagtaggaatcatcactacggaaagacatcttttgtggaacataggacttttcttcatctttaccacagctttcatcgcctttggatgttccttattatgatgtttcagggactgactatcattgctttcaatgatggtagttttgacaggaagaccatattgcaacttcttagtctgggtcctacttatgtcgtaatgaaatttattgagagtctattggatattctaatgatgtatggtgcctattcaacatctcgtggatctgcaatcaccagagtggcatggcgattctgctggtttactatagcttcagttgcaatttgctacctatatatgagagctgcatatcattgtattaatagaagaagagtgtacagagtacacaaggt

SEQ ID NO: 148 - DNA, 3872 bp, Zea Mays
ctggcatgtggcgcctttcgacgcgcagtttgcacgacacgcccgcacacctagcagtccagtcgtcgcatcctctccgggctccgggctccggacttccgtttccgctgccttctccggttctcccctcaccccactagcccccctgctccgtttctctccccgcccacagctcgaacgccaccaccttcattgtccgcgcgcccgcggctttcgaaaccctagcaccgatccccgtcgccagtcgatcgcagacgcttggagacgttcggggcccatgacgagcggcctctgagcgcgcgagagactagactgctgggtgtgctctagctagatccgaggggcttccgccgatggcgagggcggaggccaactgggagcggctggtgcgcgcggccctgcgcggggagcggctcggcagcgcctacggccagccggtcaccggcatcgccgggaatgtcccgtcgtcgctcggcaacaacgtgcacatcgaggaggtgctccgcgccgccgacgagatccaggatgaagaccccaccatcgccaggatcctttgtgagcatggttacacgttagcccagagtttggatccgaacagcgaagggagaggagtattgcagttcaaaaccggtttaatgtcagtgatcaggcaaaaactagcgaagaggggaggtgctgctattgaccgaagtcaggatattgctaaattgcaagaattttacaagctttatagagaaaagcataaagtggatgagttgattgaagatgaaatgaagctgagggaatctgccgtgttcagcggtaaccttggcgagctagaacggaaaactaggaagcgcaaaaaagtacttgcgactttgaaggtcttatggtcagtaatagaggatatgacaaaggacatatcaccagaggatgcaaacaaattgatatctgaagagatgaaaagggtcatgcaaaaggatgcagcaaggacggaggatgttgttccatataatattattcctctagattccttgacttctaccactaatgcaattgtgaattttccagaggtgagggcagcaatatcaactctgcagtactatactgatctgcccaggcttcctggtaccttttcagtccctgatgctaggaattcagatatcctggatcttttgcaatgtgtatttggttttcagggggataatgtgaaaaaccaaagagagcatatcattcacctactggcgaatgaacaatctcgtgtgggaaaactatcaggaaacgaaccgaaaattgatgagggtgccgtgcatgctgtgttttctaaagcccttgataactatatcaaatggtgcaactatctgcctcttcgtcctgtctgggataacaatgattcgttgacaaaggaaaagaagttgctatatgtgtgtttatactacttgatgtggggagaagctgctaacgtgcgatttattccagagggcttatgctacatatttcatcatctagcaagagaattaggggtgattctgcagaaacaaactgcagagccagctgaaagctgcaattctggtggtggcgtatcgtttcttgacaatgtcatttatcctttctatgaaatcattgcagcggaagcagccaataataaaaacgggcgtgcaccacattctgaatggagaaattatgatgatttcaatgagtttttctggtctcataagtgcttccacctacgatggccttggaacctgagcgacccgtttttctcgaagcccagtaggaaatataagggcttgctcagtaggaatcatcactacggaaagacatcttttgtggaacataggacttttcttcatctttaccacagctttcatcgcctttggatgttccttattatgatgtttcagggactgactatcattgctttcaatgatggtagttttgacaggaagaccatattgcaacttcttagtctgggtcctacttatgtcgtaatgaaatttattgagagtctattggatattctaatgatgtatggtgcctattcaacatctcgtggatctgcaatcaccagagtggcatggcgattctgctggtttactatagcttcagttgcaatttgctacctatatatcaagacacttcaagatggcacagagtcagcaacattcaagatatatgtttttgtaatcagtgcatatgtgggcattaagataattttcagcctacttatgagtgtcccttgttgccatggtttggctgaggcttgctatcgctggtctgctgtacgccttgttaagtggatgcatcaggagaataattatgttggaagaggcatgcatgagagtccccttgactatatcaaatacgccactttctggattgcaattcttggtgcaaaattttcattcacctattttcttcagataaaacctcttgtagaaccaacaagaactataatcaatttcactggcctgcagtatgcttggcatgattttttctcgaagaataatcataatgctcttacaatcctttctttatgggctccagtgctgtcaatttaccttttggacattcatgtattctacactgtattgtctgctatttatggatttctccttggtgcacgtgatcgcctgggagagattagtactgtcgaggctgttcacagattctttgagaagtttcctggagcattcatgcatagacttcatgttgaggttcccaaaaggaagcaactgctatcttctggtcaggaaatagagttaaacaagtttgacgcatctagattctcccccttctggaatgaaatagtgaggaatttaagggaagaggattatattaataattttgaactagaattgcttttgatgcccaagaatgacgttggagttctaccgattgtgcaatggccagttttcttgcttgctagcaaggttttcttggccaaagagattgcagaggactgcaaagactcacaagaagaactttggttaaggatatcgaaggatgaatacatgcaatatgctgttgtagagtccttccatagcatttatcatattctgacgtctatactagagaaagaaggccgcctctgggtggaaagaatttatggtggtatccgagacagcatttcgaagcggaccatccaaagtgatcttcatttcaaaaaactgcttaatgttattgccaagcttgttgctgtattgggaatactgcgaggtacgacggagtccagtgatttgaaaaaaggtttggttaatgctattcaagacctatatgatgttgttcatcatgaagcgttttcggttgatatgagtggccacattgaagactgggatcaaattaatttagcaagggctgaaggtcgcctcttcaataaactcaagtggccaaatgatcccaaattgaaagacttgatcaagagattgtattcacttctgacaattaaagaatctgctgcaactgtccctaaaaatttagaagccaggcgaagacttcagttctttacgaactcactgttcatggaaatgcctgttgcacggcctgtttcggaaatggtctcctttagtgtgtttactccatattactctgagattgttctctacagcatggctgaacttcagaagaaaaacgaagacggtataactacactgttttatctccagaagatttacccaggatggcagctgcagtctggagttgagaatagacatgttttcactattgctccaagtggcacctattcagtaaagtctgcttatgaaaggctgtgggaagaggtgggggctgctgtcaacggactcaccaaaagaggacttgactcccttatcatcctggagcctggattttgtggaaccatagaaatatatgcgtctttgatgctgcagcctaat

SEQ ID NO: 149 - DNA, 3949 bp, Zea Mays
ctggcatgtggcgcctttcgacgcgcagtttgcacgacacgcccgcacacctagcagtccagtcgtcgcatcctctccgggctccgggctccggacttccgtttccgctgccttctccggttctcccctcaccccactagcccccctgctccgtttctctccccgcccacagctcgaacgccaccaccttcattgtccgcgcgcccgcggctttcgaaaccctagcaccgatccccgtcgccagtcgatcgcagacgcttggagacgttcggggcccatgacgagcggcctctgagcgcgcgagagactagactgctgggtgtgctctagctagatccgaggggcttccgccgatggcgagggcggaggccaactgggagcggctggtgcgcgcggccctgcgcggggagcggctcggcagcgcctacggccagccggtcaccggcatcgccgggaatgtcccgtcgtcgctcggcaacaacgtgcacatcgaggaggtgctccgcgccgccgacgagatccaggatgaagaccccaccatcgccaggatcctttgtgagcatggttacacgttagcccagagtttggatccgaacagcgaagggagaggagtattgcagttcaaaaccggtttaatgtcagtgatcaggcaaaaactagcgaagaggggaggtgctgctattgaccgaagtcaggatattgctaaattgcaagaattttacaagctttatagagaaaagcataaagtggatgagttgattgaagatgaaatgaagctgagggaatctgccgtgttcagcggtaaccttggcgagctagaacggaaaactaggaagcgcaaaaaagtacttgcgactttgaaggtcttatggtcagtaatagaggatatgacaaaggacatatcaccagaggatgcaaacaaattgatatctgaagagatgaaaagggtcatgcaaaaggatgcagcaaggacggaggatgttgttccatataatattattcctctagattccttgacttctaccactaatgcaattgtgaattttccagaggtgagggcagcaatatcaactctgcagtactatactgatctgcccaggcttcctggtaccttttcagtccctgatgctaggaattcagatatcctggatcttttgcaatgtgtatttggttttcagggggataatgtgaaaaaccaaagagagcatatcattcacctactggcgaatgaacaatctcgtgtgggaaaactatcaggaaacgaaccgaaaattgatgagggtgccgtgcatgctgtgttttctaaagcccttgataactatatcaaatggtgcaactatctgcctcttcgtcctgtctgggataacaatgattcgttgacaaaggaaaagaagttgctatatgtgtgtttatactacttgatgtggggagaagctgctaacgtgcgatttattccagagggcttatgctacatatttcatcatctagcaagagaattaggggtgattctgcagaaacaaactgcagagccagctgaaagctgcaattctggtggtggcgtatcgtttcttgacaatgtcatttatcctttctatgaaatcattgcagcggaagcagccaataataaaaacgggcgtgcaccacattctgaatggagaaattatgatgatttcaatgagtttttctggtctcataagtgcttccacctacgatggccttggaacctgagcgacccgtttttctcgaagcccagtaggaaatataagggcttgctcagtaggaatcatcactacggaaagacatcttttgtggaacataggacttttcttcatctttaccacagctttcatcgcctttggatgttccttattatgatgtttcagggactgactatcattgctttcaatgatggtagttttgacaggaagaccatattgcaacttcttagtctgggtcctacttatgtcgtaatgaaatttattgagagtctattggatattctaatgatgtatggtgcctattcaacatctcgtggatctgcaatcaccagagtggcatggcgattctgctggtttactatagcttcagttgcaatttgctacctatatatcaagacacttcaagatggcacagagtcagcaacattcaagatatatgtttttgtaatcagtgcatatgtgggcattaagataattttcagcctacttatgagtgtcccttgttgccatggtttggctgaggcttgctatcgctggtctgctgtacgccttgttaagtggatgcatcaggagaataattatgttggaagaggcatgcatgagagtccccttgactatatcaaatacgccactttctggattgcaattcttggtgcaaaattttcattcacctattttcttcagataaaacctcttgtagaaccaacaagaactataatcaatttcactggcctgcagtatgcttggcatgattttttctcgaagaataatcataatgctcttacaatcctttctttatgggctccagtgctgtcaattagtactgtcgaggctgttcacagattctttgagaagtttcctggagcattcatgcatagacttcatgttgaggttcccaaaaggaagcaactgctatcttctggtcaggaaatagagttaaacaagtttgacgcatctagattctcccccttctggaatgaaatagtgaggaatttaagggaagaggattatattaataattttgaactagaattgcttttgatgcccaagaatgacgttggagttctaccgattgtgcaatggccagttttcttgcttgctagcaaggttttcttggccaaagagattgcagaggactgcaaagactcacaagaagaactttggttaaggatatcgaaggatgaatacatgcaatatgctgttgtagagtccttccatagcatttatcatattctgacgtctatactagagaaagaaggccgcctctgggtggaaagaatttatggtggtatccgagacagcatttcgaagcggaccatccaaagtgatcttcatttcaaaaaactgcttaatgttattgccaagcttgttgctgtattgggaatactgcgaggtacgacggagtccagtgatttgaaaaaaggtttggttaatgctattcaagacctatatgatgttgttcatcatgaagcgttttcggttgatatgagtggccacattgaagactgggatcaaattaatttagcaagggctgaaggtcgcctcttcaataaactcaagtggccaaatgatcccaaattgaaagacttgatcaagagattgtattcacttctgacaattaaagaatctgctgcaactgtccctaaaaatttagaagccaggcgaagacttcagttctttacgaactcactgttcatggaaatgcctgttgcacggcctgtttcggaaatggtctcctttagtgtgtttactccatattactctgagattgttctctacagcatggctgaacttcagaagaaaaacgaagacggtataactacactgttttatctccagaagatttacccagatgaatggaagaacttccttactcgtatcaacagggatgaaaatgcagcagactctgagctttttggcaacccaaatgacatacttgaactacgtctatgggcttcttatcgtgggcagaccttagctcgaactgtccgtggtatgatgtactataggaaagcccttatgctgcagagttatttggagaggatacaatctgaagatttggaatctacattagggttggctggttcagctgataggcattttgagttgtcacctgaggcgcgtgctcaggctgatttgaagtttacatatgtggttacctgccaaatttatggaaaacagaagggggaagggaaggctgaactgcagacatatccttactaatgcaaagg

SEQ ID NO: 150 - DNA, 4035 bp, Zea Mays
ctggcatgtggcgcctttcgacgcgcagtttgcacgacacgcccgcacacctagcagtccagtcgtcgcatcctctccgggctccgggctccggacttccgtttccgctgccttctccggttctcccctcaccccactagcccccctgctccgtttctctccccgcccacagctcgaacgccaccaccttcattgtccgcgcgcccgcggctttcgaaaccctagcaccgatccccgtcgccagtcgatcgcagacgcttggagacgttcggggcccatgacgagcggcctctgagcgcgcgagagactagactgctgggtgtgctctagctagatccgaggggcttccgccgatggcgagggcggaggccaactgggagcggctggtgcgcgcggccctgcgcggggagcggctcggcagcgcctacggccagccggtcaccggcatcgccgggaatgtcccgtcgtcgctcggcaacaacgtgcacatcgaggaggtgctccgcgccgccgacgagatccaggatgaagaccccaccatcgccaggatcctttgtgagcatggttacacgttagcccagagtttggatccgaacagcgaagggagaggagtattgcagttcaaaaccggtttaatgtcagtgatcaggcaaaaactagcgaagaggggaggtgctgctattgaccgaagtcaggatattgctaaattgcaagaattttacaagctttatagagaaaagcataaagtggatgagttgattgaagatgaaatgaagctgagggaatctgccgtgttcagcggtaaccttggcgagctagaacggaaaactaggaagcgcaaaaaagtacttgcgactttgaaggtcttatggtcagtaatagaggatatgacaaaggacatatcaccagaggatgcaaacaaattgatatctgaagagatgaaaagggtcatgcaaaaggatgcagcaaggacggaggatgttgttccatataatattattcctctagattccttgacttctaccactaatgcaattgtgaattttccagaggtgagggcagcaatatcaactctgcagtactatactgatctgcccaggcttcctggtaccttttcagtccctgatgctaggaattcagatatcctggatcttttgcaatgtgtatttggttttcagggggataatgtgaaaaaccaaagagagcatatcattcacctactggcgaatgaacaatctcgtgtgggaaaactatcaggaaacgaaccgaaaattgatgagggtgccgtgcatgctgtgttttctaaagcccttgataactatatcaaatggtgcaactatctgcctcttcgtcctgtctgggataacaatgattcgttgacaaaggaaaagaagttgctatatgtgtgtttatactacttgatgtggggagaagctgctaacgtgcgatttattccagagggcttatgctacatatttcatcatctagcaagagaattaggggtgattctgcagaaacaaactgcagagccagctgaaagctgcaattctggtggtggcgtatcgtttcttgacaatgtcatttatcctttctatgaaatcattgcagcggaagcagccaataataaaaacgggcgtgcaccacattctgaatggagaaattatgatgatttcaatgagtttttctggtctcataagtgcttccacctacgatggccttggaacctgagcgacccgtttttctcgaagcccagtaggaaatataagggcttgctcagtaggaatcatcactacggaaagacatcttttgtggaacataggacttttcttcatctttaccacagctttcatcgcctttggatgttccttattatgatgtttcagggactgactatcattgctttcaatgatggtagttttgacaggaagaccatattgcaacttcttagtctgggtcctacttatgtcgtaatgaaatttattgagagtctattggatattctaatgatgtatggtgcctattcaacatctcgtggatctgcaatcaccagagtggcatggcgattctgctggtttactatagcttcagttgcaatttgctacctatatatcaagacacttcaagatggcacagagtcagcaacattcaagatatatgtttttgtaatcagtgcatatgtgggcattaagataattttcagcctacttatgagtgtcccttgttgccatggtttggctgaggcttgctatcgctggtctgctgtacgccttgttaagtggatgcatcaggagaataattatgttggaagaggcatgcatgagagtccccttgactatatcaaatacgccactttctggattgcaattcttggtgcaaaattttcattcacctattttcttcagataaaacctcttgtagaaccaacaagaactataatcaatttcactggcctgcagtatgcttggcatgattttttctcgaagaataatcataatgctcttacaatcctttctttatgggctccagtgctgtcaatttaccttttggacattcatgtattctacactgtattgtctgctatttatggatttctccttggtgcacgtgatcgcctgggagagattagtactgtcgaggctgttcacagattctttgagaagtttcctggagcattcatgcatagacttcatgttgaggttcccaaaaggaagcaactgctatcttctggtcaggaaatagagttaaacaagtttgacgcatctagattctcccccttctggaatgaaatagtgaggaatttaagggaagaggattatattaataattttgaactagaattgcttttgatgcccaagaatgacgttggagttctaccgattgtgcaatggccagttttcttgcttgctagcaaggttttcttggccaaagagattgcagaggactgcaaagactcacaagaagaactttggttaaggatatcgaaggatgaatacatgcaatatgctgttgtagagtccttccatagcatttatcatattctgacgtctatactagagaaagaaggccgcctctgggtggaaagaatttatggtggtatccgagacagcatttcgaagcggaccatccaaagtgatcttcatttcaaaaaactgcttaatgttattgccaagcttgttgctgtattgggaatactgcgaggtacgacggagtccagtgatttgaaaaaaggtttggttaatgctattcaagacctatatgatgttgttcatcatgaagcgttttcggttgatatgagtggccacattgaagactgggatcaaattaatttagcaagggctgaaggtcgcctcttcaataaactcaagtggccaaatgatcccaaattgaaagacttgatcaagagattgtattcacttctgacaattaaagaatctgctgcaactgtccctaaaaatttagaagccaggcgaagacttcagttctttacgaactcactgttcatggaaatgcctgttgcacggcctgtttcggaaatggtctcctttaggtgtttactccatattactctgagattgttctctacagcatggctgaacttcagaagaaaaacgaagacggtataactacactgttttatctccagaagatttacccagatgaatggaagaacttccttactcgtatcaacagggatgaaaatgcagcagactctgagctttttggcaacccaaatgacatacttgaactacgtctatgggcttcttatcgtgggcagaccttagctcgaactgtccgtggtatgatgtactataggaaagcccttatgctgcagagttatttggagaggatacaatctgaagatttggaatctacattagggttggctggttcagctgataggcattttgagttgtcacctgaggcgcgtgctcaggctgatttgaagtttacatatgtggttacctgccaaatttatggaaaacagaagggggaagggaaggctgaactgcagacatatccttactaatgcaaagg

SEQ ID NO: 151 - DNA, 4018 bp, Zea Mays
ctggcatgtggcgcctttcgacgcgcagtttgcacgacacgcccgcacacctagcagtccagtcgtcgcatcctctccgggctccgggctccggacttccgtttccgctgccttctccggttctcccctcaccccactagcccccctgctccgtttctctccccgcccacagctcgaacgccaccaccttcattgtccgcgcgcccgcggctttcgaaaccctagcaccgatccccgtcgccagtcgatcgcagacgcttggagacgttcggggcccatgacgagcggcctctgagcgcgcgagagactagactgctgggtgtgctctagctagatccgaggggcttccgccgatggcgagggcggaggccaactgggagcggctggtgcgcgcggccctgcgcggggagcggctcggcagcgcctacggccagccggtcaccggcatcgccgggaatgtcccgtcgtcgctcggcaacaacgtgcacatcgaggaggtgctccgcgccgccgacgagatccaggatgaagaccccaccatcgccaggatcctttgtgagcatggttacacgttagcccagagtttggatccgaacagcgaagggagaggagtattgcagttcaaaaccggtttaatgtcagtgatcaggcaaaaactagcgaagaggggaggtgctgctattgaccgaagtcaggatattgctaaattgcaagaattttacaagctttatagagaaaagcataaagtggatgagttgattgaagatgaaatgaagctgagggaatctgccgtgttcagcggtaaccttggcgagctagaacggaaaactaggaagcgcaaaaaagtacttgcgactttgaaggtcttatggtcagtaatagaggatatgacaaaggacatatcaccagaggatgcaaacaaattgatatctgaagagatgaaaagggtcatgcaaaaggatgcagcaaggacggaggatgttgttccatataatattattcctctagattccttgacttctaccactaatgcaattgtgaattttccagaggtgagggcagcaatatcaactctgcagtactatactgatctgcccaggcttcctggtaccttttcagtccctgatgctaggaattcagatatcctggatcttttgcaatgtgtatttggttttcagggggataatgtgaaaaaccaaagagagcatatcattcacctactggcgaatgaacaatctcgtgtgggaaaactatcaggaaacgaaccgaaaattgatgagggtgccgtgcatgctgtgttttctaaagcccttgataactatatcaaatggtgcaactatctgcctcttcgtcctgtctgggataacaatgattcgttgacaaaggaaaagaagttgctatatgtgtgtttatactacttgatgtggggagaagctgctaacgtgcgatttattccagagggcttatgctacatatttcatcatctagcaagagaattaggggtgattctgcagaaacaaactgcagagccagctgaaagctgcaattctggtggtggcgtatcgtttcttgacaatgtcatttatcctttctatgaaatcattgcagcggaagcagccaataataaaaacgggcgtgcaccacattctgaatggagaaattatgatgatttcaatgagtttttctggtctcataagtgcttccacctacgatggccttggaacctgagcgacccgtttttctcgaagcccagtaggaaatataagggcttgctcagtaggaatcatcactacggaaagacatcttttgtggaacataggacttttcttcatctttaccacagctttcatcgcctttggatgttccttattatgatgtttcagggactgactatcattgctttcaatgatggtagttttgacaggaagaccatattgcaacttcttagtctgggtcctacttatgtcgtaatgaaatttattgagagtctattggatattctaatgatgtatggtgcctattcaacatctcgtggatctgcaatcaccagagtggcatggcgattctgctggtttactatagcttcagttgcaatttgctacctatatatcaagacacttcaagatggcacagagtcagcaacattcaagatatatgtttttgtaatcagtgcatatgtgggcattaagataattttcagcctacttatgagtgtcccttgttgccatggtttggctgaggcttgctatcgctggtctgctgtacgccttgttaagtggatgcatcaggagaataattatgttggaagaggcatgcatgagagtccccttgactatatcaaatacgccactttctggattgcaattcttggtgcaaaattttcattcacctattttcttcagataaaacctcttgtagaaccaacaagaactataatcaatttcactggcctgcagtatgcttggcatgattttttctcgaagaataatcataatgctcttacaatcctttctttatgggctccagtgctgtcaatttaccttttggacattcatgtattctacactgtattgtctgctatttatggatttctccttggtgcacgtgatcgcctgggagagattagtactgtcgaggctgttcacagattctttgagaagtttcctggagcattcatgcatagacttcatgttgaggttcccaaaaggaagcaactgctatcttctggtcaggaaatagagttaaacaagtttgacgcatctagattctcccccttctggaatgaaatagtgaggaatttaagggaagaggattatattaataattttgaactagaattgcttttgatgcccaagaatgacgttggagttctaccgattgtgcaatggccagttttcttgcttgctagcaaggttttcttggccaaagagattgcagaggactgcaaagactcacaagaagaactttggttaaggatatcgaaggatgaatacatgcaatatgctgttgtagagtccttccatagcatttatcatattctgacgtctatactagagaaagaaggccgcctctgggtggaaagaatttatggtggtatccgagacagcatttcgaagcggaccatccaaagtgatcttcatttcaaaaaactgcttaatgttattgccaagcttgttgctgtattgggaatactgcgaggtacgacggagtccagtgatttgaaaaaaggtttggttaatgctattcaagacctatatgatgttgttcatcatgaagcgttttcggttgatatgagtggccacattgaagactgggatcaaattaatttagcaagggctgaaggtcgcctcttcaataaactcaagtggccaaatgatcccaaattgaaagacttgatcaagagattgtattcacttctgacaattaaagaatctgctgcaactgtccctaaaaatttagaagccaggcgaagacttcagttctttacgaactcactgttcatggaaatgcctgttgcacggcctgtttcggaaatggtctcctttagtgtgtttactccatattactctgagattgttctctacagcatggctgaacttcagaagaaaaacgaagacggtataactacactgttttatctccagaagatttacccagatgaatggaagaacttccttactcgtatcaacagggatgaaaatgcagcagactctgagctttttggcaacccaaatgacatacttgaactacgtctatgggcttcttatcgtgggcagaccttagctcgaactgtccgtggtatgatgtactataggaaagcccttatgctgcagagttatttggagaggatacaatctgaagggttggctggttcagctgataggcattttgagttgtcacctgaggcgcgtgctcaggctgatttgaagtttacatatgtggttacctgccaaatttatggaaaacagaagggggaagggaaggctgaactgcagacatatccttactaatgcaaagg

SEQ ID NO: 152 - DNA, 4036 bp, Zea Mays
ctggcatgtggcgcctttcgacgcgcagtttgcacgacacgcccgcacacctagcagtccagtcgtcgcatcctctccgggctccgggctccggacttccgtttccgctgccttctccggttctcccctcaccccactagcccccctgctccgtttctctccccgcccacagctcgaacgccaccaccttcattgtccgcgcgcccgcggctttcgaaaccctagcaccgatccccgtcgccagtcgatcgcagacgcttggagacgttcggggcccatgacgagcggcctctgagcgcgcgagagactagactgctgggtgtgctctagctagatccgaggggcttccgccgatggcgagggcggaggccaactgggagcggctggtgcgcgcggccctgcgcggggagcggctcggcagcgcctacggccagccggtcaccggcatcgccgggaatgtcccgtcgtcgctcggcaacaacgtgcacatcgaggaggtgctccgcgccgccgacgagatccaggatgaagaccccaccatcgccaggatcctttgtgagcatggttacacgttagcccagagtttggatccgaacagcgaagggagaggagtattgcagttcaaaaccggtttaatgtcagtgatcaggcaaaaactagcgaagaggggaggtgctgctattgaccgaagtcaggatattgctaaattgcaagaattttacaagctttatagagaaaagcataaagtggatgagttgattgaagatgaaatgaagctgagggaatctgccgtgttcagcggtaaccttggcgagctagaacggaaaactaggaagcgcaaaaaagtacttgcgactttgaaggtcttatggtcagtaatagaggatatgacaaaggacatatcaccagaggatgcaaacaaattgatatctgaagagatgaaaagggtcatgcaaaaggatgcagcaaggacggaggatgttgttccatataatattattcctctagattccttgacttctaccactaatgcaattgtgaattttccagaggtgagggcagcaatatcaactctgcagtactatactgatctgcccaggcttcctggtaccttttcagtccctgatgctaggaattcagatatcctggatcttttgcaatgtgtatttggttttcagggggataatgtgaaaaaccaaagagagcatatcattcacctactggcgaatgaacaatctcgtgtgggaaaactatcaggaaacgaaccgaaaattgatgagggtgccgtgcatgctgtgttttctaaagcccttgataactatatcaaatggtgcaactatctgcctcttcgtcctgtctgggataacaatgattcgttgacaaaggaaaagaagttgctatatgtgtgtttatactacttgatgtggggagaagctgctaacgtgcgatttattccagagggcttatgctacatatttcatcatctagcaagagaattaggggtgattctgcagaaacaaactgcagagccagctgaaagctgcaattctggtggtggcgtatcgtttcttgacaatgtcatttatcctttctatgaaatcattgcagcggaagcagccaataataaaaacgggcgtgcaccacattctgaatggagaaattatgatgatttcaatgagtttttctggtctcataagtgcttccacctacgatggccttggaacctgagcgacccgtttttctcgaagcccagtaggaaatataagggcttgctcagtaggaatcatcactacggaaagacatcttttgtggaacataggacttttcttcatctttaccacagctttcatcgcctttggatgttccttattatgatgtttcagggactgactatcattgctttcaatgatggtagttttgacaggaagaccatattgcaacttcttagtctgggtcctacttatgtcgtaatgaaatttattgagagtctattggatattctaatgatgtatggtgcctattcaacatctcgtggatctgcaatcaccagagtggcatggcgattctgctggtttactatagcttcagttgcaatttgctacctatatatcaagacacttcaagatggcacagagtcagcaacattcaagatatatgtttttgtaatcagtgcatatgtgggcattaagataattttcagcctacttatgagtgtcccttgttgccatggtttggctgaggcttgctatcgctggtctgctgtacgccttgttaagtggatgcatcaggagaataattatgttggaagaggcatgcatgagagtccccttgactatatcaaatacgccactttctggattgcaattcttggtgcaaaattttcattcacctattttcttcagataaaacctcttgtagaaccaacaagaactataatcaatttcactggcctgcagtatgcttggcatgattttttctcgaagaataatcataatgctcttacaatcctttctttatgggctccagtgctgtcaatttaccttttggacattcatgtattctacactgtattgtctgctatttatggatttctccttggtgcacgtgatcgcctgggagagattagtactgtcgaggctgttcacagattctttgagaagtttcctggagcattcatgcatagacttcatgttgaggttcccaaaaggaagcaactgctatcttctggtcaggaaatagagttaaacaagtttgacgcatctagattctcccccttctggaatgaaatagtgaggaatttaagggaagaggattatattaataattttgaactagaattgcttttgatgcccaagaatgacgttggagttctaccgattgtgcaatggccagttttcttgcttgctagcaaggttttcttggccaaagagattgcagaggactgcaaagactcacaagaagaactttggttaaggatatcgaaggatgaatacatgcaatatgctgttgtagagtccttccatagcatttatcatattctgacgtctatactagagaaagaaggccgcctctgggtggaaagaatttatggtggtatccgagacagcatttcgaagcggaccatccaaagtgatcttcatttcaaaaaactgcttaatgttattgccaagcttgttgctgtattgggaatactgcgaggtacgacggagtccagtgatttgaaaaaaggtttggttaatgctattcaagacctatatgatgttgttcatcatgaagcgttttcggttgatatgagtggccacattgaagactgggatcaaattaatttagcaagggctgaaggtcgcctcttcaataaactcaagtggccaaatgatcccaaattgaaagacttgatcaagagattgtattcacttctgacaattaaagaatctgctgcaactgtccctaaaaatttagaagccaggcgaagacttcagttctttacgaactcactgttcatggaaatgcctgttgcacggcctgtttcggaaatggtctcctttagtgtgtttactccatattactctgagattgttctctacagcatggctgaacttcagaagaaaaacgaagacggtataactacactgttttatctccagaagatttacccagatgaatggaagaacttccttactcgtatcaacagggatgaaaatgcagcagactctgagctttttggcaacccaaatgacatacttgaactacgtctatgggcttcttatcgtgggcagaccttagctcgaactgtccgtggtatgatgtactataggaaagcccttatgctgcagagttatttggagaggatacaatctgaagatttggaatctacattagggttggctggttcagctgataggcattttgagttgtcacctgaggcgcgtgctcaggctgatttgaagtttacatatgtggttacctgccaaatttatggaaaacagaagggggaagggaaggctgaactgcagacatatccttactaatgcaaagg

SEQ ID NO: 153 - DNA, 2022 bp, Zea Mays
cgtttgaacgtgccagagtaccgacaagcattatgaagtacatgctgctacttcgagtaccaagtgcgtcatacccaacggtgcaagctccagtacttgccacaatgataagagcaagacacttcaagatggcacagagtcagcaacattcaagatatatgtttttgtaatcagtgcatatgtgggcattaagataattttcagcctacttatgagtgtcccttgttgccatggtttggctgaggcttgctatcgctggtctgctgtacgccttgttaagtggatgcatcaggagaataattatgttggaagaggcatgcatgagagtccccttgactatatcaaatacgccactttctggattgcaattcttggtgcaaaattttcattcacctattttcttcagataaaacctcttgtagaaccaacaagaactataatcaatttcactggcctgcagtatgcttggcatgattttttctcgaagaataatcataatgctcttacaatcctttctttatgggctccagtgctgtcaatttaccttttggacattcatgtattctacactgtattgtctgctatttatggatttctccttggtgcacgtgatcgcctgggagagattagtactgtcgaggctgttcacagattctttgagaagtttcctggagcattcatgcatagacttcatgttgaggttcccaaaaggaagcaactgctatcttctggtcaggaaatagagttaaacaagtttgacgcatctagattctcccccttctggaatgaaatagtgaggaatttaagggaagaggattatattaataattttgaactagaattgcttttgatgcccaagaatgacgttggagttctaccgattgtgcaatggccagttttcttgcttgctagcaaggttttcttggccaaagagattgcagaggactgcaaagactcacaagaagaactttggttaaggatatcgaaggatgaatacatgcaatatgctgttgtagagtccttccatagcatttatcatattctgacgtctatactagagaaagaaggccgcctctgggtggaaagaatttatggtggtatccgagacagcatttcgaagcggaccatccaaagtgatcttcatttcaaaaaactgcttaatgttattgccaagcttgttgctgtattgggaatactgcgaggtacgacggagtccagtgatttgaaaaaaggtttggttaatgctattcaagacctatatgatgttgttcatcatgaagcgttttcggttgatatgagtggccacattgaagactgggatcaaattaatttagcaagggctgaaggtcgcctcttcaataaactcaagtggccaaatgatcccaaattgaaagacttgatcaagagattgtattcacttctgacaattaaagaatctgctgcaactgtccctaaaaatttagaagccaggcgaagacttcagttctttacgaactcactgttcatggaaatgcctgttgcacggcctgtttcggaaatggtctcctttagtgtgtttactccatattactctgagattgttctctacagcatggctgaacttcagaagaaaaacgaagacggtataactacactgttttatctccagaagatttacccagatgaatggaagaacttccttactcgtatcaacagggatgaaaatgcagcagactctgagctttttggcaacccaaatgacatacttgaactacgtctatgggcttcttatcgtgggcagaccttagctcgaactgtccgtggtatgatgtactataggaaagcccttatgctgcagagttatttggagaggatacaatctgaagggttggctggttcagctgataggcattttgagttgtcacctgaggcgcgtgctcaggctgatttgaagtttacatatgtggttacctgccaaatttatggaaaacagaagggggaagggaaggctgaactgcagacatatccttactaatgcaaagg

SEQ ID NO: 154 - DNA, 2536 bp, Zea Mays
ggacacccttgtattagttgagattaagcaaaaaatagatcaaagaagttcagctcagagcctccaagggaggtcgagtcacagatctattattattttctagatctggatggcagagctagtttagggtcttttagctaggatccatagcagtccagttcagcatggcagctataaactggtcccagcaaatttgagcactatggtttcttatctgaaatatggcattcactcgtattcaccaggttgaactttgtcttacaggaaatttattcgattaaattgcctgggaatccaaagcttggagagggaaaacccgaaaatcaaaatcatgccataatatttactcgtggaaatgcagtgcaaactattgatatgaatcaggataactactttgaggaggcacttaaaatgagaaacctgcttgaggagttctctctgaagcgtggcaagcattacccttctattcttggtgttagggagcatgtcttcacgggaagtgtttcctccctggcctcatttatgtctaatcaggagacaagttttgtgacattaggacagcgtgttcttgctaacccgctgaaagtgagaatgcactatggtcatccagatgtttttgatagaatttttcatataacaaggggtggaattagtaaggcctctcgcagcatcaatatcagtgaggatatatatgcaggattcaactcaactctgcgtcaaggatgcataactcatcatgaatatattcaggttggcaaaggtagggatgttggacttaatcagattgcactatttgaaggaaaagttgctggtggaaatggtgaacaagttcttagccgagacatatatagactcggacaactttttgactttttcaggatgttatccttctacgtgacaactgttggattctacttctgtactatgctaaccgtgctgaccgtgtacatatttctctatgggaaaatgtatctggccttatctggtgttggagaatcaattcaaaatagagcggatatactgcagaacgcagccttgaatgctgctctgaacactcaatttcttttccagattggtgtatttactgctgttcccatgattcttggtttcatccttgaatcaggtgttttaacggcttttgttcagtttattacaatgcagttccaaatgtgctctgtattttttactttctcacttggaacaagaacccactactttggccgtgcaatattacatggaggtgcaaagtatagagcaaccggtagaggttttgtggtacgacatatcaagtttgctgagaactaccgtatttattctcgaagccattttgtgaaagggatggaggttgcacttttgttggtgatcttcctagcgtatgggtttaacaatggtggagcagttggctatattttactctctataagcagttggattatggcattgtcttggctttttgctccctatttatttaacccatctggatttgaatggcagaagattgttgaggatttcagagactggacaaattggctgttttatcgaggtggtattggtgttaaaggagaagaaagctgggaagcttggtgggaagaagaactgcaacatatttacagcattcgagggaggatactggaaaccatattaagcctgaggtttttcattttccaattcggagttgtttaccacatgaatgctagcggaggaagtacagctttattggtgtattggatttcttgggctgtgcttggtggccttttcatcctcctcttggtctttggtttaaaccccaaggccatggtacatttccaattgttcctgcgtttggtcaaaagtgtagcgttattgatggttttggctgctctggtccctggcaattttgtttacgaaactcagtgtgagagatgtttttgcttccattctagcatttgtgccaactgggtggggaatcatttcgattgccatggcatggaaacctgtcgtgaagaaattgggtttgtggaaaactgttcgtgccctagctcgcctctatgatgctggaatggggatggtcattttcatacccatagccatttgctcgtggtttccattcatatccactttccagacgcgacttctgttcaaccaggcgttcagcagaggtttggagatatctctgatccttgctggcaacaatccaaatgctgggatctgatggtggcagttccggccttgcttcattaatctgtggacctttcgtacttgaattaatcctcacttctcagttaacagtagcgatgtacatatctgatatctctatgttcaccggagttgtttgccgtgggtataaatatcaacggctatatttctagagttcaccggcttgtacctgtatttttgaacgggtgaactttgtatggcccttcttttgacattgacatgtgctgattacgtggaaaaattgcttttttaggtcgcttcgaacttcgtttttagcaggatacttcagtatccacatgtttttcccgaaatcccggatgggcttgagtaattatttttc

SEQ ID NO: 155 - DNA, 2052 bp, Zea Mays
tacaggaaatttattcgattaaattgcctgggaatccaaagcttggagagggaaaacccgaaaatcaaaatcatgccataatatttactcgtggaaatgcagtgcaaactattgatatgaatcaggataactactttgaggaggcacttaaaatgagaaacctgcttgaggagttctctctgaagcgtggcaagcattacccttctattcttggtgttagggagcatgtcttcacgggaagtgtttcctccctggcctcatttatgtctaatcaggagacaagttttgtgacattaggacagcgtgttcttgctaacccgctgaaagtgagaatgcactatggtcatccagatgtttttgatagaatttttcatataacaaggggtggaattagtaaggcctctcgcagcatcaatatcagtgaggatatatatgcaggattcaactcaactctgcgtcaaggatgcataactcatcatgaatatattcaggccttatctggtgttggagaatcaattcaaaatagagcggatatactgcagaacgcagccttgaatgctgctctgaacactcaatttcttttccagattggtgtatttactgctgttcccatgattcttggtttcatccttgaatcaggtgttttaacggcttttgttcagtttattacaatgcagttccaaatgtgctctgtattttttactttctcacttggaacaagaacccactactttggccgtgcaatattacatggaggtgcaaagtatagagcaaccggtagaggttttgtggtacgacatatcaagtttgctgagaactaccgtatttattctcgaagccattttgtgaaagggatggaggttgcacttttgttggtgatcttcctagcgtatgggtttaacaatggtggagcagttggctatattttactctctataagcagttggattatggcattgtcttggctttttgctccctatttatttaacccatctggatttgaatggcagaagattgttgaggatttcagagactggacaaattggctgttttatcgaggtggtattggtgttaaaggagaagaaagctgggaagcttggtgggaagaagaactgcaacatatttacagcattcgagggaggatactggaaaccatattaagcctgaggtttttcattttccaattcggagttgtttaccacatgaatgctagcggaggaagtacagctttattggtgtattggatttcttgggctgtgcttggtggccttttcatcctcctcttggtctttggtttaaaccccaaggccatggtacatttccaattgttcctgcgtttggtcaaaagtgtagcgttattgatggttttggctgctctggtccctggcaattttgtttacgaaactcagtgtgagagatgtttttgcttccattctagcatttgtgccaactgggtggggaatcatttcgattgccatggcatggaaacctgtcgtgaagaaattgggtttgtggaaaactgttcgtgccctagctcgcctctatgatgctggaatggggatggtcattttcatacccatagccatttgctcgtggtttccattcatatccactttccagacgcgacttctgttcaaccaggcgttcagcagaggtttggagatatctctgatccttgctggcaacaatccaaatgctgggatctgatggtggcagttccggccttgcttcattaatctgtggacctttcgtacttgaattaatcctcacttctcagttaacagtagcgatgtacatatctgatatctctatgttcaccggagttgtttgccgtgggtataaatatcaacggctatatttctagagttcaccggcttgtacctgtatttttgaacgggtgaactttgtatggcccttcttttgacattgacatgtgctgattacgtggaaaaattgcttttttaggtcgcttcgaacttcgtttttagcaggatacttcagtatccacatgtttttcccgaaatcccggatgggcttgagtaattatttttc

SEQ ID NO: 156 - DNA, 2288 bp, Zea Mays
acaggaaatttattcgattaaattgcctgggaatccaaagcttggagagggaaaacccgaaaatcaaaatcatgccataatatttactcgtggaaatgcagtgcaaactattgatatgaatcagctgtttttataggataactactttgaggaggcacttaaaatgagaaacctgcttgaggagttctctctgaagcgtggcaagcattacccttctattcttggtgttagggagcatgtcttcacgggaagtgtttcctccctggcctcatttatgtctaatcaggagacaagttttgtgacattaggacagcgtgttcttgctaacccgctgaaagtgagaatgcactatggtcatccagatgtttttgatagaatttttcatataacaaggggtggaattagtaaggcctctcgcagcatcaatatcagtgaggatatatatgcaggattcaactcaactctgcgtcaaggatgcataactcatcatgaatatattcaggttggcaaaggtagggatgttggacttaatcagattgcactatttgaaggaaaagttgctggtggaaatggtgaacaagttcttagccgagacatatatagactcggacaactttttgactttttcaggatgttatccttctacgtgacaactgttggattctacttctgtactatgctaaccgtgctgaccgtgtacatatttctctatgggaaaatgtatctggccttatctggtgttggagaatcaattcaaaatagagcggatatactgcagaacgcagccttgaatgctgctctgaacactcaatttcttttccagattggtgtatttactgctgttcccatgattcttggtttcatccttgaatcaggtgttttaacggcttttgttcagtttattacaatgcagttccaaatgtgctctgtattttttactttctcacttggaacaagaacccactactttggccgtgcaatattacatggaggtgcaaagtatagagcaaccggtagaggttttgtggtacgacatatcaagtttgctgagaactaccgtatttattctcgaagccattttgtgaaagggatggaggttgcacttttgttggtgatcttcctagcgtatgggtttaacaatggtggagcagttggctatattttactctctataagcagttggattatggcattgtcttggctttttgctccctatttatttaacccatctggatttgaatggcagaagattgttgaggatttcagagactggacaaattggctgttttatcgaggtggtattggtgttaaaggagaagaaagctgggaagcttggtgggaagaagaactgcaacatatttacagcattcgagggaggatactggaaaccatattaagcctgaggtttttcattttccaattcggagttgtttaccacatgaatgctagcggaggaagtacagctttattggtgtattggatttcttgggctgtgcttggtggccttttcatcctcctcttggtctttggtttaaaccccaaggccatggtacatttccaattgttcctgcgtttggtcaaaagtgtagcgttattgatggttttggctgctctggtccctggcaattttgtttacgaaactcagtgtgagagatgtttttgcttccattctagcatttgtgccaactgggtggggaatcatttcgattgccatggcatggaaacctgtcgtgaagaaattgggtttgtggaaaactgttcgtgccctagctcgcctctatgatgctggaatggggatggtcattttcatacccatagccatttgctcgtggtttccattcatatccactttccagacgcgacttctgttcaaccaggcgttcagcagaggtttggagatatctctgatccttgctggcaacaatccaaatgctgggatctgatggtggcagttccggccttgcttcattaatctgtggacctttcgtacttgaattaatcctcacttctcagttaacagtagcgatgtacatatctgatatctctatgttcaccggagttgtttgccgtgggtataaatatcaacggctatatttctagagttcaccggcttgtacctgtatttttgaacgggtgaactttgtatggcccttcttttgacattgacatgtgctgattacgtggaaaaattgcttttttaggtcgcttcgaacttcgtttttagcaggatacttcagtatccacatgtttttcccgaaatcccggatgggcttgagtaattatttttc

SEQ ID NO: 157 - DNA, 996 bp, Zea Mays
tttttttagttgctctaacacactgtaggacatacgtttttcattagcaaaggaaatgctttttttggaaaagaaaagtccattggatttaacggcgacgccacaatctcccattcccgcggcccatctcaagcccactcctggaaaacagacccacgtgacgtcagcgatccgggttcatcccccacgaaccaatccaacgccgcgcatccctccgggatccttgccacgtcacgaatccaccccactcgcttccacgcagccccatccatccatcacggatccgacgcgccgaactccacctcccacggattgcactccctccctcctcgcgcccaagcgcacaccccctcccgcctggaggccgctacagcctacaagtagcactcagcccggctcccgtttaccgccgccgacttctgattctaccaccacccgcctcctctcgagttcgatctgtttgctcccccagacatgtcgggccgcggcaagggaggcaagggcctgggtaagggcggccggccatccggaggctggctcgcaggggcggcgtgaagcgcatctccgggctcatctacgaggagacccgcggcgtgctcaagatctttctcgagaacaccgtcacagccatggacgtcgtctacgcgctcaagcgccagggccgcaccctttacggcttcggcggctagggcgctaggctaggccatgctcgacccgccccccactctccgctctggcgtcgtcactggttccttgacccctgtgcgggtcggtcggtggtgctagggtcagcagttgtctggtgtctgtagcctctctggctatccgttctttggtgtgaaatggaattccaatcgtgtgggaatggatctctgttcgattgttcaattggcccatattccatctttggatcttagttttgcactaatggcgcaagccttttcgaaaaccaatgctctgaactgcactctgtctggcttattttggagctgtctg

SEQ ID NO: 158 - DNA, 1994 bp, Zea Mays
gtcctttccatgtcacttctcgcctggcggccgctgcggcggtagcgatcccgacgattttgttgttagcgatgggactagaggccaggcgggccactgcgccagtggtcgcaaccctcgccgctggtatggctgtgcccccgccttcgatcggctgccttcgcgttggcggcagccggcagctggtcccccaacctccaccccccaactgatttgcttgctctccacaaggcccaccttccgctgcggcgtgatcagctccagcatccgcgtacgcagttacgcacagctggatactatgatcccggccggtatcatgatgttgcttctgtcaagagaaatcaaccatttaaatagttgatgttttattacagaagttttatctgattctgtaatttagcttcttaataccatcgtttcgcatgcattgtacgtccatggtaaaattagtttttgatagataaaaaaactcgacctgtgggggtaagacaacccattgtgacccgggacaagttttagacctatgctttgacgtggaacaaatgagagaatttttttaatcacaagtctgaaatttattgccatatggagttgtacctaggacctcatgagtattactcagactgtctatccaactcagatagaggccgtttcgatagaagtattgttttgcattgaattctaatatatagcattacgtgttggtaatgaccagttagatagcagttctttttttttgaagatgtagatagcagttctttgaggctagaaaagaagctaacaagatttcttgctttatcggtttgcagtgagaaaagtaataagcatgttaaacatgtgcaagtttcatcattgattcttagaaatctgcttgtatcatccaatggataaagagagaataaactttttggttcgatgttgacctcagcttcatagtttgcttttttcctgatgaagattgcattttgtcatgtttttctcgtcgttgctgcaagctctgcaggcatgcatcttccatgacgttcgcccaagttattcttagtctgtctttcccccaatgtttgttcttgcactgagtagtgttcttttttctaaatggtataatatctataccttctaaccattgcagttctagcatgctcaaccgtgggacgagggctaggcccgtgggccggtccggcacggcccgaaattcaaacgggccgggccgacccgaaattcaaacaatgcgggctttttcgggcttgggccgagccggaccgggcggcccgaatgtacacctataaactggagatgaaatgtcttaccatttggttgcaacataatcagacaaacataatcacaatggcttgcaattctgaaggcacatgtttacttgtaggctgtgagaatgttatcatttatcaaaactagaagttgatcgaaataattacatttacagctgatgatgttctgcaccggcaccctgcacattaagctgctatagttatctgtaacttgtcccacgaccacgacactagtatgtacctagtgacagtagtaaagaaccaagatagcagtttgagtctcaactctctgaagtcagctggtcgaagatagtgctatcttttcctaatggatcaaattgtatttgagccttggcttcagcaattcacttatcctaaggctacttttcatagtgggcttgctctaaaattttgaccatcctttattatgcatcaaggattttacaactatgtgttagaagtgtcatccagtattccagtgtaaggaactgaattcggagctttggactgctacaggagaaaatctgaaactttatgccttcccagctgaacaccaagaccttgtctacacgggagacgtacatacaaagtttcgtttcagagccatactacccgtatcgtatcgcttcatcatttggcgcaagatagaggccacccatctgactcttgctgggtttcgacgtgggcactcaagtggttggtccgagc

SEQ ID NO: 159 - DNA, 4759 bp, Zea Mays
gtcctttccatgtcacttctcgcctggcggccgctgcggcggtagcgatcccgacgattttgttgttagcgatgggactagaggccaggcgggccactgcgccagtggtcgcaaccctcgccgctggtatggctgtgcccccgccttcgatcggctgccttcgcgttggcggcagccggcagctggtcccccaacctccaccccccaactgatttgcttgctctccacaaggcccaccttccgctgcggcgtgatcagctccagcatccgcgtacgcagttacgcacagctggatactatgatcccggccggtatcatgatgttgcttctgtcaagagaaatcaaccatttaaatagttgatgttttattacagaagttttatctgattctgtaatttagcttcttaataccatcgtttcgcatgcattgtacgtccatggtaaaattagtttttgatagataaaaaaactcgacctgtgggggtaagacaacccattgtgacccgggacaagttttagacctatgctttgacgtggaacaaatgagagaatttttttaatcacaagtctgaaatttattgccatatggagttgtacctaggacctcatgagtattactcagactgtctatccaactcagatagaggccgtttcgatagaagtattgttttgcattgaattctaatatatagcattacgtgttggtaatgaccagttagatagcagttctttttttttgaagatgtagatagcagttctttgaggctagaaaagaagctaacaagatttcttgctttatcggtttgcagtgagaaaagtaataagcatgttaaacatgtgcaagtttcatcattgattcttagaaatctgcttgtatcatccaatggataaagagagaataaactttttggttcgatgttgacctcagcttcatagtttgcttttttcctgatgaagattgcattttgtcatgtttttctcgtcgttgctgcaagctctgcaggcatgcatcttccatgacgttcgcccaagttattcttagtctgtctttcccccaatgtttgttcttgcactgagtagtgttcttttttctaaatggtataatatctataccttctaaccattgcagttctagcatgctcaaccgtgggacgagggctaggcccgtgggccggtccggcacggcccgaaattcaaacgggccgggccgacccgaaattcaaacaatgcgggctttttcgggcttgggccgagccggaccgggcggcccgaatgtacacctataaactggagatgaaatgtcttaccatttggttgcaacataatcagacaaacataatcacaatggcttgcaattctgaaggcacatgtttacttgtaggctgtgagaatgttatcatttatcaaaactagaagttgatcgaaataattacatttacagctgatgatgttctgcaccggcaccctgcacattaagctgctatagttatctgtaacttgtcccacgaccacgacactagtatgtacctagtgacagtagtaaagaaccaagatagcagtttgagtctcaactctctgaagtcagctggtcgaagatagtgctatcttttcctaatggatcaaattgtatttgagccttggcttcagcaattcacttatcctaaggctacttttcatagtgggcttgctctaaaattttgaccatcctttattatgcatcaaggattttacaactatgtgttagaagtgtcatccagtattccagtgtaaggagaaaatctgaaactttatgccttcccagctgaacaccaagaccttgtctacacgggagacgtacatacaaagtttcgtttcagagccatactacccgtatcgtatcgcttcatcatttggcgcaaggttgttgaagtgctttgcttgccgcttgcagatagaggccacccatctgactcttgctgggtttcgacgtgggcactcaaggtgggcttaaattctccctttcttcttcccgcattccttaaaagcggcgtgaagttgtgagatcgatctgggtctcccttatggatcgagctggctaaccgcactttatcaggtccatcgttattgacagagctggcatgtccatgcgctgttggcaacaacggaaatctcggtggtggcccagctcctcgagcaagttttctggaaagcagatttcactggtgagctgatcgagcgcgcttttgccgtcatggatgcagccatttctgttgcagcgaccagtaacagttgcactgtgtacatgatttgtagctgatcattcattcatatagagctagctgagcaggcttgcttggttggcttggctgtccacaatttttgcttcggatagcatttctaccaggcgactgcaaagctccaagcacactcgatcttgctgtgataattctgagaggaagggcagagggagcaatggcgccggtcagtttgcctcctggtttcaggttccaccccactgacgaggaactcatcatctactaccttaagaggaagatcaacgggagacagattgagctcgaaatcattccggaggttgatctttacaagtgcgagccatgggatttgccagaaaaatcatttcttccaagcaaagaccttgaatggtacttcttcagcccccgggaccgcaagtacccgaatgggtcaaggacaaaccgtgcaacaaaatctgggtactggaaggcaaccggcaaggaccgaaaagtgaactcgcataggcgtgcagttggtatgaagaagaccctggtgtactatcggggccgagctccacatggttctcgcaccgattgggtcatgcacgagtaccgcctcgacgagagggaatgcgagactgacacgggcttacaggatgcatacgctttatgccgagtgttcaagaagacagcgcctgggccaaaaatcatagagcattatggcgcagtgcaccatcccatcgaacaccctcagtggatggcagaggcaggcagtgttgaccgccactccccaacgctggacttgtccagtgacgctagaggtgacgacttcgagagcagcagcttctcgttcccgacggaggcgcccagcatggactccatgcacgggatgcagatgagcgcaccccacgaggatggcaaatggatgcagttcctgagcgaagacgccttcaacgccaccaataaccctttcttcatgaacccaccttcttcttcaagcttcccatgcctcccgtccaaggtggatgtcgcactggagtgtgcaaggattcagcacaggctctcgttgcctcccctggaggtggaggacttcccacaggacgtcagcctcgacaccaaggcgagcgtgctccgcagcaaccccaacgaggtcgacatcctccaagagttcctctccgtggcgtcggcctcacaggagctcatcaatggcgccaccagcagctgctacgctgcagagttgtggccatcaggcgcgggcacaagcagcaccagcacccactacgtcaacgaactgtcttccctcgttgagctcggggtgaaggccaaagaggaggcagacaacttctactatatggactgcattgttggaacatctgtagggttctcatccaagtcgtcggtccaagtcgatgaacaggccgttaggttggttgagatcgctgacatcgaggggttgaagcaggaagagaagaggcaggtagagaaccttagaggtgtgcggcttcacaacaatgacctaggagagattgttgtacaaggagatgaaagcaatccaacggactgcatcacacaataccccatatcagattattctgctgacaatttaggagaagccggtcacctggccgatcccactgacgttggcggcggcctagccactgcacccatcttctcgcaatctcagcctgacgacttcgctattgggttcggtgacgtcgacgtcaaccctaatgcatctttcgacctgtacgagagggtcgacgtcaagcatgggctcttcgtctcaacggccggtgcgccgaagacattcttccaccacgttgagccatcgaagaaggtcagcgtctacctgagtcccgtagcgagcgacgtcgtcggcaaggcgaccgagaagttccattcccccattactgtgacagcaaccaaagcttccgtttttagcaagttgaaggcgctcgtcactcgtcagggacaaattcctggtggggaagacgcctccatcatgccgccggaggtccttaggcagcaaagaaatagcggcagccccacgacgatgaataccgagcaagagttggtcaagaaggcgaagaaggtgatgaagccggggcatggtggtggtgatggaaaccaagcatgtcttcttcttccactctccaagaggagcaaaggcatttccagcatgttcttctcggtgagaaatgggcataatttctgacatccgcgctcagggcgcaatcactggaaggtctttctgatcatgactcgtgcaaaaaagtaagggtcgtcttgtgctactaggcaactagtatcgggtgcctgcatgctgctggtgcatggagatgcatagtctttctcgtgcatcagtcagttaactggtgtgtataactggagaaatgtaataatccgtatttaattttttactcgtccgtacgtgtattaacacgtctgaagaaattgtacatggaaacattgtaagtgcaaatacacatgtgacatgttcatccatatacacggttacgttatatttg

SEQ ID NO: 160 - DNA, 4951 bp, Zea Mays
gtcctttccatgtcacttctcgcctggcggccgctgcggcggtagcgatcccgacgattttgttgttagcgatgggactagaggccaggcgggccactgcgccagtggtcgcaaccctcgccgctggtatggctgtgcccccgccttcgatcggctgccttcgcgttggcggcagccggcagctggtcccccaacctccaccccccaactgatttgcttgctctccacaaggcccaccttccgctgcggcgtgatcagctccagcatccgcgtacgcagttacgcacagctggatactatgatcccggccggtatcatgatgttgcttctgtcaagagaaatcaaccatttaaatagttgatgttttattacagaagttttatctgattctgtaatttagcttcttaataccatcgtttcgcatgcattgtacgtccatggtaaaattagtttttgatagataaaaaaactcgacctgtgggggtaagacaacccattgtgacccgggacaagttttagacctatgctttgacgtggaacaaatgagagaatttttttaatcacaagtctgaaatttattgccatatggagttgtacctaggacctcatgagtattactcagactgtctatccaactcagatagaggccgtttcgatagaagtattgttttgcattgaattctaatatatagcattacgtgttggtaatgaccagttagatagcagttctttttttttgaagatgtagatagcagttctttgaggctagaaaagaagctaacaagatttcttgctttatcggtttgcagtgagaaaagtaataagcatgttaaacatgtgcaagtttcatcattgattcttagaaatctgcttgtatcatccaatggataaagagagaataaactttttggttcgatgttgacctcagcttcatagtttgcttttttcctgatgaagattgcattttgtcatgtttttctcgtcgttgctgcaagctctgcaggcatgcatcttccatgacgttcgcccaagttattcttagtctgtctttcccccaatgtttgttcttgcactgagtagtgttcttttttctaaatggtataatatctataccttctaaccattgcagttctagcatgctcaaccgtgggacgagggctaggcccgtgggccggtccggcacggcccgaaattcaaacgggccgggccgacccgaaattcaaacaatgcgggctttttcgggcttgggccgagccggaccgggcggcccgaatgtacacctataaactggagatgaaatgtcttaccatttggttgcaacataatcagacaaacataatcacaatggcttgcaattctgaaggcacatgtttacttgtaggctgtgagaatgttatcatttatcaaaactagaagttgatcgaaataattacatttacagctgatgatgttctgcaccggcaccctgcacattaagctgctatagttatctgtaacttgtcccacgaccacgacactagtatgtacctagtgacagtagtaaagaaccaagatagcagtttgagtctcaactctctgaagtcagctggtcgaagatagtgctatcttttcctaatggatcaaattgtatttgagccttggcttcagcaattcacttatcctaaggctacttttcatagtgggcttgctctaaaattttgaccatcctttattatgcatcaaggattttacaactatgtgttagaagtgtcatccagtattccagtgtaaggagaaaatctgaaactttatgccttcccagctgaacaccaagaccttgtctacacgggagacgtacatacaaagtttcgtttcagagccatactacccgtatcgtatcgcttcatcatttggcgcaaggttgttgaagtgctttgcttgccgcttgcagatagaggccacccatctgactcttgctgggtttcgacgtgggcactcaagtggttggtccgagctctggaaaacatcggggaaatagaaagaaggattttggattatttccatcttttgaactaaagctcaaccttaaagcaaagtaatgatttttgttgaaaaataaacagagaaggtgggcttaaattctccctttcttcttcccgcattccttaaaagcggcgtgaagttgtgagatcgatctgggtctcccttatggatcgagctggctaaccgcactttatcaggtccatcgttattgacagagctggcatgtccatgcgctgttggcaacaacggaaatctcggtggtggcccagctcctcgagcaagttttctggaaagcagatttcactggtgagctgatcgagcgcgcttttgccgtcatggatgcagccatttctgttgcagcgaccagtaacagttgcactgtgtacatgatttgtagctgatcattcattcatatagagctagctgagcaggcttgcttggttggcttggctgtccacaatttttgcttcggatagcatttctaccaggcgactgcaaagctccaagcacactcgatcttgctgtgataattctgagaggaagggcagagggagcaatggcgccggtcagtttgcctcctggtttcaggttccaccccactgacgaggaactcatcatctactaccttaagaggaagatcaacgggagacagattgagctcgaaatcattccggaggttgatctttacaagtgcgagccatgggatttgccagaaaaatcatttcttccaagcaaagaccttgaatggtacttcttcagcccccgggaccgcaagtacccgaatgggtcaaggacaaaccgtgcaacaaaatctgggtactggaaggcaaccggcaaggaccgaaaagtgaactcgcataggcgtgcagttggtatgaagaagaccctggtgtactatcggggccgagctccacatggttctcgcaccgattgggtcatgcacgagtaccgcctcgacgagagggaatgcgagactgacacgggcttacaggatgcatacgctttatgccgagtgttcaagaagacagcgcctgggccaaaaatcatagagcattatggcgcagtgcaccatcccatcgaacaccctcagtggatggcagaggcaggcagtgttgaccgccactccccaacgctggacttgtccagtgacgctagaggtgacgacttcgagagcagcagcttctcgttcccgacggaggcgcccagcatggactccatgcacgggatgcagatgagcgcaccccacgaggatggcaaatggatgcagttcctgagcgaagacgccttcaacgccaccaataaccctttcttcatgaacccaccttcttcttcaagcttcccatgcctcccgtccaaggtggatgtcgcactggagtgtgcaaggattcagcacaggctctcgttgcctcccctggaggtggaggacttcccacaggacgtcagcctcgacaccaaggcgagcgtgctccgcagcaaccccaacgaggtcgacatcctccaagagttcctctccgtggcgtcggcctcacaggagctcatcaatggcgccaccagcagctgctacgctgcagagttgtggccatcaggcgcgggcacaagcagcaccagcacccactacgtcaacgaactgtcttccctcgttgagctcggggtgaaggccaaagaggaggcagacaacttctactatatggactgcattgttggaacatctgtagggttctcatccaagtcgtcggtccaagtcgatgaacaggccgttaggttggttgagatcgctgacatcgaggggttgaagcaggaagagaagaggcaggtagagaaccttagaggtgtgcggcttcacaacaatgacctaggagagattgttgtacaaggagatgaaagcaatccaacggactgcatcacacaataccccatatcagattattctgctgacaatttaggagaagccggtcacctggccgatcccactgacgttggcggcggcctagccactgcacccatcttctcgcaatctcagcctgacgacttcgctattgggttcggtgacgtcgacgtcaaccctaatgcatctttcgacctgtacgagagggtcgacgtcaagcatgggctcttcgtctcaacggccggtgcgccgaagacattcttccaccacgttgagccatcgaagaaggtcagcgtctacctgagtcccgtagcgagcgacgtcgtcggcaaggcgaccgagaagttccattcccccattactgtgacagcaaccaaagcttccgtttttagcaagttgaaggcgctcgtcactcgtcagggacaaattcctggtggggaagacgcctccatcatgccgccggaggtccttaggcagcaaagaaatagcggcagtgagtgagttgctgcagatagtacgtactgttgtcgctcctcttaatgacaccaatggaggcaggccccacgacgatgaataccgagcaagagttggtcaagaaggcgaagaaggtgatgaagccggggcatggtggtggtgatggaaaccaagcatgtcttcttcttccactctccaagaggagcaaaggcatttccagcatgttcttctcggtgagaaatgggcataatttctgacatccgcgctcagggcgcaatcactggaaggtctttctgatcatgactcgtgcaaaaaagtaagggtcgtcttgtgctactaggcaactagtatcgggtgcctgcatgctgctggtgcatggagatgcatagtctttctcgtgcatcagtcagttaactggtgtgtataactggagaaatgtaataatccgtatttaattttttactcgtccgtacgtgtattaacacgtctgaagaaattgtacatggaaacattgtaagtgcaaatacacatgtgacatgttcatccatatacacggttacgttatatttg

SEQ ID NO: 161 - DNA, 4792 bp, Zea Mays
gtcctttccatgtcacttctcgcctggcggccgctgcggcggtagcgatcccgacgattttgttgttagcgatgggactagaggccaggcgggccactgcgccagtggtcgcaaccctcgccgctggtatggctgtgcccccgccttcgatcggctgccttcgcgttggcggcagccggcagctggtcccccaacctccaccccccaactgatttgcttgctctccacaaggcccaccttccgctgcggcgtgatcagctccagcatccgcgtacgcagttacgcacagctggatactatgatcccggccggtatcatgatgttgcttctgtcaagagaaatcaaccatttaaatagttgatgttttattacagaagttttatctgattctgtaatttagcttcttaataccatcgtttcgcatgcattgtacgtccatggtaaaattagtttttgatagataaaaaaactcgacctgtgggggtaagacaacccattgtgacccgggacaagttttagacctatgctttgacgtggaacaaatgagagaatttttttaatcacaagtctgaaatttattgccatatggagttgtacctaggacctcatgagtattactcagactgtctatccaactcagatagaggccgtttcgatagaagtattgttttgcattgaattctaatatatagcattacgtgttggtaatgaccagttagatagcagttctttttttttgaagatgtagatagcagttctttgaggctagaaaagaagctaacaagatttcttgctttatcggtttgcagtgagaaaagtaataagcatgttaaacatgtgcaagtttcatcattgattcttagaaatctgcttgtatcatccaatggataaagagagaataaactttttggttcgatgttgacctcagcttcatagtttgcttttttcctgatgaagattgcattttgtcatgtttttctcgtcgttgctgcaagctctgcaggcatgcatcttccatgacgttcgcccaagttattcttagtctgtctttcccccaatgtttgttcttgcactgagtagtgttcttttttctaaatggtataatatctataccttctaaccattgcagttctagcatgctcaaccgtgggacgagggctaggcccgtgggccggtccggcacggcccgaaattcaaacgggccgggccgacccgaaattcaaacaatgcgggctttttcgggcttgggccgagccggaccgggcggcccgaatgtacacctataaactggagatgaaatgtcttaccatttggttgcaacataatcagacaaacataatcacaatggcttgcaattctgaaggcacatgtttacttgtaggctgtgagaatgttatcatttatcaaaactagaagttgatcgaaataattacatttacagctgatgatgttctgcaccggcaccctgcacattaagctgctatagttatctgtaacttgtcccacgaccacgacactagtatgtacctagtgacagtagtaaagaaccaagatagcagtttgagtctcaactctctgaagtcagctggtcgaagatagtgctatcttttcctaatggatcaaattgtatttgagccttggcttcagcaattcacttatcctaaggctacttttcatagtgggcttgctctaaaattttgaccatcctttattatgcatcaaggattttacaactatgtgttagaagtgtcatccagtattccagtgtaaggaactgaattcggagctttggactgctacaggagaaaatctgaaactttatgccttcccagctgaacaccaagaccttgtctacacgggagacgtacatacaaagtttcgtttcagagccatactacccgtatcgtatcgcttcatcatttggcgcaaggttgttgaagtgctttgcttgccgcttgcagatagaggccacccatctgactcttgctgggtttcgacgtgggcactcaagaggtgggcttaaattctccctttcttcttcccgcattccttaaaagcggcgtgaagttgtgagatcgatctgggtctcccttatggatcgagctggctaaccgcactttatcaggtccatcgttattgacagagctggcatgtccatgcgctgttggcaacaacggaaatctcggtggtggcccagctcctcgagcaagttttctggaaagcagatttcactggtgagctgatcgagcgcgcttttgccgtcatggatgcagccatttctgttgcagcgaccagtaacagttgcactgtgtacatgatttgtagctgatcattcattcatatagagctagctgagcaggcttgcttggttggcttggctgtccacaatttttgcttcggatagcatttctaccaggcgactgcaaagctccaagcacactcgatcttgctgtgataattctgagaggaagggcagagggagcaatggcgccggtcagtttgcctcctggtttcaggttccaccccactgacgaggaactcatcatctactaccttaagaggaagatcaacgggagacagattgagctcgaaatcattccggaggttgatctttacaagtgcgagccatgggatttgccagaaaaatcatttcttccaagcaaagaccttgaatggtacttcttcagcccccgggaccgcaagtacccgaatgggtcaaggacaaaccgtgcaacaaaatctgggtactggaaggcaaccggcaaggaccgaaaagtgaactcgcataggcgtgcagttggtatgaagaagaccctggtgtactatcggggccgagctccacatggttctcgcaccgattgggtcatgcacgagtaccgcctcgacgagagggaatgcgagactgacacgggcttacaggatgcatacgctttatgccgagtgttcaagaagacagcgcctgggccaaaaatcatagagcattatggcgcagtgcaccatcccatcgaacaccctcagtggatggcagaggcaggcagtgttgaccgccactccccaacgctggacttgtccagtgacgctagaggtgacgacttcgagagcagcagcttctcgttcccgacggaggcgcccagcatggactccatgcacgggatgcagatgagcgcaccccacgaggatggcaaatggatgcagttcctgagcgaagacgccttcaacgccaccaataaccctttcttcatgaacccaccttcttcttcaagcttcccatgcctcccgtccaaggtggatgtcgcactggagtgtgcaaggattcagcacaggctctcgttgcctcccctggaggtggaggacttcccacaggacgtcagcctcgacaccaaggcgagcgtgctccgcagcaaccccaacgaggtcgacatcctccaagagttcctctccgtggcgtcggcctcacaggagctcatcaatggcgccaccagcagctgctacgctgcagagttgtggccatcaggcgcgggcacaagcagcaccagcacccactacgtcaacgaactgtcttccctcgttgagctcggggtgaaggccaaagaggaggcagacaacttctactatatggactgcattgttggaacatctgtagggttctcatccaagtcgtcggtccaagtcgatgaacaggccgttaggttggttgagatcgctgacatcgaggggttgaagcaggaagagaagaggcaggtagagaaccttagaggtgtgcggcttcacaacaatgacctaggagagattgttgtacaaggagatgaaagcaatccaacggactgcatcacacaataccccatatcagattattctgctgacaatttaggagaagccggtcacctggccgatcccactgacgttggcggcggcctagccactgcacccatcttctcgcaatctcagcctgacgacttcgctattgggttcggtgacgtcgacgtcaaccctaatgcatctttcgacctgtacgagagggtcgacgtcaagcatgggctcttcgtctcaacggccggtgcgccgaagacattcttccaccacgttgagccatcgaagaaggtcagcgtctacctgagtcccgtagcgagcgacgtcgtcggcaaggcgaccgagaagttccattcccccattactgtgacagcaaccaaagcttccgtttttagcaagttgaaggcgctcgtcactcgtcagggacaaattcctggtggggaagacgcctccatcatgccgccggaggtccttaggcagcaaagaaatagcggcagccccacgacgatgaataccgagcaagagttggtcaagaaggcgaagaaggtgatgaagccggggcatggtggtggtgatggaaaccaagcatgtcttcttcttccactctccaagaggagcaaaggcatttccagcatgttcttctcggtgagaaatgggcataatttctgacatccgcgctcagggcgcaatcactggaaggtctttctgatcatgactcgtgcaaaaaagtaagggtcgtcttgtgctactaggcaactagtatcgggtgcctgcatgctgctggtgcatggagatgcatagtctttctcgtgcatcagtcagttaactggtgtgtataactggagaaatgtaataatccgtatttaattttttactcgtccgtacgtgtattaacacgtctgaagaaattgtacatggaaacattgtaagtgcaaatacacatgtgacatgttcatccatatacacggttacgttatatttg

SEQ ID NO: 162 - DNA, 2880 bp, Zea Mays
cgggaatcgagtaccaaccttggggccctcaccctttccaacgggagctgactcggcatcgctctggtggcccacaaagcgcccaatagccatccatcctacacagtcctgcggctatacaccagctcgctttggctgccaaagacaagaagagaagattgggatatttctactcaccgatataaagctactgacacaggacacaacaaaagcaaaagccaaagtttgagagatagagagagagagagggggcagtattagcttcatgtgaaagatgacaagaatcccagcataaaataatgtcccaatctttgctataaagccagagcctccgccctcctttccctccctccctctctccttcctcatccgtccgccattagccaaggttgcactgtgtacatgatttgtagctgatcattcattcatatagagctagctgagcaggcttgcttggttggcttggctgtccacaatttttgcttcggatagcatttctaccaggcgactgcaaagctccaagcacactcgatcttgctgtgataattctgagaggaagggcagagggagcaatggcgccggtcagtttgcctcctggtttcaggttccaccccactgacgaggaactcatcatctactaccttaagaggaagatcaacgggagacagattgagctcgaaatcattccggaggttgatctttacaagtgcgagccatgggatttgccagaaaaatcatttcttccaagcaaagaccttgaatggtacttcttcagcccccgggaccgcaagtacccgaatgggtcaaggacaaaccgtgcaacaaaatctgggtactggaaggcaaccggcaaggaccgaaaagtgaactcgcataggcgtgcagttggtatgaagaagaccctggtgtactatcggggccgagctccacatggttctcgcaccgattgggtcatgcacgagtaccgcctcgacgagagggaatgcgagactgacacgggcttacaggatgcatacgctttatgccgagtgttcaagaagacagcgcctgggccaaaaatcatagagcattatggcgcagtgcaccatcccatcgaacaccctcagtggatggcagaggcaggcagtgttgaccgccactccccaacgctggacttgtccagtgacgctagaggtgacgacttcgagagcagcagcttctcgttcccgacggaggcgcccagcatggactccatgcacgggatgcagatgagcgcaccccacgaggatggcaaatggatgcagttcctgagcgaagacgccttcaacgccaccaataaccctttcttcatgaacccaccttcttcttcaagcttcccatgcctcccgtccaaggtggatgtcgcactggagtgtgcaaggattcagcacaggctctcgttgcctcccctggaggtggaggacttcccacaggacgtcagcctcgacaccaaggcgagcgtgctccgcagcaaccccaacgaggtcgacatcctccaagagttcctctccgtggcgtcggcctcacaggagctcatcaatggcgccaccagcagctgctacgctgcagagttgtggccatcaggcgcgggcacaagcagcaccagcacccactacgtcaacgaactgtcttccctcgttgagctcggggtgaaggccaaagaggaggcagacaacttctactatatggactgcattgttggaacatctgtagggttctcatccaagtcgtcggtccaagtcgatgaacaggccgttaggttggttgagatcgctgacatcgaggggttgaagcaggaagagaagaggcaggtagagaaccttagaggtgtgcggcttcacaacaatgacctaggagagattgttgtacaaggagatgaaagcaatccaacggactgcatcacacaataccccatatcagattattctgctgacaatttaggagaagccggtcacctggccgatcccactgacgttggcggcggcctagccactgcacccatcttctcgcaatctcagcctgacgacttcgctattgggttcggtgacgtcgacgtcaaccctaatgcatctttcgacctgtacgagagggtcgacgtcaagcatgggctcttcgtctcaacggccggtgcgccgaagacattcttccaccacgttgagccatcgaagaaggtcagcgtctacctgagtcccgtagcgagcgacgtcgtcggcaaggcgaccgagaagttccattcccccattactgtgacagcaaccaaagcttccgtttttagcaagttgaaggcgctcgtcactcgtcagggacaaattcctggtggggaagacgcctccatcatgccgccggaggtccttaggcagcaaagaaatagcggcagccccacgacgatgaataccgagcaagagttggtcaagaaggcgaagaaggtgatgaagccggggcatggtggtggtgatggaaaccaagcatgtcttcttcttccactctccaagaggagcaaaggcatttccagcatgttcttctcggtgagaaatgggcataatttctgacatccgcgctcagggcgcaatcactggaaggtctttctgatcatgactcgtgcaaaaaagtaagggtcgtcttgtgctactaggcaactagtatcgggtgcctgcatgctgctggtgcatggagatgcatagtctttctcgtgcatcagtcagttaactggtgtgtataactggagaaatgtaataatccgtatttaattttttactcgtccgtacgtgtattaacacgtctgaagaaattgtacatggaaacattgtaagtgcaaatacacatgtgacatgttcatccatatacacggttacgttatatttg

SEQ ID NO: 163 - DNA, 2499 bp, Zea Mays
gttgcactgtgtacatgatttgtagctgatcattcattcatatagagctagctgagcaggcttgcttggttggcttggctgtccacaatttttgcttcggatagcatttctaccaggcgactgcaaagctccaagcacactcgatcttgctgtgataattctgagaggaagggcagagggagcaatggcgccggtcagtttgcctcctggtttcaggttccaccccactgacgaggaactcatcatctactaccttaagaggaagatcaacgggagacagattgagctcgaaatcattccggaggttgatctttacaagtgcgagccatgggatttgccagaaaaatcatttcttccaagcaaagaccttgaatggtacttcttcagcccccgggaccgcaagtacccgaatgggtcaaggacaaaccgtgcaacaaaatctgggtactggaaggcaaccggcaaggaccgaaaagtgaactcgcataggcgtgcagttggtatgaagaagaccctggtgtactatcggggccgagctccacatggttctcgcaccgattgggtcatgcacgagtaccgcctcgacgagagggaatgcgagactgacacgggcttacaggatgcatacgctttatgccgagtgttcaagaagacagcgcctgggccaaaaatcatagagcattatggcgcagtgcaccatcccatcgaacaccctcagtggatggcagaggcaggcagtgttgaccgccactccccaacgctggacttgtccagtgacgctagaggtgacgacttcgagagcagcagcttctcgttcccgacggaggcgcccagcatggactccatgcacgggatgcagatgagcgcaccccacgaggatggcaaatggatgcagttcctgagcgaagacgccttcaacgccaccaataaccctttcttcatgaacccaccttcttcttcaagcttcccatgcctcccgtccaaggtggatgtcgcactggagtgtgcaaggattcagcacaggctctcgttgcctcccctggaggtggaggacttcccacaggacgtcagcctcgacaccaaggcgagcgtgctccgcagcaaccccaacgaggtcgacatcctccaagagttcctctccgtggcgtcggcctcacaggagctcatcaatggcgccaccagcagctgctacgctgcagagttgtggccatcaggcgcgggcacaagcagcaccagcacccactacgtcaacgaactgtcttccctcgttgagctcggggtgaaggccaaagaggaggcagacaacttctactatatggactgcattgttggaacatctgtagggttctcatccaagtcgtcggtccaagtcgatgaacaggccgttaggttggttgagatcgctgacatcgaggggttgaagcaggaagagaagaggcaggtagagaaccttagaggtgtgcggcttcacaacaatgacctaggagagattgttgtacaaggagatgaaagcaatccaacggactgcatcacacaataccccatatcagattattctgctgacaatttagactgcaggagaagccggtcacctggccgatcccactgacgttggcggcggcctagccactgcacccatcttctcgcaatctcagcctgacgacttcgctattgggttcggtgacgtcgacgtcaaccctaatgcatctttcgacctgtacgagagggtcgacgtcaagcatgggctcttcgtctcaacggccggtgcgccgaagacattcttccaccacgttgagccatcgaagaaggtcagcgtctacctgagtcccgtagcgagcgacgtcgtcggcaaggcgaccgagaagttccattcccccattactgtgacagcaaccaaagcttccgtttttagcaagttgaaggcgctcgtcactcgtcagggacaaattcctggtggggaagacgcctccatcatgccgccggaggtccttaggcagcaaagaaatagcggcagccccacgacgatgaataccgagcaagagttggtcaagaaggcgaagaaggtgatgaagccggggcatggtggtggtgatggaaaccaagcatgtcttcttcttccactctccaagaggagcaaaggcatttccagcatgttcttctcggtgagaaatgggcataatttctgacatccgcgctcagggcgcaatcactggaaggtctttctgatcatgactcgtgcaaaaaagtaagggtcgtcttgtgctactaggcaactagtatcgggtgcctgcatgctgctggtgcatggagatgcatagtctttctcgtgcatcagtcagttaactggtgtgtataactggagaaatgtaataatccgtatttaattttttactcgtccgtacgtgtattaacacgtctgaagaaattgtacatggaaacattgtaagtgcaaatacacatgtgacatgttcatccatatacacggttacgttatatttg

SEQ ID NO: 164 - DNA, 639 bp, Zea Mays
cttaaaagcaattagaaggatgcaaatgaatcaaagtttaagatgtcagaagcactcgagaaagataaagaaattgatgaagaggaagaggagtatgtattgctagagttggacaattgtctttattcagacatgtcgccaggtgctccgttcgtactctccggtttggatacattgacgcctaccttgataataggtgacagtcttaagatgatcggagaatatgaagaaactattggcacctgctatctattctctgaaactgaagctgaaccgaaacctacaagtaatgagatggcaccttctgaagaaaacacagacaaacaagttagcagcagtaaggaagcgccgtcgaaggaggtgaaccatctcgccagcgttcaaaagatcctcaaatttcggccaatcaatgcggagcattcgcagcatcgagcatatcagcacaaggacaaggaattctagaaaaaaattgtagctggctatctgccgttatcttcttcattggccatccaaacgaggtggtttgtacactttgctttgttctatacataatctgatctattgtatcgatctgtcggtaattgtttctcagcattccccaaggaaatcatacaccaagcgggagaatttttttgtcat

SEQ ID NO: 165 - DNA, 640 bp, Zea Mays
atccgtcctcttagtgcttcagcgcgctgaagcgggctttaagatgtcagaagcactcgagaaagataaagaaattgatgaagaggaagaggagtatgtattgctagagttggacaattgtctttattcagacatgtcgccaggtgctccgttcgtactctccggtttggatacattgacgcctaccttgataataggtgacagtcttaagatgatcggagaatatgaagaaactattggcacctgctatctattctctgaaactgaagctgaaccgaaacctacaagtaatgagatggcaccttctgaagaaaacacagacaaacaagttagcagcagtaaggaagcgccgtcgaaggaggtgaaccatctcgccagcgttcaaaagatcctcaaatttcggccaatcaatgcggagcattcgcagcatcgagcatatcagcacaaggacaaggaattctagaaaaaaattgtagctggctatctgccgttatcttcttcattggccatccaaacgaggtggtttgtacactttgctttgttctatacataatctgatctattgtatcgatctgtcggtaattgtttctcagcattccccaaggaaatcatacaccaagcgggagaatttttttgtcat

SEQ ID NO: 166 - DNA, 2532 bp, Zea Mays
ctaaacgtctatcttttttcattcatcggaagcaaaagctgtttgtttggctttaatccaaaatggtttctactggctttaatccaaagcgaacaattgcaatatatttcttaagttagtgggggaggataattgcatacccgtaacagcatacatgcgtttacattgagttttttctctctcttcttgttgacctgaggtgtactccatgcattgttcatgaatggtagtggcgagcaaggtcaaaaggtagaggctgaaagccgcaagccatgcaccgcaatgcaccagcacgcagcacatgcattgcccgccaattcacagtcacaggaacgaggaatcctaccaattccgcgtcgtgacaagaaaagcttcccaacatctctgtcacgggctctcgtagcagaggagtaccactcagcgtctcactccttccccttcccttcccttcccttcagggaccaggccatcagttcttcacgagctgggaagagctcgtgagccgtgcattgaaggcaatggccgctgttcgtagatgctgcctgctggccgcggtgctgctgtggtcggcgctcgcttcagcggccacggccgcgccggcgcctgtggtggccgggccggtgtccagggtggaggacgccaccatgttccggatatactacggtcagagcttcaaggtcatcaagaactccggcgatggcaagagctaccttctcatgcagaacacgtccaagatggcatccaagacgaagtactgcacggggaggattaagtcgttcgtcatccccctcgccagcttctccgtcgacaccacgacctctccagtgtcattctttgagctgcttggagtgctagagagcttgaaaggaataacatcgaaccaagtcgcttctcagtgcgtgctccagtcatatacaagtggaaatgcccagcttgtgaatagaactgatgtgcagacactctcgcagtttactgcgcatttcataagcgatacagatgaagacagaggttgcaactttgcagcatatgtacccttagaagagggcacaccattgcagatggctgagtggatcaagtacctgggaactttcacaaactctgaaaacagggctaatgctgtctacgatgcagtaaagacaaactacctgtgcttaagcaaagtagctgcaaaccttggcacaagattcaagcctgtagtagcgtggattgaattcacacagggaatgtggacatttgttaaagaaagttacatcttacagtatgtcacagatgcaggagcagaaattgttgatgcaactattacggataagagatttaatagttcagatccagaggatatggataacttccatgctattctgtgtgtgagtatcaatcactcagaatgtaatattacaactgtaatgttagttgacgagctcactgttgcatgtgagtgtgtgacgtacaaaagacacatcctcttttggccataaaagggattaatgctgacacaattaataattgaaataaactggactggttgtatcaaatgaacaatgcctgcaaaacaccaaatggtctattacttgacacatttttcaaatgactctgcacttagtaacagttaactaagcttggttcacgaatattacagacagtggacgtggtcatagatcagacatatgctttggagcctgcagagtacaaactatccacctttttggagaatattaatgttagccacgactcctgttacagttttgtatcaaatcgcagcatatggagatttgacaaaaggataggagcttctgggacacttgattggtccgatggagctatctcacagcctcagttggttcttggagatctcatagaaattttcttcccaacggggaactacataacaatttacttcaggaatcttgcaaaggatgaaggggtcacagagattggtcctgaaatgtgcactaggagcatatccacacccatggatcctataatcctgtcatgtgaatgatgaacccagatgaacacgaagagttgtcaagctactgtactaacagacagtggcaactagttgacagaagcatttaagttactgacaaactgatctggacagaagcatttgcaacaaagattagattacacaatctagaaaaatactttctttcaaatattgagcagcaactgctgtttggtcagttgatcaataagtgattacaaacctcggtgtatccatgttaaaaggaatttgatgtaattatccaagagaccatcttatgaaattcaaacgactgttttcaatatgatatctgcctatgatttgtgatttcttgactgatatgtcctaaaatttataaatgggatactaagttactaggggtgttatatacccaaagttttagccttgaataggagtgcatgaaaaacaattatccatgtacccaaacctagacttgtgcgttctatacttctattgggtttttaattggtgagggtcggcgcgcagcaaaagcgggtccagaagcagcaagctaagctgtcacaaat

SEQ ID NO: 167 - DNA, 2080 bp, Zea Mays
ctttaatccaaagcgaacaattgcaatatatttcttaagttagtgggggaggataattgcatacccgtaacagcatacatgcgtttacattgagttttttctctctcttcttgttgacctgaggtgtactccatgcattgttcatgaatggtagtggcgagcaaggtcaaaaggtagaggctgaaagccgcaagccatgcaccgcaatgcaccagcacgcagcacatgcattgcccgccaattcacagtcacaggaacgaggaatcctaccaattccgcgtcgtgacaagaaaagcttcccaacatctctgtcacgggctctcgtagcagaggagtaccactcagcgtctcactccttccccttcccttcccttcccttcagggaccaggccatcagttcttcacgagctgggaagagctcgtgagccgtgcattgaaggcaatggccgctgttcgtagatgctgcctgctggccgcggtgctgctgtggtcggcgctcgcttcagcggccacggccgcgccggcgcctgtggtggccgggccggtgtccagggtggaggacgccaccatgttccggatatactacggtcagagcttcaaggtcatcaagaactccggcgatggcaagagctaccttctcatgcagaacacgtccaagatggcatccaagacgaagtactgcacggggaggattaagtcgttcgtcatccccctcgccagcttctccgtcgacaccacgacctctccagtgtcattctttgagctgcttggagtgctagagagcttgaaaggaataacatcgaaccaagtcgcttctcagtgcgtgctccagtcatatacaagtggaaatgcccagcttgtgaatagaactgatgtgcagacactctcgcagtttactgcgcatttcataagcgatacagatgaagacagaggttgcaactttgcagcatatgtacccttagaagagggcacaccattgcagatggctgagtggatcaagtacctgggaactttcacaaactctgaaaacagggctaatgctgtctacgatgcagtaaagacaaactacctgtgcttaagcaaagtagctgcaaaccttggcacaagattcaagcctgtagtagcgtggattgaattcacacagggaatgtggacatttgttaaagaaagttacatcttacagtatgtcacagatgcaggagcagaaattgttgatgcaactattacggataagagatttaatagttcagatccagaggatatggataacttccatgctattctgtgtttttgtatcaaatcgcagcatatggagatttgacaaaaggataggagcttctgggacacttgattggtccgatggagctatctcacagcctcagttggttcttggagatctcatagaaattttcttcccaacggggaactacataacaatttacttcaggaatcttgcaaaggatgaaggggtcacagagattggtcctgaaatgtgcactaggagcatatccacacccatggatcctataatcctgtcatgtgaatgatgaacccagatgaacacgaagagttgtcaagctactgtactaacagacagtggcaactagttgacagaagcatttaagttactgacaaactgatctggacagaagcatttgcaacaaagattagattacacaatctagaaaaatactttctttcaaatattgagcagcaactgctgtttggtcagttgatcaataagtgattacaaacctcggtgtatccatgttaaaaggaatttgatgtaattatccaagagaccatcttatgaaattcaaacgactgttttcaatatgatatctgcctatgatttgtgatttcttgactgatatgtcctaaaatttataaatgggatactaagttactaggggtgttatatacccaaagttttagccttgaataggagtgcatgaaaaacaattatccatgtacccaaacctagacttgtgcgttctatacttctattgggtttttaattggtgagggtcggcgcgcagcaaaagcgggtccagaagcagcaagctaagctgtcacaaat

SEQ ID NO: 168 - DNA, 2585 bp, Zea Mays
cgaacaattgcaatatatttcttaagttagtgggggaggataattgcatacccgtaacagcatacatgcgtttacattgagttttttctctctcttcttgttgacctgaggtgtactccatgcattgttcatgaatggtagtggcgagcaaggtcaaaaggtagaggctgaaagccgcaagccatgcaccgcaatgcaccagcacgcagcacatgcattgcccgccaattcacagtcacaggaacgaggaatcctaccaattccgcgtcgtgacaagaaaagcttcccaacatctctgtcacgggctctcgtagcagaggagtaccactcagcgtctcactccttccccttcccttcccttcccttcagggaccaggccatcagttcttcacgagctgggaagagctcgtgagccgtgcattgaaggcaatggccgctgttcgtagatgctgcctgctggccgcggtgctgctgtggtcggcgctcgcttcagcggccacggccgcgccggcgcctgtggtggccgggccggtgtccagggtggaggacgccaccatgttccggatatactacggtcagagcttcaaggtcatcaagaactccggcgatggcaagagctaccttctcatgcaggtaggtctcgttcggagacggagctgcatgcagcttgcctgcttgctccaccggattctgagaagtgctcatgctcaccgtactgcagaacacgtccaagatggcatccaagacgaagtactgcacggggaggattaagtcgttcgtcatccccctcgccagcttctccgtcgacaccacgacctctccagtgtcattctttgagctgcttggagtgctagagagcttgaaaggaataacatcgaaccaagtcgcttctcagtgcgtgctccagtcatatacaagtggaaatgcccagcttgtgaatagaactgatgtgcagacactctcgcagtttactgcgcatttcataagcgatacagatgaagacagaggttgcaactttgcagcatatgtacccttagaagagggcacaccattgcagatggctgagtggatcaagtacctgggaactttcacaaactctgaaaacagggctaatgctgtctacgatgcagtaaagacaaactacctgtgcttaagcaaagtagctgcaaaccttggcacaagattcaagcctgtagtagcgtggattgaattcacacaggtaacacgtcgcgctttctattgaagactcaaagagtagcactcaaataaatcaaaaaaaaatggatcactgatgttcattttttatgaacagtatgtcacagatgcaggagcagaaattgttgatgcaactattacggataagagatttaatagttcagatccagaggatatggataacttccatgctattctgtgtgtgagtatcaatcactcagaatgtaatattacaactgtaatgttagttgacgagctcactgttgcatgtgagtgtgtgacgtacaaaagacacatcctcttttggccataaaagggattaatgctgacacaattaataattgaaataaactggactggttgtatcaaatgaacaatgcctgcaaaacaccaaatggtctattacttgacacatttttcaaatgactctgcacttagtaacagttaactaagcttggttcacgaatattacagacagtggacgtggtcatagatcagacatatgctttggagcctgcagagtacaaactatccacctttttggagaatattaatgttagccacgactcctgttacagttttgtatcaaatcgcagcatatggagatttgacaaaaggataggagcttctgggacacttgattggtccgatggagctatctcacagcctcagttggttcttggagatctcatagaaattttcttcccaacggggaactacataacaatttacttcaggaatcttgcaaaggatgaaggggtcacagagattggtcctgaaatgtgcactaggagcatatccacacccatggatcctataatcctgtcatgtgaatgatgaacccagatgaacacgaagagttgtcaagctactgtactaacagacagtggcaactagttgacagaagcatttaagttactgacaaactgatctggacagaagcatttgcaacaaagattagattacacaatctagaaaaatactttctttcaaatattgagcagcaactgctgtttggtcagttgatcaataagtgattacaaacctcggtgtatccatgttaaaaggaatttgatgtaattatccaagagaccatcttatgaaattcaaacgactgttttcaatatgatatctgcctatgatttgtgatttcttgactgatatgtcctaaaatttataaatgggatactaagttactaggggtgttatatacccaaagttttagccttgaataggagtgcatgaaaaacaattatccatgtacccaaacctagacttgtgcgttctatacttctattgggtttttaattggtgagggtcggcgcgcagcaaaagcgggtccagaagcagcaagctaagctgtcacaaat

SEQ ID NO: 169 - DNA, 2996 bp, Zea Mays
attgcaatatatttcttaagttagtgggggaggataattgcatacccgtaacagcatacatgcgtttacattgagttttttctctctcttcttgttgacctgaggtgtactccatgcattgttcatgaatggtagtggcgagcaaggtcaaaaggtagaggctgaaagccgcaagccatgcaccgcaatgcaccagcacgcagcacatgcattgcccgccaattcacagtcacaggaacgaggaatcctaccaattccgcgtcgtgacaagaaaagcttcccaacatctctgtcacgggctctcgtagcagaggagtaccactcagcgtctcactccttccccttcccttcccttcccttcagggaccaggccatcagttcttcacgagctgggaagagctcgtgagccgtgcattgaaggcaatggccgctgttcgtagatgctgcctgctggccgcggtgctgctgtggtcggcgctcgcttcagcggccacggccgcgccggcgcctgtggtggccgggccggtgtccagggtggaggacgccaccatgttccggatatactacggtcagagcttcaaggtcatcaagaactccggcgatggcaagagctaccttctcatgcaggtaggtctcgttcggagacggagctgcatgcagcttgcctgcttgctccaccggattctgagaagtgctcatgctcaccgtactgcagaacacgtccaagatggcatccaagacgaagtactgcacggggaggattaagtcgttcgtcatccccctcgccagcttctccgtcgacaccacgacctctccagtgtcattctttgagctgcttggagtgctagagagcttgaaaggaataacatcgaaccaagtcgcttctcagtgcgtgctccagtcatatacaagtggaaatgcccagcttgtgaatagaactgatgtgcagacactctcgcagtttactgcgcatttcataagcgatacagatgaagacagaggttgcaactttgcagcatatgtacccttagaagagggcacaccattgcagatggctgagtggatcaagtacctgggaactttcacaaactctgaaaacagggctaatgctgtctacgatgcagttaagaccactaaatgcatctttatttggattgatatgaataagtaataaagtaaagacaaactacctgtgcttaagcaaagtagctgcaaaccttggcacaagattcaagcctgtagtagcgtggattgaattcacacaggtatgcagctgcaaaccagtaaaatggtaacttcctcatccaaagtaactttttttttaaaaaaaatgcatgcttagtaatcattaagccttctccatctactgttgtagggaatgtggacatttgttaaagaaagttacatcttacaggtaacacgtcgcgctttctattgaagactcaaagagtagcactcaaataaatcaaaaaaaaatggatcactgatgttcattttttatgaacagtatgtcacagatgcaggagcagaaattgttgatgcaactattacggataagagatttaatagttcagatccagaggatatggataacttccatgctattctgtgtgtgagtatcaatcactcagaatgtaatattacaactgtaatgttagttgacgagctcactgttgcatgtgagtgtgtgacgtacaaaagacacatcctcttttggccataaaagggattaatgctgacacaattaataattgaaataaactggactggttgtatcaaatgaacaatgcctgcaaaacaccaaatggtctattacttgacacatttttcaaatgactctgcacttagtaacagttaactaagcttggttcacgaatattacagacagtggacgtggtcatagatcagacatatgctttggagcctgcagagtacaaactatccacctttttggagaatattaatgttagccacgactcctgttacagttttgtatcaaatcgcagcatatggagatttgacaaaaggataggagcttctgggacacttggtaaccgaagcaatactattactagtatcatatcttttacctatgtaatgatctaatgaatttttccatctcaaagaaatgatgtcatacacatttactctttttccctttaagattggtccgatggagctatctcacagcctcagttggttcttggagatctcatagaaattttcttcccaacggggaactacataacaatttacttcaggaatcttgcaaaggcatgacctgtgttttcatttcgctacctctttcctttcatttaattgatttatgatttctccagaacaaggttgttgatcagtggaactataataacacaggatgaaggggtcacagagattggtcctgaaatgtgcactaggagcatatccacacccatggatcctataatcctgtcatgtgaatgatgaacccagatgaacacgaagagttgtcaagctactgtactaacagacagtggcaactagttgacagaagcatttaagttactgacaaactgatctggacagaagcatttgcaacaaagattagattacacaatctagaaaaatactttctttcaaatattgagcagcaactgctgtttggtcagttgatcaataagtgattacaaacctcggtgtatccatgttaaaaggaatttgatgtaattatccaagagaccatcttatgaaattcaaacgactgttttcaatatgatatctgcctatgatttgtgatttcttgactgatatgtcctaaaatttataaatgggatactaagttactaggggtgttatatacccaaagttttagccttgaataggagtgcatgaaaaacaattatccatgtacccaaacctagacttgtgcgttctatacttctattgggtttttaattggtgagggtcggcgcgcagcaaaagcgggtccagaagcagcaagctaagctgtcacaaat

SEQ ID NO: 170 - DNA, 2294 bp, Zea Mays
gataattgcatacccgtaacagcatacatgcgtttacattgagttttttctctctcttcttgttgacctgaggtgtactccatgcattgttcatgaatggtagtggcgagcaaggtcaaaaggtagaggctgaaagccgcaagccatgcaccgcaatgcaccagcacgcagcacatgcattgcccgccaattcacagtcacaggaacgaggaatcctaccaattccgcgtcgtgacaagaaaagcttcccaacatctctgtcacgggctctcgtagcagaggagtaccactcagcgtctcactccttccccttcccttcccttcccttcagggaccaggccatcagttcttcacgagctgggaagagctcgtgagccgtgcattgaaggcaatggccgctgttcgtagatgctgcctgctggccgcggtgctgctgtggtcggcgctcgcttcagcggccacggccgcgccggcgcctgtggtggccgggccggtgtccagggtggaggacgccaccatgttccggatatactacggtcagagcttcaaggtcatcaagaactccggcgatggcaagagctaccttctcatgcaggtaggtctcgttcggagacggagctgcatgcagcttgcctgcttgctccaccggattctgagaagtgctcatgctcaccgtactgcagaacacgtccaagatggcatccaagacgaagtactgcacggggaggattaagtcgttcgtcatccccctcgccagcttctccgtcgacaccacgacctctccagtgtcattctttgagctgcttggagtgctagagagcttgaaaggaataacatcgaaccaagtcgcttctcagtgcgtgctccagtcatatacaagtggaaatgcccagcttgtgaatagaactgatgtgcagacactctcgcagtttactgcgcatttcataagcgatacagatgaagacagaggttgcaactttgcagcatatgtacccttagaagagggcacaccattgcagatggctgagtggatcaagtacctgggaactttcacaaactctgaaaacagggctaatgctgtctacgatgcagtaaagacaaactacctgtgcttaagcaaagtagctgcaaaccttggcacaagattcaagcctgtagtagcgtggattgaattcacacagtatgtcacagatgcaggagcagaaattgttgatgcaactattacggataagagatttaatagttcagatccagaggatatggataacttccatgctattctgtgtttttgtatcaaatcgcagcatatggagatttgacaaaaggataggagcttctgggacacttggtaaccgaagcaatactattactagtatcatatcttttacctatgtaatgatctaatgaatttttccatctcaaagaaatgatgtcatacacatttactctttttccctttaagattggtccgatggagctatctcacagcctcagttggttcttggagatctcatagaaattttcttcccaacggggaactacataacaatttacttcaggaatcttgcaaaggcatgacctgtgttttcatttcgctacctctttcctttcatttaattgatttatgatttctccagaacaaggttgttgatcagtggaactataataacacaggatgaaggggtcacagagattggtcctgaaatgtgcactaggagcatatccacacccatggatcctataatcctgtcatgtgaatgatgaacccagatgaacacgaagagttgtcaagctactgtactaacagacagtggcaactagttgacagaagcatttaagttactgacaaactgatctggacagaagcatttgcaacaaagattagattacacaatctagaaaaatactttctttcaaatattgagcagcaactgctgtttggtcagttgatcaataagtgattacaaacctcggtgtatccatgttaaaaggaatttgatgtaattatccaagagaccatcttatgaaattcaaacgactgttttcaatatgatatctgcctatgatttgtgatttcttgactgatatgtcctaaaatttataaatgggatactaagttactaggggtgttatatacccaaagttttagccttgaataggagtgcatgaaaaacaattatccatgtacccaaacctagacttgtgcgttctatacttctattgggtttttaattggtgagggtcggcgcgcagcaaaagcgggtccagaagcagcaagctaagctgtcacaaat

SEQ ID NO: 171 - DNA, 2199 bp, Zea Mays
tgcgtttacattgagttttttctctctcttcttgttgacctgaggtgtactccatgcattgttcatgaatggtagtggcgagcaaggtcaaaaggtagaggctgaaagccgcaagccatgcaccgcaatgcaccagcacgcagcacatgcattgcccgccaattcacagtcacaggaacgaggaatcctaccaattccgcgtcgtgacaagaaaagcttcccaacatctctgtcacgggctctcgtagcagaggagtaccactcagcgtctcactccttccccttcccttcccttcccttcagggaccaggccatcagttcttcacgagctgggaagagctcgtgagccgtgcattgaaggcaatggccgctgttcgtagatgctgcctgctggccgcggtgctgctgtggtcggcgctcgcttcagcggccacggccgcgccggcgcctgtggtggccgggccggtgtccagggtggaggacgccaccatgttccggatatactacggtcagagcttcaaggtcatcaagaactccggcgatggcaagagctaccttctcatgcaggtaggtctcgttcggagacggagctgcatgcagcttgcctgcttgctccaccggattctgagaagtgctcatgctcaccgtactgcagaacacgtccaagatggcatccaagacgaagtactgcacggggaggattaagtcgttcgtcatccccctcgccagcttctccgtcgacaccacgacctctccagtgtcattctttgagctgcttggagtgctagagagcttgaaaggaataacatcgaaccaagtcgcttctcagtgcgtgctccagtcatatacaagtggaaatgcccagcttgtgaatagaactgatgtgcagacactctcgcagtttactgcgcatttcataagcgatacagatgaagacagaggttgcaactttgcagcatatgtacccttagaagagggcacaccattgcagatggctgagtggatcaagtacctgggaactttcacaaactctgaaaacagggctaatgctgtctacgatgcagtaaagacaaactacctgtgcttaagcaaagtagctgcaaaccttggcacaagattcaagcctgtagtagcgtggattgaattcacacagggaatgtggacatttgttaaagaaagttacatcttacagtatgtcacagatgcaggagcagaaattgttgatgcaactattacggataagagatttaatagttcagatccagaggatatggataacttccatgctattctttttgtatcaaatcgcagcatatggagatttgacaaaaggataggagcttctgggacacttggtaaccgaagcaatactattactagtatcatatcttttacctatgtaatgatctaatgaatttttccatctcaaagaaatgatgtcatacacatttactctttttccctttaagattggtccgatggagctatctcacagcctcagttggttcttggagatctcatagaaattttcttcccaacggggaactacataacaatttacttcaggaatcttgcaaaggatgaaggggtcacagagattggtcctgaaatgtgcactaggagcatatccacacccatggatcctataatcctgtcatgtgaatgatgaacccagatgaacacgaagagttgtcaagctactgtactaacagacagtggcaactagttgacagaagcatttaagttactgacaaactgatctggacagaagcatttgcaacaaagattagattacacaatctagaaaaatactttctttcaaatattgagcagcaactgctgtttggtcagttgatcaataagtgattacaaacctcggtgtatccatgttaaaaggaatttgatgtaattatccaagagaccatcttatgaaattcaaacgactgttttcaatatgatatctgcctatgatttgtgatttcttgactgatatgtcctaaaatttataaatgggatactaagttactaggggtgttatatacccaaagttttagccttgaataggagtgcatgaaaaacaattatccatgtacccaaacctagacttgtgcgttctatacttctattgggtttttaattggtgagggtcggcgcgcagcaaaagcgggtccagaagcagcaagctaagctgtcacaaat

SEQ ID NO: 172 - DNA, 1972 bp, Zea Mays
cactccttccccttcccttcccttcccttcagggaccaggccatcagttcttcacgagctgggaagagctcgtgagccgtgcattgaaggcaatggccgctgttcgtagatgctgcctgctggccgcggtgctgctgtggtcggcgctcgcttcagcggccacggccgcgccggcgcctgtggtggccgggccggtgtccagggtggaggacgccaccatgttccggatatactacggtcagagcttcaaggtcatcaagaactccggcgatggcaagagctaccttctcatgcagaacacgtccaagatggcatccaagacgaagtactgcacggggaggattaagtcgttcgtcatccccctcgccagcttctccgtcgacaccacgacctctccagtgtcattctttgagctgcttggagtgctagagagcttgaaaggaataacatcgaaccaagtcgcttctcagtgcgtgctccagtcatatacaagtggaaatgcccagcttgtgaatagaactgatgtgcagacactctcgcagtttactgcgcatttcataagcgatacagatgaagacagaggttgcaactttgcagcatatgtacccttagaagagggcacaccattgcagatggctgagtggatcaagtacctgggaactttcacaaactctgaaaacagggctaatgctgtctacgatgcagtaaagacaaactacctgtgcttaagcaaagtagctgcaaaccttggcacaagattcaagcctgtagtagcgtggattgaattcacacaggtatgcagctgcaaaccagtaaaatgggaatgtggacatttgttaaagaaagttacatcttacagtatgtcacagatgcaggagcagaaattgttgatgcaactattacggataagagatttaatagttcagatccagaggatatggataacttccatgctattctgtgtttttgtatcaaatcgcagcatatggagatttgacaaaaggataggagcttctgggacacttggtaaccgaagcaatactattactagtatcatatcttttacctatgtaatgatctaatgaatttttccatctcaaagaaatgatgtcatacacatttactctttttccctttaagattggtccgatggagctatctcacagcctcagttggttcttggagatctcatagaaattttcttcccaacggggaactacataacaatttacttcaggaatcttgcaaaggcatgacctgtgttttcatttcgctacctctttcctttcatttaattgatttatgatttctccagaacaaggttgttgatcagtggaactataataacacaggatgaaggggtcacagagattggtcctgaaatgtgcactaggagcatatccacacccatggatcctataatcctgtcatgtgaatgatgaacccagatgaacacgaagagttgtcaagctactgtactaacagacagtggcaactagttgacagaagcatttaagttactgacaaactgatctggacagaagcatttgcaacaaagattagattacacaatctagaaaaatactttctttcaaatattgagcagcaactgctgtttggtcagttgatcaataagtgattacaaacctcggtgtatccatgttaaaaggaatttgatgtaattatccaagagaccatcttatgaaattcaaacgactgttttcaatatgatatctgcctatgatttgtgatttcttgactgatatgtcctaaaatttataaatgggatactaagttactaggggtgttatatacccaaagttttagccttgaataggagtgcatgaaaaacaattatccatgtacccaaacctagacttgtgcgttctatacttctattgggtttttaattggtgagggtcggcgcgcagcaaaagcgggtccagaagcagcaagctaagctgtcacaaat

SEQ ID NO: 173 - DNA, 1880 bp, Zea Mays
cgaccacgatcgccgacgaccaaacctacctagtactagcggctactggctactgctacgcctacgcctcagggttctctatgctcagctctcccgcgcgggcgcgcacgaaaatggagcagatcgactagtaaaaagccgcgcgcctttcgctgtcgcaggaagatgctctggtgtcccatttgctttgtccctgtctgaacagtggacagtcgggggaacaggaacaccatgggcacgcatggcgctcggaccgtggagtggatagagagtggccattgcccgttgtcgattgcattgctactactcatccatccatttggtacggttctgttacacgcgcacgagctgacgagcacatacacacacacacacaccgcctgtcgacgacgagagcgcgactgagatcacatgacggagcaggcgttgacgtcgtcgtcgttgaacatgttgctgacggggtcggcgccgcggtggggctcgtggagctgtccgtgcttgtcgccgttgtagccgtggcggtagtagttgtaggtgcggcggtacgactcctcgtcgtggaagtagtccttggcgcaggtgaagtgcatcggcaggtccgggttgggccagaactccgccttcttccccgcgcgccggacctccttgagcacccggtggcggtccacgtaccccgtcaccgtcaccttctccatctccacgtccacctccacggagtccaccccgcgcagcctcgtcaccgcgtgcttcaccacgcgctcgcagcccgagcagcacatgcgcaccttcagctccaccgtctgacgaccaaagagcatggcatgctctgcatgcagaggtcgtcgctgttctcaacaggagcgccagcgcccgcatccgccaacggtcaccgtatgcgccaagaattcgaacaagaagaataaaaatggtggcggacacagaagaaatatgtgcatgtcacgtcgcactcgcgtagccaagtcgccgtgctcgcatgcgtgtctactacctaccctgccgcccgacgaaagaacagggcaccgcaaagcagacagacgacagaaagaagcagaggcagaggcaacggacgacgcgcacctgcagcgacagcggcctgctgctccggcccatggccctgcgcccggcgaaggtgccctcgtggtagtgcagggtgctggcgctcgtcgggtggctgctgtagtagtaggcgccgccgcggtggtggccggcggatgacgggtagaagcagcagagcaggaagttggtcagcgacgacgacaccgacgacatggctggctggctggctacttatactgcggctaatctctcccgcgcgcctgggaaggaaggaagctagctgcccctctctgcgggttcacccacccttggttgccccgccgcgccgtgcacacgcctgcctgggctttctttgcttgcgttgcgaggtcgggatggatggcgttggacgctggaggagtcgagtgccctctcgcctctgcccactgccgctgcttttattctctcgccgccgctgctgccgcgccctactctttttattctttttccgccctcgtattggtgcttgaattctgggagggaaaagagggggccctggtctgctcacctagcttgccggtccgccggccggtacacatgttctgccacgtctgccgtggactactagtgctaccgagcactagtagttgctaatcatcatcgtctgttgatgttcatagggattttgaaacgccgaaagctagactaccgccagctattatgtttaggatgtccagaaaagtatctaaaaaataaatgaaaaacaagggtattcaaactgtggttgataagttaaggagacagtacttacaccactaaactaa

SEQ ID NO: 174 - DNA, 634 bp, Zea Mays
  misc_feature (633)..(634): n is a, c, g, or t
gctctctctctctccgccccatggatgacggatactcctacaatacaagttgtagtagtagtagtaggggtactgcatacctacacagtgacagggagatggaggtcgatcccaagcatccatacatcacatgatacatgcacacacatgcttagctgcaaaactgcaacagttattaacaacactactacagtgggtgagactgattaggtaatataagtactagctactagctaggaaaggaggaggccaattcaattacctttggttgcaagccaaaaagtaagtatccatctcctttcccttgtcccaccaatgcacaagaaccttcatagtactgctactgctaccacactcatcacatctcctgctactcttcttacccagccactgctcctcctcctccttcttcttcttcctcctccgatcccctagcttgatttgagcctgcaggtcgctagcacacctcctcccttccgtcctcatcaatccatcccgcgcgcgggccgcgtagcaaccacagatccgcaataacaatccaagaaattaaaccaagctgaaccaaaccctgaaaattccccaattctaaattctcccgatccgaagccatccgctaatacaaaaaacaatccnn

SEQ ID NO: 175 - DNA, 2281 bp, Zea Mays
acagctgcacctccactcttcgccatccagtagtagcgtgccataaacaaaaagtatatcaggcgccactggtcaaagtaaagtctcaaggcggaggcggtagcggcagcagcgtcgatcgatcggccggcgtctacggcctacgttcgacctgcctcgacggacggccggccggctcgatctcgaccgatcgccggtcgtcgatcggagagatcgatggagttcaccgctcccccgcccgcgacccggtcgggcggcggcgaggagagggcggctgctgagcaccaccagcagcagcagcaggcgacggtggagaaggagcacatgttcgacaaggtggtgacgccgagcgacgtcgggaagctgaaccggctggtgatcccgaagcagcacgcggagaggtacttcccgctggacgcggcggcgaacgacaagggcctgctgctcagcttcgaggaccgcgcggggaagccctggcgcttccgctactcctactggaacagcagccagagctacgtgatgaccaagggctggagccgcttcgtcaaggagaagcgcctcgacgccggggacaccgtctccttcggccgcggcgtcggcgaggcggcgcgcggcaggctcttcatcgactggcggcgccgacccgacccgcccgtcgtgcaccaccagtaccaccaccaccgcctccctctcccctccgccgtcgtcccctacgcgccgtgggcggcggcggcgcacgcgcaccaccaccactacccagcagctggggtcggtgccgccaggacgacgacgacgacgacgacgacggtgctccaccacctgccgccctcgccctccccgctctaccttgacacccgccgccgccacgtcggctacgacgcctacggggccggcaccaggcaacttctcttctacaggccgcaccagcagccctccacgacggtgatgctggactccgtgccggtacggttaccgccaacgccagggcagcacgccgagccgccgccccccgccgtggcgtcgtcagcctcgaagcgggtgcgcctgttcggggtgaacctcgactgcgccgccgccgccggctcagaggaggagaacgtcggcgggtggaggactagtgcgccgccgacgcagcaggcgtcctcctcctcatcctactcttccgggaaagcgaggtgctccttgaaccttgacttgtgaaggcatggcagccggagaagccgcgtggtcgtcgttctcctactccgtactcgtacgatctatctctacagcagcagcctactactactactacttgctccccggccggcggccgcttctggcgccactgcagtgcactgaagacggcaccaacggtcgtcgtcgtggagagtgaggggatcgagatccaatccagtccaagtaaacaaaggcggcggcggcggtacgtggccggccggtgcaagtaaggatcgatcgagctggagtggaggagcactgcgctgcgctgcaccaacaagtcttcactcgtaacccgtatatagctcatctctcccaatttctttttagcaattccggtgtgaagggggaaacaaggaaattaagaacaaagcagcagcaacaagttataaaaaaatgatttcttcttctcgatggttaatttgtcgcctcgatttgcctttcttgatttcctcgtctgctcgaattcttctttttgttccgcctcctggaggggagaccctactgatttcttgcatttctgaaagataatagcgccttgtttgagcatgcaagaccaggggcctaggaaacactgtgtgtgtgtgtgctctctccgatccccacatatgataacaattgctaatatgcacagcatgatcatgtcagtagtgagggggttctcctagttgtgaggatcggatgagagggccgggggcgacaagtgtgctttattgtactgcatgcatgtattgtgcgcatggattgttcttgctgcggtgctttgggcaggctctccttccaaaacacctcggctgtagtgaggagaggggatcaagcaggtgcctttaaaatgtgggagctcctcagcagcagccagaggtcagagccatatgccagagctcaacgcagctgccatccagatctctatatctctttctctctctataggacagacagttatgggaggattggaggtcagatcctaaatccttctcctatcctatcctatccttcacagcagaggttgatctaccttggtaagcttgcttgctcatcctctatctcattctctctactagct

SEQ ID NO: 176 - DNA, 1519 bp, Zea Mays
ctcgtgcgtacacgtgtggttagttagttaggagcaggcagctgacgaggccacaatagattctggcatcagaagtggggttaaaaaaaaaaaaagaagcctcacatccgagtgccttccacgttaaaaaaaaaaaggaggcagagagcttttctacagccgcgccaggcgccattcttcaagctttacccaaaaggaagcatggatggatgcatccaccagtgcagagcccgccgtctggtccacgcagtttgttggctggtaaagccgggtcacgtactgaagaaagaaagatagctagactctgtctctctgaaccgaatgcatggaatgctgaagatctctgagatctgaaccagccactgccggtgtggaagcggagctgggagctggagactggagtggaaccttcttttttcactgttgtttgttgttacagcacctttttttattattgttacagactgacacttaggtacagcgctgtggtaactgttactgtaacgtcatcccagctcagcctcggcttctgctacagcaaataacggcgttggcgcgttgccaagtgctaagctagcagctatgtactgccagtttcattcaggtccatgcctccgcggctccgcctgcctgtcttcgtactccttcctgctactccagtccggctccggcgcggtgctgcacatggaggcaggtccatcaggtccgtgccgtcgccatcagtggccaatcagtcagtagatcatttgaccccaattccaggaagacgaactccggtgcggggcgctcacgcgaagcttcagtagttcagtatccaggcttggcccttggcagcgccagcgctactggaactgagactgaacccggaattcacagcatcttgtgcttcgaatcagtctgtactctgtagtctgtactgtgctgggtagggatcatcggagcatgatcatcgtcttttcttttcttctctttttttttacgaggaaagaacgtaaagcccttcgttatcgtgtgcacgccctggccggatcaggttccccatgctggctgttgggtgcaaagttggatccactttcagtggccaaatcgcaagcttcttttccttctctcccccctcctcctttcaagcctcaggcgctaatcaatcaatgatgcagctttgtctttcacaaaacatgaatcatgcagcattttggcagcccagctcgctcgtgatcattaatgtccaaaagactattttttaggtaggcgggcaggtgaggccctcgattgtgctaggcacatgacaaaagtgcggcgcaggcaccgaccgaccggccggccctgccctcgcgttcttttccttttattttccctcttttttttctttctaattgtataggacaggtttcgagagactgcatgtccccccttcttgtccgtgctggttgcgtcgttgttgccaaacaacacacgtccatggtccatctcgcaatttttgagcagcagaaacgcaggtcactaattggttggtgcgaag

SEQ ID NO: 177 - DNA, 2079 bp, Zea Mays
cgcctatgcacgttggctggccctactaaacggagaagccccaccacaaacgctactcgccgccgcggcgcgcagacgactgcgactccgcgatggacgaggaggaaagggaggaggtgggagagtacaagctgcaagggttggttgggaggggctcgttcgccgaggtgcaccgtgccgcgcaccgccgcactggcgcgcccgcggcggtcaaggcgatcgaccgccgcctcgtcgacaagcgcgtccacgacggcatcctgcaggagagggagatactcaggagcatcgaccaccccaacatcctccgcctcctcgacaccatcgacaccacgaacatgatgtacctggtgctggagtactgcgacggaggcgacctggacgcgtttctccacaagcacggccggctgccggaggccgtagccaaggacttgatgcggcagctcgcggaagggctgaaggtgctgagggggaggaacatcgtgcaccgggacctcaaaccacagaaccttctcctatcaaccaacggggatgacatcgtattgaaaattggtgactttgggtttgccaggtcgctggtgcatgaaaatttagctgctacaatatgtgggtcgccatattatatggcaccagaaatttggcaagggaaggactatgatgcaaagtcggacttgtggagtgttggtatcattctttttcagctagtcacagggaagttgccattcaccgggagtaatgcttttcagctgcaccaaaatgtcatggctaccgatgatcttaacttcccttcagaaattgaagctgatttatgtcctgattgcattgatttgtgcagaagactcctgcaccgtgatccaaagaagagaataagttttgaagaaatcttcaatcacaagtttttggcaacaacaaggaaatgctatgaatcctgtcatgctgtagaattaagagataactgccagacaatcacctctcctgttgtcctaaaaacaaagtctggaagtattgaatcaaaaaatccgaaagtttttgattcatgggagtggattgaacgagaatatgtgcttgttccggaaaactgtacttctatggaaatgtcttcactcaacatcaagtccacaaaggatgatatggatacaagaacggtcagctatggagtcagccactgtggattgtagacgagggaaaccacctgattatattacaagacttcattctctgaatcaatatgttcttgttcttgcggatcttgctcgggaaaagctatctaaaggcctgtacctggaggcgttatcaattgaacttgtattattaactatctggaaagaggcacttgatgcatgtagcttgctcatggatacatcagatggtgaaaaattctctaaatcttgtcaagaacatttccttgctaagagtggccactcacctatgaatgtagtacaaggattggatttcactcggacggcttctattttttcttggcttgaaagtgggtttatgaaggcatatgatcgtgcagagaagatatcacatgtattacggaaaagtgatgataacaccgagatgccagatgcagtggatgttacattccaaactgctttgtaatatgagaagagtagagctgcgaatgaagttttaggaaatcaaagcagatccgcagagctatattcgaagtctatcatcttgctcacgtttttagtacaggaagcatctatgttgccactaaatccaccgctttccctttcgcctttggatcagcaacgcatccgtaggtacatagctaatttgaacagccatctctgcagtgctcaggttccagggcaacggcagagatcagtccaccatgttgctttttgtctaggaggtggtgttcaatgctttggtgtcatgaacctttgtaaaattgtagttgccgaacaccatgatcctgcccccttttttgtatatatatagataataacaccacatgctctatatggtcgccccttaccatatgttcaaatgactctgaactttatatatttgcaagtgccttgtttgcacatgtaaaaagaaacgggtttcgaaccttctcgcgac

SEQ ID NO: 178 - DNA, 2082 bp, Zea Mays
aacggagaagccccaccacaaacgctactcgccgccgcggcgcgcagacgactgcgactccgcgatggacgaggaggaaagggaggaggtgggagagtacaagctgcaagggttggttgggaggggctcgttcgccgaggtgcaccgtgccgcgcaccgccgcactggcgcgcccgcggcggtcaaggcgatcgaccgccgcctcgtcgacaagcgcgtccacgacggcatcctgcaggagagggagatactcaggagcatcgaccaccccaacatcctccgcctcctcgacaccatcgacaccacgaacatgatgtacctggtgctggagtactgcgacggaggcgacctggacgcgtttctccacaagcacggccggctgccggaggccgtagccaaggacttgatgcggcagctcgcggaagggctgaaggtgctgagggggaggaacatcgtgcaccgggacctcaaaccacagaaccttctcctatcaaccaacggggatgacatcgtattgaaaattggtgactttgggtttgccaggtcgctggtgcatgaaaatttagctgctacaatatgtgggtcgccatattatatggcaccagaaatttggcaagggaaggactatgatgcaaagtcggacttgtggagtgttggtatcattctttttcagctagtcacagggaagttgccattcaccgggagtaatgcttttcagctgcaccaaaatgtcatggctaccgatgatcttaacttcccttcagaaattgaagctgatttatgtcctgattgcattgatttgtgcagaagactcctgcaccgtgatccaaagaagagaataagttttgaagaaatcttcaatcacaagtttttggcaacaacaaggaaatgctatgaatcctgtcatgctgtagaattaagagataactgccagacaatcacctctcctgttgtcctaaaaacaaagtctggaagtattgaatcaaaaaatccgaaagtttttgattcatgggagtggattgaacgagaatatgtgcttgttccggaaaactgtacttctatggaaatgtcttcactcaacatcaagtccacaaaggatgatatggatacaagaacggtcagctatgccatggatgtgctcctgtggtcatttcacaggagtcagccactgtggattgtagacgagggaaaccacctgattatattacaagacttcattctctgaatcaatatgttcttgttcttgcggatcttgctcgggaaaagctatctaaaggcctgtacctggaggcgttatcaattgaacttgtattattaactatctggaaagaggcacttgatgcatgtagcttgctcatggatacatcagatggtgaaaaattctctaaatcttgtcaagaacatttccttgctaagagtggccactcacctatgaatgtagtacaaggattggatttcactcggacggcttctattttttcttggcttgaaagtgggtttatgaaggcatatgatcgtgcagagaagatatcacatgtattacggaaaagtgatgataacaccgagatgccagatgcagtggatgttacattccaaactgctttgtaatatgagaagagtagagctgcgaatgaagttttaggaaatcaaagcagatccgcagagctatattcgaagtctatcatcttgctcacgtttttagtacaggaagcatctatgttgccactaaatccaccgctttccctttcgcctttggatcagcaacgcatccgtaggtacatagctaatttgaacagccatctctgcagtgctcaggttccagggcaacggcagagatcagtccaccatgttgctttttgtctaggaggtggtgttcaatgctttggtgtcatgaacctttgtaaaattgtagttgccgaacaccatgatcctgcccccttttttgtatatatatagataataacaccacatgctctatatggtcgccccttaccatatgttcaaatgactctgaactttatatatttgcaagtgccttgtttgcacatgtaaaaagaaacgggtttcgaaccttctcgcgac

SEQ ID NO: 179 - DNA, 1525 bp, Zea Mays
cacaaacgctactcgccgccgcggcgcgcagacgactgcgactccgcgatggacgaggaggaaagggaggaggtgggagagtacaagctgcaagggttggttgggaggggctcgttcgccgaggtgcaccgtgccgcgcaccgccgcactggcgcgcccgcggcggtcaaggcgatcgaccgccgcctcgtcgacaagcgcgtccacgacggcatcctgcaggagagggagatactcaggagcatcgaccaccccaacatcctccgcctcctcgacaccatcgacaccacgaacatgatgtacctggtgctggagtactgcgacggaggcgacctggacgcgtttctccacaagcacggccggctgccggaggccgtagccaaggacttgatgcggcagctcgcggaagggctgaaggtgctgagggggaggaacatcgtgcaccgggacctcaaaccacagaaccttctcctatcaaccaacggggatgacatcgtattgaaaattggtgactttgggtttgccaggtcgctggtgcatgaaaatttagctgctacaatatgtgggtcgccatattatatggcaccagaaatttggcaagggaaggactatgatgcaaagtcggacttgtggagtgttggtatcattctttttcagctagtcacagggaagttgccattcaccgggagtaatgcttttcagctgcaccaaaatgtcatggctaccgatgatcttaacttcccttcagaaattgaagctgatttatgtcctgattgcattgatttgtgcagaagactcctgcaccgtgatccaaagaagagaataagttttgaagaaatcttcaatcacaagtttttggcaacaacaaggaaatgctatgaatcctgtcatgctgtagaattaagagataactgccagacaatcacctctcctgttgtcctaaaaacaaagtctggaagtattgaatcaaaaaatccgaaagtttttgattcatgggagtggattgaacgagaatatgtgcttgttccggaaaactgtacttctatggaaatgtcttcactcaacatcaagtccacaaaggatgatatggatacaagaacggtcagctatggagtcagccactgtggattgtagacgagggaaaccacctgattatattacaagacttcattctctgaatcaatatgttcttgttcttgcggatcttgctcgggaaaagctatctaaaggcctgtacctggaggcgttatcaattgaacttgtattattaactatctggaaagaggcacttgatgcatgtagcttgctcatggatacatcagatggtgaaaaattctctaaatcttgtcaagaacatttccttgctaagagtggccactcacctatgaatgtagtacaaggattggatttcactcggacggcttctattttttcttggcttgaaagtgggtttatgaaggcatatgatcgtgcagagaagatatcacatgtattacggaaaaataacaccgagatgccagatgca

SEQ ID NO: 180 - DNA, 2036 bp, Zea Mays
cacggacacggagtagtttatatgttgtggagctagccctcgctgctcgtagttgtagctccgggcctccggctgctgccgccgccgccgccacagggagagctagcaaggaggtatataggtatagccgtatagctagctagctgctgctgcgtgaacggggaagaggggagggggctgctgttgcagtgttgcctgttggcctgttgcaggctcagctcgcaagtcgcgtctgcagcagctgctgcctcagggaggggctcattactccctcgttgcgtgctgcagttattgcttgctaccgctagctactgtgtacgttttggccttgccaataagctctaatggagaggatgcagctgcaactgcaagggtccatcgcctcttcgctggtaagttcacatacactacacagccaggggagggggcagccgggcaggcaatggagcacgcacgcagcttccatttgtagcggcaggcagcttctttctggaggaagctccgtcgtaaatgcaatggagtattaattctcctgctcctgctgcatgccgctgctgcctcctctagtcttgacgcttcctttcccttccatgccctctctgcattgttcacctttgctagtacttccctctcatgtcgtcgcagtggcagctctgccgccggcacccacgcacgcacgcacgcacaattcaatgcgcaccactgtactcgctctctgtgcttcctgctaggagatcgacatcgactcgactactaggagtatctttaatgtcgttgctgctgctcccctttctcgatcggcttgctgatgatgtgcctttcttgctccccttccggcgatggcgtggtgatgacgacggtggcggtaatggaacagtgggcagacaagcagcagcaggcggccagcaccaacgccgcagcggcggcggcgcagatgcccttcctggcgctgctccagggcgcgggcgttgtggtggaggcggagcagcaggaggagcagcaccacgacgggcgcaagcggcaggccttcgcgcgcgccgtctccgaccttgatctgctcgagagctgcgtcacgcaggcggtagctcccgcagcggcggcgtctgcgcccgtggccggcaggaccgagaggcggaggaagcggcagaggccccgcgcgcgcgccgcgccgccgccggagaagcgcaagaagcccgaggaggccgagagccagcgtatgacgcacattgctgtggagcgcaaccggcggcgcctcatgaacgaccacctcgcctcgctccgctccctcatcccttccagctacaccccgcgcggcgaccaggccacggtggtgggtggcgcgatcgactacgtgaagcagctggagcagcagctggtggcgctgcaggcggccgcggccgcgcggcgtggcgtggccggcaccggcgccgccgcggtggcaacggtcgcgtcggacggcgtgttcgtgtccccgcagtacgcgagctactcggactcgcgcggcgccggcgccggcgtggacgtggaggcgacggccgcggtgggcgggcacgtgcgcgtgcgcgtcgcggggaggcggtggcccgggcggctcgtgcgcgtcgtcgccgcgctcgaggacctccgcctcgcggtcttgcacctcgccgtcacctccgtcggacacgacgccgtcgtgtactgcttcaacctcaagatggaggaaggatgcgaggtggcgacggcggacgaggtggcgacggtggtgcaccagatcttcgcctacgccgcgggcgcatgctgctgacgacgacgacgacgacgggcagccggggaggacgggggacggcaagtcaggaccatggtggaggcgggcaggcacgacgatgcatgtacacgacgaacgcgggcgcggaggagaggagaggacgatgatggctggctggccgggcgggcgggccaccagaggaggtcatgcgtacgtagagaggtagagcagcggcagcgagctaggggaccaagcaagcagcggcaggcaggtccagagcagcgcaggg

SEQ ID NO: 181 - DNA, 1551 bp, Zea Mays
cacggacacggagtagtttatatgttgtggagctagccctcgctgctcgtagttgtagctccgggcctccggctgctgccgccgccgccgccacagggagagctagcaaggaggtatataggtatagccgtatagctagctagctgctgctgcgtgaacggggaagaggggagggggctgctgttgcagtgttgcctgttggcctgttgcaggctcagctcgcaagtcgcgtctgcagcagctgctgcctcagggaggggctcattactccctcgttgcgtgctgcagttattgcttgctaccgctagctactgtgtacgttttggccttgccaataagctctaatggagaggatgcagctgcaactgcaagggtccatcgcctcttcgctgtgggcagacaagcagcagcaggcggccagcaccaacgccgcagcggcggcggcgcagatgcccttcctggcgctgctccagggcgcgggcgttgtggtggaggcggagcagcaggaggagcagcaccacgacgggcgcaagcggcaggccttcgcgcgcgccgtctccgaccttgatctgctcgagagctgcgtcacgcaggcggtagctcccgcagcggcggcgtctgcgcccgtggccggcaggaccgagaggcggaggaagcggcagaggccccgcgcgcgcgccgcgccgccgccggagaagcgcaagaagcccgaggaggccgagagccagcgtatgacgcacattgctgtggagcgcaaccggcggcgcctcatgaacgaccacctcgcctcgctccgctccctcatcccttccagctacaccccgcgcggcgaccaggccacggtggtgggtggcgcgatcgactacgtgaagcagctggagcagcagctggtggcgctgcaggcggccgcggccgcgcggcgtggcgtggccggcaccggcgccgccgcggtggcaacggtcgcgtcggacggcgtgttcgtgtccccgcagtacgcgagctactcggactcgcgcggcgccggcgccggcgtggacgtggaggcgacggccgcggtgggcgggcacgtgcgcgtgcgcgtcgcggggaggcggtggcccgggcggctcgtgcgcgtcgtcgccgcgctcgaggacctccgcctcgcggtcttgcacctcgccgtcacctccgtcggacacgacgccgtcgtgtactgcttcaacctcaagatggaggaaggatgcgaggtggcgacggcggacgaggtggcgacggtggtgcaccagatcttcgcctacgccgcgggcgcatgctgctgacgacgacgacgacgacgggcagccggggaggacgggggacggcaagtcaggaccatggtggaggcgggcaggcacgacgatgcatgtacacgacgaacgcgggcgcggaggagaggagaggacgatgatggctggctggccgggcgggcgggccaccagaggaggtcatgcgtacgtagagaggtagagcagcggcagcgagctaggggaccaagcaagcagcggcaggcaggtccagagcagcgcaggg

SEQ ID NO: 182 - DNA, 523 bp, Zea Mays
tcttcctgcgccgtcctccgcgccggtagtcacccatacccgatcgtaaaccccgcgtggaggccgccggggacgggaagcaggagccgtcggcgtgccaggcgtcgacgtttcgctgagctggcggaggcgtgcgacgccatcccccacgtgctccaagggaaggacctgatcgcgctggcgcagacgggtccgggaacacgggcgcgttcgtgctgcccatcgtgcagaagctgctaagcaaccgtcaggctgatcagcctttcttcgcttgcgtgctcaggccaaccggtatttaatttcgagtgtccgtggttgctattgctactcagagatctagcgattcagattgcgaggagcagtttcaggcgctcgggtcagctactggtctgccttgctcagtgcttgttggaaatggatcgggtgcaacaagtgctacccattagcaaacgtccacatattgtgcatggaaactagtaacaagaccaaaaagcgaaggagacttgggtgtgctcaacatttc

SEQ ID NO: 183 - DNA, 823 bp, Zea Mays
acgccatcccccacgtgctccaagggaaggacctgatcgcgctggcgcagacgggtccgggaacacgggcgcgttcgtgctgcccatcgtgcagaagctgctaagcaaccgtcaggctgatcagcctttcttcgcttgcgtgctcaggccaaccggtatttaatttcgagtgtccgtggttgctattgctactcagagatctagcgattcagattgcgaggagcagtttcaggcgctcgggtcagctactggtctgccttgctcagtgcttgttggaaatggatcgggtgcaacaagtgctacccattagcaaacgtccacatattgtggcacaacatccctcgggttcagttactctggagtctggaaccactattacactattaccgaggggggctgtatctagactaaaaaggcaaataatagtctcctgtgacttggaaataatcattctgatgggtgtggatgatgttccgctgcctgaaagttgcatgcagaaggatttttcaaacaagagctactattggttattcacaaggctgggaatacttccttggggtgaaactcctgtctatcttttggaccatttgacagagactaaaggtttttagtctcaagaaaatcaagtatatgatgcattgggtaatttgatgaatgcgtcagaaaactctgaagaatagatccaagctaatgtacagggtgtgcacctgcagccttgagtagcaggactgaagccggaggggtcttcaagacgaagtcatatactcatatgcacaagcacaagcgttggttcgagaaaaaaattttggacaggagaagcaag

SEQ ID NO: 184 - DNA, 769 bp, Zea Mays
gcgcagacgggtccgggaacacgggcgcgttcgtgctgcccatcgtgcagaagctgctaagcaaccgtcaggctgatcagcctttcttcgcttgcgtgctcaggccaaccggtatttaatttcgagtgtccgtggttgctattgctactcagagatctagcgattcagattgcgaggagcagtttcaggcgctcgggtcagctactggtctgccttgctcagtgcttgttggaaatggatcgggtgcaacaagtgctacccattagcaaacgtccacatattgtggcacaacatccctcgggttcagttactctggagtctggaaccactattacactattaccgaggggggctgtatctagactaaaaaggcaaataatagtctcctgtgacttggaaataatcattctgatgggtgtggatgatgttccgctgcctgaaagttgcatgcagaaggatttttcaaacaagagctactattggttattcacaaggctgggagtaagtttgatactattgttccacaatggctatcgcaaaatggcttgtaatcctcttagtttcctcctgttgctgtactttctctaactttatgttttatcaataaaaacacagtaggggacattcccctcccatatcactccaaaaaaaaacttccttcaaaacttaggttggaactcctggccatcttttggaccatttgatagagactaaatgttttagtcttaagaaaatcaagtatttggtatgtattcattttttatctaag

SEQ ID NO: 185 - DNA, 5007 bp, Zea Mays
caaaaaaaaagtaatatatgggctgtactgacaaaaagtattgaaacaagcccacatgggcagagagattatttggagggggagctgatgaggggtacagacagacagtttctgatgcagtcggcaagttccattctagtaacaaacaaactagtaccgaaaagctaaaatgaaagagaagcatccaaaatactcctaggaggtcggggtcctgaagagctcgaggcagtgctcctggtccaggttcctgctccagaacttggcgtagtactcggcgtaggtgtagtccctgtagacggcgggcgtgccgtcggtgaggagcctggcggcggggccgatgcgcgcgtcgttgcaggggcagaggaacgacgccaccgacatcctcggcctgtcggcgttgacgacggcgcggtgccacacgctcctgtacctgccgttgctcagcgcctgtgcaggtgcagtgcagtagtggaggccaggggcagagaggaggtgagagggtgggaataatgggagagcgagacaagagcacgtcacctgcagctggtccccgatgttgacgacgagcgcgccgggccgcgggttcacggcgatccagcggccgtccttgagcacctgcaggccggccacctgctggtccatgagcaggatggtgagcgcgttggggtccgtgtgcgcgggcagcccgtacgtgagctccggcgccgggcacctcgggtagaagttcaccgccatgtgctgctcctgctcgcccagcgcctccttgatgtacgctccgtccaggcccaggccctcggagatggcgacgtacagcctgaaccccagctcccggaccgcactgcagtacgcgctcacggtcctcctgtacgtgcgtgtgacagtgtcagtaccaccacacacacacacaaagctgttactcgtgatgcatgcatgcataaatacatgcgtgttgcatgtgtgtgttaaaattcgctcctttaaacttaagaactctagcacttcaagcgtgatgaatttagccttctgtttagagatctaagattttaaaggaacaagaaccacgcacgcccttgtcctttagtaccaagttagcaagcgtggtgtcgtcgacgtactgtcctcgtcccgtccgcctcgtcgtctgcacgcttgcagtcattttctttcatgtcatcggggacacgagatcacacgtgctattctatcctaggcttttctgcactgcatccgagctgtgtgttgcgctctctctcactctcatcgtcttgtctcttggtggccgccgccccggtttctttaactctagtcggttccacttccacatctggtggtacctagcaatatcgttttgggggctcacttcacctaaatgacattgtcatataaatctaattatatagatggaggctaactagtagtggtacagaacactaataagttaaatccaaaaccttaaactgaaggtataagatctaatttaaacaaagattcaaacttgtgacgtctgatatcatattaagtttcatgcactagccaacttaattcaaaagcttaagcttaagtagttaatacacttatacacttcaacaaaacaggaagacgagtttattaagcctaattaatatatgattaactcatgtaatgctacagtaaatatttaataatcattgcttatttaggcttgataaatttgttcgtcgcctagttttcacctatgtacagactatatttattactcgtaattagtattcaaactttagatgtgatatagactaaacttagtcatcaaaaccaaacactaactctggctctaaggttgtttgtaattgtaggggaaaaaactagcatgtgtagcccggctaacagtcgagtcgcgttgtaaaagaatatgtccatctccagcagcaggtgcatgcaaacacggaataaagagagaaagatcatcggtctatatggaaaatttggaaaacagagagcacccggattttaagtagacacggagacattttagtatccacattcgagctctgttggagagtagctcattttcccgcaagcgggacacgatagggtcctattggacgacacacactaatgtcattttcaatgagagtttcatgaaagattccattttattgcattaattattatgccacataggattttttatgacatggctatatttattataaaatatgtgaaattagtttcattatcatataactatgccaacatatttctaatgtattgcaaagcgcgtgaaaccactgttgagagcaattttgtttcatctccatctatttaatctattcctatgggttatttagcctgtgaaattgtcatgaaaatcttcattaagagagtatatttcattctttatttattcttatttttattaatatggcaacattggaaatagtgtaacgaaactaccacttagaatgatctaaaactctccaacgttccaacgccttatggagcttctccccctcacacctactcatgtacgcggtcacacctcccccctcgatctcttctcggtaagagttagtttgggagtctaaatactggaggtgattggaggagctaacatacactccttattcaaaattgaataagggctagtttagaaactcgaatccccctcgggattgaagaagattggagaggaaattagttcatttctacctcaatcccctccaatcccgaagggaatttaaggttcccaatgtagccctaaggaggggattttagtccctcaaatcctctccggttttgtggctcctaaactagctctaagagaaaattttaacctatggagagggagcttttaatctccccctctccaacaataataattataaaattaattattttgggtttaattagtagataataatatgtattgcggtagtataaatatagtatgatttttttaaaactctaaaaactcatgcattaaagtcaaatagcttctttaaaggttaaaggatgagctcaatgtgaggaatggttggagatgagttgagatagggagaaattagttaaggggaagatatttaaacatgaataaaaagtatgaatgatgggatttgggatggagaatggttggagttagcctaagagtttgtttgggaatataatttttcaagtttgaagacagcactatggtatttaagcataccataatattttaggctaaaagatggttgagtaaaatatagaaactctatattttaaatcatagttttattaataccgtaatatttttgggtctaaaaaactttagtatggaataaagtttttttgttaacacattgctacagcttactctttctccttctctactatactgcaaccacagtattgttgtttcatgacattcgataaaccgttctattaaaaagcaataggccctaagcagcgggcagaaaagccaaagtttgagagagtcctgctcccggacgtgctcttcagaaaacagacaaacaagttggttggtctctctccctctcttctgatcggtaacctcagcagatgcggctatagcattttctctctcctcatatttttcttttactgtagctcaacaacacccttccctcgccccggccggccagctgcgttatatgtgacgcaaggtcgacgacgatgactcacgactcgccatgcatgctgatgtcagttcttggcttctcttttaattgtagaaatttgcttgttttgttgtcacacggatagaatcgtatgactatttcgatacttctagtctatctaggcgacaaaagaaaagagtcaatgggtcatctctctctactcttatgttttatagatgtattggaattaactgtcttcatcgtattttctatgatctggtttgattattctaatttcatgtaaattgaagtgtattaaattagattgtcatagatgttgatttgttgtgaatttaaaccgacctaatagcacttaatttatatagattaacggtgaaacgaacaaggtcttagagtttattcggtttgatgataatccatattgattaggtgagattaagtcggtttaaatttataataagttaaaagccacctcaatacatctcaatcatctctaatctgtataatctcaatcccctctaatctgcatagaataaaaataatcgaataaaatcttagtcttttttaaactctactccataaacagcacgctctaacagtatagatggtctggtgaggacggtctaatagtatagtagcggagcagagtactagtgaggtgtgatgctggggtaggaagcagaggcagatatagatagtggtacctgaaggatggtgggttgtccggccagtcggggacgtactgctccagcgggtggcagtgcaggcggaggtagtcccgccagttgtgcaccgtctccttgcgcacgttgaagctggtggacagccgcatcttcttggccgggtcgtcggagtacagcttggccttctcctccgcggggagccggaagaattcgtacgccaccgacatcatcgccgccgtcagctgctccggcaccccctgtgtgcccacctggaagaagccgtgggtgcggcacgcctcggcgaccctggcgacgacggcttcgcggtcggggtcggcgaggtccaccacggggatctccgcgtcggggacgacctcgcgcaggcgcggccgctgcgtctccggccggacgtagctgtccggcagcctgtcgtggtcagccgtagagatgagatgctctgccatgcccgccgccgccgctctagctctagatcacttccagctcccggcgccgcgtctgctctgtctcactctcacctagctaggccgcgtgctgctccatgctctgcccatatgtccaaatccaaataaatagacacgcagacgcaacatgatcgaccgacgacgagcagggagcagcgaagtagaggcagcggcctggcatccgatcgagctgacccgtggggccgggcgaggcctcgagatccg

SEQ ID NO: 186 - DNA, 1372 bp, Zea Mays
gaagattgaccattaaaatcggccaccgtgctgactctcgaggccgaagcatctcccagtcgacacgacacctcgtgtgttgccaaatatgaacgacagtgtccccaccccacccacttcttctcgagaagaagctcaccaatgcatgccgggcagggaattcatcaggaggagaacatacttgaacagaaggtttcgacatgagcaggccggagcagctagctaatagagggagatgagggggtaagtgttctctgacggacgttctggcgcatgtgcctttgacggacggtggacagtcatgtctttgttgtttgagcggtaatctctgccgggcaatcctatgtacagctccgtctccacgtccatcccgacatccttcggccccgtgtgatcgatggctgccggcgctggaggcggcggaggagccatcagcataggcggcggcggcggcggctgcttcttgcactgcacgcatggcttggatcaggattataccatatgcgtgcatcatgatgttgcagaaatggggagactgtatgcacataagatatcacagcacaggaagtcgagattcatctcctgtttggtggttgacgcaacaaggcacaagttaggatgtattctgatgtttcaatgcccgatgtagcctgtaggacacgaagctgacttaccttctccttcagcttatggagttgctcctccagcagctgagtctgccatgtacgtaagaccagatacgcatatgctcttttcgagtttcacttccaaactgtgcagttcttcaaaggagcattcttccaacctctcacccaaaagttttctgcgtctcaacgaaaatttgttcatgggccggtacataaggacagcagtattttctgtggctaaataatcaccttttgtaagcttcaagtgcttccagtttctttgccaggccctcagcatcagcttttacttgctgcaatataagttcggaccagacaatgggggcactgcggtcatgccaacagaagcagccaatccaatacctatgcaattccttctaggtcacaattcacattaaaagttttacaaaacactttcagcatatttttaagttttgaaatacatattccactgttgcattcttgtttattcaaggtcttatcatatcgacatcacatgttcttttaaatattcagctgtacattagttgtaccctgccaaagcttcacccagtatatatagtgttatgcttcaggttcagttgaagcaagcatcagcagttgggaaatgatggacatccaacaaaagtatatcataccgttggaaatagaggctctttaatgctagttagcttaaggatgatccacagaataaaaaacaaatctat

SEQ ID NO: 187 - DNA, 1288 bp, Zea Mays
cgacacgacacctcgtgtgttgccaaatatgaacgacagtgtccccaccccacccacttcttctcgagaagaagctcaccaatgcatgccgggcagggaattcatcaggaggagaacatacttgaacagaaggtttcgacatgagcaggccggagcagctagctaatagagggagatgagggggtaagtgttctctgacggacgttctggcgcatgtgcctttgacggacggtggacagtcatgtctttgttgtttgagcggtaatctctgccgggcaatcctatgtacagctccgtctccacgtccatcccgacatccttcggccccgtgtgatcgatggctgccggcgctggaggcggcggaggagccatcagcataggcggcggcggcggcggctgcttcttgcactgcacgcatggcttggatcaggattataccatatgcgtgcatcatgatgttgcagaaatggggagactgtatgcacataagatatcacagcacaggaagtcgagattcatctcctgtttggtggttgacgcaacaaggcacaagttaggatgtattctgatgtttcaatgcccgatgtagcctgtaggacacgaagctgacttaccttctccttcagcttatggagttgctcctccagcagctgagtctgccatgctcttttcgagtttcacttccaaactgtgcagttcttcaaaggagcattcttccaacctctcacccaaaagttttctgcgtctcaacgaaaatttgttcatgggccggtacataaggacagcagtattttctgtggctaaataatcaccttttgtaagcttcaagtgcttccagtttctttgccaggccctcagcatcagcttttacttgctgcaatataagttcggaccagacaatgggggcactgcggtcatgccaacagaagcagccaatccaatacctatgcaattccttctaggtcacaattcacattaaaagttttacaaaacactttcagcatatttttaagttttgaaatacatattccactgttgcattcttgtttattcaaggtcttatcatatcgacatcacatgttcttttaaatattcagctgtacattagttgtaccctgccaaagcttcacccagtatatatagtgttatgcttcaggttcagttgaagcaagcatcagcagttgggaaatgatggacatccaacaaaagtatatcataccgttggaaatagaggctctttaatgctagttagcttaaggatgatccacagaataaaaaacaaatctat

SEQ ID NO: 188 - DNA, 722 bp, Zea Mays
acttcttctcgagaagaagctcaccaatgcatgccgggcagggaattcatcaggaggagaacatacttgaacagaaggtttcgacatgagcaggccggagcagctagctaatagagggagatgagggggtaagtgttctctgacggacgttctggcgcatgtgcctttgacggacggtggacagtcatgtctttgttgtttgagcggtaatctctgccgggcaatcctatgtacagctccgtctccacgtccatcccgacatccttcggccccgtgtgatcgatggctgccggcgctggaggcggcggaggagccatcagcataggcggcggcggcggcggctgcttcttgcactgcacgcatggcttggatcaggattataccatatgcgtgcatcatgatgttgcagaaatggggagactgtatgcacataagatatcacagcacaggaagtcgagattcatctcctgtttggtggttgacgcaacaaggcacaagttaggatgtattctgatgtttcaatgcccgatgtagcctgtaggacacgaagctgacttaccttctccttcagcttatggagttgctcctccagcagctgagtctttcttcccctgatgcaatgaaggctcttttcgagtttcacttccaaactgtgcagttcttcaaaggagcattcttccaacctctcacccaaaagttttctgcgtctcaacgaaaatttg

SEQ ID NO: 189 - DNA, 2518 bp, Zea Mays
attaggatcaccattataaaaaccctataaattctccaccaacgaaacaacaaaaaaatggaaggggggcgatacaccataaggcaaacacaaaacaaaagcaacaaagcagagcaaagattggattgttccgggaataaacaagaaaggcaagggtggatggagtaaaaaaagcaactagtagaaataactgcccaatgccgagttccgaggagagcgagaggtggaggaggagagagagaaaagcgcgggggcgcgaaggcaagctgtagttacacacatcacccaccccgtcgcactcgcaccgcaatctccccgatccccaattcccccattatccgccgagccccgccccgccccgccaatggaccaccacctcacgccgacgccgccgccgccgccgccgccgatggggaactccgcggcgggggcgtcctcgaagccgccgacgccggcgtccacgcccaactcgcgcctcgcctcggcgccgtcctcccgccacgccgccacgccgccgcacgcgtcggcggcggcgtccgccccggcgccggcctcgcgcaccgtctacagcgaccgcttcatccccagccgcaccggatccaacctcgcgctcttcgacctcgccccctcgccctcctccgccgcctcgtcctcgcactcgcacgacgccggccccgcggcctcgtccggatctgcgcagcccgccgcgtcgccctactgcacgctcctccgcgccgcgctcttcggccccgacacgcccgaccgcgtcgcgtcctcggccgccgcgtgctcctcgtcgtcgtcctccttctccccggggccctcgcctgtcggcacccccgccaccgggaacatcttcagattcaagacggaggtgcgccggaacgccaagagggcgcttttttcgggagaccaagaggaggacgcgctgttccccggcattttcaccaccaggggcgcgggaccaaggaaggtgccaaggtcgccgtacaaggtgctggatgcgcccgctttgcaggacgacttctacctcaacctcgtcgattggtcttcacataacgtccttgctgtcgggttgggcaattgcgtttacttgtggaatgcatgcagcagcaaggtcaccaagctttgtgatttgggggtggatgacaatgtttgctctgtggggtgggcgcagcgcggcactcacctagctgtaggcacaaagcaaggaaaagttcagatctgggatgcaactcgttgtaaaagaataagaactatggaaagccatcgcatgcgtgtaggtgctcttgcatggagttcttctttgctttcttctggaagccgtgacaagagcatcctccaccatgatatccgtgctcaagaagattatgttagcaagcttaccgggcataaatctgaggtttgtggactcaagtggtcttatgacaatcgtcagcttgcatccggaggcaatgacaatggactttttgtttggaatccacattcagtacaaccagtactgaagtatactgagcacacagcagctgtcaaagctattgcctggtcacctcatctccacggcctgcttgcatctggtggaggaactgcagatagatgcatacgattctggaatacgaccacaaatacacacttgagttgtgtggacactggcagccaggtctgcaatcttgcgtggtcaaagaatgtgaatgagcttgttagcacccacgggtactcccagaaccagataattgtttggagatatccaacaatgtcgaagcttgccactttgacagggcacacgtaccgagtattgtatttagctatttcccctgacggccagaccatagttactggtgccggtgacgaaacactccgtttttggaacgtgttcccctctccaaagtcccagagctctgatagtctaagttgcatcgggggtacatcgtttgttagaagctacatccggtgacccgcagaaacgtagtttgaactgagctcataaggtaattgcagcatatgtggatgatcatcagcatcatcccattcatgacaaccatgccatcaggtcgtcaaccatccaaggtagctgaatttttgagatgccacggcgcagcccgatggaagaagtggcttgcgaatccgggcatggctcttttggccgagagtgtacatatttatcagagcaacaacggcgcgcatgttacaggagtgcagcatagcggaggcctcaagcatcggcattgttcccagctgataagaatacgccccctttttttgttgttatttttttgtccattttgcgggtcaaacgtcgacctggtatgtgtgtctagtgcgctagcagttaacctattcgaaacgcttactgacctgtgacgcccatttctcattcatgctggcacggtgtaagatgagagcacttgttccatggtttcgttcctggtgtcttgaaaaggagggctggttctgccctcgactggcttgtttcgaagtaatagacagtcgagaaacgtgtgttcgttgttaaaaaaaa

SEQ ID NO: 190 - DNA, 2629 bp, Zea Mays
atccttctaagttctaatgcttccttaagtacgtagcttgcctgccagcatccagccacagctgaagcctgaagggcagtcgatgtaaaaggcaagaataatgcaggtccaccgagacgacggcggcggcgcggtgacgacgatgcaacagcagcagacgcccgttcccggcgccaaccgcaaggttggtagaggcaaccgaaggcgcccccctcctcctgcttttttttttaaaaaaaaaaacccgccaccacccaaagtatttcttgaaaccaactcctaattattccatcgaattaccaaatgtatgtgcaactaacctcctacagtatatcctaaagtttgtaccgcacttctacaccatactccccgcctactcatagtaggaaacgcattggtgcaactcttggtagctagctgtaggtactaggcaccttgctcttgctttagttgttcctcttcctctttgggcatgcttggattccaaagcttcaccaccctccctcacctccacttcctctctctctctctctctctctctctctctctctctctctctctctctcattcatctcgcctttctttcttaccggccggccggccggcggctgggctctgcaattcacccaacttttctctgttttcactacgatctcagggctccggcgaccgtgcggcctcatcatcagctacaacctaccagctgctaccgtctcggtcgccgcctagctctccgcagcggctagctcatccggccggccgccccttttctcttgccgttgcgcagttgcgcccccttccccgcggcttaggaaccatcgaaaagacgcctcaccatctcctttgtgtccttgctaactaactcccccattaaatcctctccttcctcccgcgctggccgtgtggtctctcagccctccgagttgatccataagctagcgccatcatcgatcgccatatatacatagccaaggacgcacgcgcgcgcgcgcgcaaaccagcgggagcgaacaccaaccggccggaccaattaagaagcaggctagcaagtcgaagaggaaagaagagaaggggggtaccgggggtaccggccggtcatcgatcgagcttggcgaagcagcgaccgccgggtcgtcgtcgtcggtacatgcatgcagcgcggcggtgatcaagcaggagcgagcctgggcatggagatgggggtggggtacgccggcggcggcggcggcggcgagtgctcgtcgtcctcggcggctgccgcggccgcggccgcggcggagggggaggagcggcagctgctcaagggggagatcgcggtgcacccgctgtgcgagcagctagtggcggcgcacgtggggtgcctgcgcgtggccacgcccatcgaccacctccccctcatcgacgcccagctcgcgcagtccagcggcctcctccactcctacgccgcccaccaccgccccttcctctccccgcacgacaagcacgacctcgactcgttcctcgtacgacctcctgctaccacgattgctagctatgccgccacgcgccacacatatgcatgcatgagccgctgaccggtttcttcttcttcatctgcatgcatgcatggcggtggtgcaggcgcagtacctgatgctgctgtgctcgttccgggagcagctgcagcagcacgtccgggtgcacgccgtggaggccgtcatggcgtgccgcgagatcgagcagtccctgcaggacctaaccggggcgacacttgaggaagggacgggggcgaccatgtcagaggacgaggacgaggcgccgatgctggaggtgggcctggatatgggctccgacgggcacgacatgatgggcttcggcccgctcatgcccaccgactcggagcgctcgctcatggagagggtcaggcaggagctcaagatggagctcaagcaggttaaaaaagagactagggagaagaagacgtgcaattaatgcatgctgtaggttgatgtgaagtctttgtcggaatttggtttgcagggtttcaagtcgagaatagaggatgtgcgggaggagatcctgaggaaaaggagggccgggaagctgcctggggacaccaccagcatcctcaagcaatggtggcaggagcactccaagtggccataccccacggaagacgataaggctaagctcgtcgaagagaccggcctgcagctgaagcaaatcaacaactggttcatcaaccagaggaagaggaactggcacaacaactcccagacgtcaaccctcaaatcgaagcgtaaaaggtgatggaggagagctagctgcaccgtatataccgtgtatgtaacgcacacctgctgacacacatgtacacatgtataccataccaacacgctaatcaaacggagctctgcatggcgactgtactcacggaaataaagaggaccatatcgaccggttcaactgtatatctagccattagtctgaccactggcatatttgtttgctgcggctgatactttgagctgatgatgtgtggctcacagcatactttattcttgttcttattgtgttgacatagtttgtcccccataatcttgaggattaaaaaatgcatcccctgtgcgcgcgcacacacacatctgac

SEQ ID NO: 191 - DNA, 823 bp, Zea Mays
gtaacaatataagcacacaaaggggcgacacttgaggaagggacgggggcgaccatgtcagaggacgaggacgaggcgccgatgctggaggtgggcctggatatgggctccgacgggcacgacatgatgggcttcggcccgctcatgcccaccgactcggagcgctcgctcatggagagggtcaggcaggagctcaagatggagctcaagcagggtttcaagtcgagaatagaggatgtgcgggaggagatcctgaggaaaaggagggccgggaagctgcctggggacaccaccagcatcctcaagcaatggtggcaggagcactccaagtggccataccccacggaagacgataaggctaagctcgtcgaagagaccggcctgcagctgaagcaaatcaacaactggttcatcaaccagaggaagaggaactggcacaacaactcccagacgtcaaccctcaaatcgaagcgtaaaaggtgatggaggagagctagctgcaccgtatataccgtgtatgtaacgcacacctgctgacacacatgtacacatgtataccataccaacacgctaatcaaacggagctctgcatggcgactgtactcacggaaataaagaggaccatatcgaccggttcaactgtatatctagccattagtctgaccactggcatatttgtttgctgcggctgatactttgagctgatgatgtgtggctcacagcatactttattcttgttcttattgtgttgacatagtttgtcccccataatcttgaggattaaaaaatgcatcccctgtgcgcgcgcacacacacatctgac

SEQ ID NO: 192 - DNA, 720 bp, Zea Mays
ctgctgctggacatcgagtgttcatgtaggattcgagaggggaagacaaggtaagactgaagggaggccagacgcccaaggcactgaagcaatgcatgatatgacacccatctgctcctagtatcgccgtccccgctgggtggaggtggaattggaaggaaggaacctgaagatgcacggcgcggcggtcttcgtggtgcagaccggcagtgcagtgcagtgcagggggctcatccgcgcccaagttttggctcgagaagctgtgcataccgatcgccgcgtctgtccgtccactccctctgcgtctgtgaatgtgtgccagagtgaacgtgtagtgtcatcctgtacatacgtatggaacacaacattcgtgcttcggcctcctgcagccaatgcgatccaggatgagccgtgtgccaggtgcttgcgttgcctcgtcggcccggaattgtgaatatgcctgtcacgtgcgggcggaggtggcaaatgggcatctctaaatttggtgtttatcctgctttcaagtggatttggaagccttttcctcttagctaaaacataagatcgctcttttatcttctgttaagaatttaagatcgctcttttgtgattggctctccaacagcattgcaaacaagctcaaatgccttaaactgctatgtgcgcggataacttaaactgcctttgaatgtgtgccaactaagcagagcgtgttcaaat

SEQ ID NO: 193 - DNA, 1500 bp, Zea Mays
ctctctctttacttccctcactgtagtgtaaacaacactgcacttcttcagtttattgccttcaaactcagcccttgttcgtttctatcggattggtgggtcggaacgaatcctaaccggattgcttctctaatttatataaactttgattagttggaacgattccggttacaatccgacataaacgaacaaggcctcagggagaaaaaattcagtcagaaacagacacgaacacgcaccatgggccgcgctttgcaattcgtgcttttaggtgaaggcaggattctgctgaataatctcggaaattgctgggggtggatcgaaccaccagctagctttcggctaaaaagacgttgtaaacgcgctggacaatccgagttccgccatggaatctgcttttgccggccatgccattgccaggcagtcccagctgtcagcacaacaccgctcgtgctgtttctatccagaacggcctggacccatctgcctgtagacctgagctcacattcttcacacagcgaaacagaccacggtatcctcttccatgaacgggcggagtcaattttcaactacccaccttagacacccgcagacgaatctcacgaagaaacagcccgctcgcctgacttgaacacgccttccacgccttggacgtcacagtagcaggtagcagcttgccgatcaggacaggtcctctaggagcaagatccccaggccaggccaccctcttctagaaatatctacaaaatagcagcgaccccatgaacaggggcccccctcaattgacagcacaactgtgaatgcatacatcttggcctatcactgtcgaggtaagactgaagggaggccagacgcccaaggcactgaagcaatgcatgatatgacacccatctgctcctagtatcgccgtccccgctgggtggaggtggaattggaaggaaggaacctgaagatgcacggcgcggcggtcttcgtggtgcagaccggcagtgcagtgcagtgcagggggctcatccgcgcccaagttttggctcgagaagctgtgcataccgatcgccgcgtctgtccgtccactccctctgcgtctgtgaatgtgtgccagagtgaacgtgtagtgtcatcctgtacatacgtatggaacacaacattcgtgcttcggcctcctgcagccaatgcgatccaggatgagccgtgtgccaggtgcttgcgttgcctcgtcggcccggaattgtgaatatgcctgtcacgtgcgggcggaggtggcaaatgggcatctctaaatttggtgtttatcctgctttcaagtggatttggaagccttttcctcttagctaaaacataagatcgctcttttatcttctgttaagaatttaagatcgctcttttgtgattggctctccaacagcattgcaaacaagctcaaatgccttaaactgctatgtgcgcggataacttaaactgcctttgaatgtgtgccaactaagcagagcgtgttcaaat

SEQ ID NO: 194 - DNA, 2081 bp, Zea Mays
gttcagcacgcagatgtttggacgggatatatataggcgcgatgcagcagagtagactgggcatgggccactactgctagtgctagtgctagtagcagcggcacagcgcggagaggcagagaagtagccaaagccaagtaggaggaggaggaggaggcagggcgcggggcgagagcttgacgcggcaaccaccgctgcactgcactgcacccctcgctcctccgagctcagcagcagcagcagcagcagctcgctcgcggcatgtcgccatccatgtcaggaaagatttatctggtcggccgatcgagctcctctcctccgaagcactgaagctccagcggctgccctgcctgacagccactccgcacgacaaaattaaagcgcgcagggcgctcggggagaaggacgtggcggtgcccgggatgacgcgcggggacacgcccaggctcagggtgctcgaccagtgcatccgccagcacaaggcgctcacccaggccgccggcatgatggagagccacccgtggcgcccgcagcgcggactccccgagcgcgccgtcaccatcctccgggcgtggctcttcgagcacttcctgcacccgtatccaagcgacgtcgacaagcatatcctggctcgccagacgggcctctcacggagccaggtgtccaactggttcatcaatgcgcgggtcaggctctggaagccaatggtggaggagatgtacgtggaggagatgaaggccgagggccaggacggcgggggccagcagcaggtaggcgtcgccgtcgccaacaaccctaaccctagcagcgccggccacgcctccgaggcggctgaggacgatgggcgcggggacagcggcggcggcgccgtcgtcgaccggaagccgacgcgggcgcagctcctgcacgacgccggctcgctcgcctcggtcgtcaacatcggcggcggatcgcgcgcgggattcggcatcatggaccacctcgacttcgacgcctacggcggccaccatgccggcgccgtgtccctcacgctgggcctgcagcagcacgactcccacgccgacggcggcgccggcggcgtcaacatcgcgttcggcgcgccgccgcccgcgcaccaccacgggtacctgttcgctccgacggcggcggcggcaggccatcagatgggcggcggcgtgcacccgggactacaccaccacgtccagttcagcggcgccggcgccggcatcgacggcgaggcggcgcacgggcaggagcactaccggggcctgcagggcggcggcgggttccacctcctgcgtgacctggccgggtgatcgatctgctccatccacggcccgtgcatccgcggtcggccgcgcgcgagctctagctgcgactccgagtgagctgagcgatggggacgtcgtgccggcgcctagctagctaccgggtgtccgcgccggattcatggcacgcactcgatcgcgcgtgcgctcatccggccacagcggcgctgtgtacgtacgcaccggatttgtttggcttgttgcttgcctggctcgtgccggtctccatcggtctcgatcgccgccggcggcggcttggccgggcccgggtctagctggctagctagctgccctagttatacataatatatgtatttgtagcgtgtacagatcgggtcgcgatcgagcagtttggacgcgcgcaggtgcagctagtactagtagtagctagcccgccggaactgcgtagttgatcaaacacgcattgcatgcaggttaattgcattgtttgtcaatttcttgaaggattcgacgacgtacggcacaatttataccaggcattattgacgattttcctggcagaatattcatcagtccatatgcccatgcatgtttgcgaattgtctatatgtatgtttgtgattggctggtgtgtaagcctctggttagtttgcattatctaaacttttcgtaaacaaaaaaaggtgagagcgtcagctaatgttttttttcataaattgagtggctgaacaatttgaaatgagctataagagtcaggccagtttggatcaactaaagtaagttggtgtccac

SEQ ID NO: 195 - DNA, 3002 bp, Zea Mays
gggatatatataggcgcgatgcagcagagtagactgggcatgggccactactgctagtgctagtgctagtagcagcggcacagcgcggagaggcagagaagtagccaaagccaagtaggaggaggaggaggaggcagggcgcggggcgagagcttgacgcggcaaccaccgctgcactgcactgcacccctcgctcctccgagctcagcagcagcagcagcagcagctcgctcgcggcatgtcgccatccatgtcaggaaagatttatctggtcggccgatcgagctcctctcctccgaagcactgaagctccagcggctgccctgcctgacagccactccgcacgacaaaattaaaaagcgcgggcgatcaagatggcgcacgaccccagcctgggcttcgcggactacttctcggcggcggcggcggcgggcgccacggcgatggacgacgacgtcggggcgccggagctctatggcctgcatgccgacgacatggagttcctcggcatgcgtggcctggccgccatgccccccgccgcggcacaccaccagcaccaccaccatcacggccacagcaaggccggtgcgctcctcgacgacgacgacgcgggggtggggccagacgtcagcggctccgcggacgacgccaccatgcgcttcctgagcgagcagcagcagcagcagcaccaggcgccgctgtcgctgtcgctgtgccggccggacgtggcgacgacgttgcacgagcagcagcacctcgccggcggtggctcctcgtcccggtaccatcaggagcagcagccggcggcgtgggtgcagcagcagcacgactactcgccgtcgccgcagcagcacgcgtggcacctgcgcagctccaggttcctcgtcccggcgcagcaggtcctgcaggagttctgcagcctccccgtggacagcagcagcgctgccgcctccagcaagcgcgccaaggccgcaaataagccggcctcgcagcagcagcagcagcaagaagacggcggcggcgccgaggggtcgtcgtcgtcggcctcctgggcgccgtcgccgcagatccaggccatggacgcgctggagctgcagcggctcaaggacaagctctacatcatgctggaagaggtggaccggagataccggcggtactgcgagcagatgcgggcgctggcgggcgggttcgaggcggtggccggggagcgcgcggcggcggcgtacacggcgctggcgtcgcgcaccatctcgcggcacttccggagcctccgggacggcgtggtggcgcagctgcaggcggcgcgcagggcgctcggggagaaggacgtggcggtgcccgggatgacgcgcggggacacgcccaggctcagggtgctcgaccagtgcatccgccagcacaaggcgctcacccaggccgccggcatgatggagagccacccgtggcgcccgcagcgcggactccccgagcgcgccgtcaccatcctccgggcgtggctcttcgagcacttcctgcacccgtatccaagcgacgtcgacaagcatatcctggctcgccagacgggcctctcacggagccaggtgtccaactggttcatcaatgcgcgggtcaggctctggaagccaatggtggaggagatgtacgtggaggagatgaaggccgagggccaggacggcgggggccagcagcaggtaggcgtcgccgtcgccaacaaccctaaccctagcagcgccggccacgcctccgaggcggctgaggacgatgggcgcggggacagcggcggcggcgccgtcgtcgaccggaagccgacgcgggcgcagctcctgcacgacgccggctcgctcgcctcggtcgtcaacatcggcggcggatcgcgcgcgggattcggcatcatggaccacctcgacttcgacgcctacggcggccaccatgccggcgccgtgtccctcacgctgggcctgcagcagcacgactcccacgccgacggcggcgccggcggcgtcaacatcgcgttcggcgcgccgccgcccgcgcaccaccacgggtacctgttcgctccgacggcggcggcggcaggccatcagatgggcggcggcgtgcacccgggactacaccaccacgtccagttcagcggcgccggcgccggcatcgacggcgaggcggcgcacgggcaggagcactaccggggcctgcagggcggcggcgggttccacctcctgcgtgacctggccgggtgatcgatctgctccatccacggcccgtgcatccgcggtcggccgcgcgcgagctctagctgcgactccgagtgagctgagcgatggggacgtcgtgccggcgcctagctagctaccgggtgtccgcgccggattcatggcacgcactcgatcgcgcgtgcgctcatccggccacagcggcgctgtgtacgtacgcaccggatttgtttggcttgttgcttgcctggctcgtgccggtctccatcggtctcgatcgccgccggcggcggcttggccgggcccgggtctagctggctagctagctgccctagttatacataatatatgtatttgtagcgtgtacagatcgggtcgcgatcgagcagtttggacgcgcgcaggtgcagctagtactagtagtagctagcccgccggaactgcgtagttgatcaaacacgcattgcatgcaggttaattgcattgtttgtcaatttcttgaaggattcgacgacgtacggcacaatttataccaggcattattgacgattttcctggcagaatattcatcagtccatatgcccatgcatgtttgcgaattgtctatatgtatgtttgtgattggctggtgtgtaagcctctggttagtttgcattatctaaacttttcgtaaacaaaaaaaggtgagagcgtcagctaatgttttttttcataaattgagtggctgaacaatttgaaatgagctataagagtcaggccagtttggatcaactaaagtaagttggtgtccac

SEQ ID NO: 196 - DNA, 1839 bp, Zea Mays
gcagagtagactgggcatgggccactactgctagtgctagtgctagtagcagcggcacagcgcggagaggcagagaagtagccaaagccaagtaggaggaggaggaggaggcagggcgcggggcgagagcttgacgcggcaaccaccgctgcactgcactgcacccctcgctcctccgagctcagcagcagcagcagcagcagctcgctcgcggcatgtcgccatgtggaccggagataccggcggtactgcgagcagatgcgggcgctggcgggcgggttcgaggcggtggccggggagcgcgcggcggcggcgtacacggcgctggcgtcgcgcaccatctcgcggcacttccggagcctccgggacggcgtggtggcgcagctgcaggcggcgcgcagggcgctcggggagaaggacgtggcggtgcccgggatgacgcgcggggacacgcccaggctcagggtgctcgaccagtgcatccgccagcacaaggcgctcacccaggccgccggcatgatggagagccacccgtggcgcccgcagcgcggactccccgagcgcgccgtcaccatcctccgggcgtggctcttcgagcacttcctgcacccgtatccaagcgacgtcgacaagcatatcctggctcgccagacgggcctctcacggagccaggtgtccaactggttcatcaatgcgcgggtcaggctctggaagccaatggtggaggagatgtacgtggaggagatgaaggccgagggccaggacggcgggggccagcagcaggtaggcgtcgccgtcgccaacaaccctaaccctagcagcgccggccacgcctccgaggcggctgaggacgatgggcgcggggacagcggcggcggcgccgtcgtcgaccggaagccgacgcgggcgcagctcctgcacgacgccggctcgctcgcctcggtcgtcaacatcggcggcggatcgcgcgcgggattcggcatcatggaccacctcgacttcgacgcctacggcggccaccatgccggcgccggcggcggcgggttccacctcctgcgtgacctggccgggtgatcgatctgctccatccacggcccgtgcatccgcggtcggccgcgcgcgagctctagctgcgactccgagtgagctgagcgatggggacgtcgtgccggcgcctagctagctaccgggtgtccgcgccggattcatggcacgcactcgatcgcgcgtgcgctcatccggccacagcggcgctgtgtacgtacgcaccggatttgtttggcttgttgcttgcctggctcgtgccggtctccatcggtctcgatcgccgccggcggcggcttggccgggcccgggtctagctggctagctagctgccctagttatacataatatatgtatttgtagcgtgtacagatcgggtcgcgatcgagcagtttggacgcgcgcaggtgcagctagtactagtagtagctagcccgccggaactgcgtagttgatcaaacacgcattgcatgcaggttaattgcattgtttgtcaatttcttgaaggattcgacgacgtacggcacaatttataccaggcattattgacgattttcctggcagaatattcatcagtccatatgcccatgcatgtttgcgaattgtctatatgtatgtttgtgattggctggtgtgtaagcctctggttagtttgcattatctaaacttttcgtaaacaaaaaaaggtgagagcgtcagctaatgttttttttcataaattgagtggctgaacaatttgaaatgagctataagagtcaggccagtttggatcaactaaagtaagttggtgtccac

SEQ ID NO: 197 - DNA, 3488 bp, Zea Mays
gggcatgggccactactgctagtgctagtgctagtagcagcggcacagcgcggagaggcagagaagtagccaaagccaagtaggaggaggaggaggaggcagggcgcggggcgagagcttgacgcggcaaccaccgctgcactgcactgcacccctcgctcctccgagctcagcagcagcagcagcagcagctcgctcgcggcatgtcgccatgtatgcttttgctggcgcccgtcgcccccacccttttcccgttccccttccccgctcgcggatgagatctttgggtttggttggtttctttaagacccgagcgtccaaatcacccctgtgctactgctgtgcctgccttttcttttgatcccaatttcctccttttccacccctgccctcccccaacacaaagcgagattcttgcttgcttggcagaggtaaagagggggggcctatggctacctagctatctatctgctagcggctcgtgctactattcttgctctcccccgatgattgctacttgcaacgcatcttatttgacttaattagcttgcttgcttgcttatgttttctcctttttctctctcttttctcatcaggactgtatatgttttctctggtatatgtgtgtgtatacatctctctctctctctctctcttttgctgtgtgtctgtgttcctcgttgatcgatgatcatgcgtgtcgtctgggctggtcgacgatgagctatagctggccatgtcaggaaagatttatctggtcggccgatcgagctcctctcctccgaagcactgaagctccagcggctgccctgcctgacagccactccgcacgacaaaattaaaaagcgcgggcgatcaagatggcgcacgaccccagcctgggcttcgcggactacttctcggcggcggcggcggcgggcgccacggcgatggacgacgacgtcggggcgccggagctctatggcctgcatgccgacgacatggagttcctcggcatgcgtggcctggccgccatgccccccgccgcggcacaccaccagcaccaccaccatcacggccacagcaaggccggtgcgctcctcgacgacgacgacgcgggggtggggccagacgtcagcggctccgcggacgacgccaccatgcgcttcctgagcgagcagcagcagcagcagcaccaggcgccgctgtcgctgtcgctgtgccggccggacgtggcgacgacgttgcacgagcagcagcacctcgccggcggtggctcctcgtcccggtaccatcaggagcagcagccggcggcgtgggtgcagcagcagcacgactactcgccgtcgccgcagcagcacgcgtggcacctgcgcagctccaggttcctcgtcccggcgcagcaggtcctgcaggagttctgcagcctccccgtggacagcagcagcgctgccgcctccagcaagcgcgccaaggccgcaaataagccggcctcgcagcagcagcagcagcaagaagacggcggcggcgccgaggggtcgtcgtcgtcggcctcctgggcgccgtcgccgcagatccaggccatggacgcgctggagctgcagcggctcaaggacaagctctacatcatgctggaagaggtggaccggagataccggcggtactgcgagcagatgcgggcgctggcgggcgggttcgaggcggtggccggggagcgcgcggcggcggcgtacacggcgctggcgtcgcgcaccatctcgcggcacttccggagcctccgggacggcgtggtggcgcagctgcaggcggcgcgcagggcgctcggggagaaggacgtggcggtgcccgggatgacgcgcggggacacgcccaggctcagggtgctcgaccagtgcatccgccagcacaaggcgctcacccaggccgccggcatgatggagagccacccgtggcgcccgcagcgcggactccccgagcgcgccgtcaccatcctccgggcgtggctcttcgagcacttcctgcacccgtatccaagcgacgtcgacaagcatatcctggctcgccagacgggcctctcacggagccaggtgtccaactggttcatcaatgcgcgggtcaggctctggaagccaatggtggaggagatgtacgtggaggagatgaaggccgagggccaggacggcgggggccagcagcaggtaggcgtcgccgtcgccaacaaccctaaccctagcagcgccggccacgcctccgaggcggctgaggacgatgggcgcggggacagcggcggcggcgccgtcgtcgaccggaagccgacgcgggcgcagctcctgcacgacgccggctcgctcgcctcggtcgtcaacatcggcggcggatcgcgcgcgggattcggcatcatggaccacctcgacttcgacgcctacggcggccaccatgccggcgccgtgtccctcacgctgggcctgcagcagcacgactcccacgccgacggcggcgccggcggcgtcaacatcgcgttcggcgcgccgccgcccgcgcaccaccacgggtacctgttcgctccgacggcggcggcggcaggccatcagatgggcggcggcgtgcacccgggactacaccaccacgtccagttcagcggcgccggcgccggcatcgacggcgaggcggcgcacgggcaggagcactaccggggcctgcagggcggcggcgggttccacctcctgcgtgacctggccgggtgatcgatctgctccatccacggcccgtgcatccgcggtcggccgcgcgcgagctctagctgcgactccgagtgagctgagcgatggggacgtcgtgccggcgcctagctagctaccgggtgtccgcgccggattcatggcacgcactcgatcgcgcgtgcgctcatccggccacagcggcgctgtgtacgtacgcaccggatttgtttggcttgttgcttgcctggctcgtgccggtctccatcggtctcgatcgccgccggcggcggcttggccgggcccgggtctagctggctagctagctgccctagttatacataatatatgtatttgtagcgtgtacagatcgggtcgcgatcgagcagtttggacgcgcgcaggtgcagctagtactagtagtagctagcccgccggaactgcgtagttgatcaaacacgcattgcatgcaggttaattgcattgtttgtcaatttcttgaaggattcgacgacgtacggcacaatttataccaggcattattgacgattttcctggcagaatattcatcagtccatatgcccatgcatgtttgcgaattgtctatatgtatgtttgtgattggctggtgtgtaagcctctggttagtttgcattatctaaacttttcgtaaacaaaaaaaggtgagagcgtcagctaatgttttttttcataaattgagtggctgaacaatttgaaatgagctataagagtcaggccagtttggatcaactaaagtaagttggtgtccac

SEQ ID NO: 198 - DNA, 2544 bp, Zea Mays
gggcatgggccactactgctagtgctagtgctagtagcagcggcacagcgcggagaggcagagaagtagccaaagccaagtaggaggaggaggaggaggcagggcgcggggcgagagcttgacgcggcaaccaccgctgcactgcactgcacccctcgctcctccgagctcagcagcagcagcagcagcagctcgctcgcggcatgtcgccatgtatgcttttgctggcgcccgtcgcccccacccttttcccgttccccttccccgctcgcggatgagatctttgggtttggttggtttctttaagacccgagcgtccaaatcacccctgtgctactgctgtgcctgccttttcttttgatcccaatttcctccttttccacccctgccctcccccaacacaaagcgagattcttgcttgcttggcagaggtaaagagggggggcctatggctacctagctatctatctgctagcggctcgtgctactattcttgctctcccccgatgattgctacttgcaacgcatcttatttgacttaattagcttgcttgcttgcttatgttttctcctttttctctctcttttctcatcaggactgtatatgttttctctggtatatgtgtgtgtatacatctctctctctctctctctcttttgctgtgtgtctgtgttcctcgttgatcgatgatcatgcgtgtcgtctgggctggtcgacgatgagctatagctggccatgtcaggaaagatttatctggtcggccgatcgagctcctctcctccgaagcactgaagctccagcggctgccctgcctgacagccactccgcacgacaaaattaaagcgcgcagggcgctcggggagaaggacgtggcggtgcccgggatgacgcgcggggacacgcccaggctcagggtgctcgaccagtgcatccgccagcacaaggcgctcacccaggccgccggcatgatggagagccacccgtggcgcccgcagcgcggactccccgagcgcgccgtcaccatcctccgggcgtggctcttcgagcacttcctgcacccgtatccaagcgacgtcgacaagcatatcctggctcgccagacgggcctctcacggagccaggtgtccaactggttcatcaatgcgcgggtcaggctctggaagccaatggtggaggagatgtacgtggaggagatgaaggccgagggccaggacggcgggggccagcagcaggtaggcgtcgccgtcgccaacaaccctaaccctagcagcgccggccacgcctccgaggcggctgaggacgatgggcgcggggacagcggcggcggcgccgtcgtcgaccggaagccgacgcgggcgcagctcctgcacgacgccggctcgctcgcctcggtcgtcaacatcggcggcggatcgcgcgcgggattcggcatcatggaccacctcgacttcgacgcctacggcggccaccatgccggcgccgtgtccctcacgctgggcctgcagcagcacgactcccacgccgacggcggcgccggcggcgtcaacatcgcgttcggcgcgccgccgcccgcgcaccaccacgggtacctgttcgctccgacggcggcggcggcaggccatcagatgggcggcggcgtgcacccgggactacaccaccacgtccagttcagcggcgccggcgccggcatcgacggcgaggcggcgcacgggcaggagcactaccggggcctgcagggcggcggcgggttccacctcctgcgtgacctggccgggtgatcgatctgctccatccacggcccgtgcatccgcggtcggccgcgcgcgagctctagctgcgactccgagtgagctgagcgatggggacgtcgtgccggcgcctagctagctaccgggtgtccgcgccggattcatggcacgcactcgatcgcgcgtgcgctcatccggccacagcggcgctgtgtacgtacgcaccggatttgtttggcttgttgcttgcctggctcgtgccggtctccatcggtctcgatcgccgccggcggcggcttggccgggcccgggtctagctggctagctagctgccctagttatacataatatatgtatttgtagcgtgtacagatcgggtcgcgatcgagcagtttggacgcgcgcaggtgcagctagtactagtagtagctagcccgccggaactgcgtagttgatcaaacacgcattgcatgcaggttaattgcattgtttgtcaatttcttgaaggattcgacgacgtacggcacaatttataccaggcattattgacgattttcctggcagaatattcatcagtccatatgcccatgcatgtttgcgaattgtctatatgtatgtttgtgattggctggtgtgtaagcctctggttagtttgcattatctaaacttttcgtaaacaaaaaaaggtgagagcgtcagctaatgttttttttcataaattgagtggctgaacaatttgaaatgagctataagagtcaggccagtttggatcaactaaagtaagttggtgtccac

SEQ ID NO: 199 - DNA, 1665 bp, Zea Mays
aaaagtaatacatgcatgtaacatccatgttactatatactagtacaaaataaactacaatacacacacacatactcctagctagctatatatatattgccatgttgtttgcatcgaccggccgggccgggcattcgttctgagaacaagaaagcttacattatgctaagcaattgcggaggattctttggaaccggccgcgtcgcgtagatgacacatcaattcattggttgccatgtcaaggtgtccaactggttcatcaatgcgcgggtcaggctctggaagccaatggtggaggagatgtacgtggaggagatgaaggccgagggccaggacggcgggggccagcagcaggtaggcgtcgccgtcgccaacaaccctaaccctagcagcgccggccacgcctccgaggcggctgaggacgatgggcgcggggacagcggcggcggcgccgtcgtcgaccggaagccgacgcgggcgcagctcctgcacgacgccggctcgctcgcctcggtcgtcaacatcggcggcggatcgcgcgcgggattcggcatcatggaccacctcgacttcgacgcctacggcggccaccatgccggcgccgtgtccctcacgctgggcctgcagcagcacgactcccacgccgacggcggcgccggcggcgtcaacatcgcgttcggcgcgccgccgcccgcgcaccaccacgggtacctgttcgctccgacggcggcggcggcaggccatcagatgggcggcggcgtgcacccgggactacaccaccacgtccagttcagcggcgccggcgccggcatcgacggcgaggcggcgcacgggcaggagcactaccggggcctgcagggcggcggcgggttccacctcctgcgtgacctggccgggtgatcgatctgctccatccacggcccgtgcatccgcggtcggccgcgcgcgagctctagctgcgactccgagtgagctgagcgatggggacgtcgtgccggcgcctagctagctaccgggtgtccgcgccggattcatggcacgcactcgatcgcgcgtgcgctcatccggccacagcggcgctgtgtacgtacgcaccggatttgtttggcttgttgcttgcctggctcgtgccggtctccatcggtctcgatcgccgccggcggcggcttggccgggcccgggtctagctggctagctagctgccctagttatacataatatatgtatttgtagcgtgtacagatcgggtcgcgatcgagcagtttggacgcgcgcaggtgcagctagtactagtagtagctagcccgccggaactgcgtagttgatcaaacacgcattgcatgcaggttaattgcattgtttgtcaatttcttgaaggattcgacgacgtacggcacaatttataccaggcattattgacgattttcctggcagaatattcatcagtccatatgcccatgcatgtttgcgaattgtctatatgtatgtttgtgattggctggtgtgtaagcctctggttagtttgcattatctaaacttttcgtaaacaaaaaaaggtgagagcgtcagctaatgttttttttcataaattgagtggctgaacaatttgaaatgagctataagagtcaggccagtttggatcaactaaagtaagttggtgtccac

SEQ ID NO: 200 - DNA, 3488 bp, Zea Mays
aaataaactatatttaatactcttatttaatttttaaatatattacacgactaaacaaccaaggtcgcctttccagccgaatggaacaagtgagtgaccagtggacgcacaatggaatttggaatgacccaaccaggcaaccaggtcgccagtatccgtccacggtccactccagtccagggctgctgtccaccatccccgtgtcctcctcgaaccatccaagtccaccttccccgtgcccgactccacacaccacttaccactcggtcgtcctcggcacaggccagtcggccacacttgcttatccctccgtcgcctgccacaccttcggccggcacggctccactaccatcactcacaatggctgtcctcgtcctcctccttctcgcatccttcctcccgcccaccgccctggccgccttctccccacccttctccttcttcctcgcctgcggcgccggctccaccgtacgcgacagctcagcgcgcaactttacaccggacgacggttacctgaccaccaaaagcgtcccggcggtgacgaactccaacgccaacagcgccgcctccccgctctacgccgccgcgcgcgcgtccagctccggcgccttctcctacagtctctgttcagcttcaggacacgtacgacgtgctgtcctccttctcgccgccgagcgccggcgtcgtcaaggagttcttcgtcccggcaggcggctccggtgacttccgcgtcacgttcacgccggccgccggctcggccgcgttcgtcaacgccgtcgagctgttcccggctccagaggagctgctgtggaacgccagcgtgacgccggtgggcgcggcggtcctcgacatagccgcgtggccgcgggacgcgctggagacggtgtaccgcctcaacgtgggcggccccgaggtgagcgaggagagcgacacgctctggcggacgtggctccccgacgaccccttcctcttcagtcccccggggacctccacgctggagaacacgagcgccccgatcatctacgccacctacacccgcgaggtggcgcccgacgtcgtctacaggacgcagcgcgccgcggcgaacgtgtcagggatggcggtacccacgagtgtcaacgtcacgtggaccttcccggcggaaccggggtcgaactacctcgtccgtctccacttctgcgactatgaggtggtgagcgccgtcgacggagtcggcatcgtgttcaacgtcttcgtcgcgcaggccattggcacccaagacttcacgcccaaacaattcgagacgcagccgaacacggccttgtacagggactacgccgcctcggctcccatctcccggaacttcacggtcaccgtcggcatgtccgacaagagcagccctggcgaaggcggtttcctgaacgggctggagatcatgaagctgcggccttcgggttcgagcttggcggcggggtcacgcggtagcagcaggagagttctgatcatcgcgctctcggccgtgctcggcgcctcggttctcgcgtccgccgtgctctgcttgtgcttcgtcgcgcggaggaaaaggcggatggcgcgaccggcgccgctggagaaggagagcagcaagccgctgccgtggtcccaagagagctccgggtgggtgctggagccgtcgagccggtcgggcgagggcacgaccggcgcgatgcacagggtgagcacgcagctccacatcccgctggaggagctgaggtcggccaccgacaacttccacgagcgcaacctcatcggcgtgggcgggttcggcaacgtgtaccgcggagcgctccgcgacggcacgcgcgtggcggtgaagcgcgcgacgcgcgcgtccaagcagggcctgccggagttccagacggagatcgtggtgctgtcccgcatccggcaccggcacctggtgtccctgatcggctactgcaacgagcaggcggagatgatcctggtgtacgagtacatggagaaggggacgctgcggagccacctgtacgggggggcggacccgggcggcggcggcggcggcgaggcggcggtgctgtcgtggaagcagcggctggaggtgtgcatcggcgccgccagggggctgcactacctgcacacggggtactcggagaacatcatccaccgcgacgtcaagtccaccaacatcctcctgggcgacgggttcatcgcgaaggtggccgacttcgggctgtcgcgcatgggcccgtcgttcggggagacgcacgtgagcacggcggtgaagggcagcttcgggtacctggacccggagtacttcaagacgcagcagctgacggaccggtcggacgtgtactcgttcggggtggtgctgttcgaggtgctgtgcgcgcggccggtgatcgaccaggcgctggagcgcgagcagatcaacctggcggagtgggccgtggagtggcagaggcgcgggcagctggagcgcatcgccgacccgcggatcctcggggaggtgaacgagaactcgctgcgcaagttcgcggagacggcggagcggtgcctggcggactacgggcaggagcggccgtccatggccgacgtgctgtggaacctcgagtactgcctgcagctgcaggagacgcacgtgcggcgggacgcgttcgaggacagcggcgccgtgggcgcgcagttccccgaggacgtcgtcgtgccgcgctgggtgccgtcgtcgaccagcttcatgaccacggccgacccggacgactcggccgtcacgggcgtgggcgccgtcgacagcaaggtgttctcccagctcagcggcggcgagggccggtgaatgatgaccggctactggagtgtactaatcgcgcgctgttttgttatcgtttgacagtaccataggggggaaaacacgttattatcacatatacagcagcagctagctcctagagttgctggtgaatgtgctcaactctgcaaccaaaaacttttcgagccaactcttcgccgtccctacactcagacaggtctgcatcagggtcacgggataaatccgtgtccgtgtgcatgcggccaaagcaaattgaccagtggctgtctgattgattgaggcgcctgtacgactgctggcatggcaacaaagcttttgcggccattttcttcttcttctccggtggtcatagtcacgcgtatactagttgataggtggagcggacagcggagcaaggcgccggataaagctgggcggaagagtccgcggtggggatgttcagtggttgcaacgtgtgttcaacgtcagtcttatgctagtgttcgccggctgtcaccgagatccatcccaacatttccctgtgattgtgaggtcaaggttttcaggctttgagttcggtcatagactacttaaaagggaacgcacgtaactggctctaagcagtttctaatggttgccgtggagcccacggcgaagtgccgaaatctgaacgcggttcggagctgagagggaaggaagaaccgtg

SEQ ID NO: 201 - DNA, 5026 bp, Zea Mays
cgccacaccacccgagcgacttgtcttccccagctcaacgcgctgaattgattcctccactccggccttgcccgacgatctccagctgtccttcaatcaaattatcaacccaacgccatttcggcgctcccgcttcccacaggagtcacagctcaacaaatccctacccaaatccacctccccgccccccaccgccatggctcccccaccaacctcgcgctgcctcgccctcgctctcatcctcatcggcgcccgccgtcctccccgacggccgccgcttcgtgccggactctggctgcgcatccacccgcctccggtcatcctccccgtccctctcctccgcggcgccgcccggctccccgccgccgccgtcctcgctcctcgcctccgctcgggtcttctcctgccgcgcgtcctacgacctcgatgtccgccgccgcgggcaccacatcctccgcctccatttctaccccttcgtccccgccctcgccgcggcccgcttccacgtcggcgccggggggctcctcctcctccacaacttcacgagctgtcgtctcaggtgtttgagactctctacaggatcaacgtcgcggggcgcaaggtcacgccattcaacgacacactgtggcggacatgggttaacgatgagaaattcctcatcgacaccgactcctccaactacatggtgtggtcgtccagtggccggattgcttatcccaagggtagcaagcagatgacaagagaagtggctcctgacaatgtctacaactctgcaagatccgtgaggccaggggtgaatgtgacttggggtttccctgtgcctgctagcagccggtaccttgtgcgtatgcacttctgtgacattgctagcaaggctctgtatgagctctacttcaatatctacgtcaatggtgatcttgcagtcaaggatttcgatctctccagtgcaactggattcttggcctatccttattacattgactttatcgtcgatgtgaaggatgaggggatactgaaattggcgattggtggcttaaagaagagtcgatctgatgaagtaagtggtatccttaatgcactggagataatgaggatgaacaagaccagtggaggtatggatggagacttcccaattgatctacacatggaatatgtggtgagtaaggggattggagaatttgcccgctccctgctctgtggtttcatctttgttgggttgtttgtggctttggtcacgctgatggtgaggttgaggaccgagttgaggaataacggcacagcttggtcctggagacagatgaactccgatgaagggaaactggccagaacatatcagcttgtgcccagtaagacggactattgaatattgcaggctgggcatctttgaggagtgacaacctgcggctgttgtgtgcatctaatcacatcatactttttattaagttgctgaacagaccaaatttttttatgaaaaagcacattattccaaggcagctaactggcgactcatccctggctcccactaaacaccatagtgcccttcctccaaaatctgtcagagcacaagttgcgtgctaaggtgcagtcccattaaacacacatatagttgctctgatactatacttggtcacagacaagaacctgcgggccctctttttgaattttaatttctacaaaagctttcctcttatttcccatttctgctttccctatctaatttgatatccttacatctaccacattaatgttacaacctcaaatgatactattttcatgagaatattaccatcctggcaggctgtttccagcatgttttataatgttcattttttcaatgggtcatttgttgtatcatgatttcatttctttcaaatgttgccatagcacggtagcagcaacaacaataaagacttttagtcctaaacaagttgggtaggctagagttaaaacccaatagaagccacaaatcaagtttcagacacatgaatatctgctttcttttttctcctattcaaggctaaactttagggatatcgcattctttaaaatcttcttttactgtcttttctcatgtcaactttggtcttctcctgcatcttttccatttcaatcgcctcttaggatcccactacgcaatggtgcctctggaggtctcagttgaacatgttcaaacatctcaattggtgttggacaagtttttcttcaattggtgctacctctggtctatcatttatatcatcgtttcgaactcgatcccttcttatatgaccaaaaatccaacacaacatatacattttcgcagcacttatccgctgaacgtgatgtcattttatagtccaacattctacacaatacaacatagcagttctaatcaccgtcgtatgatacttgatttttagcttttgtggtaccctcttgtcacataaaacaacatatgagaaaattttattatctagtgatactactacatgtggttcatcatttatgttttgttctatcagatctggaatgcttcccagtgacctgaagatgcgatagcatctgggttggataaatgatatgcttatttggataatcaatataactaatcttttcaacctccgtggatatttaattttctgtttgaacagtattagttgagctttatattgccactatcatgtgagcacttatttatttatttttcatctgaatctgtctttagttatgtgctgatctttgggtgacttaagtgtgtgggtgtgttgtactgtgggggtcttttccctctctttcttctattaatgcaatgatatgcagtcctcctgcgtatctcagggaaaaaattgctggtcttgtttttgcttttttggctctttttttgtcaatattctagacggcatgtccatatggttcaagtttttagaactcttgaaaatcccaatactcggaaaccattagtcatggagtacttgatcatgcagtttcatcttccttagtccttactgattcagttctggaaatctggattgaatagggtttctttttgcttttaggccccgacttccttttagggtttccttttgcttttcgatcacaaggtaaagccttaatcccagccataccactaacaactaacagatgtgtaacgaatgaatatgctagataactataactaaagagaaggttaagggcgtcagtaccagctagcactagatctaagttaataagcatggaggaaaaagagaccacatcaacatcatgctatgagaaaaggatgcatcgtgaaatgcgagattgactcttgagtctattctagtctcttgcttttgcactatctactttaaaaattgttttatctaggtctaagctagaccattggatgcggcctaagcccctaacatcaacatcaacatagccttatagtcccaaacaagttggggtaggctagagttaaaacctaacgagatgtcaccaaaaggagaaagagagagaacggggagggggaaagcttttgagagcactaaaaggaaaaaaggcctaatcacggtttaggcacgtggatggcttctttccaagcacttctatccaaacacaactccattgagatattccattccttcaagtccttattgattgtctcctctcatatcaagtttggtcgacctctacctctcttcacattattgtcgtcttattatgcctctatgcaccggtgcctctggggtctccggtggacatgcccaaactatctcaaccggtgttgaataagcttttcttcaattggcgctactcctagccgatcgcgtatgtcatcatttttcactcggtccaatcttgtgtgcccacgtatccaatgcaacatatgcatctctgcgacactaagatgttggatatgtcgtctcttagtaggccaaaacttagccccatataacataacaggcctaatcgctgttctgtagaacttgcctttcagcttctgtgacactctcttgtcgcataggactcctgatgcttggcgtcatttcatccaccccgctttgattctatggctaacatcttcatcaatatcaccatctctctgtagcatggatctctaagcccctaacaaatgtatctaaatgtaaatggctaacaagctgattacataacccgtatgctgccatgttgcttctctcgtgcatgtgctgctgccacgaggccgccattccctgccacacaggtccaagcccgcaacatgttctcttgattatgagtttgtattgttgtcttgttcacacatctattaacttttttgtaaactccaaaaaaactatatatctgattggttggagcattctcttggctttgtagaggcgtcaagaggtcctccccctacaaaaacccaacccacatccttgtcttagcctttgacaagggagacgattgtgaccttcataacctacctagaccctaaggatgcgtttggttacaatgacaggatgggacgggatagaacgataccttaaataagattgtttggttcagggtcaaaggttgggacaggactatcccagtgttgtccccacttatccctcaaaattggagggacaagagaggacatcaggggacgtccccgttctgactgtcccgcaaccaaacacatcctaaaggtcaggggcgagcgaccttatgagagtccatggagggctgtagcaccagccatgcaccacaaactgccctcctcaggcacattgtataagcaggtctgagcatctggtcgagctccctaaaaaatacaagcattcttgtgcttctagagctccaatagaacaagaaagatcagggaattaacttttttgcatgtcttctttggaacacttcttaaagtaatgacaccaccagccatagaagtgactagttgatgctggagcccttaggctgtctgcatgccgcagcaaatcgtgtaaaataggggatttgcgttgtagattacactgtttacagagtgattttaaaataggggatgagatacgatagctgttggagacagcctaacacatgaggt

SEQ ID NO: 202 - DNA, 1739 bp, Zea Mays
gattcctccactccggccttgcccgacgatctccagctgtccttcaatcaaattatcaacccaacgccatttcggcgctcccgcttcccacaggagtcacagctcaacaaatccctacccaaatccacctccccgccccccaccgccatggctcccccaccaacctcgcgctgcctcgccctcgctctcatcctcatcggcgcccgccgtcctccccgacggccgccgcttcgtgccggactctggctgcgcatccacccgcctccggtcatcctccccgtccctctcctccgcggcgccgcccggctccccgccgccgccgtcctcgctcctcgcctccgctcgggtcttctcctgccgcgcgtcctacgacctcgatgtccgccgccgcgggcaccacatcctccgcctccatttctaccccttcgtccccgccctcgccgcggcccgcttccacgtcggcgccggggggctcctcctcctccacaacttcacgagctgtcgtctcaggtgtttgagactctctacaggatcaacgtcgcggggcgcaaggtcacgccattcaacgacacactgtggcggacatgggttaacgatgagaaattcctcatcgacaccgactcctccaactacatggtgtggtcgtccagtggccggattgcttatcccaagggtagcaagcagatgacaagagaagtggctcctgacaatgtctacaactctgcaagatccgtgaggccaggggtgaatgtgacttggggtttccctgtgcctgctagcagccggtaccttgtgcgtatgcacttctgtgacattgctagcaaggctctgtatgagctctacttcaatatctacgtcaatggtgatcttgcagtcaaggatttcgatctctccagtgcaactggattcttggcctatccttattacattgactttatcgtcgatgtgaaggatgaggggatactgaaattggcgattggtggcttaaagaagagtcgatctgatgaagtaagtggtatccttaatgcactggagataatgaggatgaacaagaccagtggaggtatggatggagacttcccaattgatctacacatggaatatgtggtgagtaaggggattggagaatttgcccgctccctgctctgtggtttcatctttgttgggttgtttgtggctttggtcacgctgatggtgaggttgaggaccgagttgaggaataacggcacagcttggtcctggagacagatgaactccgatgaagggaaactggccagaacatatcagcttgtgcccagtaagacggactattgaatattgcaggctgggcatctttgaggagtgacaacctgcggctgttgtgtgcatctaatcacatcatactttttattaagttgtaagtactgtagttttatcacctctctaaaagtattgtagttttgtatcatcactcctttcatgcttggactttgcattctccatgctttgtcaatggtcaatggaggacatgctcatgatgctgtaaaagtactctaccctagatgtggctgtattgctattgcctcatttattcagtttgacttctgaaacatggattcacagctgaattgcatttgaatataattagttgtagtggagacatttgattataaaaaaataagtcaaatagctgcagaagccatcatgccattgtatttgtaacatgatttggctgttgctgacttactgttttcttctcc

SEQ ID NO: 203 - DNA, 1241 bp, Zea Mays
cgtgcacgcccctcctcagcgctgccactgccaccgcgccgtctcccgtcccccgtccgcgcgcgcgcgcgcacgcacgccggccaggcccaggcccaggccctcatggaggtcggtccgacgcagcagcgcctcggcgacagcttctcccgcgggtggctggcgaagcgcggcgcgcgggcgccgtcactcgagcacctcgtcgccgacgccgacctcggccattccttcggcagctccaggtcgtcgttcatcgacatggaccccgccgcgctcttctccatgcggtggacggccacggccgcgccgccgccggagagcgacttcgagttcgggcttattattcccggtggcgtgggcgggggcagtgaccccccgtccccggcgctggtcagcgcgagccgccgggtcatccgcgacggccgcctcgtccccggcgacccgctgttctgctcggcccgcagcgcgccggcctccccgtccccgagcccgtgctgcggcgggagggccgccgccgccgggaggcgctcgtcgtggtggaagatgccgctgcagtacctccggttcctcctgccgctgtaccgcaaggtgagggccctgcggcgtctcccggcgccgaggcggcggccccgcgtggcgccggccagcccggcgcgcgcgtccgcgtccagcctcgactggtgccacggcaatgccgacaccgccgtccgcgacgccatcctctactgcaaaaagtgcagcgccgccggacaacaagacgcatagcacacgaccttgtcacgtgaagtcctccgagccgtccgtcgccctgtgccgtctcgtcaccgagctctttgtctgctcatcgtctgtccgacgtgatggcggtcatggcatcgccctgtgccatctctataccacacctcgcacaaagattacagcgtccgtgtatttgaactgccgcgtgaatggctcgtgatgtacagtttaaaatccaaagtttaaacattaatccgtagaaacgaaacggagtcggccttttctgcctcacgtaccggtggtggtggcctggtgggggtgccggggagggaaggaatagtaaacagattgcggcagcgactgaaagcgtcattattccagaagaaatcctcggctctttatactgctgacctagcactcgtttagcacgttgtgcttggcgctctccgaccgtaaattgaattcgtttggtcggctcaacaaaaaattcgcgttgaaccagg

SEQ ID NO: 204 - DNA, 730 bp, Zea Mays
tccacggcctcaaaacggcctacccgcatagctagggtttcttctctgccccctccggcaactcaggagagagcgcggctcctacccggcggcggtgaagccgcgacgatccaacggagcagaggcgccatggctgctcccgaagcgcccgcatgctacgtcgggatcgcgcggcagtccgccgccttccgccttatgaaacaaatgggatgggaagaaggtgaaggccttggcaaagacaagcaaggcataaagggtcatgttagggtgaaaaacaagcaggacacactaggtgttggtgtagatagccctcataacaaatgggtatacgataccacccaatttgacaacatattgaagaaactgaaagtgcaatcagctaatcctgttcaagaagaggttgcagctgtagaaagtgattcacctgacatcacacccaagaaagacaaatcagcaaaacatgaagttactaaagttactcgacctcaaggaagatacaagaaaagagagagggggaaaagtgtgaactcttattcagcaacagatcttcaaggcatactcgtacgcaaaaatgaagataattccaaagtggatcagaaacttgaaccgacatgcttggatgaacctgatcccatcatctgtttggatgcaggacttccgtgcgcccgccgcccgaaatatgctcctgcgcagaccacacacgcacagctggctggcaaaattgcagaat

SEQ ID NO: 205 - DNA, 1637 bp, Zea Mays
tccacggcctcaaaacggcctacccgcatagctagggtttcttctctgccccctccggcaactcaggagagagcgcggctcctacccggcggcggtgaagccgcgacgatccaacggagcagaggcgccatggctgctcccgaagcgcccgcatgctacgtcgggatcgcgcggcagtccgccgccttccgccttatgaaacaaatgggatgggaagaaggtgaaggccttggcaaagacaagcaaggcataaagggtcatgttagggtgaaaaacaagcaggacacactaggtgttggtgtagatagccctcataacaaatgggtatacgataccacccaatttgacaacatattgaagaaactgaaagtgcaatcagctaatcctgttcaagaagctgtagaaagtgattcacctgacatcacacccaagaaagacaaatcagcaaaacatgaagttactaaagttactcgacctcaaggaagatacaagaaaagagagagggggaaaagtgtgaactcttattcagcaacagatcttcaaggcatactcgtacgcaaaaatgaagataattccaaagtggatcagaaacttgaaccgacatgcttggatgaacctgatcccatcatctgtttggatgcagtatcccaagctgatgatgtgaactggtgggggcacaagtttggatttttatcaggagggtttctaggagcaaaatcccgtaaaaataaatcttcacaaaaagatcttgctaatgtccgccagacatttgcagaggaagatcaagaaaatttgtacaatcttgttcaggttgctacttctggaaagcagggtcttggcatcaaaggcctgccaatgaaagttgctggccaacgttggaagggaaacaaaacttcgtttgttgatagtgatgatgataattcagcccagtccgatgagtattcagaaatcgaagagaatggcgatgaggaagaacatatcagtgcttctgaatcaatagacacagataagaatgcagacaaagaattgcttgtggatgctagacccaaaaccaaggtcaagaaactttgcaaaagaatacttcgtcaggccccatctcagtcaatgaaattgaaggatcttaaggtcgccgttgaggaacactcaaatgttgtattttccagcttctctggtagacgcgaagccctgttgtttttgaagaaaaagcttcaaggaagcaggaaattcaatgtggacggcaagaaagttcagctcgtgtcatgaaagccaagcaaataggaattctttacgttgttggtgtccagcactcgtatttgttgttgctcgaggttccaaacagatgtaggagcacattgagctatgtagtactagtactggtatagataaatagtcaaaacctatcgcagatgcggaggtaaaattttgcaaattttcgtgaggggcagagttcctaatttgtgtgcggcgcattcgatgtaaccgtggcttatttgttttgcatgagatgtgcaaactgcaatgctatgtattgctcgtaaattatgtctatggattcacataattggagtattaaggcatgtaaaatctaattaaacgaggggtctttagggggctaattataaaaaatcaagaggcaa

SEQ ID NO: 206 - DNA, 1558 bp, Zea Mays
tccacggcctcaaaacggcctacccgcatagctagggtttcttctctgccccctccggcaactcaggagagagcgcggctcctacccggcggcggtgaagccgcgacgatccaacggagcagaggcgccatggctgctcccgaagcgcccgcatgctacgtcgggatcgcgcggcagtccgccgccttccgccttatgaaacaaatgggatgggaagaaggtgaaggccttggcaaagacaagcaaggcataaagggtcatgttagggtgaaaaacaagcaggacacactaggtgttggtgtagatagccctcataacaaatgggtatacgataccacccaatttgacaacatattgaagaaactgaaagtgcaatcagctaatcctgttcaagaagaggttgcagctgtagaaagtgattcacctgacatcacacccaagaaagacaaatcagcaaaacatgaagttactaaagttactcgacctcaaggaagatacaagaaaagagagagggggaaaagtgtgaactcttattcagcaacagatcttcaaggcatactctatcccaagctgatgatgtgaactggtgggggcacaagtttggatttttatcaggagggtttctaggagcaaaatcccgtaaaaataaatcttcacaaaaagatcttgctaatgtccgccagacatttgcagaggaagatcaagaaaatttgtacaatcttgttcaggataaagctacttctggaaagcagggtcttggcatcaaaggcctgccaatgaaagttgctggccaacgttggaagggaaacaaaacttcgtttgttgatagtgatgatgataattcagcccagtccgatgagtattcagaaatcgaagagaatggcgatgaggaagaacatatcagtgcttctgaatcaatagacacagataagaatgcagacaaagaattgcttgtggatgctagacccaaaaccaaggtcaagaaactttgcaaaagaatacttcgtcaggccccatctcagtcaatgaaattgaaggatcttaaggtcgccgttgaggaacactcaaatgttgtattttccagcttctctggtagacgcgaagccctgttgtttttgaagaaaaagcttcaaggaagcaggaaattcaatgtggacggcaagaaagttcagctcgtgtcatgaaagccaagcaaataggaattctttacgttgttggtgtccagcactcgtatttgttgttgctcgaggttccaaacagatgtaggagcacattgagctatgtagtactagtactggtatagataaatagtcaaaacctatcgcagatgcggaggtaaaattttgcaaattttcgtgaggggcagagttcctaatttgtgtgcggcgcattcgatgtaaccgtggcttatttgttttgcatgagatgtgcaaactgcaatgctatgtattgctcgtaaattatgtctatggattcacataattggagtattaaggcatgtaaaatctaattaaacgaggggtctttagggggctaattataaaaaatcaagaggcaa

SEQ ID NO: 207 - DNA, 1642 bp, Zea Mays
tccacggcctcaaaacggcctacccgcatagctagggtttcttctctgccccctccggcaactcaggagagagcgcggctcctacccggcggcggtgaagccgcgacgatccaacggagcagaggcgccatggctgctcccgaagcgcccgcatgctacgtcgggatcgcgcggcagtccgccgccttccgccttatgaaacaaatgggatgggaagaaggtgaaggccttggcaaagacaagcaaggcataaagggtcatgttagggtgaaaaacaagcaggacacactaggtgttggtgtagatagccctcataacaaatgggtatacgataccacccaatttgacaacatattgaagaaactgaaagtgcaatcagctaatcctgttcaagaagaggttgcagctgtagaaagtgattcacctgacatcacacccaagaaagacaaatcagcaaaacatgaagttactaaagttactcgacctcaaggaagatacaagaaaagagagagggggaaaagtgtgaactcttattcagcaacagatcttcaaggcatactcgtacgcaaaaatgaagataattccaaagtggatcagaaacttgaaccgacatgcttggatgaacctgatcccatcatctgtttggatgcagtatcccaagctgatgatgtgaactggtgggggcacaagtttggatttttatcaggagggtttctaggagcaaaatcccgtaaaaataaatcttcacaaaaagatcttgctaatgtccgccagacatttgcagaggaagatcaagaaaatttgtacaatcttgttcaggataaagctacttctggaaagcagggtcttggcatcaaaggcctgccaatgaaagttgctggccaacgttggaagggaaacaaaacttcgtttgttgatagtgatgatgataattcagcccagtccgatgagtattcagaaatcgaagagaatggcgatgaggaagaacatatcagtgcttctgaatcaatagacacagataagaatgcagacaaagaattgcttgtggatgctagacccaaaaccaaggtcaagaaactttgcaaaagaatacttcgtcaggccccatctcagtcaatgaaattgaaggatcttaaggtcgccgttgaggaacactcaaatgttgtattttccagcttctctggtagacgcgaagccctgttgtttttgaagaaaaaggaagcaggaaattcaatgtggacggcaagaaagttcagctcgtgtcatgaaagccaagcaaataggaattctttacgttgttggtgtccagcactcgtatttgttgttgctcgaggttccaaacagatgtaggagcacattgagctatgtagtactagtactggtatagataaatagtcaaaacctatcgcagatgcggaggtaaaattttgcaaattttcgtgaggggcagagttcctaatttgtgtgcggcgcattcgatgtaaccgtggcttatttgttttgcatgagatgtgcaaactgcaatgctatgtattgctcgtaaattatgtctatggattcacataattggagtattaaggcatgtaaaatctaattaaacgaggggtctttagggggctaattataaaaaatcaagaggcaa

SEQ ID NO: 208 - DNA, 1310 bp, Zea Mays
tccacggcctcaaaacggcctacccgcatagctagggtttcttctctgccccctccggcaactcaggagagagcgcggctcctacccggcggcggtgaagccgcgacgatccaacggagcagaggcgccatggctgctcccgaagcgcccgcatgctacgtcgggatcgcgcggcagtccgccgccttccgccttatgaaacaaatgggatgggaagaaggtgaaggccttggcaaagacaagcaaggcataaagggtcatgttagggtgaaaaacaagcaggacacactaggtgttggtgtagatagccctcataacaaatgggtatacgataccacccaatttgacaacatattgaagaaactgaaagtgcaatcagctaatcctgttcaagaagaggttgcagctgtagaaagtgattcacctgacatcacacccaagaaagacaaatcagcaaaacatgaagttactaaagttactcgacctcaaggaagatacaagaaaagagagagggggaaaagtgtgaactcttattcagcaacagatcttcaaggcatactcgtacgcaaaaatgaagataattccaaagtggatcagaaacttgaaccgacatgcttggatgaacctgatcccatcatctgtttggatgcagtatcccaagctgatgatgtgaactggtgggggcacaagtttggatttttatcaggagggtttctaggagcaaaatcccgtaaaaataaatcttcacaaaaagatcttgctaatgtccgccagacatttgcagaggaagatcaagaaaatttgtacaatcttgttcaggttgctacttctggaaagcagggtcttggcatcaaaggcctgccaatgaaagttgctggccaacgttggaagggaaacaaaacttcgtttgttgatagtgatgatgataattcagcccagtccgatgagtattcagaaatcgaagagaatggcgatgaggaagaacatatcagtgcttctgaatcaatagacacagataagaatgcagacaaagaattgcttgtggatgctagacccaaaaccaaggtcaagaaactttgcaaaagaatacttcgtcaggccccatctcagtcaatgaaattgaaggatcttaaggtcgccgttgaggaacactcaaatgttgtattttccagcttctctggtagacgcgaagccctgttgtttttgaagaaaaagctttatcaacagctgaatcttgaatgcaaagcttgagagaaataaaggcttcatctctgttcgtttcctttgtaagagcattaaagaagttgttg

SEQ ID NO: 209 - DNA, 2489 bp, Zea Mays
tagggtcgcaagccgagccaaaagcagctgcactgcagaccgaccaccacgcgacgctcctgctggctgctgccgcggaacccgggacaagcgacctcctccacctccccagctagctatagcttcctgcttgcagctgcaggtgccagccgagccgcctaccgggtacagccgcacaggcaggcggcggcatgcgctccagcctccagcagtgagggagggagctgtcccgctcccgccccttctacttctacccctccccccccgcgggccgagagggagtccgcccgccggcgccgcgcgactcaccgatgcccagccatgaggcctgctgcggcaccatgttctgggtgtacctcatgtcctgcgtcggcctcgtcgtcttcgccggcctcatgtcgggcctcaccctcggcctcatgtccctcagcctcgtcgacctcgagccaggatcctccccgtcatgaagaaccagcacctgctcctctgcacgctcctcatcggaaactcgctcgccatggaggcgctgcccatattcctcgacacgctcgtgccgccctacgtcgccatcctcatctccgtcacgctcatcctcgcgttcggggagatcatgccgcaagccatctgcacgcgctacgggcttagcgtgggggccaaggcggcgcccgtcgtccgcctactgctcatcctcttcttccccgtcgcctacccgatcagtaagttgttggaccgcctactgggaaagggacattttgcactaatgagaagagctgagctgaagacgttagttgatatgcacggcaatgaggctggaaaaggtggagagctcactcgtgatgaaacaactatcattacaggagctttggagctgactcaaaagattgcaaaagatgccatgactcctatatctgaaaccttctcacttgacataaatgctaagctggacttacacacaatgggtatgataatgactagagggcatagtcgtgttcctatatactctgggattccaagcaatattattggccttatattggtaaaaaacttgattacttgccgagctgaggatgaagtgcccattcgtaatgttactatcagaaaaattccaaggctcatccccttcttatgctaacaacactgctggaagtcgtagatttaacatagagaagcatggagacgggcgctcatgtaataagaaatcagaaaagaagcgggaaaatattcttgattttaacacagatccacttccaagctattcaatggatgaggcggcagtcggaataatcacgatggaagatgtaatggaagaacttctacaggttgcacatatttgtaatcaagttcccatggtttggaacaagtatttacattgctcacagcataaaatgtctaccatgctttcaaaatatgcactaagatcaccagctaatgatgctgtatgagtgttctccatatcccattaaaacatcagttgtttgcaacattttagccatcataaggagtgcttgtacctgggtcattatggccctttattttccctctactttaatatatgggtgcgcagtcctcctgcgctctttcgaaaaaaaaaacattttagccatcataagtactagtattcaattaggagagaaactaggggggaaaatcagttgcacttgaattgtggtaatttgtttgtcttctcaagtttggcttctctcagatattgtaaactgacacggctctgttcgcaggaagaaatctatgatgaaacagatgagtatgttgatgtacataacaagatcaggataaacatgttacctccaggcaaagcactgtcacctaccatatctcctggtggtggacccttacctcaggggctccgaaagactcctatgacatctccgttctcaccatactaccattgtaattcagtgttacgttccccagcttccaaccattgtcagtcacctgggactctaccgacaatactttcccctggaagatcacctactgcacaaacacctgggcaaagttcaccaaatggaagtcaggtttcaataaattccaacggtcaacataaaaaggacggtgagaactaacataccagaagattgttttccagacggtctcgtctcaagacgggatgcatgattaaaaatcatgaaattgctagcgtaggattaagctgcgaatataagtagcacagctctcttgaatggttagtggcccatgtatttattgattgtttgcttgtacatatatgcttcggcatccggaccttagtatggcctaatcctcactatgtatcatacataggaagtgaatggaagccaatataattttgctctagacaattttagcttgctttctggacccttatgtaagccttcaagatagtgaaaatgttaagtgagtagctcacgagctaaataatggctagatattctcggtaatgaccaaaatcgatcaagtacaacaccaaaagcaaataaaataaaaaacaa

SEQ ID NO: 210 - DNA, 2261 bp, Zea Mays
tagggtcgcaagccgagccaaaagcagctgcactgcagaccgaccaccacgcgacgctcctgctggctgctgccgcggaacccgggacaagcgacctcctccacctccccagctagctatagcttcctgcttgcagctgcaggtgccagccgagccgcctaccgggtacagccgcacaggcaggcggcggcatgcgctccagcctccagcagtgagggagggagctgtcccgctcccgccccttctacttctacccctccccccccgcgggccgagagggagtccgcccgccggcgccgcgcgactcaccgatgcccagccatgaggcctgctgcggcaccatgttctgggtgtacctcatgtcctgcgtcggcctcgtcgtcttcgccggcctcatgtcgggcctcaccctcggcctcatgtccctcagcctcgtcgacctcgaggtgctcgccaaggccggcacgcccaaggacaagctcaacgccgccaggatcctccccgtcatgaagaaccagcacctgctcctctgcacgctcctcatcggaaactcgctcgccatggaggcgctgcccatattcctcgacacgctcgtgccgccctacgtcgccatcctcatctccgtcacgctcatcctcgcgttcggggagatcatgccgcaagccatctgcacgcgctacgggcttagcgtgggggccaaggcggcgcccgtcgtccgcctactgctcatcctcttcttccccgtcgcctacccgatcagtaagttgttggaccgcctactgggaaagggacattttgcactaatgagaagagctgagctgaagacgttagttgatatgcacggcaatgaggctggaaaaggtggagagctcactcgtgatgaaacaactatcattacaggagctttggagctgactcaaaagattgcaaaagatgccatgactcctatatctgaaaccttctcacttgacataaatgctaagctggacttacacacaatgggtatgataatgactagagggcatagtcgtgttcctatatactctgggattccaagcaatattattggccttatattggtaaaaaacttgattacttgccgagctgaggatgaagtgcccattcgtaatgttactatcagaaaaattccaagggtggctgatgatcttcctctctatgacattctaaatgagttccagaaaggtcacagccacatggctgtggtagttaaacgaacaaaggaagcaggagtatccactgaaaaccaaaagagcacaactgcagattataaaataaaccccaaagatgctcatgctgatggctcatccccttcttatgctaacaacactgctggaagtcgtagatttaacatagagaagcatggagacgggcgctcatgtaataagaaatcagaaaagaagcgggaaaatattcttgattttaacacagatccacttccaagctattcaatggatgaggcggcagtcggaataatcacgatggaagatgaagaaatctatgatgaaacagatgagtatgttgatgtacataacaagatcaggataaacatgttacctccaggcaaagcactgtcacctaccatatctcctggtggtggacccttacctcaggggctccgaaagactcctatgacatctccgttctcaccatactaccattgtaattcagtgttacgttccccagcttccaaccattgtcagtcacctgggactctaccgacaatactttcccctggaagatcacctactgcacaaacacctgggcaaagttcaccaaatggaagtcaggtttcaataaattccaacggtcaacataaaaaggacggtgagaactaacataccagaagattgttttccagacggtctcgtctcaagacgggatgcatgattaaaaatcatgaaattgctagcgtaggattaagctgcgaatataagtagcacagctctcttgaatggttagtggcccatgtatttattgattgtttgcttgtacatatatgcttcggcatccggaccttagtatggcctaatcctcactatgtatcatacataggaagtgaatggaagccaatataattttgctctagacaattttagcttgctttctggacccttatgtaagccttcaagatagtgaaaatgttaagtgagtagctcacgagctaaataatggctagatattctcggtaatgaccaaaatcgatcaagtacaacaccaaaagcaaataaaataaaaaacaa

SEQ ID NO: 211 - DNA, 2115 bp, Zea Mays
tagggtcgcaagccgagccaaaagcagctgcactgcagaccgaccaccacgcgacgctcctgctggctgctgccgcggaacccgggacaagcgacctcctccacctccccagctagctatagcttcctgcttgcagctgcaggtgccagccgagccgcctaccgggtacagccgcacaggcaggcggcggcatgcgctccagcctccagcagtgagggagggagctgtcccgctcccgccccttctacttctacccctccccccccgcgggccgagagggagtccgcccgccggcgccgcgcgactcaccgatgcccagccatgaggcctgctgcggcaccatgttctgggtgtacctcatgtcctgcgtcggcctcgtcgtcttcgccggcctcatgtcgggcctcaccctcggcctcatgtccctcagcctcgtcgacctcgaggtgctcgccaaggccggcacgcccaaggacaagctcaacgccgccaggatcctccccgtcatgaagaaccagcacctgctcctctgcacgctcctcatcggaaactcgctcgccatggaggcgctgcccatattcctcgacacgctcgtgccgccctacgtcgccatcctcatctccgtcacgctcatcctcgcgttcggggagatcatgccgcaagccatctgcacgcgctacgggcttagcgtgggggccaaggcggcgcccgtcgtccgcctactgctcatcctcttcttccccgtcgcctacccgatcagtaagttgttggaccgcctactgggaaagggacattttgcactaatgagaagagctgagctgaagacgttagttgatatgcacggcaatgaggctggaaaaggtggagagctcactcgtgatgaaacaactatcattacaggagctttggagctgactcaaaagattgcaaaagatgccatgactcctatatctgaaaccttctcacttgacataaatgctaagctggacttacacacaatgggtatgataatgactagagggcatagtcgtgttcctatatactctgggattccaagcaatattattggccttatattggtaaaaaacttgattacttgccgagctgaggatgaagtgcccattcgtaatgttactatcagaaaaattccaaggctcatccccttcttatgctaacaacactgctggaagtcgtagatttaacatagagaagcatggagacgggcgctcatgtaataagaaatcagaaaagaagcgggaaaatattcttgattttaacacagatccacttccaagctattcaatggatgaggcggcagtcggaataatcacgatggaagatgtaatggaagaacttctacaggaagaaatctatgatgaaacagatgagtatgttgatgtacataacaagatcaggataaacatgttacctccaggcaaagcactgtcacctaccatatctcctggtggtggacccttacctcaggggctccgaaagactcctatgacatctccgttctcaccatactaccattgtaattcagtgttacgttccccagcttccaaccattgtcagtcacctgggactctaccgacaatactttcccctggaagatcacctactgcacaaacacctgggcaaagttcaccaaatggaagtcaggtttcaataaattccaacggtcaacataaaaaggacggtgagaactaacataccagaagattgttttccagacggtctcgtctcaagacgggatgcatgattaaaaatcatgaaattgctagcgtaggattaagctgcgaatataagtagcacagctctcttgaatggttagtggcccatgtatttattgattgtttgcttgtacatatatgcttcggcatccggaccttagtatggcctaatcctcactatgtatcatacataggaagtgaatggaagccaatataattttgctctagacaattttagcttgctttctggacccttatgtaagccttcaagatagtgaaaatgttaagtgagtagctcacgagctaaataatggctagatattctcggtaatgaccaaaatcgatcaagtacaacaccaaaagcaaataaaataaaaaacaa

SEQ ID NO: 212 - DNA, 1460 bp, Zea Mays
gtatgagtgaacaaggatgaatgcctaaacatttgttgttgcacagtcctatatggcgtagatattatctttttggctggaaaaggtggagagctcactcgtgatgaaacaactatcattacaggagctttggagctgactcaaaagattgcaaaagatgccatgactcctatatctgaaaccttctcacttgacataaatgctaagctggacttacacacaatgggtatgataatgactagagggcatagtcgtgttcctatatactctgggattccaagcaatattattggccttatattggtaaaaaacttgattacttgccgagctgaggatgaagtgcccattcgtaatgttactatcagaaaaattccaagaaaggtcacagccacatggctgtggtagttaaacgaacaaaggaagcaggagtatccactgaaaaccaaaagagcacaactgcagattataaaataaaccccaaagatgctcatgctgatggctcatccccttcttatgctaacaacactgctggaagtcgtagatttaacatagagaagcatggagacgggcgctcatgtaataagaaatcagaaaagaagcgggaaaatattcttgattttaacacagatccacttccaagctattcaatggatgaggcggcagtcggaataatcacgatggaagatgtaatggaagaacttctacaggaagaaatctatgatgaaacagatgagtatgttgatgtacataacaagatcaggataaacatgttacctccaggcaaagcactgtcacctaccatatctcctggtggtggacccttacctcaggggctccgaaagactcctatgacatctccgttctcaccatactaccattgtaattcagtgttacgttccccagcttccaaccattgtcagtcacctgggactctaccgacaatactttcccctggaagatcacctactgcacaaacacctgggcaaagttcaccaaatggaagtcaggtttcaataaattccaacggtcaacataaaaaggacggtgagaactaacataccagaagattgttttccagacggtctcgtctcaagacgggatgcatgattaaaaatcatgaaattgctagcgtaggattaagctgcgaatataagtagcacagctctcttgaatggttagtggcccatgtatttattgattgtttgcttgtacatatatgcttcggcatccggaccttagtatggcctaatcctcactatgtatcatacataggaagtgaatggaagccaatataattttgctctagacaattttagcttgctttctggacccttatgtaagccttcaagatagtgaaaatgttaagtgagtagctcacgagctaaataatggctagatattctcggtaatgaccaaaatcgatcaagtacaacaccaaaagcaaataaaataaaaaacaa

SEQ ID NO: 213 - DNA, 1075 bp, Zea Mays
cagccacatggctgtggtagttaaacgaacaaaggaagcaggagtatccactgaaaaccaaaagagcacaactgcagattataaaataaaccccaaagatgctcatgctgatggctcatccccttcttatgctaacaacactgctggaagtcgtagatttaacatagagaagcatggagacgggcgctcatgtaataagaaatcagaaaagaagcgggaaaatattcttgattttaacacagatccacttccaagctattcaatggatgaggcggcagtcggaataatcacgatggaagatgtaatggaagaacttctacaggaagaaatctatgatgaaacagatgagtatgttgatgtacataacaagatcaggataaacatgttacctccaggcaaagcactgtcacctaccatatctcctggtggtggacccttacctcaggggctccgaaagactcctatgacatctccgttctcaccatactaccattgtaattcagtgttacgttccccagcttccaaccattgtcagtcacctgggactctaccgacaatactttcccctggaagatcacctactgcacaaacacctgggcaaagttcaccaaatggaagtcaggtttcaataaattccaacggtcaacataaaaaggacggtgagaactaacataccagaagattgttttccagacggtctcgtctcaagacgggatgcatgattaaaaatcatgaaattgctagcgtaggattaagctgcgaatataagtagcacagctctcttgaatggttagtggcccatgtatttattgattgtttgcttgtacatatatgcttcggcatccggaccttagtatggcctaatcctcactatgtatcatacataggaagtgaatggaagccaatataattttgctctagacaattttagcttgctttctggacccttatgtaagccttcaagatagtgaaaatgttaagtgagtagctcacgagctaaataatggctagatattctcggtaatgaccaaaatcgatcaagtacaacaccaaaagcaaataaaataaaaaacaa

SEQ ID NO: 214 - DNA, 642 bp, Zea Mays
gtcacactgccaacgagaaggcaggcactgccggtgccctccgggatccaggctcgatctgagctgctgatccagagtcaagctgcagctgcgtacgtgcctgctacaggagcacggagtggtaccgctccacagcaggcagtgtgtgtgtgtcacagctgagaggtggagacctgtcacccgccgccactagctactccggtagtctgccctgcttctgtagcacagtcggccactgctcactccgcttcgcaccaacgctacctccgcgctctgcatctcctctccactcctgctatttagcgccgccctgcgcctcccactcccgaattcccctgcgcctctcacctccctgctcgaatccagcgctcacccgcgccgcgtcgagacatgtcgaaggtgagccctgccctcctcttgtccattcatatcggtggcatgcatcgcgcggcggccccccgttcatctccgtgcattgcattcctctcatcttttcgaagccggtagaggaagcggatgactaaactaaccgtatgtgtgccatggccatgaacgtgcagaaaatcgtggtgaagctggacctgcacgacaacaaggacaagcagaaggcgctgaaggccatctccgtgctcgtcggtcgtg

SEQ ID NO: 215 - DNA, 1484 bp, Zea Mays
taaacaccactgtacatgcccttactatatgagtaagctactaactcgtggatcattactccgccagcacttgatccaacaatccaactgcagttagctcaaggatccacgagttgattaaaaatggctgccagaaacccatggtggcttgtgtttcggtgccgtatcggtttccaaccctgatgacgtcagtccgcgcccgccgggcaggccggcaggcactttgggtttggggcccctcgcttctcccgtccagtgccatgtgccaatgccagcgccagccattccccgtcaaatttgtttcggtgcgggtgactcggatgaccccgacgtctccacgccgggcgccgccccgtgacgacagccggtctctcacggcggcaccggcagccgcctgggtcgcttattgcttattgcttctccgccggcacaagcactgggccataccagccattaatgccggtcatggatggatggctgcggtgcgtgaggcgacggacggaccgggagctctcggctctggttccgtgacgcccttggtgttctgttctccttcctgcacgatttcctgatcctgcataagaaaaaggaatccgtcttcctcgcgtccggtacgcttccagtccgggtggtcagaaacagaacagtggagagcccggtgaaactggcctgacctccgcgcgcacgcgtgcggtgcccccggtggccggtggcgacggcgacgggtaggatcgccgtcgccattcgccaatggtggggttaaataaaaacaactccaccgcagctacctgctgctgcggtctttatcatccacgcgagagcccactctcgctgtcgcgccgatacgtggggggtgggatgcacaccagcacacgcacttagccgagcccgagcaggcgtacgcggtgaaacttctctggttggctctggctcgtccaaaatccgcgtcgccggacaaacgctggcgtccggaactgaacggccggcagcagacagacactgatgcgccccgccaccttcgaggctaaaagatgatggagttttcacggaggtttcttcgtcggaaaacggtgcagtgcatgggttccgatgactctctacttcgtactgaccagtgagccagtgaccagtcaccacgagttacctacctacggaagatgccactgttcttgctactactacttttgtactgagaccacccgctccacgcctttcagatcgctgtcattgcactctacccatctgcgacgcgaatgtccccatccatgcagcgtcggattcgatgcgactcgcacatcattttagagggcagctacagctagcgtcgtcgtagcgagtgcaagagcttcgcaggggaaaacagtagtatatacagtaacaacagtatttcgattacaattttttttacaaacctgtgagctctagctaataagggtctgtttatatctattagaactaatataattgctagcgtctaaaattag

SEQ ID NO: 216 - DNA, 2176 bp, Zea Mays
agacaaccaaagtagaatcacttggaagtaagaagctattagatggcctccatgggattggattttttttttccaacaggaacgtgagcggtgagcaaccctaccccaggcccagcttgcgcgctctctctctctctggacgacgacgcctacgccagggccccaggtcgctgccgccctacgccaggtccccttcgccggcgacgagcaccaggtctgttgttacttctctggtgatggaccggaattcagatcaaaactgaaagattggaggagcatataccagtttgagtgtaaatagagatgactccaaaatggagtgcatgctcttcaaatagctacagagaactaccttcacatgaaaatggagagtgcaaatcaaccttaacagagtcagtcccttcacctacaagctgttttggcttgcacactgcaaacacaatgtgctccttatcttcacaaaagaaggatggtaatgtttataaaagaaggaagatggataaggattcaaattctcctataacatttgaagatgctaaagaaatggcaacccaaagttgcacaatttctgatgaccactcatcattactgctacccattatctcctcagaggcattgcttttaaattcaacagcaggcatggcaggtcctatcctagattgtgaggagcctgctgatgttccattggagccaaattctggtacagatgatagatgcttcatttcaaacatgtctccaacttccatgactccagacaaaaagaatgctgctgaatgttcctcatcgaatattggccctacagaatcaattaccgagcatatttcaccaagggatctttgcattgccatactgatgaaagatggactaataaatgaatcaagaacaagaatggcacataaagaggaattcactgacaatgatgctaaccctttgttggcatgcaataattgtggctgcttggaacattcattgaagatgctgatatgcgattcttgtgaagcaggatttcatttgtcttgctgcattccttgtattaaggagctacctactgatgaatggtattgtgctccatgcttgtgtaagaaacccaagagtctttatggcaaactctcagagggcaggataaatccttccaggaatactaacacaaggcctcatgggatgagtcacatagagtacatgctgaaggatgctgaaccatatgtaactggggttcgacttggtagagattttcaggcagaggtgccagaatggtctggtccatcatccagcagcgatgtttactttgacgagccctgtgcaattgattctgcagaactaactacatttaatttgtgcaaaatgagtaatcaaagtcattcttccattggtaattggatccaatgccgtgagaccttgaatccaggagattctgacaagcaagttgtctgtggaaaatggagaagggcacccttatatgttgtacagtcagataattgggattgtttttgttgtcttctttgggatccagtccatgctgattgtgctgttccacaggagttgaagactagtgaagttctaaagcagctgaagtttgtaaacatgctaaagaatcagctggtggaccaaaaccagaagcctgcttaaataaatgccagtaccagagtgggcgattcctcaagagaaggatacccattatgatggtatgaatgagttgccgtatgtggcgttctcttgtagtaactagccgtctgtgaacatgtgagaactatgttgttctagcctgttaaacgaaatgatctgtactgtcttctatagggtcttggtacacaagagttatacaacatagatctgtctgtgcagtccagggagcagcgtgtcgctactgctgtgatcgccgccaaacgatcctgtgatcctgcgccaagttttgtttcttggtaacttctggtattgcgcgtgccactgcatggcgtggatgacgttttctggtagactgccgagcgtttgtgtatctgttgataggcgtttggcctgctatgcatttcatgacgagaggcatattgcattgtgtgcctgcattcttgccagaactaaaatgctgggcctagaatccactttccttgtaagcccacgcggcctttttcccgtgagcacaaaatagtactcccagacctttttcatgacgagaggattg

SEQ ID NO: 217 - DNA, 1961 bp, Zea Mays
ggaagtaagaagctattagatggcctccatgggattggattttttttttccaacaggaacgtgagcggtgagcaaccctaccccaggcccagcttgcgcgctctctctctctctggacgacgacgcctacgccagggccccaggtcgctgccgccctacgccaggtccccttcgccggcgacgagcaccaggtctgttgttacttctctggtgatggaccggaattcagatcaaaactgaaagattggaggagcatataccagtttgagtgtaaatagaggatcttccttatgtttgatgattagctcattgagcaacatacagcaacagatagctacaaatcgtggcatatgactccaaaatggagtgcatgctcttcaaatagctacagagaactaccttcacaaaagaaggatggtaatgtttataaaagaaggaagatggataaggattcaaattctcctataacatttgaagatgctaaagaaatggcaacccaaagttgcacaatttctgatgaccactcatcattactgctacccattatctcctcagaggcattgcttttaaattcaacagcaggcatggcaggtcctatcctagattgtgaggagcctgctgatgttccattggagccaaattctggtacagatgatagatgcttcatttcaaacatgtctccaacttccatgactccagacaaaaagaatgctgctgaatgttcctcatcgaatattggccctacagaatcaattaccgagcatatttcaccaagggatctttgcattgccatactgatgaaagatggactaataaatgaatcaagaacaagaatggcacataaagaggaattcactgacaatgatgctaaccctttgttggcatgcaataattgtggctgcttggaacattcattgaagatgctgatatgcgattcttgtgaagcaggatttcatttgtcttgctgcattccttgtattaaggagctacctactgatgaatggtattgtgctccatgcttgtgtaagaaacccaagagtctttatggcaaactctcagagggcaggataaatccttccaggaatactaacacaaggcctcatgggatgagtcacatagagtacatgctgaaggatgctgaaccatatgtaactggggttcgacttggtagagattttcaggcagaggtgccagaatggtctggtccatcatccagcagcgatgtttactttgacgagccctgtgcaattgattctgcagaactaactacatttaatttgtgcaaaatgagtaatcaaagtcattcttccattggtaattggatccaatgccgtgagaccttgaatccaggagattctgacaagcaagttgtctgtggaaaatggagaagggcacccttatatgttgtacagtcagataattgggattgtttttgttgtcttctttgggatccagtccatgctgattgtgctgttccacaggagttgaagactagtgaagttctaaagcagctgaagtttgtaaacatgctaaagaatcagctggtggaccaaaaccagaagcctgcttaaataaatgccagtaccagagtgggcgattcctcaagagaaggatacccattatgatgtccagggagcagcgtgtcgctactgctgtgatcgccgccaaacgatcctgtgatcctgcgccaagttttgtttcttggtaacttctggtattgcgcgtgccactgcatggcgtggatgacgttttctggtagactgccgagcgtttgtgtatctgttgataggcgtttggcctgctatgcatttcatgacgagaggcatattgcattgtgtgcctgcattcttgccagaactaaaatgctgggcctagaatccactttccttgtaagcccacgcggcctttttcccgtgagcacaaaatagtactcccagacctttttcatgacgagaggattg

SEQ ID NO: 218 - DNA, 2261 bp, Zea Mays
attagatggcctccatgggattggattttttttttccaacaggaacgtgagcggtgagcaaccctaccccaggcccagcttgcgcgctctctctctctctggacgacgacgcctacgccagggccccaggtcgctgccgccctacgccaggtccccttcgccggcgacgagcaccaggtctgttgttacttctctggtgatggaccggaattcagatcaaaactgaaagattggaggagcatataccagtttgagtgtaaatagaggatcttccttatgtttgatgattagctcattgagcaacatacagcaacagatagctacaaatcgtggcatatgactccaaaatggagtgcatgctcttcaaatagctacagagaactaccttcacatgaaaatggagagtgcaaatcaaccttaacagagtcagtcccttcacctacaagctgttttggcttgcacactgcaaacacaatgtgctccttatcttcacaaaagaaggatggtaatgtttataaaagaaggaagatggataaggattcaaattctcctataacatttgaagatgctaaagaaatggcaacccaaagttgcacaatttctgatgaccactcatcattactgctacccattatctcctcagaggcattgcttttaaattcaacagcaggcatggcaggtcctatcctagattgtgaggagcctgctgatgttccattggagccaaattctggtacagatgatagatgcttcatttcaaacatgtctccaacttccatgactccagacaaaaagaatgctgctgaatgttcctcatcgaatattggccctacagaatcaattaccgagcatatttcaccaagggatctttgcattgccatactgatgaaagatggactaataaatgaatcaagaacaagaatggcacataaagaggaattcactgacaatgatgctaaccctttgttggcatgcaataattgtggctgcttggaacattcattgaagatgctgatatgcgattcttgtgaagcaggatttcatttgtcttgctgcattccttgtattaaggagctacctactgatgaatggtattgtgctccatgcttgtgtaagaaacccaagagtctttatggcaaactctcagagggcaggataaatccttccaggaatactaacacaaggcctcatgggatgagtcacatagagtacatgctgaaggatgctgaaccatatgtaactggggttcgacttggtagagattttcaggcagaggtgccagaatggtctggtccatcatccagggacgaggggattcctatctcgcacttgagccatttattagattgaatccaagagcgatgtttactttgacgagccctgtgcaattgattctgcagaactaactacatttaatttgtgcaaaatgagtaatcaaagtcattcttccattggtaattggatccaatgccgtgagaccttgaatccaggagattctgacaagcaagttgtctgtggaaaatggagaagggcacccttatatgttgtacagtcagataattgggattgtttttgttgtcttctttgggatccagtccatgctgattgtgctgttccacaggagttgaagactagtgaagttctaaagcagctgaagtttgtaaacatgctaaagaatcagctggtggaccaaaaccagaagcctgcttaaataaatgccagtaccagagtgggcgattcctcaagagaaggatacccattatgatggtatgaatgagttgccgtatgtggcgttctcttgtagtaactagccgtctgtgaacatgtgagaactatgttgttctagcctgttaaacgaaatgatctgtactgtcttctatagggtcttggtacacaagagttatacaacatagatctgtctgtgcagtccagggagcagcgtgtcgctactgctgtgatcgccgccaaacgatcctgtgatcctgcgccaagttttgtttcttggtaacttctggtattgcgcgtgccactgcatggcgtggatgacgttttctggtagactgccgagcgtttgtgtatctgttgataggcgtttggcctgctatgcatttcatgacgagaggcatattgcattgtgtgcctgcattcttgccagaactaaaatgctgggcctagaatccactttccttgtaagcccacgcggcctttttcccgtgagcacaaaatagtactcccagacctttttcatgacgagaggattg

SEQ ID NO: 219 - DNA, 2172 bp, Zea Mays
tccaacaggaacgtgagcggtgagcaaccctaccccaggcccagcttgcgcgctctctctctctctggacgacgacgcctacgccagggccccaggtcgctgccgccctacgccaggtccccttcgccggcgacgagcaccaggtctgttgttacttctctggtgatggaccggaattcagatcaaaactgaaagattggaggagcatataccagtttgagtgtaaatagaggatcttccttatgtttgatgattagctcattgagcaacatacagcaacagatagctacaaatcgtggcatatgactccaaaatggagtgcatgctcttcaaatagctacagagaactaccttcacatgaaaatggagagtgcaaatcaaccttaacagagtcagtcccttcacctacaagctgttttggcttgcacactgcaaacacaatgtgctccttatcttcacaaaagaaggatggtaatgtttataaaagaaggaagatggataaggattcaaattctcctataacatttgaagatgctaaagaaatggcaacccaaagttgcacaatttctgatgaccactcatcattactgctacccattatctcctcagaggcattgcttttaaattcaacagcaggcatggcaggtcctatcctagattgtgaggagcctgctgatgttccattggagccaaattctggtacagatgatagatgcttcatttcaaacatgtctccaacttccatgactccagacaaaaagaatgctgctgaatgttcctcatcgaatattggccctacagaatcaattaccgagcatatttcaccaagggatctttgcattgccatactgatgaaagatggactaataaatgaatcaagaacaagaatggcacataaagaggaattcactgacaatgatgctaaccctttgttggcatgcaataattgtggctgcttggaacattcattgaagatgctgatatgcgattcttgtgaagcaggatttcatttgtcttgctgcattccttgtattaaggagctacctactgatgaatggtattgtgctccatgcttgtgtaagaaacccaagagtctttatggcaaactctcagagggcaggataaatccttccaggaatactaacacaaggcctcatgggatgagtcacatagagtacatgctgaaggatgctgaaccatatgtaactggggttcgacttggtagagattttcaggcagaggtgccagaatggtctggtccatcatccagcgatgtttactttgacgagccctgtgcaattgattctgcagaactaactacatttaatttgtgcaaaatgagtaatcaaagtcattcttccattggtaattggatccaatgccgtgagaccttgaatccaggagattctgacaagcaagttgtctgtggaaaatggagaagggcacccttatatgttgtacagtcagataattgggattgtttttgttgtcttctttgggatccagtccatgctgattgtgctgttccacaggagttgaagactagtgaagttctaaagcagctgaagtttgtaaacatgctaaagaatcagctggtggaccaaaaccagaagcctgcttaaataaatgccagtaccagagtgggcgattcctcaagagaaggatacccattatgatggtatgaatgagttgccgtatgtggcgttctcttgtagtaactagccgtctgtgaacatgtgagaactatgttgttctagcctgttaaacgaaatgatctgtactgtcttctatagggtcttggtacacaagagttatacaacatagatctgtctgtgcagtccagggagcagcgtgtcgctactgctgtgatcgccgccaaacgatcctgtgatcctgcgccaagttttgtttcttggtaacttctggtattgcgcgtgccactgcatggcgtggatgacgttttctggtagactgccgagcgtttgtgtatctgttgataggcgtttggcctgctatgcatttcatgacgagaggcatattgcattgtgtgcctgcattcttgccagaactaaaatgctgggcctagaatccactttccttgtaagcccacgcggcctttttcccgtgagcacaaaatagtactcccagacctttttcatgacgagaggattg

SEQ ID NO: 220 - DNA, 2012 bp, Zea Mays
acaggaacgtgagcggtgagcaaccctaccccaggcccagcttgcgcgctctctctctctctggacgacgacgcctacgccagggccccaggtcgctgccgccctacgccaggtccccttcgccggcgacgagcaccagatgactccaaaatggagtgcatgctcttcaaatagctacagagaactaccttcacatgaaaatggagagtgcaaatcaaccttaacagagtcagtcccttcacctacaagctgttttggcttgcacactgcaaacacaatgtgctccttatcttcacaaaagaaggatggtaatgtttataaaagaaggaagatggataaggattcaaattctcctataacatttgaagatgctaaagaaatggcaacccaaagttgcacaatttctgatgaccactcatcattactgctacccattatctcctcagaggcattgcttttaaattcaacagcaggcatggcaggtcctatcctagattgtgaggagcctgctgatgttccattggagccaaattctggtacagatgatagatgcttcatttcaaacatgtctccaacttccatgactccagacaaaaagaatgctgctgaatgttcctcatcgaatattggccctacagaatcaattaccgagcatatttcaccaagggatctttgcattgccatactgatgaaagatggactaataaatgaatcaagaacaagaatggcacataaagaggaattcactgacaatgatgctaaccctttgttggcatgcaataattgtggctgcttggaacattcattgaagatgctgatatgcgattcttgtgaagcaggatttcatttgtcttgctgcattccttgtattaaggagctacctactgatgaatggtattgtgctccatgcttgtgtaagaaacccaagagtctttatggcaaactctcagagggcaggataaatccttccaggaatactaacacaaggcctcatgggatgagtcacatagagtacatgctgaaggatgctgaaccatatgtaactggggttcgacttggtagagattttcaggcagaggtgccagaatggtctggtccatcatccagcagcgatgtttactttgacgagccctgtgcaattgattctgcagaactaactacatttaatttgtgcaaaatgagtaatcaaagtcattcttccattggtaattggatccaatgccgtgagaccttgaatccaggagattctgacaagcaagttgtctgtggaaaatggagaagggcacccttatatgttgtacagtcagataattgggattgtttttgttgtcttctttgggatccagtccatgctgattgtgctgttccacaggagttgaagactagtgaagttctaaagcagctgaagtttgtaaacatgctaaagaatcagctggtggaccaaaaccagaagcctgcttaaataaatgccagtaccagagtgggcgattcctcaagagaaggatacccattatgatggtatgaatgagttgccgtatgtggcgttctcttgtagtaactagccgtctgtgaacatgtgagaactatgttgttctagcctgttaaacgaaatgatctgtactgtcttctatagggtcttggtacacaagagttatacaacatagatctgtctgtgcagtccagggagcagcgtgtcgctactgctgtgatcgccgccaaacgatcctgtgatcctgcgccaagttttgtttcttggtaacttctggtattgcgcgtgccactgcatggcgtggatgacgttttctggtagactgccgagcgtttgtgtatctgttgataggcgtttggcctgctatgcatttcatgacgagaggcatattgcattgtgtgcctgcattcttgccagaactaaaatgctgggcctagaatccactttccttgtaagcccacgcggcctttttcccgtgagcacaaaatagtactcccagacctttttcatgacgagaggattg

SEQ ID NO: 221 - DNA, 2226 bp, Zea Mays
acaggaacgtgagcggtgagcaaccctaccccaggcccagcttgcgcgctctctctctctctggacgacgacgcctacgccagggccccaggtcgctgccgccctacgccaggtccccttcgccggcgacgagcaccaggtctgttgttacttctctggtgatggaccggaattcagatcaaaactgaaagattggaggagcatataccagtttgagtgtaaatagaggatcttccttatgtttgatgattagctcattgagcaacatacagcaacagatagctacaaatcgtggcatatgactccaaaatggagtgcatgctcttcaaatagctacagagaactaccttcacatgaaaatggagagtgcaaatcaaccttaacagagtcagtcccttcacctacaagctgttttggcttgcacactgcaaacacaatgtgctccttatcttcacaaaagaaggatggtaatgtttataaaagaaggaagatggataaggattcaaattctcctataacatttgaagatgctaaagaaatggcaacccaaagttgcacaatttctgatgaccactcatcattactgctacccattatctcctcagaggcattgcttttaaattcaacagcaggcatggcaggtcctatcctagattgtgaggagcctgctgatgttccattggagccaaattctggtacagatgatagatgcttcatttcaaacatgtctccaacttccatgactccagacaaaaagaatgctgctgaatgttcctcatcgaatattggccctacagaatcaattaccgagcatatttcaccaagggatctttgcattgccatactgatgaaagatggactaataaatgaatcaagaacaagaatggcacataaagaggaattcactgacaatgatgctaaccctttgttggcatgcaataattgtggctgcttggaacattcattgaagatgctgatatgcgattcttgtgaagcaggatttcatttgtcttgctgcattccttgtattaaggagctacctactgatgaatggtattgtgctccatgcttgtgtaagaaacccaagagtctttatggcaaactctcagagggcaggataaatccttccaggaatactaacacaaggcctcatgggatgagtcacatagagtacatgctgaaggatgctgaaccatatgtaactggggttcgacttggtagagattttcaggcagaggtgccagaatggtctggtccatcatccagggacgaggggattcctatctcgcacttgagccatttattagattgaatccaagagcagcgatgtttactttgacgagccctgtgcaattgattctgcagaactaactacatttaatttgtgcaaaatgagtaatcaaagtcattcttccattggtaattggatccaatgccgtgagaccttgaatccaggagattctgacaagcaagttgtctgtggaaaatggagaagggcacccttatatgttgtacagtcagataattgggattgtttttgttgtcttctttgggatccagtccatgctgattgtgctgttccacaggagttgaagactagtgaagttctaaagcagctgaagtttgtaaacatgctaaagaatcagctggtggaccaaaaccagaagcctgcttaaataaatgccagtaccagagtgggcgattcctcaagagaaggatacccattatgatggtatgaatgagttgccgtatgtggcgttctcttgtagtaactagccgtctgtgaacatgtgagaactatgttgttctagcctgttaaacgaaatgatctgtactgtcttctatagggtcttggtacacaagagttatacaacatagatctgtctgtgcagtccagggagcagcgtgtcgctactgctgtgatcgccgccaaacgatcctgtgatcctgcgccaagttttgtttcttggtaacttctggtattgcgcgtgccactgcatggcgtggatgacgttttctggtagactgccgagcgtttgtgtatctgttgataggcgtttggcctgctatgcatttcatgacgagaggcatattgcattgtgtgcctgcattcttgccagaactaaaatgctgggcctagaatccactttccttgtaagcccacgcggcctttttcccgtgagcacaaaatagtactcccagacctttttcatgacgagaggattg

SEQ ID NO: 222 - DNA, 621 bp, Zea Mays
cgtgttcaatttgtcatgttcccttctcgctaaagaatcagctggtggaccaaaaccagaagcctgcttaaataaatgccagtaccagagtgggcgattcctcaagagaaggatacccattatgatggtatgaatgagttgccgtatgtggcgttctcttgtagtaactagccgtctgtgaacatgtgagaactatgttgttctagcctgttaaacgaaatgatctgtactgtcttctatagggtcttggtacacaagagttatacaacatagatctgtctgtgcagtccagggagcagcgtgtcgctactgctgtgatcgccgccaaacgatcctgtgatcctgcgccaagttttgtttcttggtaacttctggtattgcgcgtgccactgcatggcgtggatgacgttttctggtagactgccgagcgtttgtgtatctgttgataggcgtttggcctgctatgcatttcatgacgagaggcatattgcattgtgtgcctgcattcttgccagaactaaaatgctgggcctagaatccactttccttgtaagcccacgcggcctttttcccgtgagcacaaaatagtactcccagacctttttcatgacgagaggattg

SEQ ID NO: 223 - DNA, 2228 bp, Zea Mays
ccgcctcagcccgtccgcccgcccgtcaccaaacgccgattaaatttaatacccttaaaagcgcccgcgcgacccagtcgagccggccccgcatcccattccgtgccaccgccgccgcgctgcgtctgcgtctgcgtgcgtcgcccgcagtgtccgcagccagaaccagcgcacgcgctgctccgccgacgccgaagcctcgtccgcgagcgcgtggggctaagcaagcactcgagctccctcgagcggcgggtgcagtgcagccaggccgcgcgcgccgcagcatgaacggcgtcggcgacgcgcacgcggccgcggccgcggccgccatggtgcagcaaacgctggggatgtcgctgccgatggcggcgttcgtgcccgagcagggcagcgccaataggctgaccaggccgccggggctgccgccgctgccgcaggcgttcgcggcccagcagcgcggggacgtgtgcatggaggccgtcgaccccgcggctggcccgcgcaaggcgcaccggcgctcccgcagcgacgtcccgttcggctacttcccgccggcgggccaccaccagctcccgccgcccaaggtggaggccggctggggcggccacctccccgccggcggcggcggcggcggcgacgacgacctgttcaacgcgtacctcaacctggaggggctggacgggctcaactcctccgacgaccgcctcgacgacggggacagccgcggcagcagcatgaggaccaacggcgccgacagcagcgagaacgagtcggaggagtgcgccgccgacagccgcgccgggatccgcctctgcgccgccgctgccgacaggcgggaggggctcaagagggccgccgctgcgcccgtggcgcgccacgccaggagcctgtccatggatagcctcatcggcaagctcaacttctccgccggcgcgacgggcgccgctagcggcgtcattccgggacccaacaggttcagcctcgagttcggcaccggcgagttttcgccggtcgagatgaagaagatcatggccgacgagaagctggccgagatggcgctcgccgaccccaagcgcgtcaagaggcagtcggcggcgcggtccaaggagcgcaagatgcgatacattggcgagctggagcacaaggtgcagatcctgcagacggaggccaccactctctccgcccagctcacgcttcttcagcgggactccgcggggatcgcgacgcagaacaacgagctcaagttccggctgcaggccatggagcagcaggcgcagctgcgtgacgcattgaatgaggcactgacagccgaggtccaacgcctgaaggtcgcgaccgcagagctcggggattcttgctcgtccagcaacctagcccagcagatccaaatcagcgttcaggaccagatgtttcaactgcatcagcagcaggcaacgcctataccgttctaccagctgcagcaggcgcagcagaatggcgcagggaagaagcatgagccgacggaatgatctcagacctgccattatccaccgctgcgtgagcaggggaaaaaaagatcggtttcgatggactgaaaacatttcttttcctaactcattggttaagtgtcgttaataagcaccgtgcatttttttccaggtgatgaacctgctgcttgtacctgtttatttattctttggatgattcagttgcttgagttgccaaactgatcaaattgtagccggttaatattcttttatagttgtagtgtttatggatgcttttgcactttggtaccttacgttgacttttattcttgagttatttttgacttttctatattatgtctgaatatatagaaaatcaactgtatataaaaagccaaatccttttatagtttgaatgtctttattttgtgttgaagaccaaacggcatccatttcgtacaacaccacgagctgctaaaaacatttaaagaataaaaaacaaatactgctacactacgcataatacaagctcatacagcgaatggtgcacgaacgaattgagatatttacagtgagcagtcaattccgtttaagctacccaacagaatcctcaaccatagcctcctcgctgtcgctgtcgctgccatctgaacctgaatctgaatcaccttcctcgacgccttcatccgtctcagcgtcagacatcggctcctcgtttccagctccactcctggacatttgcttcctgaattcaggatcaac

SEQ ID NO: 224 - DNA, 3914 bp, Zea Mays
gccgtagctgccagttaactactccgcctactagtagcggcagcggccaccgcggcagagctggtgggtggtaatgccgctgcggctgcgtgcggtggcactggcacagcgcggcctgtccctgtcgcgatgacgcgccgctcccaggccacgcccgccgcttcggcggcgctgccgcttctcctggccccgtttcttctgcttctgctgctgctgcattgccagtgccaccgcgccggcgcggcgacggacgcggagcggcgggcgctgctggacttcaaggcggcggtgacggcggacccgcggggcgtgctggcgtcgtggacgcccgcgggggacccctgcggcttcgtcggggtcacctgcgacgcgtccacgggcgccgtgcagcgcctgcgcatccacggcgcggggctggcgggcacgctcgcgccctccctcgcgcgccttcccgcgctcgagtccgtctcgctcttcggcaacgccctcgcgggcggcgtcccgcccggcttccgcgcgctcgcgcccacgctccgcaagctcaacctcagccggaacgcgctcgccggcgagatcccgccgttcctcggcgccttcccgtggctccgcctgctcgacctctcctacaaccacttcgccggcgggatccccgccgggctcttcgacccctgcctccgcctccgctacgtctcgctcgcgcacaacgacctgacgggccccgtcccgcccggcattgccaactgctcgcgcctcgccggcttcgacttctcctacaaccgcctctccggcgagctcccggaccgggtctgcgcgccgccggagatgaactacatctccgtccggagcaacgcgctctctgggcaaatatccaacaagctcacctcctgcggcggcattgacctcttcgacgtcggcagcaacaacttctccggagctgcgccctttgcgctccttggctcggtaaacatcacctacttcaatgtctcctccaacgcctttgaaggcgaaatccccagcattgcgacctgcggcaccaaattctcacgcttggacgcgtccggcaaccggctcacggggccggtgccggagagcgtcgtgaattgccgcggcctgaggtttttggatttgggggcgaatgctcttggtggagctgtacctcctgtgattgggactctgcggtcgctctccttcctccggctcgcgggcaatcctggcatttccggttcgattccacctgagcttggagggatcgagatgcttgtcacactcgacctcgcgggccttgctctcacaggagagattccagggtccctcagccagtgccgattcttgcttgaactgaatctgtccggcaacaaactgcaaggagctatcccagacacactcaacaacataacctacctcaaggtgcttgatctccacaggaaccagcttgatgggggcattccagtcacacttgggcagctcacaaaccttgttcttctagacctctcggagaatcaactgactggggcaatacctccacagcttgggaacctctctaacctgacacatttcaacatgtccttcaataacctatctggcatgattcctcctgagccagtcttgcagaaatttgattacactgcctacatgggcaaccagtttctatgtggctctccattgcccaataactgtgggaccgggatgaagcaccgcaaacgagtgggtgtgcctgtcataatcgccattgttgctgcagccctcatacttattggaatatgcattgtttgtgctttaaacatcaaggcttatacgcgtaagagcacagatgaggacatgaaggaagaggaagaggttcttgtgtctgagagtactcctccaattgcatctccaggctcaaatgccatcatcggaaaattggtgcttttcagcaagagcttgccatcaaggtacgaagattgggaaactggaactaaggcgctacttgataaagactgtctcattggcggtggatcaatcggtacggtgtacaaggccacttttgaaaacggcatgtccattgctgtgaagaaactggagacactagggagcgtgagaggccaggatgagtttgagcatgagatgagccagcttggtaacctcagccaccccaatctggttgcttttcagggttactactggtcatcctcaatgcagttgcttctgtcggaatttgtggccagcgggagcttgtatgaccacctccacggtagccatcctcatgctttctctgagagcagcagcagaggtgctggaggtgaactgtcttgggaacagaggttcaacgtcgcacttggagcggcccgtgcacttgcttaccttcaccatgattgccggccacagatcctgcacctcaacatcaagtcctccaacattatgttagatgggaaatacgaagctaagctatctgactatggattggggaagctgttgccgattctaggaagcattgaattgagtagaattcacaccgcaattgggtacattgctccggagctgtcatctccgactttgagatatagcgacaagagtgatgtatttagctttggggtggttttgcttgagaccgtgacagggcggaaaccggtggacagccctggggtagctacagctgtggttctgcgtgattatgtaagagaggtattggaggatggaactgcatcggactgctttgatcgaagcctgaggggaattgttgaagctgaattggttcaagtgctcaaattaggtctggtatgcacttccaatacaccatcaagccggcctagcatggcagaagtggcacagcaaaggaacagttgaacaagagcagtgtgatgcaggagcagctcatctaacccacaagttctatcctacatatatcagcagtgcaggcaagatctgcagcagcacaacaaaaattccatctccaaagtccaaaccaaatatctgaaaaatggatggggagcttgaactgcccgaattcaaccctcgggaacgcgtcaagcagcagatttcagtcccgtttctctgggaggtgaagcccggtgccccgaagagggactgggtcatctcccagccagtgccagtagcgtttgcatgcccgtccccggccccgacaaagcttgttgtgagcgtgccattccagtgggaagaaaagcctgggaagcctctgcaggaagcatctcccttccatgtgctgcccccggatcacggtgccttttcagcatcttcccgctcgctgaacccgtttgtggtcgagagcgaggaggaatactcgcttggttttgagctggaagcatttggttttccagacagcagcgacgcctctggcgctgcagcgtgggcagatggctcctcctccggccgtcgtgacggctggttctcgttttcagagtcggaagactacagccactccagtggcgatacttcagcacacgacaaggagttccagtttccccgggcgccttcagagaagagctgggaggtggccaatgacgaggacaatccatggagccctccgaggagcgcggccacgacgctggaggagcttatggtgctcagccggagactgaggtgcggacaagctctgccggttgacgtcgggaagaagagactgccctccgtggagctcatgaagaagctcttcatcgtgtgttcttagctgcactgcacatggacgtgccaaaaggtacaggctgcatgtgagaccataatagaggaagcatggcaaagtggggcgttcgcaagtagaaagcctagctgtcgggtgactggagttgtaccgtcagagtcgtcaaaatgttggtcttttttttgtgtgtgaaatgaaacgttgtgcaggagagatactctggatttttgtttgtacgacaagtttgaaagaaatgttccgttgttgttgttccatctta

SEQ ID NO: 225 - DNA, 3866 bp, Zea Mays
gccgtagctgccagttaactactccgcctactagtagcggcagcggccaccgcggcagagctggtgggtggtaatgccgctgcggctgcgtgcggtggcactggcacagcgcggcctgtccctgtcgcgatgacgcgccgctcccaggccacgcccgccgcttcggcggcgctgccgcttctcctggccccgtttcttctgcttctgctgctgctgcattgccagtgccaccgcgccggcgcggcgacggacgcggagcggcgggcgctgctggacttcaaggcggcggtgacggcggacccgcggggcgtgctggcgtcgtggacgcccgcgggggacccctgcggcttcgtcggggtcacctgcgacgcgtccacgggcgccgtgcagcgcctgcgcatccacggcgcggggctggcgggcacgctcgcgccctccctcgcgcgccttcccgcgctcgagtccgtctcgctcttcggcaacgccctcgcgggcggcgtcccgcccggcttccgcgcgctcgcgcccacgctccgcaagctcaacctcagccggaacgcgctcgccggcgagatcccgccgttcctcggcgccttcccgtggctccgcctgctcgacctctcctacaaccacttcgccggcgggatccccgccgggctcttcgacccctgcctccgcctccgctacgtctcgctcgcgcacaacgacctgacgggccccgtcccgcccggcattgccaactgctcgcgcctcgccggcttcgacttctcctacaaccgcctctccggcgagctcccggaccgggtctgcgcgccgccggagatgaactacatctccgtccggagcaacgcgctctctgggcaaatatccaacaagctcacctcctgcggcggcattgacctcttcgacgtcggcagcaacaacttctccggagctgcgccctttgcgctccttggctcggtaaacatcacctacttcaatgtctcctccaacgcctttgaaggcgaaatccccagcattgcgacctgcggcaccaaattctcacgcttggacgcgtccggcaaccggctcacggggccggtgccggagagcgtcgtgaattgccgcggcctgaggtttttggatttgggggcgaatgctcttggtggagctgtacctcctgtgattgggactctgcggtcgctctccttcctccggctcgcgggcaatcctggcatttccggttcgattccacctgagcttggagggatcgagatgcttgtcacactcgacctcgcgggccttgctctcacaggagagattccagggtccctcagccagtgccgattcttgcttgaactgaatctgtccggcaacaaactgcaaggagctatcccagacacactcaacaacataacctacctcaaggtgcttgatctccacaggaaccagcttgatgggggcattccagtcacacttgggcagctcacaaaccttgttcttctagacctctcggagaatcaactgactggggcaatacctccacagcttgggaacctctctaacctgacacatttcaacatgtccttcaataacctatctggcatgattcctcctgagccagtcttgcagaaatttgattacactgcctacatgggcaaccagtttctatgtggctctccattgcccaataactgtgggaccgggatgaagcaccgcaaacgagtgggtgtgcctgtcataatcgccattgttgctgcagccctcatacttattggaatatgcattgtttgtgctttaaacatcaaggcttatacgcgtaagagcacagatgaggacatgaaggaagaggaagaggttcttgtgtctgagagtactcctccaattgcatctccaggctcaaatgccatcatcggaaaattggtgcttttcagcaagagcttgccatcaaggtacgaagattgggaaactggaactaaggcgctacttgataaagactgtctcattggcggtggatcaatcggtacggtgtacaaggccacttttgaaaacggcatgtccattgctgtgaagaaactggagacactagggagcgtgagaggccaggatgagtttgagcatgagatgagccagcttggtaacctcagccaccccaatctggttgcttttcagggttactactggtcatcctcaatgcagttgcttctgtcggaatttgtggccagcgggagcttgtatgaccacctccacggtagccatcctcatgctttctctgagagcagcagcagaggtgctggaggtgaactgtcttgggaacagaggttcaacgtcgcacttggagcggcccgtgcacttgcttaccttcaccatgattgccggccacagatcctgcacctcaacatcaagtcctccaacattatgttagatgggaaatacgaagctaagctatctgactatggattggggaagctgttgccgattctaggaagcattgaattgagtagaattcacaccgcaattgggtacattgctccggagctgtcatctccgactttgagatatagcgacaagagtgatgtatttagctttggggtggttttgcttgagaccgtgacagggcggaaaccggtggacagccctggggtagctacagctgtggttctgcgtgattatgtaagagaggtattggaggatggaactgcatcggactgctttgatcgaagcctgaggggaattgttgaagctgaattggttcaagtgctcaaattaggtctggcacagcaaaggaacagttgaacaagagcagtgtgatgcaggagcagctcatctaacccacaagttctatcctacatatatcagcagtgcaggcaagatctgcagcagcacaacaaaaattccatctccaaagtccaaaccaaatatctgaaaaatggatggggagcttgaactgcccgaattcaaccctcgggaacgcgtcaagcagcagatttcagtcccgtttctctgggaggtgaagcccggtgccccgaagagggactgggtcatctcccagccagtgccagtagcgtttgcatgcccgtccccggccccgacaaagcttgttgtgagcgtgccattccagtgggaagaaaagcctgggaagcctctgcaggaagcatctcccttccatgtgctgcccccggatcacggtgccttttcagcatcttcccgctcgctgaacccgtttgtggtcgagagcgaggaggaatactcgcttggttttgagctggaagcatttggttttccagacagcagcgacgcctctggcgctgcagcgtgggcagatggctcctcctccggccgtcgtgacggctggttctcgttttcagagtcggaagactacagccactccagtggcgatacttcagcacacgacaaggagttccagtttccccgggcgccttcagagaagagctgggaggtggccaatgacgaggacaatccatggagccctccgaggagcgcggccacgacgctggaggagcttatggtgctcagccggagactgaggtgcggacaagctctgccggttgacgtcgggaagaagagactgccctccgtggagctcatgaagaagctcttcatcgtgtgttcttagctgcactgcacatggacgtgccaaaaggtacaggctgcatgtgagaccataatagaggaagcatggcaaagtggggcgttcgcaagtagaaagcctagctgtcgggtgactggagttgtaccgtcagagtcgtcaaaatgttggtcttttttttgtgtgtgaaatgaaacgttgtgcaggagagatactctggatttttgtttgtacgacaagtttgaaagaaatgttccgttgttgttgttccatctta

SEQ ID NO: 226 - DNA, 1876 bp, Zea Mays
cttccagcaatccaaaccctgggtcttctataccgtgcctcatctagtcatctcgtctcaggttgcggccgaaccagagccccgtcccaactccaccacctctcttctctacggcgcgagcaagggcggcgccggccgcggcgtcggcgggaaccgggcctcgctctccccatctctccggatatgctgttatacttacaagtggttaactgctcatactccttttatgataccatgagtaaagtttccgttccacttagcttggggaaaatcgatctagatcacttctgtcctgtgaaaatggcggatgaactacgctcaacgtctgtgggtcagaagttccatgggcagtccgtgctgttgagcagaatctcttcctattccgccatgaacaaccctgtattcaacaatgcctattctgcttacaatgtgccccagaggtcatatcatgggatgaatgcaactgctggactctcatctgtcatggcaccatctcctgtctttgcttctgccccaaaagagaaaggcttttctggatttatgatcgactttatgatgggtggagtttctgctgctgtctccaagacagctgcagctccgattgagcgtgtcaagcttttgattcagaaccaggatgaaatgctcaagactggcaggctttctgaaccgtacaagggtattggggactgctttggccggacaatcagagatgagggttttgtctcactgtggagaggaaacacagctaatgtcatccgttacttccccacacaggcattgaactttgcgttcaaggatcacttcaagcgcatgttcaactttaagaaggacaaggatgggtactggaagtggtttgctggaaatctggcttctggtggagctgctggtgcttgctctctattctttgtctattctctggactacgcccgtacgcgtttggccaatgatgccaaggctgcaaagaagggtggtgagaggcagttcaatggactcgttgatgtttaccgcaagacccttgccagtgatggtattcgtggcctctaccgtggattcaatatctcttgtgtggggatcattgtgtaccgaggtctttactttggtatgtatgattccctgaagccagtgcttcttgttggtaccctgcaggataacttcttggccagcttcttgctcgggtggggtataaccattggtgctggccttgcctcctaccccattgacactgttcgccgtcgcatgatgatgacatctggtgaggccgtcaagtacaacagctccttggacgctttcaagcagattgtcgcaaaggagggtaccaagtccctcttcaagggtgctggcgcaaacatcctccgcgctgtagctggtgctggtgtccttgctgggtacgacaagctccaggtggttgtcttcggcaagaagtacgggtctggtggtggctaaggatgtataatgatgatgacgacgaacaacaaacatgatgttttaggtgcctcctttaagtaaacatacgtacggaccctcgacaccattttaagttcgctctcgcagaggctggtgagtttgtagcgtggctgtgaccgcacctctttttatgtcagagattggaaataagtgacgttagaaattgctgtcttgctgcatcagttttttatactccgttttttgttttgcgcgtgcaaagggttgctcgaatgtatctatgtaggtttcggaatcacagcttactatgtttgatgaaggtgtatgttctgtgacctttggcagcatcacttcatctgtctagcgctacatgattttaaggatcatctggtattattacggtaacactcgatgtttgatgggggtagtgaatgctcatatgagtgggttcgag

SEQ ID NO: 227 - DNA, 1631 bp, Zea Mays
gtgcaactactttaagtgcatctaggagtattcatatcacttctgtcctgtgaaaatggcggatgaactacgctcaacgtctgtgggtcagaagttccatgggcagtccgtgctgttgagcagaatctcttcctattccgccatgaacaaccctgtattcaacaatgcctattctgcttacaatgtgccccagaggtcatatcatgggatgaatgcaactgctggactctcatctgtcatggcaccatctcctgtctttgcttctgccccaaaagagaaaggcttttctggatttatgatcgactttatgatgggtggagtttctgctgctgtctccaagacagctgcagctccgattgagcgtgtcaagcttttgattcagaaccaggatgaaatgctcaagactggcaggctttctgaaccgtacaagggtattggggactgctttggccggacaatcagagatgagggttttgtctcactgtggagaggaaacacagctaatgtcatccgttacttccccacacaggcattgaactttgcgttcaaggatcacttcaagcgcatgttcaactttaagaaggacaaggatgggtactggaagtggtttgctggaaatctggcttctggtggagctgctggtgcttgctctctattctttgtctattctctggactacgcccgtacgcgtttggccaatgatgccaaggctgcaaagaagggtggtgagaggcagttcaatggactcgttgatgtttaccgcaagacccttgccagtgatggtattcgtggcctctaccgtggattcaatatctcttgtgtggggatcattgtgtaccgaggtctttactttggtatgtatgattccctgaagccagtgcttcttgttggtaccctgcaggataacttcttggccagcttcttgctcgggtggggtataaccattggtgctggccttgcctcctaccccattgacactgttcgccgtcgcatgatgatgacatctggtgaggccgtcaagtacaacagctccttggacgctttcaagcagattgtcgcaaaggagggtaccaagtccctcttcaagggtgctggcgcaaacatcctccgcgctgtagctggtgctggtgtccttgctgggtacgacaagctccaggtggttgtcttcggcaagaagtacgggtctggtggtggctaaggatgtataatgatgatgacgacgaacaacaaacatgatgttttaggtgcctcctttaagtaaacatacgtacggaccctcgacaccattttaagttcgctctcgcagaggctggtgagtttgtagcgtggctgtgaccgcacctctttttatgtcagagattggaaataagtgacgttagaaattgctgtcttgctgcatcagttttttatactccgttttttgttttgcgcgtgcaaagggttgctcgaatgtatctatgtaggtttcggaatcacagcttactatgtttgatgaaggtgtatgttctgtgacctttggcagcatcacttcatctgtctagcgctacatgattttaaggatcatctggtattattacggtaacactcgatgtttgatgggggtagtgaatgctcatatgagtgggttcgag

SEQ ID NO: 228 - DNA, 1472 bp, Zea Mays
caccaatttaaaaaacccaataatataatgatgtgcaagctcttttgtgtattccagaaaaaatgtagcaaccaagatgatggatgctaacttaaaaaattgtagattttttacttaaataaccttttgtattatgaaagataccttttgggacaatttacttttaggtaattaacattattttacttattggtttctatgctggaactaatgtgtaagtttttcataatgctgactatagttgaacatcatgaactaatgctgtgtgtcttcgtgcagcctcgtctgtttgttggtagggggatgcatgaaagtgctttctcacttttcatgtacaccatgttctggattgctcttctcttgataaagtttgcatttagctactacgtggagatcaaacctcttgttgaacccaccaaggttatcatgaagacccccatacatacgtttcggtggcatgaatttttcccaagagaaaagagcaatatcggtgttgttattgcaatttgggctccaatcattctggtatatttcatggatacacaaatttggtatacaatcttctccactctacttggtggaatttacggtgctttccaacggctcggagagattcgtactctggggatgctgcgatctcgctttgattcaatacctttagcctttaactcgtgcctaattcctgttgaaacatctgatgcaaaaaggaagaaaggtctgaggtcttacttacacaatcgtttcaaagagatggaacatgctgacaaggagaatatagcagcaaggttcgcacaaatgtggaatgaaattgtcaccagctttcgagatgaagatcttatagacaatagggagaaggagctgctacttgttccttatgtgtctgatcggacccttggtgtcgtgcagtggcctccatttttgcttgccagcaagatcccgatagcagttgacatggctaaagatagcaatggcaaagaccgagatctgagaaagaggcttgacaatgattattattttaagtgtgcaattgaggaatgttatgcatcatttaagaatatcatcaatggccttgtacagggtgaaccagagaaaagggtcataaataagatatttgtagaagttgaaaaatgcatctctgaggacaaagttattgcagatttgaacatgcgggccctgccagatctctacttcaagtttgttgagttggtaaactacttggagaagaatgaccacccaaacctacctagaaattacatgagaccaagatatgctggacaatatcattagcttggtcacaaagagggcaaacagtagggtgtggcaagccacgcttcgcaagatgttcttttgtccagcatctatctattattctctgcaagagcttttccaaatctgcttccatggtgcaaatctagtaccgatgaaaaagcatcatgcgaacgctcttgcagtgcgatggatgtgactcccga

SEQ ID NO: 229 - DNA, 1196 bp, Zea Mays
gtaagtttttcataatgctgactatagttgaacatcatgaactaatgctgtgtgtcttcgtgcagcctcgtctgtttgttggtagggggatgcatgaaagtgctttctcacttttcatgtacaccatgttctggattgctcttctcttgataaagtttgcatttagctactacgtggagatcaaacctcttgttgaacccaccaaggttatcatgaagacccccatacatacgtttcggtggcatgaatttttcccaagagaaaagagcaatatcggtgttgttattgcaatttgggctccaatcattctggtatatttcatggatacacaaatttggtatacaatcttctccactctacttggtggaatttacggtgctttccaacggctcggagagattcgtactctggggatgctgcgatctcgctttgattcaatacctttagcctttaactcgtgcctaattcctgttgaaacatctgatgcaaaaaggaagaaaggtctgaggtcttacttacacaatcgtttcaaagagatggaacatgctgacaaggagaatatagcagcaaggttcgcacaaatgtggaatgaaattgtcaccagctttcgagatgaagatcttatagacaatagggagaaggagctgctacttgttccttatgtgtctgatcggacccttggtgtcgtgcagtggcctccatttttgcttgccagcaagatcccgatagcagttgacatggctaaagatagcaatggcaaagaccgagatctgagaaagaggcttgacaatgattattattttaagtgtgcaattgaggaatgttatgcatcatttaagaatatcatcaatggccttgtacagggtgaaccagagaaaagatttgaacatgcgggccctgccagatctctacttcaagtttgttgagttggtaaactacttggagaagaatgaccacccaaacctacctagaaattacatgagaccaagatatgctggacaatatcattagcttggtcacaaagagggcaaacagtagggtgtggcaagccacgcttcgcaagatgttcttttgtccagcatctatctattattctctgcaagagcttttccaaatctgcttccatggtgcaaatctagtaccgatgaaaaagcatcatgcgaacgctcttgcagtgcgatggatgtgactcccga

SEQ ID NO: 230 - DNA, 358 bp, Zea Mays
tgccatccctagacagaacacagagtatggaattgtccattgcgtataacctaagcagttcccagccatatacagtaaacctttgtgaagtgagtggcagaaacactattctagcactaacatatcagtacagttttcttaagaaatggagcgcgtaagcagcaatttttcaaaaggggtgaacatatctaatccgttatttcagattgtttcagcagcgccaacaccaaatcggtcccgttttattctctagtgcctatctggaaaactgcgtccctaggtaactgaatccaatcgtgcaatcgggtttacagggcagattgcaacagctaaaatcaagcaaggcgagaaaaattcc

SEQ ID NO: 231 - DNA, 354 bp, Zea Mays
cgcacctgcagccacggagggcgacgccgggggcgggggctcggtgcggggcctcggatgtagcgaaggcgctcggctgaagccggcgaggacagggccggagtgtcgggagagacggaagagtggcgatgaggtgagcggagatggcgaccatggcgaagagacgaggggaatggaggagataggagagcactggccgcagaaatggatctgttgctgcggtttgtcagtttgctgtggtggcctctagctgtagccactgaaagatgtgcagtacctgagtgacctgatttcctcctgtttcagttcaggagatgtataatttatttcatgtgatcattgatgagttaacat

SEQ ID NO: 232 - DNA, 3453 bp, Zea Mays
cgacacctgtaaattccaaaaccacacgccgaaaaaattcctggaactgaaagcaagcttgcttgtgtaaagaaaaggacgctcttctcttctgcgactgggggtaattagcaagcaattacaaaaaccgcttgagcgtacgccttgtagtagcatttcttcaggcactccggacggcagtctggcacagcttccttgaagagtttgaaatcctcagagtcgcacaagacacaagcgtacgaagatctactaggccttattcggttatctctcaatccatgtggattgagttggattgggtgggtttaaatcccaaacaagtcaaagttcttctaaattttttccaatcccgtccaatccatatataatgggaataaccgaacaagaccctacagagaagaaaatacagatacaaccggctgaagtttgaccttctagattggaagggatcaaaaccaattgcaagatttggcttctcgccgcccgtctgggtctttctcgtgcgtttcgcctttggtttcgccgatttggtgccggattcggtgggttgcggccgagtagcctggatctcgggcgcgggtctagcgctaggagccctcacactggggatttcctgccggaggaagcttttcaagggagctagcagctagtagctagctgcctttgggagcagtagctcttctagtctctgaaggtttcaccatacgcggtggagagcgctattagcttgaggagtagatttcgtgtagcggtgagcaaagtttgggtgtcaagtctggtggtggaagccttcaggcttgagattttctccaaggagcacgccgtctctggaaggaatttcctgccatcccagaggctgccgatttcctccctcccgggaagcaagcaagggctttcttctagacgagctcttctggttccttaagtttgtgggccgtggctatttaatctccaactgcatccccagatattcaccaaattctgtgagactgggaactccgggattggtttggataaggtgttctgggaatggggaaccaatgcccaaacgggacccttgggagtgactactacaaccgcccgacgtccaggttcgctgatggttgtcttgaggacgatcgctactctgacttgaagaagtttgacaagccatggcctgaggtgaactcgtttaagcccactgctgttggtattttgaagaggggattggatccaacgtcaatcactgtccttgaaaggaagacggccgacataagggaacattatatcattggtcggaggcttggtcaaggccagtttggcacaacattcctctgcaccgagatcagtacagggtgtgagtatgcatgcaagacaatcccaaagcgaaagctcatcaccaaggaggatgttgaggatgtgcgccgtgagatccagataatgcaccatttgtcaggccacaagaatgttgtttccatcaaggatgtatacgaggatgggcaggcggtgtatattgtgatggagctctgcgccggtggggagctctttgatcgaattcaggagaaagggcattatagcgaacagaaggctgcagagctcataagaatcattattagccttgtggctatgtgccattcacttggggttatgcaccgtgatctaaagccagaaaacttcctcctttgggataaagaagatgacctgtcaataaaagcaatcgattttggtctatctgtgttcttcaaaccaggtcaggttttcactgagctggttggaagtccatactacgttgctcctgaggtactacacaaacggtatggaccagaagcggatgtgtggtcagctggagtgatactgtatgttttgcttagtggggtgccacctttttgggcagagacgcaacaaggtatatttgatgctgtcttgaaggggcacattgattttgactcggacccatggcctaagatatctgaaagcgcaaagaatctcataaggaagatgctctgcccttgtccttcagagcgtctgaaagcccatgaagtactacgccatccttggatctgtgaaaatggagtggctactgatcaggctcttgatcccggtgttctctctcgtctcaaacaattctccacaatgaacaaattaaagaagttggctctgagagtgatagctgaacgactttctgaggaggagattgctgggttaagacaaatgttcaaggcagttgacgttcaaaatagaggcgtaattacttttggtgaacttagacaaggtttaaaaagatatggtagcgaattggagaatagagaaattagtgatataatggaagtggctgataatgacaataatgtgaccatcaattatgaagaatttatcgctgcaactgtgcctcttaacaaaatagaacgtgaggagcacctgatggcagcttttacctacttcgacaaagatggaagtggttatatcacagttgacaagctgcaacgagcttgtggagaacatgacatggatgacactttccttgaagagataattttagaagttgaccaaaacaatgacggtcagattgactacgccgaattcgtagccatgatgcaaggcagcaaagttggacttgggtggcaacaaatggaaaccactctgaatgtaaccttgagagatgcacctcaagtacactgtcactgatgcgctcgccatgtacagattttgttctcttctcgtgttcatcgtttctccacacgacctgagagttccggtcgacatgacatgtatcacgaggagagagcaaatcaatcgattcatttagtggtatttatcccaaataaagtgtgggctggcaggcagaatatggtttgtcatgagagacactagtatgggtttatatgtataaatatatagcagtggtggtatattggtttatgtagcgggtgatcctgtcaagcgatccaatcgaaataccaaaagtgcgttcagtttgcccgttttgttacgggtttcatgaagatgaatgtgattatgttttctcatgtcgagatttgcacttccttaaaacgcagcagatttaccaattcttttttacctgtcagtgtcagtgccgtataaacgatcgttttgtgcttacgctctacgcctgcaggcgcatgttctggcagccgctgtctttgcagtctgggctccatgagccagaccagtttggcagttgctaggcacgcagcgggaaaccagtttgcaaagcagccgtagcagggaaaggcagagccgggtgcatgaaacggccaaatgaacagaaatgttgcaatcgtctaaatgatgattgttaaggcgaagagtgttgaggttagacggccaagcagtcgttgtaccttcgattcgaagataccaaattgagttggctcatcgagcagcgcgttttgttctctgttggatcgggtatggccaattggccccgaagtcaagtggtctccgacacccggc

SEQ ID NO: 233 - DNA, 3521 bp, Zea Mays
attagcaagcaattacaaaaaccgcttgagcgtacgccttgtagtagcatttcttcaggcactccggacggcagtctggcacagcttccttgaagagtttgaaatcctcagagtcgcacaagacacaagcgtacgaagatctactaggccttattcggttatctctcaatccatgtggattgagttggattgggtgggtttaaatcccaaacaagtcaaagttcttctaaattttttccaatcccgtccaatccatatataatgggaataaccgaacaagaccctacagagaagaaaatacagatacaaccggctgaagtttgaccttctagattggaagggatcaaaaccaattgcaagcccctcaggaagctcggatttcggccccgctccggcggaccgcttccgttcgtgctctgctccgaccgagcgcgccgcgccgtggggggcagctgcgaggactctcgttcggcggctctggttctcggcttggtcccgtttcttccccaacaaatctcgtaatttttcgtccagatttggcttctcgccgcccgtctgggtctttctcgtgcgtttcgcctttggtttcgccgatttggtgccggattcggtgggttgcggccgagtagcctggatctcgggcgcgggtctagcgctaggagccctcacactggggatttcctgccggaggaagcttttcaagggagctagcagctagtagctagctgcctttgggagcagtagctcttctagtctctgaaggtttcaccatacgcggtggagagcgctattagcttgaggagtagatttcgtgtagcggtgagcaaagtttgggtgtcaagtctggtggtggaagccttcaggcttgagattttctccaaggagcacgccgtctctggaaggaatttcctgccatcccagaggctgccgatttcctccctcccgggaagcaagcaagggctttcttctagacgagctcttctggttccttaagtttgtgggccgtggctatttaatctccaactgcatccccagatattcaccaaattctgtgagactgggaactccgggattggtttggataaggtgttctgggaatggggaaccaatgcccaaacgggacccttgggagtgactactacaaccgcccgacgtccaggttcgctgatggttgtcttgaggacgatcgctactctgacttgaagaagtttgacaagccatggcctgaggtgaactcgtttaagcccactgctgttggtattttgaagaggggattggatccaacgtcaatcactgtccttgaaaggaagacggccgacataagggaacattatatcattggtcggaggcttggtcaaggccagtttggcacaacattcctctgcaccgagatcagtacagggtgtgagtatgcatgcaagacaatcccaaagcgaaagctcatcaccaaggaggatgttgaggatgtgcgccgtgagatccagataatgcaccatttgtcaggccacaagaatgttgtttccatcaaggatgtatacgaggatgggcaggcggtgtatattgtgatggagctctgcgccggtggggagctctttgatcgaattcaggagaaagggcattatagcgaacagaaggctgcagagctcataagaatcattattagccttgtggctatgtgccattcacttggggttatgcaccgtgatctaaagccagaaaacttcctcctttgggataaagaagatgacctgtcaataaaagcaatcgattttggtctatctgtgttcttcaaaccaggtcaggttttcactgagctggttggaagtccatactacgttgctcctgaggtactacacaaacggtatggaccagaagcggatgtgtggtcagctggagtgatactgtatgttttgcttagtggggtgccacctttttgggcagagacgcaacaaggtatatttgatgctgtcttgaaggggcacattgattttgactcggacccatggcctaagatatctgaaagcgcaaagaatctcataaggaagatgctctgcccttgtccttcagagcgtctgaaagcccatgaagtactacgccatccttggatctgtgaaaatggagtggctactgatcaggctcttgatcccggtgttctctctcgtctcaaacaattctccacaatgaacaaattaaagaagttggctctgagagtgatagctgaacgactttctgaggaggagattgctgggttaagacaaatgttcaaggcagttgacgttcaaaatagaggcgtaattacttttggtgaacttagacaaggtttaaaaagatatggtagcgaattggagaatagagaaattagtgatataatggaagtggctgataatgacaataatgtgaccatcaattatgaagaatttatcgctgcaactgtgcctcttaacaaaatagaacgtgaggagcacctgatggcagcttttacctacttcgacaaagatggaagtggttatatcacagttgacaagctgcaacgagcttgtggagaacatgacatggatgacactttccttgaagagataattttagaagttgaccaaaacaatgacggtcagattgactacgccgaattcgtagccatgatgcaaggcagcaaagttggacttgggtggcaacaaatggaaaccactctgaatgtaaccttgagagatgcacctcaagtacactgtcactgatgcgctcgccatgtacagattttgttctcttctcgtgttcatcgtttctccacacgacctgagagttccggtcgacatgacatgtatcacgaggagagagcaaatcaatcgattcatttagtggtatttatcccaaataaagtgtgggctggcaggcagaatatggtttgtcatgagagacactagtatgggtttatatgtataaatatatagcagtggtggtatattggtttatgtagcgggtgatcctgtcaagcgatccaatcgaaataccaaaagtgcgttcagtttgcccgttttgttacgggtttcatgaagatgaatgtgattatgttttctcatgtcgagatttgcacttccttaaaacgcagcagatttaccaattcttttttacctgtcagtgtcagtgccgtataaacgatcgttttgtgcttacgctctacgcctgcaggcgcatgttctggcagccgctgtctttgcagtctgggctccatgagccagaccagtttggcagttgctaggcacgcagcgggaaaccagtttgcaaagcagccgtagcagggaaaggcagagccgggtgcatgaaacggccaaatgaacagaaatgttgcaatcgtctaaatgatgattgttaaggcgaagagtgttgaggttagacggccaagcagtcgttgtaccttcgattcgaagataccaaattgagttggctcatcgagcagcgcgttttgttctctgttggatcgggtatggccaattggccccgaagtcaagtggtctccgacacccggc

SEQ ID NO: 234 - DNA, 3655 bp, Zea Mays
tataatgggaataaccgaacaagaccctacagagaagaaaatacagatacaaccggctgaagtttgaccttctagattggaagggatcaaaaccaattgcaaggtgagacaaatctaacttcgatttgttctagactagttaaagtgataaacaaaccacgaccgttttacaagacctgtccgtgcctgtcgccgaacacgaaaacagccagccaccgcccaccacagagcaaatcgtttttgactcgtcggagccggctcgccgcccgccgagcgctgccctgccgaccgctgcggcttctgtcggtgtgcaaatactccgagactccgggtgccccgccgcaaaaacgtccccacgcagctgcgtcgcacctaacccgccccgccccgcccgcctataaaagccggctcgccccctcccgctcctctcttctcccccatctccatttttctcctcccactgattttgcattttagcccctcaggaagctcggatttcggccccgctccggcggaccgcttccgttcgtgctctgctccgaccgagcgcgccgcgccgtggggggcagctgcgaggactctcgttcggcggctctggttctcggcttggtcccgtttcttccccaacaaatctcgtaatttttcgtccagatttggcttctcgccgcccgtctgggtctttctcgtgcgtttcgcctttggtttcgccgatttggtgccggattcggtgggttgcggccgagtagcctggatctcgggcgcgggtctagcgctaggagccctcacactggggatttcctgccggaggaagcttttcaagggagctagcagctagtagctagctgcctttgggagcagtagctcttctagtctctgaaggtttcaccatacgcggtggagagcgctattagcttgaggagtagatttcgtgtagcggtgagcaaagtttgggtgtcaagtctggtggtggaagccttcaggcttgagattttctccaaggagcacgccgtctctggaaggaatttcctgccatcccagaggctgccgatttcctccctcccgggaagcaagcaagggctttcttctagacgagctcttctggttccttaagtttgtgggccgtggctatttaatctccaactgcatccccagatattcaccaaattctgtgagactgggaactccgggattggtttggataaggtgttctgggaatggggaaccaatgcccaaacgggacccttgggagtgactactacaaccgcccgacgtccaggttcgctgatggttgtcttgaggacgatcgctactctgacttgaagaagtttgacaagccatggcctgaggtgaactcgtttaagcccactgctgttggtattttgaagaggggattggatccaacgtcaatcactgtccttgaaaggaagacggccgacataagggaacattatatcattggtcggaggcttggtcaaggccagtttggcacaacattcctctgcaccgagatcagtacagggtgtgagtatgcatgcaagacaatcccaaagcgaaagctcatcaccaaggaggatgttgaggatgtgcgccgtgagatccagataatgcaccatttgtcaggccacaagaatgttgtttccatcaaggatgtatacgaggatgggcaggcggtgtatattgtgatggagctctgcgccggtggggagctctttgatcgaattcaggagaaagggcattatagcgaacagaaggctgcagagctcataagaatcattattagccttgtggctatgtgccattcacttggggttatgcaccgtgatctaaagccagaaaacttcctcctttgggataaagaagatgacctgtcaataaaagcaatcgattttggtctatctgtgttcttcaaaccaggtcaggttttcactgagctggttggaagtccatactacgttgctcctgaggtactacacaaacggtatggaccagaagcggatgtgtggtcagctggagtgatactgtatgttttgcttagtggggtgccacctttttgggcaggttacttctatactcagagacgcaacaaggtatatttgatgctgtcttgaaggggcacattgattttgactcggacccatggcctaagatatctgaaagcgcaaagaatctcataaggaagatgctctgcccttgtccttcagagcgtctgaaagcccatgaagtactacgccatccttggatctgtgaaaatggagtggctactgatcaggctcttgatcccggtgttctctctcgtctcaaacaattctccacaatgaacaaattaaagaagttggctctgagagtgatagctgaacgactttctgaggaggagattgctgggttaagacaaatgttcaaggcagttgacgttcaaaatagaggcgtaattacttttggtgaacttagacaaggtttaaaaagatatggtagcgaattggagaatagagaaattagtgatataatggaagtggctgataatgacaataatgtgaccatcaattatgaagaatttatcgctgcaactgtgcctcttaacaaaatagaacgtgaggagcacctgatggcagcttttacctacttcgacaaagatggaagtggttatatcacagttgacaagctgcaacgagcttgtggagaacatgacatggatgacactttccttgaagagataattttagaagttgaccaaaacaatgacggtcagattgactacgccgaattcgtagccatgatgcaaggcagcaaagttggacttgggtggcaacaaatggaaaccactctgaatgtaaccttgagagatgcacctcaagtacactgtcactgatgcgctcgccatgtacagattttgttctcttctcgtgttcatcgtttctccacacgacctgagagttccggtcgacatgacatgtatcacgaggagagagcaaatcaatcgattcatttagtggtatttatcccaaataaagtgtgggctggcaggcagaatatggtttgtcatgagagacactagtatgggtttatatgtataaatatatagcagtggtggtatattggtttatgtagcgggtgatcctgtcaagcgatccaatcgaaataccaaaagtgcgttcagtttgcccgttttgttacgggtttcatgaagatgaatgtgattatgttttctcatgtcgagatttgcacttccttaaaacgcagcagatttaccaattcttttttacctgtcagtgtcagtgccgtataaacgatcgttttgtgcttacgctctacgcctgcaggcgcatgttctggcagccgctgtctttgcagtctgggctccatgagccagaccagtttggcagttgctaggcacgcagcgggaaaccagtttgcaaagcagccgtagcagggaaaggcagagccgggtgcatgaaacggccaaatgaacagaaatgttgcaatcgtctaaatgatgattgttaaggcgaagagtgttgaggttagacggccaagcagtcgttgtaccttcgattcgaagataccaaattgagttggctcatcgagcagcgcgttttgttctctgttggatcgggtatggccaattggccccgaagtcaagtggtctccgacacccggc

SEQ ID NO: 235 - DNA, 988 bp, Zea Mays
gccttttttttccctacagactccagtccactgcgcaaactccaccagttgctttgctcgaaaggcggatgcgcgctatgcgcgcggaggccaccgagagcagcgccttaaccgccggggctgcgcatttgctctgctttgcaggcctcgctgccgcccacaccctcgctggccgcggcgcgctcgtctcagaccccgcgctcgccctccgccttctcgtggtctgtgaagcgcccatagtcatcgccgtgttcagctacctccggcgtgatgccaaaagctgctcgattttcaaagctgttgcgagaggattgatctgcttgcccgtgggagcattccttaatgcatttggagcaatcgttcttggtgcacctgttggaatcaaatactggatacctactatatattggtcactcctcatgtccctgttcacgtttgttccagcagcatgtgtctttggagcatccaagattgattggcaaaatgtgctttctcactccatttatttcatgccaaatgatgttgagaactacatgatctctgcaccttgtcatggagctgtgctaggagcatggctcggtggttggcctatgccccttgactgggagaggccctggcaggaatggccaatctgtgtctcttatggtgccgttgctgggtatttggttggaatggcagtgtcagtggtcctagtagctgttcacaatagaagggttcgtgcaaaagctgactagcctgtggtcctgtggatgatgagtgcagctgtcctaatagctgttcacaagaacaatgtatttgctgataacctatcttgttagtggacggacaggcagatagagggagttgctctaagaaaactaaagagacgaagacgatggcgtcaacacttacaacgagcgggacaaaagagatccagacaagcgtgccgaatcctgcgcacataattaatgatggtggttattacaagaccaataataactcaataaag

SEQ ID NO: 236 - DNA, 960 bp, Zea Mays
gccttttttttccctacagactccagtccactgcgcaaactccaccagttgctttgctcgaaaggcggatgcgcgctatgcgcgcggaggccaccgagagcagcgccttaaccgccggggctgcgcatttgctctgctttgcaggcctcgctgccgcccacaccctcgctggccgcggcgcgctcgtctcagaccccgcgctcgccctccgccttctcgtggtctgtgaagcgcccatagtcatcgccgtgttcagctacctccggcgtgatgccaaaagctgctcgattttcaaagctgttgcgagaggattgatctgcttgcccgtgggagcattccttaatgcatttggagcaatcgttcttggtgcacctgttggaatcaaatactggatacctactatatattggtcactcctcatgtccctgttcacgtttgttccagcagcatgtgtctttggagcatccaagattgattggcaaaatgtgctttctcactccatttatttcatgccaaatgatgttgagaactacatgatctctgcaccttgtcatggagctgtgctaggagcatggctcggtggttggcctatgccccttgactgggagaggccctggcaggaatggccaatctgtgtctcttatggtgccgttgctgggtatttggttggaatggcagtgtcagtggtcctagtagctgttcacaatagaagggttcgtgcaaaagctgactagcctgtggtcctgtggatgatgagtgcagctgtcctaatagctgttcacaagaacaatggacggacaggcagatagagggagttgctctaagaaaactaaagagacgaagacgatggcgtcaacacttacaacgagcgggacaaaagagatccagacaagcgtgccgaatcctgcgcacataattaatgatggtggttattacaagaccaataataactcaataaag

SEQ ID NO: 237 - DNA, 765 bp, Zea Mays
cactgacctcgccgccgccggtgccggtctgtgaagcgcccatagtcatcgccgtgttcagctacctccggcgtgatgccaaaagctgctcgattttcaaagctgttgcgagaggattgatctgcttgcccgtgggagcattccttaatgcatttggagcaatcgttcttggtgcacctgttggaatcaaatactggatacctactatatattggtcactcctcatgtccctgttcacgtttgttccagcagcatgtgtctttggagcatccaagattgattggcaaaatgtgctttctcactccatttatttcatgccaaatgatgttgagaactacatgatctctgcaccttgtcatggagctgtgctaggagcatggctcggtggttggcctatgccccttgactgggagaggccctggcaggaatggccaatctgtgtctcttatggtgccgttgctgggtatttggttggaatggcagtgtcagtggtcctagtagctgttcacaatagaagggttcgtgcaaaagctgactagcctgtggtcctgtggatgatgagtgcagctgtcctaatagctgttcacaagaacaatggacggacaggcagatagagggagttgctctaagaaaactaaagagacgaagacgatggcgtcaacacttacaacgagcgggacaaaagagatccagacaagcgtgccgaatcctgcgcacataattaatgatggtggttattacaagaccaataataactcaataaag

SEQ ID NO: 238 - DNA, 668 bp, Zea Mays
ataccatacgtacatacgagacgtgagaggcgaagaggacgcacaggggaggggagggcaaccaccaccagctaccagctcagctgtgagtgagagatgcaggctgcatgacaccgatagatgagaagcaggggaggacggccaccagctgtgcgtcttcagcttcttgcgctcgactggcccccgacgtcgcccacaggtcccctgggctgcttcttgttgttgttctccggagcgaggttgtccgccgcagctctctttggcctcagctacagttcaggacagggttttaacctttatcggtgatgtggttttatgtagccgtgcgtgatagtgaagtcttactagcagtagcagtagctgctcaccttctcctcggatttctggtacaagtgcctcagcaggatgttcctggcctccgtggttatcactgcaattccagggcgcgattcagtccgcagtagtctgtaggaagcagtcattgatcctcaagtactgtgaactatggacctatatacatatataaaataatgcagtggtatgataggtacaaggaaatttggaagagagagagagagagagagagagagagagagaagaattgtcatgcatgtatatagttaaaagaatgcccacggtttgttcagtacatttatctgctatacaaa

SEQ ID NO: 239 - DNA, 4439 bp, Zea Mays
gtctccctcaggctgcagtacagctcaagaacgctagtagtaccaccgtcgtctccctcaggctgcagtacactcagaaacctcacgagcatggatggagtacacactggccgccgcgctcttcccagttcccgtgtagtacactagtacgtacttcagcagctagtagtaccaccactgaagcgagcgagcgagcacagactgaatcggtactactacgtacaccattgctcgcccgcctacaaataagtcacgagtgatgagtggcctgcaaagccatggcaggttgagcatctcctctagttctgggattagggataggaatcagggtcagtttgctctgctggctagtagcagcagcggtggaaggggcatgcagaggaggagcacgagcgaggtgtggctggaagaagcagccggggcctgtgtgctatatacccctcgcaagctctcctcactcctctcctgtgcctgcctcttccattccttctgctacgccattatatgtttgcaagcgtcagaagtgcatgcttctgcgcagttgccctgtgatgaggcaaccaacagccaaacatcgctggcattccattccacacagctctactgcattgtgctagtactaaaagtttctcaggctctgcgtttggtttgcttgagatttttggaatctgcctttggtttaattgctagattctacagattcaattacatacaagcacattacccctaggcatagtagtatctacatgcgtttggttcattatgagatatttttatccggattctaaaaaccccatgaaaaccaaacagactttcagtcacttctgaatctcactctctgctatgttagcaccacggatgctgagtgtcgctcctgaaatggaggcatctttccttgcgcgtgatcatgcataggcgcatagctgtgggtgtgaaagttcagagggcaggaagcgtcataccccttcaggggccgcgggttccgtgttaatataggcgcccattgcgcaaggataacatcagatgtaacaaccttcccttgacccggttacatgagagtaaatctagctaacagctaacaaacaatctatatccgtagctagaggttgttacaaggagttcgggatatacattaaataatatgactattctaatagcctccctcaatcacagccgtcggaggttgagattgactttaaagttctccagcagtttgaccgataatgccttagtgaaaccgtctgcaatttgtccttgggaggaaacaaaatcaatttctagtagcttttgtagaactctttctcttacaaagtgataatccacctcaatgtgcttggttcttgcatgaaagataggattggctgataaatattttgctcccatgttatcacaccagagtttagctgttctcggactgctaatatttagttctttgagtaaaatttgtacccacataatttcagctgtggcattagcaatagccttatattctgactccgtacttgatctagatactgtgggttgcttacgagcactccaagaaataagattagatcctagaaacactgcaaaacctccggttgatcttctatcatcaatgctaccagcccagtctgcatcagaaaatgcgcttaccaaagttgagggtgatttgtgtatatgcagacccaactttgtgcactgtttgatatacctgaggattctctttactgctgcccagtgaacagttgtaggggcatgaaggaactgacataccttattaacagagaatgcaatgtcaggcctagtgagtgttaagtattgtaaagccccaacaatacttctgtattgtgtggcgtcattgctccccaacaatgacccttcatgcagggatagcttttcactagtggacaatggtgagctagctggtttgcagtttgacattcctaccttttttaataaatctgaagcatatctctcttgagtaagaataatcccatcatgtaccttgttcacttctatgcccaagaaataatgtagatcaccaagatctttgagtgcaaattctccttttaaatctcttagcagtgctgcggttgctgcttatgtagagcttgcaacaattatatcatcaacataaacaagcacaaatactgtagtgttacccttgttatagaaaaataaagatgaatcagcttttgatggtgagaaaccgaggttcaccagcttggaacttaggcgagagtaccatgctcttggtgcttgtttgagtccatataatgctttatcaagcttacacacatattgtttcttttctggatcctcaaaacctggtggttgttgcatgtagacttcttcttcaagaaaaccatgaaggaaggcattttgaacatcaagttgtcgaaggctccaacctcgagagatagccatagatagaataatacgtattgtagtagctttaatgactggactaaatgtgtcttcataatctattccatattgttgcttaaaaccttttgcaactaggcgagctttatatctatctaagcttccatcagccttccttttaattttatatacccatttacaacctatcacatttgtgcctttttttggtggaactagatgccatgtttcgttattcatcagagcagcatattccagatccatagcattcttccaatgagaattactaagtgcttcatcaagacattgtggctcaccagaggacgtgaagtagccatacctgattgtgccatcagtgtatattttctctttccggatgccgctccgcagtctcgtgtgtggacgtagggacgtgtcagcagtatcatcatgggcatggaccggctctggcaagaacgcggctgcttcccctgtttgctgtaaagagagtgcgtcctgtatagtcacatcagcgcctgtagtaatagggggaataggggctgtaggtgcggtacagtggagcggcacaggagcagcatgcgtggtacagtggtccggcacaggagcagcgtgcgcctgtacagtgtcccggattccctcagatgcatgcgcggtagactggtcaggttcctcccctggcgtcaaacttgcaacagtgggtagtgatccatcaattcggtgaacaggaccccctgcatattgatgtctgtgcactgcagtattctcatcagacaagttagtattaacagggagaaaatcaggaacatcagtatcacgtctattagcacctattttagtcgtgagggatggcattaagagaacttcagactgtaatctggcgccagcatttggatggagagcggagaaaggaaaaacagtctcatcaaatatgacatctctagaaatataaacacgtcctgtggagatatcgagacacttaaaacccttgtgaagaggactatagccaagaaaagcacactgctttgatctgaattgaagtttgcgagtattgtaggggcgcaaatttggccaacaggcacaaccaaaaacacgtaaagaggaataatctggtttttggtgaaaaagacgttctataggagtttgattattaatgacttgactaggtagtctattaataagatatgtggctgataggaaagcttcatcccagaatttaagaggcatagatgcatgagatagcaaggaaaggccgacttcaacaatgtggcgatgctttcgttcggctgccccattttgctggtgtgcatgagggcaagagactaaatgggagatgccaattttggtaaagaaggaatttaatttttgatattctcctccccaatctgtttgaatggcacgaatttttctatcaaattgcctttcaacaagacgttggaaatcaatgaatttctggaatacctcagattttaacttaataaggtaaatccaggtaaacttgctataatcatcaataaagctaacataatattgttttctgcccacagactcaatcgcaggaccccagacatcagaaaaaataagctccaaaggagagttcgatttactagaagaaataggatatggcagctgatgggctttcgcttgttggcaagcgttgcatacagactcattattagattcaactaaacaatggagtttatttctattaataattcgccgaactataacagatgaaggatgaccaagacgatcatgccaccgagagattgatggctggctgactccacaggcgtgacgctttattgatgatgacgaaggaagagggtacagtcctcggtgacatggtcccctaagcagcgtgtgcctagttgcttgatccttaatcaaaaagaaatctgggtgaaattctataaaggcagaattatctgtagttaagcgatggacagacacaagatttttcttggcttcaggaacatatagaatatcttttagatgaagcttacgactagaggtgctaacagaggaattaccgatgtggctgatttccatacctg

SEQ ID NO: 240 - DNA, 1291 bp, Zea Mays
atctcagtatctcactcccagtcgcctccgcacatacaaatacgcgacgggaacggccagggccgaaccctaaaaccatcgccctgcccccgcctccgcctccgcctccgctgcatcccatggcggccgtgcagcgcctcctccgggcagtcgcccccggtggctcggcagcggcggcggtcaggaggcgcatgacgtcgcttgcgccggagcaggcgccgtctgcggccgccgggttcccattcgcggcggagcagagagcaaggcggccggtggcggcggagaggaacgtgcagtgggtgttcctgggctgccccggcgtgggcaagggcacctacgcgagccgcctgtcgcgcctcctcggcgtgccgcacatcgcgacgggggatcttgttcgcgacgagctcgcctccaccgggccacttgctacgcaggcttaagaaaggagaagaccagggagaatcaggatttattcttgatggttttccccgtacagtaaaacaagcggaaattcttgatggcgttacagacattgatatggtggttaatctgaaactaagagaagatgttatagtagagaagtgccttggcagaaggatttgcggccaatgtggaaagaacttcaatttggcctgcattgatgttaagggtgaaaatggactcccaccaatctacatggcaccactgttgcccccaaacaactgcatgtcgaagcttattacccgagctgatgataccgaagaggtggtcagaaatcggcttcagatatataatgacatgagtcaacctgtggaaggtttctaccgagagcaggggaagctcttggaatttgacttgcctggtgggatccctgaatcttggccaaagctgctccaggttctaaacctcgaggaccaagaggagttgaggttggctgcagcgtagccgcgtaggtctctgggagaccgacctacatactgggaaaaagaccataccacattttttttgaataatggagaagaggaaacttactccatagtttagtgcgttatgcagaagtaatggttttcttgtaaaaatcgatttgttggtttccaccggcgttttgatgatgagccggtactatgtaacttacgatagctgtaagcactaagcagcccattcttgcttgggacacagtttggagcgcatgaagacatgctgtagtgtttttttttttaattcataacaaacttgtagtacacatttgtgttcatgataaaacactgaagtagtatgatactacagaacaacacagacctgatgaatgcct

SEQ ID NO: 241 - DNA, 807 bp, Zea Mays
aggaatattaacttaatttgcgggaaattcttgatggcgttacagacattgatatggtggttaatctgaaactaagagaagatgttatagtagagaagtgccttggcagaaggatttgcggccaatgtggaaagaacttcaatttggcctgcattgatgttaagggtgaaaatggactcccaccaatctacatggcaccactgttgcccccaaacaactgcatgtcgaagcttattacccgagctgatgataccgaagaggtggtcagaaatcggcttcagatatataatgacatgagtcaacctgtggaaggtttctaccgagagcaggggaagctcttggaatttgacttgcctggtgggatccctgaatcttggccaaagctgctccaggttctaaacctcgaggaccaagaggagttgaggttggctgcagcgtagccgcgtaggtctctgggagaccgacctacatactgggaaaaagaccataccacattttttttgaataatggagaagaggaaacttactccatagtttagtgcgttatgcagaagtaatggttttcttgtaaaaatcgatttgttggtttccaccggcgttttgatgatgagccggtactatgtaacttacgatagctgtaagcactaagcagcccattcttgcttgggacacagtttggagcgcatgaagacatgctgtagtgtttttttttttaattcataacaaacttgtagtacacatttgtgttcatgataaaacactgaagtagtatgatactacagaacaacacagacctgatgaatgcct

SEQ ID NO: 242 - DNA, 2802 bp, Zea Mays
gtggagttttgctggggcaactgccctaatatctttgaccatagcaacgtaagtacagcatttcctgctgctataccatatcaacgttaatatagtgaaggaaataataggttatatggcgagaagttgtttcatacatgtaaactatataaacaaagacagacttggcgtaatttacaagatacagaaaaaatgtttacaaaaacaaagatataaacccaaacctgtccactttgtgcgtgagatggactcgaaaattgcacataaggaaaatggaagaaatgtcaggtaaaaaaatccatgttacgccagagttcgctcaaagaatctaaaccttgtattgacaaatcaagacgcaagacacaaaaccctaatcagagcagagagcatatcagaacttgggtggagaccggcttcccgatgctttaaaaggtccacttgaaccgaatgggtcggcgtcatcaaaagagtcaaaccggccaaaatttcgtgagctattccctgtgtcaaatcctgatacattctcgcccttggagctgctaatggagtcgaacctggagaaacggctttcctgagggaaggatccagtgtcttgggatctgaaggaatcaaacctcccgaagttataagaggagctatcgtcacggctttcgccaaattttggagagaacccagatgtgtatgcaggagaacttggaacagaatcgtcgaagaatgaattcctcttctttccaaatacactagcgccacttggtgagcctgcctccgacccaaagaaagagttatgcgtgccaccgcgttggtcggcctccttgttcagtacagtagaaccccaaacagagtcagtatcttgatcatcaaagttccaggaagtttcatcagcaaacttgtcaccaaaaacggattcagaaccaccatggtacctgtaactttctcttttgctgggagatgagtcatgcatgccaaagccggaagatttaaatggactccctgaggcacttcttccagcactgccaggactcctcacagattcatcaccaaaatcatatgctatttcactctcagccacttgatcacctccactgtaacgcctttcttccttgatatgaccattagaggatgcaacaggagacatatcaccatcatcccaaagagatggcacttttccattttcagcagaaactgggttttcctgtattgtaccattatccttaacaatactaaaccctgtcatgtcatatgattcaataaggaatacgatgtgataaattggaaatgaaagggaaaaaattgccccaagtgtaagacacaaaattaacaatagctcatgtcatcaaaatctatgtacagtatatcacacaaacaatgttctaacaacagaaggttcactagaacagaggcgggggcttggtatgttcaatgaaaggaacctaaacaaggatatcatagcagaaaaattatctccataaatggcactaataaataatatcagctacacaaatatcaagcttagaaacagtcaaggttgcttatttcaggatatggctttgctagtatacgttaacacgtgtaaaaggtatgaaatcttttgtctctttcacagattagttactagtattgaatttcttaaaacacacagtagtaaagtcacaaatattttttaaaacagtagcatggcaaacactggattgcaaaactcagcttgcaaccatgcagagtactccgatatataaacagacaattgccagctttaaaaagtaaccagacttcagggatgcttgagtaatagcagaggagaatgcagtggaagtatttaaccttcatcttcaaatttatcccagtcttcatcccactcaatgagtccctcttgtggcccaggttcccaacctataacaaataaagacagaaattatcagcatatgcaggttacgagtctgaaggctgcaggaagtaaattaaaatggtaacatccttgttttaaaggcgacgcctaggcgtccaggcgcccgaaagatccaaggtgttcccgtcgcataggtaagaatcagcaagagggcataggggaaggggaagggggcggcgccgtttcgggagcggcggaggccaaatcggaggccaaatccagggcagcgacatctgaatcgttggcggcagcttccaaatcgtcggcggcggcggcgaatctgaggcggcgacgacgaatatgaggcggcggcggctcaatcgggggcagcagcagctgaatggtgggggagagaggcaacctaggcttgccagaggaaggactatatgggctggctggtgggctgggcctccgaacccttccttctccttttttctttttctttttttctttttcttcctcctccatggggctgttttgctgattctcaggttgataaggcgtcgccttgctcgccttaggcgtctaggcggtggtccagcgccttatctcgccttaccgccttaagaaccatggataacatgccatagcatgaagttggactctcaattataataaaataaataataatatggagatggaaagccaggtaccggaaggaagctcaactgatgcagatggtttgaatttaagttcaaagtgtttgcaccgttcactaagagctttttccatctcttctaattgatattggattcgatcagctcgaacctaggaaataacaggtgttactgagagattaaaaaataagtacctagcaaagtaacagtgtacctgaagtaaaccatcaacacttccaccttgtaccattttaatcagtgcatcatgcagctcaacttttc

SEQ ID NO: 243 - DNA, 2887 bp, Zea Mays
cgcactgacaggtgggtcgcactgccttctattccaacgaaaaaaacaaccacccacacgaccctggggcacccaccaatcgggtccggccacggcacaaacgcgcccggtcccaccccaccaaacgcgcccgcggccggccgatccgactcgcaacaacgcggggagctttatccccctctcgtttccatgtggggccctatacagaccggacccgcatgtcatgacatactgggccccaaaacagccgagcagaccgacgcaaaccgaaagaccccaggggaaaaaaataccaaacgcacgcaaagccacacgcacctcgacccgttcccaggccatcacaccaccagcaccacctcgtcccccgtacctgcctcgccgccgccgccgcctcctgccggcctccgatggcgaagacccgcaagcctccggcccctccttctccgccgccgccccccgcagaaacgccatccccgcagcggcggcgcaagaagaagggccgcccgtccctcctcgacctccagcgccgcagcctccgcctgcaggcccaaaaccctagccccgccgcctcgcccacccgccgggaccccaatccctccgacgacgatgaggacgggaccgggagcgggcggcggcggcagaagcgcctcaagagcgtcctctccggcgtcgtcaaggaggagcagggggaggggaagaaggatgcagcgaaagcgacggggaaagaggacgctgcgtcggatggtgggcccacggggactcccctcccagacaaaaagttgctactcttcatcctcgataggctccagaagaaggatacttatggagttttctcggagcctgtcgatgcagaggagcttccagattactttgacattattgaccatccaatggacttctcaacaatccgtgagaagctgttgaatgactcgtattctaagttggagcagtttgaggatgatgtgtttctactcacatcaaatgccatgtcttacaattcagctgatacaatctacttccgacaggcacggtctattgaagctcttgccaaaaaggattttgagaacctgaggcaacccagtgatgaagaggaacccaaaccaccagctcgaaggggtaggccaccgaagaatcccaagacagagggtgatgtgtcaccagacctatctaatgtgaaagcaaataaacctgaagacaatgtcgatacattcagaaaaaggtcaactggagacagaactcgaaatacaaataccccaatgaaagatctgtccagttttcacgatacgtttggttcttttagtgcaaaaagaacagataaaattggtgattattctggttcatcgaagtggggaaagaaacctgttagtctagatgacgaccgcaggagtacatatgatcagcactattcacgtaatagctctctgtttgctgccctggatgatgagaggaaactactggtgccagtaggggttcagcagccacatgcatatgctaggagcttggcacgatttgcatcaaaattgggcccagttggctgggatgtggcagcaaatcgtatcagaagggcactcccccctgggacaagtttcggcccaggatgggttgtagatggtgaaccacctcaaaactctcagtgggctcctgcagcatcgactaatccctcctctgagcccactgctccacccaatatgccatccaagaatgatgtactcgatcacaagtctggaccgtcttctaatggggatgttactgtaaagtaaccaagcttgagaacggagttaccgagtcatgtggtggtacggacaatacgggatcagcagcgcctccaatgcagcaacacagccacagtcgagaaatccactctaacatcaatggctttactgctatgtcaaacgccatgagtcagtacgcggggcaagggttatttggatcaggcattcatatgacgcacgcccaagtgcttgggatgttttctggcatgaatggcaaagtcaatggctatatccataggcacccagtaactgctgatagtcttaaaacagcaggacagaacggagatgttggaaaggcaactgtgaaccccgtgcaaagcgcaggccaggatccaaagaccgcgaccgaaaatagctctgctcacccaggcttgaattccagagcccagtcatcaggttcctcgcctaggggaaagctgacaaatccgaagcaccctgatctggctttgcagctatgagcgcggtagtaggcattgacatagtttggtttagtactgtgatctgtgacagaggcatgagctcctcgagcactgctcctccgggcctaattctcaagcttccggcacgctgatagacatttgtagcttgccaagcggttgaagaggtaacagatggttggattgttgtcagagaataataacgcaaagcagctgttgcatgaggcggcggcggaacaccatgtaggccccccattttaatcatttgacccccagtgagttgttgtaaaagggtagggtagcttctgtacaggttctaatcttattggagatgacagtgtttcggatgaggcggccgcctgttgtccaatttgtaacatttataggaggaagtatacaggcgaaaaaggcagtgaataattgtgccttttgaaatgttcgaacggccgattggcgacatgttgctgttgttttgatttcttgtgccttttgggctcactctgtccactggatacgttggatgctggtgattggcatatatatgtaggtcatgctcttgagccttctactcgctgtgattcttcttcgcctcggaaattagtcaccagcaagggcgcccatatgggtgtacactgatttactgatttacattatagatgtactgtttatagagtgaag

SEQ ID NO: 244 - DNA, 2282 bp, Zea Mays
gcggatttgacctttttctcctactgatggaggtgtaagcattgtccggacggcgcgcgacagaaaaaggaggagcagggggaggggaagaaggatgcagcgaaagcgacggggaaagaggacgctgcgtcggatggtgggcccacggggactcccctcccagacaaaaagttgctactcttcatcctcgataggctccagaagaaggatacttatggagttttctcggagcctgtcgatgcagaggagcttccagattactttgacattattgaccatccaatggacttctcaacaatccgtgagaagctgttgaatgactcgtattctaagttggagcagtttgaggcacggtctattgaagctcttgccaaaaaggattttgagaacctgaggcaacccagtgatgaagaggaacccaaaccaccagctcgaaggggtaggccaccgaagaatcccaagacagagggtgatgtgtcaccagacctatctaatgtgaaagcaaataaacctgaagacaatgtcgatacattcagaaaaaggtcaactggagacagaactcgaaatacaaataccccaatgaaagatctgtccagttttcacgatacgtttggttcttttagtgcaaaaagaacagataaaattggtgattattctggttcatcgaagtggggaaagaaacctgttagtctagatgacgaccgcaggagtacatatgatcagcactattcacgtaatagctctctgtttgctgccctggatgatgagaggaaactactggtgccagggttcagcagccacatgcatatgctaggagcttggcacgatttgcatcaaaattgggcccagttggctgggatgtggcagcaaatcgtatcagaagggcactcccccctgggacaagtttcggcccaggatgggttgtagatggtgaaccacctcaaaactctcagtgggctcctgcagcatcgactaatccctcctctgagcccactgctccacccaatatgccatccaagaatgatgtactcgatcacaagtctggaccgtcttctaatggggatgttactggtgaggagcatttaactagaactcaaacagtggcttctacatcaacaagctttgataagagctctgacatttccagtaaagtaaccaagcttgagaacggagttaccgagtcatgtggtggtacggacaatacgggatcagcagcgcctccaatgcagcaacacagccacagtcgagaaatccactctaacatcaatggctttactgctatgtcaaacgccatgagtcagtacgcggggcaagggttatttggatcaggcattcatatgacgcacgcccaagtgcttgggatgttttctggcatgaatggcaaagtcaatggctatatccataggcacccagtaactgctgatagtcttaaaacagcaggacagaacggagatgttggaaaggcaactgtgaaccccgtgcaaagcgcaggccaggatccaaagaccgcgaccgaaaatagctctgctcacccaggcttgaattccagagcccagtcatcaggttcctcgcctaggggaaagctgacaaatccgaagcaccctgatctggctttgcagctatgagcgcggtagtaggcattgacatagtttggtttagtactgtgatctgtgacagaggcatgagctcctcgagcactgctcctccgggcctaattctcaagcttccggcacgctgatagacatttgtagcttgccaagcggttgaagaggtaacagatggttggattgttgtcagagaataataacgcaaagcagctgttgcatgaggcggcggcggaacaccatgtaggccccccattttaatcatttgacccccagtgagttgttgtaaaagggtagggtagcttctgtacaggttctaatcttattggagatgacagtgtttcggatgaggcggccgcctgttgtccaatttgtaacatttataggaggaagtatacaggcgaaaaaggcagtgaataattgtgccttttgaaatgttcgaacggccgattggcgacatgttgctgttgttttgatttcttgtgccttttgggctcactctgtccactggatacgttggatgctggtgattggcatatatatgtaggtcatgctcttgagccttctactcgctgtgattcttcttcgcctcggaaattagtcaccagcaagggcgcccatatgggtgtacactgatttactgatttacattatagatgtactgtttatagagtgaag

SEQ ID NO: 245 - DNA, 2436 bp, Zea Mays
aagcattgtccggacggcgcgcgacagaaaaaggaggagcagggggaggggaagaaggatgcagcgaaagcgacggggaaagaggacgctgcgtcggatggtgggcccacggggactcccctcccagacaaaaagttgctactcttcatcctcgataggctccagaagaaggatacttatggagttttctcggagcctgtcgatgcagaggagcttccagattactttgacattattgaccatccaatggacttctcaacaatccgtgagaagctgttgaatgactcgtattctaagttggagcagtttgaggatgatgtgtttctactcacatcaaatgccatgtcttacaattcagctgatacaatctacttccgacaggcacggtctattgaagctcttgccaaaaaggattttgagaacctgaggcaacccagtgatgaagaggaacccaaaccaccagctcgaaggggtaggccaccgaagaatcccaagacagagggtgatgtgtcaccagacctatctaatgtgaaagcaaataaacctgaagacaatgtcgatacattcagaaaaaggtcaactggagacagaactcgaaatacaaataccccaatgaaagatctgtccagttttcacgatacgtttggttcttttagtgcaaaaagaacagataaaattggtgattattctggttcatcgaagtggggaaagaaacctgttagtctagatgacgaccgcaggagtacatatgatcagcactattcacgtaatagctctctgtttgctgccctggatgatgagaggaaactactggtgccagtaagcatactccgatcagatacagtttgtggtcaagagctacagatttcaatttttggctgacttgtaaaacctaccaacttaactatagttgatcattgcaaccaccgtcgtatttcaatctatccttgctggaacttgctgtgctaatatttcttgttcttttttttttgtttcttattgtctgaaccaggtaggggttcagcagccacatgcatatgctaggagcttggcacgatttgcatcaaaattgggcccagttggctgggatgtggcagcaaatcgtatcagaagggcactcccccctgggacaagtttcggcccaggatgggttgtagatggtgaaccacctcaaaactctcagtgggctcctgcagcatcgactaatccctcctctgagcccactgctccacccaatatgccatccaagaatgatgtactcgatcacaagtctggaccgtcttctaatggggatgttactgtaaagtaaccaagcttgagaacggagttaccgagtcatgtggtggtacggacaatacgggatcagcagcgcctccaatgcagcaacacagccacagtcgagaaatccactctaacatcaatggctttactgctatgtcaaacgccatgagtcagtacgcggggcaagggttatttggatcaggcattcatatgacgcacgcccaagtgcttgggatgttttctggcatgaatggcaaagtcaatggctatatccataggcacccagtaactgctgatagtcttaaaacagcaggacagaacggagatgttggaaaggcaactgtgaaccccgtgcaaagcgcaggccaggatccaaagaccgcgaccgaaaatagctctgctcacccaggcttgaattccagagcccagtcatcaggttcctcgcctaggggaaagctgacaaatccgaagcaccctgatctggctttgcagctatgagcgcggtagtaggcattgacatagtttggtttagtactgtgatctgtgacagaggcatgagctcctcgagcactgctcctccgggcctaattctcaagcttccggcacgctgatagacatttgtagcttgccaagcggttgaagaggtaacagatggttggattgttgtcagagaataataacgcaaagcagctgttgcatgaggcggcggcggaacaccatgtaggccccccattttaatcatttgacccccagtgagttgttgtaaaagggtagggtagcttctgtacaggttctaatcttattggagatgacagtgtttcggatgaggcggccgcctgttgtccaatttgtaacatttataggaggaagtatacaggcgaaaaaggcagtgaataattgtgccttttgaaatgttcgaacggccgattggcgacatgttgctgttgttttgatttcttgtgccttttgggctcactctgtccactggatacgttggatgctggtgattggcatatatatgtaggtcatgctcttgagccttctactcgctgtgattcttcttcgcctcggaaattagtcaccagcaagggcgcccatatgggtgtacactgatttactgatttacattatagatgtactgtttatagagtgaag

SEQ ID NO: 246 - DNA, 1604 bp, Zea Mays
cccgccggtcttcaaatccaatttctgacttcacgagagctcgcctgacctcttcccttcctgtgcttccctccctccgctttccccaaaccgctccctgctcaaatccatcgctccctgtaaaatcttctgctcccaatggagttctttgctgccactggtgaggacgacgactccatcgacacttccaacctaccggccaaacaagcatcctgggagttatccccccaagctagccgctccatgggtgtccctggagctcatcttcaaagggctgctgcaaacttcaatagcttcgacctcaactctgaggccccaaactatggaagcttcactcaattagttctttctccatccatccccaatccagatctcgagtttggagcaggtcggcgtggcaaggtagctggtcagcactctgtgtctccaagccatgctgcggcaccgcaaaaatcttgcagagtggacaccacatctgttgctagaaatcccataaccatgggcgcacatggcgggcatcaccgttctgtggcatctcttcgtggtgccaaggcgtccagactgcaccctgaaattggtagcaggcatgggaatcttggtgtaggtgcaagttccaatgtcacagcaccatccttggcagacacagaccacgcacaagacatggaggacgaagtggttatcgatgcattttcaaatggggagcactatgacaaggctaactggaattccgagaacactaatgtgttctgtgacctgtgtgttgaggagatgcgcgctgggaatcatagcaatggttttctaacagcgagagcttacaaaaacatagctgagaagtacttcttgaccacggggttgcgacactctaggcagcaatttaagaataggtggcaagccttgaagagaatgtataatttctggctgtgggtgaacaaacaaacaggtcaaggctctgtttttgacgatgacgcattttgggaatccaatactaagggacaatccgagtggaagaagcttaggtacgccccccctgaatggatcgatcaatttgaaatcatgtttcagcatgtggctgttgatggatcatctgcatgtattcctggagagcagattttcaataaaggtggttgtggtgacaaaaaagatgtcgatggcagaaaaagagttgggcaaagcagcatatgtgctaccagtccacagaagaaaacaaagagccctatggtgaggatcatgaagggaatatgggagacaatgcaaaagaacgcagcggccacacagaaggcagtggatggtgatgtgcaatcagattcgatcaaaaaagccatgtccttggttgtagagtgcggagcaccagaggggagtgcagagcatttcatggccagccagctgtttgcgaaatcagcctatcgtgacatcttttttaccttaacaaccaaggagggaaggctggcttggttgaggaggtggtgtcagtcaaggaatgtctattagttcgtatgctagtcatgtgtatgcaagtttaaattgtgtgtttatggatggtagttgtatattagttgttggatgtgtctgcttttggttaggagtataaaacctcttcaaactag

SEQ ID NO: 247 - DNA, 288 bp, Zea Mays
agcccacatttatatgtaaggttccaccggtacactctttattcatccttaaacacagaatctagatgccgcctctcaatctcaggtctaaaaccaatgaaccagacataatctcacaatgccaactacagatcgcatggatcagaacacagttatgttcgtcatcatattctattggcccatgtttccaagaagtcgctccactgcagcatgaacatttccagcagtggcggccaaggctcggatgttctcctgtgtgtcaaaaaaacccatttcttggagctgagc

SEQ ID NO: 248 - DNA, 282 bp, Zea Mays
atgagtggcatattcattatttccctcatcaagttaggattttcagctagctgttgttgcatgtggtctaattcagggaggccagatccaaacaaacccaaacccccactgttagcagcagcccctgtagcacccagattttgcaacaagccacccaatcctgctgctggggaactggcaggagcagcagtggtaggttcttggttggctgcaggtgcagtggatgctggtggtggcgcagcaccacgtaccatgtggattgtatggtctgtctccacacct

SEQ ID NO: 249 - DNA, 2086 bp, Zea Mays
ccggacgttttttttccagaaaccctggctgctctcggaccttggacgacacgtcgacaccagtgcagcagccaccaaagatccggcccgcccgcgccgcacgagaccgccgcccgcgccgcacgagagtcatgacgacgccgcggcggcacgctgatccgtcgccctcgccctcgccctcttccccgccgcagcttctctcccgcctccgctccggggcctccagtttcctggcgcggcagtacagcacggggaagggaggcgataacaccggtccttcgaagccgaaaggtggtggctcctccgcgccaaggcacctcaggccaggattcgtggatccttcatcatggaaacattttgactcaagggctgttggcattaaaccgggtgctatacatacagatgcatgggcggttttaaaaaagctcagacgtgaaggttttcaagcttaccttgttggtggctgtgtgagagatttgctactcaaaagggtacctaaagattttgacgtgattaccactgcaagtctcgaacagcttaagaaaaatatattcaggagatctaggattgtaggcaaacgctttccaatatgtcttcttaaaatgcgtgactctgtaattgagatttcgagctttcgaacagttgctaattatgggaatagaagtgaagtggtagattatgtggcagagttgaatggctctgacgttagggatattcttcgctggaaggattctatgagaagagacttcacaataaatggtcttttctttaacccgatgaactgcaaaatttatgattacgtgaatggagtaagggatatgagaaaaaacaaagtgtgtacagtgattcctgctcacatttctttcatggaggaccctgcaaggattttacgtggcttcagaattgctgctcgccttggtttccagttttccagtgaaacttctaatgcgatacgtgatttttcttcatctataaataatatcgataaggcaaggctgatgatggaaatgaattatataatgtcttatggagcagcagcaccttctgttaggttgcttagaaaatatggactacttgatattttgctgcctttccagtcagcatatttgtctgagcagatgaaaggtggttcaagtgacagacatctgatgcttatgaaattactgtctaatcttgataggttactctctgcggaccgaccatgccatagctctttgtggctggcgttgttggcatttcacagtacattggttatatatccacaagacaccttggtaataagagcttttgctgcagtgttgtatttcggaacatgggaaacaacagtcaaatttctgagagaagaagttggagctgaagttccatttgccccagagacaatggggccttctcggaccaaactggattgtcttaaggaacaaacgtcacatctagcatcactagtcaattcttcagtagatatattgacatgtcctcatgatctggagcaatcgctagccagattctcggaacctctgcaattttcaggagtggaaaaagttgtcggccgtatttgagggccttgcttctgacctacattcatatgatgggagaagagggatgcgtgggattgattactcgtcgctgaaacttggggatcttgccgaggtccgatttgttctcggtaaagtgatcatggacacaatgtacgacaagttaccatgcgaatctactgaggatgagggcgctgctgcagatgttgctggtggaagcctacctccattgtccgcattgttttaatcgtagtgaagcatagggttcactcaacaaactaggcagcccttttctggttttagtcagtgctgcaaagcaatcgagttgttcagaattttcttgtgttgcaagatgaccacaacgacaactgtagacgtatttcagaatttttatcaaggaactcgaatgtgcagttgtagctaaactcccatgaatcctttcggtgaacatagggcgtgcacttatcaatctctttgctagggaaaactttaggcctgcgtctccattgttgtgaaacatatgctgatatgcgtcttcgaacatacatctcttt

SEQ ID NO: 250 - DNA, 2063 bp, Zea Mays
ctggctgctctcggaccttggacgacacgtcgacaccagtgcagcagccaccaaagatccggcccgcccgcgccgcacgagaccgccgcccgcgccgcacgagagtcatgacgacgccgcggcggcacgctgatccgtcgccctcgccctcgccctcttccccgccgcagcttctctcccgcctccgctccggggcctccagtttcctggcgcggcagtacagcacggggaagggaggcgataacaccggtccttcgaagccgaaaggtggtggctcctccgcgccaaggcacctcaggccaggattcgtggatccttcatcatggaaacattttgactcaagggctgttggcattaaaccgggtgctatacatacagatgcatgggcggttttaaaaaagctcagacgtgaaggttttcaagcttaccttgttggtggctgtgtgagagatttgctactcaaaagggtacctaaagattttgacgtgattaccactgcaagtctcgaacagcttaagaaaaatatattcaggagatctaggattgtaggcaaacgctttccaatatgtcttcttaaaatgcgtgactctgtaattgagatttcgagctttcgaacagttgctaattatgggaatagaagtgaagtggtagattatgtggcagagttgaatggctctgacgttagggatattcttcgctggaaggattctatgagaagagacttcacaataaatggtcttttctttaacccgatgaactgcaaaatttatgattacgtgaatggagtaagggatatgagaaaaaacaaagtgtgtacagtgattcctgctcacatttctttcatggaggaccctgaattgctgctcgccttggtttccagttttccagtgaaacttctaatgcgatacgtgatttttcttcatctataaataatatcgataaggcaaggctgatgatggaaatgaattatataatgtcttatggagcagcagcaccttctgttaggttgcttagaaaatatggactacttgatattttgctgcctttccagtcagcatatttgtctgagcagatgaaaggtggttcaagtgacagacatctgatgcttatgaaattactgtctaatcttgataggttactctctgcggaccgaccatgccatagctctttgtggctggcgttgttggcatttcacagtacattggttatatatccacaagacaccttggtaataagagcttttgctgcagtgttgtatttcggaacatgggaaacaacagtcaaatttctgagagaagaagttggagctgaagttccatttgccccagagacaatggggccttctcggaccaaactggattgtcttaaggaacaaacgtcacatctagcatcactagtcaattcttcagtagatatattgacatgtcctcatgatctggagcaatcgctagccagattctcggaacctctgcaattttcaggagtggtagtcgcatctaacaatgataggaaaaagttgtcggccgtatttgagggccttgcttctgacctacattcatatgatgggagaagagggatgcgtgggattgattactcgtcgctgaaacttggggatcttgccgaggtccgatttgttctcggtaaagtgatcatggacacaatgtacgacaagttaccatgcgaatctactgaggatgagggcgctgctgcagatgttgctggtggaagcctacctccattgtccgcattgttttaatcgtagtgaagcatagggttcactcaacaaactaggcagcccttttctggttttagtcagtgctgcaaagcaatcgagttgttcagaattttcttgtgttgcaagatgaccacaacgacaactgtagacgtatttcagaatttttatcaaggaactcgaatgtgcagttgtagctaaactcccatgaatcctttcggtgaacatagggcgtgcacttatcaatctctttgctagggaaaactttaggcctgcgtctccattgttgtgaaacatatgctgatatgcgtcttcgaacatacatctcttt

SEQ ID NO: 251 - DNA, 1301 bp, Zea Mays
ctttgcagttctaaaattgaccatgtgatcgaaaatccaagcagaaagttgtacctttaccctggagggggctgatgcgtcgcttcatttctgctcttctgccgtctagtcctttgtactgaccggcgctccggtcgtctcctcgcgcttgcgggttccccgtccccaccccacgccgggggcaagagatggagaacgcggtggtgctccgggagtggtttgaccgcgtcgacgccggccgcaccggcaacatcaccgctgcccagctccagggcgcgctcgctgtcggcaacctcaacttccccatctccgtcgtgcagcagatgattaggatgtatgacttcgatcggaatggcaccatgaacttcgaagagtttctggctcttaacaaattcctacagaaggtatgtatgtggcttctctaatttggatctgttgcgcatttaggaattaggattagatgattagtggattactcactcagacaagcatcttctgcaacaggcaatttttctgtttcataatcaactgggtctgatatgtctcataccaactaatggccgtgagaatgttatttaggcttatataagttatacagaagatgtttcgttatgataatgcacaaaagttatggtgtgcaatgaaaggtatatttgagagtaatagaaatagactcattgtgctgcatccttaactgtaagtttcttgtgtgcgactcatcgtaatcgcaggtgtttcctgtttccaatttgcaggtgcaaaatgtgttttccaccctggataggggtcgtggatttctaagtcttgaggaggtgtaccagccttctatactgtttgtgagagctttgacaagagcaagaagggcatgattcaattggatgagtttatatcactctgcatttttgttcagtcagctcgtaacctgttcaattcgttcgatacaagcaagcaaggaagagtgactttagattttaaccaattcgtgtactgcacggcaaactgcaggatataatgtggttgtacatgggcgcccaaacaaaaaggttagcagtgtgaagtgctaaccgttcgccaatcaaacttcgtttctgaaccggcagctgggtattgcaattcactgttcgccatctaaggcttgttgtaccatcattttgcctgaatgtattcttggtcacctattggtcaatccgtgtccagttttctgacatcctgggctgtatatacagaataagacttggcaatttgtggctgtatttatataaaatatttcaagtaatccagacattcactcctttgcattg

SEQ ID NO: 252 - DNA, 1228 bp, Zea Mays
ctaaaattgaccatgtgatcgaaaatccaagcagaaagttgtacctttaccctggagggggctgatgcgtcgcttcatttctgctcttctgccgtctagtcctttgtactgaccggcgctccggtcgtctcctcgcgcttgcgggttccccgtccccaccccacgccgggggcaagagatggagaacgcggtggtgctccgggagtggtttgaccgcgtcgacgccggccgcaccggcaacatcaccgctgcccagctccagggcgcgctcgctgtcggcaacctcaacttccccatctccgtcgtgcagcagatgattaggatgtatgacttcgatcggaatggcaccatgaacttcgaagagtttctggctcttaacaaattcctacagaaggcaatttttctgtttcataatcaactgggtctgatatgtctcataccaactaatggccgtgagaatgttatttaggcttatataagttatacagaagatgtttcgttatgataatgcacaaaagttatggtgtgcaatgaaaggtatatttgagagtaatagaaatagactcattgtgctgcatccttaactgtaagtttcttgtgtgcgactcatcgtaatcgcaggtgtttcctgtttccaatttgcaggtgcaaaatgtgttttccaccctggataggggtcgtggatttctaagtcttgaggaggtgtaccaggcattaatcaaacttggtttctcgttggattcaccagccttctatactgtttgtgagagctttgacaagagcaagaagggcatgattcaattggatgagtttatatcactctgcatttttgttcagtcagctcgtaacctgttcaattcgttcgatacaagcaagcaaggaagagtgactttagattttaaccaattcgtgtactgcacggcaaactgcaggatataatgtggttgtacatgggcgcccaaacaaaaaggttagcagtgtgaagtgctaaccgttcgccaatcaaacttcgtttctgaaccggcagctgggtattgcaattcactgttcgccatctaaggcttgttgtaccatcattttgcctgaatgtattcttggtcacctattggtcaatccgtgtccagttttctgacatcctgggctgtatatacagaataagacttggcaatttgtggctgtatttatataaaatatttcaagtaatccagacattcactcctttgcattg

SEQ ID NO: 253 - DNA, 950 bp, Zea Mays
ctggagggggctgatgcgtcgcttcatttctgctcttctgccgtctagtcctttgtactgaccggcgctccggtcgtctcctcgcgcttgcgggttccccgtccccaccccacgccgggggcaagagatggagaacgcggtggtgctccgggagtggtttgaccgcgtcgacgccggccgcaccggcaacatcaccgctgcccagctccagggcgcgctcgctgtcggcaacctcaacttccccatctccgtcgtgcagcagatgattaggatgtatgacttcgatcggaatggcaccatgaacttcgaagagtttctggctcttaacaaattcctacagaaggtgtttcctgtttccaatttgcaggtgcaaaatgtgttttccaccctggataggggtcgtggatttctaagtcttgaggaggtgtaccaggcattaatcaaacttggtttctcgttggattcaccagccttctatactgtttgtgagagctttgacaagagcaagaagggcatgattcaattggatgagtttatatcactctgcatttttgttcagtcagctcgtaacctgttcaattcgttcgatacaagcaagcaaggaagagtgactttagattttaaccaattcgtgtactgcacggcaaactgcaggatataatgtggttgtacatgggcgcccaaacaaaaaggttagcagtgtgaagtgctaaccgttcgccaatcaaacttcgtttctgaaccggcagctgggtattgcaattcactgttcgccatctaaggcttgttgtaccatcattttgcctgaatgtattcttggtcacctattggtcaatccgtgtccagttttctgacatcctgggctgtatatacagaataagacttggcaatttgtggctgtatttatataaaatatttcaagtaatccagacattcactcctttgcattg

SEQ ID NO: 254 - DNA, 613 bp, Zea Mays
gtggagtctagagatagagagcccctggatcgctgctctggggtgcaggcgtggtcgcgtgtagtcagctcgccttgcccgctctaatcggtcaccactgacctccgcccatggcgaccatgtctgcagccctcgccatctccttaccgtcgctaactcgcgttgccgtcgcaagtacgccctctgcttcctcgcgcatcaaggagcaggagatctccggcgcccctcccgccccgccgctggacaaatctgcaagatcgcccccttcctctctgctgggcatttccacgagcacctggtctgcgggtgtcgctgggctggggttcctggagactggttacctcacttacctcaagctcacgggctccgaggcgttctgccccatcactggcgcaggctgtggcgacgtcctcgacagcgactactccgtcgtctttggtaatcttcttggtggtgttgctgacagcttgttggtaaattgtgcactaactggtgcatcagcctcatgaaatttagatcgatttgtatagcaatcctcttgtgccttgctcctcgtacgaacggtaatcctcttgattaccagtcataggaatgctgaattatggtattcttg

SEQ ID NO: 255 - DNA, 821 bp, Zea Mays
gtcagccagacggccagaccccaaacagagcaggactagcactggcagtctagcacacccgcactgcgtctccgcagcacacactcgcacgcacgagaaggccggagaggcggcgcacccggagaggcaaagggtatttcaagaacgcggaggcaacacaatcaacattgacacctgatggatggctcaagactggggatctctgctacatagatgaggatggttatctcttcgttgtggatcgtctgaaggagttgatcaaatacaaagggtaccaggtgcctccggcggagttggaagctcttttgctaacacatccagaaatcgaagatgtcgccgttataccgtttcccgaccgtgaggtcggccagttcccaatggcctacgtagtgaggaagaaagggagcaatttgtcagagcgcgaggtgatggagttcgtggcgaaacaggtagcgccttacaagaaggttagaaaggtggcgtttgtggcggagattcccaagaacgcgtccggcaagattctgaggaaggatctcatcaagctcgccacatccaaatccaaactatgaaaattgtttttcgtgtttacagtgctggaatacgcctgtcgtccacgagcggcgagccattctctacgctgccccggtagtttggttgtagaatgcttgtataactgaagatcccgtcggctatgtgcttgcttgtgtacagtgctctgttctcgtacaatacaatattgggagggaatactaggcgtctgtacgtaggcttggatggaaataatatccggtaatttcagtgttgagaaaaagaaagaaaaa

SEQ ID NO: 256 - DNA, 1884 bp, Zea Mays
gtcagccagacggccagaccccaaacagagcaggactagcactggcagtctagcacacccgcactgcgtctccgcagcacacactcgcacgcacgagaaggccggagaggcggcgcacccggagaggcaaaggcaagcgatccctctccctccctccctcgtatccaggacaacagcccgtgcgatccgatcccgatggcggcccggccggacgcgcgcagcggctactgcgccgcgacgcgcaccttccgtagcaagcgcgcggacgtcccgctccccgccgacgcggacctggacgtcgtcaggttcctcgcgtcccgccgccacgcgggcgtcgtcgcgctcgtcgacgccgccacgggccaccgggtcacgttccaggaactctggcgcgcggtggaaggggcggccaccgcgctcgccgcgccgccgctgtcgctccgcaagggccaggtcgcgctcatcctctccccgaactccgtccacttccccgtcgccaccatcggggagatctccgccacgccgcccgaccccacgcgccgccgggaccgcgtcacacaggacgacccggccacgctgctctactcctcgggcaccacggggcccagcaagggcgtcgtcgccacgcaccggagcctcatctccatggtgcagatcatcatgtcgcgcttccgcctcgaggcctccaacaggaccgagaccttcctctgcacggtgcccatgttccacgtctacggcctcgtcgccttcgccacggggctgctcggctgcggcgccaccatcgtcgtgctctccaagtacgagctccccgagatgctgcgcgccatcaacgaatacggggtcacctacctcccactcgtgccgcccatcctcgtcgccatgctggcgcaccccaaccgcctgccgctcgggggcctgcgcaaggtgctctccggcggagcgccgctcagcaaggagctgatcgaggggtttaaggagaaatacccgcaggtggagatccttcaggggtacgggctgacggagagcacggctatcggcgcgtccacggactctgccgaggagagcagccggtacggtacggctgggctgctgtcgccaagcaccgaggctaagatcgtcgacccagagaccggcgaggcgctgccggtgaaccgcaccggcgagctctggatccgggggccatacgtcatgaaagggtatttcaagaacgcggaggcaacacaatcaacattgacacctgatggatggctcaagactggggatctctgctacatagatgaggatggttatctcttcgttgtggatcgtctgaaggagttgatcaaatacaaagggtaccaggtgcctccggcggagttggaagctcttttgctaacacatccagaaatcgaagatgtcgccgttataccgtttcccgaccgtgaggtcggccagttcccaatggcctacgtagtgaggaagaaagggagcaatttgtcagagcgcgaggtgatggagttcgtggcgaaacaggtagcgccttacaagaaggttagaaaggtggcgtttgtggcggagattcccaagaacgcgtccggcaagattctgaggaaggatctcatcaagctcgccacatccaaatccaaactatgaaaattgtttttcgtgtttacagtgctggaatacgcctgtcgtccacgagcggcgagccattctctacgctgccccggtagtttggttgtagaatgcttgtataactgaagatcccgtcggctatgtgcttgcttgtgtacagtgctctgttctcgtacaatacaatattgggagggaatactaggcgtctgtacgtaggcttggatggaaataatatccggtaatttcagtgttgagaaaaagaaagaaaaa

SEQ ID NO: 257 - DNA, 2060 bp, Zea Mays
tggaaattcgtgttaagatggcggctgcatcacagccaagaacgggacgaaaccgcccatacaaaggcagaaccgcagaaaggggggcggaggcggacagagacgcagaagccaaaagcaaccaaacccacccggccaccccccgagcccgaaggcaggcctctttcttcttcttcctcctcttcccctgctcggtcggctactcctactgtccggggaacccagcccagcccagcacctgaaccccacaccacacacacagggttgcccacccacgccacgcacgcgcagccgcggcggaagccaccggggggtgggctccgatgggctgctgcggctcctcgcagcgggcggggacgcacccggagaagaagccgccgggggcgctccccccgcaccgtccctcctactcgctcaaccagcaccaggcgccggcgccgccgcctccctccgcggctcgcgccggcgcccgccaggtgccgccgctcaaggagttctcgctcgcggagctgcgcgccgccacggccggcttcgcggcggggaacatcgtgtcggagagcggcgagaaggcgcccaatttcgtgtacaggggccgcctcgacgccggccgccgcgcgatcgccgtcaagaagttcaccaagatggcgtggcccgatcccaagcagttcgcggaggaggccaagggcgtcgggaagctgcgccactgccgcctggccaacctcatcggctactgctgcgacggggacgagcggctgctcgtcgccgagttcatgcccaacgacacgctcgccaagcacctcttccactgggaaaaccagacaattgaatgggctatgcgtctgagagttgcatactacatcgctgaagcactggagtattgcagcactgagggaaggcctttgtaccacgacctaaatgcatatagggtcctctttgatgagaatggtgatcctcgcctttcatgctttggcctgatgaaaaacagtagggatgggaaaagctatagcacaaatcttgcatatacacctccagaatatttaagaaatggaagagtaacatcagaaagtgtcatattcagctttggcactatactgctggacctcctaagtggaaagcgtatacctccttcccgtgctcttgatatgataaaaggcaacaatatccaagtactgatggattcacatttggagggaaactactcaacagatgaggcaaccacattggttgacctggcctcccagtgcctacagtatgagcctagggatcgggccaacactaaaaagctggtttccgtactcgagcccttgcaaataaaatcagaggtaccatcctacgagatgcttggcattccaaaacatgaggaagaagcgcctccccctccacaaccgcagcgccctctctctcccatgggtgaagcctgttctaggacggatctgacagctatccatcaaattctagtgaacacgcattacagggacgatgaagggagcaacgaggaatggacgcagcagatgagggacatgctggaagctaggaagcgtggggacttcgcctttcgcgataaagatttcaaggcagccatagattgctacacgcagttcgttgacgtggggacgatggtatcgccaacggtgtacgcgaggcggagcctgtgccacctcatgtgtgaccagcctgacgccgccctccgcgacgcaatgcaggcgcagtgcgtgtacccggactggccaaccgcgttctacatgcaagctgtcgcgctcgcgaagctgaacatgcagagcgatgccacggacatgttgaacgaggcatcgcagctcgaagagaagcggcagaagaacacaaaaccctgatgatggcttgttcctggtccaggggttgggaatgtagctgggggagtgtgctgcagagtcctgcgattgtaactacctggtttcgcatttctgtcatgcattttttttgggcccgtgtacatgttacatcgacgaaagtcgaaacaggcagaatgcaaggggatttttttacttgtggttgtcaaaatctgagcttgtgctgttcgtact

SEQ ID NO: 258 - DNA, 1498 bp, Zea Mays
cttagggctgccatttcttctttttgtcaacctagactgcgtccaccttttgtgggaagatgctttggtagaagggaaaaccagacaattgaatgggctatgcgtctgagagttgcatactacatcgctgaagcactggagtattgcagcactgagggaaggcctttgtaccacgacctaaatgcatatagggtcctctttgatgagaatggtgatcctcgcctttcatgctttggcctgatgaaaaacagtagggatgggaaaagctatagcacaaatcttgcatatacacctccagaatatttaagaaatggtaacatatgatttgtctatgacaaacttagccttctttgaattgtttagtcagggtatttagaagtgggtatacatgacagtacatgctatttactgaaaatagaatggctaacattttcgtaatgatgggatttccatggcaacctatgctgcttcaggaagagtaacatcagaaagtgtcatattcagctttggcactatactgctggacctcctaagtggaaagcgtatacctccttcccgtgctcttgatatgataaaaggcaacaatatccaagtactgatggattcacatttggagggaaactactcaacagatgaggcaaccacattggttgacctggcctcccagtgcctacagtatgagcctagggatcgggccaacactaaaaagctggtttccgtactcgagcccttgcaaataaaatcagaggtaccatcctacgagatgcttggcattccaaaacatgaggaagaagcgcctccccctccacaaccgcagcgccctctctctcccatgggtgaagcctgttctaggacggatctgacagctatccatcaaattctagtgaacacgcattacagggacgatgaagggagcaacgagctatcgttccaggaatggacgcagcagatgagggacatgctggaagctaggaagcgtggggacttcgcctttcgcgataaagatttcaaggcagccatagattgctacacgcagttcgttgacgtggggacgatggtatcgccaacggtgtacgcgaggcggagcctgtgccacctcatgtgtgaccagcctgacgccgccctccgcgacgcaatgcaggcgcagtgcgtgtacccggactggccaaccgcgttctacatgcaagctgtcgcgctcgcgaagctgaacatgcagagcgatgccacggacatgttgaacgaggcatcgcagctcgaagagaagcggcagaagaacacaaaaccctgatgatggcttgttcctggtccaggggttgggaatgtagctgggggagtgtgctgcagagtcctgcgattgtaactacctggtttcgcatttctgtcatgcattttttttgggcccgtgtacatgttacatcgacgaaagtcgaaacaggcagaatgcaaggggatttttttacttgtggttgtcaaaatctgagcttgtgctgttcgtact

SEQ ID NO: 259 - DNA, 1239 bp, Zea Mays
ttaaaaaacacttataaataggcacgcccggccgtgagcggagcggagagcatcaaagcaagccatgtggaggagggctttagcgatggtcctgttcatggctggcgccgcgctgctcgccggggctgccggcgccggcgcgcagcagggcgtgtggagcatcatcacccggcccatgttccagagcatgctgagccaccgcggcgacagcgggtgccagggcgccttctacacctacgacgccttcatcgaggccgccagcaagttccccggcttcggcaccaccggcgacgagcagacgcgcaggcgggagctcgccgccttcttcggccagacgtcccacgaaaccaccggtggatgggcgactgctccggatggaccgtttgcctggggatactgccgggtgaaggaacagaaacagacggacccaccctactatggacgaggacccatacagctaactcataagtacaactacaggctcgccgggcaagcgctgaacctgaacctggtgggcgacccggacctggtggcgagagaccccgtggtagccttcaagacggccatctggttctggatgacgccgcagtcgcccaagccctcgtgccacgccgtgatgaccggcgactggaggccctccgccaccgaccgcgccgcggggaggctccccggatacggcctgaccacgaacatcatcaacggtggtctagagtgcggcgaggaccgctccaccgacggcgccaaagccgccaaggaccgggtcggctactacaagaggtactgcggtatgctcggagtggggtacggggacaacatggcatgcgggagccagaagccttacggaggatgatgacactagtagctgatctatggttgctgcaatgcaagccttcacgtgtgtttgcctctctacctaaagaataaatcaagctagcagcaaacctaccttcggcgtgtgtctacttgcttatcatagtgtgtgtccgtgtatgagagatgatgtactgtcacgaactcacgtgtgtatgagagaggatacatgctcgcaagccgagtcgagccgagcatcctccttcagcttgttgagtgggcgatcctagctcggttaaccaacaagctgcaccgagtccaaccgatctcggctcgtttccagccataactcagaccatgcatggcaaggaccttctttgtaaaactagatgctaggtctaattggccatataataattaaatagtcct

SEQ ID NO: 260 - DNA, 1717 bp, Zea Mays
aggtccacccacatccgcgctcgtcccggccaccgccgccgcactctcacggtcccacctctctgtggcatgagaagatggtcgcgtgctccaggggactcgcgtggccgccgttcgatctgaccacggcgaggggggcggcgtcctggccgcgccggcgtgccgcgatccggtgctgctgcgccggagcagacgcacagccgcagaggcgactctcgagggcggccgcggtcgcgcccgagcgcgccgaggagtggcgcatcgatgggaacaagccgtccgccgcggcaccgggacggcggcgcaccagcctcaccgccatgcccccgctccccttccctgcacctcgctctagaagacaggtcaagcaaccggacttctacccgcggtgcactccgagggggtcggctcctcaatcccgtgataccccgcccaagagagacactggtattgctagtgagaaggaatggggaatcaacttgctggacgaagccgtcaaggagtctggaataaatgaagatggaagcacttggtacagggagagtggagatgatattggcgagaacgggtaccgctgccgctgggcaagaatgggaggacagagccatgatggttccaccgaatggaaagagacttggtgggagaaaagtgactggactggatataaggaattaggtgcggagaaatctgggaggaatgctgaaggagattcttggtgggagaaatggaaagaagttctgtaccaagacgaatggagcaatcttgcaagaatagagagaagtgctgagaaacaagcaaaatcaggcatagaaaatgctgggtggtacgagaaatggtgggagaaatatgatgccaaaggttggacagaaaaaggtgctcacaaatatggaagattgaatgagcagtcctggtgggagagatggggtgaacattatgatggccgtggatttgttttgaaatgataagtgggcagagacagacttaggcaccaaatggggggacaagtgggaggagaaattctttgcaggaattggttctcgacaaggggagacatggcatgtatgtcctggcggtgaacgttggtcaagaacctggggagaagaacactttggtaacggaaaagtccacaagtatggaaagagcacaaccggcgagaggtgggacttggtagtcgacgaggagacatactacgaggcggagccccattacggatgggccgatgtcgtcggagactcgacgcagctgctgtccatacagcccgtggagaggccacccggcgtgttcccggccatcgacttcagctccgcgccgccgccgaaggacgctccgccgggcatgcccccttctcctctggactgagtgaattaggcctgccagcacagacggatttttctgtctatataggctccagattttgcctgtaagggaacagcattctttgtaggaagttgacggaaccccgttcctgcgttcattggttggctcattctttgctacgcattcctttcctctggctgggatatatatatattttgcttgggaactgggtggatgcaataatcaaacggcgcccgtggttgtgtgtgttgcccctgtccccctatgtgcttgcaacttggtctgaaggcagtgtggtctgggcaaagctttccacagcacgaacgaacgcgcttgagctcagtgcgcgtccgcgtgatgtctacaagtccacctcggg

SEQ ID NO: 261 - DNA, 1722 bp, Zea Mays
aggtccacccacatccgcgctcgtcccggccaccgccgccgcactctcacggtcccacctctctgtggcatgagaagatggtcgcgtgctccaggggactcgcgtggccgccgttcgatctgaccacggcgaggggggcggcgtcctggccgcgccggcgtgccgcgatccggtgctgctgcgccggagcagacgcacagccgcagaggcgactctcgagggcggccgcggtcgcgcccgagcgcgccgaggagtggcgcatcgatgggaacaagccgtccgccgcggcaccgggacggcggcgcaccagcctcaccgccatgcccccgctccccttccctgcacctcgctctagaagacaggtcaagcaaccggacttctacccgcggtgcactccgagggggtcggctcctcaatcccgtgataccccgcccaagagagacactggtattgctagtgagaaggaatggggaatcaacttgctggacgaagccgtcaaggagtctggaataaatgaagatggaagcacttggtacagggagagtggagatgatattggcgagaacgggtaccgctgccgctgggcaagaatgggaggacagagccatgatggttccaccgaatggaaagagacttggtgggagaaaagtgactggactggatataaggaattaggtgcggagaaatctgggaggaatgctgaaggagattcttggtgggagaaatggaaagaagttctgtaccaagacgaatggagcaatcttgcaagaatagagagaagtgctgagaaacaagcaaaatcaggcatagaaaatgctgggtggtacgagaaatggtgggagaaatatgatgccaaaggttggacagaaaaaggtgctcacaaatatggaagattgaatgagcagtcctggtgggagagatggggtgaacattatgatggccgtggatttgttttgaaatggacagataagtgggcagagacagacttaggcaccaaatggggggacaagtgggaggagaaattctttgcaggaattggttctcgacaaggggagacatggcatgtatgtcctggcggtgaacgttggtcaagaacctggggagaagaacactttggtaacggaaaagtccacaagtatggaaagagcacaaccggcgagaggtgggacttggtagtcgacgaggagacatactacgaggcggagccccattacggatgggccgatgtcgtcggagactcgacgcagctgctgtccatacagcccgtggagaggccacccggcgtgttcccggccatcgacttcagctccgcgccgccgccgaaggacgctccgccgggcatgcccccttctcctctggactgagtgaattaggcctgccagcacagacggatttttctgtctatataggctccagattttgcctgtaagggaacagcattctttgtaggaagttgacggaaccccgttcctgcgttcattggttggctcattctttgctacgcattcctttcctctggctgggatatatatatattttgcttgggaactgggtggatgcaataatcaaacggcgcccgtggttgtgtgtgttgcccctgtccccctatgtgcttgcaacttggtctgaaggcagtgtggtctgggcaaagctttccacagcacgaacgaacgcgcttgagctcagtgcgcgtccgcgtgatgtctacaagtccacctcggg

SEQ ID NO: 262 - DNA, 1690 bp, Zea Mays
tccgcgctcgtcccggccaccgccgccgcactctcacggtcccacctctctgtggcatgagaagatggtcgcgtgctccaggggactcgcgtggccgccgttcgatctgaccacggcgaggggggcggcgtcctggccgcgccggcgtgccgcgatccggtgctgctgcgccggagcagacgcacagccgcagaggcgactctcgagggcggccgcggtcgcgcccgagcgcgccgaggagtggcgcatcgatgggaacaagccgtccgccgcggcaccgggacggcggcgcaccagcctcaccgccatgcccccgctccccttccctgcacctcgctctagaagacaggtcaagcaaccggacttctacccgcggtgcactccgagggggtcggctcctcaatcccgtgataccccgcccaagagagacactggtattgctagtgagaaggaatggggaatcaacttgctggacgaagccgtcaaggagtctggaataaatgaagatggaagcacttggtacagggagagtggagatgatattggcgagaacgggtaccgctgccgctgggcaagaatgggaggacagagccatgatggttccaccgaatggaaagagacttggtgggagaaaagtgactggactggatataaggaattaggtgcggagaaatctgggaggaatgctgaaggagattcttggtgggagaaatggaaagaagttctgtaccaagacgaatggagcaatcttgcaagaatagagagaagtgctgagaaacaagcaaaatcaggcatagaaaatgctgggtggtacgagaaatggtgggagaaatatgatgccaaaggttggacagaaaaaggtgctcacaaatatggaagattgaatgagcagtcctggtgggagagatggggtgaacattatgatggccgtggatttgttttgaaatggacagataagtgggcagagacagacttaggcaccaaatggggggacaagtgggaggagaaattctttgcaggaattggttctcgacaaggggagacatggcatgttggtcaagaacctggggagaagaacactttggtaacggaaaagtccacaagtatggaaagagcacaaccggcgagaggtgggacttggtagtcgacgaggagacatactacgaggcggagccccattacggatgggccgatgtcgtcggagactcgacgcagctgctgtccatacagcccgtggagaggccacccggcgtgttcccggccatcgacttcagctccgcgccgccgccgaaggacgctccgccgggcatgcccccttctcctctggactgagtgaattaggcctgccagcacagacggatttttctgtctatataggctccagattttgcctgtaagggaacagcattctttgtaggaagttgacggaaccccgttcctgcgttcattggttggctcattctttgctacgcattcctttcctctggctgggatatatatatattttgcttgggaactgggtggatgcaataatcaaacggcgcccgtggttgtgtgtgttgcccctgtccccctatgtgcttgcaacttggtctgaaggcagtgtggtctgggcaaagctttccacagcacgaacgaacgcgcttgagctcagtgcgcgtccgcgtgatgtctacaagtccacctcggg

SEQ ID NO: 263 - DNA, 1708 bp, Zea Mays
ctcgtcccggccaccgccgccgcactctcacggtcccacctctctgtggcatgagaagatggtcgcgtgctccaggggactcgcgtggccgccgttcgatctgaccacggcgaggggggcggcgtcctggccgcgccggcgtgccgcgatccggtgctgctgcgccggagcagacgcacagccgcagaggcgactctcgagggcggccgcggtcgcgcccgagcgcgccgaggagtggcgcatcgatgggaacaagccgtccgccgcggcaccgggacggcggcgcaccagcctcaccgccatgcccccgctccccttccctgcacctcgtatagctctagaagacaggtcaagcaaccggacttctacccgcggtgcactccgagggggtcggctcctcaatcccgtgataccccgcccaagagagacactggtattgctagtgagaaggaatggggaatcaacttgctggacgaagccgtcaaggagtctggaataaatgaagatggaagcacttggtacagggagagtggagatgatattggcgagaacgggtaccgctgccgctgggcaagaatgggaggacagagccatgatggttccaccgaatggaaagagacttggtgggagaaaagtgactggactggatataaggaattaggtgcggagaaatctgggaggaatgctgaaggagattcttggtgggagaaatggaaagaagttctgtaccaagacgaatggagcaatcttgcaagaatagagagaagtgctgagaaacaagcaaaatcaggcatagaaaatgctgggtggtacgagaaatggtgggagaaatatgatgccaaaggttggacagaaaaaggtgctcacaaatatggaagattgaatgagcagtcctggtgggagagatggggtgaacattatgatggccgtggatttgttttgaaatggacagataagtgggcagagacagacttaggcaccaaatggggggacaagtgggaggagaaattctttgcaggaattggttctcgacaaggggagacatggcatgtatgtcctggcggtgaacgttggtcaagaacctggggagaagaacactttggtaacggaaaagtccacaagtatggaaagagcacaaccggcgagaggtgggacttggtagtcgacgaggagacatactacgaggcggagccccattacggatgggccgatgtcgtcggagactcgacgcagctgctgtccatacagcccgtggagaggccacccggcgtgttcccggccatcgacttcagctccgcgccgccgccgaaggacgctccgccgggcatgcccccttctcctctggactgagtgaattaggcctgccagcacagacggatttttctgtctatataggctccagattttgcctgtaagggaacagcattctttgtaggaagttgacggaaccccgttcctgcgttcattggttggctcattctttgctacgcattcctttcctctggctgggatatatatatattttgcttgggaactgggtggatgcaataatcaaacggcgcccgtggttgtgtgtgttgcccctgtccccctatgtgcttgcaacttggtctgaaggcagtgtggtctgggcaaagctttccacagcacgaacgaacgcgcttgagctcagtgcgcgtccgcgtgatgtctacaagtccacctcggg

SEQ ID NO: 264 - DNA, 1629 bp, Zea Mays
atggtcgcgtgctccaggggactcgcgtggccgccgttcgatctgaccacggcgaggggggcggcgtcctggccgcgccggcgtgccgcgatccggtgctgctgcgccggagcagacgcacagccgcagaggcgactctcgagggcggccgcggtcgcgcccgagcgcgccgaggagtggcgcatcgatgggaacaagccgtccgccgcggcaccgggacggcggcgcaccagcctcaccgccatgcccccgctccccttccctgcacctcgctctagaagacaggtcaagcaaccggacttctacccgcggtgcactccgagggggtcggctcctcaatcccgtgataccccgcccaagagagtgagaaggaatggggaatcaacttgctggacgaagccgtcaaggagtctggaataaatgaagatggaagcacttggtacagggagagtggagatgatattggcgagaacgggtaccgctgccgctgggcaagaatgggaggacagagccatgatggttccaccgaatggaaagagacttggtgggagaaaagtgactggactggatataaggaattaggtgcggagaaatctgggaggaatgctgaaggagattcttggtgggagaaatggaaagaagttctgtaccaagacgaatggagcaatcttgcaagaatagagagaagtgctgagaaacaagcaaaatcaggcatagaaaatgctgggtggtacgagaaatggtgggagaaatatgatgccaaaggttggacagaaaaaggtgctcacaaatatggaagattgaatgagcagtcctggtgggagagatggggtgaacattatgatggccgtggatttgttttgaaatggacagataagtgggcagagacagacttaggcaccaaatggggggacaagtgggaggagaaattctttgcaggaattggttctcgacaaggggagacatggcatgtatgtcctggcggtgaacgttggtcaagaacctggggagaagaacactttggtaacggaaaagtccacaagtatggaaagagcacaaccggcgagaggtgggacttggtagtcgacgaggagacatactacgaggcggagccccattacggatgggccgatgtcgtcggagactcgacgcagctgctgtccatacagcccgtggagaggccacccggcgtgttcccggccatcgacttcagctccgcgccgccgccgaaggacgctccgccgggcatgcccccttctcctctggactgagtgaattaggcctgccagcacagacggatttttctgtctatataggctccagattttgcctgtaagggaacagcattctttgtaggaagttgacggaaccccgttcctgcgttcattggttggctcattctttgctacgcattcctttcctctggctgggatatatatatattttgcttgggaactgggtggatgcaataatcaaacggcgcccgtggttgtgtgtgttgcccctgtccccctatgtgcttgcaacttggtctgaaggcagtgtggtctgggcaaagctttccacagcacgaacgaacgcgcttgagctcagtgcgcgtccgcgtgatgtctacaagtccacctcggg

SEQ ID NO: 265 - DNA, 830 bp, Zea Mays
tttttcattcatacggagggggtccacactgcgagcatttaagcccattcgcgtcccgtcccgtcaaacaagcactcaaacctccctcccaagccctcttttttccctcgccgcggcgcaggcagagcagaggcactagcatgtcgccgttcgccgcccgcgtggcctccttggccgcgctgctgctcgccctcctgctcgcggcgccggcctcggccgccaacttcacctgcgccacagtgggcaaaacgtgccagtcggcgatcgggtacgcggtgcccaacgcgaccacgtacggggagctggtggcgcggttcaacgccaccacgacgctggcggagctgctgggcgccaacggcctccccgccacgacgccggcctcgacgccgctggcggccaaggccacggtgcgcgtgccgttccggtgccggtgcgggagcaacggcgtggggcagtcggacgggggacccttctacgtggtgtacccgctggacgggctggaccacatcgcgcgggaggtgttcggcggcttcgtcacctaccaggagatcgccaccgccaacaacatcaccaacgtcaacctcatcgtcgtcgggcagaagctcaggatcccgctgccctgcacctgcgaccaggtggacggcgccgacgtcatgcacttcgcctacagcgtcgccaagggggacgacccgcccggcatcgccgccaggttcggggtcaccgagaccacgctgctgagtgtgaataagatcaccgaccccaagaccagcctgcagcaggggcagatcctggatgtccccctccctggtctcaaatggcataccactatt

SEQ ID NO: 266 - DNA, 2346 bp, Zea Mays
gccagttcgttaggcccagatgtacctgtatattgatagagcccatctctgccttgcttcctcggttgttcctcccccttcttttattaggttttttttgtctcattggatttgcgcctgtgctgctcacctgagcgcatactagtctctgcatcagctgcatcagagagtagagacctccgagctgctcttcaacacgcagattgggcagagccgcaaggtgcctgccgggagagagtgaaaagtgagagagcgcgcgctcaagggggccaaaaggaatttttttttatccagcttcttagcttgattctatctgatccgggagagcagccgccagtccaactaatccttgctgttggtgtgccggggctttgattgctctccagatctgaggcacctgctgggtggattccaggaatcctagcacgaagttgacagtggagttctcagggaggaaggaagaggctgaaagggcggcggagagagaaaggctataagagcgagctgggtccctcgaggatgccatcaagaaaccgcgtggaggggagggcgatgagatgagggatgctggccgcggtgatggactactttagctcctgctggggcccgcgatcgggtgccgggcaccgggaaaagggctccgacgccgctggccggcaggacggtctcctctggtacaaggacgtcgggcagctcgtcactggggagttctccatggccgtggtgcaggccaaccagctgctcgaggaccagagccaagtggagtccggatcgctctccctggctgacacgggcccgcagggcaccttcgtcggcgtctatgatggccatggcggcccggagacgtcccggttcatcaatgaccacctcttcaaccatctcagaaggtttgcaactgagcacaagtttatgtcagcggacgtgatccggaaagctttccaagcaactgaggagggctttctttctctagtcagcaaggaatggtctttgaagcctcagattgcttcagtgggctcctgctgccttgttggtgtaatctgtgctgggactctctatgttgcaaacctgggcgactcacgtgcagttcttggaaggcttgttaaggcaactggagaggttttggccattcagttgtcatcggagcacaatgcgtgctatgaggaagttagacaagagctgcagtcatcacatcctgatgatccacatattgttgttctcaaacacaatgtttggcgtgtgaagggtatcatccagtcagaagacgggcgggcgaagcaagaggaagcacgcgcgcgttgtcgctaagggagaacggagccgcgccgccgtggaaggtttgactggcgggcagagcaggagggtcgtgccactgcggaagagggttgctgccaccacctagggatgtaaatgatctcaagatctattggagatgtatatctaaagaaaccagagtataatagagaaccgcttcacagcaagtttcggcttcgagaaaccttccagaggccgatccttagttctgaacctcaaattactgaacatcgaatacagccaaacgatcaatttgttatatttgcttctgatggtctatgggagcacctcagcaataaggaagcagttgaccttgtccaaagtagtccccgaaatggaatcgctcggagactagtgaaagccgcgatgcaagaagctgccaagaagagggagatgagatattcagacctcaagaagatcgaccgtggtgtgagaaggcatttccacgacgatataactgtcgtcgtggtgttcatgccatgagcaaagctagctggagcaaaagcccctcggtttctcttcgagggggcggtgtcacccttcctgcggagtccctcgcacctttctcagctccggcatggttgaagagcaccaactgaagctgctgctactcttgaaaggaagagcacagtgcaggtctgcaggagagatgaaaaaagaacagcaatcaagtgtagcgttacacttgcacctgctgtgttgttgctcttcgcgaaactactgtcttgactctagactacgcctggtaattagtgcactgatagcgacgcaaatcctttcacattcttttctctccctcgacatgagatgagaattgagatactccattcatccaggaaaataggaccgattatggagaaaagacaaaatttaaccaacaattactcaatgtatgtgtaagtttaggatacaacttatattagtagatttattatattcaattgactccgagattatattactaatttcttttagaaattgaaaacactccattcgttccaaaatagtagtaattttagagaattagtaggttca

SEQ ID NO: 267 - DNA, 2182 bp, Zea Mays
gttaggcccagatgtacctgtatattgatagagcccatctctgccttgcttcctcggttgttcctcccccttcttttattaggttttttttgtctcattggatttgcgcctgtgctgctcacctgagcgcatactagtctctgcatcagctgcatcagagagtagagacctccgagctgctcttcaacacgcagattgggcagagccgcaaggtgcctgccgggagagagtgaaaagtgagagagcgcgcgctcaagggggccaaaaggaatttttttttatccagcttcttagcttgattctatctgatccgggagagcagccgccagtccaactaatccttgctgttggtgtgccggggctttgattgctctccagatctgaggcacctgctgggtggattccaggaatcctagcacgaagttgacagtggagttctcagggaggaaggaagaggctgaaagggcggcggagagagaaaggctataagagcgagctgggtccctcgaggatgccatcaagaaaccgcgtggaggggagggcgatgagatgagggatgctggccgcggtgatggactactttagctcctgctggggcccgcgatcgggtgccgggcaccgggaaaagggctccgacgccgctggccggcaggacggtctcctctggtacaaggacgtcgggcagctcgtcactggggagttctccatggccgtggtgcaggccaaccagctgctcgaggaccagagccaagtggagtccggatcgctctccctggctgacacgggcccgcagggcaccttcgtcggcgtctatgatggccatggcggcccggagacgtcccggttcatcaatgaccacctcttcaaccatctcagaaggtttgcaactgagcacaagtttatgtcagcggacgtgatccggaaagctttccaagcaactgaggagggctttctttctctagtcagcaaggaatggtctttgaagcctcagattgcttcagtgggctcctgctgccttgttggtgtaatctgtgctgggactctctatgttgcaaacctgggcgactcacgtgcagttcttggaaggcttgttaaggcaactggagaggttttggccattcagttgtcatcggagcacaatgcgtgctatgaggaagttagacaagagctgcagtcatcacatcctgatgatccacatattgttgttctcaaacacaatgtttggcgtgtgaagggtatcatccagatctcaagatctattggagatgtatatctaaagaaaccagagtataatagagaaccgcttcacagcaagtttcggcttcgagaaaccttccagaggccgatccttagttctgaacctcaaattactgaacatcgaatacagccaaacgatcaatttgttatatttgcttctgatggtctatgggagcacctcagcaataaggaagcagttgaccttgtccaaagtagtccccgaaatggaatcgctcggagactagtgaaagccgcgatgcaagaagctgccaagaagagggagatgagatattcagacctcaagaagatcgaccgtggtgtgagaaggcatttccacgacgatataactgtcgtcgtggtgttcatgccatgagcaaagctagctggagcaaaagcccctcggtttctcttcgagggggcggtgtcacccttcctgcggagtccctcgcacctttctcagctccggcatggttgaagagcaccaactgaagctgctgctactcttgaaaggaagagcacagtgcaggtctgcaggagagatgaaaaaagaacagcaatcaagtgtagcgttacacttgcacctgctgtgttgttgctcttcgcgaaactactgtcttgactctagactacgcctggtaattagtgcactgatagcgacgcaaatcctttcacattcttttctctccctcgacatgagatgagaattgagatactccattcatccaggaaaataggaccgattatggagaaaagacaaaatttaaccaacaattactcaatgtatgtgtaagtttaggatacaacttatattagtagatttattatattcaattgactccgagattatattactaatttcttttagaaattgaaaacactccattcgttccaaaatagtagtaattttagagaattagtaggttca

SEQ ID NO: 268 - DNA, 2273 bp, Zea Mays
cttttattaggttttttttgtctcattggatttgcgcctgtgctgctcacctgagcgcatactagtctctgcatcagctgcatcagagagtagagacctccgagctgctcttcaacacgcagattgggcagagccgcaaggtgcctgccgggagagagtgaaaagtgagagagcgcgcgctcaagggggccaaaaggaatttttttttatccagcttcttagcttgattctatctgatccgggagagcagccgccagtccaactaatccttgctgttggtgtgccggggctttgattgctctccagatctgaggcacctgctgggtggattccaggaatcctagcacgaagttgacagtggagttctcaggtaaaagggaggaaggaagaggctgaaagggcggcggagagagaaaggctataagagcgagctgggtccctcgaggatgccatcaagaaaccgcgtggaggggagggcgatgagatgagggatgctggccgcggtgatggactactttagctcctgctggggcccgcgatcgggtgccgggcaccgggaaaagggctccgacgccgctggccggcaggacggtctcctctggtacaaggacgtcgggcagctcgtcactggggagttctccatggccgtggtgcaggccaaccagctgctcgaggaccagagccaagtggagtccggatcgctctccctggctgacacgggcccgcagggcaccttcgtcggcgtctatgatggccatggcggcccggagacgtcccggttcatcaatgaccacctcttcaaccatctcagaaggtttgcaactgagcacaagtttatgtcagcggacgtgatccggaaagctttccaagcaactgaggagggctttctttctctagtcagcaaggaatggtctttgaagcctcagattgcttcagtgggctcctgctgccttgttggtgtaatctgtgctgggactctctatgttgcaaacctgggcgactcacgtgcagttcttggaaggcttgttaaggcaactggagaggttttggccattcagttgtcatcggagcacaatgcgtgctatgaggaagttagacaagagctgcagtcatcacatcctgatgatccacatattgttgttctcaaacacaatgtttggcgtgtgaagggtatcatccagtcagaagacgggcgggcgaagcaagaggaagcacgcgcgcgttgtcgctaagggagaacggagccgcgccgccgtggaaggtttgactggcgggcagagcaggagggtcgtgccactgcggaagagggttgctgccaccacctagggatgtaaatgatctcaagatctattggagatgtatatctaaagaaaccagagtataatagagaaccgcttcacagcaagtttcggcttcgagaaaccttccagaggccgatccttagttctgaacctcaaattactgaacatcgaatacagccaaacgatcaatttgttatatttgcttctgatggtctatgggagcacctcagcaataaggaagcagttgaccttgtccaaagtagtccccgaaatggaatcgctcggagactagtgaaagccgcgatgcaagaagctgccaagaagagggagatgagatattcagacctcaagaagatcgaccgtggtgtgagaaggcatttccacgacgatataactgtcgtcgtggtgttcatgccatgagcaaagctagctggagcaaaagcccctcggtttctcttcgagggggcggtgtcacccttcctgcggagtccctcgcacctttctcagctccggcatggttgaagagcaccaactgaagctgctgctactcttgaaaggaagagcacagtgcaggtctgcaggagagatgaaaaaagaacagcaatcaagtgtagcgttacacttgcacctgctgtgttgttgctcttcgcgaaactactgtcttgactctagactacgcctggtaattagtgcactgatagcgacgcaaatcctttcacattcttttctctccctcgacatgagatgagaattgagatactccattcatccaggaaaataggaccgattatggagaaaagacaaaatttaaccaacaattactcaatgtatgtgtaagtttaggatacaacttatattagtagatttattatattcaattgactccgagattatattactaatttcttttagaaattgaaaacactccattcgttccaaaatagtagtaattttagagaattagtaggttca

SEQ ID NO: 269 - DNA, 2153 bp, Zea Mays
attggatttgcgcctgtgctgctcacctgagcgcatactagtctctgcatcagctgcatcagagagtagagacctccgagctgctcttcaacacgcagattgggcagagccgcaaggtgcctgccgggagagagtgaaaagtgagagagcgcgcgctcaagggggccaaaaggaatttttttttatccagcttcttagcttgattctatctgatccgggagagcagccgccagtccaactaatccttgctgttggtgtgccggggctttgattgctctccagatctgaggcacctgctgggtggattccaggaatcctagcacgaagttgacagtggagttctcaggtaaaagggaggaaggaagaggctgaaagggcggcggagagagaaaggctataagagcgagctgggtccctcgaggatgccatcaagaaaccgcgtggaggggagggcgatgagatgagggatgctggccgcggtgatggactactttagctcctgctggggcccgcgatcgggtgccgggcaccgggaaaagggctccgacgccgctggccggcaggacggtctcctctggtacaaggacgtcgggcagctcgtcactggggagttctccatggccgtggtgcaggccaaccagctgctcgaggaccagagccaagtggagtccggatcgctctccctggctgacacgggcccgcagggcaccttcgtcggcgtctatgatggccatggcggcccggagacgtcccggttcatcaatgaccacctcttcaaccatctcagaaggtttgcaactgagcacaagtttatgtcagcggacgtgatccggaaagctttccaagcaactgaggagggctttctttctctagtcagcaaggaatggtctttgaagcctcagattgcttcagtgggctcctgctgccttgttggtgtaatctgtgctgggactctctatgttgcaaacctgggcgactcacgtgcagttcttggaaggcttgttaaggcaactggagaggttttggccattcagttgtcatcggagcacaatgcgtgctatgaggaagttagacaagagctgcagtcatcacatcctgatgatccacatattgttgttctcaaacacaatgtttggcgtgtgaagggtatcatccagtcagaagacgggcgggcgaagcaagaggaagcacgcgcgcgttgtcgctaagggagaacggagccgcgccgccgtggaaggtttgactggcgggcagagcaggagggtcgtgccactgcggaagagggttgctgccaccacctagggatgtaaatgatctcaagatctattggagatgtatatctaaagaaaccagagtacaacagagaaccacttcacagcaagtttcggcttcgagaaaccttccagaggccgatccttagttctgaacctcaaattactgaacatcgaatacagccgaacgatcaatttgttatatttgcttctgatggtctatgggagcacctcagcaataaggaagcagttgaccttgtccaaagtagtccccgaaatggaatcgctcggaggctagtgaaagccgcgatgcaagaagctgccaagaagagggagatgagatactcagacctcaagaagatcgaccgtggtgtgagaaggcatttccacgacgatataactgtcgtcgtggtattcctcgattcggatgccatgagcaaagctagctggagcaaaagcccctcggtttctctccgagggggcggtgtcgccctccctgcgaagtccctcgcacctttctcagctccggcacggctgaacagcacctactgaagttgctaccactcttgaaaggaagaacacagtgcagatctgcagtggtgagagagagagaaaacagcaaccaagtgtagcgttacagttacacctgctgtgttgttgctctttgcaaaactactgtctagactccgcctggtaattagtgtactgatagcgaggtaaaaaagttagattatttgttagcgacacacatcctttcaccttctcttctctccctcgattcctatcccttttctcttcatccttgagagaacaggtggttgtaaattgttcagaacatgttttcccttatagtccatcatatcccgcttttttcgtgttgat

SEQ ID NO: 270 - DNA, 1901 bp, Zea Mays
ctgagcgcatactagtctctgcatcagctgcatcagagagtagagacctccgagctgctcttcaacacgcagattgggcagagccgcaagatctgaggcacctgctgggtggattccaggaatcctagcacgaagttgacagtggagttctcaggtaaaagggaggaaggaagaggctgaaagggcggcggagagagaaaggctataagagcgagctgggtccctcgaggatgccatcaagaaaccgcgtggaggggagggcgatgagatgagggatgctggccgcggtgatggactactttagctcctgctggggcccgcgatcgggtgccgggcaccgggaaaagggctccgacgccgctggccggcaggacggtctcctctggtacaaggacgtcgggcagctcgtcactggggagttctccatggccgtggtgcaggccaaccagctgctcgaggaccagagccaagtggagtccggatcgctctccctggctgacacgggcccgcagggcaccttcgtcggcgtctatgatggccatggcggcccggagacgtcccggttcatcaatgaccacctcttcaaccatctcagaaggtttgcaactgagcacaagtttatgtcagcggacgtgatccggaaagctttccaagcaactgaggagggctttctttctctagtcagcaaggaatggtctttgaagcctcagattgcttcagtgggctcctgctgccttgttggtgtaatctgtgctgggactctctatgttgcaaacctgggcgactcacgtgcagttcttggaaggcttgttaaggcaactggagaggttttggccattcagttgtcatcggagcacaatgcgtgctatgaggaagttagacaagagctgcagtcatcacatcctgatgatccacatattgttgttctcaaacacaatgtttggcgtgtgaagggtatcatccagatctcaagatctattggagatgtatatctaaagaaaccagagtataatagagaaccgcttcacagcaagtttcggcttcgagaaaccttccagaggccgatccttagttctgaacctcaaattactgaacatcgaatacagccaaacgatcaatttgttatatttgcttctgatggtctatgggagcacctcagcaataaggaagcagttgaccttgtccaaagtagtccccgaaatggaatcgctcggagactagtgaaagccgcgatgcaagaagctgccaagaagagggagatgagatattcagacctcaagaagatcgaccgtggtgtgagaaggcatttccacgacgatataactgtcgtcgtggtgttcatgccatgagcaaagctagctggagcaaaagcccctcggtttctcttcgagggggcggtgtcacccttcctgcggagtccctcgcacctttctcagctccggcatggttgaagagcaccaactgaagctgctgctactcttgaaaggaagagcacagtgcaggtctgcaggagagatgaaaaaagaacagcaatcaagtgtagcgttacacttgcacctgctgtgttgttgctcttcgcgaaactactgtcttgactctagactacgcctggtaattagtgcactgatagcgacgcaaatcctttcacattcttttctctccctcgacatgagatgagaattgagatactccattcatccaggaaaataggaccgattatggagaaaagacaaaatttaaccaacaattactcaatgtatgtgtaagtttaggatacaacttatattagtagatttattatattcaattgactccgagattatattactaatttcttttagaaattgaaaacactccattcgttccaaaatagtagtaattttagagaattagtaggttca

SEQ ID NO: 271 - DNA, 1969 bp, Zea Mays
cctcttgtcccttgacatgtttctgccgcctacactggacgacgcttgatgcatacgagatgatgagttggccggaggaaggaagaggctgaaagggcggcggagagagaaaggctataagagcgagctgggtccctcgaggatgccatcaagaaaccgcgtggaggggagggcgatgagatgagggatgctggccgcggtgatggactactttagctcctgctggggcccgcgatcgggtgccgggcaccgggaaaagggctccgacgccgctggccggcaggacggtctcctctggtacaaggacgtcgggcagctcgtcactggggagttctccatggccgtggtgcaggccaaccagctgctcgaggaccagagccaagtggagtccggatcgctctccctggctgacacgggcccgcagggcaccttcgtcggcgtctatgatggccatggcggcccggagacgtcccggttcatcaatgaccacctcttcaaccatctcagaaggtttgcaactgagcacaagtttatgtcagcggacgtgatccggaaagctttccaagcaactgaggagggctttctttctctagtcagcaaggaatggtctttgaagcctcagattgcttcagtgggctcctgctgccttgttggtgtaatctgtgctgggactctctatgttgcaaacctgggcgactcacgtgcagttcttggaaggcttgttaaggcaactggagaggttttggccattcagttgtcatcggagcacaatgcgtgctatgaggaagttagacaagagctgcagtcatcacatcctgatgatccacatattgttgttctcaaacacaatgtttggcgtgtgaagggtatcatccagtcagaagacgggcgggcgaagcaagaggaagcacgcgcgcgttgtcgctaagggagaacggagccgcgccgccgtggaaggtttgactggcgggcagagcaggagggtcgtgccactgcggaagagggttgctgccaccacctagggatgtaaatgatctcaagatctattggagatgtatatctaaagaaaccagagtataatagagaaccgcttcacagcaagtttcggcttcgagaaaccttccagaggccgatccttagttctgaacctcaaattactgaacatcgaatacagccaaacgatcaatttgttatatttgcttctgatggtctatgggagcacctcagcaataaggaagcagttgaccttgtccaaagtagtccccgaaatggaatcgctcggagactagtgaaagccgcgatgcaagaagctgccaagaagagggagatgagatattcagacctcaagaagatcgaccgtggtgtgagaaggcatttccacgacgatataactgtcgtcgtggtgttcatgccatgagcaaagctagctggagcaaaagcccctcggtttctcttcgagggggcggtgtcacccttcctgcggagtccctcgcacctttctcagctccggcatggttgaagagcaccaactgaagctgctgctactcttgaaaggaagagcacagtgcaggtctgcaggagagatgaaaaaagaacagcaatcaagtgtagcgttacacttgcacctgctgtgttgttgctcttcgcgaaactactgtcttgactctagactacgcctggtaattagtgcactgatagcgacgcaaatcctttcacattcttttctctccctcgacatgagatgagaattgagatactccattcatccaggaaaataggaccgattatggagaaaagacaaaatttaaccaacaattactcaatgtatgtgtaagtttaggatacaacttatattagtagatttattatattcaattgactccgagattatattactaatttcttttagaaattgaaaacactccattcgttccaaaatagtagtaattttagagaattagtaggttca

SEQ ID NO: 272 - DNA, 1764 bp, Zea Mays
tgcatacgagatgatgagttggccggaggaaggaagaggctgaaagggcggcggagagagaaaggctataagagcgagctgggtccctcgaggatgccatcaagaaaccgcgtggaggggagggcgatgagatgagggatgctggccgcggtgatggactactttagctcctgctggggcccgcgatcgggtgccgggcaccgggaaaagggctccgacgccgctggccggcaggacggtctcctctggtacaaggacgtcgggcagctcgtcactggggagttctccatggccgtggtgcaggccaaccagctgctcgaggaccagagccaagtggagtccggatcgctctccctggctgacacgggcccgcagggcaccttcgtcggcgtctatgatggccatggcggcccggagacgtcccggttcatcaatgaccacctcttcaaccatctcagaaggtttgcaactgagcacaagtttatgtcagcggacgtgatccggaaagctttccaagcaactgaggagggctttctttctctagtcagcaaggaatggtctttgaagcctcagattgcttcagtgggctcctgctgccttgttggtgtaatctgtgctgggactctctatgttgcaaacctgggcgactcacgtgcagttcttggaaggcttgttaaggcaactggagaggttttggccattcagttgtcatcggagcacaatgcgtgctatgaggaagttagacaagagctgcagtcatcacatcctgatgatccacatattgttgttctcaaacacaatgtttggcgtgtgaagggtatcatccagatctcaagatctattggagatgtatatctaaagaaaccagagtataatagagaaccgcttcacagcaagtttcggcttcgagaaaccttccagaggccgatccttagttctgaacctcaaattactgaacatcgaatacagccaaacgatcaatttgttatatttgcttctgatggtctatgggagcacctcagcaataaggaagcagttgaccttgtccaaagtagtccccgaaatggaatcgctcggagactagtgaaagccgcgatgcaagaagctgccaagaagagggagatgagatattcagacctcaagaagatcgaccgtggtgtgagaaggcatttccacgacgatataactgtcgtcgtggtgttcatgccatgagcaaagctagctggagcaaaagcccctcggtttctcttcgagggggcggtgtcacccttcctgcggagtccctcgcacctttctcagctccggcatggttgaagagcaccaactgaagctgctgctactcttgaaaggaagagcacagtgcaggtctgcaggagagatgaaaaaagaacagcaatcaagtgtagcgttacacttgcacctgctgtgttgttgctcttcgcgaaactactgtcttgactctagactacgcctggtaattagtgcactgatagcgacgcaaatcctttcacattcttttctctccctcgacatgagatgagaattgagatactccattcatccaggaaaataggaccgattatggagaaaagacaaaatttaaccaacaattactcaatgtatgtgtaagtttaggatacaacttatattagtagatttattatattcaattgactccgagattatattactaatttcttttagaaattgaaaacactccattcgttccaaaatagtagtaattttagagaattagtaggttca

SEQ ID NO: 273 - DNA, 950 bp, Zea Mays
aaaaatattatcagatctcaagatctattggagatgtatatctaaagaaaccagagtataatagagaaccgcttcacagcaagtttcggcttcgagaaaccttccagaggccgatccttagttctgaacctcaaattactgaacatcgaatacagccaaacgatcaatttgttatatttgcttctgatggtctatgggagcacctcagcaataaggaagcagttgaccttgtccaaagtagtccccgaaatggaatcgctcggagactagtgaaagccgcgatgcaagaagctgccaagaagagggagatgagatattcagacctcaagaagatcgaccgtggtgtgagaaggcatttccacgacgatataactgtcgtcgtggtgttcatgccatgagcaaagctagctggagcaaaagcccctcggtttctcttcgagggggcggtgtcacccttcctgcggagtccctcgcacctttctcagctccggcatggttgaagagcaccaactgaagctgctgctactcttgaaaggaagagcacagtgcaggtctgcaggagagatgaaaaaagaacagcaatcaagtgtagcgttacacttgcacctgctgtgttgttgctcttcgcgaaactactgtcttgactctagactacgcctggtaattagtgcactgatagcgacgcaaatcctttcacattcttttctctccctcgacatgagatgagaattgagatactccattcatccaggaaaataggaccgattatggagaaaagacaaaatttaaccaacaattactcaatgtatgtgtaagtttaggatacaacttatattagtagatttattatattcaattgactccgagattatattactaatttcttttagaaattgaaaacactccattcgttccaaaatagtagtaattttagagaattagtaggttca

SEQ ID NO: 274 - DNA, 1093 bp, Zea Mays
gtcagaagacgggcgggcgaagcaagaggaagcacgcgcgcgttgtcgctaagggagaacggagccgcgccgccgtggaaggtttgactggcgggcagagcaggagggtcgtgccactgcggaagagggttgctgccaccacctagggatgtaaatgatctcaagatctattggagatgtatatctaaagaaaccagagtataatagagaaccgcttcacagcaagtttcggcttcgagaaaccttccagaggccgatccttagttctgaacctcaaattactgaacatcgaatacagccaaacgatcaatttgttatatttgcttctgatggtctatgggagcacctcagcaataaggaagcagttgaccttgtccaaagtagtccccgaaatggaatcgctcggagactagtgaaagccgcgatgcaagaagctgccaagaagagggagatgagatattcagacctcaagaagatcgaccgtggtgtgagaaggcatttccacgacgatataactgtcgtcgtggtgttcatgccatgagcaaagctagctggagcaaaagcccctcggtttctcttcgagggggcggtgtcacccttcctgcggagtccctcgcacctttctcagctccggcatggttgaagagcaccaactgaagctgctgctactcttgaaaggaagagcacagtgcaggtctgcaggagagatgaaaaaagaacagcaatcaagtgtagcgttacacttgcacctgctgtgttgttgctcttcgcgaaactactgtcttgactctagactacgcctggtaattagtgcactgatagcgacgcaaatcctttcacattcttttctctccctcgacatgagatgagaattgagatactccattcatccaggaaaataggaccgattatggagaaaagacaaaatttaaccaacaattactcaatgtatgtgtaagtttaggatacaacttatattagtagatttattatattcaattgactccgagattatattactaatttcttttagaaattgaaaacactccattcgttccaaaatagtagtaattttagagaattagtaggttca

SEQ ID NO: 275 - DNA, 233 bp, Zea Mays
ttcttgagagaactagatacaagtgatctttataagggacagagatgtccatgtattgtttgctatacacagctgcttgcaccttgagcggaaaataagcatttccctgaccctttgaagtttgaacacgaaccatttcagttacttacatgccatgatcaggatgacagcttgatttcagatcctacctaacaaacagtgataccaacaactgggagaacagaataaattca

SEQ ID NO: 276 - DNA, 2123 bp, Zea Mays
gcatcagagtagtggcctccgagctgctcttcaacacacagattcggcagagcctgccgagagagagtgaaaagagagggagcgcgctcaaggtgtggcgcaaggagatttttcttttatccagcttcttagcatgattctctttgatcccggagagcagccaccggtccaactagtccttgctgttggtctgccggaacttttgattgctctccagatctgaggcacctgctgggtggattccaggaacccgagcacgaagttgacaggtgagttctcagggaaaaaggtgagcccctttttttctctccctccccatccgtccaccattgccaaactgtccgtccgcctacactggacgaacaatagtaatcgtgtagtcttagctccgattgttaagcttcaactgttacctattgtcccttgatctgtttctgccgcctacactggacgacgcttcatgcatacgagatgatgagggaggaaggaagaggctgaaagggcggtggagagagaaagactataagggcgagctgagtcccttgaggatgccgtcaagaaaccgcgtggagaggagggcgatgagatgagggatgctggccgcggtgatggactacttcagctcctgctggggcccgcgatcgggcgccgggcaccggggcaagggctccgacgccgccggccggcaggacggtctcctctggtacaaggacgccggccagctcgtcactggggagttctccatggccgtggtgcaggccaaccagctcctcgaggaccagagccaagtagagtccggatcgctctccctggctgacccgggcccacagggcaccttcgtcggcgtctatgatggccatggcggcccggagacgtcccggttcatcaatgaccacctcttcaaccatctcagaaggtttgcaactgagcacaagtttatgtcagcggacgtgatccggaaagctttccaagcaactgaggagggctttctttctctagtcagcaaggaatggtctttgaagcctcagattgcttcagtgggctcctgctgccttgttggtgtaatctgtgctgggactctctatgttgcaaacgtgggcgactcacgtgcagttcttggaaggcttgttaaggcaactggagaggttgtggccatgcagttgtcatcggagcacaatgcgtgctatgaggaagttagacaagaactgcagtcatcacatcctgacgatccacatattgtggttctcaaacacaatgtttggcgagtgaagggtctcatccagatctcaagatctattggagatgtatatctaaagaaaccagagtacaacagagaaccacttcacagcaagtttcggcttcgagaaaccttccagaggccgatccttagttctgaacctcaaattactgaacatcgaatacagccgaacgatcaatttgttatatttgcttctgatggtctatgggagcacctcagcaataaggaagcagttgaccttgtccaaagtagtccccgaaatggaatcgctcggaggctagtgaaagccgcgatgcaagaagctgccaagaagagggagatgagatactcagacctcaagaagatcgaccgtggtgtgagaaggcatttccacgacgatataactgtcgtcgtggtattcctcgattcggatgccatgagcaaagctagctggagcaaaagcccctcggtttctctccgagggggcggtgtcgccctccctgcgaagtccctcgcacctttctcagctccggcacggctgaacagcacctactgaagttgctaccactcttgaaaggaagaacacagtgcagatctgcagtggtgagagagagagaaaacagcaaccaagtgtagcgttacagttacacctgctgtgttgttgctctttgcaaaactactgtctagactccgcctggtaattagtgtactgatagcgaggtaaaaaagttagattatttgttagcgacacacatcctttcaccttctcttctctccctcgattcctatcccttttctcttcatccttgagagaacaggtggttgtaaattgttcagaacatgttttcccttatagtccatcatatcccgcttttttcgtgttgat

SEQ ID NO: 277 - DNA, 2512 bp, Zea Mays
gcaccttacaagagagaagtcggcccaagtagcgtgcgcgcagaagctactcccgaagagtcgctctcctgcgtccacgcctcgcttgcggcgactagggcgactgccgccgccgcccttcgcccagctgcccaggtcttcgtcgggcgctttaccggtgaagagcgcccaccataccagtcgtggcgccgagccctactcctcctcccgccgccgccgccgccgccgcagactcttcctcgcgactcgccgctcgcccgactttccgagctccgacaccaaggaacaccatgggagagtcgagcaaggagctcctggacctgccctccgaccccaggcctcccgcctccttcatcgagtcgcttctcgctggcagggagcagcagcagcaggataaggagggaaagcgtaagttgggggcgtccactgatcccctgcccaaaagccaaggtactgttgaactagctcttcagcttgtacaagtgtctgatcagaaacgcggtaaggccgtaagggggctaaatagaagctcgaaatctttctagcggcacaatatagataaataatgatatcaatttcattgcctgcagtcagaaaatcataatgctacatgcaactttaagcagttattaagtctaaactaagcagggccacttaaaaaagggtgcatacccagtgccggagctttgtacatacagggatctaggaactgaggcaagatttctctcacgactgcaccagtcctacccttcaagcagggacacttaccagaagtttttttcccaatggtgcagtcagcaacttgtcctttgcattaggtaaatcatgtgtctctagacaggttccaaaacttaccaacatcagaattacaaatgtccaacaagcttcctatcctctacaataagtggcaatgcaaatagaactgatttgtgttaaaaggaggaccgtgaaagcggaacctgggacaggattggaacacagcaggttgtcttgcatcagcatttggcaaataatgaaaaaatattgaaaatcctgagatagtagccctcttacttgtgtgatgcggcaaacatgcttttctgtgttccctgtcgattcgacttgggtgtttggttctcggttgtgaaccaagttactgtggcggcagtggatgctggaacagttgcagatgcaggaatagcagaagcaagcaagcaatggtgttggtgcaggtggatctgtgcagtgtgcccactgcccactgcctagccatagcgtcagctagcccaagcagtgaggcctgtggaagaggaggtgaggtctcgaggggtgaggggcagagggtcgatggtgaggccgggaggtaccaccgcaccagcgtgaaggagaacagatacggagtggaggggaggcttctcgctcggcactcagagaggtgggcagctgccaattcagctagggtggctggagtccttttgtgggctgttcttggattacacagaagagttgtagtggaatttttctgggctcgccccaggctgcagccacccccagccctggggcctgaatccgcctctggctcgtacagtactttttgtattataacatttgtcgactagccctagatcccaagttatcacattacctttttatttgtactgtatttccttatagtcttaaatcacaccactgaatcatgtagtttcctaggtttaaggctgcagtacggcatagttagtaggtggtacacaaaagaatttctggtgttcttttgtgtgccagttcactgaattttgattgattgttttggtgtgtcagttatcgggaaagtgaaggatttcttgggggagattgcaagggccaaccagaagttgcagcttgatgcacagaacaagcctcctgtggagtacgatattgaagcccttactgggaacgaggaggaatacattgagatggatctgcttctaggtgtcgctgatcttcattcagagcaggctgtggaggcagctgaagcaacaataaacggacgccagacttcagaaatgtcatttgctttgcagctcatctgactcggaagatgatagtgatgacagcgatgaagatgctgatgacaaacctctcacgtctgacaaagataataaatgtaaaagtcctgatgatgcggagatgggtccagcgaaaggaaagaagcccaataaaagacagaaaattgttgttctcaactagtacccttgtcttctgtacacctaagaacaagggctggagcgcaagtggtgaatgtgttggcctggtattatcagaagttacggagggactctctctgttcttttttatttgtcacggtttagtttaaaaatgaacaggggacaaatattcgagaagggaggttgtatttttttcagtgttgtgcaatgttcaggccagctagggcaacgtgcacgggggctaaaagaagtaatgcatattccagtttatacaatgcgttccaatgttctggcctctgtatggtttccttgtgattttttaggtagag

SEQ ID NO: 278 - DNA, 2538 bp, Zea Mays
gcaccttacaagagagaagtcggcccaagtagcgtgcgcgcagaagctactcccgaagagtcgctctcctgcgtccacgcctcgcttgcggcgactagggcgactgccgccgccgcccttcgcccagctgcccaggtcttcgtcgggcgctttaccggtgaagagcgcccaccataccaggccccgcaccttttaacaagttccagtcgtggcgccgagccctactcctcctcccgccgccgccgccgccgccgcagactcttcctcgcgactcgccgctcgcccgactttccgagctccgacaccaaggaacaccatgggagagtcgagcaaggagctcctggacctgccctccgaccccaggcctcccgcctccttcatcgagtcgcttctcgctggcagggagcagcagcagcaggataaggagggaaagcgtaagttgggggcgtccactgatcccctgcccaaaagccaaggtactgttgaactagctcttcagcttgtacaagtgtctgatcagaaacgcggtaaggccgtaagggggctaaatagaagctcgaaatctttctagcggcacaatatagataaataatgatatcaatttcattgcctgcagtcagaaaatcataatgctacatgcaactttaagcagttattaagtctaaactaagcagggccacttaaaaaagggtgcatacccagtgccggagctttgtacatacagggatctaggaactgaggcaagatttctctcacgactgcaccagtcctacccttcaagcagggacacttaccagaagtttttttcccaatggtgcagtcagcaacttgtcctttgcattaggtaaatcatgtgtctctagacaggttccaaaacttaccaacatcagaattacaaatgtccaacaagcttcctatcctctacaataagtggcaatgcaaatagaactgatttgtgttaaaaggaggaccgtgaaagcggaacctgggacaggattggaacacagcaggttgtcttgcatcagcatttggcaaataatgaaaaaatattgaaaatcctgagatagtagccctcttacttgtgtgatgcggcaaacatgcttttctgtgttccctgtcgattcgacttgggtgtttggttctcggttgtgaaccaagttactgtggcggcagtggatgctggaacagttgcagatgcaggaatagcagaagcaagcaagcaatggtgttggtgcaggtggatctgtgcagtgtgcccactgcccactgcctagccatagcgtcagctagcccaagcagtgaggcctgtggaagaggaggtgaggtctcgaggggtgaggggcagagggtcgatggtgaggccgggaggtaccaccgcaccagcgtgaaggagaacagatacggagtggaggggaggcttctcgctcggcactcagagaggtgggcagctgccaattcagctagggtggctggagtccttttgtgggctgttcttggattacacagaagagttgtagtggaatttttctgggctcgccccaggctgcagccacccccagccctggggcctgaatccgcctctggctcgtacagtactttttgtattataacatttgtcgactagccctagatcccaagttatcacattacctttttatttgtactgtatttccttatagtcttaaatcacaccactgaatcatgtagtttcctaggtttaaggctgcagtacggcatagttagtaggtggtacacaaaagaatttctggtgttcttttgtgtgccagttcactgaattttgattgattgttttggtgtgtcagttatcgggaaagtgaaggatttcttgggggagattgcaagggccaaccagaagttgcagcttgatgcacagaacaagcctcctgtggagtacgatattgaagcccttactgggaacgaggaggaatacattgagatggatctgcttctaggtgtcgctgatcttcattcagagcaggctgtggaggcagctgaagcaacaataaacggacgccagacttcagaaatgtcatttgctttgcagctcatctgactcggaagatgatagtgatgacagcgatgaagatgctgatgacaaacctctcacgtctgacaaagataataaatgtaaaagtcctgatgatgcggagatgggtccagcgaaaggaaagaagcccaataaaagacagaaaattgttgttctcaactagtacccttgtcttctgtacacctaagaacaagggctggagcgcaagtggtgaatgtgttggcctggtattatcagaagttacggagggactctctctgttcttttttatttgtcacggtttagtttaaaaatgaacaggggacaaatattcgagaagggaggttgtatttttttcagtgttgtgcaatgttcaggccagctagggcaacgtgcacgggggctaaaagaagtaatgcatattccagtttatacaatgcgttccaatgttctggcctctgtatggtttccttgtgattttttaggtagag

SEQ ID NO: 279 - DNA, 895 bp, Zea Mays
gcaccttacaagagagaagtcggcccaagtagcgtgcgcgcagaagctactcccgaagagtcgctctcctgcgtccacgcctcgcttgcggcgactagggcgactgccgccgccgcccttcgcccagctgcccaggtcttcgtcgggcgctttaccggtgaagagcgcccaccataccagttatcgggaaagtgaaggatttcttgggggagattgcaagggccaaccagaagttgcagcttgatgcacagaacaagcctcctgtggagtacgatattgaagcccttactgggaacgaggaggaatacattgagatggatctgcttctaggtgtcgctgatcttcattcagagcaggctgtggaggcagctgaagcaacaataaacggacgccagacttcagaaatgtcatttgctttgcagctcatctgactcggaagatgatagtgatgacagcgatgaagatgctgatgacaaacctctcacgtctgacaaagataataaatgtaaaagtcctgatgatgcggagatgggtccagcgaaaggaaagaagcccaataaaagacagaaaattgttgttctcaactagtacccttgtcttctgtacacctaagaacaagggctggagcgcaagtggtgaatgtgttggcctggtattatcagaagttacggagggactctctctgttcttttttatttgtcacggtttagtttaaaaatgaacaggggacaaatattcgagaagggaggttgtatttttttcagtgttgtgcaatgttcaggccagctagggcaacgtgcacgggggctaaaagaagtaatgcatattccagtttatacaatgcgttccaatgttctggcctctgtatggtttccttgtgattttttaggtagag

SEQ ID NO: 280 - DNA, 1165 bp, Zea Mays
gcaccttacaagagagaagtcggcccaagtagcgtgcgcgcagaagctactcccgaagagtcgctctcctgcgtccacgcctcgcttgcggcgactagggcgactgccgccgccgcccttcgcccagctgcccaggtcttcgtcgggcgctttaccggtgaagagcgcccaccataccagtcgtggcgccgagccctactcctcctcccgccgccgccgccgccgccgcagactcttcctcgcgactcgccgctcgcccgactttccgagctccgacaccaaggaacaccatgggagagtcgagcaaggagctcctggacctgccctccgaccccaggcctcccgcctccttcatcgagtcgcttctcgctggcagggagcagcagcagcaggataaggagggaaagcgtaagttgggggcgtccactgatcccctgcccaaaagccaagttatcgggaaagtgaaggatttcttgggggagattgcaagggccaaccagaagttgcagcttgatgcacagaacaagcctcctgtggagtacgatattgaagcccttactgggaacgaggaggaatacattgagatggatctgcttctaggtgtcgctgatcttcattcagagcaggctgtggaggcagctgaagcaacaataaacggacgccagacttcagaaatgtcatttgctttgcagctcatctgactcggaagatgatagtgatgacagcgatgaagatgctgatgacaaacctctcacgtctgacaaagataataaatgtaaaagtcctgatgatgcggagatgggtccagcgaaaggaaagaagcccaataaaagacagaaaattgttgttctcaactagtacccttgtcttctgtacacctaagaacaagggctggagcgcaagtggtgaatgtgttggcctggtattatcagaagttacggagggactctctctgttcttttttatttgtcacggtttagtttaaaaatgaacaggggacaaatattcgagaagggaggttgtatttttttcagtgttgtgcaatgttcaggccagctagggcaacgtgcacgggggctaaaagaagtaatgcatattccagtttatacaatgcgttccaatgttctggcctctgtatggtttccttgtgattttttaggtagag

SEQ ID NO: 281 - DNA, 1274 bp, Zea Mays
atgtactttatctgttacgatctcttgtacaaggactacaactttgaccaaaagttttctttgtcgacatgttctaactctggtttgaatctcacagccactggtgtgaagatcaatgaagacttcattggtgatatacggacacagcataaaagcggcagaaccactgttgatgtcataatcgatagtgattctaaagtgtcaaccacagtcactgttgatgaagcactaactggtttgaagacttcatttgccttcaaggttccagatcacaagtctgggaagcttgatctgcaatatgcccacaatcgtttttcaatgaattcgaccattggtttgacatcaacacctttggttgagctcgctgcaactgtcggcacaagtgaacttgccattggtgctgagttcgggtttgatagtacttcagctgctgttaccaaatacaactcaggggttggatacaacaagtctgatttctctgcttccttgctacttgctgataaaggggagactttgaaggcatcttacgttcatttattcaatccgaccaacggggctacagttgcagctgaggtaacacacaagctgaaaaccaaggagaactatttcacacttgggagctcccatgcacttgatccttcaacattgctaaagacgagattcagcaactcggggaaggtcggtctgctctgtcagcatgagtggaggccaaagtccctcgtgactctttcagctgagtatgatccaaaggtggtaagtgcgccttcaaggatcggcgtggccatatcgctcaagccttgagatatgggtcaagtcaccttctgtaaaacagtacaagcgttacgtactgatactcgtgtccaagaacataaacttttggagcgatacctagaacaaccctctccattttagccttgtttttggtaagagccttgggcaaagaagtgttgtcagggagttggacttgttttgtggaatgtttccattaagagccaaccccacaccgaggattgcaaacacagaagtttgtattagtgcagaagtttcactctgcgatattttttccccatgttttcctagtcgacgcaaaatgattttggaggtgattgaacacctaacgtcttgagttgatggtagctttaacagctgtgatgataaaggggccacttgtacccagcaacagaagaatttgctcccaattcgtcgaattggttattctggtggatcattttttgttgtcgttggattggttcttttgaaattcatgtattcag

SEQ ID NO: 282 - DNA, 1393 bp, Zea Mays
gaatctcctgcaggttggagctatggcaatcactgctaataggagctttagcttacctgttttgagttggatgttgtgttctttatggtaggttataggttccagtgttttcttctatttgggcttgaaatgcttcatctattactttagattagtgattgatgttacttgagtagcagtgtgtttgtagtgaaggaggaatggggaatctcttgcagcctggagctttggtaatcagccagtcactgctactacaagctttagcccctgatttctaattggatgttcaattgttcaatattagatggcagaaagcagcaagaggccagtagcagagcatatcggcggctcggataagtggagcctgactgacagcgagcggccacacccagatgatagctgttgttggtagagaaaaaaaggttagagacagagaccgatcgatggtgtttagttttttttctccttcttcttctcttggcgatgtgttggaaatcctgctgcacatggcaaagatttgcagctcggatctcacgtggaaatgagcatgtgcagtgcagtgcagatgccagttcgcagactcagtctgatgctctaccgctcgatctgagatggaaccaaacacaggcaggcaggcaggcaggtgaggcagagatcatcccggacggatggatgaggagcgaggcaggatgagccaaataatcacaggcgacacatgtatgcgtctgcgattaggtagagcaagggcggcatcaaaactggctcacattcacatggacggaccaccacgcccacgctgcctgcaggcaacggccactcgctgtcgctgcgctgcaaactccccgctccggttccggccagatccatccttgtccactacagatgtagatcaggtttgccagtggagtgcaggtttgccagtgaactacagtgcacttatcactcagcgaggcataggaacagtagtctggtggtttatgcctctcaagatcgattggtgatcaggatctgtctaatgctggaggccatcttattatttcaagcgacggtgtctgggatgcttttgactgcagaaatggcttttaaatgtgcacgagggcttcctcctgaggccgcagctgagccaattgttaaagaagcagttgaagcaaaaggattgagagatgatacaacttgcattgtcattgacataatatcaccagagaaaccaaaacgcactatacaatctcaaagaacgccaggaaaaggccttgtgcttctaaaaaaaattctttttaaggaaaacaacatctgactcgttgtctctcccttataagaataattatcctgagccagatttggaggaggtctttgaggacggatgcccatccctatcaaggaggtttgtatcctt

SEQ ID NO: 283 - DNA, 1397 bp, Zea Mays
cgcacgacatccccagtgccggccgtctccgtccgcggcacgggcacggcaccaccccctgcttctctcccagcaggcccaggccgccagccgcctctcctgttctctttctctaaatagcagcgcccgcccgcgcgggacaccgcccgccctcccgcgcctttttccgctagccaacgcacggctgacggcaccacaaggcaagcccgcccgctctcggctctcgctctgctcctgccccccttctctctctctctctctctctctctcggtctctccctctttcagcctgcagcgctagcgagccctcgccttcccttccccattattcccaggattccccttgcgactgcaccacgccccacccaaacccacctaccgcctccgctcccctctccagcgagtcgggggcacggacgggaccagacgaccaggccatggggaagtacatgcgcaagggcaaggtgtccggggaggtcgccgtcatggaggtacccggcggcgcgctgctcggcgtccgcacccgctcccgcacgctcgcgctgcagcgcgcgcagaggccgctcgacaagggcgacgcggaggacgccgccgcggagtacctcgagctcaggagccggaggctcgagaagccgcacaaggagccgccgccgccgccgcggtgcagcacgtgctgatgcaggacgaggtcgaggtcgaggtctcgttcggggacaacgtgcttgacttggacaccatggaaaggagtaccagagagacaacaccgtgcagcctgattaggaacccagagatgataagcaccccaggatccacaactaaaagcaaaaccagcagcaactcgacgacttcccgccgcagaacggaggaaaccccgagctgccggttcataccgagctcgctcgagatggaggagttcttctcggcggccgagcaacaggagcagcatagcttcagggagaagtacaacttctgtcccgtgaacgactgtcctctccctggccggtacgaatgggcgaggctagactgctagattccccacccagcacaagagcaccattgatctgattgatatgtgtctaccacaccacaatgtgactagctccgccgccgccgccgtggaccgtggaggaggcgcaaccaactgtggatctcgatcgcattagctttgttgtctgttgtaaaaattagagtagttagctttgtagccggatgaatgatcttgtgtaaccaacaggcgtggttcacccctggtcacacaacctcactgtaacctgttaactgctcaagctgctgtaaccgaaccaatctcatgtagcgtaggcctagcgcagtcttctcatctgttcgtagctctcgaaattgattgaatggaattagagttaaaatttgcatggcaa

SEQ ID NO: 284 - DNA, 767 bp, Zea Mays
cacatgttctagtgactggacaagtaatcctctttaacctaagagaatccgcagtttagacacctagtagagcacctaacaactgcaccttttctctatatctcaaagaaacaggagtaccagagagacaacaccgtgcagcctgattaggaacccagagatgataagcaccccaggatccacaactaaaagcaaaaccagcagcaactcgacgacttcccgccgcagaacggaggaaaccccgagctgccggttcataccgagctcgctcgagatggaggagttcttctcggcggccgagcaacaggagcagcatagcttcagggagaagtacaacttctgtcccgtgaacgactgtcctctccctggccggtacgaatgggcgaggctagactgctagattccccacccagcacaagagcaccattgatctgattgatatgtgtctaccacaccacaatgtgactagctccgccgccgccgccgtggaccgtggaggaggcgcaaccaactgtggatctcgatcgcattagctttgttgtctgttgtaaaaattagagtagttagctttgtagccggatgaatgatcttgtgtaaccaacaggcgtggttcacccctggtcacacaacctcactgtaacctgttaactgctcaagctgctgtaaccgaaccaatctcatgtagcgtaggcctagcgcagtcttctcatctgttcgtagctctcgaaattgattgaatggaattagagttaaaatttgcatggcaa

SEQ ID NO: 285 - DNA, 684 bp, Zea Mays
caggacttttttctggtatttgctgtgcgaggagtaccagagagacaacaccgtgcagcctgattaggaacccagagatgataagcaccccaggatccacaactaaaagcaaaaccagcagcaactcgacgacttcccgccgcagaacggaggaaaccccgagctgccggttcataccgagctcgctcgagatggaggagttcttctcggcggccgagcaacaggagcagcatagcttcagggagaagtacaacttctgtcccgtgaacgactgtcctctccctggccggtacgaatgggcgaggctagactgctagattccccacccagcacaagagcaccattgatctgattgatatgtgtctaccacaccacaatgtgactagctccgccgccgccgccgtggaccgtggaggaggcgcaaccaactgtggatctcgatcgcattagctttgttgtctgttgtaaaaattagagtagttagctttgtagccggatgaatgatcttgtgtaaccaacaggcgtggttcacccctggtcacacaacctcactgtaacctgttaactgctcaagctgctgtaaccgaaccaatctcatgtagcgtaggcctagcgcagtcttctcatctgttcgtagctctcgaaattgattgaatggaattagagttaaaatttgcatggcaa

SEQ ID NO: 286 - DNA, 755 bp, Zea Mays
gggaaggagacacagtgcaggagcaaattttgttagcgcttgtacacacagtggtgttctagtacaaaatcgaacagtactttgcaggacctatgattcacggagtaccagagagacaacaccgtgcagcctgattaggaacccagagatgataagcaccccaggatccacaactaaaagcaaaaccagcagcaactcgacgacttcccgccgcagaacggaggaaaccccgagctgccggttcataccgagctcgctcgagatggaggagttcttctcggcggccgagcaacaggagcagcatagcttcagggagaagtacaacttctgtcccgtgaacgactgtcctctccctggccggtacgaatgggcgaggctagactgctagattccccacccagcacaagagcaccattgatctgattgatatgtgtctaccacaccacaatgtgactagctccgccgccgccgccgtggaccgtggaggaggcgcaaccaactgtggatctcgatcgcattagctttgttgtctgttgtaaaaattagagtagttagctttgtagccggatgaatgatcttgtgtaaccaacaggcgtggttcacccctggtcacacaacctcactgtaacctgttaactgctcaagctgctgtaaccgaaccaatctcatgtagcgtaggcctagcgcagtcttctcatctgttcgtagctctcgaaattgattgaatggaattagagttaaaatttgcatggcaa

SEQ ID NO: 287 - DNA, 1111 bp, Zea Mays
caaaagctcgccccacccccaaggccccaacctgcctatacggccagacctgctcgcctgattcgctctcccgcgattccacccccacaaatcctccgacccaacccaatccagcgtctcaaaattcacgcaacttcgcgtcgcgtcggctccaaatttgcccccttcgatccataaatcccttcccccacccccgattttgcgccgaattcggttagcttattactctccgagcttatcgccaaccgtctgtcccgacctcgagatccggctcattttttcaccctcttacgtattcggatcgagcccgagctgccaattcgaggagctccgaacgcgggccgcataaagcgaatcgaatgaatcaagcttgcgcgacgggcagttgatgccacccggcgatggatcgccgcatcctcaggacctcgtcgtgcaacggcagcggtaagaacccgtccccttcctctcccgcggcggtctcacggcctgcgtcctccgggggcatcggctccaaggacgacgccgctgccggcgagcgcaaggcgctgctgccgcggcagcctcctggcggcatggcgcggaagggccgcaaggggtccaaccgccgcgtgcagtggaaagataagcatggcagcaagctcaccgatgtcagggagttccagcctagtgactcaagtgactcagatgatgaatatttggatacatgcatatgctcaatcatgtaaatacatcttgcacagttcgttccaacagactccgaactggtgataatcagctggccttaactgggagttacatcaaagacctagaaaatgatcaccggattcagtaggtagacatgattaaagaagccgagaaagaatgcctttctttggtttaattttggataccaacagcatcctgagtttttggcagagtaatgattcatgtgataatgcaaatgctattagaatcgaacattactaattcctgtgcatgattcagatcgattttgtcaaataggatttgatgtattaacatggtatgtttcttttaaaaagaatccttgctaccatcatttgttacttacaggagctagtgcccagatttgtgctgaacactattaacaaac

SEQ ID NO: 288 - DNA, 774 bp, Zea Mays
cccaaggccccaacctgcctatacggccagacctgctcgcctgattcgctctcccgcgattccacccccacaaatcctccgacccaacccaatccagcgtctcaaaattcacgcaacttcgcgtcgcgtcggctccaaatttgcccccttcgatccataaatcccttcccccacccccgattttgcgccgaattcggttagcttattactctccgagcttatcgccaaccgtctgtgactcaagtgactcagatgatgaatatttggatacatgcatatgctcaatcatgtaaatacatcttgcacaggtggattctatcatgtgtataaggagctgtatctcagtattactgtcttcggcttggccctaacagtacagtgacaatcatgcatgcatgcatagttcgttccaacagactccgaactggtgataatcagctggccttaactgggagttacatcaaagacctagaaaatgatcaccggattcagtaggtagacatgattaaagaagccgagaaagaatgcctttctttggtttaattttggataccaacagcatcctgagtttttggcagagtaatgattcatgtgataatgcaaatgctattagaatcgaacattactaattcctgtgcatgattcagatcgattttgtcaaataggatttgatgtattaacatggtatgtttcttttaaaaagaatccttgctaccatcatttgttacttacaggagctagtgcccagatttgtgctgaacactattaacaaac

SEQ ID NO: 289 - DNA, 663 bp, Zea Mays
cgacatcttgtctggcagggtatgacattagaacatgtgttttgttggggtatgtcgtaaccttccattctcagcaaggctaacggaatgattgtgcttgggagctttcgatcacctaattcaatgactcaagtgactcagatgatgaatatttggatacatgcatatgctcaatcatgtaaatacatcttgcacaggtggattctatcatgtgtataaggagctgtatctcagtattactgtcttcggcttggccctaacagtacagtgacaatcatgcatgcatgcatagttcgttccaacagactccgaactggtgataatcagctggccttaactgggagttacatcaaagacctagaaaatgatcaccggattcagtaggtagacatgattaaagaagccgagaaagaatgcctttctttggtttaattttggataccaacagcatcctgagtttttggcagagtaatgattcatgtgataatgcaaatgctattagaatcgaacattactaattcctgtgcatgattcagatcgattttgtcaaataggatttgatgtattaacatggtatgtttcttttaaaaagaatccttgctaccatcatttgttacttacaggagctagtgcccagatttgtgctgaacactattaacaaac

SEQ ID NO: 290 - DNA, 2335 bp, Zea Mays
gctaataaagttcaggcagagtttgttactctggtctaaaggcatggtcactgctgttaattgttgggcgagggtgggagcgtaaatgttgaactctaccgcattttgaatgagtctggtttgcatgtttttccttgtttgcttttgatatactattctgctgcaatacatgcacgaaaggtgatcactggtttattctgaagttcagcttctctgttagtgttcatctgtaaacatttttgtttgcaaaatgcaatttagtgagtaaatgattcaagtgttatgatctgaatactgtgctatttctggctttctaatcggatgatgagcagtcaaattctatggggtcaatcactatttaattaggcaatctagattaattgaagtttatgattttctttacatttattaggcatttttttgaggagctgcacatgttaattagcagtagattgttggattcgtactctttatcaagtaataaataacttccagtacttaggggttaaggtaattagttccccaaaggaaaagagatttaagacagctaacactcagtatcttattttcatcattttatacttatgcagtcaactggccaagttgacaaagttaaatctggacacatgcatgtacattacacaaccttgctgcacctaaaaactttgtttctatacatttattgtagtggagatgtttatgtcttttatgcccatgtcaagcacttttcatgggatctgaagttttagtttgcactaatgaaatggtgggcataatctatcttagtatgccaacagacagctggaactagatacgatcacatggccacccatcctgattcccattttgtttagttgacccggtggagcaaaggaatctgactacatgggaaaaaaatcttctgtgggtttgaccacactataaccaaaagttcattttccacttgcttggaagaatttctgtggaggacacatggtattctatcaccagtctctaacaacaacaacaataatgccttttactcccaagcaagtcgggatagactagaattaaaacacaacaaaatccacaagtcaaggttcagacatatgaataggtatttcctatgcactcaaattcaaggttaaatttatagttatattatatcctttatttccttttattgtctctttccatgtcaattttggccttccctcccctctctttccattgctattgtgccttagaactcactacgcactggtgtctctagaggcctttgttggacatgaaccatctcaaccgatgttggacagaattttcttcaattagtgctacccttagcctatcacgttcacatatatcattgtcctggactcgctcacttcttgtatggtcacaaatccaacacaacatacacatttctataacattgatctgttgaacatatcatctttttataggcaaacattttgcaccgtacaacatagcaggtctaattgtcgtcctataaaacttgtcttttagcttcaatggtaccctcttgtcatatagacgtcaaatgtttgacgccacttcatctaccctgctttgattctatggctaaaatcttcatcaatatctccatctccagttagttgtattattctcattgtttggaccagactagtaactcctcaagagcgaagttgagatgaaactgcacttcacctgatagtgagtcaatatagccctgtattctgatgttctatttaatccacataggaacccatcaaatttcaactactctgcaatgggctttagtcttatctccaaagtgactcaagtgactcagatgatgaatatttggatacatgcatatgctcaatcatgtaaatacatcttgcacaggtggattctatcatgtgtataaggagctgtatctcagtattactgtcttcggcttggccctaacagtacagtgacaatcatgcatgcatgcatagttcgttccaacagactccgaactggtgataatcagctggccttaactgggagttacatcaaagacctagaaaatgatcaccggattcagtaggtagacatgattaaagaagccgagaaagaatgcctttctttggtttaattttggataccaacagcatcctgagtttttggcagagtaatgattcatgtgataatgcaaatgctattagaatcgaacattactaattcctgtgcatgattcagatcgattttgtcaaataggatttgatgtattaacatggtatgtttcttttaaaaagaatccttgctaccatcatttgttacttacaggagctagtgcccagatttgtgctgaacactattaacaaac

SEQ ID NO: 291 - DNA, 2875 bp, Zea Mays
gccgagccggccgaaaaattctgccaccaccaagcctcccctcggggcaccgccgcacgcccctcacccccaagcccccaacgcgcgatggcggccgcgtccacgtcacgcctcgccatccaaatccgtgtccctttcgttccttggccttttccgtttccaccccgcctcgctaccttggcggtttccacccgcacccggctcgcctcctatggcctttgcctccccacgcggcccgccggcatgcctcctctcgccgagcacgagctcgcggccgcggccgccacctccgcgctcggcgtagccttcggggtgcgcctgctcgtcgccctctcccgctcccgcgcgctcaagccgctggcggccgccacgtccgccgccgccgccgcgctccggacgccgcgggcgctcgccaccgcctcctcccctgtcgccgccatcctagccgcgtccaaggccgcctccaagtcgtacaaggcggcacgcacgctcggccccgccgccgcgcgcctcccctcgctcccctcctccaagcgcctcaaggccgcgctcgccgccgcctcgctcctccgcctcgccgccgccgcgccggcgggcctccacgccgcgtcgcccgcgggcgtcgccgtgctcgccgtcctcaagtccagctacaagctctccaagaacacctccaaggtcgtcgagggcttcctcggcctccagctgcacaagggcttcaggaacgggatcgacgcgctcggggtggtcgtcaaggtcgccgtcattgtctctgaggtcgccgtctgggtcggggcccgattctggggttatgggcgcgctcgctgcgtcatgttcctcggcttcaccagacccactggcttagtcctgcttggctgtagcaaatctgagccccaggttgcactattcgatccggttatagttgggatggatgctcaggggtgcgaattggaggagcgagggctctcagaattgttctctcttgctgtgccagtgccccaggccacaacattaatgactatgagttagccttaccacatagctgtttgtacatttgcttctatcagatgattttttgatccactgcgtgcaactatattcttgtataatcaacaagtgtgggtgaacaaactgtacagcaattgaaggatccaaatgcattgacttaaacgataaaatcttgtctggcagagcaaattctggcatggaatttccacttccctacaatgttggtttgagtaaccgctgtttgtaagtttgaccactgattgcagcttagccgtaatggagatttgtaatgtggtagtactgctagagctttacattgcctaagacagtagtgtgtctttcaccttggctacttattaaatggcacaggcagtgcttatacttgaggaaaacattttagttgattaatattttaatctttgccctagctcaactgtggatacactactctatgagcctgtagcttgttcttggacaactccactaaaacagaaaatgaacataattggatttctacaattgcatgggcctatgaattatcagcaagaccatgaaccttactgagctcttgagtatagttttaaacatttttgctacggttattcattgttcattgttggttctgactcttgatctttctgcacataggggcacaggctacaaggcacctaggtgacattccaatatattaactttacttattactgtgctctgtaaccatgttattatgattatgttgatgtatcgttgctatccttggaatttgctgagcaggccaaatctagactctgtgacaaagaaatattgaagagatcctcagaacttttatttctataaatggcatagttatatacacaaaccactcttctggagactaactaccacattcacttgtgacaatggtaaacaagtgagcagattcacacatacattaaatctacattagctgaactaagttctcgacctgaaattgagcttctaatgctgtaagtttattttaaaggaaatgaaaaaaaactgtgctcaatgttgcacaacttgaattaagacactgggtcttagtttgtgtggttgagacttgagaatcacatccatgattcgatggtgcatttatacttgtagttgtaggaatttaattcacttagatgcgcaagaatgtcagatgtgtccagcatggcttcttctttcatatggtcctgaaaaaggtaagagttcttgttaactacgcatagaaatatgtcaggcttttgtttaataacaatgaaaatacataagaacattcatgttttccatcattgtaatggggcagggacttaaaatcatggcctaattttttcatctattacaatcttacgatttgtctccatatgcatcaagttacattcccgtaacatttaatatcgccatatcttctagttatgccagactgtttgataagattgtgtagtttaattaaaaacttacagtttgttcataatgtccataattcagggagcctgattgcgctgctgcttcacagagctcatcattcttcgcgaaccttccccggacacggggcctgctatctgccaaggtttttctgcatgcgtactgcattttgttgtaggtcaagcacaactaaattgcggacaaccttgaatgtggagtcttccaatcctgatagttctgggttcccattgcatccgtttaccaggtgctgatcatttcctcctacctgtttggttaatataattcgttctgtgtaagaatcggaaattctaggcatggtcaaccggtaacttgacctgtgcttttgtttggcatcattgtggatggtgtacctaagcttttgaatgttacctgcatctctgcattagtattaaatgcc

SEQ ID NO: 292 - DNA, 2545 bp, Zea Mays
aaaaaagtcagagttatatacataactttaacatgatagagttatgcacatgacttatacatatatgataaatttatatgcataaattttagaaataatatttttcggaacaaacttatcgacataatttcttccacataattttatgtataacattttacagaacaaatatattattgtaactttttaatacatttttatacaccttttatgtaatcttatagacagcttaatcatggtaacttttacataaagcagtgcagactggcctgccctggtgcaatcagaatatccaattccagtcttcactcgtattaaagccttagcctttagcatacgtcctaatgatcgatccgatccacatagccattggcagttcagttctccgatcctctaccgcagcagcgtaggcaaagtaggaggcaaggatcaatggcgccgccgcggatctccttcctggagctctgcctctccttcctctgcttcgtggtcttctactacttccacatgagatccaagcggaagaaccctttcgtgccgctggactggccgctggtgggcatgctcccggccctcctcggcaacctccaccacctccacgactggatcacctccctcctggtcgccagccagctcagcttcctcttcacaggcccgccgcgctccggcatgcagttcttcgtcaccgccgaccccgccaacgtccgccacgtcttcacctccaacttcgccaactaccccaagggccccgagttcgaggagatcttcgacgtcctcggcggcggcatcttcaacgccgacggcgagtcgtggcgccggcagcgcgccaaggcgcagctgctcatgtccagcgccccgttccgggccctggtgtcgcggtacagccgcgccaaggtggacaccgccctgctcccgctgctctcgcacatggccgccaccggggaggcgttcgacctccaggacgtgttcctccggctgacgttcgacaccacgacgacgctggtgttcggcgtcgaccccgggtgcctgtccgtcggcctccccgaggtgccgttcgcgcgcgccatggacgacgccatgggcgtgctcctcctccgccacgtcgtcccgatgacgtggtggaagctggcgcggaggctccggatcgggcacgagcgcaagatggcggaggcgtggcgcaccatcgaccagttcgtcgccgacacgatcgccaagcggcgggccgagaaggcgaggcacggcaacgggcaggtctcggcggacctgctctcgtcctacatcaacgacgacgaggacgaggaaggcggcgtggacgcgttcctgcgcgacacgaccatcaacctcatgctggccggccgcgacacgacgggctcggcgctgtcctggttcttctacctcctgacgcggaacccgcgcgtggtgggcaagatacggcaggagctggagtgcgtcaagagcaagagcagcggcagcggcggcggcatggcgagcttcgacccggacgagctgagccggctgacgtacctgcacgcggcgctgtgcgagtcgctgaggctgtacccgcccgtgccgcaggagctcaaggaggcggcggcggcggacgtgctgccgtgcgggcacgaggtgcgggccggggacaagatcctggtgtctctgtacgcgatgggaaggatggaggaggtgtggggcagcgactgccgggagttcaggccggagcggtggatcccggagttggaggacgggcgcagggtggtgcaggtgcggtacgtgccgtcgtacaagttcatgtcgttcaactcggggccccggacctgcctcggcaaggacatggcgttcgtgcagctgaaggcggcggcggccgccgtggtcagcaacttcgacgtggaggcggtgccggggcacgtcgtggagcccaagctgtccatcatacttcacatgaagaatggctttatggccacggtcaagaggaggcgccagacgtttgcttagcttcgacgtacgtgcaagtacacgtggtcgtcgtggcatgtacgtgtacgacactccgtccgccgttgaaaggtctctatggatgacattgccccgatgataagatgagtaaccgctatgacaacatggggtgcacaacatcgaatgattttatttgtagtttgccatgtgttttgacagattagtccatgcggcggaggctagacaacatgcaccggaggttgaggctgttggagcaacaaatagagacgctgccgaggcccaaattggcaaaaccaccgacaatgtgctgatttttatctattacttttcttgaaaacatgtatacaaaatggcccacccctgattactgcgcaaacatgttcaacagaatgcaacataatcaatgcttttataattaagtttttaatctaatttttaaaatattttaagtttggttctgtattgatggttggcaaagaatatatattgttcgtttttatttgtgtatcatcgcaacacacatgcattgtactatatacattatatgttagttttattacacttgagattttcg

SEQ ID NO: 293 - DNA, 2252 bp, Zea Mays
ataatttcttccacataattttatgtataacattttacagaacaaatatattattgtaactttttaatacatttttatacaccttttatgtaatcttatagacagcttaatcatggtaacttttacataaagcagtgcagactggcctgccctggtgcaatcagaatatccaattccagtcttcactcgtattaaagccttagcctttagcatacgtcctaatgatcgatccgatccacatagccattggcagttcagttctccgatcctctaccgcagcagcgtaggcaaagtaggaggcaaggatcaatggcgccgccgcggatctccttcctggagctctgcctctccttcctctgcttcgtggtcttctactacttccacatgagatccaagcggaagaaccctttcgtgccgctggactggccgctggtgggcatgctcccggccctcctcggcaacctccaccacctccacgactggatcacctccctcctggtcgccagccagctcagcttcctcttcacaggcccgccgcgctccggcatgcagttcttcgtcaccgccgaccccgccaacgtccgccacgtcttcacctccaacttcgccaactaccccaagggccccgagttcgaggagatcttcgacgtcctcggcggcggcatcttcaacgccgacggcgagtcgtggcgccggcagcgcgccaaggcgcagctgctcatgtccagcgccccgttccgggccctggtgtcgcggtacagccgcgccaaggtggacaccgccctgctcccgctgctctcgcacatggccgccaccggggaggcgttcgacctccaggacgtgttcctccggctgacgttcgacaccacgacgacgctggtgttcggcgtcgaccccgggtgcctgtccgtcggcctccccgaggtgccgttcgcgcgcgccatggacgacgccatgggcgtgctcctcctccgccacgtcgtcccgatgacgtggtggaagctggcgcggaggctccggatcgggcacgagcgcaagatggcggaggcgtggcgcaccatcgaccagttcgtcgccgacacgatcgccaagcggcgggccgagaaggcgaggcacggcaacgggcaggtctcggcggacctgctctcgtcctacatcaacgacgacgaggacgaggaaggcggcgtggacgcgttcctgcgcgacacgaccatcaacctcatgctggccggccgcgacacgacgggctcggcgctgtcctggttcttctacctcctgacgcggaacccgcgcgtggtgggcaagatacggcaggagctggagtgcgtcaagagcaagagcagcggcagcggcggcggcatggcgagcttcgacccggacgagctgagccggctgacgtacctgcacgcggcgctgtgcgagtcgctgaggctgtacccgcccgtgccgcaggagctcaaggaggcggcggcggcggacgtgctgccgtgcgggcacgaggtgcgggccggggacaagatcctggtgtctctgtacgcgatgggaaggatggaggaggtgtggggcagcgactgccgggagttcaggccggagcggtggatcccggagttggaggacgggcgcagggtggtgcaggtgcggtacgtgccgtcgtacaagttcatgtcgttcaactcggggccccggacctgcctcggcaaggacatggcgttcgtgcagctgaaggcggcggcggccgccgtggtcagcaacttcgacgtggaggcggtgccggggcacgtcgtggagcccaagctgtccatcatacttcacatgaagaatggctttatggccacggtcaagaggaggcgccagacgtttgcttagcttcgaccaggtgcaagtacacgtggtcgtcgtggcatgtacgtgtacgacactccgtccgccgttgaaaggtacgtagtgttattacgtgtacttgtacgtgtgtgctgtgcgatgtcgatcagtgcatatagcatatgggtgttttctgtggtgtggtggggcgaaatgagagtatgagaccaaacctcctagcaaatttatactctcttcgatccttttttatttgtcatggtttaattcaaaactaaactatcgagaagatttggactctcgaaccaccttttccatgccggtgacgagaactgaggacgctggcgcaacttgtgagtggtaacaaactacactatagggcgtcatgcatgggtccgtcagttcggtggaag

SEQ ID NO: 294 - DNA, 2421 bp, Zea Mays
ataatttcttccacataattttatgtataacattttacagaacaaatatattattgtaactttttaatacatttttatacaccttttatgtaatcttatagacagcttaatcatggtaacttttacataaagcagtgcagactggcctgccctggtgcaatcagaatatccaattccagtcttcactcgtattaaagccttagcctttagcatacgtcctaatgatcgatccgatccacatagccattggcagttcagttctccgatcctctaccgcagcagcgtaggcaaagtaggaggcaaggatcaatggcgccgccgcggatctccttcctggagctctgcctctccttcctctgcttcgtggtcttctactacttccacatgagatccaagcggaagaaccctttcgtgccgctggactggccgctggtgggcatgctcccggccctcctcggcaacctccaccacctccacgactggatcacctccctcctggtcgccagccagctcagcttcctcttcacaggcccgccgcgctccggcatgcagttcttcgtcaccgccgaccccgccaacgtccgccacgtcttcacctccaacttcgccaactaccccaagggccccgagttcgaggagatcttcgacgtcctcggcggcggcatcttcaacgccgacggcgagtcgtggcgccggcagcgcgccaaggcgcagctgctcatgtccagcgccccgttccgggccctggtgtcgcggtacagccgcgccaaggtggacaccgccctgctcccgctgctctcgcacatggccgccaccggggaggcgttcgacctccaggacgtgttcctccggctgacgttcgacaccacgacgacgctggtgttcggcgtcgaccccgggtgcctgtccgtcggcctccccgaggtgccgttcgcgcgcgccatggacgacgccatgggcgtgctcctcctccgccacgtcgtcccgatgacgtggtggaagctggcgcggaggctccggatcgggcacgagcgcaagatggcggaggcgtggcgcaccatcgaccagttcgtcgccgacacgatcgccaagcggcgggccgagaaggcgaggcacggcaacgggcaggtctcggcggacctgctctcgtcctacatcaacgacgacgaggacgaggaaggcggcgtggacgcgttcctgcgcgacacgaccatcaacctcatgctggccggccgcgacacgacgggctcggcgctgtcctggttcttctacctcctgacgcggaacccgcgcgtggtgggcaagatacggcaggagctggagtgcgtcaagagcaagagcagcggcagcggcggcggcatggcgagcttcgacccggacgagctgagccggctgacgtacctgcacgcggcgctgtgcgagtcgctgaggctgtacccgcccgtgccgcaggagctcaaggaggcggcggcggcggacgtgctgccgtgcgggcacgaggtgcgggccggggacaagatcctggtgtctctgtacgcgatgggaaggatggaggaggtgtggggcagcgactgccgggagttcaggccggagcggtggatcccggagttggaggacgggcgcagggtggtgcaggtgcggtacgtgccgtcgtacaagttcatgtcgttcaactcggggccccggacctgcctcggcaaggacatggcgttcgtgcagctgaaggcggcggcggccgccgtggtcagcaacttcgacgtggaggcggtgccggggcacgtcgtggagcccaagctgtccatcatacttcacatgaagaatggctttatggccacggtcaagaggaggcgccagacgtttgcttagcttcgacgtgcaagtacacgtggtcgtcgtggcatgtacgtgtacgacactccgtccgccgttgaaaggtagtctctatggatgacattgccccgatgataagatgagtaaccgctatgacaacatggggtgcacaacatcgaatgattttatttgtagtttgccatgtgttttgacagattagtccatgcggcggaggctagacaacatgcaccggaggttgaggctgttggagcaacaaatagagacgctgccgaggcccaaattggcaaaaccaccgacaatgtgctgatttttatctattacttttcttgaaaacatgtatacaaaatggcccacccctgattactgcgcaaacatgttcaacagaatgcaacataatcaatgcttttataattaagtttttaatctaatttttaaaatattttaagtttggttctgtattgatggttggcaaagaatatatattgttcgtttttatttgtgtatcatcgcaacacacatgcattgtactatatacattatatgttagttttattacacttgagattttcg

SEQ ID NO: 295 - DNA, 2282 bp, Zea Mays
aacattttacagaacaaatatattattgtaactttttaatacatttttatacaccttttatgtaatcttatagacagcttaatcatggtaacttttacataaagcagtgcagactggcctgccctggtgcaatcagaatatccaattccagtcttcactcgtattaaagccttagcctttagcatacgtcctaatgatcgatccgatccacatagccattggcagttcagttctccgatcctctaccgcagcagcgtaggcaaagtaggaggcaaggatcaatggcgccgccgcggatctccttcctggagctctgcctctccttcctctgcttcgtggtcttctactacttccacatgagatccaagcggaagaaccctttcgtgccgctggactggccgctggtgggcatgctcccggccctcctcggcaacctccaccacctccacgactggatcacctccctcctggtcgccagccagctcagcttcctcttcacaggcccgccgcgctccggcatgcagttcttcgtcaccgccgaccccgccaacgtccgccacgtcttcacctccaacttcgccaactaccccaagggccccgagttcgaggagatcttcgacgtcctcggcggcggcatcttcaacgccgacggcgagtcgtggcgccggcagcgcgccaaggcgcagctgctcatgtccagcgccccgttccgggccctggtgtcgcggtacagccgcgccaaggtggacaccgccctgctcccgctgctctcgcacatggccgccaccggggaggcgttcgacctccaggacgtgttcctccggctgacgttcgacaccacgacgacgctggtgttcggcgtcgaccccgggtgcctgtccgtcggcctccccgaggtgccgttcgcgcgcgccatggacgacgccatgggcgtgctcctcctccgccacgtcgtcccgatgacgtggtggaagctggcgcggaggctccggatcgggcacgagcgcaagatggcggaggcgtggcgcaccatcgaccagttcgtcgccgacacgatcgccaagcggcgggccgagaaggcgaggcacggcaacgggcaggtctcggcggacctgctctcgtcctacatcaacgacgacgaggacgaggaaggcggcgtggacgcgttcctgcgcgacacgaccatcaacctcatgctggccggccgcgacacgacgggctcggcgctgtcctggttcttctacctcctgacgcggaacccgcgcgtggtgggcaagatacggcaggagctggagtgcgtcaagagcaagagcagcggcagcggcggcggcatggcgagcttcgacccggacgagctgagccggctgacgtacctgcacgcggcgctgtgcgagtcgctgaggctgtacccgcccgtgccgcaggagctcaaggaggcggcggcggcggacgtgctgccgtgcgggcacgaggtgcgggccggggacaagatcctggtgtctctgtacgcgatgggaaggatggaggaggtgtggggcagcgactgccgggagttcaggccggagcggtggatcccggagttggaggacgggcgcagggtggtgcaggtgcggtacgtgccgtcgtacaagttcatgtcgttcaactcggggccccggacctgcctcggcaaggacatggcgttcgtgcagctgaaggcggcggcggccgccgtggtcagcaacttcgacgtggaggcggtgccggggcacgtcgtggagcccaagctgtccatcatacttcacatgaagaatggctttatggccacggtcaagaggaggcgccagacgtttgcttagcttcgacgtgcaagtacacgtggtcgtcgtggcatgtacgtgtacgacactccgtccgccgttgaaagattagtccatgcggcggaggctagacaacatgcaccggaggttgaggctgttggagcaacaaatagagacgctgccgaggcccaaattggcaaaaccaccgacaatgtgctgatttttatctattacttttcttgaaaacatgtatacaaaatggcccacccctgattactgcgcaaacatgttcaacagaatgcaacataatcaatgcttttataattaagtttttaatctaatttttaaaatattttaagtttggttctgtattgatggttggcaaagaatatatattgttcgtttttatttgtgtatcatcgcaacacacatgcattgtactatatacattatatgttagttttattacacttgagattttcg

SEQ ID NO: 296 - DNA, 1841 bp, Zea Mays
ccatgcccccgtctccgcagatctcgcctgcgctaccccgctcgcgatagcctgtacctcgcgcctagcctcggcgctgccctccaccgtcgtcgtctcctccccgtgctccgccttctcgccctcctccacgtcgctgagatccgcatgcatcatatcctccgagtacgccctcctcgttgtcttagacccagagaagccgagcctgccgccgcctcgctcatccctagatctgcgcccagttatgtctcctacctcgtcaccagcgtctgccgtgccgaccccgaccaacgccgccattccgtgcgcttgcttctgcgactttgtcacactcgcagaccaactcgccgaggccttccgtggccatttagtgccgccgctcctagacaagaatgttggtcggggagcaaaggacgagggagatcacgcggtatggtgtacccactgtggacaagatctgcggccatggtatgcagctccctttccatatttgtcggtcatggtatctgcgtatatccgtcatctgctttactcgaacagaataatgttgagtcaatgtcttctgagccaattgacgaattgattaaggctgattgttttgccaaagcctttcaagaacttaagtatgagatcatgaaacgcttgcaagcaagaaacatatatgtggtatgactagggatggagtgaatgatgccccggctctgaagaatgctgacattggtattacagtagcatactccaccgatgcggcttgtagtgcttctgacattgtcctgtctgaaccaagccttagtgtgattattggtgttgtgttgacgagccgtgcaattttccaaagaatgaagaattacatgtttgacttcccaccatttatggtcctgatcattgccatcctcaatgatggtaccattatgactgtctctaaggacatagtgaaaccatctccacaacctgaaggtgagatttttgcgactagagtagttcttagtgcttatttggccacgatgactgttattttcttctgggatgcgtacaagaccgactttttcccggtatggaccagcaattgctactctgattaccgtatacgccaactaggcatttgctatgatcaagggcattggatgaggttgggccgacacatctggttgtacaatatcatctccttcttcccgccagatatcatccagttcctcattcgttatgcgctgagcaggagagcgtggaacctcgtccttgagcagaggcaagaactttggtaccgaagaaagggaatgcagatgggaagatgaccttcagtgatgtgaacccgcttgtagaagaggccagaaggagagccaagatagcaaggtccaattgtggcttctcgagcatctccactgaacacgacaacctgactttgcactgccccgtctgattaaggggaggatgccctgtgtgattaaggggaggatggagtcagtggtgaagcagaagggtttgaacatttagtagccctactccatgtgaccggcaaactatagaggcatgattgtactgtatatatagtatgtataggtatatacatgtgcattgccacgagggttaaaaattagtataaaacatagatacgaaacgacaaacatcgctataatattttgtcacactgatttttgcatatcataacgatgtttgtcatttcgtatctatatttcatactaatttttaacttccgtaattcaggaggccactacaatgaacccttcattgcggaagatggagtgtcaggagtgcttctacaccacaagcaagttttgattgtctcttctttgagttcattattgtggattacttattctttt

SEQ ID NO: 297 - DNA, 835 bp, Zea Mays
gcagcggcaacccgggaaggctggatttgaaggcgtattcgttggttatctactagctgacggtctcactgatgctcatgcctccgcctccctgcccgccgacgctgccgcaccttctccgccacctccgcggccgcatgctcaccacccagctcctcgaccacctcatcagggatgcttcgatgttccaatttcactgctctcaaagatcttgcgcgccatctccagtacctcacttatcatgggatggtgcctggctgcctggcttggagcaccaggtttttttttttgacactgaagcgagctgggctcctgattttatgctgtagtccccttgaagccttctatcagttagactttcaaacttctaagagttgcaagattatgctcgcctcttggcctgttttggtccagaggtcactggtgaggtagccttgacgaggaccgtgtggagaacagaacagacaggtcgcagcttgcctgagagcccccgtagggacgggtggttttgtgtcctctttttgtatttgaaaaaatggaatcagtttattgaggacggtgctttctgggtgagtttagaaatgtaatttgtttgaacaatattagctctatgcagtgcatgcgaatcgatggttggaaccatacgaattgatggctggaaccaaatgtaatatatgttcttgtgcttactcggcctaggtctacccataaataattaggtaaaaagattagtctagtgtatggagggttcctagggtagtctacccataaaaaataggtaaaataagtttcattcggattcactgcttcataggaaatttgtgacctgcgattg

SEQ ID NO: 298 - DNA, 2134 bp, Zea Mays
gccactgctggacgctgcgcggcgcgggcaaaggagccgtgcaactgactcgtggaccctacccaccgtggctaggccgcgtaggtgcggggcccgaaacctgacaaaagcaaggccgggtgcagttgctccgcctcctggcctcagtcctgctgccggtgctcgccctcgccctcgaccgtcacggagaaaacgaagagacccctagatggggtctgcggcggaggtgcctgttgtgatcagttccgacgaggacggcgcgcagacgcccgccgctggcaagcgccagtcaccggaagacgccgcccttgcgtgggcggagggaatactggcccaagacgactacgacgacaacgcggtttgtgagggagtgggttatccagcgatgatgctggagctgttggattccctgaaggatgaaacagggactgttgtgggtgacaaggaggttgcggttggtgccaagaacacgaacaccatgcctgatgctcgttgcgacgatgatggcgatgattgcgtcattcttgacggtgaccctgataagccggttgccgttgcaaaggaggaggggggaccgccacgagatgcccctgaggatgaactgcagatagttgcggagaaaggagagttagcatgcagagatttccctcatccacgacatctatgcgctgccttgccattcagcagcagttctcatgcaagtcattgtagcatgtgccattgttatgtctgtgattgtcctgctccctgtgccctatgggacaagcattgtcatgctacggacaaggatagaaagtggaagagacttagggaaatatccaaaaataaaagccagccaaatcctaaacgaagaataccccagcatttcaaacgctcagtcacgacaggaccatcatcctcacagtattccgcaaatatgactggttttactggaagatttcctgcttcgggtactgcgaaccaaattcaacaggtggatatctctgttatggttgcacaggatatggtgaggggtatcagtctgccgagtgcaccatctcctacgccaagaactaaaaatcggagctatggatccaaaggtgcccagattgctcctccaatttatacattctcaaatgataatcatttccagccttctgttcctagctatggtctggtgcggcctcatgcatctaaaactgcacatgtttcatcaggaggtcatgttagcgctaagacttttcagagtaacccatctcagttttgtgttcgtgcaccaatgggatctcatggacacaggtaccgaccaccatcatatcctcagcctcctcctaacacagttgttggcactggtgtgcccctctcacggtgcgcctcgctgaacgctgaggctcagggaacacaacgcccacaagttccgccggcaggtacaatatcgaaggaatcacttgcaaatttggcacgtcggctgggattaccttattacaatactaatcagccattaggtcagcagtcaacgagcacatctcaatttctgcatatgcatcctcacgagatgctacctgctcaaggtgctcaaaacacgacctggcaagcttacgttaagaaaagtgtggcaacaacttcacaaatcgtgccttctagtgaacataattcgtcaattcatgcacctgggagcactgttcttccatctggttcagttcagatccagcagcctttgcgccaattcaaatcgggcactgttctatcatctggtgcagcccagatccaccagcagcctctgcgccaactcgattctcagagcagtgttactccgagtgaaaccgttccaagtactctctaccttccgcagccatgaagtttcatcggaagtgttctcatcctagactattgttcctttctttagtgtacttgtagtttttttatatcatagataatcattgacagatatcttgctatcctaacctttctgctgtaatggtttaaagctgagaattaatggtcaaatcttgcggtggtcgggtggtaacactgatttgcaacatactatagctggtgaggtttcagcaccttgtccaatggtaaaacaggtgctcgttttatacgagtgaggttagacgacgagagttaataatgatgtgacattgatttcttt

SEQ ID NO: 299 - DNA, 1550 bp, Zea Mays
agttgctccgcctcctggcctcaggtcccatcacattccctccctcccttctcgacgccgccaaaacaagccatctcgtctcttcactcttcttctgcagtcctgctgccggtgctcgccctcgccctcgaccgtcacggagaaaacgaagagacccctagttagcatgcagagatttccctcatccacgacatctatgcgctgccttgccattcagcagcagttctcatgcaagtcattgtagcatgtgccattgttatgtctgtgattgtcctgctccctgtgccctatgggacaagcattgtcatgctacggacaaggatagaaagtggaagagacttagggaaatatccaaaaataaaagccagccaaatcctaaacgaagaataccccagcatttcaaacgctcagtcacgacaggaccatcatcctcacagtattccgcaaatatgactggttttactggaagatttcctgcttcgggtactgcgaaccaaattcaacaggtggatatctctgttatggttgcacaggatatggtgaggggtatcagtctgccgagtgcaccatctcctacgccaagaactaaaaatcggagctatggatccaaaggaggtcatgttagcgctaagacttttcagagtaacccatctcagttttgtgttcgtgcaccaatgggatctcatggacacaggtaccgaccaccatcatatcctcagcctcctcctaacacagttgttggcactggtgtgcccctctcacggtgcgcctcgctgaacgctgaggctcagggaacacaacgcccacaagttccgccggcaggtacaatatcgaaggaatcacttgcaaatttggcacgtcggctgggattaccttattacaatactaatcagccattaggtcagcagtcaacgagcacatctcaatttctgcatatgcatcctcacgagatgctacctgctcaaggtgctcaaaacacgacctggcaagcttacgttaagaaaagtgtggcaacaacttcacaaatcgtgccttctagtgaacataattcgtcaattcatgcacctgggagcactgttcttccatctggttcagttcagatccagcagcctttgcgccaattcaaatcgggcactgttctatcatctggtgcagcccagatccaccagcagcctctgcgccaactcgattctcagagcagtgttactccgagtgaaaccgttccaagtactctctaccttccgcagccatgaagtttcatcggaagtgttctcatcctagactattgttcctttctttagtgtacttgtagtttttttatatcatagataatcattgacagatatcttgctatcctaacctttctgctgtaatggtttaaagctgagaattaatggtcaaatcttgcggtggtcgggtggtaacactgatttgcaacatactatagctggtgaggtttcagcaccttgtccaatggtaaaacaggtgctcgttttatacgagtgaggttagacgacgagagttaataatgatgtgacattgatttcttt

SEQ ID NO: 300 - DNA, 1995 bp, Zea Mays
ctttcaccgtgcggggcgctcggcgtcctccatggtgatcggttagtgcgttccgttcaaggacgaaagatggggtctgcggcggaggtgcctgttgtgatcagttccgacgaggacggcgcgcagacgcccgccgctggcaagcgccagtcaccggaagacgccgcccttgcgtgggcggagggaatactggcccaagacgactacgacgacaacgcggtttgtgagggagtgggttatccagcgatgatgctggagctgttggattccctgaaggatgaaacagggactgttgtgggtgacaaggaggttgcggttggtgccaagaacacgaacaccatgcctgatgctcgttgcgacgatgatggcgatgattgcgtcattcttgacggtgaccctgataagccggttgccgttgcaaaggaggaggggggaccgccacgagatgcccctgaggatgaactgcagatagttgcggagaaaggagagttagcatgcagagatttccctcatccacgacatctatgcgctgccttgccattcagcagcagttctcatgcaagtcattgtagcatgtgccattgttatgtctgtgattgtcctgctccctgtgccctatgggacaagcattgtcatgctacggacaaggatagaaagtggaagagacttagggaaatatccaaaaataaaagccagccaaatcctaaacgaagaataccccagcatttcaaacgctcagtcacgacaggaccatcatcctcacagtattccgcaaatatgactggttttactggaagatttcctgcttcgggtactgcgaaccaaattcaacaggtggatatctctgttatggttgcacaggatatggtgaggggtatcagtctgccgagtgcaccatctcctacgccaagaactaaaaatcggagctatggatccaaaggtgcccagattgctcctccaatttatacattctcaaatgataatcatttccagccttctgttcctagctatggtctggtgcggcctcatgcatctaaaactgcacatgtttcatcaggaggtcatgttagcgctaagacttttcagagtaacccatctcagttttgtgttcgtgcaccaatgggatctcatggacacaggtaccgaccaccatcatatcctcagcctcctcctaacacagttgttggcactggtgtgcccctctcacggtgcgcctcgctgaacgctgaggctcagggaacacaacgcccacaagttccgccggcaggtacaatatcgaaggaatcacttgcaaatttggcacgtcggctgggattaccttattacaatactaatcagccattaggtcagcagtcaacgagcacatctcaatttctgcatatgcatcctcacgagatgctacctgctcaaggtgctcaaaacacgacctggcaagcttacgttaagaaaagtgtggcaacaacttcacaaatcgtgccttctagtgaacataattcgtcaattcatgcacctgggagcactgttcttccatctggttcagttcagatccagcagcctttgcgccaattcaaatcgggcactgttctatcatctggtgcagcccagatccaccagcagcctctgcgccaactcgattctcagagcagtgttactccgagtgaaaccgttccaagtactctctaccttccgcagccatgaagtttcatcggaagtgttctcatcctagactattgttcctttctttagtgtacttgtagtttttttatatcatagataatcattgacagatatcttgctatcctaacctttctgctgtaatggtttaaagctgagaattaatggtcaaatcttgcggtggtcgggtggtaacactgatttgcaacatactatagctggtgaggtttcagcaccttgtccaatggtaaaacaggtgctcgttttatacgagtgaggttagacgacgagagttaataatgatgtgacattgatttcttt

SEQ ID NO: 301 - DNA, 2304 bp, Zea Mays
gccctatttaaccccgcggcacggggctccccttcgcttcccccgtaataataaccgaatccccagaccaaatcgccgtcgccgtcgccgtcgcatcgcagcagcgggagtcccagggtcccggaccgaatccatttccagacacccaaggccaagatccatcgctcgttccaaccagccttcttcttcttctgcttggtcgtctgatctcgttttccattcgtgtccaatccgatccagccaaccgctgtgaatgatggcgctcaacctgtcccaccagaccggcgcggccgtggcggcggcaccggcggcgccacgcgcggccgtcgtcgcggcggcggccacggcgccacgctcggccgtcgtcgccgcggcggccaccgtggcgccgccgcccgcgtcggcgcccgcccccgctccggcgctccagctgcagacgatgacggtggacccggcccccgcgcaggcgcccgacgcggtgaagccggacctcgccatggcgtgccaggcgctggtggaggccgcgcccgaggcggagcacgccgacgtggccgccgagctccggagcagggccggggtgcccgtcttcgtcatgatgccgctcgacaccgtgcgcaaggacggcaactcgctcaaccggcgcaaggccgtggagggcatcatggtggacgtctggtggggcatcgccgaggccgacgggcccgggcagtacaacttcaacgggtacatggagctcatggagatggccaagaagaccgggctcaaggtccaggccgtcatgtccttccaccagtgcggcggcaacgtcggtgattcagtcaccataccacttccgggatgggtcttggaggagatggacaaggaccaggacctggcctacacggaccggagcggccgccggaactacgagtacgtctccctgggctgcgacgcgatgcccgtgctcaagggccgcacccccatccagtgctacgccgacttcatgcgcgccttccgcgaccacttcgccaccttcatgggcaacaccatcgtggagatccaggtcggcatgggccctgccggcgagctgcgctacccgtcctacccggagagcgacggcacctggtcgttccctggcatcggcgagttccagtgctacgacaggttcatgctgagtagcttgaaggcggctgctgaggccgtgggcaagccggagtggggcaacgcgggtccgggcgactccggcagctacaaggactggccggaggacacgggcttcttccggcgcgagggcgggtggagcacggagtacggggagttcttcatgagctggtactcgcagatgctcctggagcacggcgagcgcatcctgtcggcggcgacgggcgtgttcacgggttcccccggcgtgaagatctcggtgaaggtggccgggatccactggcactacggcacccggtcccacgcggcggagctgacggcggggtactacaacacccggtcgcacgacgggtacgcgcccatcgcgcgcatgctggcgcgccacggcgccgtgctcaacttcacgtgcgtggagatgcgcgaccacgagcagccgcaggacgcgcagtgccgccccgaggcgctggtgcagcaggtggccgccgcggcgcgggaggccggcgtgggcctggccggcgagaacgcgctgccgcgctacgacgacacggcgcacgaccaggtggtggccacggccgccgacagggccgccgaggaccgcatggtggccttcacgtacctgcgcatggggcccgacctgttccagcccgacaactggcgccgcttcgccgcgttcgtcaagcgcatgacggagccgggcgcgcgggaggcgtgccgggagcaggtggagcgggaggccgagggcgtcgcgcacgccacccagcccctcgtgcacgaggccgccgtcgcgctcaccaactgaccggaccggccggcgttccccgtcgactgtgttcgatcgctagacggggtggcacgctgcgatgactacctgtatggcgagtccctatacttactcatacataagctgcgccgccgtgtcgtcggtgcgtgcaccgcgcagtagtgtgcgtacagcggaagctgcgactgcgagcgaggtagggtgtggggtgggtgactggggtacggtacgtaggtgccacgttggaggctttggcgtttgctcagagcctggcaggagatgggtttgatgttctgctgctgtgttactgtatcctacacctacagaatgtgctatgatttgtactgctataatttttaacgaagatacaaacttctacaaaa

SEQ ID NO: 302 - DNA, 2295 bp, Zea Mays
gtctgctttgccgttggactgcgtccggattttgggaaatatcgccgtgtaaaattccaatcaacaaagatggcggttttggtttggtgctcgtcaaacatccccgttgactactactattaactttggagacatgtgccatttgccttggtggcatgagatcagggcagggtcatgccttgttcactgctgaatgctcccacaagttccattttcattgcatttcttcaaatatcaagcatggcaacctcatctgcccgatatgccgtgctaagtggaaagaactcccaggcgctcaacctgcagatgccagttatggacgagctagagttaacccattaaattggccccaggatgaagggcacatggctgttgtccgcaggctttcccatacatacagcggaaacctgcaggagcaccttcctttcttccgtactctggaggcaggcgttttcaatgatgatgagcacatagatcttcagtctgataatatcagtgaacataatgcagtcgctggttcagttaaaatcaaggcatattcagaagttccagctattgaacaatcaacgaccaaggagatctttgctatcttgatccatctcagggctccaaaatcttcacactcagcgagctcccgtgcacctcttgacctcgtcaccgtgcttgatgtcagtggtagcatggcagggaccaaaattgcacttctgaagaatgccatgagctttgtcatccaaacccttggacccaacgaccgcctgtctgtcgttgctttctcatctacagcacgcagactcttccctcttcggcgaatgacattatctggcaggcagcaagcattgcaagctgtcagttcccttgttgcaagtggtggcacaaacattgctgatgggctaaagaaggctgctaaagtgattgaggaccgtcggttgaagaattctgtttgcagtatcattcttctctctgacggtcaagacacatatacactcccttctgacaggaatctgcaagattacagtgccgttgtcccaccttcaatccttcctggaacatgccagcatgtacagatccacacctttggtttcggctcagatcatgattctgctgccatgcatgctattgctgagatctccagtggcacattttcattcatcgatgctgaaggctcaatccaagatggatttgcccagtgtattggtggccttcttagtgttgtggttaaggaggtgaggttgggcattgagtgtgtcgacaatggtgtgctactgacttccatcaagtctggcgggtatacaagtcaagttgctgaagatggacgcggcggttcagttgatatcggtgatctgtatgcagatgaagagagggggtttctggtcactctacatgtcccagctgcacagggacagactgtgctgatcaaaccaagctgcatgtatcatgacgctatcactacggagaacatcgaagtacatggtgaggaagtaaggattcagcgccctgaacatcgcgtggactgcaaaatgtctcctgaggttgagcgtgagtggcaccgtgttcaggccacagaggacatgtctgccgcacgggctgcagcggaggtaggtgctttctctcaggccgtggcaatcctggaagcccgtaggaggatactggaagcacaagcagcacaatcttcagacgaccagttcctggcattgatggcggagctgagggagatgcagcagagagtggagaaccggcggaggtacgaggagtcaggcagagctttcatgctggcaggcctgagctcacactcatggcagagagcaactgcacgaggggactcaacagagatcactaccactattcatacctaccagacgccatccatggttgacatgctgcagcgctctcagatcctcgtgccacccattgctgacatgctgaacagctccccaactgtggcgcctccaaatagattcagccggccatccaggtccaggacaataaaatccttctctgagcaactcctgtgatgcatcctgatcatgacacatgtctagctataattgtcaaaatattaggtgaatgtaagctgtccatttttttagtttgttcctgcagctggtacttccattttcttcagtattctatatagcagacatggggctagaagtcctggggtataaattggtttggtgtacatggttggtatttggaaaggatttgttctgtacataaacttgccccttgaattgcagtcaataatttggggtgaaatcatttacccgtttgtatatagatattggagcacaaaat

SEQ ID NO: 303 - DNA, 2125 bp, Zea Mays
cttttccaagaggagatgcccggtcccacagcggagcttgctccctcctcccttcctctcgagagggactccctcggcgtcaccatcgaccccgcggaagcgggggcgtgcgcgtatccactcctcaaccaagtggagcatcccctcacgctagaccggagctggggggcgacgacgagccagccgccgccggtttgaccagacctgtggtgatggactgataaggaggggattttgctaagggcacaatatgcataggagaggttgatgttacaagtattaccaaattccggagtatatggacctgctcagatgctacattttatgagccagaaggaattcctgatggtttccactgccttgggcactacgcccaacagaatgaccgccccttacagggatttcttctggtggcaagggaagtggctagccaccaagttattgataccaagcccgcccttgagaaaccatcagattactcccttgtttggaccagtgctgacgcaaatgaagatgacaatagcgaatgtggttgcatctggctgccatgtccacccaatgggtataaagcccttggctatgtggttactaaaggaccaaagaagccctcactggaagcagttcggtgtgtgcgagatgacctaacggacacgcgcgaaaatttccattcaattgcaaatatggacaacgcatgccagatttggaagacaaggccttgccaccgaggagtgggagggcgtggtataccggttggtacattctcctgcgaaaccgattcaacagatagtgatgaatcaagcactccctgcctgaaaaatgtcgactcgaatctgggtgccatgcctaatctggagcagatcaatgctctgatcaagcactacggcccaaccgttttcttccacccgcaagagacgtacttaccgtcatcagtttcttggttctttgagaacggagctacattgcacgagaaagacgcaaaaatgggagatgcaatactccctggtggcttgaatctgcctgttggtgggacaaacgatggcgagtactggattgatctccctgatgatgacaggaaggagctcgtcagagctggcaatctgaagagcgctgagctatacgctcatgtgaagccagctcatggagggaccttcactgacattgcaatgtgggtgttctgcccgttcaacgggcctgccaccatcaaggttgggtttgcgagtttcgctctgcagaaggtcggtaggcacattggagactgggagcacttcaccctccgagtgagcaacttctcaggtcagctgtcgtctatctacttctcgcagcacagcgggggcgagtgggttgaagcttgcgatctggagttcatctctgggaacaaggcgatcatctactcgtccaggaacgggcacgcgagctacccccacccaggctgctacctgatgggttccgagacgctcggtgtcggagttagaaacgatgtggcgcgaagtgatctgtcagtggattcgagcacgcggtatgagatcatctcggcagggcatctcggggaggacgctgttgcggaaccgtgctggctgcagtacatgagggagtggggaccgaccatcacgtacagctcacgttcagagatagacacggcgctgagcttcctgccgttctttctccggttcacagcagaggcaatattcaacagccttccggcggaactgtacgaggaggaaggtcctacggggcccaaggagaagaacaactgggaaggcgacgagagatgctaggctttgtcgccatcattgtttacccctgtcaccttaatctgtaccctagagctgtattgtacttgatgaaaaagattgatactgtatgtgataagaatatacagtttcgtacatatggtgggctggtggctgagccctgagggttcagtgcacttgtcaggttaggcatctcgctgcttatttagcccgatgcggtggtgcaagtgcatgactacttgccctgtgcatctgccaaccagattgcgcttgtattgtgcctgtcatacttccttttctagtggagtattttggtaagagacagatatatagttcaaaatcaataatctcgtgagttcctatcttgcaaagcc

SEQ ID NO: 304 - DNA, 1956 bp, Zea Mays
aagcagttcgtctactacctaccactctgctttactttcaagtgataatttacatggaggggattttgctaagggcacaatatgcataggagaggttgatgttacaagtattaccaaattccggagtatatggacctgctcagatgctacattttatgagccagaaggaattcctgatggtttccactgccttgggcactacgcccaacagaatgaccgccccttacagggatttcttctggtggcaagggaagtggctagccaccaagttattgataccaagcccgcccttgagaaaccatcagattactcccttgtttggaccagtgctgacgcaaatgaagatgacaatagcgaatgtggttgcatctggctgccatgtccacccaatgggtataaagcccttggctatgtggttactaaaggaccaaagaagccctcactggaagcagttcggtgtgtgcgagatgacctaacggacacgcgcgaaaatttccattcaattgcaaatatggacaacgcatgccagatttggaagacaaggccttgccaccgaggagtgggagggcgtggtataccggttggtacattctcctgcgaaaccgattcaacagatagtgatgaatcaagcactccctgcctgaaaaatgtcgactcgaatctgggtgccatgcctaatctggagcagatcaatgctctgatcaagcactacggcccaaccgttttcttccacccgcaagagacgtacttaccgtcatcagtttcttggttctttgagaacggagctacattgcacgagaaagacgcaaaaatgggagatgcaatactccctggtggcttgaatctgcctgttggtgggacaaacgatggcgagtactggattgatctccctgatgatgacaggaaggagctcgtcagagctggcaatctgaagagcgctgagctatacgctcatgtgaagccagctcatggagggaccttcactgacattgcaatgtgggtgttctgcccgttcaacgggcctgccaccatcaaggttgggtttgcgagtttcgctctgcagaaggtcggtaggcacattggagactgggagcacttcaccctccgagtgagcaacttctcaggtcagctgtcgtctatctacttctcgcagcacagcgggggcgagtgggttgaagcttgcgatctggagttcatctctgggaacaaggcgatcatctactcgtccaggaacgggcacgcgagctacccccacccaggctgctacctgatgggttccgagacgctcggtgtcggagttagaaacgatgtggcgcgaagtgatctgtcagtggattcgagcacgcggtatgagatcatctcggcagggcatctcggggaggacgctgttgcggaaccgtgctggctgcagtacatgagggagtggggaccgaccatcacgtacagctcacgttcagagatagacacggcgctgagcttcctgccgttctttctccggttcacagcagaggcaatattcaacagccttccggcggaactgtacgaggaggaaggtcctacggggcccaaggagaagaacaactgggaaggcgacgagagatgctaggctttgtcgccatcattgtttacccctgtcaccttaatctgtaccctagagctgtattgtacttgatgaaaaagattgatactgtatgtgataagaatatacagtttcgtacatatggtgggctggtggctgagccctgagggttcagtgcacttgtcaggttaggcatctcgctgcttatttagcccgatgcggtggtgcaagtgcatgactacttgccctgtgcatctgccaaccagattgcgcttgtattgtgcctgtcatacttccttttctagtggagtattttggtaagagacagatatatagttcaaaatcaataatctcgtgagttcctatcttgcaaagcc

SEQ ID NO: 305 - DNA, 3219 bp, Zea Mays
ccttccgctacgatacaaaagctcgagaacccacgcacgcgcgcaccccccacccaccccacgtctcgcttctccccaccccgcccgctacagcgccggtggggggcccccgcggctgccggcgaccggtcgccgccgccgaggccgtcctcgccgccccgacattctccagctggtgcggcagcattagccatggtttagcggaggcgattctccttgcaggcttgcagctgtttccggggtggtggattttcaaggaataaagaatgatcaacctcttcgaattgagcgttggagccagcgccaaggtctcctcaagagatggctctccggtgagaggaactcagtcggagcggaaggagtacgccggatcaaagttgactggcagcacgaggaggagctcgtcggatagatcgggcggtacgcccatgaaaatgctgatagctcaggaaatggccaaggagggggacgcgaatcagaagaccactaacgttgtggcgaggctgatggggcttgacgataatgtggatcttgctaagcctgtcgtgcccccaaacaggaggagtttcccggacggccatttatctgctacactggcaagagtaaacaaccaaattccatttgagaagcacacgagttccgccgaagatgtggagtacaaggatgtctacgaagttgggtaccagccaccaagaggtgatgaatatccaaggaggaggaggccgagtgaagatcatgacaagagaaggatggatcttgtccgccagaagtttgttgaagcaaagcggcttgcgtcacatgataatatcctccagtcgaaggaattccacgatgctcttgaggttctgaattcaaacaaagatctgtttctcaaatttctcgaagaacctaactctctctttgcgaagcagtctgggggactcggttctgcaccaacatcacctcagagaaagcacattactgtgttgaagccctcgaaatcagtggagatgaagggtgacaaagcaattagaaggcagacaaaccatgcagccggaaacagaacagacaggagcaacgtgcacaagtctgatgcagctcatgtgaaggaagataagcttcccaaacacaccaggatagtggtcttgaaacctacctcggtaattgcttccatggagcaatctgagcaaagttatcatgctgatctcgatgattctgaagcgcctgttctgtcaaggcatctgagtgatgagatagattggtcggtacatggaatttctcgacgccacactgaatctttgcagggttgcatacagtcaaatatgttcggcgcagatagaccataccatcagtatgctgaagaagagggcaatagcttgagtgactcagatattggaaccccaacatcacatcactcttgggagtacatctaccggtttagcaatccttactttggctctttgagccatgcttcttgctcccctgagtcacatgtaactagggaggctaagaagcatgcttctgacagatgggcaaccgttccatccagtgagatgacccaggacaaggtaccagtgcgaagaagtttgagcacacttggtgaaatgcttgccatgccggatatgaagaaagaagaggctgctgaacaagcatctcctgatgctacccaccagttgtgtgagccaacagttggcgtatcatctaattgtgctgttggcgaaggtgagggagaaagctccctcaggaaaatctcgaggtcacgatctgttccggtctcttcaacagcttttgatagcctgcggttagatggtggatgtttggatgctcagcataaagaacctacagtgccgaaggaggtcaaacctaagagtgggaaatcatctttgaagggaaaaatcacgagtttcttctcaaaacgtaagaaagcagaaaaggagaagcctagcccatctcccttgggaaccctgaacggtcgaggttcgtcagtcagcactgtagcagttgctaaaccagatgctccacagcatgtttgtgctagttcacaggatgatgtttccttcgaaagtttagaagaccagtttaatcacggaccaatcggagctccggttgatgaacccgaagcaccctctgtgtctaagcctccagcttcgcttgagaagacgctatcatttgagattcgagcttcccacttcgaccagcccagccctacatcggtttttgatgtacaatttgaggatatcagcgagaaatcccccatttcatcagaaagcgcgattactgctaaacaagagcctctatccaggtctataccaatcggatcgatcgcgaggaccttatcatgggacgacgcttcccaagaggctcctccgcagtgttctaccaaaggagacagcaaccacgagcaggagcagcacgagttcgtcgagaagacgctggcatccgctggcttctgcaacgagaagacccaggacatctttgcccggtggcattcgctcgaccggcccttggaccccgccgtggtcgagcagctgctggaacgcaaggtggaggacgccaagtgccgagagaggcggtcgaaccagaggctcctaatcgactctgtcaacgccgccctgctcgacatcggccagagcaaagtctgggggggcgcgtacccttgcaccgcacggcactattccaacgctccgggagttggcacgtgcgatgatgatgtgctagtgaccgacgaggcgtggaggctggtgaggagctggctcttcgatgacgagaacgacatcgccgggttgggggacaacgcgggccttgcggcggactgggttgtcggtagggagatccacggcaaagggtgggccgagacgctgcggatggaggtggacgagatgagcagggagatatgtggcgaggtcctgggcgagttggttggggaggcgttttcggagcttgccggcgctgcggggtggcattgaagctgcctgccttctattttccctgcttgtggtggcgtccacctgctgctgctgcttttacttccaatccggttcttgtgtgtatattaccctcgtaactgctcaaagtgttccctgctgctgcctctctatctgtgttgcatctctttcagcattgatacattcacggtaataacatttacggatgaatacagctgctgcactgcacttgaaatcctctctctttttcctggccacatgttcctttctctgctatggctatgaggttgcacaa

SEQ ID NO: 306 - DNA, 3400 bp, Zea Mays
ccttccgctacgatacaaaagctcgagaacccacgcacgcgcgcaccccccacccaccccacgtctcgcttctccccaccccgcccgctacagcgccggtggggggcccccgcggctgccggcgaccggtcgccgccgccgaggccgtcctcgccgccccgacattctccagctggtgcgttctcgttcctggcttccggccttggctggcctcctccccgcggaactgaggcgaattggcgcgggagggcacgggatcttgccgtcctgtcctggcgtctcctgccgcaccgcgtttgggcaacttttttttgtcggcgaaaaaagaatacatgaaaacgccgccttttgctcggggcgcttcacgggcctccgcagcattagccatggtttagcggaggcgattctccttgcaggcttgcagctgtttccggggtggtggattttcaaggaataaagaatgatcaacctcttcgaattgagcgttggagccagcgccaaggctctccggtgagaggaactcagtcggagcggaaggagtacgccggatcaaaggcgttgactggcagcacgaggaggagctcgtcggatagatcgggcggtacgcccatgaaaatgctgatagctcaggaaatggccaaggagggggacgcgaatcagaagaccactaacgttgtggcgaggctgatggggcttgacgataatgtggatcttgctaagcctgtcgtgcccccaaacaggaggagtttcccggacggccatttatctgctacactggcaagagtaaacaaccaaattccatttgagaagcacacgagttccgccgaagatgtggagtacaaggatgtctacgaagttgggtaccagccaccaagaggtgatgaatatccaaggaggaggaggccgagtgaagatcatgacaagagaaggatggatcttgtccgccagaagtttgttgaagcaaagcggcttgcgtcacatgataatatcctccagtcgaaggaattccacgatgctcttgaggttctgaattcaaacaaagatctgtttctcaaatttctcgaagaacctaactctctctttgcgaagcagtctgggggactcggttctgcaccaacatcacctcagagaaagcacattactgtgttgaagccctcgaaatcagtggagatgaagggtgacaaagcaattagaaggcagacaaaccatgcagccggaaacagaacagacaggagcaacgtgcacaagtctgatgcagctcatgtgaaggaagataagcttcccaaacacaccaggatagtggtcttgaaacctacctcggtaattgcttccatggagcaatctgagcaaagttatcatgctgatctcgatgattctgaagcgcctgttctgtcaaggcatctgagtgatgagatagattggtcggtacatggaatttctcgacgccacactgaatctttgcagggttgcatacagtcaaatatgttcggcgcagatagaccataccatcagtatgctgaagaagagggcaatagcttgagtgactcagatattggaaccccaacatcacatcactcttgggagtacatctaccggtttagcaatccttactttggctctttgagccatgcttcttgctcccctgagtcacatgtaactagggaggctaagaagcatgcttctgacagatgggcaaccgttccatccagtgagatgacccaggacaaggtaccagtgcgaagaagtttgagcacacttggtgaaatgcttgccatgccggatatgaagaaagaagaggctgctgaacaagcatctcctgatgctacccaccagttgtgtgagccaacagttggcgtatcatctaattgtgctgttggcgaaggtgagggagaaagctccctcaggaaaatctcgaggtcacgatctgttccggtctcttcaacagcttttgatagcctgcggttagatggtggatgtttggatgctcagcataaagaacctacagtgccgaaggaggtcaaacctaagagtgggaaatcatctttgaagggaaaaatcacgagtttcttctcaaaacgtaagaaagcagaaaaggagaagcctagcccatctcccttgggaaccctgaacggtcgaggttcgtcagtcagcactgtagcagttgctaaaccagatgctccacagcatgtttgtgctagttcacaggatgatgtttccttcgaaagtttagaagaccagtttaatcacggaccaatcggagctccggttgatgaacccgaagcaccctctgtgtctaagcctccagcttcgcttgagaagacgctatcatttgagattcgagcttcccacttcgaccagcccagccctacatcggtttttgatgtacaatttgaggatatcagcgagaaatcccccatttcatcagaaagcgcgattactgctaaacaagagcctctatccaggtctataccaatcggatcgatcgcgaggaccttatcatgggacgacgcttcccaagaggctcctccgcagtgttctaccaaaggagacagcaaccacgagcaggagcagcacgagttcgtcgagaagacgctggcatccgctggcttctgcaacgagaagacccaggacatctttgcccggtggcattcgctcgaccggcccttggaccccgccgtggtcgagcagctgctggaacgcaaggtggaggacgccaagtgccgagagaggcggtcgaaccagaggctcctaatcgactctgtcaacgccgccctgctcgacatcggccagagcaaagtctgggggggcgcgtacccttgcaccgcacggcactattccaacgctccgggagttggcacgtgcgatgatgatgtgctagtgaccgacgaggcgtggaggctggtgaggagctggctcttcgatgacgagaacgacatcgccgggttgggggacaacgcgggccttgcggcggactgggttgtcggtagggagatccacggcaaagggtgggccgagacgctgcggatggaggtggacgagatgagcagggagatatgtggcgaggtcctgggcgagttggttggggaggcgttttcggagcttgccggcgctgcggggtggcattgaagctgcctgccttctattttccctgcttgtggtggcgtccacctgctgctgctgcttttacttccaatccggttcttgtgtgtatattaccctcgtaactgctcaaagtgttccctgctgctgcctctctatctgtgttgcatctctttcagcattgatacattcacggtaataacatttacggatgaatacagctgctgcactgcacttgaaatcctctctctttttcctggccacatgttcctttctctgctatggctatgaggttgcacaa

SEQ ID NO: 307 - DNA, 3429 bp, Zea Mays
ccttccgctacgatacaaaagctcgagaacccacgcacgcgcgcaccccccacccaccccacgtctcgcttctccccaccccgcccgctacagcgccggtggggggcccccgcggctgccggcgaccggtcgccgccgccgaggccgtcctcgccgccccgacattctccagctgttctcgttcctggcttccggccttggctggcctcctccccgcggaactgaggcgaattggcgcgggagggcacgggatcttgccgtcctgtcctggcgtctcctgccgcaccgcgtttgggcaacttttttttgtcggcgaaaaaagaatacatgaaaacgccgccttttgctcggggcgcttcacgggcctccgcagcattagccatggtttagcggaggcgattctccttgcaggcttgcagctgtttccggggtggtggattttcaaggaataaagaatgatcaacctcttcgaattgagcgttggagccagcgccaaggtctcctcaagagatggctctccggtgagaggaactcagtcggagcggaaggagtacgccggatcaaaggcgcatgatctatgtcggcagttgactggcagcacgaggaggagctcgtcggatagatcgggcggtacgcccatgaaaatgctgatagctcaggaaatggccaaggagggggacgcgaatcagaagaccactaacgttgtggcgaggctgatggggcttgacgataatgtggatcttgctaagcctgtcgtgcccccaaacaggaggagtttcccggacggccatttatctgctacactggcaagagtaaacaaccaaattccatttgagaagcacacgagttccgccgaagatgtggagtacaaggatgtctacgaagttgggtaccagccaccaagaggtgatgaatatccaaggaggaggaggccgagtgaagatcatgacaagagaaggatggatcttgtccgccagaagtttgttgaagcaaagcggcttgcgtcacatgataatatcctccagtcgaaggaattccacgatgctcttgaggttctgaattcaaacaaagatctgtttctcaaatttctcgaagaacctaactctctctttgcgaagcagtctgggggactcggttctgcaccaacatcacctcagagaaagcacattactgtgttgaagccctcgaaatcagtggagatgaagggtgacaaagcaattagaaggcagacaaaccatgcagccggaaacagaacagacaggagcaacgtgcacaagtctgatgcagctcatgtgaaggaagataagcttcccaaacacaccaggatagtggtcttgaaacctacctcggtaattgcttccatggagcaatctgagcaaagttatcatgctgatctcgatgattctgaagcgcctgttctgtcaaggcatctgagtgatgagatagattggtcggtacatggaatttctcgacgccacactgaatctttgcagggttgcatacagtcaaatatgttcggcgcagatagaccataccatcagtatgctgaagaagagggcaatagcttgagtgactcagatattggaaccccaacatcacatcactcttgggagtacatctaccggtttagcaatccttactttggctctttgagccatgcttcttgctcccctgagtcacatgtaactagggaggctaagaagcatgcttctgacagatgggcaaccgttccatccagtgagatgacccaggacaaggtaccagtgcgaagaagtttgagcacacttggtgaaatgcttgccatgccggatatgaagaaagaagaggctgctgaacaagcatctcctgatgctacccaccagttgtgtgagccaacagttggcgtatcatctaattgtgctgttggcgaaggtgagggagaaagctccctcaggaaaatctcgaggtcacgatctgttccggtctcttcaacagcttttgatagcctgcggttagatggtggatgtttggatgctcagcataaagaacctacagtgccgaaggaggtcaaacctaagagtgggaaatcatctttgaagggaaaaatcacgagtttcttctcaaaacgtaagaaagcagaaaaggagaagcctagcccatctcccttgggaaccctgaacggtcgaggttcgtcagtcagcactgtagcagttgctaaaccagatgctccacagcatgtttgtgctagttcacaggatgatgtttccttcgaaagtttagaagaccagtttaatcacggaccaatcggagctccggttgatgaacccgaagcaccctctgtgtctaagcctccagcttcgcttgagaagacgctatcatttgagattcgagcttcccacttcgaccagcccagccctacatcggtttttgatgtacaatttgaggatatcagcgagaaatcccccatttcatcagaaagcgcgattactgctaaacaagagcctctatccaggtctataccaatcggatcgatcgcgaggaccttatcatgggacgacgcttcccaagaggctcctccgcagtgttctaccaaaggagacagcaaccacgagcaggagcagcacgagttcgtcgagaagacgctggcatccgctggcttctgcaacgagaagacccaggacatctttgcccggtggcattcgctcgaccggcccttggaccccgccgtggtcgagcagctgctggaacgcaaggtggaggacgccaagtgccgagagaggcggtcgaaccagaggctcctaatcgactctgtcaacgccgccctgctcgacatcggccagagcaaagtctgggggggcgcgtacccttgcaccgcacggcactattccaacgctccgggagttggcacgtgcgatgatgatgtgctagtgaccgacgaggcgtggaggctggtgaggagctggctcttcgatgacgagaacgacatcgccgggttgggggacaacgcgggccttgcggcggactgggttgtcggtagggagatccacggcaaagggtgggccgagacgctgcggatggaggtggacgagatgagcagggagatatgtggcgaggtcctgggcgagttggttggggaggcgttttcggagcttgccggcgctgcggggtggcattgaagctgcctgccttctattttccctgcttgtggtggcgtccacctgctgctgctgcttttacttccaatccggttcttgtgtgtatattaccctcgtaactgctcaaagtgttccctgctgctgcctctctatctgtgttgcatctctttcagcattgatacattcacggtaataacatttacggatgaatacagctgctgcactgcacttgaaatcctctctctttttcctggccacatgttcctttctctgctatggctatgaggttgcacaa

SEQ ID NO: 308 - DNA, 3416 bp, Zea Mays
ccttccgctacgatacaaaagctcgagaacccacgcacgcgcgcaccccccacccaccccacgtctcgcttctccccaccccgcccgctacagcgccggtggggggcccccgcggctgccggcgaccggtcgccgccgccgaggccgtcctcgccgccccgacattctccagctggtgcgttctcgttcctggcttccggccttggctggcctcctccccgcggaactgaggcgaattggcgcgggagggcacgggatcttgccgtcctgtcctggcgtctcctgccgcaccgcgtttgggcaacttttttttgtcggcgaaaaaagaatacatgaaaacgccgccttttgctcggggcgcttcacgggcctccgcagcattagccatggtttagcggaggcgattctccttgcaggcttgcagctgtttccggggtggtggattttcaaggaataaagaatgatcaacctcttcgaattgagcgttggagccagcgccaaggtctcctcaagagatggctctccggtgagaggaactcagtcggagcggaaggagtacgccggatcaaaggcgttgactggcagcacgaggaggagctcgtcggatagatcgggcggtacgcccatgaaaatgctgatagctcaggaaatggccaaggagggggacgcgaatcagaagaccactaacgttgtggcgaggctgatggggcttgacgataatgtggatcttgctaagcctgtcgtgcccccaaacaggaggagtttcccggacggccatttatctgctacactggcaagagtaaacaaccaaattccatttgagaagcacacgagttccgccgaagatgtggagtacaaggatgtctacgaagttgggtaccagccaccaagaggtgatgaatatccaaggaggaggaggccgagtgaagatcatgacaagagaaggatggatcttgtccgccagaagtttgttgaagcaaagcggcttgcgtcacatgataatatcctccagtcgaaggaattccacgatgctcttgaggttctgaattcaaacaaagatctgtttctcaaatttctcgaagaacctaactctctctttgcgaagcagtctgggggactcggttctgcaccaacatcacctcagagaaagcacattactgtgttgaagccctcgaaatcagtggagatgaagggtgacaaagcaattagaaggcagacaaaccatgcagccggaaacagaacagacaggagcaacgtgcacaagtctgatgcagctcatgtgaaggaagataagcttcccaaacacaccaggatagtggtcttgaaacctacctcggtaattgcttccatggagcaatctgagcaaagttatcatgctgatctcgatgattctgaagcgcctgttctgtcaaggcatctgagtgatgagatagattggtcggtacatggaatttctcgacgccacactgaatctttgcagggttgcatacagtcaaatatgttcggcgcagatagaccataccatcagtatgctgaagaagagggcaatagcttgagtgactcagatattggaaccccaacatcacatcactcttgggagtacatctaccggtttagcaatccttactttggctctttgagccatgcttcttgctcccctgagtcacatgtaactagggaggctaagaagcatgcttctgacagatgggcaaccgttccatccagtgagatgacccaggacaaggtaccagtgcgaagaagtttgagcacacttggtgaaatgcttgccatgccggatatgaagaaagaagaggctgctgaacaagcatctcctgatgctacccaccagttgtgtgagccaacagttggcgtatcatctaattgtgctgttggcgaaggtgagggagaaagctccctcaggaaaatctcgaggtcacgatctgttccggtctcttcaacagcttttgatagcctgcggttagatggtggatgtttggatgctcagcataaagaacctacagtgccgaaggaggtcaaacctaagagtgggaaatcatctttgaagggaaaaatcacgagtttcttctcaaaacgtaagaaagcagaaaaggagaagcctagcccatctcccttgggaaccctgaacggtcgaggttcgtcagtcagcactgtagcagttgctaaaccagatgctccacagcatgtttgtgctagttcacaggatgatgtttccttcgaaagtttagaagaccagtttaatcacggaccaatcggagctccggttgatgaacccgaagcaccctctgtgtctaagcctccagcttcgcttgagaagacgctatcatttgagattcgagcttcccacttcgaccagcccagccctacatcggtttttgatgtacaatttgaggatatcagcgagaaatcccccatttcatcagaaagcgcgattactgctaaacaagagcctctatccaggtctataccaatcggatcgatcgcgaggaccttatcatgggacgacgcttcccaagaggctcctccgcagtgttctaccaaaggagacagcaaccacgagcaggagcagcacgagttcgtcgagaagacgctggcatccgctggcttctgcaacgagaagacccaggacatctttgcccggtggcattcgctcgaccggcccttggaccccgccgtggtcgagcagctgctggaacgcaaggtggaggacgccaagtgccgagagaggcggtcgaaccagaggctcctaatcgactctgtcaacgccgccctgctcgacatcggccagagcaaagtctgggggggcgcgtacccttgcaccgcacggcactattccaacgctccgggagttggcacgtgcgatgatgatgtgctagtgaccgacgaggcgtggaggctggtgaggagctggctcttcgatgacgagaacgacatcgccgggttgggggacaacgcgggccttgcggcggactgggttgtcggtagggagatccacggcaaagggtgggccgagacgctgcggatggaggtggacgagatgagcagggagatatgtggcgaggtcctgggcgagttggttggggaggcgttttcggagcttgccggcgctgcggggtggcattgaagctgcctgccttctattttccctgcttgtggtggcgtccacctgctgctgctgcttttacttccaatccggttcttgtgtgtatattaccctcgtaactgctcaaagtgttccctgctgctgcctctctatctgtgttgcatctctttcagcattgatacattcacggtaataacatttacggatgaatacagctgctgcactgcacttgaaatcctctctctttttcctggccacatgttcctttctctgctatggctatgaggttgcacaa

SEQ ID NO: 309 - DNA, 3235 bp, Zea Mays
ccttccgctacgatacaaaagctcgagaacccacgcacgcgcgcaccccccacccaccccacgtctcgcttctccccaccccgcccgctacagcgccggtggggggcccccgcggctgccggcgaccggtcgccgccgccgaggccgtcctcgccgccccgacattctccagctggcagcattagccatggtttagcggaggcgattctccttgcaggcttgcagctgtttccggggtggtggattttcaaggaataaagaatgatcaacctcttcgaattgagcgttggagccagcgccaaggtctcctcaagagatggctctccggtgagaggaactcagtcggagcggaaggagtacgccggatcaaaggcgcatgatctatgtcggcagttgactggcagcacgaggaggagctcgtcggatagatcgggcggtacgcccatgaaaatgctgatagctcaggaaatggccaaggagggggacgcgaatcagaagaccactaacgttgtggcgaggctgatggggcttgacgataatgtggatcttgctaagcctgtcgtgcccccaaacaggaggagtttcccggacggccatttatctgctacactggcaagagtaaacaaccaaattccatttgagaagcacacgagttccgccgaagatgtggagtacaaggatgtctacgaagttgggtaccagccaccaagaggtgatgaatatccaaggaggaggaggccgagtgaagatcatgacaagagaaggatggatcttgtccgccagaagtttgttgaagcaaagcggcttgcgtcacatgataatatcctccagtcgaaggaattccacgatgctcttgaggttctgaattcaaacaaagatctgtttctcaaatttctcgaagaacctaactctctctttgcgaagcagtctgggggactcggttctgcaccaacatcacctcagagaaagcacattactgtgttgaagccctcgaaatcagtggagatgaagggtgacaaagcaattagaaggcagacaaaccatgcagccggaaacagaacagacaggagcaacgtgcacaagtctgatgcagctcatgtgaaggaagataagcttcccaaacacaccaggatagtggtcttgaaacctacctcggtaattgcttccatggagcaatctgagcaaagttatcatgctgatctcgatgattctgaagcgcctgttctgtcaaggcatctgagtgatgagatagattggtcggtacatggaatttctcgacgccacactgaatctttgcagggttgcatacagtcaaatatgttcggcgcagatagaccataccatcagtatgctgaagaagagggcaatagcttgagtgactcagatattggaaccccaacatcacatcactcttgggagtacatctaccggtttagcaatccttactttggctctttgagccatgcttcttgctcccctgagtcacatgtaactagggaggctaagaagcatgcttctgacagatgggcaaccgttccatccagtgagatgacccaggacaaggtaccagtgcgaagaagtttgagcacacttggtgaaatgcttgccatgccggatatgaagaaagaagaggctgctgaacaagcatctcctgatgctacccaccagttgtgtgagccaacagttggcgtatcatctaattgtgctgttggcgaaggtgagggagaaagctccctcaggaaaatctcgaggtcacgatctgttccggtctcttcaacagcttttgatagcctgcggttagatggtggatgtttggatgctcagcataaagaacctacagtgccgaaggaggtcaaacctaagagtgggaaatcatctttgaagggaaaaatcacgagtttcttctcaaaacgtaagaaagcagaaaaggagaagcctagcccatctcccttgggaaccctgaacggtcgaggttcgtcagtcagcactgtagcagttgctaaaccagatgctccacagcatgtttgtgctagttcacaggatgatgtttccttcgaaagtttagaagaccagtttaatcacggaccaatcggagctccggttgatgaacccgaagcaccctctgtgtctaagcctccagcttcgcttgagaagacgctatcatttgagattcgagcttcccacttcgaccagcccagccctacatcggtttttgatgtacaatttgaggatatcagcgagaaatcccccatttcatcagaaagcgcgattactgctaaacaagagcctctatccaggtctataccaatcggatcgatcgcgaggaccttatcatgggacgacgcttcccaagaggctcctccgcagtgttctaccaaaggagacagcaaccacgagcaggagcagcacgagttcgtcgagaagacgctggcatccgctggcttctgcaacgagaagacccaggacatctttgcccggtggcattcgctcgaccggcccttggaccccgccgtggtcgagcagctgctggaacgcaaggtggaggacgccaagtgccgagagaggcggtcgaaccagaggctcctaatcgactctgtcaacgccgccctgctcgacatcggccagagcaaagtctgggggggcgcgtacccttgcaccgcacggcactattccaacgctccgggagttggcacgtgcgatgatgatgtgctagtgaccgacgaggcgtggaggctggtgaggagctggctcttcgatgacgagaacgacatcgccgggttgggggacaacgcgggccttgcggcggactgggttgtcggtagggagatccacggcaaagggtgggccgagacgctgcggatggaggtggacgagatgagcagggagatatgtggcgaggtcctgggcgagttggttggggaggcgttttcggagcttgccggcgctgcggggtggcattgaagctgcctgccttctattttccctgcttgtggtggcgtccacctgctgctgctgcttttacttccaatccggttcttgtgtgtatattaccctcgtaactgctcaaagtgttccctgctgctgcctctctatctgtgttgcatctctttcagcattgatacattcacggtaataacatttacggatgaatacagctgctgcactgcacttgaaatcctctctctttttcctggccacatgttcctttctctgctatggctatgaggttgcacaa

SEQ ID NO: 310 - DNA, 3214 bp, Zea Mays
ccttccgctacgatacaaaagctcgagaacccacgcacgcgcgcaccccccacccaccccacgtctcgcttctccccaccccgcccgctacagcgccggtggggggcccccgcggctgccggcgaccggtcgccgccgccgaggccgtcctcgccgccccgacattctccagctggcagcattagccatggtttagcggaggcgattctccttgcaggcttgcagctgtttccggggtggtggattttcaaggaataaagaatgatcaacctcttcgaattgagcgttggagccagcgccaaggtctcctcaagagatggctctccggtgagaggaactcagtcggagcggaaggagtacgccggatcaaagttgactggcagcacgaggaggagctcgtcggatagatcgggcggtacgcccatgaaaatgctgatagctcaggaaatggccaaggagggggacgcgaatcagaagaccactaacgttgtggcgaggctgatggggcttgacgataatgtggatcttgctaagcctgtcgtgcccccaaacaggaggagtttcccggacggccatttatctgctacactggcaagagtaaacaaccaaattccatttgagaagcacacgagttccgccgaagatgtggagtacaaggatgtctacgaagttgggtaccagccaccaagaggtgatgaatatccaaggaggaggaggccgagtgaagatcatgacaagagaaggatggatcttgtccgccagaagtttgttgaagcaaagcggcttgcgtcacatgataatatcctccagtcgaaggaattccacgatgctcttgaggttctgaattcaaacaaagatctgtttctcaaatttctcgaagaacctaactctctctttgcgaagcagtctgggggactcggttctgcaccaacatcacctcagagaaagcacattactgtgttgaagccctcgaaatcagtggagatgaagggtgacaaagcaattagaaggcagacaaaccatgcagccggaaacagaacagacaggagcaacgtgcacaagtctgatgcagctcatgtgaaggaagataagcttcccaaacacaccaggatagtggtcttgaaacctacctcggtaattgcttccatggagcaatctgagcaaagttatcatgctgatctcgatgattctgaagcgcctgttctgtcaaggcatctgagtgatgagatagattggtcggtacatggaatttctcgacgccacactgaatctttgcagggttgcatacagtcaaatatgttcggcgcagatagaccataccatcagtatgctgaagaagagggcaatagcttgagtgactcagatattggaaccccaacatcacatcactcttgggagtacatctaccggtttagcaatccttactttggctctttgagccatgcttcttgctcccctgagtcacatgtaactagggaggctaagaagcatgcttctgacagatgggcaaccgttccatccagtgagatgacccaggacaaggtaccagtgcgaagaagtttgagcacacttggtgaaatgcttgccatgccggatatgaagaaagaagaggctgctgaacaagcatctcctgatgctacccaccagttgtgtgagccaacagttggcgtatcatctaattgtgctgttggcgaaggtgagggagaaagctccctcaggaaaatctcgaggtcacgatctgttccggtctcttcaacagcttttgatagcctgcggttagatggtggatgtttggatgctcagcataaagaacctacagtgccgaaggaggtcaaacctaagagtgggaaatcatctttgaagggaaaaatcacgagtttcttctcaaaacgtaagaaagcagaaaaggagaagcctagcccatctcccttgggaaccctgaacggtcgaggttcgtcagtcagcactgtagcagttgctaaaccagatgctccacagcatgtttgtgctagttcacaggatgatgtttccttcgaaagtttagaagaccagtttaatcacggaccaatcggagctccggttgatgaacccgaagcaccctctgtgtctaagcctccagcttcgcttgagaagacgctatcatttgagattcgagcttcccacttcgaccagcccagccctacatcggtttttgatgtacaatttgaggatatcagcgagaaatcccccatttcatcagaaagcgcgattactgctaaacaagagcctctatccaggtctataccaatcggatcgatcgcgaggaccttatcatgggacgacgcttcccaagaggctcctccgcagtgttctaccaaaggagacagcaaccacgagcaggagcagcacgagttcgtcgagaagacgctggcatccgctggcttctgcaacgagaagacccaggacatctttgcccggtggcattcgctcgaccggcccttggaccccgccgtggtcgagcagctgctggaacgcaaggtggaggacgccaagtgccgagagaggcggtcgaaccagaggctcctaatcgactctgtcaacgccgccctgctcgacatcggccagagcaaagtctgggggggcgcgtacccttgcaccgcacggcactattccaacgctccgggagttggcacgtgcgatgatgatgtgctagtgaccgacgaggcgtggaggctggtgaggagctggctcttcgatgacgagaacgacatcgccgggttgggggacaacgcgggccttgcggcggactgggttgtcggtagggagatccacggcaaagggtgggccgagacgctgcggatggaggtggacgagatgagcagggagatatgtggcgaggtcctgggcgagttggttggggaggcgttttcggagcttgccggcgctgcggggtggcattgaagctgcctgccttctattttccctgcttgtggtggcgtccacctgctgctgctgcttttacttccaatccggttcttgtgtgtatattaccctcgtaactgctcaaagtgttccctgctgctgcctctctatctgtgttgcatctctttcagcattgatacattcacggtaataacatttacggatgaatacagctgctgcactgcacttgaaatcctctctctttttcctggccacatgttcctttctctgctatggctatgaggttgcacaa

SEQ ID NO: 311 - DNA, 4325 bp, Zea Mays
gacgattctcgcacggctctaacaaacaggcccggtagtacaccggctccgaaggtccgcaagaccgcaatcatccggatgagcaaccggatgtgcaggggttagctgtgctcctgtctagtgaaagatatgcgactaacagtcctattgagtacagcgatgttgctgcttatcgtctatcactaggagaagatacaaaagcaatcaaccagctgaatacactgatcaaagaaggaaaagaaatgacatctttgctgtacacataccgtagctgtgtaaaagctctacctcagctgcctgattcaatgaagcataatcaagcagacttgtatcttgaaacctatcaagttcttgacatggaaatgagccatttacgtgaaattcagagatggcaagcttctgctgcttctaagttagcggctgacatgcagagattctctaggccagagagactggttaatggacccacaatcactcatttttggtctatgcttaagttgcttgacgtcctactgcagcttgatcatctcaagaatgcaaaagcaagcataccaaatgatttttcatggtacaagagaacgttcactcaagtaagcacccagtggcaggatactgacaccatgagagaagagctggatgatcttcagatttttctgagcaccagatgggccatcttgttaaatttgcatgctgagatgtttcggacaaataccgttgaggatattctacaggttcttatagtattttgtgtggagtcattggaattggactttgctcttctttttcctgagcgccataccctacttcgtgtcctcccagttttggttgtcctagcaacctcatcagagaaggagagtgagtcactttataaaagggtgaagataaatcgtcttctcaatgtttttaagaatgatccagtgatcccggcatttccagatctgcatctttctcctgctgcaattttgaaggaattgtcatcatattttcaaaatttttccagtcaaactcgtctccttgctcttcaagcgcctcatgaaattcagggtcgtgagctacaagattatcagaggcattacttgattttgaatcacatgggaactatcagagctgatcatgacgacttctctatacgttttgcctctgctatggatcagatgataaggttgaagtcatcagatggtgtgtataatgactggtcccgcgatatcaaagggaacatgtatgatattgttgttgaaggcttccagcttcttagtcgttggactggcaggatttgggaacaatgtgcatggaaattctctcgccctatttcagattctcaacaaaactccatgacatgttttgactatgaaaaggtagtacgctataactatactgctgaagaacgaagggctctgcttgaattaattggttacataaagagtattggattgatgatgcagcattgtgatactttagtgtctgaagctttgtgggaaacgatacacatggaggtccaagattttgtacaggataaacttgatactatgcttcgtacaacatttagaaagaagaaggacctttcccggattctctctgatatgcggaccctctcagcagattggatggccagcactagtaaagcagacccagagcagcactcgctacaccaagaaactgaggaaatgagacaaaacacattttacccaagaccagttgcaccaacagctgcacagattcattgtttgcaatttcttatatgtgaacttgtatctggtggtaatctgagaaaagttggaggactatttgggaatagtggctctggcatacctgtggaagatcttaaacaactagagacatttttctacaagcttagttttttcttgcatattttggattatacagcgactattggtactctaactgatcttggatttctttggttcagagaattttaccttgaatcttctcgtgtcattcagtttccaattgaatgctcgctcccgtggatgctggtgggccatgtcattgaatcagaagatgctggtcttctcgaaagcattttgattccatttgacctgtacaatgactctgctcaacatgcactaacttctctcaagcagagatttctttatgatgaaattgaagctgaggctgatctttgcttcgatcttcttgctcagaagcttaatgagatcatctttacatattataagagctgtgcagcaagtactcttcttgatagttcatttacatatgcatgcgatgatggtgacaagtattttgtcaaacctttgcgattcgacgcgattttcaagttaaggagagtaatggttttagggaggacaattgatctaagaagcataattactcagagaatgaacaaaatattcagggaaaatattgactttctacttgagcgctttgaaaatggagatctttgtggtgttgtggaactgcaacaactgctggatattttggagcttacacaccaatcaatatcaagatttcttgaattggattcttactctcttatgcttagcgagatgcaagaaaatctttcgttggtttcttattcaagtcgcatctcttctcagatatggagtgagatgcagacagatttcttgccgaatttcatcttatgtaataccacacagcggtttgtccggtccgcaaaaggaactcaccactcttcgcatagatcaagcgcttctactgggaaaccttacttctattgtggatcacatgatttgaccatggcataccagggtcttgctgggctgtaccgtgacttttttggagtccctcatatgtttgcagttgttaaacttcttggttccagatcattacctgcaatcatccgtgctttactggatcatatatcaagtaagattacaggtttgctaccgaaaataaatgcactgcaagaagcattaccaaaatctattgggcttctttcatttgatggtggtatagcaggttgccaaaagatagttcatgaaattttgacatgggaagcaaaatctgaagttaaaactgaagttcttcatgaccttaaggaaattggaagtgctttgtattggatgagcattctggacattgtgttgagacaaatcgacactacacagttcatgcagtcagctccgtggctaggattggttccaggaaatgatgggcaagtgaagcatgcctactctgataatactccatttaccacacttttaagtgctgcctctaatgctgtgacatcaagccctacatgcccaaatccatctacgtttcttgtcatgtcaaagcaagctgaagctgcgagtctgctgtacaaatcaaacctcaactctggtagtgtgctggagtatgctcttgcattcacaagtgctgccctggatagacactatagcaaatggagcgcaactccaaaaacaggctttatcgacattactacttcaaaggatttctatcgcatttttagcggtcttcagtatagttacttagaagatagcattaacaatccttcgaagaaacaagaaatgctgggtgattctgtagcctgggctggctgtacgataatgtacttactgggacagcagcagcacttcgagctttttgatttctcctatcaatttctcaatgtggcagaagtagaaagtgcgacagtatcacactatcaatcttcagagaggactaaaagttcaaatttcttgcaaggctacgagggcatcctggaagcgatgaggaaggctaggaggctcaataaccatgttttctccatgttgagggcacgatgtccccttgaggacaaggttgcatgtgctatcaagccaagtggggcaccgcttcaccggatgaagtttatgaacaccgtttctgcattcgagacattgccacaaagagtcacctaaccagcttccaggcaatgtgcagaatgtactcttgtatgcggggttatatgttatgttgtaaggtaaatgtatattatgtagtcacaagtcacaaccatcaaccgtggatcctggacctgaacaggagaatgtgtttgcttgctatatatgaaaattaggtgggtatgttgaagttgaccctgagttcgcaagtttagctttcaactttgagactatctcgctgaaccaaatatgtaaaccagctggagagttgagccagaggacacgtgctagttagctgttcttctcgtgtctgtatttctcagactgctctcaaagtatatttaatgtatgacgattcagattagcttaaaaagttgtgttatccgagaactcatttcggcgtgcatgtaaccactcccctatcttgctcagtatctcgtcgcatcatgcttttaataaatc

SEQ ID NO: 312 - DNA, 4565 bp, Zea Mays
atttcacttcgagtacacttcacgtctcgtcttcttcgccccactgggtgtctggcccaccgttgccacaggtcacccggggcagtacgagttccttgtctctccttgacggcctccttgctcagcacgatctcggctccgtctctctctagtctctaccaacggtagcaccatctcgctcccactcccaaccactccgccaccaccgctctcctgcgcctgcgtccgcgcctcctccctgcggccccggccgcaccggcgacatggccatccccgttgaggaggccatcgccgccctctccaccttctcgctcgaggatgagcaaccggatgtgcaggggttagctgtgctcctgtctagtgaaagatatgcgactaacagtcctattgagtacagcgatgttgctgcttatcgtctatcactaggagaagatacaaaagcaatcaaccagctgaatacactgatcaaagaaggaaaagaaatgacatctttgctgtacacataccgtagctgtgtaaaagctctacctcagctgcctgattcaatgaagcataatcaagcagacttgtatcttgaaacctatcaagttcttgacatggaaatgagccatttacgtgaaattcagagatggcaagcttctgctgcttctaagttagcggctgacatgcagagattctctaggccagagagactggttaatggacccacaatcactcatttttggtctatgcttaagttgcttgacgtcctactgcagcttgatcatctcaagaatgcaaaagcaagcataccaaatgatttttcatggtacaagagaacgttcactcaagtaagcacccagtggcaggatactgacaccatgagagaagagctggatgatcttcagatttttctgagcaccagatgggccatcttgttaaatttgcatgctgagatgtttcggacaaataccgttgaggatattctacaggttcttatagtattttgtgtggagtcattggaattggactttgctcttctttttcctgagcgccataccctacttcgtgtcctcccagttttggttgtcctagcaacctcatcagagaaggagagtgagtcactttataaaagggtgaagataaatcgtcttctcaatgtttttaagaatgatccagtgatcccggcatttccagatctgcatctttctcctgctgcaattttgaaggaattgtcatcatattttcaaaatttttccagtcaaactcgtctccttgctcttcaagcgcctcatgaaattcagggtcgtgagctacaagattatcagaggcattacttgattttgaatcacatgggaactatcagagctgatcatgacgacttctctatacgttttgcctctgctatggatcagatgataaggttgaagtcatcagatggtgtgtataatgactggtcccgcgatatcaaagggaacatgtatgatattgttgttgaaggcttccagcttcttagtcgttggactggcaggatttgggaacaatgtgcatggaaattctctcgccctatttcagattctcaacaaaactccatgacatgttttgactatgaaaaggtagtacgctataactatactgctgaagaacgaagggctctgcttgaattaattggttacataaagagtattggattgatgatgcagcattgtgatactttagtgtctgaagctttgtgggaaacgatacacatggaggtccaagattttgtacaggataaacttgatactatgcttcgtacaacatttagaaagaagaaggacctttcccggattctctctgatatgcggaccctctcagcagattggatggccagcactagtaaagcagacccagagcagcactcgctacaccaagaaactgaggaaatgagacaaaacacattttacccaagaccagttgcaccaacagctgcacagattcattgtttgcaatttcttatatgtgaacttgtatctggtggtaatctgagaaaagttggaggactatttgggaatagtggctctggcatacctgtggaagatcttaaacaactagagacatttttctacaagcttagttttttcttgcatattttggattatacagcgactattggtactctaactgatcttggatttctttggttcagagaattttaccttgaatcttctcgtgtcattcagtttccaattgaatgctcgctcccgtggatgctggtgggccatgtcattgaatcagaagatgctggtcttctcgaaagcattttgattccatttgacctgtacaatgactctgctcaacatgcactaacttctctcaagcagagatttctttatgatgaaattgaagctgaggctgatctttgcttcgatcttcttgctcagaagcttaatgagatcatctttacatattataagagctgtgcagcaagtactcttcttgatagttcatttacatatgcatgcgatgatggtgacaagtattttgtcaaacctttgcgattcgacgcgattttcaagttaaggagagtaatggttttagggaggacaattgatctaagaagcataattactcagagaatgaacaaaatattcagggaaaatattgactttctacttgagcgctttgaaaatggagatctttgtggtgttgtggaactgcaacaactgctggatattttggagcttacacaccaatcaatatcaagatttcttgaattggattcttactctcttatgcttagcgagatgcaagaaaatctttcgttggtttcttattcaagtcgcatctcttctcagatatggagtgagatgcagacagatttcttgccgaatttcatcttatgtaataccacacagcggtttgtccggtccgcaaaaggaactcaccactcttcgcatagatcaagcgcttctactgggaaaccttacttctattgtggatcacatgatttgaccatggcataccagggtcttgctgggctgtaccgtgacttttttggagtccctcatatgtttgcagttgttaaacttcttggttccagatcattacctgcaatcatccgtgctttactggatcatatatcaagtaagattacaggtttgctaccgaaaataaatgcactgcaagaagcattaccaaaatctattgggcttctttcatttgatggtggtatagcaggttgccaaaagatagttcatgaaattttgacatgggaagcaaaatctgaagttaaaactgaagttcttcatgaccttaaggaaattggaagtgctttgtattggatgagcattctggacattgtgttgagacaaatcgacactacacagttcatgcagtcagctccgtggctaggattggttccaggaaatgatgggcaagtgaagcatgcctactctgataatactccatttaccacacttttaagtgctgcctctaatgctgtgacatcaagccctacatgcccaaatccatctacgtttcttgtcatgtcaaagcaagctgaagctgcgagtctgctgtacaaatcaaacctcaactctggtagtgtgctggagtatgctcttgcattcacaagtgctgccctggatagacactatagcaaatggagcgcaactccaaaaacaggctttatcgacattactacttcaaaggatttctatcgcatttttagcggtcttcagtatagttacttagaagatagcattaacaatccttcgaagaaacaagaaatgctgggtgattctgtagcctgggctggctgtacgataatgtacttactgggacagcagcagcacttcgagctttttgatttctcctatcaatttctcaatgtggcagaagtagaaagtgcgacagtatcacactatcaatcttcagagaggactaaaagttcaaatttcttgcaaggctacgagggcatcctggaagcgatgaggaaggctaggaggctcaataaccatgttttctccatgttgagggcacgatgtccccttgaggacaaggttgcatgtgctatcaagccaagtggggcaccgcttcaccggatgaagtttatgaacaccgtttctgcattcgagacattgccacaaagagtcacctaaccagcttccaggcaatgtgcagaatgtactcttgtatgcggggttatatgttatgttgtaaggtaaatgtatattatgtagtcacaagtcacaaccatcaaccgtggatcctggacctgaacaggagaatgtgtttgcttgctatatatgaaaattaggtgggtatgttgaagttgaccctgagttcgcaagtttagctttcaactttgagactatctcgctgaaccaaatatgtaaaccagctggagagttgagccagaggacacgtgctagttagctgttcttctcgtgtctgtatttctcagactgctctcaaagtatatttaatgtatgacgattcagattagcttaaaaagttgtgttatccgagaactcatttcggcgtgcatgtaaccactcccctatcttgctcagtatctcgtcgcatcatgcttttaataaatc

SEQ ID NO: 313 - DNA, 4482 bp, Zea Mays
ggggcagtacgagttccttgtctctccttgacggcctccttgctcagcacgatctcggctccgtctctctctagtctctaccaacggtagcaccatctcgctcccactcccaaccactccgccaccaccgctctcctgcgcctgcgtccgcgcctcctccctgcggccccggccgcaccggcgacatggccatccccgttgaggaggccatcgccgccctctccaccttctcgctcgaggatgagcaaccggatgtgcaggggttagctgtgctcctgtctagtgaaagatatgcgactaacagtcctattgagtacagcgatgttgctgcttatcgtctatcactaggagaagatacaaaagcaatcaaccagctgaatacactgatcaaagaaggaaaagaaatgacatctttgctgtacacataccgtagctgtgtaaaagctctacctcagctgcctgattcaatgaagcataatcaagcagacttgtatcttgaaacctatcaagttcttgacatggaaatgagccatttacgtgaaattcagagatggcaagcttctgctgcttctaagttagcggctgacatgcagagattctctaggccagagagactggttaatggacccacaatcactcatttttggtctatgcttaagttgcttgacgtcctactgcagcttgatcatctcaagaatgcaaaagcaagcataccaaatgatttttcatggtacaagagaacgttcactcaagtaagcacccagtggcaggatactgacaccatgagagaagagctggatgatcttcagatttttctgagcaccagatgggccatcttgttaaatttgcatgctgagatgtttcggacaaataccgttgaggatattctacaggttcttatagtattttgtgtggagtcattggaattggactttgctcttctttttcctgagcgccataccctacttcgtgtcctcccagttttggttgtcctagcaacctcatcagagaaggagagtgagtcactttataaaagggtgaagataaatcgtcttctcaatgtttttaagaatgatccagtgatcccggcatttccagatctgcatctttctcctgctgcaattttgaaggaattgtcatcatattttcaaaatttttccagtcaaactcgtctccttgctcttcaagcgcctcatgaaattcagggtcgtgagctacaagattatcagaggcattacttgattttgaatcacatgggaactatcagagctgatcatgacgacttctctatacgttttgcctctgctatggatcagatgataaggttgaagtcatcagatggtgtgtataatgactggtcccgcgatatcaaagggaacatgtatgatattgttgttgaaggcttccagcttcttagtcgttggactggcaggatttgggaacaatgtgcatggaaattctctcgccctatttcagattctcaacaaaactccatgacatgttttgactatgaaaaggtagtacgctataactatactgctgaagaacgaagggctctgcttgaattaattggttacataaagagtattggattgatgatgcagcattgtgatactttagtgtctgaagctttgtgggaaacgatacacatggaggtccaagattttgtacaggataaacttgatactatgcttcgtacaacatttagaaagaagaaggacctttcccggattctctctgatatgcggaccctctcagcagattggatggccagcactagtaaagcagacccagagcagcactcgctacaccaagaaactgaggaaatgagacaaaacacattttacccaagaccagttgcaccaacagctgcacagattcattgtttgcaatttcttatatgtgaacttgtatctggtggtaatctgagaaaagttggaggactatttgggaatagtggctctggcatacctgtggaagatcttaaacaactagagacatttttctacaagcttagttttttcttgcatattttggattatacagcgactattggtactctaactgatcttggatttctttggttcagagaattttaccttgaatcttctcgtgtcattcagtttccaattgaatgctcgctcccgtggatgctggtgggccatgtcattgaatcagaagatgctggtcttctcgaaagcattttgattccatttgacctgtacaatgactctgctcaacatgcactaacttctctcaagcagagatttctttatgatgaaattgaagctgaggctgatctttgcttcgatcttcttgctcagaagcttaatgagatcatctttacatattataagagctgtgcagcaagtactcttcttgatagttcatttacatatgcatgcgatgatggtgacaagtattttgtcaaacctttgcgattcgacgcgattttcaagttaaggagagtaatggttttagggaggacaattgatctaagaagcataattactcagagaatgaacaaaatattcagggaaaatattgactttctacttgagcgctttgaaaatggagatctttgtggtgttgtggaactgcaacaactgctggatattttggagcttacacaccaatcaatatcaagatttcttgaattggattcttactctcttatgcttagcgagatgcaagaaaatctttcgttggtttcttattcaagtcgcatctcttctcagatatggagtgagatgcagacagatttcttgccgaatttcatcttatgtaataccacacagcggtttgtccggtccgcaaaaggaactcaccactcttcgcatagatcaagcgcttctactgggaaaccttacttctattgtggatcacatgatttgaccatggcataccagggtcttgctgggctgtaccgtgacttttttggagtccctcatatgtttgcagttgttaaacttcttggttccagatcattacctgcaatcatccgtgctttactggatcatatatcaaattacaggtttgctaccgaaaataaatgcactgcaagaagcattaccaaaatctattgggcttctttcatttgatggtggtatagcaggttgccaaaagatagttcatgaaattttgacatgggaagcaaaatctgaagttaaaactgaagttcttcatgaccttaaggaaattggaagtgctttgtattggatgagcattctggacattgtgttgagacaaatcgacactacacagttcatgcagtcagctccgtggctaggattggttccaggaaatgatgggcaagtgaagcatgcctactctgataatactccatttaccacacttttaagtgctgcctctaatgctgtgacatcaagccctacatgcccaaatccatctacgtttcttgtcatgtcaaagcaagctgaagctgcgagtctgctgtacaaatcaaacctcaactctggtagtgtgctggagtatgctcttgcattcacaagtgctgccctggatagacactatagcaaatggagcgcaactccaaaaacaggctttatcgacattactacttcaaaggatttctatcgcatttttagcggtcttcagtatagttacttagaagatagcattaacaatccttcgaagaaacaagaaatgctgggtgattctgtagcctgggctggctgtacgataatgtacttactgggacagcagcagcacttcgagctttttgatttctcctatcaatttctcaatgtggcagaagtagaaagtgcgacagtatcacactatcaatcttcagagaggactaaaagttcaaatttcttgcaaggctacgagggcatcctggaagcgatgaggaaggctaggaggctcaataaccatgttttctccatgttgagggcacgatgtccccttgaggacaaggttgcatgtgctatcaagccaagtggggcaccgcttcaccggatgaagtttatgaacaccgtttctgcattcgagacattgccacaaagagtcacctaaccagcttccaggcaatgtgcagaatgtactcttgtatgcggggttatatgttatgttgtaaggtaaatgtatattatgtagtcacaagtcacaaccatcaaccgtggatcctggacctgaacaggagaatgtgtttgcttgctatatatgaaaattaggtgggtatgttgaagttgaccctgagttcgcaagtttagctttcaactttgagactatctcgctgaaccaaatatgtaaaccagctggagagttgagccagaggacacgtgctagttagctgttcttctcgtgtctgtatttctcagactgctctcaaagtatatttaatgtatgacgattcagattagcttaaaaagttgtgttatccgagaactcatttcggcgtgcatgtaaccactcccctatcttgctcagtatctcgtcgcatcatgcttttaataaatc

SEQ ID NO: 314 - DNA, 4480 bp, Zea Mays
ggggcagtacgagttccttgtctctccttgacggcctccttgctcagcacgatctcggctccgtctctctctagtctctaccaacggtagcaccatctcgctcccactcccaaccactccgccaccaccgctctcctgcgcctgcgtccgcgcctcctccctgcggccccggccgcaccggcgacatggccatccccgttgaggaggccatcgccgccctctccaccttctcgctcgaggatgagcaaccggatgtgcaggggttagctgtgctcctgtctagtgaaagatatgcgactaacagtcctattgagtacagcgatgttgctgcttatcgtctatcactaggagaagatacaaaagcaatcaaccagctgaatacactgatcaaagaaggaaaagaaatgacatctttgctgtacacataccgtagctgtgtaaaagctctacctcagctgcctgattcaatgaagcataatcaagcagacttgtatcttgaaacctatcaagttcttgacatggaaatgagccatttacgtgaaattcagagatggcaagcttctgctgcttctaagttagcggctgacatgcagagattctctaggccagagagactggttaatggacccacaatcactcatttttggtctatgcttaagttgcttgacgtcctactgcagcttgatcatctcaagaatgcaaaagcaagcataccaaatgatttttcatggtacaagagaacgttcactcaagtaagcacccagtggcaggatactgacaccatgagagaagagctggatgatcttcagatttttctgagcaccagatgggccatcttgttaaatttgcatgctgagatgtttcggacaaataccgttgaggatattctacaggttcttatagtattttgtgtggagtcattggaattggactttgctcttctttttcctgagcgccataccctacttcgtgtcctcccagttttggttgtcctagcaacctcatcagagaaggagagtgagtcactttataaaagggtgaagataaatcgtcttctcaatgtttttaagaatgatccagtgatcccggcatttccagatctgcatctttctcctgctgcaattttgaaggaattgtcatcatattttcaaaatttttccagtcaaactcgtctccttgctcttcaagcgcctcatgaaattcagggtcgtgagctacaagattatcagaggcattacttgattttgaatcacatgggaactatcagagctgatcatgacgacttctctatacgttttgcctctgctatggatcagatgataaggttgaagtcatcagatggtgtgtataatgactggtcccgcgatatcaaagggaacatgtatgatattgttgttgaaggcttccagcttcttagtcgttggactggcaggatttgggaacaatgtgcatggaaattctctcgccctatttcagattctcaacaaaactccatgacatgttttgactatgaaaaggtagtacgctataactatactgctgaagaacgaagggctctgcttgaattaattggttacataaagagtattggattgatgatgcagcattgtgatactttagtgtctgaagctttgtgggaaacgatacacatggaggtccaagattttgtacaggataaacttgatactatgcttcgtacaacatttagaaagaagaaggacctttcccggattctctctgatatgcggaccctctcagcagattggatggccagcactagtaaagcagacccagagcagcactcgctacaccaagaaactgaggaaatgagacaaaacacattttacccaagaccagttgcaccaacagctgcacagattcattgtttgcaatttcttatatgtgaacttgtatctggtggtaatctgagaaaagttggaggactatttgggaatagtggctctggcatacctgtggaagatcttaaacaactagagacatttttctacaagcttagttttttcttgcatattttggattatacagcgactattggtactctaactgatcttggatttctttggttcagagaattttaccttgaatcttctcgtgtcattcagtttccaattgaatgctcgctcccgtggatgctggtgggccatgtcattgaatcagaagatgctggtcttctcgaaagcattttgattccatttgacctgtacaatgactctgctcaacatgcactaacttctctcaagcagagatttctttatgatgaaattgaagctgaggctgatctttgcttcgatcttcttgctcagaagcttaatgagatcatctttacatattataagagctgtgcagcaagtactcttcttgatagttcatttacatatgcatgcgatgatggtgacaagtattttgtcaaacctttgcgattcgacgcgattttcaagttaaggagagtaatggttttagggaggacaattgatctaagaagcataattactcagagaatgaacaaaatattcagggaaaatattgactttctacttgagcgctttgaaaatggagatctttgtggtgttgtggaactgcaacaactgctggatattttggagcttacacaccaatcaatatcaagatttcttgaattggattcttactctcttatgcttagcgagatgcaagaaaatctttcgttggtttcttattcaagtcgcatctcttctcagatatggagtgagatgcagacagatttcttgccgaatttcatcttatgtaataccacacagcggtttgtccggtccgcaaaaggaactcaccactcttcgcatagatcaagcgcttctactgggaaaccttacttctattgtggatcacatgatttgaccatggcataccagggtcttgctgggctgtaccgtgacttttttggagtccctcatatgtttgcagttgttaaacttcttggttccagatcattacctgcaatcatccgtgctttactggatcatatatcaagtaaggtttgctaccgaaaataaatgcactgcaagaagcattaccaaaatctattgggcttctttcatttgatggtggtatagcaggttgccaaaagatagttcatgaaattttgacatgggaagcaaaatctgaagttaaaactgaagttcttcatgaccttaaggaaattggaagtgctttgtattggatgagcattctggacattgtgttgagacaaatcgacactacacagttcatgcagtcagctccgtggctaggattggttccaggaaatgatgggcaagtgaagcatgcctactctgataatactccatttaccacacttttaagtgctgcctctaatgctgtgacatcaagccctacatgcccaaatccatctacgtttcttgtcatgtcaaagcaagctgaagctgcgagtctgctgtacaaatcaaacctcaactctggtagtgtgctggagtatgctcttgcattcacaagtgctgccctggatagacactatagcaaatggagcgcaactccaaaaacaggctttatcgacattactacttcaaaggatttctatcgcatttttagcggtcttcagtatagttacttagaagatagcattaacaatccttcgaagaaacaagaaatgctgggtgattctgtagcctgggctggctgtacgataatgtacttactgggacagcagcagcacttcgagctttttgatttctcctatcaatttctcaatgtggcagaagtagaaagtgcgacagtatcacactatcaatcttcagagaggactaaaagttcaaatttcttgcaaggctacgagggcatcctggaagcgatgaggaaggctaggaggctcaataaccatgttttctccatgttgagggcacgatgtccccttgaggacaaggttgcatgtgctatcaagccaagtggggcaccgcttcaccggatgaagtttatgaacaccgtttctgcattcgagacattgccacaaagagtcacctaaccagcttccaggcaatgtgcagaatgtactcttgtatgcggggttatatgttatgttgtaaggtaaatgtatattatgtagtcacaagtcacaaccatcaaccgtggatcctggacctgaacaggagaatgtgtttgcttgctatatatgaaaattaggtgggtatgttgaagttgaccctgagttcgcaagtttagctttcaactttgagactatctcgctgaaccaaatatgtaaaccagctggagagttgagccagaggacacgtgctagttagctgttcttctcgtgtctgtatttctcagactgctctcaaagtatatttaatgtatgacgattcagattagcttaaaaagttgtgttatccgagaactcatttcggcgtgcatgtaaccactcccctatcttgctcagtatctcgtcgcatcatgcttttaataaatc

SEQ ID NO: 315 - DNA, 4092 bp, Zea Mays
ggggcagtacgagttccttgtctctccttgacggcctccttgctcagcacgatctcggctccgtctctctctagtctctaccaacggtagcaccatctcgctcccactcccaaccactccgccaccaccgctctcctgcgcctgcgtccgcgcctcctccctgcggccccggccgcaccggcgacatggccatccccgttgaggaggccatcgccgccctctccaccttctcgctcgaggatgagcaaccggatgtgcaggggttagctgtgctcctgtctagtgaaagatatgcgactaacagtcctattgagtacagcgatgttgctgcttatcgtctatcactaggagaagatacaaaagcaatcaaccagctgaatacactgatcaaagaaggaaaagaaatgacatctttgctgtacacataccgtagctgtgtaaaagctctacctcagctgcctgattcaatgaagcataatcaagcagacttgtatcttgaaacctatcaagttcttgacatggaaatgagccatttacgtgaaattcagagatggcaagcttctgctgcttctaagttagcggctgacatgcagagattctctaggccagagagactggttaatggacccacaatcactcatttttggtctatgcttaagttgcttgacgtcctactgcagcttgatcatctcaagaatgcaaaagcaagcataccaaatgatttttcatggtacaagagaacgttcactcaagtaagcacccagtggcaggatactgacaccatgagagaagagctggatgatcttcagatttttctgagcaccagatgggccatcttgttaaatttgcatgctgagatgtttcggacaaataccgttgaggatattctacaggttcttatagtattttgtgtggagtcattggaattggactttgctcttctttttcctgagcgccataccctacttcgtgtcctcccagttttggttgtcctagcaacctcatcagagaaggagagtgagtcactttataaaagggtgaagataaatcgtcttctcaatgtttttaagaatgatccagtgatcccggcatttccagatctgcatctttctcctgctgcaattttgaaggaattgtcatcatattttcaaaatttttccagtcaaactcgtctccttgctcttcaagcgcctcatgaaattcagggtcgtgagctacaagattatcagaggcattacttgattttgaatcacatgggaactatcagagctgatcatgacgacttctctatacgttttgcctctgctatggatcagatgataaggttgaagtcatcagatggtgtgtataatgactggtcccgcgatatcaaagggaacatgtatgatattgttgttgaaggcttccagcttcttagtcgttggactggcaggatttgggaacaatgtgcatggaaattctctcgccctatttcagattctcaacaaaactccatgacatgttttgactatgaaaaggtagtacgctataactatactgctgaagaacgaagggctctgcttgaattaattggttacataaagagtattggattgatgatgcagcattgtgatactttagtgtctgaagctttgtgggaaacgatacacatggaggtccaagattttgtacaggataaacttgatactatgcttcgtacaacatttagaaagaagaaggacctttcccggattctctctgatatgcggaccctctcagcagattggatggccagcactagtaaagcagacccagagcagcactcgctacaccaagaaactgaggaaatgagacaaaacacattttacccaagaccagttgcaccaacagctgcacagattcattgtttgcaatttcttatatgtgaacttgtatctggtggtaatctgagaaaagttggaggactatttgggaatagtggctctggcatacctgtggaagatcttaaacaactagagacatttttctacaagcttagttttttcttgcatattttggattatacagcgactattggtactctaactgatcttggatttctttggttcagagaattttaccttgaatcttctcgtgtcattcagtttccaattgaatgctcgctcccgtggatgctggtgggccatgtcattgaatcagaagatgctggtcttctcgaaagcattttgattccatttgacctgtacaatgactctgctcaacatgcactaacttctctcaagcagagatttctttatgatgaaattgaagctgaggctgatctttgcttcgatcttcttgctcagaagcttaatgagatcatctttacatattataagagctgtgcagcaagtactcttcttgatagttcatttacatatgcatgcgatgatggtgacaagtattttgtcaaacctttgcgattcgacgcgattttcaagttaaggagagtaatggttttagggaggacaattgatctaagaagcataattactcagagaatgaacaaaatattcagggaaaatattgactttctacttgagcgctttgaaaatggagatctttgtggtgttgtggaactgcaacaactgctggatattttggagcttacacaccaatcaatatcaagatttcttgaattggattcttactctcttatgcttagcgagatgcaagaaaatctttcgttggtttcttattcaagtcgcatctcttctcagatatggagtgagatgcagacagatttcttgccgaatttcatcttatgtaataccacacagcggtttgtccggtccgcaaaaggaactcaccactcttcgcatagatcaagcgcttctactgggaaaccttacttctattgtggatcacatgatttgaccatggcataccagggtcttgctgggctgtaccgtgacttttttggagtccctcatatgtttgcagttgttaaacttcttggttccagatcattacctgcaatcatccgtgctttactggatcatatatcaagtaagattacaggtttgctaccgaaaataaatgcactgcaagaagcattaccaaaatctattgggcttctttcatttgatggtggtatagcaggttgccaaaagatagttcatgaaattttgacatgggaagcaaaatctgaagttaaaactgaagttcttcatgaccttaaggaaattggaagtgctttgtattggatgagcattctggacattgtgttgagacaaatcgacactacacagttcatgcagtcagctccgtggctaggattggttccaggaaatgatgggcaagtgaagcatgcctactctgataatactccatttaccacacttttaagtgctgcctctaatgctgtgacatcaagccctacatgcccaaatccatctacgtttcttgtcatgtcaaagcaagctgaagctgcgaggctacgagggcatcctggaagcgatgaggaaggctaggaggctcaataaccatgttttctccatgttgagggcacgatgtccccttgaggacaaggttgcatgtgctatcaagccaagtggggcaccgcttcaccggatgaagtttatgaacaccgtttctgcattcgagacattgccacaaagagtcacctaaccagcttccaggcaatgtgcagaatgtactcttgtatgcggggttatatgttatgttgtaaggtaaatgtatattatgtagtcacaagtcacaaccatcaaccgtggatcctggacctgaacaggagaatgtgtttgcttgctatatatgaaaattaggtgggtatgttgaagttgaccctgagttcgcaagtttagctttcaactttgagactatctcgctgaaccaaatatgtaaaccagctggagagttgagccagaggacacgtgctagttagctgttcttctcgtgtctgtatttctcagactgctctcaaagtatatttaatgtatgacgattcagattagcttaaaaagttgtgttatccgagaactcatttcggcgtgcatgtaaccactcccctatcttgctcagtatctcgtcgcatcatgcttttaataaatc

SEQ ID NO: 316 - DNA, 4414 bp, Zea Mays
ggggcagtacgagttccttgtctctccttgacggcctccttgctcagcacgatctcggctccgtctctctctagtctctaccaacggtagcaccatctcgctcccactcccaaccactccgccaccaccgctctcctgcgcctgcgtccgcgcctcctccctgcggccccggccgcaccggcgacatggccatccccgttgaggaggccatcgccgccctctccaccttctcgctcgaggatgagcaaccggatgtgcaggggttagctgtgctcctgtctagtgaaagatatgcgactaacagtcctattgagtacagcgatgttgctgcttatcgtctatcactaggagaagatacaaaagcaatcaaccagctgaatacactgatcaaagaaggaaaagaaatgacatctttgctgtacacataccgtagctgtgtaaaagctctacctcagctgcctgattcaatgaagcataatcaagcagacttgtatcttgaaacctatcaagttcttgacatggaaatgagccatttacgtgaaattcagagatggcaagcttctgctgcttctaagttagcggctgacatgcagagattctctaggccagagagactggttaatggacccacaatcactcatttttggtctatgcttaagttgcttgacgtcctactgcagcttgatcatctcaagaatgcaaaagcaagcataccaaatgatttttcatggtacaagagaacgttcactcaagtaagcacccagtggcaggatactgacaccatgagagaagagctggatgatcttcagatttttctgagcaccagatgggccatcttgttaaatttgcatgctgagatgtttcggacaaataccgttgaggatattctacaggttcttatagtattttgtgtggagtcattggaattggactttgctcttctttttcctgagcgccataccctacttcgtgtcctcccagttttggttgtcctagcaacctcatcagagaaggagagtgagtcactttataaaagggtgaagataaatcgtcttctcaatgtttttaagaatgatccagtgatcccggcatttccagatctgcatctttctcctgctgcaattttgaaggaattgtcatcatattttcaaaatttttccagtcaaactcgtctccttgctcttcaagcgcctcatgaaattcagggtcgtgagctacaagattatcagaggcattacttgattttgaatcacatgggaactatcagagctgatcatgacgacttctctatacgttttgcctctgctatggatcagatgataaggttgaagtcatcagatggtgtgtataatgactggtcccgcgatatcaaagggaacatgtatgatattgttgttgaaggcttccagcttcttagtcgttggactggcaggatttgggaacaatgtgcatggaaattctctcgccctatttcagattctcaacaaaactccatgacatgttttgactatgaaaaggtagtacgctataactatactgctgaagaacgaagggctctgcttgaattaattggttacataaagagtattggattgatgatgcagcattgtgatactttagtgtctgaagctttgtgggaaacgatacacatggaggtccaagattttgtacaggataaacttgatactatgcttcgtacaacatttagaaagaagaaggacctttcccggattctctctgatatgcggaccctctcagcagattggatggccagcactagtaaagcagacccagagcagcactcgctacaccaagaaactgaggaaatgagacaaaacacattttacccaagaccagttgcaccaacagctgcacagattcattgtttgcaatttcttatatgtgaacttgtatctggtggtaatctgagaaaagttggaggactatttgggaatagtggctctggcatacctgtggaagatcttaaacaactagagacatttttctacaagcttagttttttcttgcatattttggattatacagcgactattggtactctaactgatcttggatttctttggttcagagaattttaccttgaatcttctcgtgtcattcagtttccaattgaatgctcgctcccgtggatgctggtgggccatgtcattgaatcagaagatgctggtcttctcgaaagcattttgattccatttgacctgtacaatgactctgctcaacatgcactaacttctctcaagcagagatttctttatgatgaaattgaagctgaggctgatctttgcttcgatcttcttgctcagaagcttaatgagatcatctttacatattataagagctgtgcagcaagtactcttcttgatagttcatttacatatgcatgcgatgatggtgacaagtattttgtcaaacctttgcgattcgacgcgattttcaagttaaggagagtaatggttttagggaggacaattgatctaagaagcataattactcagagaatgaacaaaatattcagggaaaatattgactttctacttgagcgctttgaaaatggagatctttgtggtgttgtggaactgcaacaactgctggatattttggagcttacacaccaatcaatatcaagatttcttgaattggattcttactctcttatgcttagcgagatgcaagaaaatctttcgttggtttcttattcaagtcgcatctcttctcagatatggagtgagatgcagacagatttcttgccgaatttcatcttatgtaataccacacagcggtttgtccggtccgcaaaaggaactcaccactcttcgcatagatcaagcgcttctactgggaaaccttacttctattgtggatcacatttgttaaacttcttggttccagatcattacctgcaatcatccgtgctttactggatcatatatcaagtaagattacaggtttgctaccgaaaataaatgcactgcaagaagcattaccaaaatctattgggcttctttcatttgatggtggtatagcaggttgccaaaagatagttcatgaaattttgacatgggaagcaaaatctgaagttaaaactgaagttcttcatgaccttaaggaaattggaagtgctttgtattggatgagcattctggacattgtgttgagacaaatcgacactacacagttcatgcagtcagctccgtggctaggattggttccaggaaatgatgggcaagtgaagcatgcctactctgataatactccatttaccacacttttaagtgctgcctctaatgctgtgacatcaagccctacatgcccaaatccatctacgtttcttgtcatgtcaaagcaagctgaagctgcgagtctgctgtacaaatcaaacctcaactctggtagtgtgctggagtatgctcttgcattcacaagtgctgccctggatagacactatagcaaatggagcgcaactccaaaaacaggctttatcgacattactacttcaaaggatttctatcgcatttttagcggtcttcagtatagttacttagaagatagcattaacaatccttcgaagaaacaagaaatgctgggtgattctgtagcctgggctggctgtacgataatgtacttactgggacagcagcagcacttcgagctttttgatttctcctatcaatttctcaatgtggcagaagtagaaagtgcgacagtatcacactatcaatcttcagagaggactaaaagttcaaatttcttgcaaggctacgagggcatcctggaagcgatgaggaaggctaggaggctcaataaccatgttttctccatgttgagggcacgatgtccccttgaggacaaggttgcatgtgctatcaagccaagtggggcaccgcttcaccggatgaagtttatgaacaccgtttctgcattcgagacattgccacaaagagtcacctaaccagcttccaggcaatgtgcagaatgtactcttgtatgcggggttatatgttatgttgtaaggtaaatgtatattatgtagtcacaagtcacaaccatcaaccgtggatcctggacctgaacaggagaatgtgtttgcttgctatatatgaaaattaggtgggtatgttgaagttgaccctgagttcgcaagtttagctttcaactttgagactatctcgctgaaccaaatatgtaaaccagctggagagttgagccagaggacacgtgctagttagctgttcttctcgtgtctgtatttctcagactgctctcaaagtatatttaatgtatgacgattcagattagcttaaaaagttgtgttatccgagaactcatttcggcgtgcatgtaaccactcccctatcttgctcagtatctcgtcgcatcatgcttttaataaatc

SEQ ID NO: 317 - DNA, 4457 bp, Zea Mays
ggggcagtacgagttccttgtctctccttgacggcctccttgctcagcacgatctcggctccgtctctctctagtctctaccaacggtagcaccatctcgctcccactcccaaccactccgccaccaccgctctcctgcgcctgcgtccgcgcctcctccctgcggccccggccgcaccggcgacatggccatccccgttgaggaggccatcgccgccctctccaccttctcgctcgaggatgagcaaccggatgtgcaggggttagctgtgctcctgtctagtgaaagatatgcgactaacagtcctattgagtacagcgatgttgctgcttatcgtctatcactaggagaagatacaaaagcaatcaaccagctgaatacactgatcaaagaaggaaaagaaatgacatctttgctgtacacataccgtagctgtgtaaaagctctacctcagctgcctgattcaatgaagcataatcaagcagacttgtatcttgaaacctatcaagttcttgacatggaaatgagccatttacgtgaaattcagagatggcaagcttctgctgcttctaagttagcggctgacatgcagagattctctaggccagagagactggttaatggacccacaatcactcatttttggtctatgcttaagttgcttgacgtcctactgcagcttgatcatctcaagaatgcaaaagcaagcataccaaatgatttttcatggtacaagagaacgttcactcaagtaagcacccagtggcaggatactgacaccatgagagaagagctggatgatcttcagatttttctgagcaccagatgggccatcttgttaaatttgcatgctgagatgtttcggacaaataccgttgaggatattctacaggttcttatagtattttgtgtggagtcattggaattggactttgctcttctttttcctgagcgccataccctacttcgtgtcctcccagttttggttgtcctagcaacctcatcagagaaggagagtgagtcactttataaaagggtgaagataaatcgtcttctcaatgtttttaagaatgatccagtgatcccggcatttccagatctgcatctttctcctgctgcaattttgaaggaattgtcatcatattttcaaaatttttccagtcaaactcgtctccttgctcttcaagcgcctcatgaaattcagggtcgtgagctacaagattatcagaggcattacttgattttgaatcacatgggaactatcagagctgatcatgacgacttctctatacgttttgcctctgctatggatcagatgataaggttgaagtcatcagatggtgtgtataatgactggtcccgcgatatcaaagggaacatgtatgatattgttgttgaaggcttccagcttcttagtcgttggactggcaggatttgggaacaatgtgcatggaaattctctcgccctatttcagattctcaacaaaactccatgacatgttttgactatgaaaaggtagtacgctataactatactgctgaagaacgaagggctctgcttgaattaattggttacataaagagtattggattgatgatgcagcattgtgatactttagtgtctgaagctttgtgggaaacgatacacatggaggtccaagattttgtacaggataaacttgatactatgcttcgtacaacatttagaaagaagaaggacctttcccggattctctctgatatgcggaccctctcagcagattggatggccagcactagtaaagcagacccagagcagcactcgctacaccaagaaactgaggaaatgagacaaaacacattttacccaagaccagttgcaccaacagctgcacagattcattgtttgcaatttcttatatgtgaacttgtatctggtggtaatctgagaaaagttggaggactatttgggaatagtggctctggcatacctgtggaagatcttaaacaactagagacatttttctacaagcttagttttttcttgcatattttggattatacagcgactattggtactctaactgatcttggatttctttggttcagagaattttaccttgaatcttctcgtgtcattcagtttccaattgaatgctcgctcccgtggatgctggtgggccatgtcattgaatcagaagatgctggtcttctcgaaagcattttgattccatttgacctgtacaatgactctgctcaacatgcactaacttctctcaagcagagatttctttatgatgaaattgaagctgagaagcttaatgagatcatctttacatattataagagctgtgcagcaagtactcttcttgatagttcatttacatatgcatgcgatgatggtgacaagtattttgtcaaacctttgcgattcgacgcgattttcaagttaaggagagtaatggttttagggaggacaattgatctaagaagcataattactcagagaatgaacaaaatattcagggaaaatattgactttctacttgagcgctttgaaaatggagatctttgtggtgttgtggaactgcaacaactgctggatattttggagcttacacaccaatcaatatcaagatttcttgaattggattcttactctcttatgcttagcgagatgcaagaaaatctttcgttggtttcttattcaagtcgcatctcttctcagatatggagtgagatgcagacagatttcttgccgaatttcatcttatgtaataccacacagcggtttgtccggtccgcaaaaggaactcaccactcttcgcatagatcaagcgcttctactgggaaaccttacttctattgtggatcacatgatttgaccatggcataccagggtcttgctgggctgtaccgtgacttttttggagtccctcatatgtttgcagttgttaaacttcttggttccagatcattacctgcaatcatccgtgctttactggatcatatatcaagtaagattacaggtttgctaccgaaaataaatgcactgcaagaagcattaccaaaatctattgggcttctttcatttgatggtggtatagcaggttgccaaaagatagttcatgaaattttgacatgggaagcaaaatctgaagttaaaactgaagttcttcatgaccttaaggaaattggaagtgctttgtattggatgagcattctggacattgtgttgagacaaatcgacactacacagttcatgcagtcagctccgtggctaggattggttccaggaaatgatgggcaagtgaagcatgcctactctgataatactccatttaccacacttttaagtgctgcctctaatgctgtgacatcaagccctacatgcccaaatccatctacgtttcttgtcatgtcaaagcaagctgaagctgcgagtctgctgtacaaatcaaacctcaactctggtagtgtgctggagtatgctcttgcattcacaagtgctgccctggatagacactatagcaaatggagcgcaactccaaaaacaggctttatcgacattactacttcaaaggatttctatcgcatttttagcggtcttcagtatagttacttagaagatagcattaacaatccttcgaagaaacaagaaatgctgggtgattctgtagcctgggctggctgtacgataatgtacttactgggacagcagcagcacttcgagctttttgatttctcctatcaatttctcaatgtggcagaagtagaaagtgcgacagtatcacactatcaatcttcagagaggactaaaagttcaaatttcttgcaaggctacgagggcatcctggaagcgatgaggaaggctaggaggctcaataaccatgttttctccatgttgagggcacgatgtccccttgaggacaaggttgcatgtgctatcaagccaagtggggcaccgcttcaccggatgaagtttatgaacaccgtttctgcattcgagacattgccacaaagagtcacctaaccagcttccaggcaatgtgcagaatgtactcttgtatgcggggttatatgttatgttgtaaggtaaatgtatattatgtagtcacaagtcacaaccatcaaccgtggatcctggacctgaacaggagaatgtgtttgcttgctatatatgaaaattaggtgggtatgttgaagttgaccctgagttcgcaagtttagctttcaactttgagactatctcgctgaaccaaatatgtaaaccagctggagagttgagccagaggacacgtgctagttagctgttcttctcgtgtctgtatttctcagactgctctcaaagtatatttaatgtatgacgattcagattagcttaaaaagttgtgttatccgagaactcatttcggcgtgcatgtaaccactcccctatcttgctcagtatctcgtcgcatcatgcttttaataaatc

SEQ ID NO: 318 - DNA, 4400 bp, Zea Mays
ggggcagtacgagttccttgtctctccttgacggcctccttgctcagcacgatctcggctccgtctctctctagtctctaccaacggtagcaccatctcgctcccactcccaaccactccgccaccaccgctctcctgcgcctgcgtccgcgcctcctccctgcggccccggccgcaccggcgacatggccatccccgttgaggaggccatcgccgccctctccaccttctcgctcgaggatgagcaaccggatgtgcaggggttagctgtgctcctgtctagtgaaagatatgcgactaacagtcctattgagtacagcgatgttgctgcttatcgtctatcactaggagaagatacaaaagcaatcaaccagctgaatacactgatcaaagaaggaaaagaaatgacatctttgctgtacacataccgtagctgtgtaaaagctctacctcagctgcctgattcaatgaagcataatcaagcagacttgtatcttgaaacctatcaagttcttgacatggaaatgagccatttacgtgaaattcagagatggcaagcttctgctgcttctaagttagcggctgacatgcagagattctctaggccagagagactggttaatggacccacaatcactcatttttggtctatgcttaagttgcttgacgtcctactgcagcttgatcatctcaagaatgcaaaagcaagcataccaaatgatttttcatggtacaagagaacgttcactcaagtaagcacccagtggcaggatactgacaccatgagagaagagctggatgatcttcagatttttctgagcaccagatgggccatcttgttaaatttgcatgctgagatgtttcggacaaataccgttgaggatattctacaggttcttatagtattttgtgtggagtcattggaattggactttgctcttctttttcctgagcgccataccctacttcgtgtcctcccagttttggttgtcctagcaacctcatcagagaaggagagtgagtcactttataaaagggtgaagataaatcgtcttctcaatgtttttaagaatgatccagtgatcccggcatttccagatctgcatctttctcctgctgcaattttgaaggaattgtcatcatattttcaaaatttttccagtcaaactcgtctccttgctcttcaagcgcctcatgaaattcagggtcgtgagctacaagattatcagaggcattacttgattttgaatcacatgggaactatcagagctgatcatgacgacttctctatacgttttgcctctgctatggatcagatgataaggttgaagtcatcagatggtgtgtataatgactggtcccgcgatatcaaagggaacatgtatgatattgttgttgaaggcttccagcttcttagtcgttggactggcaggatttgggaacaatgtgcatggaaattctctcgccctatttcagattctcaacaaaactccatgacatgttttgactatgaaaagcattgtgatactttagtgtctgaagctttgtgggaaacgatacacatggaggtccaagattttgtacaggataaacttgatactatgcttcgtacaacatttagaaagaagaaggacctttcccggattctctctgatatgcggaccctctcagcagattggatggccagcactagtaaagcagacccagagcagcactcgctacaccaagaaactgaggaaatgagacaaaacacattttacccaagaccagttgcaccaacagctgcacagattcattgtttgcaatttcttatatgtgaacttgtatctggtggtaatctgagaaaagttggaggactatttgggaatagtggctctggcatacctgtggaagatcttaaacaactagagacatttttctacaagcttagttttttcttgcatattttggattatacagcgactattggtactctaactgatcttggatttctttggttcagagaattttaccttgaatcttctcgtgtcattcagtttccaattgaatgctcgctcccgtggatgctggtgggccatgtcattgaatcagaagatgctggtcttctcgaaagcattttgattccatttgacctgtacaatgactctgctcaacatgcactaacttctctcaagcagagatttctttatgatgaaattgaagctgaggctgatctttgcttcgatcttcttgctcagaagcttaatgagatcatctttacatattataagagctgtgcagcaagtactcttcttgatagttcatttacatatgcatgcgatgatggtgacaagtattttgtcaaacctttgcgattcgacgcgattttcaagttaaggagagtaatggttttagggaggacaattgatctaagaagcataattactcagagaatgaacaaaatattcagggaaaatattgactttctacttgagcgctttgaaaatggagatctttgtggtgttgtggaactgcaacaactgctggatattttggagcttacacaccaatcaatatcaagatttcttgaattggattcttactctcttatgcttagcgagatgcaagaaaatctttcgttggtttcttattcaagtcgcatctcttctcagatatggagtgagatgcagacagatttcttgccgaatttcatcttatgtaataccacacagcggtttgtccggtccgcaaaaggaactcaccactcttcgcatagatcaagcgcttctactgggaaaccttacttctattgtggatcacatgatttgaccatggcataccagggtcttgctgggctgtaccgtgacttttttggagtccctcatatgtttgcagttgttaaacttcttggttccagatcattacctgcaatcatccgtgctttactggatcatatatcaagtaagattacaggtttgctaccgaaaataaatgcactgcaagaagcattaccaaaatctattgggcttctttcatttgatggtggtatagcaggttgccaaaagatagttcatgaaattttgacatgggaagcaaaatctgaagttaaaactgaagttcttcatgaccttaaggaaattggaagtgctttgtattggatgagcattctggacattgtgttgagacaaatcgacactacacagttcatgcagtcagctccgtggctaggattggttccaggaaatgatgggcaagtgaagcatgcctactctgataatactccatttaccacacttttaagtgctgcctctaatgctgtgacatcaagccctacatgcccaaatccatctacgtttcttgtcatgtcaaagcaagctgaagctgcgagtctgctgtacaaatcaaacctcaactctggtagtgtgctggagtatgctcttgcattcacaagtgctgccctggatagacactatagcaaatggagcgcaactccaaaaacaggctttatcgacattactacttcaaaggatttctatcgcatttttagcggtcttcagtatagttacttagaagatagcattaacaatccttcgaagaaacaagaaatgctgggtgattctgtagcctgggctggctgtacgataatgtacttactgggacagcagcagcacttcgagctttttgatttctcctatcaatttctcaatgtggcagaagtagaaagtgcgacagtatcacactatcaatcttcagagaggactaaaagttcaaatttcttgcaaggctacgagggcatcctggaagcgatgaggaaggctaggaggctcaataaccatgttttctccatgttgagggcacgatgtccccttgaggacaaggttgcatgtgctatcaagccaagtggggcaccgcttcaccggatgaagtttatgaacaccgtttctgcattcgagacattgccacaaagagtcacctaaccagcttccaggcaatgtgcagaatgtactcttgtatgcggggttatatgttatgttgtaaggtaaatgtatattatgtagtcacaagtcacaaccatcaaccgtggatcctggacctgaacaggagaatgtgtttgcttgctatatatgaaaattaggtgggtatgttgaagttgaccctgagttcgcaagtttagctttcaactttgagactatctcgctgaaccaaatatgtaaaccagctggagagttgagccagaggacacgtgctagttagctgttcttctcgtgtctgtatttctcagactgctctcaaagtatatttaatgtatgacgattcagattagcttaaaaagttgtgttatccgagaactcatttcggcgtgcatgtaaccactcccctatcttgctcagtatctcgtcgcatcatgcttttaataaatc

SEQ ID NO: 319 - DNA, 4450 bp, Zea Mays
cttgtctctccttgacggcctccttgctcagcacgatctcggctccgtctctctctagtctctaccaacggtagcaccatctcgctcccactcccaaccactccgccaccaccgctctcctgcgcctgcgtccgcgcctcctccctgcggccccggccgcaccggcgacatggccatccccgttgaggaggccatcgccgccctctccaccttctcgctcgaggggttagctgtgctcctgtctagtgaaagatatgcgactaacagtcctattgagtacagcgatgttgctgcttatcgtctatcactaggagaagatacaaaagcaatcaaccagctgaatacactgatcaaagaaggaaaagaaatgacatctttgctgtacacataccgtagctgtgtaaaagctctacctcagctgcctgattcaatgaagcataatcaagcagacttgtatcttgaaacctatcaagttcttgacatggaaatgagccatttacgtgaaattcagagatggcaagcttctgctgcttctaagttagcggctgacatgcagagattctctaggccagagagactggttaatggacccacaatcactcatttttggtctatgcttaagttgcttgacgtcctactgcagcttgatcatctcaagaatgcaaaagcaagcataccaaatgatttttcatggtacaagagaacgttcactcaagtaagcacccagtggcaggatactgacaccatgagagaagagctggatgatcttcagatttttctgagcaccagatgggccatcttgttaaatttgcatgctgagatgtttcggacaaataccgttgaggatattctacaggttcttatagtattttgtgtggagtcattggaattggactttgctcttctttttcctgagcgccataccctacttcgtgtcctcccagttttggttgtcctagcaacctcatcagagaaggagagtgagtcactttataaaagggtgaagataaatcgtcttctcaatgtttttaagaatgatccagtgatcccggcatttccagatctgcatctttctcctgctgcaattttgaaggaattgtcatcatattttcaaaatttttccagtcaaactcgtctccttgctcttcaagcgcctcatgaaattcagggtcgtgagctacaagattatcagaggcattacttgattttgaatcacatgggaactatcagagctgatcatgacgacttctctatacgttttgcctctgctatggatcagatgataaggttgaagtcatcagatggtgtgtataatgactggtcccgcgatatcaaagggaacatgtatgatattgttgttgaaggcttccagcttcttagtcgttggactggcaggatttgggaacaatgtgcatggaaattctctcgccctatttcagattctcaacaaaactccatgacatgttttgactatgaaaaggtagtacgctataactatactgctgaagaacgaagggctctgcttgaattaattggttacataaagagtattggattgatgatgcagcattgtgatactttagtgtctgaagctttgtgggaaacgatacacatggaggtccaagattttgtacaggataaacttgatactatgcttcgtacaacatttagaaagaagaaggacctttcccggattctctctgatatgcggaccctctcagcagattggatggccagcactagtaaagcagacccagagcagcactcgctacaccaagaaactgaggaaatgagacaaaacacattttacccaagaccagttgcaccaacagctgcacagattcattgtttgcaatttcttatatgtgaacttgtatctggtggtaatctgagaaaagttggaggactatttgggaatagtggctctggcatacctgtggaagatcttaaacaactagagacatttttctacaagcttagttttttcttgcatattttggattatacagcgactattggtactctaactgatcttggatttctttggttcagagaattttaccttgaatcttctcgtgtcattcagtttccaattgaatgctcgctcccgtggatgctggtgggccatgtcattgaatcagaagatgctggtcttctcgaaagcattttgattccatttgacctgtacaatgactctgctcaacatgcactaacttctctcaagcagagatttctttatgatgaaattgaagctgaggctgatctttgcttcgatcttcttgctcagaagcttaatgagatcatctttacatattataagagctgtgcagcaagtactcttcttgatagttcatttacatatgcatgcgatgatggtgacaagtattttgtcaaacctttgcgattcgacgcgattttcaagttaaggagagtaatggttttagggaggacaattgatctaagaagcataattactcagagaatgaacaaaatattcagggaaaatattgactttctacttgagcgctttgaaaatggagatctttgtggtgttgtggaactgcaacaactgctggatattttggagcttacacaccaatcaatatcaagatttcttgaattggattcttactctcttatgcttagcgagatgcaagaaaatctttcgttggtttcttattcaagtcgcatctcttctcagatatggagtgagatgcagacagatttcttgccgaatttcatcttatgtaataccacacagcggtttgtccggtccgcaaaaggaactcaccactcttcgcatagatcaagcgcttctactgggaaaccttacttctattgtggatcacatgatttgaccatggcataccagggtcttgctgggctgtaccgtgacttttttggagtccctcatatgtttgcagttgttaaacttcttggttccagatcattacctgcaatcatccgtgctttactggatcatatatcaagtaagattacaggtttgctaccgaaaataaatgcactgcaagaagcattaccaaaatctattgggcttctttcatttgatggtggtatagcaggttgccaaaagatagttcatgaaattttgacatgggaagcaaaatctgaagttaaaactgaagttcttcatgaccttaaggaaattggaagtgctttgtattggatgagcattctggacattgtgttgagacaaatcgacactacacagttcatgcagtcagctccgtggctaggattggttccaggaaatgatgggcaagtgaagcatgcctactctgataatactccatttaccacacttttaagtgctgcctctaatgctgtgacatcaagccctacatgcccaaatccatctacgtttcttgtcatgtcaaagcaagctgaagctgcgagtctgctgtacaaatcaaacctcaactctggtagtgtgctggagtatgctcttgcattcacaagtgctgccctggatagacactatagcaaatggagcgcaactccaaaaacaggctttatcgacattactacttcaaaggatttctatcgcatttttagcggtcttcagtatagttacttagaagatagcattaacaatccttcgaagaaacaagaaatgctgggtgattctgtagcctgggctggctgtacgataatgtacttactgggacagcagcagcacttcgagctttttgatttctcctatcaatttctcaatgtggcagaagtagaaagtgcgacagtatcacactatcaatcttcagagaggactaaaagttcaaatttcttgcaaggctacgagggcatcctggaagcgatgaggaaggctaggaggctcaataaccatgttttctccatgttgagggcacgatgtccccttgaggacaaggttgcatgtgctatcaagccaagtggggcaccgcttcaccggatgaagtttatgaacaccgtttctgcattcgagacattgccacaaagagtcacctaaccagcttccaggcaatgtgcagaatgtactcttgtatgcggggttatatgttatgttgtaaggtaaatgtatattatgtagtcacaagtcacaaccatcaaccgtggatcctggacctgaacaggagaatgtgtttgcttgctatatatgaaaattaggtgggtatgttgaagttgaccctgagttcgcaagtttagctttcaactttgagactatctcgctgaaccaaatatgtaaaccagctggagagttgagccagaggacacgtgctagttagctgttcttctcgtgtctgtatttctcagactgctctcaaagtatatttaatgtatgacgattcagattagcttaaaaagttgtgttatccgagaactcatttcggcgtgcatgtaaccactcccctatcttgctcagtatctcgtcgcatcatgcttttaataaatc

SEQ ID NO: 320 - DNA, 2231 bp, Zea Mays
ctacctggatccttaaatgcgtcttgatagctctgagggctgatctttgcttcgatcttcttgctcagaagcttaatgagatcatctttacatattataagagctgtgcagcaagtactcttcttgatagttcatttacatatgcatgcgatgatggtgacaagtattttgtcaaacctttgcgattcgacgcgattttcaagttaaggagagtaatggttttagggaggacaattgatctaagaagcataattactcagagaatgaacaaaatattcagggaaaatattgactttctacttgagcgctttgaaaatggagatctttgtggtgttgtggaactgcaacaactgctggatattttggagcttacacaccaatcaatatcaagatttcttgaattggattcttactctcttatgcttagcgagatgcaagaaaatctttcgttggtttcttattcaagtcgcatctcttctcagatatggagtgagatgcagacagatttcttgccgaatttcatcttatgtaataccacacagcggtttgtccggtccgcaaaaggaactcaccactcttcgcatagatcaagcgcttctactgggaaaccttacttctattgtggatcacatgatttgaccatggcataccagggtcttgctgggctgtaccgtgacttttttggagtccctcatatgtttgcagttgttaaacttcttggttccagatcattacctgcaatcatccgtgctttactggatcatatatcaagtaagattacaggtttgctaccgaaaataaatgcactgcaagaagcattaccaaaatctattgggcttctttcatttgatggtggtatagcaggttgccaaaagatagttcatgaaattttgacatgggaagcaaaatctgaagttaaaactgaagttcttcatgaccttaaggaaattggaagtgctttgtattggatgagcattctggacattgtgttgagacaaatcgacactacacagttcatgcagtcagctccgtggctaggattggttccaggaaatgatgggcaagtgaagcatgcctactctgataatactccatttaccacacttttaagtgctgcctctaatgctgtgacatcaagccctacatgcccaaatccatctacgtttcttgtcatgtcaaagcaagctgaagctgcgagtctgctgtacaaatcaaacctcaactctggtagtgtgctggagtatgctcttgcattcacaagtgctgccctggatagacactatagcaaatggagcgcaactccaaaaacaggctttatcgacattactacttcaaaggatttctatcgcatttttagcggtcttcagtatagttacttagaagatagcattaacaatccttcgaagaaacaagaaatgctgggtgattctgtagcctgggctggctgtacgataatgtacttactgggacagcagcagcacttcgagctttttgatttctcctatcaatttctcaatgtggcagaagtagaaagtgcgacagtatcacactatcaatcttcagagaggactaaaagttcaaatttcttgcaaggctacgagggcatcctggaagcgatgaggaaggctaggaggctcaataaccatgttttctccatgttgagggcacgatgtccccttgaggacaaggttgcatgtgctatcaagccaagtggggcaccgcttcaccggatgaagtttatgaacaccgtttctgcattcgagacattgccacaaagagtcacctaaccagcttccaggcaatgtgcagaatgtactcttgtatgcggggttatatgttatgttgtaaggtaaatgtatattatgtagtcacaagtcacaaccatcaaccgtggatcctggacctgaacaggagaatgtgtttgcttgctatatatgaaaattaggtgggtatgttgaagttgaccctgagttcgcaagtttagctttcaactttgagactatctcgctgaaccaaatatgtaaaccagctggagagttgagccagaggacacgtgctagttagctgttcttctcgtgtctgtatttctcagactgctctcaaagtatatttaatgtatgacgattcagattagcttaaaaagttgtgttatccgagaactcatttcggcgtgcatgtaaccactcccctatcttgctcagtatctcgtcgcatcatgcttttaataaatc

SEQ ID NO: 321 - DNA, 2041 bp, Zea Mays
atcaatctctcttgcccgcgcagcctaggttttagggaggacaattgatctaagaagcataattactcagagaatgaacaaaatattcagggaaaatattgactttctacttgagcgctttgaaaatggagatctttgtggtgttgtggaactgcaacaactgctggatattttggagcttacacaccaatcaatatcaagatttcttgaattggattcttactctcttatgcttagcgagatgcaagaaaatctttcgttggtttcttattcaagtcgcatctcttctcagatatggagtgagatgcagacagatttcttgccgaatttcatcttatgtaataccacacagcggtttgtccggtccgcaaaaggaactcaccactcttcgcatagatcaagcgcttctactgggaaaccttacttctattgtggatcacatgatttgaccatggcataccagggtcttgctgggctgtaccgtgacttttttggagtccctcatatgtttgcagttgttaaacttcttggttccagatcattacctgcaatcatccgtgctttactggatcatatatcaagtaagattacaggtttgctaccgaaaataaatgcactgcaagaagcattaccaaaatctattgggcttctttcatttgatggtggtatagcaggttgccaaaagatagttcatgaaattttgacatgggaagcaaaatctgaagttaaaactgaagttcttcatgaccttaaggaaattggaagtgctttgtattggatgagcattctggacattgtgttgagacaaatcgacactacacagttcatgcagtcagctccgtggctaggattggttccaggaaatgatgggcaagtgaagcatgcctactctgataatactccatttaccacacttttaagtgctgcctctaatgctgtgacatcaagccctacatgcccaaatccatctacgtttcttgtcatgtcaaagcaagctgaagctgcgagtctgctgtacaaatcaaacctcaactctggtagtgtgctggagtatgctcttgcattcacaagtgctgccctggatagacactatagcaaatggagcgcaactccaaaaacaggctttatcgacattactacttcaaaggatttctatcgcatttttagcggtcttcagtatagttacttagaagatagcattaacaatccttcgaagaaacaagaaatgctgggtgattctgtagcctgggctggctgtacgataatgtacttactgggacagcagcagcacttcgagctttttgatttctcctatcaatttctcaatgtggcagaagtagaaagtgcgacagtatcacactatcaatcttcagagaggactaaaagttcaaatttcttgcaaggctacgagggcatcctggaagcgatgaggaaggctaggaggctcaataaccatgttttctccatgttgagggcacgatgtccccttgaggacaaggttgcatgtgctatcaagccaagtggggcaccgcttcaccggatgaagtttatgaacaccgtttctgcattcgagacattgccacaaagagtcacctaaccagcttccaggcaatgtgcagaatgtactcttgtatgcggggttatatgttatgttgtaaggtaaatgtatattatgtagtcacaagtcacaaccatcaaccgtggatcctggacctgaacaggagaatgtgtttgcttgctatatatgaaaattaggtgggtatgttgaagttgaccctgagttcgcaagtttagctttcaactttgagactatctcgctgaaccaaatatgtaaaccagctggagagttgagccagaggacacgtgctagttagctgttcttctcgtgtctgtatttctcagactgctctcaaagtatatttaatgtatgacgattcagattagcttaaaaagttgtgttatccgagaactcatttcggcgtgcatgtaaccactcccctatcttgctcagtatctcgtcgcatcatgcttttaataaatc

SEQ ID NO: 322 - DNA, 5334 bp, Zea Mays
tgttacgtccactactcctgagccggcgtgctgctcttccgagaatgaagcccaagtcgcagaagcaggcccaagaaggggaagccgtgtccgcaggcccagttctcgtctacagggttttgtgtagcctagaggagagctgtgagagagagagttaaatggcggctgccattgtatggatgcagacttgaacaatacgaacacaaaaaaatcctgcagattctgtcgtcctcccttcttcctccttgagacttcttctaccactattccaccgctgcttctaacatttggtatcaaagacagcgctcgcgtcctggagccctaccaccaatactacactcggcgtcagaagaatttaggcgccatggatcccaatttcaaaccgatcttcgaagaagcgatgaagatgatgcgagtcgagatcacgaaggaaatctccaagtgcttcgccgaccacgatgcggttgtcaaccaacgcttcgctgatttcgcggcggctgcagaacacaacaacgcccgcgtcacatctctggaagaggccgcatccaagttcgatcacaccttctccaactggcagccagagatcgaggcctccgtcgccgacatcaggctcgaaatctccaagctcaacaaattcttcgatcgcgacgctcgtgaacactccgggtttcaactgggtgttctgggtactgagtcgacgtccgcgcgcccatctgccggattccgcgtcgacgggcctcgtggccaccgcgccgaacctcattaccgggatgatggtcctgggttccacaacacccagacccatcacccggtcaagggtatgcatgacactcccctttttgctcctcgccatgaattcaatagaactggtcagaattgccagggaggcgttggttctcgtggccacatccctcagatgccttttcctaagtttgagggcgcgaacccacgcctgtggcgttctcgctgtgagacttatttcaacatgcactccgtagatcgtgatgtttgggttcaggtggcctccatgtatttggaaggaccagccgctcgttggtttcagtccatcgagcacaaacttgcttatattccgtgggacggcttctgttccttgttcatggaacgttttgggagagatgagcatgaggttttgattagaaaactttttcacattcgacagtcaggatccgtagccgaatatatctctgatttttctcaattagtcgatcagttacgagcttatgaacctatgaccgaccctttatactatacaactcgttttatcgatggtttacatcacagcattcgttcatcaattttgctgcaacgtccaccggacctcgatactgcttgtgtccttgcctctctgcaggaagaagcagccgacactggtcagcgcaaagagtatcgaaggcttgctgattatagcactacatccaagccagattacaagcaattatacaaacaagctcatcctctcccttctccacctactgctgaaatgcgtaaaggagctgatccagtcatcaattctgatcaatctggcaagttggaggccttgagagcttaccgaatggctaaaggattgtgtaaaatctgtgctgaaaagtggtttaaggggcataagtgttctccatcagtgcaactccacgtggttcaagaaatttgggatatgttgggccctcccaattgtgagtcacctgcagattgtacagacacatcatcacaactttttgttactttatctcaagctgctgtgtctggcactgaatattccaagacacttaagttttggggctatgtcgcaggatgtcagatattgatccttgttgatagcggtagttctcactccttcatcaatgctgcagttgctagcaagctacctggtgtttctctgttgacttcaccactgaatgttgcggtggccaacggtgacaagttgagttgtactgctgagattcagaatattcagtggtcagtcgacagctacagttttacctctactttcaagatccttccacttcattgttatgatcttatacttggcatggattggctcgagtcctgcagtccgatgcatgtgcattgggagcaaaaatggttgtcattctttcaagggtctaatcaagtcattttacaaggagtgttacctcgattgccacctgctactgttatacagattttgtgtgcttcccctgaatgttttgcagtagatgtcactgcattaccatcagatattcagcagattattcaagattatggacatctgttcgaggtccctactggtctaccacctagtagagcatgtgatcattccattcccttgattgctggtgctaaacccttccatataaggccttatcggtaccctcctagtctcaaaactgagattgaacgtcaggtccaagagatgcttgacactggtattattcaacatagccaaagtcctttcagttctcctgtgcttttggttaaaaagaaggaccaaacctggcgattctgtgttgattttcgacacctcaatgcactaacagttaaacgccagtttcccataccagtaatggatgatattttccatgagttatctgccgccacttggtttactaaactggatcttagggccggcttccaccaaattttattacagcctggggaagaacataagacagcattctctacccatgagggtcactttgagttcagggttcttgcgttcggcttgacaggtgctccagcaacatttcaaggggctatgaatgccactcttaaacccttgttgcgtcggtgcgttatggttttttttgatgatattttgatatacagcccatcttatactcagcacactgttgatattcgtcgggtattggatttgttacaacaagatgattggaaaatcaagctgtctaagtgttcttttgcccaacagcagttatcttacctgggtcacattattagtgctgctggtatttctactgaccctagtaaggttgatgccatcatgtcttggccacctcccaccaatgtgaaggagctccgtagtttcctcggcctcgctggttactaccgaaaatttgttcgccactttggcgttataagcaagcccttgactaatttgcttcggaaacacactctctatgtgtggaccagcgaacatgaagaggcctttcaagctctcaaatcagctttgcagtcagctccggtattatcgttgccagatttttcccaaccattttgtgtggaaactgatgctagtggcaaaggagtaggtgctgtcttgctgcaacatgaacatccaattgcttttgtgagtaaagctctcagccctcgaaacttgggactctccacttatgaaaaagagtatcatgctatattgctcgctgtcgagcagtggcgcccctatttacaatatggggaattcatcattcggactgaccatcgcagtctgtcccatttatctgaccaacgcctacacaccacttggcagcaaaaagtttttactaaacttcttggtctccaatacaaggttgtgtataagaaaggtactgaaaactgtgtagctgatgctctctcgcgacgaccccatcctgaattgtcagctatttcatctgcaactccagcatggttgtctgatgtgtcttccagctatgcaaatgacccaagagcgcaagacctgttgacagctctgtcggttaaaccagattcaataccacatttttccctgcggcaagggttactgcgttacaaggataagatctatgttggggcagttccctcccttcatacgcagattgtgtcagctttccatgacacggctgttgggggccatagtggtataccagtaactcttcgccgtatccgacagttattcttctggcctggtatgaaatccagtgttgcttcttttgtcaaaacttgtaccacttgtcaacaagtcaaaccagaccgctctcgctacccaggcctgttgcagccccttgaaattccaccagcagcttggcacaccatcactatggatttcgtcacaggcctgcctaaatctggccacgccgactgtgttcttgtggtcgtcgacaagttctcaaaatacggccatttcttaccattgcatcacccatacactgctgtttcggtagctcgtttatttcttgaccacatttacaagcttcacggcttaccagtggcgattgtttcggatcgtgatcctgtctttacagcaaggttttggaaggagctgttttctttagctggagttcagttacggatgagttctgcttatcacccgcaatctgacggtcagacagagcgggtcaatcagtgtatggaaacgtttcttcgctgttttgtcaacgcttgtccttcgaaatggcttaagtggttacccttggcagagtactggtataataccagctggcacacttcacttggccgctccccttttgaagttctctatggacattctcctcatcactttgggcttactgcacttgatgcttgcaccagtccggatgttactagctggctatccgagagggctgttatgactgaattggttaaccagcatttgcaccgtgctcaactccgcatgaagaaacaagctgacaaaaacaggtctgaacgtattttttcagtaggcgattcagtgtttgtcaagcttcagccttatgttcaaagttcactgtctcggcgttcttcccagaagctgtcattcagatattttgggccgtttactattgtctccagaatcggttcttcaggaacgccacgtccgtcgcaacgacggcatggttcaggaagcactgatcgtctggtcacatcttcctcgcgaactggccacttgggaagatgtcgctcgacttcgccaagaattccctgctgcacctgcttgggggcaagcaggtctccaagggggagggagtgttacgtccactactcctgagccggcgtgctgctcttccgagaatgaagcccaagtcgcagaagcaggcccaagaaggggaagccgtgtccgcaggcccagttctcgtctacagggttttgtgtagcctagaggagagctgtgagagagagagttaaatggcggctgccattgtatggatgcagacttgaacaatacgaacacaaaaaaatcctgcagattctgtcgtcctcccttcttcttcctccttgagacttcttctaccactattccaccgctgcttctaacagaaaatgaactaatttctcttacgggacgtttggatccctttattttaaagaaattggaattcactcgataaaataagttatttagtttggaatttgatattccaccactttccaacgttcatatataag

SEQ ID NO: 323 - DNA, 1531 bp, Zea Mays
taacatttcacttcatatttcaggctcgttggttcaggtagacccacttcagttcctcacagctcaactgcttcactcttcctccggacgtccttggtcacaaatcaggaacacatatgacacaactactgcactcattcattaatgccttgggatgcatatataaaaccattgtctcgccaatcgtttaacttacccagaaacacaaagaaaaatatacacagctgatcgatcgagcagcagaaacctgcacgtccaaccaaccaaaacccaagatgtcgagcttcttcccatttccgtccgcccctctcgccgttcttctcatcgtcacgctccacgcctccgccatccatgcgcagatacctgcctcggcaacgaccggcgccgcggtggccgccacaaacccgcagccaggaggcagtggcactggcggcggcgtagtgggcgcgggcgggccggacgcgcctctggaactctacatgcacgacatcctgggcgggtcgagcccgacggcgcggcccatcaccggtttgctgggcaacatctacaacgggcaggtccccttcgcgcggcccatcggcttcagcgcgcccaggaacggcgtggcgatccccaacgccaacgggcaggtgcccacgtacaacggcaacaccggcatcccgctggacaccggcttgtccggcgccgggttcttgcagccagggactgggaacggcggcggcgcggcggcggcggcaccggcgcaggtgcagctgggccccgacggcctcagcctcgggttcggcaccatcacggtcatcgacgacgtgctgacgagcgggcccgacctcggcgcgcagccgctcgggcgcgcgcagggcgtgtacgtggcgagctccgccgatgggtcgtcgcagatgatggcgttcacggccatgatggagggcggcgagtacggcgacacgatcaacttcttcggggtgtacaaggtgggcaccccgctgtgccggctgtccatcaccggaggcaccggcaagttcaagggtgcctgcgggttcgccgaggtacgcccgctcatcgcttccggccagcacgtcaccgatggcgcagagacgctgctgaggatcaccgtccatcttgcttaagttgtgaccgtaaagtaagccagcgcttgtcggctgtcgtggctgcagtgaagcctgggctgtgttgtttcggacgtgtcgaggtcgtcgcctcgtcggtggatgcatgcatgcatgcaattgcaatgtagtgtttgcatgggtcaaaaattgtattcgcctcgtctgcagggtgtactaccaattgttaaattaaagcagtacatgatgtcgtgtggttattatacaaaagataattcacatccattttcttgcattttcgccccacaagccaacaagccacaagggccgtcgccacgcaagcgccggcgcggagatgacctgcaaaccttgaagttgtgctggccatgttgaacgatctgtcaacccgatgactctggagcttgcttgccacgagagagatcagc

SEQ ID NO: 324 - DNA, 1471 bp, Zea Mays
caaagtaaactgatcgaaggtgcacacttctgagttctgacacaacaccaaacgcaagacagcccgcgagtctcatcagtttcaccagccgcccatcaatactttggcaaagtttcctcttcctctcccgcagagcagggcgcagcaggcagccgcccagaaaatttcccctctccacccatgcaatgcaatccgccgcggcggccgcgccctcctcccttccgctcagcgtcttccccaaggattcccgcccgctcccgtgcctcctcctcacttccctgctgctgctcctgaccctccatttcctctcctcctcccccaccccctcgccgcctccaccgcagccccgcctcgcgccgctcccgtccacagcctccgcgggcccggccccgtcagcgctcgcgttcctcctcacgggatccgcgggcgacgcagaccgcctccagcggctgcttctcgccacctaccacccccgcaacgtctacctcctcctgctcgaccgcgccgcctccgcggccgaccgcgcgcggcttgctcgcagcgcgcgggctgcccccggccgcgacaacgtccatgtcgtcggggaccccgggttcgccaacccgcgcggtgcatccgccctcgccgccaccctgcacggggccgcgctgctgctgagggtcgaccagggatgggactggttcgtgcacctcgacgccgatgagtacccgctcgtgacccccgatgatctcctgcatgttttttcatacctacctaaggatctcaacttcattcagcacactagctatattggttggaaggaggaaagacaaataaggccaattatcgttgatcctggtctatatctctcatccaggaatgacattttctacgccacccaaaagcgtgatataccaaatgcttacaaattatttacaggctcttcgtctgttatcctttctcggaaatttattgaatattgtattgttggtatggataatctgccaagaactctgctgatgtactacactaacatgcccttgccacacaggaagtattttcagacagttctttgcaactccgctgaattcaacaagactgtagttaaccatgacctacactattcaacatgggatgctcgttccaaaaacgagccacgcctactgactatagatgatgtagaaaatatgaccgaaagtggtgcagcctttgggactagatttcccaaagatgatcatgcgcttgatcgcatcgatgaagaaattttgcaccgtcatcctggagagctagttacaggaggatggtgcataggtgttgggcatgatagtccatgcgacatttcagggaactgttatctctcgggttatgtgtttgcggtttgcctcatactgcggtgcatttcgttcgccatcatttgcatatgatgtctgtagttgattctcttgtgataacctaaaacagtacaagtggatcataagaaatgttctaccat

SEQ ID NO: 325 - DNA, 986 bp, Zea Mays
cttcccctctccactaatcaataataataattatgaaattaattatttttgagtttactagcagataacaatgtgtattattactataaatatggcagtgttttttgaaactccaaaaacaaatgtaaaaaaagttaaattgctcagttaaaagataaaaagaaaactgaataggaagaatgataagagagaagataaaataatatttaaatatgaataaaaagtataaatagcggggctttgagagggggaatggtaggagatactataaggaaagttgatcgagaagtcttggtagacatggagcagatccagtactccgagaagtactacgacgacacctatgaatacaggcacgtcgtcctcccgcccgaggtcgccaagctcctccccaggaacatccttctctccgagtggcggttggtgggtgtgcagcagagccgcgggtgggtgcactacgcgatccaccggccggagccgcacatcatgctgttccgccgcccgatcaactaccagcagcagcaggaggaagcggctgccgcgcatgtgctgcccaagtgaagcctctgctggcgaccaggaatgttaaaaacccctagccctcttttcatctctaaaaggggcgtagctgttgtgttgattaatccctctggctgttagttggaaacttgggatctagttgggtcgacttggtgtgtgcgtggcgatctgtttgtgctgacatttaatctgtgcgatgtgatctttgtgattgtgattctggttagtagcgctggaatcaggtttaatctgttctatgtgagattaaaattgtcaccatgcatttcaaagttcaaacatgctgaggaagaaactatcctaggatcttggctgtcattgagggcgcaagatatcatttgacgatatggtacatctggatatgtggtagtgctggaatcatgtttaatctgttctatgtgagattacaattgtcaccacacatttca

SEQ ID NO: 326 - DNA, 977 bp, Zea Mays
ccactaatcaataataataattatgaaattaattatttttgagtttactagcagataacaatgtgtattattactataaatatggcagtgttttttgaaactccaaaaacaaatgtaaaaaaagttaaattgctcagttaaaagataaaaagaaaactgaataggaagaatgataagagagaagataaaataatatttaaatatgaataaaaagtataaatagcggggctttgagagggggaatggtaggagatactataagttgatcgagaagtcttggtagacatggagcagatccagtactccgagaagtactacgacgacacctatgaatacaggcacgtcgtcctcccgcccgaggtcgccaagctcctccccaggaacatccttctctccgagaagcagtggcggttggtgggtgtgcagcagagccgcgggtgggtgcactacgcgatccaccggccggagccgcacatcatgctgttccgccgcccgatcaactaccagcagcagcaggaggaagcggctgccgcgcatgtgctgcccaagtgaagcctctgctggcgaccaggaatgttaaaaacccctagccctcttttcatctctaaaaggggcgtagctgttgtgttgattaatccctctggctgttagttggaaacttgggatctagttgggtcgacttggtgtgtgcgtggcgatctgtttgtgctgacatttaatctgtgcgatgtgatctttgtgattgtgattctggttagtagcgctggaatcaggtttaatctgttctatgtgagattaaaattgtcaccatgcatttcaaagttcaaacatgctgaggaagaaactatcctaggatcttggctgtcattgagggcgcaagatatcatttgacgatatggtacatctggatatgtggtagtgctggaatcatgtttaatctgttctatgtgagattacaattgtcaccacacatttca

SEQ ID NO: 327 - DNA, 1916 bp, Zea Mays
ttacgggttttttgcccagccctactagttcttccctcgcgttcactccccagcgtgggaaaatcccggaattttcttgtttgtccactggttttcttgcgccaaaaccaggtttctccccgttgccgtggcagaactctgttcttgcccagtctagaagatctgcaccgttccaaccaccgactccggccgccaagcatatagccagcgcggcgaagaattcccaacgcgaaagccaaaacctcttcacttcacttcacgtcgacacgtgcggggagaatatgcgcgcgacaatcccagccctgtcgctcctggtgacgccgcggctcccctcgctcgccgtgccgctggctggaggccgcctccgcgtgggcggtcgttctcggacccgcctccgcgtggcggcgccgacgtccgtcccaggggaagcggcggagcaggcggagccgagcacgtcggcgcccgagtccggcgagaagttctcgtggagggatcactggtacccggtctccctcgtcgaggacctcgaccccagccgccccaccccgttccagctcctcaaccgcgacctcgtcatctggaaggaacccaagtccggcgagtgggtcgcgctcgacgaccgctgcccccaccgccttgccccgctctcggagggcaggatcgatgagacggggtgcttgcagtgctcgtatcacggatggtcattcgatggctccggcgcctgcaccaagatcccccaggccatgcccgagggtcctgaggcccgtgcggtgcggtcaccgaaggcgtgcgcgatcaagttccccaccctcgtctcccaggggctgctcttcgtgtggcccgatgagaatgggtgggagaaagcggccgccaccaagcctccaatgttgccgaaagaatttgaggacccggccttctccacggtgacaatccagagggacttgttctatggttatgatacgttgatggagaacgtctctgatccgtcccatatagaatttgctcaccacaaggttactggacgaagagatagagccaggcctttgacattcaggatggaatcaagtggtgcctggggttactcaggagcaaattctggtaatcctcgcattactgcaacttttgaggccccttgttatgcattaaacaaaatagagatagacacaaagttacccatttttggcgaccagaaatgggtcatatggatttgctctttcaacattccaatggccccagggaagactcgttctattgtctgtagcgctcgaaactttttccagttcacaatgccaggaaaagcatggtggcagcttgttcctcgatggtatgaacattggacttcaaatttggtctatgatggcgatatgatcgttcttcaaggccaggagaagattttcctagctgcaaccaaggagtcttctacggatattaatcagcagtacacaaagatcacattcacgcccacacaagctgatcgatttgttttagcattccgcacgtggctaaggaaatttggcaatagccagccggagtggtttggaaatcctacacaagaagcattgccttccaccgtcctttcaaagcgcgagatgctagacagatacgagcagcacacgttgaaatgctcgtcttgcaaaggagcatataatgctttccagaatctgcagaaggtattcatgggagcgacagtagtttgctgtgctgccgctggtattcctccagatgttcagctcaggctattgatcggtgcggctgctttggggatcggcgccgtgattgttagcgccgacccctcttatacggggtcgaacggtgatcttcccgtggcaccgtctgctgtctgggacgcatgtcggtcaaatgcgatgggtgcggattctaccctccaagacacgcgatggcgatctaacgtgcaa

SEQ ID NO: 328 - DNA, 1305 bp, Zea Mays
aaaaatcccaccgagaaatccccctccattccctccctcgtggcctcgtctcctcccgtggcccgtgggggacggcacgcaaccacacgcagccactcaccggtgagcggcgaggcgactggcgcggccgcgcaccgcagtcacgcacgcaggcgctcaatggctgcgtcactctgctccccgcctccgctcccttccgccttccgccgatcccgcgccgtcgtccgcgcctcctcctcctcctcgtcgtcatccgccgtctcgtcgtcgtcgtccgcccccaaagcgcggttcgtcgcccgccgctccgagtccgtccccgtccagcagctggtccgcccgctcggtacccggagccttcccccctcccgagctctccccaaacttcatggtctctacttgctcgctagttgaggggtcgcttgagatacatgtctgcttgcctcctgcagcggagtacatgagcttgccagccagccagtactcggtgctggacgccgagcgcatcgaacgcgtcgacgactccaccttccggtgctacgtgtaccgcttccgtttcttcgcgcttgaggtctgccccgtcctcctggtccgcgtcgatgaggaacccgacggctctggagggatcaccgctcgtggaggcgcagaatgataaattctcagcttccatggcgaatagggttttctgcagcagcaagtcgcaagattcgacccttcaacaacttacatcagatactacaatagaggttgcaattgatataccttttccatttcgagcaataccagttgaagccattgaatcaagtggcaggcaagtgcttgaacagttactcagagtcatgcttccaagatttctgaagcagcttgttaaagactaccaagcttgggcttctggcgatgcttctaggaaaccacttggcactggtgaaatctgaagctgcccagtgtctccattacgcatgatagtttgatcgtagaattcagttattgcccccttgtgttgtatagcaatcctgccaaaacaatgggcatgcttgtttcagtttttttttgctgattttggctgccaaaagctgttgtatgctaaacgctcagtttttcattccacttttatgagaatcgttttgatgaaaaaatgtccaaaattaacttaaacacaatcgatcgacaggaggaatctgtcacttcctgcattctaaaccctatggatccttttatctttcttcgtatataatttttataattttgtattctctctacagctagattctctcaaaaaagctcgtcagaaaaaacaaacaaaca

SEQ ID NO: 329 - DNA, 1145 bp, Zea Mays
tccattccctccctcgtggcctcgtctcctcccgtggcccgtgggggacggcacgcaaccacacgcagccactcaccggtgagcggcgaggcgactggcgcggccgcgcaccgcagtcacgcacgcaggcgctcaatggctgcgtcactctgctccccgcctccgctcccttccgccttccgccgatcccgcgccgtcgtccgcgcctcctcctcctcctcgtcgtcatccgccgtctcgtcgtcgtcgtccgcccccaaagcgcgcggagtacatgagcttgccagccagccagtactcggtgctggacgccgagcgcatcgaacgcgtcgacgactccaccttccggtgctacgtgtaccgcttccgtttcttcgcgcttgaggtctgccccgtcctcctggtccgcgtcgatgaggaacccgacggctgttgtattcgcctcctctcctgcaaactggagggatcaccgctcgtggaggcgcagaatgataaattctcagcttccatggcgaatagggttttctgcagcagcaagtcgcaagattcgacccttcaacaacttacatcagatactacaatagaggttgcaattgatataccttttccatttcgagcaataccagttgaagccattgaatcaagtggcaggcaagtgcttgaacagttactcagagtcatgcttccaagatttctgaagcagcttgttaaagactaccaagcttgggcttctggcgatgcttctaggaaaccacttggcactggtgaaatctgaagctgcccagtgtctccattacgcatgatagtttgatcgtagaattcagttattgcccccttgtgttgtatagcaatcctgccaaaacaatgggcatgcttgtttcagtttttttttgctgattttggctgccaaaagctgttgtatgctaaacgctcagtttttcattccacttttatgagaatcgttttgatgaaaaaatgtccaaaattaacttaaacacaatcgatcgacaggaggaatctgtcacttcctgcattctaaaccctatggatccttttatctttcttcgtatataatttttataattttgtattctctctacagctagattctctcaaaaaagctcgtcagaaaaaacaaacaaaca

SEQ ID NO: 330 - DNA, 1188 bp, Zea Mays
tccattccctccctcgtggcctcgtctcctcccgtggcccgtgggggacggcacgcaaccacacgcagccactcaccggtgagcggcgaggcgactggcgcggccgcgcaccgcagtcacgcacgcaggcgctcaatggctgcgtcactctgctccccgcctccgctcccttccgccttccgccgatcccgcgccgtcgtccgcgcctcctcctcctcctcgtcgtcatccgccgtctcgtcgtcgtcgtccgcccccaaagcgcggttcgtcgcccgccgctccgagtccgtccccgtccagcagctgcggagtacatgagcttgccagccagccagtactcggtgctggacgccgagcgcatcgaacgcgtcgacgactccaccttccggtgctacgtgtaccgcttccgtttcttcgcgcttgaggtctgccccgtcctcctggtccgcgtcgatgaggaacccgacggctgttgtattcgcctcctctcctgcaaactggagggatcaccgctcgtggaggcgcagaatgataaattctcagcttccatggcgaatagggttttctgcagcagcaagtcgcaagattcgacccttcaacaacttacatcagatactacaatagaggttgcaattgatataccttttccatttcgagcaataccagttgaagccattgaatcaagtggcaggcaagtgcttgaacagttactcagagtcatgcttccaagatttctgaagcagcttgttaaagactaccaagcttgggcttctggcgatgcttctaggaaaccacttggcactggtgaaatctgaagctgcccagtgtctccattacgcatgatagtttgatcgtagaattcagttattgcccccttgtgttgtatagcaatcctgccaaaacaatgggcatgcttgtttcagtttttttttgctgattttggctgccaaaagctgttgtatgctaaacgctcagtttttcattccacttttatgagaatcgttttgatgaaaaaatgtccaaaattaacttaaacacaatcgatcgacaggaggaatctgtcacttcctgcattctaaaccctatggatccttttatctttcttcgtatataatttttataattttgtattctctctacagctagattctctcaaaaaagctcgtcagaaaaaacaaacaaaca

SEQ ID NO: 331 - DNA, 698 bp, Zea Mays
tcagataaagcggctgctgctaaactgctgagtatcattcctagtttcctacagtgcttccatggcgaatagggttttctgcagcagcaagtcgcaagattcgacccttcaacaacttacatcagatactacaatagaggttgcaattgatataccttttccatttcgagcaataccagttgaagccattgaatcaagtggcaggcaagtgcttgaacagttactcagagtcatgcttccaagatttctgaagcagcttgttaaagactaccaagcttgggcttctggcgatgcttctaggaaaccacttggcactggtgaaatctgaagctgcccagtgtctccattacgcatgatagtttgatcgtagaattcagttattgcccccttgtgttgtatagcaatcctgccaaaacaatgggcatgcttgtttcagtttttttttgctgattttggctgccaaaagctgttgtatgctaaacgctcagtttttcattccacttttatgagaatcgttttgatgaaaaaatgtccaaaattaacttaaacacaatcgatcgacaggaggaatctgtcacttcctgcattctaaaccctatggatccttttatctttcttcgtatataatttttataattttgtattctctctacagctagattctctcaaaaaagctcgtcagaaaaaacaaacaaaca

SEQ ID NO: 332 - DNA, 572 bp, Zea Mays
cacgttcctccctcatgcttccccgttgcagcgattgctcccggtggctcggcgccaatagaggcgccgccacctgactcggccgacccccatctcgctcgacgagatcgtcgctggtatccgcggtatatcttagagaatgttcatgccaagagtggcaacatatcgagaagccatgccaccatgccttatgccaagagtggcaacagacctattgatcattcatgtgatgcacctgctgctattccaactgaggtgccaacaccagtgttttcttcagctgaagttggtttgttgatgtccaccccgaggaaaattaggagagctgtcaataagcttactcccaagaagaagatgcatggcatgtagacagcttcaatggtgaatgtcgactgtattttgtttcagaatatctatggcatgaagacagcttcaacgcatgttaactgaatgtatctgtctttcctttcagttatgtgttgtttcagaaacaaatgtgcatgtgattatgtgaactgaatgtatctgtgaaccgaatgtgcctgtgcaatgaatgttcgtgttaattgaat

SEQ ID NO: 333 - DNA, 1180 bp, Zea Mays
aaggaaatggctgttataataataatactacaaaagcaattgcatcgttccgagtagcacttttccaaagctctaccaataaggaaaaaaaaaaactcttctccacgcgtccttcctattctcctcgtcatcttcctgctgcgcgtccctgccagcacagcgccgcctcccctaacggccccaccatctcctcacatcgttatcgtgtcacggcctctcggcctcgcgcccttctgagctgtcgtcgtctccccctctctcgctcggctgtcgccgcggatctccctgcgtcggccgcaacgatggcctcctcatccgccgcggcgtcggccgccgccctaggtgctcgtcgcctcgctcgccgatgactccccagtcgcccgtgacgccgcgctcgctgccctccgcgacatcgcgccgttgaacccgatgctcatcctcgactgctgcgccaccgtctcccgtggcggacgtcggcggtttggcaacatggctggggtttttcttgtcatggcatctgcagtcagggctctcgatcactctgacgccgagagcgagttcctccggaaaatcgcgaagattgcaactgctgagattgttacctcaaaggaattcaatgttgattggcaaagagcagctgcttgtcttctggttgctataggttcacatgatccagacttgatgatgggggaaatttttcttcacttctctggaccaacttctgctctgccagccatgttacaaatacttgcagattttgcgtcttctgaagttcaccccacggttgaaggacgtgcttttgcgtgttttacctatcctaggaagtgtgcgagatggccaacggcctgtttttgcgaatgcattcaagtgttggtgccaggctgcatggcagtacctgggagatgccccctctgagcttcctcttgataacgatgttatgtccttcatgaattcagtatttgagttacttataaaagtatggacaggctcacgtgatctaaaggtgcgtccgaattttggctttgagtttttttttcacacaacttataacaatataatgtctcaacttataggactattagccatggatttcaatcgcctgatcgtctggcctgggcgatcagccgattagacgcgattagggcgacgattagtcgcccctaatctaccctagccgtcc

SEQ ID NO: 334 - DNA, 1191 bp, Zea Mays
aaggaaatggctgttataataataatactacaaaagcaattgcatcgttccgagtagcacttttccaaagctctaccaataaggaaaaaaaaaaactcttctccacgcgtccttcctattctcctcgtcatcttcctgctgcgcgtccctgccagcacagcgccgcctcccctaacggccccaccatctcctcacatcgttatcgtgtcacggcctctcggcctcgcgcccttctgagctgtcgtcgtctccccctctctcgctcggctgtcgccgcggatctccctgcgtcggccgcaacgatggcctcctcatccgccgcggcgtcggccgccgccctagaggccgtgcaggtgctcgtcgcctcgctcgccgatgactccccagtcgcccgtgacgccgcgctcgctgccctccgcgacatcgcgccgttgaacccgatgctcatcctcgactgctgcgccaccgtctcccgtggcggacgtcggcggtttggcaacatggctggggtttttcttgtcatggcatctgcagtcagggctctcgatcactctgacgccgagagcgagttcctccggaaaatcgcgaagattgcaactgctgagattgttacctcaaaggaattcaatgttgattggcaaagagcagctgcttgtcttctggttgctataggttcacatgatccagacttgatgatgggggaaatttttcttcacttctctggaccaacttctgctctgccagccatgttacaaatacttgcagattttgcgtcttctgaagttcaccccacggttgaaggacgtgcttttgcgtgttttacctatcctaggaagtgtgcgagatggccaacggcctgtttttgcgaatgcattcaagtgttggtgccaggctgcatggcagtacctgggagatgccccctctgagcttcctcttgataacgatgttatgtccttcatgaattcagtatttgagttacttataaaagtatggacaggctcacgtgatctaaaggtgcgtccgaattttggctttgagtttttttttcacacaacttataacaatataatgtctcaacttataggactattagccatggatttcaatcgcctgatcgtctggcctgggcgatcagccgattagacgcgattagggcgacgattagtcgcccctaatctaccctagccgtcc

SEQ ID NO: 335 - DNA, 3794 bp, Zea Mays
atgactaacatggtggatttgtttgctcgtttggttgtgcttctgcataatccacttgctaggggtcaactggccacccagatcctgacggttctgtgctacttgggtccacttttccccagaaacctttctttattttggcaagatgaggtccctaagatgaaagcttacatcagtgatcctgaagacctaaagcaagatagcacataccaggaaaaatgggatgacatgataataaattttttggcagaatgtttggatgttgtgaatgatactgagtgggtcatttctttgggtgatgcatttgcacggcagtatgatctgtattctatatctgacggacacgctgctttgctgcacagatgcttgggaatgcttcttcagaaggttgatgataggatttatgtcagcgagaagattgattggatgtgtagacactcaagtatgtctattcctattaatcgccttggacttgctcaaggcatcgggctggttgcggcttctcatttagatacagtgttggagaaactgaagaacatactagatagtgcagagcaaagtgctttccagaggttcctctcatttttctcattcggcccaaaagtggaagatgttgatgacacatatgcagcattggcgttgatgtatggttatgccgcaagatatgctccatcaactgttattgaagccagaattaatgcacttgtggggagtaatatgcttggaaggttgcttcatgttcagcatcctactgcaaagcaagctgtgattactgcaatcgaccttttaggtcgagctgttattagtgctgctgaaatgggaatctcattcccactgaaacgaagagatcagttactggagtacgttttaactctaatgggtagggatcaaagtaatgatctcactgatttcaacactgagcttttgcacacacagagccttgctttaagtgcctgtactactcttgtctcgctagaaccaagattgccaatggaaacaagaaaccgtgtcatgaaggcaacattaggtttttttgctttgccaacagagccctcaagcattgttgagagtctcgtaacaaacctaattattctgttaggtgccatcctgcttacaagtggtgaagatggtcgaagtcgagcagagcagttgctgcatattcttaggcagcttgatccatatgtatcatcatctctggaacaccaaagaagaagaggatgtgttgctgtacaggaggtgttaataaagtttcgcaatctttgttctggtggattcggtgcattgggctcctatccaactttcacaatgaataaacaaatcgatcgagggactaggagcttgtcaagtttgccatctgcatttgtgttgcctagtcgagattctttaagcttgggagagaggacaatggcataccttcctcgttgtgctgatacagacacggaagttaggaaagttgcaattcagatcattgcacttttcttcgacatttcattgtcacttccaaagcagaaggcatatcctaatgatattgatctggaatcctcgtatagtgctttgtcctcccttgaggagttagtctctattgtcagaagggaggcatctgttgatcaaactgaactatttcagagggttgtatcctcagtgtgtattctattatcaaaggatgagctggtcgtcttgctacactcttgtacgttggcaacatgtgataagataaaacagtcagcagatgcttcaattcaagctattatcatgtttattatcagaagaggcaaggagctacgtgaagctgatgtctcgaggacaactcaatctttgctctcatctgctatttctcttactgacacacactcacgccaagagatatcatgcctagcagaaaacaccaatcacgttgtggtctttgatgaggttctatctgtggctggaaaagatatctgtacaaaagacataccaaggattcgtggaggctgggccatacaggatgttttttatgcattttcccagcacaaggagcttgcacttctattcctggagtacactttatctatacttcacaaagaacctgtcataataaacagttctgagaagggggagagtacctctgagtcattggctgatgactgtattctacaggcaactatgtttgctctcaatgcatttatgagaggtggtgggaagattgggaaacaagcagttgagaaaagttacccttctgttctttcgggccttatactgaagctcggaagtcttaatggtgttgctgaattgggccgaaatgaacttctacgatcgttgttaattgcatttcagtcattttgcgaatgtgttggtgatgtagaaatgggaaagctattagctcgagatggggaacaaactgagaaggacaaatggatcgagcttgttcaggaaatcgcatgcagttcctcagtaaaacgaccaaaagatgttctgccaacttgtgttatcttgtgtaatgctctcaaccgaaatcagagggctgaaagggaggctgctgctgctgcactatcagaatttatccaccacattgaaaaagaacctacattgcttgaacaaatggttgaggaaatgtgtcaacatgtttctgatgattcaccaactgtcaggagcctctgtttgcgtggacttgtgcaggctcctgagagccacatgcttaaatacatccagcaagtgttaggagtaatattagcacttcttgaagaccccaacgagtctgttcaattaactgctgtccaatgcttgttaaatgtccttaatttgtcagaacaagatgctgttggtccaatcttaataaatctcttagtaaggctgcgaaatcttcaggtctcaatgaatacgaaaatgaggtccaatgcgtttgcagcttatggtgctttaagtgcatatggtgttggtttgcagcgcactgcttttattgagcagatacatgctacccttccccgtctgatcctccatcttcacgatgatgacctaagtgttcgtcttgcctgtcggaacacattccagctccttgcgacattgatggaagtagagggcttgtctgtgctcctcagcaagcagtattttgcttctgatcgccgttctgactatgaggacttcattagagacttaacaagacaactttgtcggttgtctcccgccagagtcgacagctacctagaatcggctatccaggcattcgatgcaccttggccagtcataagagcaaacgcagtttgtttggtgagttgcatgctatcctttttggatgatcagcgattcattgctccttatttctcccaggtatttgctacgttggttggtagaatgagccaatcgccagacgcaattgttcgagcatcagcatcgtctgcgctgggcattctgatcaagagatctaacatgctgaggtcactggtttcacgatatgatcgagcagattcatcacgcaattcccagagcggtgattctaacaccaagacaccatcagagtttcaagaacaggcagaaggaaatccgaatgatggcgcaagtggagcggcaataaaggggactgaagccgatcactgatgtaaatttactcgtatatacgtatagtgttctagctatgcatgcttgtgtatatgctgtacttccctcgcaaataggaacaggagagcaaatttatgctgccatgtcaatagatcttcagtacacctgtaaagcaaccactcacagttagatgattatttattgaatcaaatattatttatatattgaattgaattttcttcgatgcagtatgtcgaatcttc

SEQ ID NO: 336 - DNA, 4264 bp, Zea Mays
atgactaacatggtggatttgtttgctcgtttggttgtgcttctgcataatccacttgctaggggtcaactggccacccagatcctgacgggtgagtggaggagaagattggaatgacacaatgcgttgggagaggaggacgcggaccttctaggttccctgtgccggcgctgtgcccagccaggatgacccaagatgatcccgccctaaggaggatctttatttcttggatcctaatacaaactacagcctgcgcctttatagaggcaggcgacttacaactcaagaaaacaagcagatatcttaaggaactaatctgctattatttggcaactaactagctaaggaaactaagcagatatcttaaagaactaatctgctattatttggcaaccaactagctaaggaaactaagtatccctgatttgtagccacggttgtttcctgccccttttctccttatttgctgattgtctttccttaactgtccctgctggcattcggtcccttagcggcccttctccttgaatactggcgcccccacaaaggttctgtgctacttgggtccacttttccccagaaacctttctttattttggcaagatgaggtccctaagatgaaagcttacatcagtgatcctgaagacctaaagcaagatagcacataccaggaaaaatgggatgacatgataataaattttttggcagaatgtttggatgttgtgaatgatactgagtgggtcatttctttgggtgatgcatttgcacggcagtatgatctgtattctatatctgacggacacgctgctttgctgcacagatgcttgggaatgcttcttcagaaggttgatgataggatttatgtcagcgagaagattgattggatgtgtagacactcaagtatgtctattcctattaatcgccttggacttgctcaaggcatcgggctggttgcggcttctcatttagatacagtgttggagaaactgaagaacatactagatagtgcagagcaaagtgctttccagaggttcctctcatttttctcattcggcccaaaagtggaagatgttgatgacacatatgcagcattggcgttgatgtatggttatgccgcaagatatgctccatcaactgttattgaagccagaattaatgcacttgtggggagtaatatgcttggaaggttgcttcatgttcagcatcctactgcaaagcaagctgtgattactgcaatcgaccttttaggtcgagctgttattagtgctgctgaaatgggaatctcattcccactgaaacgaagagatcagttactggagtacgttttaactctaatgggtagggatcaaagtaatgatctcactgatttcaacactgagcttttgcacacacagagccttgctttaagtgcctgtactactcttgtctcgctagaaccaagattgccaatggaaacaagaaaccgtgtcatgaaggcaacattaggtttttttgctttgccaacagagccctcaagcattgttgagagtctcgtaacaaacctaattattctgttaggtgccatcctgcttacaagtggtgaagatggtcgaagtcgagcagagcagttgctgcatattcttaggcagcttgatccatatgtatcatcatctctggaacaccaaagaagaagaggatgtgttgctgtacaggaggtgttaataaagtttcgcaatctttgttctggtggattcggtgcattgggctcctatccaactttcacaatgaataaacaaatcgatcgagggactaggagcttgtcaagtttgccatctgcatttgtgttgcctagtcgagattctttaagcttgggagagaggacaatggcataccttcctcgttgtgctgatacagacacggaagttaggaaagttgcaattcagatcattgcacttttcttcgacatttcattgtcacttccaaagcagaaggcatatcctaatgatattgatctggaatcctcgtatagtgctttgtcctcccttgaggagttagtctctattgtcagaagggaggcatctgttgatcaaactgaactatttcagagggttgtatcctcagtgtgtattctattatcaaaggatgagctggtcgtcttgctacactcttgtacgttggcaacatgtgataagataaaacagtcagcagatgcttcaattcaagctattatcatgtttattatcagaagaggcaaggagctacgtgaagctgatgtctcgaggacaactcaatctttgctctcatctgctatttctcttactgacacacactcacgccaagaggttctgaatgctatatcatgcctagcagaaaacaccaatcacgttgtggtctttgatgaggttctatctgtggctggaaaagatatctgtacaaaagacataccaaggattcgtggaggctgggccatacaggatgttttttatgcattttcccagcacaaggagcttgcacttctattcctggagtacactttatctatacttcacaaagaacctgtcataataaacagttctgagaagggggagagtacctctgagtcattggctgatgactgtattctacaggcaactatgtttgctctcaatgcatttatgagaggtggtgggaagattgggaaacaagcagttgagaaaagttacccttctgttctttcgggccttatactgaagctcggaagtcttaatggtgttgctgaattgggccgaaatgaacttctacgatcgttgttaattgcatttcagtcattttgcgaatgtgttggtgatgtagaaatgggaaagctattagctcgagatggggaacaaactgagaaggacaaatggatcgagcttgttcaggaaatcgcatgcagttcctcagtaaaacgaccaaaagatgttctgccaacttgtgttatcttgtgtaatgctctcaaccgaaatcagagggctgaaagggaggctgctgctgctgcactatcagaatttatccaccacattgaaaaagaacctacattgcttgaacaaatggttgaggaaatgtgtcaacatgtttctgatgattcaccaactgtcaggagcctctgtttgcgtggacttgtgcaggctcctgagagccacatgcttaaatacatccagcaagtgttaggagtaatattagcacttcttgaagaccccaacgagtctgttcaattaactgctgtccaatgcttgttaaatgtccttaatttgtcagaacaagatgctgttggtccaatcttaataaatctcttagtaaggctgcgaaatcttcaggtctcaatgaatacgaaaatgaggtccaatgcgtttgcagcttatggtgctttaagtgcatatggtgttggtttgcagcgcactgcttttattgagcagatacatgctacccttccccgtctgatcctccatcttcacgatgatgacctaagtgttcgtcttgcctgtcggaacacattccagctccttgcgacattgatggaagtagagggcttgtctgtgctcctcagcaagcagtattttgcttctgatcgccgttctgactatgaggacttcattagagacttaacaagacaactttgtcggttgtctcccgccagagtcgacagctacctagaatcggctatccaggcattcgatgcaccttggccagtcataagagcaaacgcagtttgtttggtgagttgcatgctatcctttttggatgatcagcgattcattgctccttatttctcccaggtatttgctacgttggttggtagaatgagccaatcgccagacgcaattgttcgagcatcagcatcgtctgcgctgggcattctgatcaagagatctaacatgctgaggtcactggtttcacgatatgatcgagcagattcatcacgcaattcccagagcggtgattctaacaccaagacaccatcagagtttcaagaacaggcagaaggaaatccgaatgatggcgcaagtggagcggcaataaaggggactgaagccgatcactgatgtaaatttactcgtatatacgtatagtgttctagctatgcatgcttgtgtatatgctgtacttccctcgcaaataggaacaggagagcaaatttatgctgccatgtcaatagatcttcagtacacctgtaaagcaaccactcacagttagatgattatttattgaatcaaatattatttatatattgaattgaattttcttcgatgcagtatgtcgaatcttc

SEQ ID NO: 337 - DNA, 3655 bp, Zea Mays
atgactaacatggtggatttgtttgctcgtttggttgtgcttctgcataatccacttgctaggggtcaactggccacccagatcctgacgagggagcttccccgagcactagagatatcctgcagcacatccaggaggatgctacgctgtggggtatggccggggctagagggcttaggggcatttggccttaagactaggagggcctgctgttgtgtcatagataagggatgagtgtgtttctgtatttgtgttttcgacctccgtaaggagtcgtttgtacccctgtctgttctcagacctatctctttcttaatataaattgtacgcagctctcctgcgtgtttcgaaaaaaaaacttcctcttaccctgaatttaagtaattccagtaatttctgattgaaggctcattaaaccagtcttgtttatactctttgggctcatgaagattgttcattaaaagaaacatttttaatatgtttatatttgccattgatattcactttacctttgtgtttgtgtaggttctgtgctacttgggtccacttttccccagaaacctttctttattttggcaagatgaggtccctaagatgaaagcttacatcagtgatcctgaagacctaaagcaagatagcacataccaggaaaaatgggatgacatgataataaattttttggcagaatgtttggatgttgtgaatgatactgagtgggtcatttctttgggtgatgcatttgcacggcagtatgatctgtattctatatctgacggacacgctgctttgctgcacagatgcttgggaatgcttcttcagaaggttgatgataggatttatgtcagcgagaagattgattggatgtgtagacactcaagtatgtctattcctattaatcgccttggacttgctcaaggcatcgggctggttgcggcttctcatttagatacagtgttggagaaactgaagaacatactagatagtgcagagcaaagtgctttccagaggttcctctcatttttctcattcggcccaaaagtggaagatgttgatgacacatatgcagcattggcgttgatgtatggttatgccgcaagatatgctccatcaactgttattgaagccagaattaatgcacttgtggggagtaatatgcttggaaggttgcttcatgttcagcatcctactgcaaagcaagctgtgattactgcaatcgaccttttaggtcgagctgttattagtgctgctgaaatgggaatctcattcccactgaaacgaagagatcagttactggagtacgttttaactctaatgggtagggatcaaagtaatgatctcactgatttcaacactgagcttttgcacacacagagccttgctttaagtgcctgtactactcttgtctcgctagaaccaagattgccaatggaaacaagaaaccgtgtcatgaaggcaacattaggtttttttgctttgccaacagagccctcaagcattgttgagagtctcgtaacaaacctaattattctgttaggtgccatcctgcttacaagtggtgaagatggtcgaagtcgagcagagcagttgctgcatattcttaggcagcttgatccatatgtatcatcatctctggaacaccaaagaagaagaggatgtgttgctgtacaggaggtgttaataaagtttcgcaatctttgttctggtggattcggtgcattgggctcctatccaactttcacaatgaataaacaaatcgatcgagggactaggagcttgtcaagtttgccatctgcatttgtgttgcctagtcgagattctttaagcttgggagagaggacaatggcataccttcctcgttgtgctgatacagacacggaagttaggaaagttgcaattcagatcattgcacttttcttcgacatttcattgtcacttccaaagcagaaggcatatcctaatgatattgatctggaatcctcgtatagtgctttgtcctcccttgaggagttagtctctattgtcagaagggaggcatctgttgatcaaactgaactatttcagagggttgtatcctcagtgtgtattctattatcaaaggatgagctggtcgtcttgctacactcttgtacgttggcaacatgtgataagataaaacagtcagcagatgcttcaattcaagctattatcatgtttattatcagaagaggcaaggagctacgtgaagctgatgtctcgaggacaactcaatctttgctctcatctgctatttctcttactgacacacactcacgccaagaggttctgaatgctatatcatgcctagcagaaaacaccaatcacgttgtggtctttgatgaggttctatctgtggctggaaaagatatctgtacaaaagacataccaaggattcgtggaggctgggccatacaggatgttttttatgcattttcccagcacaaggagcttgcacttctattcctggagtacactttatctatacttcacaaagaacctgtcataataaacagttctgagaagggggagagtacctctgagtcattggctgatgactgtattctacaggcaactatgtttgctctcaattaactgctgtccaatgcttgttaaatgtccttaatttgtcagaacaagatgctgttggtccaatcttaataaatctcttagtaaggctgcgaaatcttcaggtctcaatgaatacgaaaatgaggtccaatgcgtttgcagcttatggtgctttaagtgcatatggtgttggtttgcagcgcactgcttttattgagcagatacatgctacccttccccgtctgatcctccatcttcacgatgatgacctaagtgttcgtcttgcctgtcggaacacattccagctccttgcgacattgatggaagtagagggcttgtctgtgctcctcagcaagcagtattttgcttctgatcgccgttctgactatgaggacttcattagagacttaacaagacaactttgtcggttgtctcccgccagagtcgacagctacctagaatcggctatccaggcattcgatgcaccttggccagtcataagagcaaacgcagtttgtttggtgagttgcatgctatcctttttggatgatcagcgattcattgctccttatttctcccaggtatttgctacgttggttggtagaatgagccaatcgccagacgcaattgttcgagcatcagcatcgtctgcgctgggcattctgatcaagagatctaacatgctgaggtcactggtttcacgatatgatcgagcagattcatcacgcaattcccagagcggtgattctaacaccaagacaccatcagagtttcaagaacaggcagaaggaaatccgaatgatggcgcaagtggagcggcaataaaggggactgaagccgatcactgatgtaaatttactcgtatatacgtatagtgttctagctatgcatgcttgtgtatatgctgtacttccctcgcaaataggaacaggagagcaaatttatgctgccatgtcaatagatcttcagtacacctgtaaagcaaccactcacagttagatgattatttattgaatcaaatattatttatatattgaattgaattttcttcgatgcagtatgtcgaatcttc

SEQ ID NO: 338 - DNA, 3812 bp, Zea Mays
atgactaacatggtggatttgtttgctcgtttggttgtgcttctgcataatccacttgctaggggtcaactggccacccagatcctgacggttctgtgctacttgggtccacttttccccagaaacctttctttattttggcaagatgagtattaggtccctaagatgaaagcttacatcagtgatcctgaagacctaaagcaagatagcacataccaggaaaaatgggatgacatgataataaattttttggcagaatgtttggatgttgtgaatgatactgagtgggtcatttctttgggtgatgcatttgcacggcagtatgatctgtattctatatctgacggacacgctgctttgctgcacagatgcttgggaatgcttcttcagaaggttgatgataggatttatgtcagcgagaagattgattggatgtgtagacactcaagtatgtctattcctattaatcgccttggacttgctcaaggcatcgggctggttgcggcttctcatttagatacagtgttggagaaactgaagaacatactagatagtgcagagcaaagtgctttccagaggttcctctcatttttctcattcggcccaaaagtggaagatgttgatgacacatatgcagcattggcgttgatgtatggttatgccgcaagatatgctccatcaactgttattgaagccagaattaatgcacttgtggggagtaatatgcttggaaggttgcttcatgttcagcatcctactgcaaagcaagctgtgattactgcaatcgaccttttaggtcgagctgttattagtgctgctgaaatgggaatctcattcccactgaaacgaagagatcagttactggagtacgttttaactctaatgggtagggatcaaagtaatgatctcactgatttcaacactgagcttttgcacacacagagccttgctttaagtgcctgtactactcttgtctcgctagaaccaagattgccaatggaaacaagaaaccgtgtcatgaaggcaacattaggtttttttgctttgccaacagagccctcaagcattgttgagagtctcgtaacaaacctaattattctgttaggtgccatcctgcttacaagtggtgaagatggtcgaagtcgagcagagcagttgctgcatattcttaggcagcttgatccatatgtatcatcatctctggaacaccaaagaagaagaggatgtgttgctgtacaggaggtgttaataaagtttcgcaatctttgttctggtggattcggtgcattgggctcctatccaactttcacaatgaataaacaaatcgatcgagggactaggagcttgtcaagtttgccatctgcatttgtgttgcctagtcgagattctttaagcttgggagagaggacaatggcataccttcctcgttgtgctgatacagacacggaagttaggaaagttgcaattcagatcattgcacttttcttcgacatttcattgtcacttccaaagcagaaggcatatcctaatgatattgatctggaatcctcgtatagtgctttgtcctcccttgaggagttagtctctattgtcagaagggaggcatctgttgatcaaactgaactatttcagagggttgtatcctcagtgtgtattctattatcaaaggatgagctggtcgtcttgctacactcttgtacgttggcaacatgtgataagataaaacagtcagcagatgcttcaattcaagctattatcatgtttattatcagaagaggcaaggagctacgtgaagctgatgtctcgaggacaactcaatctttgctctcatctgctatttctcttactgacacacactcacgccaagaggttctgaatgctatatcatgcctagcagaaaacaccaatcacgttgtggtctttgatgaggttctatctgtggctggaaaagatatctgtacaaaagacataccaaggattcgtggaggctgggccatacaggatgttttttatgcattttcccagcacaaggagcttgcacttctattcctggagtacactttatctatacttcacaaagaacctgtcataataaacagttctgagaagggggagagtacctctgagtcattggctgatgactgtattctacaggcaactatgtttgctctcaatgcatttatgagaggtggtgggaagattgggaaacaagcagttgagaaaagttacccttctgttctttcgggccttatactgaagctcggaagtcttaatggtgttgctgaattgggccgaaatgaacttctacgatcgttgttaattgcatttcagtcattttgcgaatgtgttggtgatgtagaaatgggaaagctattagctcgagatggggaacaaactgagaaggacaaatggatcgagcttgttcaggaaatcgcatgcagttcctcagtaaaacgaccaaaagatgttctgccaacttgtgttatcttgtgtaatgctctcaaccgaaatcagagggctgaaagggaggctgctgctgctgcactatcagaatttatccaccacattgaaaaagaacctacattgcttgaacaaatggttgaggaaatgtgtcaacatgtttctgatgattcaccaactgtcaggagcctctgtttgcgtggacttgtgcaggctcctgagagccacatgcttaaatacatccagcaagtgttaggagtaatattagcacttcttgaagaccccaacgagtctgttcaattaactgctgtccaatgcttgttaaatgtccttaatttgtcagaacaagatgctgttggtccaatcttaataaatctcttagtaaggctgcgaaatcttcaggtctcaatgaatacgaaaatgaggtccaatgcgtttgcagcttatggtgctttaagtgcatatggtgttggtttgcagcgcactgcttttattgagcagatacatgctacccttccccgtctgatcctccatcttcacgatgatgacctaagtgttcgtcttgcctgtcggaacacattccagctccttgcgacattgatggaagtagagggcttgtctgtgctcctcagcaagcagtattttgcttctgatcgccgttctgactatgaggacttcattagagacttaacaagacaactttgtcggttgtctcccgccagagtcgacagctacctagaatcggctatccaggcattcgatgcaccttggccagtcataagagcaaacgcagtttgtttggtgagttgcatgctatcctttttggatgatcagcgattcattgctccttatttctcccaggtatttgctacgttggttggtagaatgagccaatcgccagacgcaattgttcgagcatcagcatcgtctgcgctgggcattctgatcaagagatctaacatgctgaggtcactggtttcacgatatgatcgagcagattcatcacgcaattcccagagcggtgattctaacaccaagacaccatcagagtttcaagaacaggcagaaggaaatccgaatgatggcgcaagtggagcggcaataaaggggactgaagccgatcactgatgtaaatttactcgtatatacgtatagtgttctagctatgcatgcttgtgtatatgctgtacttccctcgcaaataggaacaggagagcaaatttatgctgccatgtcaatagatcttcagtacacctgtaaagcaaccactcacagttagatgattatttattgaatcaaatattatttatatattgaattgaattttcttcgatgcagtatgtcgaatcttc

SEQ ID NO: 339 - DNA, 3875 bp, Zea Mays
actgaattgtgcaggcataaattttcacatacaaacccactatatactgaatttaatgcctccaacgaaacccccaatcctgaggatttgtttgctcgtttggttgtgcttctgcataatccacttgctaggggtcaactggccacccagatcctgacggttctgtgctacttgggtccacttttccccagaaacctttctttattttggcaagatgaggtccctaagatgaaagcttacatcagtgatcctgaagacctaaagcaagatagcacataccaggaaaaatgggatgacatgataataaattttttggcagaatgtttggatgttgtgaatgatactgagtgggtcatttctttgggtgatgcatttgcacggcagtatgatctgtattctatatctgacggacacgctgctttgctgcacagatgcttgggaatgcttcttcagaaggttgatgataggatttatgtcagcgagaagattgattggatgtgtagacactcaagtatgtctattcctattaatcgccttggacttgctcaaggcatcgggctggttgcggcttctcatttagatacagtgttggagaaactgaagaacatactagatagtgcagagcaaagtgctttccagaggttcctctcatttttctcattcggcccaaaagtggaagatgttgatgacacatatgcagcattggcgttgatgtatggttatgccgcaagatatgctccatcaactgttattgaagccagaattaatgcacttgtggggagtaatatgcttggaaggttgcttcatgttcagcatcctactgcaaagcaagctgtgattactgcaatcgaccttttaggtcgagctgttattagtgctgctgaaatgggaatctcattcccactgaaacgaagagatcagttactggagtacgttttaactctaatgggtagggatcaaagtaatgatctcactgatttcaacactgagcttttgcacacacagagccttgctttaagtgcctgtactactcttgtctcgctagaaccaagattgccaatggaaacaagaaaccgtgtcatgaaggcaacattaggtttttttgctttgccaacagagccctcaagcattgttgagagtctcgtaacaaacctaattattctgttaggtgccatcctgcttacaagtggtgaagatggtcgaagtcgagcagagcagttgctgcatattcttaggcagcttgatccatatgtatcatcatctctggaacaccaaagaagaagaggatgtgttgctgtacaggaggtgttaataaagtttcgcaatctttgttctggtggattcggtgcattgggctcctatccaactttcacaatgaataaacaaatcgatcgagggactaggagcttgtcaagtttgccatctgcatttgtgttgcctagtcgagattctttaagcttgggagagaggacaatggcataccttcctcgttgtgctgatacagacacggaagttaggaaagttgcaattcagatcattgcacttttcttcgacatttcattgtcacttccaaagcagaaggcatatcctaatgatattgatctggaatcctcgtatagtgctttgtcctcccttgaggagttagtctctattgtcagaagggaggcatctgttgatcaaactgaactatttcagagggttgtatcctcagtgtgtattctattatcaaaggatgagctggtcgtcttgctacactcttgtacgttggcaacatgtgataagataaaacagtcagcagatgcttcaattcaagctattatcatgtttattatcagaagaggcaaggagctacgtgaagctgatgtctcgaggacaactcaatctttgctctcatctgctatttctcttactgacacacactcacgccaagaggttctgaatgctatatcatgcctagcagaaaacaccaatcacgttgtggtctttgatgaggttctatctgtggctggaaaagatatctgtacaaaagacataccaaggattcgtggaggctgggccatacaggatgttttttatgcattttcccagcacaaggagcttgcacttctattcctggagtacactttatctatacttcacaaagaacctgtcataataaacagttctgagaagggggagagtacctctgagtcattggctgatgactgtattctacaggcaactatgtttgctctcaatgcatttatgagaggtggtgggaagattgggaaacaagcagttgagaaaagttacccttctgttctttcgggccttatactgaagctcggaagtcttaatggtgttgctgaattgggccgaaatgaacttctacgatcgttgttaattgcatttcagtcattttgcgaatgtgttggtgatgtagaaatgggaaagctattagctcgagatggggaacaaactgagaaggacaaatggatcgagcttgttcaggaaatcgcatgcagttcctcagtaaaacgaccaaaagatgttctgccaacttgtgttatcttgtgtaatgctctcaaccgaaatcagagggctgaaagggaggctgctgctgctgcactatcagaatttatccaccacattgaaaaagaacctacattgcttgaacaaatggttgaggaaatgtgtcaacatgtttctgatgattcaccaactgtcaggagcctctgtttgcgtggacttgtgcaggctcctgagagccacatgcttaaatacatccagcaagtgttaggagtaatattagcacttcttgaagaccccaacgagtctgttcaattaactgctgtccaatgcttgttaaatgtccttaatttgtcagaacaagatgctgttggtccaatcttaataaatctcttagtaaggctgcgaaatcttcaggtctcaatgaatacgaaaatgaggtccaatgcgtttgcagcttatggtgctttaagtgcatatggtgttggtttgcagcgcactgcttttattgagcagatacatgctacccttccccgtctgatcctccatcttcacgatgatgacctaagtgttcgtcttgcctgtcggaacacattccagctccttgcgacattgatggaagtagagggcttgtctgtgctcctcagcaagcagtattttgcttctgatcgccgttctgactatgaggacttcattagagacttaacaagacaactttgtcggttgtctcccgccagagtcgacagctacctagaatcggctatccaggcattcgatgcaccttggccagtcataagagcaaacgcagtttgtttggtgagttgcatgctatcctttttggatgatcagcgattcattgctccttatttctcccaggtatttgctacgttggttggtagaatgagccaatcgccagacgcaattgttcgagcatcagcatcgtctgcgctgggcattctgatcaagagatctaacatgctgaggtcactggtttcacgatatgatcgagcagattcatcacgcaattcccagagcggtgattctaacaccaagacaccatcagagtttcaagaacaggcagaaggaaatccgaatgatggcgcaagtggagcggcaataaaggggactgaagccgatcactgatgtaaatttactcgtatatacgtatagtgttctagctatgcatgcttgtgtatatgctgtacttccctcgcaaataggaacaggagagcaaatttatgctgccatgtcaatagatcttcagtacacctgtaaagcaaccactcacagttagatgattatttattgaatcaaatattatttatatattgaattgaattttcttcgatgcagtatgtcgaatcttc

SEQ ID NO: 340 - DNA, 3880 bp, Zea Mays
ctgaattgtgcaggcataaattttcacatacaaacccactatatactgaatttaatgcctccaacgaaacccccaatcctgaggatttgtttgctcgtttggttgtgcttctgcataatccacttgctaggggtcaactggccacccagatcctgacggttctgtgctacttgggtccacttttccccagaaacctttctttattttggcaagatgagtattaggtccctaagatgaaagcttacatcagtgatcctgaagacctaaagcaagatagcacataccaggaaaaatgggatgacatgataataaattttttggcagaatgtttggatgttgtgaatgatactgagtgggtcatttctttgggtgatgcatttgcacggcagtatgatctgtattctatatctgacggacacgctgctttgctgcacagatgcttgggaatgcttcttcagaaggttgatgataggatttatgtcagcgagaagattgattggatgtgtagacactcaagtatgtctattcctattaatcgccttggacttgctcaaggcatcgggctggttgcggcttctcatttagatacagtgttggagaaactgaagaacatactagatagtgcagagcaaagtgctttccagaggttcctctcatttttctcattcggcccaaaagtggaagatgttgatgacacatatgcagcattggcgttgatgtatggttatgccgcaagatatgctccatcaactgttattgaagccagaattaatgcacttgtggggagtaatatgcttggaaggttgcttcatgttcagcatcctactgcaaagcaagctgtgattactgcaatcgaccttttaggtcgagctgttattagtgctgctgaaatgggaatctcattcccactgaaacgaagagatcagttactggagtacgttttaactctaatgggtagggatcaaagtaatgatctcactgatttcaacactgagcttttgcacacacagagccttgctttaagtgcctgtactactcttgtctcgctagaaccaagattgccaatggaaacaagaaaccgtgtcatgaaggcaacattaggtttttttgctttgccaacagagccctcaagcattgttgagagtctcgtaacaaacctaattattctgttaggtgccatcctgcttacaagtggtgaagatggtcgaagtcgagcagagcagttgctgcatattcttaggcagcttgatccatatgtatcatcatctctggaacaccaaagaagaagaggatgtgttgctgtacaggaggtgttaataaagtttcgcaatctttgttctggtggattcggtgcattgggctcctatccaactttcacaatgaataaacaaatcgatcgagggactaggagcttgtcaagtttgccatctgcatttgtgttgcctagtcgagattctttaagcttgggagagaggacaatggcataccttcctcgttgtgctgatacagacacggaagttaggaaagttgcaattcagatcattgcacttttcttcgacatttcattgtcacttccaaagcagaaggcatatcctaatgatattgatctggaatcctcgtatagtgctttgtcctcccttgaggagttagtctctattgtcagaagggaggcatctgttgatcaaactgaactatttcagagggttgtatcctcagtgtgtattctattatcaaaggatgagctggtcgtcttgctacactcttgtacgttggcaacatgtgataagataaaacagtcagcagatgcttcaattcaagctattatcatgtttattatcagaagaggcaaggagctacgtgaagctgatgtctcgaggacaactcaatctttgctctcatctgctatttctcttactgacacacactcacgccaagaggttctgaatgctatatcatgcctagcagaaaacaccaatcacgttgtggtctttgatgaggttctatctgtggctggaaaagatatctgtacaaaagacataccaaggattcgtggaggctgggccatacaggatgttttttatgcattttcccagcacaaggagcttgcacttctattcctggagtacactttatctatacttcacaaagaacctgtcataataaacagttctgagaagggggagagtacctctgagtcattggctgatgactgtattctacaggcaactatgtttgctctcaatgcatttatgagaggtggtgggaagattgggaaacaagcagttgagaaaagttacccttctgttctttcgggccttatactgaagctcggaagtcttaatggtgttgctgaattgggccgaaatgaacttctacgatcgttgttaattgcatttcagtcattttgcgaatgtgttggtgatgtagaaatgggaaagctattagctcgagatggggaacaaactgagaaggacaaatggatcgagcttgttcaggaaatcgcatgcagttcctcagtaaaacgaccaaaagatgttctgccaacttgtgttatcttgtgtaatgctctcaaccgaaatcagagggctgaaagggaggctgctgctgctgcactatcagaatttatccaccacattgaaaaagaacctacattgcttgaacaaatggttgaggaaatgtgtcaacatgtttctgatgattcaccaactgtcaggagcctctgtttgcgtggacttgtgcaggctcctgagagccacatgcttaaatacatccagcaagtgttaggagtaatattagcacttcttgaagaccccaacgagtctgttcaattaactgctgtccaatgcttgttaaatgtccttaatttgtcagaacaagatgctgttggtccaatcttaataaatctcttagtaaggctgcgaaatcttcaggtctcaatgaatacgaaaatgaggtccaatgcgtttgcagcttatggtgctttaagtgcatatggtgttggtttgcagcgcactgcttttattgagcagatacatgctacccttccccgtctgatcctccatcttcacgatgatgacctaagtgttcgtcttgcctgtcggaacacattccagctccttgcgacattgatggaagtagagggcttgtctgtgctcctcagcaagcagtattttgcttctgatcgccgttctgactatgaggacttcattagagacttaacaagacaactttgtcggttgtctcccgccagagtcgacagctacctagaatcggctatccaggcattcgatgcaccttggccagtcataagagcaaacgcagtttgtttggtgagttgcatgctatcctttttggatgatcagcgattcattgctccttatttctcccaggtatttgctacgttggttggtagaatgagccaatcgccagacgcaattgttcgagcatcagcatcgtctgcgctgggcattctgatcaagagatctaacatgctgaggtcactggtttcacgatatgatcgagcagattcatcacgcaattcccagagcggtgattctaacaccaagacaccatcagagtttcaagaacaggcagaaggaaatccgaatgatggcgcaagtggagcggcaataaaggggactgaagccgatcactgatgtaaatttactcgtatatacgtatagtgttctagctatgcatgcttgtgtatatgctgtacttccctcgcaaataggaacaggagagcaaatttatgctgccatgtcaatagatcttcagtacacctgtaaagcaaccactcacagttagatgattatttattgaatcaaatattatttatatattgaattgaattttcttcgatgcagtatgtcgaatcttc

SEQ ID NO: 341 - DNA, 3761 bp, Zea Mays
tagcggcccttctccttgaatactggcgcccccacaaaggttctgtgctacttgggtccacttttccccagaaacctttctttattttggcaagatgagtattaggtccctaagatgaaagcttacatcagtgatcctgaagacctaaagcaagatagcacataccaggaaaaatgggatgacatgataataaattttttggcagaatgtttggatgttgtgaatgatactgagtgggtcatttctttgggtgatgcatttgcacggcagtatgatctgtattctatatctgacggacacgctgctttgctgcacagatgcttgggaatgcttcttcagaaggttgatgataggatttatgtcagcgagaagattgattggatgtgtagacactcaagtatgtctattcctattaatcgccttggacttgctcaaggcatcgggctggttgcggcttctcatttagatacagtgttggagaaactgaagaacatactagatagtgcagagcaaagtgctttccagaggttcctctcatttttctcattcggcccaaaagtggaagatgttgatgacacatatgcagcattggcgttgatgtatggttatgccgcaagatatgctccatcaactgttattgaagccagaattaatgcacttgtggggagtaatatgcttggaaggttgcttcatgttcagcatcctactgcaaagcaagctgtgattactgcaatcgaccttttaggtcgagctgttattagtgctgctgaaatgggaatctcattcccactgaaacgaagagatcagttactggagtacgttttaactctaatgggtagggatcaaagtaatgatctcactgatttcaacactgagcttttgcacacacagagccttgctttaagtgcctgtactactcttgtctcgctagaaccaagattgccaatggaaacaagaaaccgtgtcatgaaggcaacattaggtttttttgctttgccaacagagccctcaagcattgttgagagtctcgtaacaaacctaattattctgttaggtgccatcctgcttacaagtggtgaagatggtcgaagtcgagcagagcagttgctgcatattcttaggcagcttgatccatatgtatcatcatctctggaacaccaaagaagaagaggatgtgttgctgtacaggaggtgttaataaagtttcgcaatctttgttctggtggattcggtgcattgggctcctatccaactttcacaatgaataaacaaatcgatcgagggactaggagcttgtcaagtttgccatctgcatttgtgttgcctagtcgagattctttaagcttgggagagaggacaatggcataccttcctcgttgtgctgatacagacacggaagttaggaaagttgcaattcagatcattgcacttttcttcgacatttcattgtcacttccaaagcagaaggcatatcctaatgatattgatctggaatcctcgtatagtgctttgtcctcccttgaggagttagtctctattgtcagaagggaggcatctgttgatcaaactgaactatttcagagggttgtatcctcagtgtgtattctattatcaaaggatgagctggtcgtcttgctacactcttgtacgttggcaacatgtgataagataaaacagtcagcagatgcttcaattcaagctattatcatgtttattatcagaagaggcaaggagctacgtgaagctgatgtctcgaggacaactcaatctttgctctcatctgctatttctcttactgacacacactcacgccaagaggttctgaatgctatatcatgcctagcagaaaacaccaatcacgttgtggtctttgatgaggttctatctgtggctggaaaagatatctgtacaaaagacataccaaggattcgtggaggctgggccatacaggatgttttttatgcattttcccagcacaaggagcttgcacttctattcctggagtacactttatctatacttcacaaagaacctgtcataataaacagttctgagaagggggagagtacctctgagtcattggctgatgactgtattctacaggcaactatgtttgctctcaatgcatttatgagaggtggtgggaagattgggaaacaagcagttgagaaaagttacccttctgttctttcgggccttatactgaagctcggaagtcttaatggtgttgctgaattgggccgaaatgaacttctacgatcgttgttaattgcatttcagtcattttgcgaatgtgttggtgatgtagaaatgggaaagctattagctcgagatggggaacaaactgagaaggacaaatggatcgagcttgttcaggaaatcgcatgcagttcctcagtaaaacgaccaaaagatgttctgccaacttgtgttatcttgtgtaatgctctcaaccgaaatcagagggctgaaagggaggctgctgctgctgcactatcagaatttatccaccacattgaaaaagaacctacattgcttgaacaaatggttgaggaaatgtgtcaacatgtttctgatgattcaccaactgtcaggagcctctgtttgcgtggacttgtgcaggctcctgagagccacatgcttaaatacatccagcaagtgttaggagtaatattagcacttcttgaagaccccaacgagtctgttcaattaactgctgtccaatgcttgttaaatgtccttaatttgtcagaacaagatgctgttggtccaatcttaataaatctcttagtaaggctgcgaaatcttcaggtctcaatgaatacgaaaatgaggtccaatgcgtttgcagcttatggtgctttaagtgcatatggtgttggtttgcagcgcactgcttttattgagcagatacatgctacccttccccgtctgatcctccatcttcacgatgatgacctaagtgttcgtcttgcctgtcggaacacattccagctccttgcgacattgatggaagtagagggcttgtctgtgctcctcagcaagcagtattttgcttctgatcgccgttctgactatgaggacttcattagagacttaacaagacaactttgtcggttgtctcccgccagagtcgacagctacctagaatcggctatccaggcattcgatgcaccttggccagtcataagagcaaacgcagtttgtttggtgagttgcatgctatcctttttggatgatcagcgattcattgctccttatttctcccaggtatttgctacgttggttggtagaatgagccaatcgccagacgcaattgttcgagcatcagcatcgtctgcgctgggcattctgatcaagagatctaacatgctgaggtcactggtttcacgatatgatcgagcagattcatcacgcaattcccagagcggtgattctaacaccaagacaccatcagagtttcaagaacaggcagaaggaaatccgaatgatggcgcaagtggagcggcaataaaggggactgaagccgatcactgatgtaaatttactcgtatatacgtatagtgttctagctatgcatgcttgtgtatatgctgtacttccctcgcaaataggaacaggagagcaaatttatgctgccatgtcaatagatcttcagtacacctgtaaagcaaccactcacagttagatgattatttattgaatcaaatattatttatatattgaattgaattttcttcgatgcagtatgtcgaatcttc

SEQ ID NO: 342 - DNA, 2918 bp, Zea Mays
actggcgcccccacaaaggttctgtgctacttgggtccacttttccccagaaacctttctttattttggcaagatgagtattaggtccctaagatgaaagcttacatcagtgatcctgaagacctaaagcaagatagcacataccaggaaaaatgggatgacatgataataaattttttggcagaatgtttggatgttgtgaatgatactgagtgggtcatttctttgggtgatgcatttgcacggcagtatgatctgtattctatatctgacggacacgctgctttgctgcacagatgcttgggaatgcttcttcagaaggttgatgataggatttatgtcagcgagaagattgattggatgtgtagacactcaagtatgtctattcctattaatcgccttggacttgctcaaggcatcgggctggttgcggcttctcatttagatacagtgttggagaaactgaagaacatactagatagtgcagagcaaagtgctttccagaggttcctctcatttttctcattcggcccaaaagtggaagatgttgatgacacatatgcagcattggcgttgatgtatggttatgccgcaagatatgctccatcaactgttattgaagccagaattaatgcacttgtggggagtaatatgcttggaaggttgcttcatgttcagcatcctactgcaaagcaagctgtgattactgcaatcgaccttttaggtcgagctgttattagtgctgctgaaatgggaatctcattcccactgaaacgaagagatcagttactggagtacgttttaactctaatgggtagggatcaaagtaatgatctcactgatttcaacactgagcttttgcacacacagagccttgctttaagtgcctgtactactcttgtctcgctagaaccaagattgccaatggaaacaagaaaccgtgtcatgaaggcaacattaggtttttttgctttgccaacagagccctcaagcattgttgagagtctcgtaacaaacctaattattctgttaggtgccatcctgcttacaagctgcatttgtgttgcctagtcgagattctttaagcttgggagagaggacaatggcataccttcctcgttgtgctgatacagacacggaagttaggaaagttgcaattcagatcattgcacttttcttcgacatttcattgtcacttccaaagcagaaggcatatcctaatgatattgatctggaatcctcgtatagtgctttgtcctcccttgaggagttagtctctattgtcagaagggaggcatctgttgatcaaactgaactatttcagagggttgtatcctcagtgtgtattctattatcaaaggatgagctggtcgtcttgctacactcttgtacgttggcaacatgtgataagataaaacagtcagcagatgcttcaattcaagctattatcatgtttattatcagaagaggcaaggagctacgtgaagctgatgtctcgaggacaactcaatctttgctctcatctgctatttctcttactgacacacactcacgccaagaggttctgaatgctatatcatgcctagcagaaaacaccaatcacgttgtggtctttgatgaggttctatctgtggctggaaaagatatctgtacaaaagacataccaaggattcgtggaggctgggccatacaggatgttttttatgcattttcccagcacaaggagcttgcacttctattcctggagtacactttatctatacttcacaaagaacctgtcataataaacagttctgagaagggggagagtacctctgagtcattggctgatgactgtattctacaggcaactatgtttgctctcaattaactgctgtccaatgcttgttaaatgtccttaatttgtcagaacaagatgctgttggtccaatcttaataaatctcttagtaaggctgcgaaatcttcaggtctcaatgaatacgaaaatgaggtccaatgcgtttgcagcttatggtgctttaagtgcatatggtgttggtttgcagcgcactgcttttattgagcagatacatgctacccttccccgtctgatcctccatcttcacgatgatgacctaagtgttcgtcttgcctgtcggaacacattccagctccttgcgacattgatggaagtagagggcttgtctgtgctcctcagcaagcagtattttgcttctgatcgccgttctgactatgaggacttcattagagacttaacaagacaactttgtcggttgtctcccgccagagtcgacagctacctagaatcggctatccaggcattcgatgcaccttggccagtcataagagcaaacgcagtttgtttggtgagttgcatgctatcctttttggatgatcagcgattcattgctccttatttctcccaggtatttgctacgttggttggtagaatgagccaatcgccagacgcaattgttcgagcatcagcatcgtctgcgctgggcattctgatcaagagatctaacatgctgaggtcactggtttcacgatatgatcgagcagattcatcacgcaattcccagagcggtgattctaacaccaagacaccatcagagtttcaagaacaggcagaaggaaatccgaatgatggcgcaagtggagcggcaataaaggggactgaagccgatcactgatgtaaatttactcgtatatacgtatagtgttctagctatgcatgcttgtgtatatgctgtacttccctcgcaaataggaacaggagagcaaatttatgctgccatgtcaatagatcttcagtacacctgtaaagcaaccactcacagttagatgattatttattgaatcaaatattatttatatattgaattgaattttcttcgatgcagtatgtcgaatcttc

SEQ ID NO: 343 - DNA, 3684 bp, Zea Mays
tgcatcttgcaactcttgtgaatttccggtccctaagatgaaagcttacatcagtgatcctgaagacctaaagcaagatagcacataccaggaaaaatgggatgacatgataataaattttttggcagaatgtttggatgttgtgaatgatactgagtgggtcatttctttgggtgatgcatttgcacggcagtatgatctgtattctatatctgacggacacgctgctttgctgcacagatgcttgggaatgcttcttcagaaggttgatgataggatttatgtcagcgagaagattgattggatgtgtagacactcaagtatgtctattcctattaatcgccttggacttgctcaaggcatcgggctggttgcggcttctcatttagatacagtgttggagaaactgaagaacatactagatagtgcagagcaaagtgctttccagaggttcctctcatttttctcattcggcccaaaagtggaagatgttgatgacacatatgcagcattggcgttgatgtatggttatgccgcaagatatgctccatcaactgttattgaagccagaattaatgcacttgtggggagtaatatgcttggaaggttgcttcatgttcagcatcctactgcaaagcaagctgtgattactgcaatcgaccttttaggtcgagctgttattagtgctgctgaaatgggaatctcattcccactgaaacgaagagatcagttactggagtacgttttaactctaatgggtagggatcaaagtaatgatctcactgatttcaacactgagcttttgcacacacagagccttgctttaagtgcctgtactactcttgtctcgctagaaccaagattgccaatggaaacaagaaaccgtgtcatgaaggcaacattaggtttttttgctttgccaacagagccctcaagcattgttgagagtctcgtaacaaacctaattattctgttaggtgccatcctgcttacaagtggtgaagatggtcgaagtcgagcagagcagttgctgcatattcttaggcagcttgatccatatgtatcatcatctctggaacaccaaagaagaagaggatgtgttgctgtacaggaggtgttaataaagtttcgcaatctttgttctggtggattcggtgcattgggctcctatccaactttcacaatgaataaacaaatcgatcgagggactaggagcttgtcaagtttgccatctgcatttgtgttgcctagtcgagattctttaagcttgggagagaggacaatggcataccttcctcgttgtgctgatacagacacggaagttaggaaagttgcaattcagatcattgcacttttcttcgacatttcattgtcacttccaaagcagaaggcatatcctaatgatattgatctggaatcctcgtatagtgctttgtcctcccttgaggagttagtctctattgtcagaagggaggcatctgttgatcaaactgaactatttcagagggttgtatcctcagtgtgtattctattatcaaaggatgagctggtcgtcttgctacactcttgtacgttggcaacatgtgataagataaaacagtcagcagatgcttcaattcaagctattatcatgtttattatcagaagaggcaaggagctacgtgaagctgatgtctcgaggacaactcaatctttgctctcatctgctatttctcttactgacacacactcacgccaagaggttctgaatgctatatcatgcctagcagaaaacaccaatcacgttgtggtctttgatgaggttctatctgtggctggaaaagatatctgtacaaaagacataccaaggattcgtggaggctgggccatacaggatgttttttatgcattttcccagcacaaggagcttgcacttctattcctggagtacactttatctatacttcacaaagaacctgtcataataaacagttctgagaagggggagagtacctctgagtcattggctgatgactgtattctacaggcaactatgtttgctctcaatgcatttatgagaggtggtgggaagattgggaaacaagcagttgagaaaagttacccttctgttctttcgggccttatactgaagctcggaagtcttaatggtgttgctgaattgggccgaaatgaacttctacgatcgttgttaattgcatttcagtcattttgcgaatgtgttggtgatgtagaaatgggaaagctattagctcgagatggggaacaaactgagaaggacaaatggatcgagcttgttcaggaaatcgcatgcagttcctcagtaaaacgaccaaaagatgttctgccaacttgtgttatcttgtgtaatgctctcaaccgaaatcagagggctgaaagggaggctgctgctgctgcactatcagaatttatccaccacattgaaaaagaacctacattgcttgaacaaatggttgaggaaatgtgtcaacatgtttctgatgattcaccaactgtcaggagcctctgtttgcgtggacttgtgcaggctcctgagagccacatgcttaaatacatccagcaagtgttaggagtaatattagcacttcttgaagaccccaacgagtctgttcaattaactgctgtccaatgcttgttaaatgtccttaatttgtcagaacaagatgctgttggtccaatcttaataaatctcttagtaaggctgcgaaatcttcaggtctcaatgaatacgaaaatgaggtccaatgcgtttgcagcttatggtgctttaagtgcatatggtgttggtttgcagcgcactgcttttattgagcagatacatgctacccttccccgtctgatcctccatcttcacgatgatgacctaagtgttcgtcttgcctgtcggaacacattccagctccttgcgacattgatggaagtagagggcttgtctgtgctcctcagcaagcagtattttgcttctgatcgccgttctgactatgaggacttcattagagacttaacaagacaactttgtcggttgtctcccgccagagtcgacagctacctagaatcggctatccaggcattcgatgcaccttggccagtcataagagcaaacgcagtttgtttggtgagttgcatgctatcctttttggatgatcagcgattcattgctccttatttctcccaggtatttgctacgttggttggtagaatgagccaatcgccagacgcaattgttcgagcatcagcatcgtctgcgctgggcattctgatcaagagatctaacatgctgaggtcactggtttcacgatatgatcgagcagattcatcacgcaattcccagagcggtgattctaacaccaagacaccatcagagtttcaagaacaggcagaaggaaatccgaatgatggcgcaagtggagcggcaataaaggggactgaagccgatcactgatgtaaatttactcgtatatacgtatagtgttctagctatgcatgcttgtgtatatgctgtacttccctcgcaaataggaacaggagagcaaatttatgctgccatgtcaatagatcttcagtacacctgtaaagcaaccactcacagttagatgattatttattgaatcaaatattatttatatattgaattgaattttcttcgatgcagtatgtcgaatcttc

SEQ ID NO: 344 - DNA, 2756 bp, Zea Mays
cttggttgtgttgcttcacatttattggtttggcatattttgtgaaacttcattccatatcccatcttgtatttggaaaaacagaaatggagactggatcattcaaaagttcctctcatttttctcattcggcccaaaagtggaagatgttgatgacacatatgcagcattggcgttgatgtatggttatgccgcaagatatgctccatcaactgttattgaagccagaattaatgcacttgtggggagtaatatgcttggaaggttgcttcatgttcagcatcctactgcaaagcaagctgtgattactgcaatcgaccttttaggtcgagctgttattagtgctgctgaaatgggaatctcattcccactgaaacgaagagatcagttactggagtacgttttaactctaatgggtagggatcaaagtaatgatctcactgatttcaacactgagcttttgcacacacagagccttgctttaagtgcctgtactactcttgtctcgctagaaccaagattgccaatggaaacaagaaaccgtgtcatgaaggcaacattaggtttttttgctttgccaacagagccctcaagcattgttgagagtctcgtaacaaacctaattattctgttaggtgccatcctgcttacaagtggtgaagatggtcgaagtcgagcagagcagttgctgcatattcttaggcagcttgatccatatgtatcatcatctctggaacaccaaagaagaagaggatgtgttgctgtacaggaggtgttaataaagtttcgcaatctttgttctggtggattcggtgcattgggctcctatccaactttcacaatgaataaacaaatcgatcgagggactaggagcttgtcaagtttgccatctgcatttgtgttgcctagtcgagattctttaagcttgggagagaggacaatggcataccttcctcgttgtgctgatacagacacggaagttaggaaagttgcaattcagatcattgcacttttcttcgacatttcattgtcacttccaaagcagaaggcatatcctaatgatattgatctggaatcctcgtatagtgctttgtcctcccttgaggagttagtctctattgtcagaagggaggcatctgttgatcaaactgaactatttcagagggttgtatcctcagtgtgtattctattatcaaaggatgagctggtcgtcttgctacactcttgtacgttggcaacatgtgataagataaaacagtcagcagatgcttcaattcaagctattatcatgtttattatcagaagaggcaaggagctacgtgaagctgatgtctcgaggacaactcaatctttgctctcatctgctatttctcttactgacacacactcacgccaagaggttctgaatgctatatcatgcctagcagaaaacaccaatcacgttgtggtctttgatgaggttctatctgtggctggaaaagatatctgtacaaaagacataccaaggattcgtggaggctgggccatacaggatgttttttatgcattttcccagcacaaggagcttgcacttctattcctggagtacactttatctatacttcacaaagaacctgtcataataaacagttctgagaagggggagagtacctctgagtcattggctgatgactgtattctacaggcaactatgtttgctctcaattaactgctgtccaatgcttgttaaatgtccttaatttgtcagaacaagatgctgttggtccaatcttaataaatctcttagtaaggctgcgaaatcttcaggtctcaatgaatacgaaaatgaggtccaatgcgtttgcagcttatggtgctttaagtgcatatggtgttggtttgcagcgcactgcttttattgagcagatacatgctacccttccccgtctgatcctccatcttcacgatgatgacctaagtgttcgtcttgcctgtcggaacacattccagctccttgcgacattgatggaagtagagggcttgtctgtgctcctcagcaagcagtattttgcttctgatcgccgttctgactatgaggacttcattagagacttaacaagacaactttgtcggttgtctcccgccagagtcgacagctacctagaatcggctatccaggcattcgatgcaccttggccagtcataagagcaaacgcagtttgtttggtgagttgcatgctatcctttttggatgatcagcgattcattgctccttatttctcccaggtatttgctacgttggttggtagaatgagccaatcgccagacgcaattgttcgagcatcagcatcgtctgcgctgggcattctgatcaagagatctaacatgctgaggtcactggtttcacgatatgatcgagcagattcatcacgcaattcccagagcggtgattctaacaccaagacaccatcagagtttcaagaacaggcagaaggaaatccgaatgatggcgcaagtggagcggcaataaaggggactgaagccgatcactgatgtaaatttactcgtatatacgtatagtgttctagctatgcatgcttgtgtatatgctgtacttccctcgcaaataggaacaggagagcaaatttatgctgccatgtcaatagatcttcagtacacctgtaaagcaaccactcacagttagatgattatttattgaatcaaatattatttatatattgaattgaattttcttcgatgcagtatgtcgaatcttc

SEQ ID NO: 345 - DNA, 982 bp, Zea Mays
cggagcaggaagccctgccgaagccctccaaggtctcaatgaatacgaaaatgaggtccaatgcgtttgcagcttatggtgctttaagtgcatatggtgttggtttgcagcgcactgcttttattgagcagatacatgctacccttccccgtctgatcctccatcttcacgatgatgacctaagtgttcgtcttgcctgtcggaacacattccagctccttgcgacattgatggaagtagagggcttgtctgtgctcctcagcaagcagtattttgcttctgatcgccgttctgactatgaggacttcattagagacttaacaagacaactttgtcggttgtctcccgccagagtcgacagctacctagaatcggctatccaggcattcgatgcaccttggccagtcataagagcaaacgcagtttgtttggtgagttgcatgctatcctttttggatgatcagcgattcattgctccttatttctcccaggtatttgctacgttggttggtagaatgagccaatcgccagacgcaattgttcgagcatcagcatcgtctgcgctgggcattctgatcaagagatctaacatgctgaggtcactggtttcacgatatgatcgagcagattcatcacgcaattcccagagcggtgattctaacaccaagacaccatcagagtttcaagaacaggcagaaggaaatccgaatgatggcgcaagtggagcggcaataaaggggactgaagccgatcactgatgtaaatttactcgtatatacgtatagtgttctagctatgcatgcttgtgtatatgctgtacttccctcgcaaataggaacaggagagcaaatttatgctgccatgtcaatagatcttcagtacacctgtaaagcaaccactcacagttagatgattatttattgaatcaaatattatttatatattgaattgaattttcttcgatgcagtatgtcgaatcttc

SEQ ID NO: 346 - DNA, 2008 bp, Zea Mays
aaggtaccctttcgtggctttacaaaattttatgttttttgaacaaaaaaaagggtaagggaccaggttttttgggacagaatgggctcacccagtggaggtggggagaaaagaacaatccgggagaaattcccccttccatgcatttttctcccaagcggggcttttccttgggggggggcccagttttatggggttaccccccccttggacttggccttaggggattttggaaaaaccaagcacaaattacaaaaaaagttcatggggagccagcaaaatttgttcacccaaaattaggttatggtttttggatagccagctttggaaatgagttttttggaacttattgccaaagggatgccctttcgggaaagcagccagaaccccaaaattggaagccaagaatgaactgtgccgaatttatgctttctcaccatctcctctacagctctactaactgttcactagttgtacagcatggacacatttgaactgatgattactgaagaaaaccagtatctgtctaaacaagcacacaacgaagctcattggtagcagatttataactcaatagtttcatacttggcagtcaatgcaacacatttttttcagaaaagggaacaaaattttgttggcagttctatgattgcaatacagtaacataaataggaagaaatcattgcaacttgttgagcctcaaacattatcaccaaggacacaaagtgtgtgctcctaacttgtggtgcaataatgtacttgcctgttgagatataggttgtcctataactgttgtagggcagacccagtgtcacaggctcccatattagcaggtcgggggataggataaactaaggcaagccttcccctgcaaatgaggaggctgctttgaagttcgaacctacgacatggagtgagacagctctcatcattgcaccaggtctgcccttctgtcctataactgttgtagtttcgctttattccctgtttttcagttttttttgttctcattggtatatagggtctgtttggttgagctgtggctgtgaaaaaagttgctgtgggctgtgagctgtggaaaaagctgttgtaggctgtgagtcgttaaaaagctaaaaaccgtttggtggaaatcactaaaagtcgttaaaagttcttcgatatatgttttcacagttccatccgaaaagtcactaaaagcaggtttaggggtgctttcagatttgcactgtgagaaagtcagcttttagaaaaagctgcttcctagatccagccctttggttggcttttggcttttaggtggcaaaagccaaagccaaaagtcaaaccaaacacacccatagtttgtgcagtttgatccaaagggttccttaggagctttcactggctacaagcatatggtgcatcaatttcatttcaggcgaaaactaaagaataataaaattccattgaagaggcaacaagagacaatgtagtatcttgcaataagccaataactacagctcaccatgcaaatctgaatgattgaagatatactgcatatagcattattcttagatattccagcaaagatgaatgcaataccatatattatacaggggttaatgacatttccaactcagatgctccacatacatatatgatatataggcacccagtctcactttaaaatggcagtggagcatgtccaaactttcccacaaaaaggaacactccaggagttttcaaaatttatatcaagtagcattgctggtaactgacctttttaaatcgcacacagcatacccttcgttttgaaacaggtgacaacaagatccgatatcagtattcaatgcagtacagcaggagcattatatgcactagtaagtttcattcagccaattagacatgagcaataacaacaagaagaaacttaccggaccgaatgccctagaatcccagctacgagtagagttatcaccttcaacccagcaatgcccttctgggatcttagtagggttaagggacc

SEQ ID NO: 347 - DNA, 2443 bp, Zea Mays
gcggaccagcagccggacggccgtataaaacataccaaggccgcctcgctcgctcagcatacggaggcagccgccggacctcgagttattaagttgggcgaggagaggtggttcattccagcagggatccttctcgtgagcccagtcgatctgaccgtccttggtatctggggggggttgttctgtactctctctttaatttggacctccaaagtagtgctgggatgtatcgcctttgggattttctgggtgatggccgtcttccccaccgtcccgttcatgcctgttgggcggacggctgggtccctccttggtgctatgctaatggtcctgttccgcgtcatctccccggaggacgcgtacgccgcgattgacctcccgatcatcggcctgctcttcgggacaatggtcgtcagcatcttccttgagagggctgacatgtttaagtacctcgggaacctgctctcgtggaagagcagaggcagcaaggacctgctcttccgagtctgcatcgtgtccgcgtttgccagcgcgcttttcaccaatgacacatgctgtgttgtcctcaccgagttcatcctcaaggttgctaggcaaaacaacctgccaccacagcctttccttctggcccttgccactagttcgaacatcggctctgctgccacgccgatcggcaaccctcagaaccttgtcatagctgtcgagagtgggatctcatttggccagttcttgctgggagttttcccagctatgatcgttggggttctcacaaacgctgctatcctccttttgtacttctggaaatacttgtcggtggagaaggatcaggagggtgggcagcccacaggaccagaggtggttgccgacgatgaggttacttcccatcggttcacaccggctagaatgtcacatgtttcttctctgaatccagatgacatggattgcgtaagcgaaccgatcatcaggagcaacagtgtcagtactactgggaatgagaacctgagaagcagaagcatcaattctgaggctgacattcagcttgcgatcaagtctctgcgggcatcaagcatgtcgcatgagatggtagaggtctcgacggttcctgatcggagagatgaaggtgcatcctcaaggaagttcacaaggactgctagccagcaaaggagcgtgataatagaggatttagcaccctccccagagattaatggggaaaaggagaaagaaactgaagttgcagagaagagatggaaagtacttgtgtggaagactgctgtttatcttatcactctcggtatgctcattgcacttctaatgggactgaacatgtcctggactgcaatcactgcagctcttgttcttctggcactcgattttacggacgcacaagcttgtcttgagaaggtgtcatattcactgctgatctttttctgcgggatgtttatcactgttgatggcttcaacaaaacgggcataccgaacacactatgggagttagtggaaccatattcacgaatcgatagtgcgaaaggtgttgcacttcttgccgtggtgattcttatcctttcaaacgtggcctctaatgttcctacagtcctattgctcggtacaagagtggctgcatcagcggcttcgatttctcatggttcagagaggaaagcctggctcatccttgcatgggtcagcaccgtggctgggaacctcaccctcctaggctctgcggcgaatctgattgtctgcgagcaggccaggcgggcccagttcttcggctacaacctcaccttctggagccacctccgattcggggtcccgtcgaccatcatcgtcacggcgattggtttgctcatcgtcatcagttactgaaacagctgaaggcagaagagcgtagtgtaagagaagcagaatggataaaaatccttccaataagaagtacatgtaaattaggcttgccctataactcaagtgtgtatcggtacgttatgtctccgtctgtgctcttgctcgtgagcaagcagcacatggctgaccgtgtagcttgcatttccattgcataataggcttatgaagaatgctttggtaatatgattttacagtctgacaaggattgtgaagcagaggcagtgtaccatcaagataatacttctggaagcatataaaaaaatttcgtatatttggatttcaaatccagtctgcttcagactggaaattcatattatcttctggaatcgtgctttattgtcagaaacatgggctaaaattggaaagtccgtcatttattgggcttgcaatgggacaaccttttgggtctgttatatatcactataaccagtgacaactttggttcgcaaactcaaaccagtttctaatctttattttatgatttttatataaagttcttaataggtcctcttgctattttcaatctaaattctaaatactaaaaaaa

SEQ ID NO: 348 - DNA, 2039 bp, Zea Mays
cggaccagcagccggacggccgtataaaacataccaaggccgcctcgctcgctcagcatacggaggcagccgccggtaagccgcgcgcgcgtgcagtcacccatccgtccgtccgtccgtccgtcgtccgccgtccaccgccagcgcgcgctcgccaccgcacccagctagcagcacaagaaaagtctggtggcgtcggcggcggcggcggcggccggcttgccacagtccaatccttgtaccggaccaaaaagcagttgaagggcgcgagcgagcaagctagcgcgcccctacgcctacgcgcgatcgagccgcgcattgctgacctcgagttattaagttgggcgaggagaggtggttcattccagcagggatccttctcgtgagcccagtcgatctgaccgtccttggtatctggggggggttgttctgtactctctctttaatttggacctccaaagtagtgctgggatgtatcgcctttgggattttctgggtgatggccgtcttccccaccgtcccgttcatgcctgttgggcggacggctgggtccctccttggtgctatgctaatggtcctgttccgcgtcatctccccggaggacgcgtacgccgcgattgacctcccgatcatcggcctgctcttcgggacaatggtcgtcagcatcttccttgagagggctgacatgtttaagtacctcgggaacctgctctcgtggaagagcagaggcagcaaggacctgctcttccgagtctgcatcgtgtccgcgtttgccagcgcgcttttcaccaatgacacatgctgtgttgtcctcaccgagttcatcctcaaggttgctaggcaaaacaacctgccaccacagcctttccttctggcccttgccactagttcgaacatcggctctgctgccacgccgatcggcaaccctcagaaccttgtcatagctgtcgagagtgggatctcatttggccagttcttgctgggagttttcccagctatgatcgttggggttctcacaaacgctgctatcctccttttgtacttctggaaatacttgtcggtggagaaggatcaggagggtgggcagcccacaggaccagaggtggttgccgacgatgaggttacttcccatcggttcacaccggctagaatgtcacatgtttcttctctgaatccagatgacatggattgcgtaagcgaaccgatcatcaggagcaacagtgtcagtactactgggaatgagaacctgagaagcagaagcatcaattctgaggctgacattcagcttgcgatcaagtctctgcgggcatcaagcatgtcgcatgagatggtagaggtctcgacggttcctgatcggagagatgaaggtgcatcctcaaggaagttcacaaggactgctagccagcaaaggagcgtgataatagaggatttagcaccctccccagagattaatggggaaaaggagaaagaaactgaagttgcagagaagagatggaaagtacttgtgtggaagactgctgtttatcttatcactctcggtatgctcattgcacttctaatgggactgaacatgtcctggactgcaatcactgcagctcttgttcttctggcactcgattttacggacgcacaagcttgtcttgagaaggtgtcatattcactgctgatctttttctgcgggatgtttatcactgttgatggcttcaacaaaacgggcataccgaacacactatgggagttagtggaaccatattcacgaatcgatagtgcgaaaggtgttgcacttcttgccgtggtgattcttatcctttcaaacgtggcctctaatgttcctacaggtaatttttcttacgcatatgaccatgtataaccatttaatactttatatacatatatgctcttctgtttgcaaaattcataacacatggtatttcgagaggttgtgtgctcaatgccgccatctggcctctgttctttattcatgacaagcatgattaaatgaaggaaatggaagcattacattatcttgtgtacatagg

SEQ ID NO: 349 - DNA, 2690 bp, Zea Mays
cggaccagcagccggacggccgtataaaacataccaaggccgcctcgctcgctcagcatacggaggcagccgccggtaagccgcgcgcgcgtgcagtcacccatccgtccgtccgtccgtccgtcgtccgccgtccaccgccagcgcgcgctcgccaccgcacccagctagcagcacaagaaaagtctggtggcgtcggcggcggcggcggcggccggcttgccacagtccaatccttgtaccggaccaaaaagcagttgaagggcgcgagcgagcaagctagcgcgcccctacgcctacgcgcgatcgagccgcgcattgctgacctcgagttattaagttgggcgaggagaggtggttcattccagcagggatccttctcgtgagcccagtcgatctgaccgtccttggtatctggggggggttgttctgtactctctctttaatttggacctccaaagtagtgctgggatgtatcgcctttgggattttctgggtgatggccgtcttccccaccgtcccgttcatgcctgttgggcggacggctgggtccctccttggtgctatgctaatggtcctgttccgcgtcatctccccggaggacgcgtacgccgcgattgacctcccgatcatcggcctgctcttcgggacaatggtcgtcagcatcttccttgagagggctgacatgtttaagtacctcgggaacctgctctcgtggaagagcagaggcagcaaggacctgctcttccgagtctgcatcgtgtccgcgtttgccagcgcgcttttcaccaatgacacatgctgtgttgtcctcaccgagttcatcctcaaggttgctaggcaaaacaacctgccaccacagcctttccttctggcccttgccactagttcgaacatcggctctgctgccacgccgatcggcaaccctcagaaccttgtcatagctgtcgagagtgggatctcatttggccagttcttgctgggagttttcccagctatgatcgttggggttctcacaaacgctgctatcctccttttgtacttctggaaatacttgtcggtggagaaggatcaggagggtgggcagcccacaggaccagaggtggttgccgacgatgaggttacttcccatcggttcacaccggctagaatgtcacatgtttcttctctgaatccagatgacatggattgcgtaagcgaaccgatcatcaggagcaacagtgtcagtactactgggaatgagaacctgagaagcagaagcatcaattctgaggctgacattcagcttgcgatcaagtctctgcgggcatcaagcatgtcgcatgagatggtagaggtctcgacggttcctgatcggagagatgaaggtgcatcctcaaggaagttcacaaggactgctagccagcaaaggagcgtgataatagaggatttagcaccctccccagagattaatggggaaaaggagaaagaaactgaagttgcagagaagagatggaaagtacttgtgtggaagactgctgtttatcttatcactctcggtatgctcattgcacttctaatgggactgaacatgtcctggactgcaatcactgcagctcttgttcttctggcactcgattttacggacgcacaagcttgtcttgagaaggtgtcatattcactgctgatctttttctgcgggatgtttatcactgttgatggcttcaacaaaacgggcataccgaacacactatgggagttagtggaaccatattcacgaatcgatagtgcgaaaggtgttgcacttcttgccgtggtgattcttatcctttcaaacgtggcctctaatgttcctacagtcctattgctcggtacaagagtggctgcatcagcggcttcgatttctcatggttcagagaggaaagcctggctcatccttgcatgggtcagcaccgtggctgggaacctcaccctcctaggctctgcggcgaatctgattgtctgcgagcaggccaggcgggcccagttcttcggctacaacctcaccttctggagccacctccgattcggggtcccgtcgaccatcatcgtcacggcgattggtttgctcatcgtcatcagttactgaaacagctgaaggcagaagagcgtagtgtaagagaagcagaatggataaaaatccttccaataagaagtacatgtaaattaggcttgccctataactcaagtgtgtatcggtacgttatgtctccgtctgtgctcttgctcgtgagcaagcagcacatggctgaccgtgtagcttgcatttccattgcataataggcttatgaagaatgctttggtaatatgattttacagtctgacaaggattgtgaagcagaggcagtgtaccatcaagataatacttctggaagcatataaaaaaatttcgtatatttggatttcaaatccagtctgcttcagactggaaattcatattatcttctggaatcgtgctttattgtcagaaacatgggctaaaattggaaagtccgtcatttattgggcttgcaatgggacaaccttttgggtctgttatatatcactataaccagtgacaactttggttcgcaaactcaaaccagtttctaatctttattttatgatttttatataaagttcttaataggtcctcttgctattttcaatctaaattctaaatactaaaaaaa

SEQ ID NO: 350 - DNA, 2639 bp, Zea Mays
agcgcgcccctacgcctacgcgcgatcgagccgcgcattgctgatacaccgtgagtaggcgtgatggtgcttgataccccgttttcgtgcagcttgttgctaattcgttttagtttgagggatcaagaaccaccttgttctttctttctttcttttttggactatgatgaatcattgcaaatctcttgaatacatttttcactataaaatactgccttgcctttgagctccttggttcacgtgcaatgtttctttgccctccgattttgcaggacctcgagttattaagttgggcgaggagaggtggttcattccagcagggatccttctcgtgagcccagtcgatctgaccgtccttggtatctggggggggttgttctgtactctctctttaatttggacctccaaagtagtgctgggatgtatcgcctttgggattttctgggtgatggccgtcttccccaccgtcccgttcatgcctgttgggcggacggctgggtccctccttggtgctatgctaatggtcctgttccgcgtcatctccccggaggacgcgtacgccgcgattgacctcccgatcatcggcctgctcttcgggacaatggtcgtcagcatcttccttgagagggctgacatgtttaagtacctcgggaacctgctctcgtggaagagcagaggcagcaaggacctgctcttccgagtctgcatcgtgtccgcgtttgccagcgcgcttttcaccaatgacacatgctgtgttgtcctcaccgagttcatcctcaaggttgctaggcaaaacaacctgccaccacagcctttccttctggcccttgccactagttcgaacatcggctctgctgccacgccgatcggcaaccctcagaaccttgtcatagctgtcgagagtgggatctcatttggccagttcttgctgggagttttcccagctatgatcgttggggttctcacaaacgctgctatcctccttttgtacttctggaaatacttgtcggtggagaaggatcaggagggtgggcagcccacaggaccagaggtggttgccgacgatgaggttacttcccatcggttcacaccggctagaatgtcacatgtttcttctctgaatccagatgacatggattgcgtaagcgaaccgatcatcaggagcaacagtgtcagtactactgggaatgagaacctgagaagcagaagcatcaattctgaggctgacattcagcttgcgatcaagtctctgcgggcatcaagcatgtcgcatgagatggtagaggtctcgacggttcctgatcggagagatgaaggtgcatcctcaaggaagttcacaaggactgctagccagcaaaggagcgtgataatagaggatttagcaccctccccagagattaatggggaaaaggagaaagaaactgaagttgcagagaagagatggaaagtacttgtgtggaagactgctgtttatcttatcactctcggtatgctcattgcacttctaatgggactgaacatgtcctggactgcaatcactgcagctcttgttcttctggcactcgattttacggacgcacaagcttgtcttgagaaggtgtcatattcactgctgatctttttctgcgggatgtttatcactgttgatggcttcaacaaaacgggcataccgaacacactatgggagttagtggaaccatattcacgaatcgatagtgcgaaaggtgttgcacttcttgccgtggtgattcttatcctttcaaacgtggcctctaatgttcctacagtcctattgctcggtacaagagtggctgcatcagcggcttcgatttctcatggttcagagaggaaagcctggctcatccttgcatgggtcagcaccgtggctgggaacctcaccctcctaggctctgcggcgaatctgattgtctgcgagcaggccaggcgggcccagttcttcggctacaacctcaccttctggagccacctccgattcggggtcccgtcgaccatcatcgtcacggcgattggtttgctcatcgtcatcagttactgaaacagctgaaggcagaagagcgtagtgtaagagaagcagaatggataaaaatccttccaataagaagtacatgtaaattaggcttgccctataactcaagtgtgtatcggtacgttatgtctccgtctgtgctcttgctcgtgagcaagcagcacatggctgaccgtgtagcttgcatttccattgcataataggcttatgaagaatgctttggtaatatgattttacagtctgacaaggattgtgaagcagaggcagtgtaccatcaagataatacttctggaagcatataaaaaaatttcgtatatttggatttcaaatccagtctgcttcagactggaaattcatattatcttctggaatcgtgctttattgtcagaaacatgggctaaaattggaaagtccgtcatttattgggcttgcaatgggacaaccttttgggtctgttatatatcactataaccagtgacaactttggttcgcaaactcaaaccagtttctaatctttattttatgatttttatataaagttcttaataggtcctcttgctattttcaatctaaattctaaatactaaaaaaa

SEQ ID NO: 351 - DNA, 4375 bp, Zea Mays
tcctgctgccattattgaatactgccaaggttctcacaatatcaccggagagcatgcacggggcagctaggcgccatctcagggacgagcactgcatagacactttggtcaactaacaactcaatgagcaggcgccatctaatggggctacacaaactggtctgatatgccactggacattgtcaaccaaatctctatcggccgcgcaattactcagcataaaatatcggatacgagtgattgtccggcttagaatctgatttaccccgattcgttttaatattggatcactagcatatattattttgatattgtagtcttgaaagttccaactatatacaggccgcgcttttaaatgcactagagctgatatgattagctgactaaaaaaattaatagtagaattaataactagctaacaaatagctgactattatatataactgtgagctcactttggattttggatgaactcgctaatgaactaatatattcgattagttgatggaacaactaatatagttagctagactattagccagagatatttttgatgtttccagctaaaagcagttaatagctgaatcaatagccagtctttttgaatgtcactatcatatccacagaaccaatactgtagctacgaagctacataatatatcctacttatattacactgacgagaacgtgtcgagcaggagtggtgctggggcccaataaagaaaatgcccaataccccccttttcttttgccatgagactgacggccgccccctctagctagttttgtcgctcaacggaaccgcacgcgttttctttttcttggatgccaagaaagatctatataactgtgctgggcacagcagttaagcgcaagcccaagcccccacgcgcaaaatccaaaaaaaaaaaaaacatcagagccatcgaaatcacggttccgtctctctaaccgaagaagctccctcacgaatcgaatcacatgaatcaccacgcgggagaggaaaaagtgctaggtgtacataaacctggccattagtttcgcaacgttaatggtaacggtaatggttcacactcgataaccaacggtaacaagattgaatataccaatatcaatttctagtatgatatccaattacggttagacttaaataaacaagatttaatcttatcggttaaatatgtgaaccaaacaacacctaaaacttttatactccagtactagacagttgcaacctgcatatatttattcgaaaagaaaacatgattcagcaaacagacaaattctctgtgacataagaaaaaaaccgtccaacttttttaccatccagaaaacgggagctctaccagtgtgccgggtgcgcctggtaaattacgggcgtccatgcatggagccccacccccacctccatgtaggacccacgcccaagtgaccccaccacatacccgtgaatgaaaggaagactgaaaagcagagttcctgccatgttccccgtccccacacgctcacgcggctcccatggtgcacacccacggccacgggccatagcgacaccccccgcggcccgcctatttagccgcccccacccacatcgcggcggggtctccatgcctccagtgtccagtccagagtccaggctccaggactaccaccactccgtctcgtctcgtcctcacaccccactccaccaccacctctgccttgcaaagctttccaccgatccgccgcctcgtccgcgcgctcgcaggcagcagtgtggactacccgccccatactccatcccctactcgaaggatacaccgtgagtaggcgtgatggtgcttgataccccgttttcgtgcagcttgttgctaattcgttttagtttgagggatcaagaaccaccttgttctttctttctttcttttttggactatgatgaatcattgcaaatctcttgaatacatttttcactataaaatactgccttgcctttgagctccttggttcacgtgcaatgtttctttgccctccgattttgcaggacctcgagttattaagttgggcgaggagaggtggttcattccagcagggatccttctcgtgagcccagtcgatctgaccgtccttggtatctggggggggttgttctgtactctctctttaattttgctgggatgtatcgcctttgggattttctgggtgatggccgtcttccccaccgtcccgttcatgcctgttgggcggacggctgggtccctccttggtgctatgctaatggtcctgttccgcgtcatctccccggaggacgcgtacgccgcgattgacctcccgatcatcggcctgctcttcgggacaatggtcgtcagcatcttccttgagagggctgacatgtttaagtacctcgggaacctgctctcgtggaagagcagaggcagcaaggacctgctcttccgagtctgcatcgtgtccgcgtttgccagcgcgcttttcaccaatgacacatgctgtgttgtcctcaccgagttcatcctcaaggttgctaggcaaaacaacctgccaccacagcctttccttctggcccttgccactagttcgaacatcggctctgctgccacgccgatcggcaaccctcagaaccttgtcatagctgtcgagagtgggatctcatttggccagttcttgctgggagttttcccagctatgatcgttggggttctcacaaacgctgctatcctccttttgtacttctggaaatacttgtcggtggagaaggatcaggagggtgggcagcccacaggaccagaggtggttgccgacgatgaggttacttcccatcggttcacaccggctagaatgtcacatgtttcttctctgaatccagatgacatggattgcgtaagcgaaccgatcatcaggagcaacagtgtcagtactactgggaatgagaacctgagaagcagaagcatcaattctgaggctgacattcagcttgcgatcaagtctctgcgggcatcaagcatgtcgcatgagatggtagaggtctcgacggttcctgatcggagagatgaaggtgcatcctcaaggaagttcacaaggactgctagccagcaaaggagcgtgataatagaggatttagcaccctccccagagattaatggggaaaaggagaaagaaactgaagttgcagagaagagatggaaagtacttgtgtggaagactgctgtttatcttatcactctcggtatgctcattgcacttctaatgggactgaacatgtcctggactgcaatcactgcagctcttgttcttctggcactcgattttacggacgcacaagcttgtcttgagaaggtgtcatattcactgctgatctttttctgcgggatgtttatcactgttgatggcttcaacaaaacgggcataccgaacacactatgggagttagtggaaccatattcacgaatcgatagtgcgaaaggtgttgcacttcttgccgtggtgattcttatcctttcaaacgtggcctctaatgttcctacagtcctattgctcggtacaagagtggctgcatcagcggcttcgatttctcatggttcagagaggaaagcctggctcatccttgcatgggtcagcaccgtggctgggaacctcaccctcctaggctctgcggcgaatctgattgtctgcgagcaggccaggcgggcccagttcttcggctacaacctcaccttctggagccacctccgattcggggtcccgtcgaccatcatcgtcacggcgattggtttgctcatcgtcatcagttactgaaacagctgaaggcagaagagcgtagtgtaagagaagcagaatggataaaaatccttccaataagaagtacatgtaaattaggcttgccctataactcaagtgtgtatcggtacgttatgtctccgtctgtgctcttgctcgtgagcaagcagcacatggctgaccgtgtagcttgcatttccattgcataataggcttatgaagaatgctttggtaatatgattttacagtctgacaaggattgtgaagcagaggcagtgtaccatcaagataatacttctggaagcatataaaaaaatttcgtatatttggatttcaaatccagtctgcttcagactggaaattcatattatcttctggaatcgtgctttattgtcagaaacatgggctaaaattggaaagtccgtcatttattgggcttgcaatgggacaaccttttgggtctgttatatatcactataaccagtgacaactttggttcgcaaactcaaaccagtttctaatctttattttatgatttttatataaagttcttaataggtcctcttgctattttcaatctaaattctaaatactaaaaaaa

SEQ ID NO: 352 - DNA, 2853 bp, Zea Mays
acggaaccgcacgcgttttctttttcttggatgccaagaaagatctatataactgtgctgggcacagcagttaagcgcaagcccaagcccccacgcgcaaaatccaaaaaaaaaaaaaacatcagagccatcgaaatcacggttccgtctctctaaccgaagaagctccctcacgaatcgaatcacatgaatcaccacgcgggagaggaaaaagtgctaggtgtacataaacctggccattagtttcgcaacgttaatggtaacggtaatggttcacactcgataaccaacggtaacaagattgaatataccaatatcaatttctagtatgatatccaattacggttagacttaaataaacaagatttaatcttatcggttaaatatgtgaaccaaacaacacctaaaacttttatactccagtactagacagttgcaacctgcatatatttattcgaaaagaaaacatgattcagcaaacagacaaattctctgtgacataagaaaaaaaccgtccaacttttttaccatccagaaaacgggagctctaccagtgtgccgggtgcgcctggtaaattacgggcgtccatgcatggagccccacccccacctccatgtaggacccacgcccaagtgaccccaccacatacccgtgaatgaaaggaagactgaaaagcagagttcctgccatgttccccgtccccacacgctcacgcggctcccatggtgcacacccacggccacgggccatagcgacaccccccgcggcccgcctatttagccgcccccacccacatcgcggcggggtctccatgcctccagtgtccagtccagagtccaggctccaggactaccaccactccgtctcgtctcgtcctcacaccccactccaccaccacctctgccttgcaaagctttccaccgatccgccgcctcgtccgcgcgctcgcaggcagcagtgtggactacccgccccatactccatcccctactcgaaggatacaccgtgagtaggcgtgatggtgcttgataccccgttttcgtgcagcttgttgctaattcgttttagtttgagggatcaagaaccaccttgttctttctttctttcttttttggactatgatgaatcattgcaaatctcttgaatacatttttcactataaaatactgccttgcctttgagctccttggttcacgtgcaatgtttctttgccctccgattttgcaggacctcgagttattaagttgggcgaggagaggtggttcattccagcagggatccttctcgtgagcccagtcgatctgaccgtccttggtatctggggggggttgttctgtactctctctttaattttgctgggatgtatcgcctttgggattttctgggtgatggccgtcttccccaccgtcccgttcatgcctgttgggcggacggctgggtccctccttggtgctatgctaatggtcctgttccgcgtcatctccccggaggacgcgtacgccgcgattgacctcccgatcatcggcctgctcttcgggacaatggtcgtcagcatcttccttgagagggctgacatgtttaagtacctcgggaacctgctctcgtggaagagcagaggcagcaaggacctgctcttccgagtctgcatcgtgtccgcgtttgccagcgcgcttttcaccaatgacacatgctgtgttgtcctcaccgagttcatcctcaaggttgctaggcaaaacaacctgccaccacagcctttccttctggcccttgccactagttcgaacatcggctctgctgccacgccgatcggcaaccctcagaaccttgtcatagctgtcgagagtgggatctcatttggccagttcttgctgggagttttcccagctatgatcgttggggttctcacaaacgctgctatcctccttttgtacttctggaaatacttgtcggtggagaaggatcaggagggtgggcagcccacaggaccagagatgacatggattgcgtaagcgaaccgatcatcaggagcaacagtgtcagtactactgggaatgagaacctgagaagcagaagcatcaattctgaggctgacattcagcttgcgatcaagtctctgcgggcatcaagcatgtcgcatgagatggtagaggtctcgacggttcctgatcggagagatgaaggtgcatcctcaaggaagttcacaaggactgctagccagcaaaggagcgtgataatagaggatttagcaccctccccagagattaatggggaaaaggagaaagaaactgaagttgcagagaagagatggaaagtacttgtgtggaagactgctgtttatcttatcactctcggtatgctcattgcacttctaatgggactgaacatgtcctggactgcaatcactgcagctcttgttcttctggcactcgattttacggacgcacaagcttgtcttgagaaggtgtcatattcactgctgatctttttctgcgggatgtttatcactgttgatggcttcaacaaaacgggcataccgaacacactatgggagttagtggaaccatattcacgaatcgatagtgcgaaaggtgttgcacttcttgccgtggtgattcttatcctttcaaacgtggcctctaatgttcctacaggtaatttttcttacgcatatgaccatgtataaccatttaatactttatatacatatatgctcttctgtttgcaaaattcataacacatggtatttcgagaggttgtgtgctcaatgccgccatctggcctctgttctttattcatgacaagcatgattaaatgaaggaaatggaagcattacattatcttgtgtacatagg

SEQ ID NO: 353 - DNA, 1698 bp, Zea Mays
gaagctccctcacgaatcgaatcacatgaatcaccacgcgggagaggaaaaagtgctaggtgtacataaacctggccattagtttcgcaacgttaatggtaacggtaatggttcacactcgataaccaacggtaacaagattgaatataccaatatcaatttctagtatgatatccaattacggttagacttaaataaacaagatttaatcttatcggttaaatatgtgaaccaaacaacacctaaaacttttatactccagtactagacagttgcaacctgcatatatttattcgaaaagaaaacatgattcagcaaacagacaaattctctgtgacataagaaaaaaaccgtccaacttttttaccatccagaaaacgggagctctaccagtgtgccgggtgcgcctggtaaattacgggcgtccatgcatggagccccacccccacctccatgtaggacccacgcccaagtgaccccaccacatacccgtgaatgaaaggaagactgaaaagcagagttcctgccatgttccccgtccccacacgctcacgcggctcccatggtgcacacccacggccacgggccatagcgacaccccccgcggcccgcctatttagccgcccccacccacatcgcggcggggtctccatgcctccagtgtccagtccagagtccaggctccaggactaccaccactccgtctcgtctcgtcctcacaccccactccaccaccacctctgccttgcaaagctttccaccgatccgccgcctcgtccgcgcgctcgcaggcagcagtgtggactacccgccccatactccatcccctactcgaagatgacatggattgcgtaagcgaaccgatcatcaggagcaacagtgtcagtactactgggaatgagaacctgagaagcagaagcatcaattctgaggctgacattcagcttgcgatcaagtctctgcgggcatcaagcatgtcgcatgagatggtagaggtctcgacggttcctgatcggagagatgaaggtgcatcctcaaggaagttcacaaggactgctagccagcaaaggagcgtgataatagaggatttagcaccctccccagagattaatggggaaaaggagaaagaaactgaagttgcagagaagagatggaaagtacttgtgtggaagactgctgtttatcttatcactctcggtatgctcattgcacttctaatgggactgaacatgtcctggactgcaatcactgcagctcttgttcttctggcactcgattttacggacgcacaagcttgtcttgagaaggtgtcatattcactgctgatctttttctgcgggatgtttatcactgttgatggcttcaacaaaacgggcataccgaacacactatgggagttagtggaaccatattcacgaatcgatagtgcgaaaggtgttgcacttcttgccgtggtgattcttatcctttcaaacgtggcctctaatgttcctacaggtaatttttcttacgcatatgaccatgtataaccatttaatactttatatacatatatgctcttctgtttgcaaaattcataacacatggtatttcgagaggttgtgtgctcaatgccgccatctggcctctgttctttattcatgacaagcatgattaaatgaaggaaatggaagcattacattatcttgtgtacatagg

SEQ ID NO: 354 - DNA, 2707 bp, Zea Mays
gaagctccctcacgaatcgaatcacatgaatcaccacgcgggagaggaaaaagtgctaggtgtacataaacctggccattagtttcgcaacgttaatggtaacggtaatggttcacactcgataaccaacggtaacaagattgaatataccaatatcaatttctagtatgatatccaattacggttagacttaaataaacaagatttaatcttatcggttaaatatgtgaaccaaacaacacctaaaacttttatactccagtactagacagttgcaacctgcatatatttattcgaaaagaaaacatgattcagcaaacagacaaattctctgtgacataagaaaaaaaccgtccaacttttttaccatccagaaaacgggagctctaccagtgtgccgggtgcgcctggtaaattacgggcgtccatgcatggagccccacccccacctccatgtaggacccacgcccaagtgaccccaccacatacccgtgaatgaaaggaagactgaaaagcagagttcctgccatgttccccgtccccacacgctcacgcggctcccatggtgcacacccacggccacgggccatagcgacaccccccgcggcccgcctatttagccgcccccacccacatcgcggcggggtctccatgcctccagtgtccagtccagagtccaggctccaggactaccaccactccgtctcgtctcgtcctcacaccccactccaccaccacctctgccttgcaaagctttccaccgatccgccgcctcgtccgcgcgctcgcaggcagcagtgtggactacccgccccatactccatcccctactcgaaggatacaccgtgagtaggcgtgatggtgcttgataccccgttttcgtgcagcttgttgctaattcgttttagtttgagggatcaagaaccaccttgttctttctttctttcttttttggactatgatgaatcattgcaaatctcttgaatacatttttcactataaaatactgccttgcctttgagctccttggttcacgtgcaatgtttctttgccctccgattttgcaggacctcgagttattaagttgggcgaggagaggtggttcattccagcagggatccttctcgtgagcccagtcgatctgaccgtccttggtatctggggggggttgttctgtactctctctttaatttggacctccaaagtagtgctgggatgtatcgcctttgggattttctgggtgatggccgtcttccccaccgtcccgttcatgcctgttgggcggacggctgggtccctccttggtgctatgctaatggtcctgttccgcgtcatctccccggaggacgcgtacgccgcgattgacctcccgatcatcggcctgctcttcgggacaatggtcgtcagcatcttccttgagagggctgacatgtttaagtacctcgggaacctgctctcgtggaagagcagaggcagcaaggacctgctcttccgagtctgcatcgtgtccgcgtttgccagcgcgcttttcaccaatgacacatgctgtgttgtcctcaccgagttcatcctcaaggttgctaggcaaaacaacctgccaccacagcctttccttctggcccttgccactagttcgaacatcggctctgctgccacgccgatcggcaaccctcagaaccttgtcatagctgtcgagagtgggatctcatttggccagttcttgctgggagttttcccagctatgatcgttggggttctcacaaacgctgctatcctccttttgtacttctggaaatacttgtcggtggagaaggatcaggagggtgggcagcccacaggaccagagatgacatggattgcgtaagcgaaccgatcatcaggagcaacagtgtcagtactactgggaatgagaacctgagaagcagaagcatcaattctgaggctgacattcagcttgcgatcaagtctctgcgggcatcaagcatgtcgcatgagatggtagaggtctcgacggttcctgatcggagagatgaaggtgcatcctcaaggaagttcacaaggactgctagccagcaaaggagcgtgataatagaggatttagcaccctccccagagattaatggggaaaaggagaaagaaactgaagttgcagagaagagatggaaagtacttgtgtggaagactgctgtttatcttatcactctcggtatgctcattgcacttctaatgggactgaacatgtcctggactgcaatcactgcagctcttgttcttctggcactcgattttacggacgcacaagcttgtcttgagaaggtgtcatattcactgctgatctttttctgcgggatgtttatcactgttgatggcttcaacaaaacgggcataccgaacacactatgggagttagtggaaccatattcacgaatcgatagtgcgaaaggtgttgcacttcttgccgtggtgattcttatcctttcaaacgtggcctctaatgttcctacaggtaatttttcttacgcatatgaccatgtataaccatttaatactttatatacatatatgctcttctgtttgcaaaattcataacacatggtatttcgagaggttgtgtgctcaatgccgccatctggcctctgttctttattcatgacaagcatgattaaatgaaggaaatggaagcattacattatcttgtgtacatagg

SEQ ID NO: 355 - DNA, 2639 bp, Zea Mays
gaagctccctcacgaatcgaatcacatgaatcaccacgcgggagaggaaaaagtgctaggtgtacataaacctggccattagtttcgcaacgttaatggtaacggtaatggttcacactcgataaccaacggtaacaagattgaatataccaatatcaatttctagtatgatatccaattacggttagacttaaataaacaagatttaatcttatcggttaaatatgtgaaccaaacaacacctaaaacttttatactccagtactagacagttgcaacctgcatatatttattcgaaaagaaaacatgattcagcaaacagacaaattctctgtgacataagaaaaaaaccgtccaacttttttaccatccagaaaacgggagctctaccagtgtgccgggtgcgcctggtaaattacgggcgtccatgcatggagccccacccccacctccatgtaggacccacgcccaagtgaccccaccacatacccgtgaatgaaaggaagactgaaaagcagagttcctgccatgttccccgtccccacacgctcacgcggctcccatggtgcacacccacggccacgggccatagcgacaccccccgcggcccgcctatttagccgcccccacccacatcgcggcggggtctccatgcctccagtgtccagtccagagtccaggctccaggactaccaccactccgtctcgtctcgtcctcacaccccactccaccaccacctctgccttgcaaagctttccaccgatccgccgcctcgtccgcgcgctcgcaggcagcagtgtggactacccgccccatactccatcccctactcgaaggacctcgagttattaagttgggcgaggagaggtggttcattccagcagggatccttctcgtgagcccagtcgatctgaccgtccttggtatctggggggggttgttctgtactctctctttaatttgtgagtcgtgacaggttcttgaagtgcaattgttaagagttttagttgtagaggaagagaagggtttgctaatatggcgttggcagggacctccaaagtagtgctgggatgtatcgcctttgggattttctgggtgatggccgtcttccccaccgtcccgttcatgcctgttgggcggacggctgggtccctccttggtgctatgctaatggtcctgttccgcgtcatctccccggaggacgcgtacgccgcgattgacctcccgatcatcggcctgctcttcgggacaatggtcgtcagcatcttccttgagagggctgacatgtttaagtacctcgggaacctgctctcgtggaagagcagaggcagcaaggacctgctcttccgagtctgcatcgtgtccgcgtttgccagcgcgcttttcaccaatgacacatgctgtgttgtcctcaccgagttcatcctcaaggttgctaggcaaaacaacctgccaccacagcctttccttctggcccttgccactagttcgaacatcggctctgctgccacgccgatcggcaaccctcagaaccttgtcatagctgtcgagagtgggatctcatttggccagttcttgctgggagttttcccagctatgatcgttggggttctcacaaacgctgctatcctccttttgtacttctggaaatacttgtcggtggagaaggatcaggagggtgggcagcccacaggaccagaggtggttgccgacgatgaggttacttcccatcggttcacaccggctagaatgtcacatgtttcttctctgaatccagatgacatggattgcgtaagcgaaccgatcatcaggagcaacagtgtcagtactactgggaatgagaacctgagaagcagaagcatcaattctgaggctgacattcagcttgcgatcaagtctctgcgggcatcaagcatgtcgcatgagatggtagaggtctcgacggttcctgatcggagagatgaaggtgcatcctcaaggaagttcacaaggactgctagccagcaaaggagcgtgataatagaggatttagcaccctccccagagattaatggggaaaaggagaaagaaactgaagttgcagagaagagatggaaagtacttgtgtggaagactgctgtttatcttatcactctcggtatgctcattgcacttctaatgggactgaacatgtcctggactgcaatcactgcagctcttgttcttctggcactcgattttacggacgcacaagcttgtcttgagaaggtgtcatattcactgctgatctttttctgcgggatgtttatcactgttgatggcttcaacaaaacgggcataccgaacacactatgggagttagtggaaccatattcacgaatcgatagtgcgaaaggtgttgcacttcttgccgtggtgattcttatcctttcaaacgtggcctctaatgttcctacaggtaatttttcttacgcatatgaccatgtataaccatttaatactttatatacatatatgctcttctgtttgcaaaattcataacacatggtatttcgagaggttgtgtgctcaatgccgccatctggcctctgttctttattcatgacaagcatgattaaatgaaggaaatggaagcattacattatcttgtgtacatagg

SEQ ID NO: 356 - DNA, 2613 bp, Zea Mays
cgcgcgtctcatcactcccatcgtaattcgtaacctagtagcacggagacacctgttctcggcaccggtgcacgccggatcttctatcgtcggatacaccgtgagtaggcgtgatggtgcttgataccccgttttcgtgcagcttgttgctaattcgttttagtttgagggatcaagaaccaccttgttctttctttctttcttttttggactatgatgaatcattgcaaatctcttgaatacatttttcactataaaatactgccttgcctttgagctccttggttcacgtgcaatgtttctttgccctccgattttgcaggacctcgagttattaagttgggcgaggagaggtggttcattccagcagggatccttctcgtgagcccagtcgatctgaccgtccttggtatctggggggggttgttctgtactctctctttaatttggacctccaaagtagtgctgggatgtatcgcctttgggattttctgggtgatggccgtcttccccaccgtcccgttcatgcctgttgggcggacggctgggtccctccttggtgctatgctaatggtcctgttccgcgtcatctccccggaggacgcgtacgccgcgattgacctcccgatcatcggcctgctcttcgggacaatggtcgtcagcatcttccttgagagggctgacatgtttaagtacctcgggaacctgctctcgtggaagagcagaggcagcaaggacctgctcttccgagtctgcatcgtgtccgcgtttgccagcgcgcttttcaccaatgacacatgctgtgttgtcctcaccgagttcatcctcaaggttgctaggcaaaacaacctgccaccacagcctttccttctggcccttgccactagttcgaacatcggctctgctgccacgccgatcggcaaccctcagaaccttgtcatagctgtcgagagtgggatctcatttggccagttcttgctgggagttttcccagctatgatcgttggggttctcacaaacgctgctatcctccttttgtacttctggaaatacttgtcggtggagaaggatcaggagggtgggcagcccacaggaccagagatgacatggattgcgtaagcgaaccgatcatcaggagcaacagtgtcagtactactgggaatgagaacctgagaagcagaagcatcaattctgaggctgacattcagcttgcgatcaagtctctgcgggcatcaagcatgtcgcatgagatggtagaggtctcgacggttcctgatcggagagatgaaggtgcatcctcaaggaagttcacaaggactgctagccagcaaaggagcgtgataatagaggatttagcaccctccccagagattaatggggaaaaggagaaagaaactgaagttgcagagaagagatggaaagtacttgtgtggaagactgctgtttatcttatcactctcggtatgctcattgcacttctaatgggactgaacatgtcctggactgcaatcactgcagctcttgttcttctggcactcgattttacggacgcacaagcttgtcttgagaaggtgtcatattcactgctgatctttttctgcgggatgtttatcactgttgatggcttcaacaaaacgggcataccgaacacactatgggagttagtggaaccatattcacgaatcgatagtgcgaaaggtgttgcacttcttgccgtggtgattcttatcctttcaaacgtggcctctaatgttcctacagtcctattgctcggtacaagagtggctgcatcagcggcttcgatttctcatggttcagagaggaaagcctggctcatccttgcatgggtcagcaccgtggctgggaacctcaccctcctaggctctgcggcgaatctgattgtctgcgagcaggccaggcgggcccagttcttcggctacaacctcaccttctggagccacctccgattcggggtcccgtcgaccatcatcgtcacggcgattggtttgctcatcgtcatcagttactgaaacagctgaaggcagaagagcgtagtgtaagagaagcagaatggataaaaatccttccaataagaagtacatgtaaattaggcttgccctataactcaagtgtgtatcggtacgttatgtctccgtctgtgctcttgctcgtgagcaagcagcacatggctgaccgtgtagcttgcatttccattgcataataggcttatgaagaatgctttggtaatatgattttacagtctgacaaggattgtgaagcagaggcagtgtaccatcaagataatacttctggaagcatataaaaaaatttcgtatatttggatttcaaatccagtctgcttcagactggaaattcatattatcttctggaatcgtgctttattgtcagaaacatgggctaaaattggaaagtccgtcatttattgggcttgcaatgggacaaccttttgggtctgttatatatcactataaccagtgacaactttggttcgcaaactcaaaccagtttctaatctttattttatgatttttatataaagttcttaataggtcctcttgctattttcaatctaaattctaaatactaaaaaaa

SEQ ID NO: 357 - DNA, 2598 bp, Zea Mays
cgcgcgtctcatcactcccatcgtaattcgtaacctagtagcacggagacacctgttctcggcaccggtgcacgccggatcttctatcgtcggatacaccgtgagtaggcgtgatggtgcttgataccccgttttcgtgcagcttgttgctaattcgttttagtttgagggatcaagaaccaccttgttctttctttctttcttttttggactatgatgaatcattgcaaatctcttgaatacatttttcactataaaatactgccttgcctttgagctccttggttcacgtgcaatgtttctttgccctccgattttgcaggacctcgagttattaagttgggcgaggagaggtggttcattccagcagggatccttctcgtgagcccagtcgatctgaccgtccttggtatctggggggggttgttctgtactctctctttaattttgctgggatgtatcgcctttgggattttctgggtgatggccgtcttccccaccgtcccgttcatgcctgttgggcggacggctgggtccctccttggtgctatgctaatggtcctgttccgcgtcatctccccggaggacgcgtacgccgcgattgacctcccgatcatcggcctgctcttcgggacaatggtcgtcagcatcttccttgagagggctgacatgtttaagtacctcgggaacctgctctcgtggaagagcagaggcagcaaggacctgctcttccgagtctgcatcgtgtccgcgtttgccagcgcgcttttcaccaatgacacatgctgtgttgtcctcaccgagttcatcctcaaggttgctaggcaaaacaacctgccaccacagcctttccttctggcccttgccactagttcgaacatcggctctgctgccacgccgatcggcaaccctcagaaccttgtcatagctgtcgagagtgggatctcatttggccagttcttgctgggagttttcccagctatgatcgttggggttctcacaaacgctgctatcctccttttgtacttctggaaatacttgtcggtggagaaggatcaggagggtgggcagcccacaggaccagagatgacatggattgcgtaagcgaaccgatcatcaggagcaacagtgtcagtactactgggaatgagaacctgagaagcagaagcatcaattctgaggctgacattcagcttgcgatcaagtctctgcgggcatcaagcatgtcgcatgagatggtagaggtctcgacggttcctgatcggagagatgaaggtgcatcctcaaggaagttcacaaggactgctagccagcaaaggagcgtgataatagaggatttagcaccctccccagagattaatggggaaaaggagaaagaaactgaagttgcagagaagagatggaaagtacttgtgtggaagactgctgtttatcttatcactctcggtatgctcattgcacttctaatgggactgaacatgtcctggactgcaatcactgcagctcttgttcttctggcactcgattttacggacgcacaagcttgtcttgagaaggtgtcatattcactgctgatctttttctgcgggatgtttatcactgttgatggcttcaacaaaacgggcataccgaacacactatgggagttagtggaaccatattcacgaatcgatagtgcgaaaggtgttgcacttcttgccgtggtgattcttatcctttcaaacgtggcctctaatgttcctacagtcctattgctcggtacaagagtggctgcatcagcggcttcgatttctcatggttcagagaggaaagcctggctcatccttgcatgggtcagcaccgtggctgggaacctcaccctcctaggctctgcggcgaatctgattgtctgcgagcaggccaggcgggcccagttcttcggctacaacctcaccttctggagccacctccgattcggggtcccgtcgaccatcatcgtcacggcgattggtttgctcatcgtcatcagttactgaaacagctgaaggcagaagagcgtagtgtaagagaagcagaatggataaaaatccttccaataagaagtacatgtaaattaggcttgccctataactcaagtgtgtatcggtacgttatgtctccgtctgtgctcttgctcgtgagcaagcagcacatggctgaccgtgtagcttgcatttccattgcataataggcttatgaagaatgctttggtaatatgattttacagtctgacaaggattgtgaagcagaggcagtgtaccatcaagataatacttctggaagcatataaaaaaatttcgtatatttggatttcaaatccagtctgcttcagactggaaattcatattatcttctggaatcgtgctttattgtcagaaacatgggctaaaattggaaagtccgtcatttattgggcttgcaatgggacaaccttttgggtctgttatatatcactataaccagtgacaactttggttcgcaaactcaaaccagtttctaatctttattttatgatttttatataaagttcttaataggtcctcttgctattttcaatctaaattctaaatactaaaaaaa

SEQ ID NO: 358 - DNA, 2331 bp, Zea Mays
gtagcacggagacacctgttctcggcaccggtgcacgccggatcttctatcgtcggacctcgagttattaagttgggcgaggagaggtggttcattccagcagggatccttctcgtgagcccagtcgatctgaccgtccttggtatctggggggggttgttctgtactctctctttaattttgctgggatgtatcgcctttgggattttctgggtgatggccgtcttccccaccgtcccgttcatgcctgttgggcggacggctgggtccctccttggtgctatgctaatggtcctgttccgcgtcatctccccggaggacgcgtacgccgcgattgacctcccgatcatcggcctgctcttcgggacaatggtcgtcagcatcttccttgagagggctgacatgtttaagtacctcgggaacctgctctcgtggaagagcagaggcagcaaggacctgctcttccgagtctgcatcgtgtccgcgtttgccagcgcgcttttcaccaatgacacatgctgtgttgtcctcaccgagttcatcctcaaggttgctaggcaaaacaacctgccaccacagcctttccttctggcccttgccactagttcgaacatcggctctgctgccacgccgatcggcaaccctcagaaccttgtcatagctgtcgagagtgggatctcatttggccagttcttgctgggagttttcccagctatgatcgttggggttctcacaaacgctgctatcctccttttgtacttctggaaatacttgtcggtggagaaggatcaggagggtgggcagcccacaggaccagagatgacatggattgcgtaagcgaaccgatcatcaggagcaacagtgtcagtactactgggaatgagaacctgagaagcagaagcatcaattctgaggctgacattcagcttgcgatcaagtctctgcgggcatcaagcatgtcgcatgagatggtagaggtctcgacggttcctgatcggagagatgaaggtgcatcctcaaggaagttcacaaggactgctagccagcaaaggagcgtgataatagaggatttagcaccctccccagagattaatggggaaaaggagaaagaaactgaagttgcagagaagagatggaaagtacttgtgtggaagactgctgtttatcttatcactctcggtatgctcattgcacttctaatgggactgaacatgtcctggactgcaatcactgcagctcttgttcttctggcactcgattttacggacgcacaagcttgtcttgagaaggtgtcatattcactgctgatctttttctgcgggatgtttatcactgttgatggcttcaacaaaacgggcataccgaacacactatgggagttagtggaaccatattcacgaatcgatagtgcgaaaggtgttgcacttcttgccgtggtgattcttatcctttcaaacgtggcctctaatgttcctacagtcctattgctcggtacaagagtggctgcatcagcggcttcgatttctcatggttcagagaggaaagcctggctcatccttgcatgggtcagcaccgtggctgggaacctcaccctcctaggctctgcggcgaatctgattgtctgcgagcaggccaggcgggcccagttcttcggctacaacctcaccttctggagccacctccgattcggggtcccgtcgaccatcatcgtcacggcgattggtttgctcatcgtcatcagttactgaaacagctgaaggcagaagagcgtagtgtaagagaagcagaatggataaaaatccttccaataagaagtacatgtaaattaggcttgccctataactcaagtgtgtatcggtacgttatgtctccgtctgtgctcttgctcgtgagcaagcagcacatggctgaccgtgtagcttgcatttccattgcataataggcttatgaagaatgctttggtaatatgattttacagtctgacaaggattgtgaagcagaggcagtgtaccatcaagataatacttctggaagcatataaaaaaatttcgtatatttggatttcaaatccagtctgcttcagactggaaattcatattatcttctggaatcgtgctttattgtcagaaacatgggctaaaattggaaagtccgtcatttattgggcttgcaatgggacaaccttttgggtctgttatatatcactataaccagtgacaactttggttcgcaaactcaaaccagtttctaatctttattttatgatttttatataaagttcttaataggtcctcttgctattttcaatctaaattctaaatactaaaaaaa

SEQ ID NO: 359 - DNA, 2413 bp, Zea Mays
gttctcggcaccggtgcacgccggatcttctatcgtcggatacaccgacctcgagttattaagttgggcgaggagaggtggttcattccagcagggatccttctcgtgagcccagtcgatctgaccgtccttggtatctggggggggttgttctgtactctctctttaatttggacctccaaagtagtgctgggatgtatcgcctttgggattttctgggtgatggccgtcttccccaccgtcccgttcatgcctgttgggcggacggctgggtccctccttggtgctatgctaatggtcctgttccgcgtcatctccccggaggacgcgtacgccgcgattgacctcccgatcatcggcctgctcttcgggacaatggtcgtcagcatcttccttgagagggctgacatgtttaagtacctcgggaacctgctctcgtggaagagcagaggcagcaaggacctgctcttccgagtctgcatcgtgtccgcgtttgccagcgcgcttttcaccaatgacacatgctgtgttgtcctcaccgagttcatcctcaaggttgctaggcaaaacaacctgccaccacagcctttccttctggcccttgccactagttcgaacatcggctctgctgccacgccgatcggcaaccctcagaaccttgtcatagctgtcgagagtgggatctcatttggccagttcttgctgggagttttcccagctatgatcgttggggttctcacaaacgctgctatcctccttttgtacttctggaaatacttgtcggtggagaaggatcaggagggtgggcagcccacaggaccagaggtggttgccgacgatgaggttacttcccatcggttcacaccggctagaatgtcacatgtttcttctctgaatccagatgacatggattgcgtaagcgaaccgatcatcaggagcaacagtgtcagtactactgggaatgagaacctgagaagcagaagcatcaattctgaggctgacattcagcttgcgatcaagtctctgcgggcatcaagcatgtcgcatgagatggtagaggtctcgacggttcctgatcggagagatgaaggtgcatcctcaaggaagttcacaaggactgctagccagcaaaggagcgtgataatagaggatttagcaccctccccagagattaatggggaaaaggagaaagaaactgaagttgcagagaagagatggaaagtacttgtgtggaagactgctgtttatcttatcactctcggtatgctcattgcacttctaatgggactgaacatgtcctggactgcaatcactgcagctcttgttcttctggcactcgattttacggacgcacaagcttgtcttgagaaggtgtcatattcactgctgatctttttctgcgggatgtttatcactgttgatggcttcaacaaaacgggcataccgaacacactatgggagttagtggaaccatattcacgaatcgatagtgcgaaaggtgttgcacttcttgccgtggtgattcttatcctttcaaacgtggcctctaatgttcctacagtcctattgctcggtacaagagtggctgcatcagcggcttcgatttctcatggttcagagaggaaagcctggctcatccttgcatgggtcagcaccgtggctgggaacctcaccctcctaggctctgcggcgaatctgattgtctgcgagcaggccaggcgggcccagttcttcggctacaacctcaccttctggagccacctccgattcggggtcccgtcgaccatcatcgtcacggcgattggtttgctcatcgtcatcagttactgaaacagctgaaggcagaagagcgtagtgtaagagaagcagaatggataaaaatccttccaataagaagtacatgtaaattaggcttgccctataactcaagtgtgtatcggtacgttatgtctccgtctgtgctcttgctcgtgagcaagcagcacatggctgaccgtgtagcttgcatttccattgcataataggcttatgaagaatgctttggtaatatgattttacagtctgacaaggattgtgaagcagaggcagtgtaccatcaagataatacttctggaagcatataaaaaaatttcgtatatttggatttcaaatccagtctgcttcagactggaaattcatattatcttctggaatcgtgctttattgtcagaaacatgggctaaaattggaaagtccgtcatttattgggcttgcaatgggacaaccttttgggtctgttatatatcactataaccagtgacaactttggttcgcaaactcaaaccagtttctaatctttattttatgatttttatataaagttcttaataggtcctcttgctattttcaatctaaattctaaatactaaaaaaa

SEQ ID NO: 360 - DNA, 2401 bp, Zea Mays
tcggcaccggtgcacgccggatcttctatcgtcggacctcgagttattaagttgggcgaggagaggtggttcattccagcagggatccttctcgtgagcccagtcgatctgaccgtccttggtatctggggggggttgttctgtactctctctttaatttggacctccaaagtagtgctgggatgtatcgcctttgggattttctgggtgatggccgtcttccccaccgtcccgttcatgcctgttgggcggacggctgggtccctccttggtgctatgctaatggtcctgttccgcgtcatctccccggaggacgcgtacgccgcgattgacctcccgatcatcggcctgctcttcgggacaatggtcgtcagcatcttccttgagagggctgacatgtttaagtacctcgggaacctgctctcgtggaagagcagaggcagcaaggacctgctcttccgagtctgcatcgtgtccgcgtttgccagcgcgcttttcaccaatgacacatgctgtgttgtcctcaccgagttcatcctcaaggttgctaggcaaaacaacctgccaccacagcctttccttctggcccttgccactagttcgaacatcggctctgctgccacgccgatcggcaaccctcagaaccttgtcatagctgtcgagagtgggatctcatttggccagttcttgctgggagttttcccagctatgatcgttggggttctcacaaacgctgctatcctccttttgtacttctggaaatacttgtcggtggagaaggatcaggagggtgggcagcccacaggaccagaggtggttgccgacgatgaggttacttcccatcggttcacaccggctagaatgtcacatgtttcttctctgaatccagatgacatggattgcgtaagcgaaccgatcatcaggagcaacagtgtcagtactactgggaatgagaacctgagaagcagaagcatcaattctgaggctgacattcagcttgcgatcaagtctctgcgggcatcaagcatgtcgcatgagatggtagaggtctcgacggttcctgatcggagagatgaaggtgcatcctcaaggaagttcacaaggactgctagccagcaaaggagcgtgataatagaggatttagcaccctccccagagattaatggggaaaaggagaaagaaactgaagttgcagagaagagatggaaagtacttgtgtggaagactgctgtttatcttatcactctcggtatgctcattgcacttctaatgggactgaacatgtcctggactgcaatcactgcagctcttgttcttctggcactcgattttacggacgcacaagcttgtcttgagaaggtgtcatattcactgctgatctttttctgcgggatgtttatcactgttgatggcttcaacaaaacgggcataccgaacacactatgggagttagtggaaccatattcacgaatcgatagtgcgaaaggtgttgcacttcttgccgtggtgattcttatcctttcaaacgtggcctctaatgttcctacagtcctattgctcggtacaagagtggctgcatcagcggcttcgatttctcatggttcagagaggaaagcctggctcatccttgcatgggtcagcaccgtggctgggaacctcaccctcctaggctctgcggcgaatctgattgtctgcgagcaggccaggcgggcccagttcttcggctacaacctcaccttctggagccacctccgattcggggtcccgtcgaccatcatcgtcacggcgattggtttgctcatcgtcatcagttactgaaacagctgaaggcagaagagcgtagtgtaagagaagcagaatggataaaaatccttccaataagaagtacatgtaaattaggcttgccctataactcaagtgtgtatcggtacgttatgtctccgtctgtgctcttgctcgtgagcaagcagcacatggctgaccgtgtagcttgcatttccattgcataataggcttatgaagaatgctttggtaatatgattttacagtctgacaaggattgtgaagcagaggcagtgtaccatcaagataatacttctggaagcatataaaaaaatttcgtatatttggatttcaaatccagtctgcttcagactggaaattcatattatcttctggaatcgtgctttattgtcagaaacatgggctaaaattggaaagtccgtcatttattgggcttgcaatgggacaaccttttgggtctgttatatatcactataaccagtgacaactttggttcgcaaactcaaaccagtttctaatctttattttatgatttttatataaagttcttaataggtcctcttgctattttcaatctaaattctaaatactaaaaaaa

SEQ ID NO: 361 - DNA, 1891 bp, Zea Mays
gcgtgatggtgcttgataccccgttttcgtgcagcttgttgctaattcgttttagtttgagggatcaagaaccaccttgttctttctttctttcttttttggactatgatgaatcattgcaaatctcttgaatacatttttcactataaaatactgccttgcctttgagctccttggttcacgtgcaatgtttctttgccctccgattttgcaggacctcgagttattaagttgggcgaggagaggtggttcattccagcagggatccttctcgtgagcccagtcgatctgaccgtccttgggacctccaaagtagtgctgggatgtatcgcctttgggattttctgggtgatggccgtcttccccaccgtcccgttcatgcctgttgggcggacggctgggtccctccttggtgctatgctaatggtcctgttccgcgtcatctccccggaggacgcgtacgccgcgattgacctcccgatcatcggcctgctcttcgggacaatggtcgtcagcatcttccttgagagggctgacatgtttaagtacctcgggaacctgctctcgtggaagagcagaggcagcaaggacctgctcttccgagtctgcatcgtgtccgcgtttgccagcgcgcttttcaccaatgacacatgctgtgttgtcctcaccgagttcatcctcaaggttgctaggcaaaacaacctgccaccacagcctttccttctggcccttgccactagttcgaacatcggctctgctgccacgccgatcggcaaccctcagaaccttgtcatagctgtcgagagtgggatctcatttggccagttcttgctgggagttttcccagctatgatcgttggggttctcacaaacgctgctatcctccttttgtacttctggaaatacttgtcggtggagaaggatcaggagggtgggcagcccacaggaccagaggtggttgccgacgatgaggttacttcccatcggttcacaccggctagaatgtcacatgtttcttctctgaatccagatgacatggattgcgtaagcgaaccgatcatcaggagcaacagtgtcagtactactgggaatgagaacctgagaagcagaagcatcaattctgaggctgacattcagcttgcgatcaagtctctgcgggcatcaagcatgtcgcatgagatggtagaggtctcgacggttcctgatcggagagatgaaggtgcatcctcaaggaagttcacaaggactgctagccagcaaaggagcgtgataatagaggatttagcaccctccccagagattaatggggaaaaggagaaagaaactgaagttgcagagaagagatggaaagtacttgtgtggaagactgctgtttatcttatcactctcggtatgctcattgcacttctaatgggactgaacatgtcctggactgcaatcactgcagctcttgttcttctggcactcgattttacggacgcacaagcttgtcttgagaaggtgtcatattcactgctgatctttttctgcgggatgtttatcactgttgatggcttcaacaaaacgggcataccgaacacactatgggagttagtggaaccatattcacgaatcgatagtgcgaaaggtgttgcacttcttgccgtggtgattcttatcctttcaaacgtggcctctaatgttcctacaggtaatttttcttacgcatatgaccatgtataaccatttaatactttatatacatatatgctcttctgtttgcaaaattcataacacatggtatttcgagaggttgtgtgctcaatgccgccatctggcctctgttctttattcatgacaagcatgattaaatgaaggaaatggaagcattacattatcttgtgtacatagg

SEQ ID NO: 362 - DNA, 2364 bp, Zea Mays
attattaaatgtatcgttgatattatttcttattaagttaaaaatataaatataaatattatagagacatttagaggagtttctgattgaaaaaagtaaaacaaaaataacaaagcgcatgctgcaggctgggcctactcgcagaactcttcctgacccgaaccagtccaacttgaggcaccgaacacagagcgcgaaactccacggctccgagtctccgaccattctcgcccccggctctttccttcttcccgtgtcatcgtcaaaccgccgctttccaattccaggccatcaagacgtagcagctccccttgcgtctgcgcacgccaccgaaggatcctcgccgcgcgtgcagtgcgatccgaggggaggggtccaaggccatgatgaagagcgtcagcggcaccggctcggccgggagccggagcgatccgggcggcagcggcgagctgtcccgcttctccgtcgccaccacggcgtcgtccgcctcgcagccttccgcgaacggtggcgcgcgcgggatctccttcctcgacgccttccggtcctgcttcgtgcccccggaggcgcgctcgccggagaactccatgtccgacgaatcccacccttcccaccaactctcgcagtctttgagctcacaaggttctaacagtgggagcgtgtttgggagcaagcgatcgattaaaggaatgtatagtcccatgcacaagagttctttagatagggagatccctggcagcacaaaattctccttgccgcagatccagaaagcaacaaagaacttctcgccgaacttcaagattgggcagggtggttctgggactgtatacaagggtcagcttgctgatggtactcttgtcgctgtcaaacgtgccaagaagaatgtttatgacaagcatatgggtcgtgagttctggaacgagattgagacattgcaacgcattgagcacctgaatttggttaggtttcatgggtacctggagtttggtggcgagcagttgattattgtggagtatgttcccaatgggaatcttcgagagcacctcgactgtataaatggtaaaatattggaattctcactgagattggaaattgcaattgatgtggctcatgctattacatatcttcatacctattcagggtttgaccttcagatgtatattaaagatcatccagtcatccacagagacatcaaatcctcaaacattcttctaatgaacaattgtcgagccaaggttgctgactttggattcgccaaactggctccaactgattctagtcatatatctactcaagtcaaaggaacagcaggctatctcgatccagaatatctcagaacataccagctcaatgagaagagtgatgtctactcctttggagtccttctggtggagttggttactgggaggcgccctatagagccaaaaaaggcaatcattgagcgtgttaccacaaaatgggcaatggaaaaatttgtggagggcaatgctatccaaacactagatccgaatctggaagcgaccgatgcgatcaatctagcggtcgagaagctgtatgagctggctctgcaatgcttagccccaactaagaggaaccgaccgagcatgaagcggtgcgcagagattctgtggagcatccgtaaagattacagggagttggttgtacccacctctgccatgaactgaagcaggtcgtctggagcagtcaagtgaacaaaaagatgtatcattccagtttgcctctcttgattcgcttcaaagattggtggttgaaatcatccgattgctgggattctttcagttaccgcaagtggtcgtgaacaggactgatggccttcctagatgctgtgtttgtgctagaaaccagaaaagtccctgtgtgaaagtgttgctgagtaaacatgtacgagtatatatcagatatctaatggtgtgtatatcttgtaggttctcttatacaggtaagtgcatcacgcatgaagaaatctagttgtttccattgcatctttttttttgttgttgttgtctatgatgaacaatattcagcgtatgattagcaagcaacactcaggagctgtacttgtgctcttcctttcctggcgtccaatctgtgccttatcccggcacgggggtgcagaggtcactgctgtagtaatctggacggagagccagactggagctgccttcttggcaggcagctccgtcacctctttatcctgtagcaaaatcgtccgtgcattgacgtgactattttatgtccaaatatggttcttttaaattgtcactcgatgtttttatgcttcggtgtcacgtttttgacaactaaagaaggaatatactcggccgaaaaaggtccgacttcctg

SEQ ID NO: 363 - DNA, 2347 bp, Zea Mays
attattaaatgtatcgttgatattatttcttattaagttaaaaatataaatataaatattatagagacatttagaggagtttctgattgaaaaaagtaaaacaaaaataacaaagcgcatgctgcaggctgggcctactcgcagaactcttcctgacccgaaccagtccaacttgaggcaccgaacacagagcgcgaaactccacggctccgagtctccgaccattctcgcccccggctctttccttcttcccgtgtcatcgtcaaaccgccgctttccaattccaggccatcaagacgtagcagctccccttgcgtctgcgcacgccaccgaaggatcctcgccgcgcgtgcagtgcgatccgaggggaggggtccaaggccatgatgaagagcgtcagcggcaccggctcggccgggagccggagcgatccgggcggcagcggcgagctgtcccgcttctccgtcgccaccacggcgtcgtccgcctcgcagccttccgcgaacggtggcgcgcgcgggatctccttcctcgacgccttccggtcctgcttcgtgcccccggaggcgcgctcgccggagaactccatgtccgacgaatcccacccttcccaccaactctcgcagtctttgagctcacaaggttctaacagtgggagcgtgtttgggagcaagcgatcgattaaaggaatgtatagtcccatgcacaagagttctttagatagggagatccctggcagcacaaaattctccttgccgcagatccagaaagcaacaaagaacttctcgccgaacttcaagattgggcagggtggttctgggactgtatacaagggtcagcttgctgatggtactcttgtcgctgtcaaacgtgccaagaagaatgtttatgacaagcatatgggtcgtgagttctggaacgagattgagacattgcaacgcattgagcacctgaatttggttaggtttcatgggtacctggagtttggtggcgagcagttgattattgtggagtatgttcccaatgggaatcttcgagagcacctcgactctatatgcaggtataaatggtaaaatattggaattctcactgagattggaaattgcaattgatgtggctcatgctattacatatcttcatacctattcagatcatccagtcatccacagagacatcaaatcctcaaacattcttctaatgaacaattgtcgagccaaggttgctgactttggattcgccaaactggctccaactgattctagtcatatatctactcaagtcaaaggaacagcaggctatctcgatccagaatatctcagaacataccagctcaatgagaagagtgatgtctactcctttggagtccttctggtggagttggttactgggaggcgccctatagagccaaaaaaggcaatcattgagcgtgttaccacaaaatgggcaatggaaaaatttgtggagggcaatgctatccaaacactagatccgaatctggaagcgaccgatgcgatcaatctagcggtcgagaagctgtatgagctggctctgcaatgcttagccccaactaagaggaaccgaccgagcatgaagcggtgcgcagagattctgtggagcatccgtaaagattacagggagttggttgtacccacctctgccatgaactgaagcaggtcgtctggagcagtcaagtgaacaaaaagatgtatcattccagtttgcctctcttgattcgcttcaaagattggtggttgaaatcatccgattgctgggattctttcagttaccgcaagtggtcgtgaacaggactgatggccttcctagatgctgtgtttgtgctagaaaccagaaaagtccctgtgtgaaagtgttgctgagtaaacatgtacgagtatatatcagatatctaatggtgtgtatatcttgtaggttctcttatacaggtaagtgcatcacgcatgaagaaatctagttgtttccattgcatctttttttttgttgttgttgtctatgatgaacaatattcagcgtatgattagcaagcaacactcaggagctgtacttgtgctcttcctttcctggcgtccaatctgtgccttatcccggcacgggggtgcagaggtcactgctgtagtaatctggacggagagccagactggagctgccttcttggcaggcagctccgtcacctctttatcctgtagcaaaatcgtccgtgcattgacgtgactattttatgtccaaatatggttcttttaaattgtcactcgatgtttttatgcttcggtgtcacgtttttgacaactaaagaaggaatatactcggccgaaaaaggtccgacttcctg

SEQ ID NO: 364 - DNA, 2254 bp, Zea Mays
attattaaatgtatcgttgatattatttcttattaagttaaaaatataaatataaatattatagagacatttagaggagtttctgattgaaaaaagtaaaacaaaaataacaaagcgcatgctgcaggctgggcctactcgcagaactcttcctgacccgaaccagtccaacttgaggcaccgaacacagagcgcgaaactccacggctccgagtctccgaccattctcgcccccggctctttccttcttcccgtgtcatcgtcaaaccgccgctttccaattccaggccatcaagacgtagcagctccccttgcgtctgcgcacgccaccgaaggatcctcgccgcgcgtgcagtgcgatccgaggggaggggtccaaggccatgatgaagagcgtcagcggcaccggctcggccgggagccggagcgatccgggcggcagcggcgagctgtcccgcttctccgtcgccaccacggcgtcgtccgcctcgcagccttccgcgaacggtggcgcgcgcgggatctccttcctcgacgccttccggtcctgcttcgtgcccccggaggcgcgctcgccggagaactccatgtccgacgaatcccacccttcccaccaactctcgcagtctttgagctcacaaggttctaacagtgggagcgtgtttgggagcaagcgatcgattaaaggaatgtatagtcccatgcacaagagttctttagatagggagatccctggcagcacaaaattctccttgccgcagatccagaaagcaacaaagaacttctcgccgaacttcaagattgggcagggtggttctgggactgtatacaagggtcagcttgctgatggtactcttgtcgctgtcaaacgtgccaagaaggtttcatgggtacctggagtttggtggcgagcagttgattattgtggagtatgttcccaatgggaatcttcgagagcacctcgactgtataaatggtaaaatattggaattctcactgagattggaaattgcaattgatgtggctcatgctattacatatcttcatacctattcagatcatccagtcatccacagagacatcaaatcctcaaacattcttctaatgaacaattgtcgagccaaggttgctgactttggattcgccaaactggctccaactgattctagtcatatatctactcaagtcaaaggaacagcaggctatctcgatccagaatatctcagaacataccagctcaatgagaagagtgatgtctactcctttggagtccttctggtggagttggttactgggaggcgccctatagagccaaaaaaggcaatcattgagcgtgttaccacaaaatgggcaatggaaaaatttgtggagggcaatgctatccaaacactagatccgaatctggaagcgaccgatgcgatcaatctagcggtcgagaagctgtatgagctggctctgcaatgcttagccccaactaagaggaaccgaccgagcatgaagcggtgcgcagagattctgtggagcatccgtaaagattacagggagttggttgtacccacctctgccatgaactgaagcaggtcgtctggagcagtcaagtgaacaaaaagatgtatcattccagtttgcctctcttgattcgcttcaaagattggtggttgaaatcatccgattgctgggattctttcagttaccgcaagtggtcgtgaacaggactgatggccttcctagatgctgtgtttgtgctagaaaccagaaaagtccctgtgtgaaagtgttgctgagtaaacatgtacgagtatatatcagatatctaatggtgtgtatatcttgtaggttctcttatacaggtaagtgcatcacgcatgaagaaatctagttgtttccattgcatctttttttttgttgttgttgtctatgatgaacaatattcagcgtatgattagcaagcaacactcaggagctgtacttgtgctcttcctttcctggcgtccaatctgtgccttatcccggcacgggggtgcagaggtcactgctgtagtaatctggacggagagccagactggagctgccttcttggcaggcagctccgtcacctctttatcctgtagcaaaatcgtccgtgcattgacgtgactattttatgtccaaatatggttcttttaaattgtcactcgatgtttttatgcttcggtgtcacgtttttgacaactaaagaaggaatatactcggccgaaaaaggtccgacttcctg

SEQ ID NO: 365 - DNA, 1810 bp, Zea Mays
ctatatgcaaacccctagtcccctaccacaatacggatttgttaacgtcctctatgattgaaggagaattccaaaacctgtaaagaatgagtctcgcagtctttgagctcacaaggttctaacagtgggagcgtgtttgggagcaagcgatcgattaaaggaatgtatagtcccatgcacaagagttctttagatagggagatccctggcagcacaaaattctccttgccgcagatccagaaagcaacaaagaacttctcgccgaacttcaagattgggcagggtggttctgggactgtatacaagggtcagcttgctgatggtactcttgtcgctgtcaaacgtgccaagaagaatgtttatgacaagcatatgggtcgtgagttctggaacgagattgagacattgcaacgcattgagcacctgaatttggttaggtttcatgggtacctggagtttggtggcgagcagttgattattgtggagtatgttcccaatgggaatcttcgagagcacctcgactgtataaatggtaaaatattggaattctcactgagattggaaattgcaattgatgtggctcatgctattacatatcttcatacctattcagatcatccagtcatccacagagacatcaaatcctcaaacattcttctaatgaacaattgtcgagccaaggttgctgactttggattcgccaaactggctccaactgattctagtcatatatctactcaagtcaaaggaacagcaggctatctcgatccagaatatctcagaacataccagctcaatgagaagagtgatgtctactcctttggagtccttctggtggagttggttactgggaggcgccctatagagccaaaaaaggcaatcattgagcgtgttaccacaaaatgggcaatggaaaaatttgtggagggcaatgctatccaaacactagatccgaatctggaagcgaccgatgcgatcaatctagcggtcgagaagctgtatgagctggctctgcaatgcttagccccaactaagaggaaccgaccgagcatgaagcggtgcgcagagattctgtggagcatccgtaaagattacagggagttggttgtacccacctctgccatgaactgaagcaggtcgtctggagcagtcaagtgaacaaaaagatgtatcattccagtttgcctctcttgattcgcttcaaagattggtggttgaaatcatccgattgctgggattctttcagttaccgcaagtggtcgtgaacaggactgatggccttcctagatgctgtgtttgtgctagaaaccagaaaagtccctgtgtgaaagtgttgctgagtaaacatgtacgagtatatatcagatatctaatggtgtgtatatcttgtaggttctcttatacaggtaagtgcatcacgcatgaagaaatctagttgtttccattgcatctttttttttgttgttgttgtctatgatgaacaatattcagcgtatgattagcaagcaacactcaggagctgtacttgtgctcttcctttcctggcgtccaatctgtgccttatcccggcacgggggtgcagaggtcactgctgtagtaatctggacggagagccagactggagctgccttcttggcaggcagctccgtcacctctttatcctgtagcaaaatcgtccgtgcattgacgtgactattttatgtccaaatatggttcttttaaattgtcactcgatgtttttatgcttcggtgtcacgtttttgacaactaaagaaggaatatactcggccgaaaaaggtccgacttcctg

SEQ ID NO: 366 - DNA, 1902 bp, Zea Mays
ttcactgacaaccgctaaaaccctctatctcctgccaccgcggcggccccttctcttccctgtaataaacccccggcgagcgatgcggcggctggcgaaatccctcctcctcgcctccctctccaggaccctccgccaccgcccccagctcccgctgcttcacccttggcctccccagccccgtcgcccggagccccgcctcctccccttctccactcaaaccctagccccgggccctgctcccccgcctgcgcttgttgcggcgtcgacgggcgagcccacaggcctcgcgcttctagagtccgcggagctgcacgagtccgagggggaccaccaggaggccctcggcctcgccctcaaggcgctcgcgccgctgcaggcgtcccacggcgggtggtcgctccccgtcgcgcgcgcgctccgtctcgccggcgccgcggccacccgcgccggcagcctcagcgacgggctcgagtccctcggcgctgccgcggatatcgtcgactacctggcacccgcgcggcgcaagggggtgcctgcggaggtggcggtggtcggcgctgccgtgtacgagcagctggcgcgcgccaaaatggccatcgggcgccggtgggacgcggtgggcgacctccagcgtgcactggacctgaagactctgttcctggaggccgggagtgctgagcttgggaacgcctacagggacgtcgccgaggcctatgcgggtgtgctggacttcgacaaggcgctgccattgtgttctaaggcattggggattgcggagagacggtttggtgaggactcggcagaagtggctaagctacggcggcttctcatgtctgtctatactggtttgggtcgccatgaggaggctctggctcaaattgagcttgctaaggtggtatatgagcgattgggattgaatgttgaactttctcaggctgaaattgatggggctaatatccgtatcttgttggggagatcggaggaggcgctgaataacattaagagggtaatgcagcgggcagacaaggagagcgaggagcgtgcactagcatatgtcacaatggcaaagatattgatgtccgaggatacggttttggactcaaagcggtgcttggagatcgctcaggggatcatagatgcaaaggattccatcgaccctggtcggtttgctgaggcatatgctgagatatcaatgttgtatgagtcgttggcaaattttgaaacgtcttcgggctcgtttgaaatggcttcgaacttgatgaagaaaacactggcaattcttgagagcgccaaggagatgcatcacatcgaaggcagcatctcagcaaggctagggtggctcctcctgtatattaaaaatgttgatgagtctgtccaatatctggagagagcggttgataaattgaagaattgctttggaccacgacactttgggttaggttttgcttataggaatctggggcaggcctatcttgaaatgaaccaacatcaatcagctgtggagttcttcaaacttgcgcttgatattattgaagctacatttggaccgctacatgatgataccattgacacaaaacagtgcattgcaaatgcatacggactgatgaaaagctacaaacttgctatggagtttcaagaacaagtcatggatgcctacagtaggtgtggccatggtgccttggatgatttcaaggaagctgaaaggcttttagagcagatcaagatgaaggctcaaggattgcgtcatgcagtatttcctgcaaattcattgcctgattcagctctagctctagctcaacgcaacaaagacgattagttcttctgtatcagtgccaacttagatgagttaatggaagctcatgaatccatcctatccctatggcggtagctggtggtccc

SEQ ID NO: 367 - DNA, 1680 bp, Zea Mays
agctgtactgtatatataccacgtacggctagctagctagcgtatctgcatgcaatgcaatacctaccgtatagtatagtatcggtatgccgcccagctagcgtgtgtataaatagctgccgtgcagtagagaaccccggccaggcagcagcaggaacatctcatatccacagagacacagtgctaggtagctagcagccagtgcaggagtagcccggttatatagagagtgtagcacgactatacaatatatcacagagctagctagtagtatatacgtactatatatagtctattgctcgctatagcttgctgaatcaagctgaactactaagattaatggaggacgacaagaaggagggcaagtaccgcggcgtgcggaagcggccgtggggcaagttcgccgcggagatccgggacccggagcgcggcggctcccgcgtctggctcggcaccttcgacaccgccgaggaggccgccagggcctacgaccgcgccgcattcgccatgaagggcgccacggccgtgctcaacttccccgccagcggaggatcgtcagctggcgcggctcccggcggccggaccagcggcggctcctcctcgtccaccacgtcggctccggccagcagggggagggcccgtgttcccgactcggagaaggtggagctggagtgcctcgacgacagggtcttggaggagctgctcgcggaggacaagtacaacaagaactaatgaaacgctagctgatgcacaacatacatagccgccgcaacgcgctgctagagctagctcttcgctgccgcttccagtaaattttattaaaggagacaagaactatattaacttaattatactatactcactaccaattaagggtttcaagaatatataccccccttctcctgttcaactcggtgcctgctgggggccctccgtccggccctggagcatggacgtatatacctactgccggccggggcgatgacgtgcatgggcatacgtacgtgtgcacactgaacagcttacagccttacacgtacgtcattgttccggcaagctccatcatgcagcgtgctcgatctacctgtcgtcacactcgtcaccaacgtaccaagacaggaaggccatgcacatgctgacatgcgtatgcatttctcccttataaaaagaaagcgccagtaaatctgtatttgattatataagcatatttagtcattgtctcgaagatgaaaattatatacatatgatcagatgcagacaaattaactgtttttcttttctctcgaaaattacagttcgtcgtcctctcagtgaaaaaatatacatgcatgcatgtccaagcacgtacgcatatatatatgttcctgaaaagttctgtctagctacttaaatatatgtgtgtgtgttcctgaaaatgtttgtgcatggaagtctcaagaaatgatttttccgacactgctggctgatgtgcatgaaaagagtgctaactgcagatcgatgctgtctggacgaccctacttccaaaacaaaaacaatgataatgagaaaacgacgctggtgggaatattcttattgtaagatctaaggtttttctcctgcacgcaataaacatatttttttatgtacataactatatgtgtgttgtgcacgaatgtccttgagaaggcctagaaacataaa

SEQ ID NO: 368 - DNA, 1775 bp, Zea Mays
agccaggcacggctccagcaacgacacccgagtacggagtacccgacccgcctgcctgcctcctgcctgcctgtggtcgcctgtatcacaagctcccaaaaccgccgcgcacgctgccaccaccggtacccaacgaacatggcggcggcgccgtcctccctcgcctcctcgtcgcatatcccccgccgcgccacagccacggccccagcacagtcgcactcgcctccgttgccgcagcagctccgccccgccaggtccttcaaacgcggggcgctcgcgcagcacgtccggtacagctttgccggcagggaggcatcgaggcggcgcacaccaggtgcttgcttcgtggtctcatccagccagccaggccttgctgccatcgatgtgccggcagcgactattcctgatgccacgacgacaagcgtcactgagcggacttcggtttcatctcttttagaggttgtatcggaggacttgctcagccttaacaacaatctgaaatcgcttgttggtgcagaaaatccagttttggtttctgcagctgaacaaatttttggtgctggtggaaaaagattaaggccagcattggttttcctggtgtctagagcaactgctgaattagctgggagttaactgcagaacatcgacggttggcagagataatcgagatgattcacactgcgagtttaatacatgatgatgtcatagatgatagtgggatgagaagaggcagaggttaaccaggcatcccaccatcacaataggatattgcttgttttgaatggaaggaaactattcaccaactatatggtacacgtgtggctgtacttgctggtgattttatgtttgcacaatcttcttggtttcttgcaaacctagaaaatattgaagttataaaattgatcagtcaggtcatcaaggactttgcaagcggcgagataaaacaagcttccactctttttgattgtgacatcacacttgacgactaccttctcaagagctactacaagactgcatctttgattgcagccagcacaaaatcagcttccatattcagtggcgtcagcaccactatttgtgaaaaaatgtatgcatatggcaggaatcttggtctatccttccaggttgtcgatgacatcctggatttcacccagtcagccgaacaacttggcaaaccagcagcaagtgacttggcaaagggaaacctgactgctccagtcatcttcgctttgcaaagtgaaccagagctaagggagatcattgattctgagttcagtgacacggattcgttagctactgcaatagagctcgttcatagaagtggtgggatacggagggcacatgagcttgcaagagagaagggtgacttggcaatccaaaatctgcagtgccttccaagaagtgacttcagaagtgcccttgagaagatggtggaatacaatcttgagaggattgagtagtggattttacttgaatgctccatcagaatcataagaaaccctaggacttgaccgcagccccttgcgcctacatgtatccgagcattctacttggcagttcttgtaaataatagaaccatacagtaacttagcattcttttttgttttgcaatctgagcatgcttacaagcaacaaagtgtgtgctatatttgtacggatctacgtgcacctaacatcatgcacttgtacaattgctttgcactattatgtactatttccgatttaacagtaatacggatttaacagtaataataccgttcattttctacataaga

SEQ ID NO: 369 - DNA, 1715 bp, Zea Mays
agccaggcacggctccagcaacgacacccgagtacggagtacccgacccgcctgcctgcctcctgcctgcctgtggtcgcctgtatcacaagctcccaaaaccgccgcgcacgctgccaccaccggtacccaacgaacatggcggcggcgccgtcctccctcgcctcctcgtcgcatatcccccgccgcgccacagccacggccccagcacagtcgcactcgcctccgttgccgcagcagctccgccccgccaggtccttcaaacgcggggcgctcgcgcagcacgtccggtacagctttgccggcagggaggcatcgaggcggcgcacaccaggtgcttgcttcgtggtctcatccagccagccaggccttgctgccatcgatgtgccggcagcgactattcctgatgccacgacgacaagcgtcactgagcggacttcggtttcatctcttttagaggttgtatcggaggacttgctcagccttaacaacaatctgaaatcgaaaatccagttttggtttctgcagctgaacaaatttttggtgctggtggaaaaagattaaggccagcattggttttcctggtgtctagagcaactgctgaattagctggtttgtcggagttaactgcagaacatcgacggttggcagagataatcgagatgattcacactgcgagtttaatacatgatgatgtcatagatgatagtgggatgagaagagggaaggaaactattcaccaactatatggtacacgtgtggctgtacttgctggtgattttatgtttgcacaatcttcttggtttcttgcaaacctagaaaatattgaagttataaaattgatcagtcaggtcatcaaggactttgcaagcggcgagataaaacaagcttccactctttttgattgtgacatcacacttgacgactaccttctcaagagctactacaagactgcatctttgattgcagccagcacaaaatcagcttccatattcagtggcgtcagcaccactatttgtgaaaaaatgtatgcatatggcaggaatcttggtctatccttccaggttgtcgatgacatcctggatttcacccagtcagccgaacaacttggcaaaccagcagcaagtgacttggcaaagggaaacctgactgctccagtcatcttcgctttgcaaagtgaaccagagctaagggagatcattgattctgagttcagtgacacggattcgttagctactgcaatagagctcgttcatagaagtggtgggatacggagggcacatgagcttgcaagagagaagggtgacttggcaatccaaaatctgcagtgccttccaagaagtgacttcagaagtgcccttgagaagatggtggaatacaatcttgagaggattgagtagtggattttacttgaatgctccatcagaatcataagaaaccctaggacttgaccgcagccccttgcgcctacatgtatccgagcattctacttggcagttcttgtaaataatagaaccatacagtaacttagcattcttttttgttttgcaatctgagcatgcttacaagcaacaaagtgtgtgctatatttgtacggatctacgtgcacctaacatcatgcacttgtacaattgctttgcactattatgtactatttccgatttaacagtaatacggatttaacagtaataataccgttcattttctacataaga

SEQ ID NO: 370 - DNA, 2277 bp, Zea Mays
agccaggcacggctccagcaacgacacccgagtacggagtacccgacccgcctgcctgcctcctgcctgcctgtggtcgcctgtatcacaagctcccaaaaccgccgcgcacgctgccaccaccggtacccaacgaacatggcggcggcgccgtcctccctcgcctcctcgtcgcatatcccccgccgcgccacagccacggccccagcacagtcgcactcgcctccgttgccgcagcagctccgccccgccaggtccttcaaacgcggggcgctcgcgcagcacgtccggtacagctttgccggcagggaggcatcgaggcggcgcacaccaggtgcttgcttcgtggtctcatccagccagccaggccttgctgccatcgatgtgccggcagcgactattcctgatgccacgacgacaagcgtcactgagcggacttcggtttcatctcttttagaggttgtatcggaggacttgctcagccttaacaacaatctgaaatcgcttgttggtgcagaaaatccagttttggtttctgcagctgaacaaatttttggtgctggtggaaaaagattaaggccagcattggttttcctggtgtctagagcaactgctgaattagctggtttgtcggagttaactgcagaacatcgacggttggcagagataatcgagatgattcacactgcgagtttaatacatgatgatgtcatagatgatagtgggatgagaagaggtacatgatgatataatgctattatctaatatgccaaaagtactatcaataaaaccatgtcattttgggaatagatgaatgttatattcttcttagaaacatttctagctatagaaacatggattactacgaaagggcctctatctgagttggttatacggtccgagtagtacttctcatgtcctaagtttacccctttgtaggagtgaatttcagactgggggttaaaaaatcccctcgtctgagaaatattctcttaatacaatactaggggttgtcttacccctgtaggtcgagtttttagaaacatggattatttgctgcactctttttcaagtgctctttagggaacatttgattattgtaataacataatataagtagcacagttccgttttcgttttccttcttttctgaaaattggccagtaacttttaaattgattgagatagagatgagcattcacttcggttctaagtgttgggcctaaagcaggcagaggttaaccaggcatcccaccatcacaataggatattgcttgttttgaatggaaggaaactattcaccaactatatggtacacgtgtggctgtacttgctggtgattttatgtttgcacaatcttcttggtttcttgcaaacctagaaaatattgaagttataaaattgatcagtcaggtcatcaaggactttgcaagcggcgagataaaacaagcttccactctttttgattgtgacatcacacttgacgactaccttctcaagagctactacaagactgcatctttgattgcagccagcacaaaatcagcttccatattcagtggcgtcagcaccactatttgtgaaaaaatgtatgcatatggcaggaatcttggtctatccttccaggttgtcgatgacatcctggatttcacccagtcagccgaacaacttggcaaaccagcagcaagtgacttggcaaagggaaacctgactgctccagtcatcttcgctttgcaaagtgaaccagagctaagggagatcattgattctgagttcagtgacacggattcgttagctactgcaatagagctcgttcatagaagtggtgggatacggagggcacatgagcttgcaagagagaagggtgacttggcaatccaaaatctgcagtgccttccaagaagtgacttcagaagtgcccttgagaagatggtggaatacaatcttgagaggattgagtagtggattttacttgaatgctccatcagaatcataagaaaccctaggacttgaccgcagccccttgcgcctacatgtatccgagcattctacttggcagttcttgtaaataatagaaccatacagtaacttagcattcttttttgttttgcaatctgagcatgcttacaagcaacaaagtgtgtgctatatttgtacggatctacgtgcacctaacatcatgcacttgtacaattgctttgcactattatgtactatttccgatttaacagtaatacggatttaacagtaataataccgttcattttctacataaga

SEQ ID NO: 371 - DNA, 2579 bp, Zea Mays
agccaggcacggctccagcaacgacacccgagtacggagtacccgacccgcctgcctgcctcctgcctgcctgtggtcgcctgtatcacaagctcccaaaaccgccgcgcacgctgccaccaccggtacccaacgaacatggcggcggcgccgtcctccctcgcctcctcgtcgcatatcccccgccgcgccacagccacggccccagcacagtcgcactcgcctccgttgccgcagcagctccgccccgccaggtccttcaaacgcggggcgctcgcgcagcacgtccggtacagctttgccggcagggaggcatcgaggcggcgcacaccaggtgcttgcttcgtggtctcatccagccagccaggttccttgtcacttcagttggccttgctgccatcgatgtgccggcagcgactattcctgatgccacgacgacaagcgtcactgagcggacttcggtttcatctcttttagaggttgtatcggaggacttgctcagccttaacaacaatctgaaatcgcttgttggtgcagaaaatccagttttggtttctgcagctgaacaaatttttggtgctggtggaaaaagattaaggccagcattggttttcctggtgtctagagcaactgctgaattagctggtttgtcggagttaactgcagaacatcgacggttggcagagataatcgagatgattcacactgcgagtttaatacatgatgatgtcatagatgatagtgggatgagaagaggtacatgatgatataatgctattatctaatatgccaaaagtactatcaataaaaccatgtcattttgggaatagatgaatgttatattcttcttagaaacatttctagctatagaaacatggattactacgaaagggcctctatctgagttggttatacggtccgagtagtacttctcatgtcctaagtttacccctttgtaggagtgaatttcagactgggggttaaaaaatcccctcgtctgagaaatattctcttaatacaatactaggggttgtcttacccctgtaggtcgagtttttagaaacatggattatttgctgcactctttttcaagtgctctttagggaacatttgattattgtaataacataatataagtagcacagttccgttttcgttttccttcttttctgaaaattggccagtaacttttaaattgattgagatagagatgagcattcacttcggttctaagtgttgggcctaaagcaggcagaggttaaccaggcatcccaccatcacaataggatattgcttgttttgaatgtaaggccactctcgtttttttcacacgggagagtggggggtgggggtggggggctggatctcacaacttgaccagtttattctaatgtagagctaactgtttcagggaaggaaactattcaccaactatatggtacacgtgtggctgtacttgctggtgattttatgtttgcacaatcttcttggtttcttgcaaacctagaaaatattgaagttataaaattgatcagtcaggtcatcaaggactttgcaagcggcgagataaaacaagcttccactctttttgattgtgacatcacacttgacgactaccttctcaagagctactacaagactgcatctttgattgcagccagcacaaaatcagcttccatattcagtggcgtcagcaccactatttgtgaaaaaatgtatgcatatggcaggaatcttggtctatccttccaggttgtcgatgacatcctggatttcacccagtcagccgaacaacttggcaaaccagcagcaagtgacttggcaaagggaaacctgactgctccagtcatcttcgctttgcaaagtgaaccagagctaagggagatcattgattctgagttcagtgacacggattcgttagctactgcaatagagctcgttcatagaagtggtgggatacggagggcacatgagcttgcaagagagaagggtgacttggcaatccaaaatctgcagtgccttccaagaagtgacttcagaagtgcccttgagaagatggtggaatacaatcttgagaggattgagtagtggattttacttgaatgctccatcaggtacatatctccatttggggtttggggtagttctcatatagatctttatattcagcccctttgggaagatacatttcactgaaaaatcagatgaatcacactatttcatacaaattctggggatagcctttgagcaggccactactatcaagttgattttgtaacagcttgtgcagaatcataagaaaccctaggacttgaccgcagccccttgcgcctacatgtatccgagcattctacttggcagttcttgtaaataatagaaccatacagtaacttagcattcttttttgttttgcaatctgagcatgcttacaagcaacaaagtgtgtgctatatttgtacggatctacgtgcacctaacatcatgcacttgtacaattgctttgcactattatgtactatttccgatttaacagtaatacggatttaacagtaataataccgttcattttctacataaga

SEQ ID NO: 372 - DNA, 696 bp, Zea Mays
gtcaaatctttcgtcatcgcgctcgaaggtaaaggtctggtcatgaggaagggttttaaaggatcatttcctgatgctgcttcgtctgctaagatatttgctgtccttgctggcgtacaaagtttggtagcctgctctttgcgaaaactacgtggaaaagatgatggtatcaatgcaggagtggcaggctgttgcactggccttgcgctgagctttccaggtgcaccgcaaactctgattcagagctgcctgacctttgggactttctcgtacatcatagagacgctaaacaagcagcagcccgcactggcgctaccactggctacagagattaaggatcaaaaggctggacaaagtgttcttcctcccttcacgctccctcttccgcaggatgcgatggatggattttctaagttccagaactttttgtcgtcgaaatttcagggaaaatgagtcaccttatggagtgacgtttagttgccttgtaaatgcctcaatctgagcccttttttgggtttatttctctgcaaatgtatgtttctaaggtagtgtgttgttaatgttaatgattctacacctttctgtgacagttttgcgaataagaggagcacctcatcctttgttcagctgttgtagtatttgttggggcattcgatgccgaaaatcacttgcctaacctttttacctccgcacaag

SEQ ID NO: 373 - DNA, 3536 bp, Zea Mays
tgaatccttattttaccagtgatattatttatatcatcgttttaaaggcggtatatatcaaattctcccctcaggagacactgtatcaaatgggtcgcttacctcaaatgatcttgcaaagaatggaggaaagcggtttatcgttgaggaagagtagtgttaaataaaaaccccggtccccttctgtccgccgccataaaccctaagacacaagcgcgctgcctgaaccacccagcccacgcgccggcggccgcccgccatggtgaaggcttacctccgctacgagccggccctcaccttcggtgtgattgcgtcgccggagtccaacgtcgtctacgacccctcgggccgccgcctcctcgccgccgccctcgaccgcctcgccgcctgggacatcaagcgtggtcttccctctgtctccttcgcaccttcctcctcctccccttcgctcgccgtctcctgcatcgcttcctcccactccgccgccgtctcctcttcgattgcgagcgggcacgcagatgggagcatcaggctgtgggacgcggaaacaggtgcttgcgaggcaaccctccacggccaccgctccgctgcctccgccctccgcttcggcccctctggcgccgtcctcgcttctggcagcaaggactgcgatgtcatcctctgggacgtcgttgcgcaggctgggctcttccgtctgcgtggccaccgtgaccaggtcaccgatttggtgtttctggattctggtaagaagctgatgagctgctccaaggacaagtttattagggtttgggaccttgaaacacagcactgtcttcaaatcgttggtggtcaccgcagtgagatttggtcaatggatgttgatcctagcgagagatttttagtgtctgggtctgctgatccagagctgcaagtgtttagaatccggcaatcagtggaggaaggcgaggattggagcaagtgggatgtgctcaagctatttggtgagattccacggcagagcaaggaacgagtggcaaatgttaggtttaatagggacggcagtcttgtggtatgccaggtggctgggaagacagcagatatttatagggttcttgatgaaacagaggctgcacgtaaggccaaaaggcgggtgagcagaaagaaggagaaagcatctgcgaaatccatgattgctgaagagaatggcactatcattgatcctttaccagttcaaaacttacaaaatcctactgttattgtcaccgatgtatttaagctatttcaagttttacgtgcaagcaaaaaaatatgttcgattacattctctccaagtaatcctccaagaggatgccttgccactttgtctctatcactcaacaataacatgcttgagacatattcagtggataaggagaaggtatcaaagatgtactcagttgagatgcatggacaccgttctgacatcaggagtgtctcccttaattcggaggacaacctccttatgtcgactagtcataacgctgtcaagatatggaaccctagtacaggggaatgccttcggaccattgactctggatatgggttgtcaagtgctttcgttggaaatcggtatgctcttgttggtacaaaaagtggtacgttggagattatggatattgctagtgggagcttaactgaggccatagaagctcatgctggctccatacggtcaattgtacctattccagatgaagatggaactgttggtgcacgaggctttgtcactggaagtgctgatcatgatgtcaagttctgggaataccaattggtgcagaagtctgataacgactctaagcagctgactgtaactaatgtgaggaccttgaaaatgacagaagatgttcttgctgtctcgatcagtcccgaaggaaagcacattgctgttgctctcttggattgccatgtcaagttctctgtatggacatatcatcagatggagctttgctagttactggctctgcggacaaaaatttgaagatatggggtatggattttggggactgccacaggtctatatttgctcactcagacagtgtgatggatgttaagtttgtgtatagaactcattatatgttcagtgtggggaaagatcgcactatgaagtactgggatgctgataaatttgagttattgttaacacttgaaggacatcatgctgaagtttggtgcctcacactcagcagtcgcggtgattttgttgtaacaggttcacatgatcgttccattcggcgttgggatcgtactgaagaacaactgttcattgaggaagagaaggagaaaagattggaagaaacctttgaggctgatttagaaaacgataatgactatagatatgggcagaaagatgatgcccctgatgaaggttctgtgggtgttcctggtaggaaaacaaaagagacagtaacttctgctgatgcaatcatggatgcacttgacactgctgaggaggaactaaaacgcattaatcaacataaaatggaagagcaaattactgcgaaggcagctaaatttcaacctaatgttataatgcaagggcattcaccttcagattatgttctgaatgtagtttcaagcatccgtccaaatgatctggagcaggccctcttggcattgccgttctcggatgcactaaagctcatgtcttacttgaaggagtggtctttggttccttcaaaggttgagcttgtttgtagggtttgcttagtgctccttcagacacatcacaatcaattaactgccacgccagctgcaagatccttgttgacagaactgaaggatattctttactgtagagtaaaggaatgcaaggatactataggcttcaacctcgccgcaatggatcatataaaagaattgttggcgttgagatcagatgcacctttccgtgatgccaaggcgaaactcatggaaatcaagaaggagcagtcgaagcggtcaagtagtaggcttgacggagatgaaaaaaggaaaaagaagagaaagaaagcgtccgctgaaagctgagccaacaaacaaaaacaaaagaatgttgtattgttgttcttaccttctgcaactactacatggacgtgctcgtttccttggttcacgagcacgcagaatttttgttagatgggtgtaatcggaaagtgcgtggacataaagatttctagaggttcgtcttgcgtatctgatgaaagggaatatatcaggtggaacatatacattggtgtagtcgtgtaactaaggtcccgtctggtaggactttagcttgcccaaacacggttttagctctagttttttttttctaaaagcagcttgctgaagccatttcgtaaagaaacggtttatcctagtgctagaattgtttttctatattaaagtgttagcccgcattaaggatggaattattcttcttttatgtagtacaaaaatgttttatgtagtacaaaaatggctcttacttttagatgtttaagctgttttaaaaaatagtatttaggactagtttagaaatctgatttttatttttataaaag

SEQ ID NO: 374 - DNA, 3477 bp, Zea Mays
ttgcaaagaatggaggaaagcggtttatcgttgaggaagagtagtgttaaataaaaaccccggtccccttctgtccgccgccataaaccctaagacacaagcgcgctgcctgaaccacccagcccacgcgccggcggccgcccgccatggtgaaggcttacctccgctacgagccggccctcaccttcggtgtgattgcgtcgccggagtccaacgtcgtctacgacccctcgggccgccgcctcctcgccgccgccctcgaccgcctcgccgcctgggacatcaagcgtggtcttccctctgtctccttcgcaccttcctcctcctccccttcgctcgccgtctcctgcatcgcttcctcccactccgccgccgtctcctcttcgattgcgagcgggcacgcagatgggagcatcaggctgtgggacgcggaaacaggtgcttgcgaggcaaccctccacggccaccgctccgctgcctccgccctccgcttcggcccctctggcgccgtcctcgcttctggcagcaaggactgcgatgtcatcctctgggacgtcgttgcgcaggctgggctcttccgtctgcgtggccaccgtgaccaggtcaccgatttggtgtttctggattctggtaagaagctgatgagctgctccaaggacaagtttattagggtttgggaccttgaaacacagcactgtcttcaaatcgttggtggtcaccgcagtgagatttggtcaatggatgttgatcctagcgagagatttttagtgtctgggtctgctgatccagagctgcaagtgtttagaatccggcaatcagtggaggaaggcgaggattggagcaagtgggatgtgctcaagctatttggtgagattccacggcagagcaaggaacgagtggcaaatgttaggtttaatagggacggcagtcttgtggtatgccaggtggctgggaagacagcagatatttatagggttcttgatgaaacagaggctgcacgtaaggccaaaaggcgggtgagcagaaagaaggagaaagcatctgcgaaatccatgattgctgaagagaatggcactatcattgatcctttaccagttcaaaacttacaaaatcctactgttattgtcaccgatgtatttaagctatttcaagttttacgtgcaagcaaaaaaatatgttcgattacattctctccaagtaatcctccaagaggatgccttgccactttgtctctatcactcaacaataacatgcttgagacatattcagtggataaggagaaggtatcaaagatgtactcagttgagatgcatggacaccgttctgacatcaggagtgtctcccttaattcggaggacaacctccttatgtcgactagtcataacgctgtcaagatatggaaccctagtacaggggaatgccttcggaccattgactctggatatgggttgtcaagtgctttcgttggaaatcggtatgctcttgttggtacaaaaagtggtacgttggagattatggatattgctagtgggagcttaactgaggccatagaagctcatgctggctccatacggtcaattgtacctattccagatgaagatggaactgttggtgcacgaggctttgtcactggaagtgctgatcatgatgtcaagttctgggaataccaattggtgcagaagtctgataacgactctaagcagctgactgtaactaatgtgaggaccttgaaaatgacagaagatgttcttgctgtctcgatcagtcccgaaggaaagcacattgctgttgctctcttggattgccatgtcaaggtcttccacatggacacactgaaaccatctttaaacctttatgggcacaaacttccagttctctgtatggacatatcatcagatggagctttgctagttactggctctgcggacaaaaatttgaagatatggggtatggattttggggactgccacaggtctatatttgctcactcagacagtgtgatggatgttaagtttgtgtatagaactcattatatgttcagtgtggggaaagatcgcactatgaagtactgggatgctgataaatttgagttattgttaacacttgaaggacatcatgctgaagtttggtgcctcacactcagcagtcgcggtgattttgttgtaacaggttcacatgatcgttccattcggcgttgggatcgtactgaagaacaactgttcattgagagaaggagaaaagattggaagaaacctttgaggctgatttagaaaacgataatgactatagatatgggcagaaagatgatgcccctgatgaaggttctgtgggtgttcctggtaggaaaacaaaagagacagtaacttctgctgatgcaatcatggatgcacttgacactgctgaggaggaactaaaacgcattaatcaacataaaatggaagagcaaattactgcgaaggcagctaaatttcaacctaatgttataatgcaagggcattcaccttcagattatgttctgaatgtagtttcaagcatccgtccaaatgatctggagcaggccctcttggcattgccgttctcggatgcactaaagctcatgtcttacttgaaggagtggtctttggttccttcaaaggttgagcttgtttgtagggtttgcttagtgctccttcagacacatcacaatcaattaactgccacgccagctgcaagatccttgttgacagaactgaaggatattctttactgtagagtaaaggaatgcaaggatactataggcttcaacctcgccgcaatggatcatataaaagaattgttggcgttgagatcagatgcacctttccgtgatgccaaggcgaaactcatggaaatcaagaaggagcagtcgaagcggtcaagtagtaggcttgacggagatgaaaaaaggaaaaagaagagaaagaaagcgtccgctgaaagctgagccaacaaacaaaaacaaaagaatgttgtattgttgttcttaccttctgcaactactacatggacgtgctcgtttccttggttcacgagcacgcagaatttttgttagatgggtgtaatcggaaagtgcgtggacataaagatttctagaggttcgtcttgcgtatctgatgaaagggaatatatcaggtggaacatatacattggtgtagtcgtgtaactaaggtcccgtctggtaggactttagcttgcccaaacacggttttagctctagttttttttttctaaaagcagcttgctgaagccatttcgtaaagaaacggtttatcctagtgctagaattgtttttctatattaaagtgttagcccgcattaaggatggaattattcttcttttatgtagtacaaaaatgttttatgtagtacaaaaatggctcttacttttagatgtttaagctgttttaaaaaatagtatttaggactagtttagaaatctgatttttatttttataaaag

SEQ ID NO: 375 - DNA, 3257 bp, Zea Mays
ataaaaaccccggtccccttctgtccgccgccataaaccctaagacacaagcgcgctgcctgaaccacccagcccacgcgccggcggccgcccgccatggtgaaggcttacctccgctacgagccggccctcaccttcggtgtgattgcgtcgccggagtccaacgtcgtctacgacccctcgggccgccgcctcctcgccgccgccctcgaccgcctcgccgcctgggacatcaagcgtggtcttccctctgtctccttcgcaccttcctcctcctccccttcgctcgccgtctcctgcatcgcttcctcccactccgccgccgtctcctcttcgattgcgagcgggcacgcagatgggagcatcaggctgtgggacgcggaaacaggtgcttgcgaggcaaccctccacggccaccgctccgctgcctccgccctccgcttcggcccctctggcgccgtcctcgcttctggcagcaaggactgcgatgtcatcctctgggacgtcgttgcgcaggctgggctcttccgtctgcgtggccaccgtgaccaggtcaccgatttggtgtttctggattctggtaagaagctgatgagctgctccaaggacaagtttattagggtttgggaccttgaaacacagcactgtcttcaaatcgttggtggtcaccgcagtgagatttggtcaatggatgttgatcctagcgagagatttttagtgtctgggtctgctgatccagagctgcaagtgtttagaatccggcaatcagtggaggaaggcgaggattggagcaagtgggatgtgctcaagctatttggtgagattccacggcagagcaaggaacgagtggcaaatgttaggtttaatagggacggcagtcttgtggtatgccaggtggctgggaagacagcagatatttatagggttcttgatgaaacagaggctgcacgtaaggccaaaaggcgggtgagcagaaagaaggagaaagcatctgcgaaatccatgattgctgaagagaatggcactatcattgatcctttaccagttcaaaacttacaaaatcctactgttattgtcaccgatgtatttaagctatttcaagttttacgtgcaagcaaaaaaatatgttcgattacattctctccaagtaatcctccaagaggatgccttgccactttgtctctatcactcaacaataacatgcttgagacatattcagtggataaggagaaggtatcaaagatgtactcagttgagatgcatggacaccgttctgacatcaggagtgtctcccttaattcggaggacaacctccttatgtcgactagtcataacgctgtcaagatatggaaccctagtacaggggaatgccttcggaccattgactctggatatgggttgtcaagtgctttcgttggaaatcggtatgctcttgttggtacaaaaagtgatgaagatggaactgttggtgcacgaggctttgtcactggaagtgctgatcatgatgtcaagttctgggaataccaattggtgcagaagtctgataacgactctaagcagctgactgtaactaatgtgaggaccttgaaaatgacagaagatgttcttgctgtctcgatcagtcccgaaggaaagcacattgctgttgctctcttggattgccatgtcaaggtcttccacatggacacactgaaaccatctttaaacctttatgggcacaaacttccagttctctgtatggacatatcatcagatggagctttgctagttactggctctgcggacaaaaatttgaagatatggggtatggattttggggactgccacaggtctatatttgctcactcagacagtgtgatggatgttaagtttgtgtatagaactcattatatgttcagtgtggggaaagatcgcactatgaatcgcggtgattttgttgtaacaggttcacatgatcgttccattcggcgttgggatcgtactgaagaacaactgttcattgaggaagagaaggagaaaagattggaagaaacctttgaggctgatttagaaaacgataatgactatagatatgggcagaaagatgatgcccctgatgaaggttctgtgggtgttcctggtaggaaaacaaaagagacagtaacttctgctgatgcaatcatggatgcacttgacactgctgaggaggaactaaaacgcattaatcaacataaaatggaagagcaaattactgcgaaggcagctaaatttcaacctaatgttataatgcaagggcattcaccttcagattatgttctgaatgtagtttcaagcatccgtccaaatgatctggagcaggccctcttggcattgccgttctcggatgcactaaagctcatgtcttacttgaaggagtggtctttggttccttcaaaggttgagcttgtttgtagggtttgcttagtgctccttcagacacatcacaatcaattaactgccacgccagctgcaagatccttgttgacagaactgaaggatattctttactgtagagtaaaggaatgcaaggatactataggcttcaacctcgccgcaatggatcatataaaagaattgttggcgttgagatcagatgcacctttccgtgatgccaaggcgaaactcatggaaatcaagaaggagcagtcgaagcggtcaagtagtaggcttgacggagatgaaaaaaggaaaaagaagagaaagaaagcgtccgctgaaagctgagccaacaaacaaaaacaaaagaatgttgtattgttgttcttaccttctgcaactactacatggacgtgctcgtttccttggttcacgagcacgcagaatttttgttagatgggtgtaatcggaaagtgcgtggacataaagatttctagaggttcgtcttgcgtatctgatgaaagggaatatatcaggtggaacatatacattggtgtagtcgtgtaactaaggtcccgtctggtaggactttagcttgcccaaacacggttttagctctagttttttttttctaaaagcagcttgctgaagccatttcgtaaagaaacggtttatcctagtgctagaattgtttttctatattaaagtgttagcccgcattaaggatggaattattcttcttttatgtagtacaaaaatgttttatgtagtacaaaaatggctcttacttttagatgtttaagctgttttaaaaaatagtatttaggactagtttagaaatctgatttttatttttataaaag

SEQ ID NO: 376 - DNA, 3226 bp, Zea Mays
ataaaccctaagacacaagcgcgctgcctgaaccacccagcccacgcgccggcggccgcccgccatggtgaaggcttacctccgctacgagccggccctcaccttcggtgtgattgcgtcgccggagtccaacgtcgtctacgacccctcgggccgccgcctcctcgccgccgccctcgaccgcctcgccgcctgggacatcaagcgtggtcttccctctgtctccttcgcaccttcctcctcctccccttcgctcgccgtctcctgcatcgcttcctcccactccgccgccgtctcctcttcgattgcgagcgggcacgcagatgggagcatcaggctgtgggacgcggaaacaggtgcttgcgaggcaaccctccacggccaccgctccgctgcctccgccctccgcttcggcccctctggcgccgtcctcgcttctggcagcaaggactgcgatgtcatcctctgggacgtcgttgcgcaggctgggctcttccgtctgcgtggccaccgtgaccaggtcaccgatttggtgtttctggattctggtaagaagctgatgagctgctccaaggacaagtttattagggtttgggaccttgaaacacagcactgtcttcaaatcgttggtggtcaccgcagtgagatttggtcaatggatgttgatcctagcgagagatttttagtgtctgggtctgctgatccagagctgcaagtgtttagaatccggcaatcagtggaggaaggcgaggattggagcaagtgggatgtgctcaagctatttggtgagattccacggcagagcaaggaacgagtggcaaatgttaggtttaatagggacggcagtcttgtggtatgccaggtggctgggaagacagcagatatttatagggttcttgatgaaacagaggctgcacgtaaggccaaaaggcgggtgagcagaaagaaggagaaagcatctgcgaaatccatgattgctgaagagaatggcactatcattgatcctttaccagttcaaaacttacaaaatcctactgttattgtcaccgatgtatttaagctatttcaagttttacgtgcaagcaaaaaaatatgttcgattacattctctccaagtaatcctccaagaggatgccttgccactttgtctctatcactcaacaataacatgcttgagacatattcagtggataaggagaaggtatcaaagatgtactcagttgagatgcatggacaccgttctgacatcaggagtgtctcccttaattcggaggacaacctccttatgtcgactagtcataacgctgtcaagatatggaaccctagtacaggggaatgccttcggaccattgactctggatatgggttgtcaagtgctttcgttggaaatcggtatgctcttgttggtacaaaaagtggtacgttggagattatggatattgctagtgggagcttaactgaggccatagaagctcatgctggctccatacggtcaattgtacctattccagatgaagatggaactgttggtgcacgaggctttgtcactggaagtgctgatcatgatgtcaagttctgggaataccaattggtgcagaagtctgataacgactctaagcagctgactgtaactaatgtgaggaccttgaaaatgacagaagatgttcttgctgtctcgatcagtcccgaaggaaagcacattgctgttgctctcttggattgccatgtcaaggtcttccacatggacacactgaaaccatctttaaacctttatgggcacaaacttccagttctctgtatggacatatcatcagatggagctttgctagttactggctctgcggacaaaaatttgaagatatggggtatggattttggggactgccacaggtctatatttgctcactcagacaggttcacatgatcgttccattcggcgttgggatcgtactgaagaacaactgttcattgaggaagagaaggagaaaagattggaagaaacctttgaggctgatttagaaaacgataatgactatagatatgggcagaaagatgatgcccctgatgaaggttctgtgggtgttcctggtaggaaaacaaaagagacagtaacttctgctgatgcaatcatggatgcacttgacactgctgaggaggaactaaaacgcattaatcaacataaaatggaagagcaaattactgcgaaggcagctaaatttcaacctaatgttataatgcaagggcattcaccttcagattatgttctgaatgtagtttcaagcatccgtccaaatgatctggagcaggccctcttggcattgccgttctcggatgcactaaagctcatgtcttacttgaaggagtggtctttggttccttcaaaggttgagcttgtttgtagggtttgcttagtgctccttcagacacatcacaatcaattaactgccacgccagctgcaagatccttgttgacagaactgaaggatattctttactgtagagtaaaggaatgcaaggatactataggcttcaacctcgccgcaatggatcatataaaagaattgttggcgttgagatcagatgcacctttccgtgatgccaaggcgaaactcatggaaatcaagaaggagcagtcgaagcggtcaagtagtaggcttgacggagatgaaaaaaggaaaaagaagagaaagaaagcgtccgctgaaagctgagccaacaaacaaaaacaaaagaatgttgtattgttgttcttaccttctgcaactactacatggacgtgctcgtttccttggttcacgagcacgcagaatttttgttagatgggtgtaatcggaaagtgcgtggacataaagatttctagaggttcgtcttgcgtatctgatgaaagggaatatatcaggtggaacatatacattggtgtagtcgtgtaactaaggtcccgtctggtaggactttagcttgcccaaacacggttttagctctagttttttttttctaaaagcagcttgctgaagccatttcgtaaagaaacggtttatcctagtgctagaattgtttttctatattaaagtgttagcccgcattaaggatggaattattcttcttttatgtagtacaaaaatgttttatgtagtacaaaaatggctcttacttttagatgtttaagctgttttaaaaaatagtatttaggactagtttagaaatctgatttttatttttataaaag

SEQ ID NO: 377 - DNA, 1654 bp, Zea Mays
atttccgtctctctctccattttgcgcccgcacctccccacctccacctcccctcctttcggttgttgtctgacttgtctcctactctcctcgccttcccccttgccttagggtttatcccgcgctccgcctcgctccgtccctccctgattcgcgcgatctccgcgcggccatggtctccggcgcggcgcccaacccggacgggggcggcgcccaaaacacccagcgcccgccgccgcttactcaggccggggcccggacggccctcgccacgccgccggcggtctccggcggcgccgcgcactccgcttctaccagtgggggcagcgccggctcaccaccgtccagccgcagcgagcagcacgcccccgacggtgctgccaagggtcccgccctcggggccgcgcccgcggcggccgcgtccacgccggccagcgacagcacgttcctccgcttgaataatctcgacatcaacggcgacgacgcgccgtcgtcgcaggctcctacgagcaagaagaaaaggagaggcacacgggcagtgggtcctgataaaggtaaccggggactgcgccagtttagtatgaaagtttgtgagaaagttgaaagtaaagggagaacaacatataatgaggtggcagatgaacttgttgctgagtttacagaccccaacaataatattgaggcaccagatcctgataaccctaacgcgcaacaatatgatgagaaaaatatacgacgaagagtttatgatgctttgaatgttctgatggctatggacattatatctaaagataaaaaggagatccagtggaagggcttgccgcgtactagtataagtgacattgaagaaatgaagacggagcttgtgggactgaaaggtaggattgaaaagaaaagtgcttatctacaggagctacaagaccaagtctgcaaaacctgattcaacgaaatgaacagtcatatggttcaggaaacacgccttctggtggagtggctttgccatttatcctagttcagacccgacctcatgctaccgtggaagttgagatatcagaagatatgcagctggtgcattttgacttcaatagcaccccattcgagctgcacgacgactcatacgtcctaaaagaaatgcgattctgtggaagagaacaacatgacagcactcaagagtcgatatcaaatggaggtgagagctcaagcgtgtcaaatatttattggcaacacgtacagcatgtggaaaggccaaacaatggcacaggtaggttaccgagctcaccgcctattccagggatcttgaaagggcgtgcgaagcacgagcactaacgctagggtgttggttcactttccttttcgtctgagcagttggttttattgcatttctccgttgtgtaaagggccctgtaaattattaggcaagcgggagcgtagcttgatctaatttagctctgcaccagattggtagaacgacgggtgctctaagtagttgtgtaactataactatccttgaatcggtttctttagtatggttgagagaagggttgacatgtaattttgtagagccttgtaaaattaaaattgttgatttctatcagggtgaaatttctgggcacaatctttatttcgtgttccttttcccatcagtgaacgtaaa

SEQ ID NO: 378 - DNA, 1547 bp, Zea Mays
cctccccacctccacctcccctcctttcggttgttgtctgacttgtctcctactctcctcgccttcccccttgccttagggtttatcccgcgctccgcctcgctccgtccctccctgattcgcgcgatctccgcgcggccatggtctccggcgcggcgcccaacccggacgggggcggcgcccaaaacacccagcgcccgccgccgcttactcaggccggggcccggacggccctcgccacgccgccggcggtctccggcggcgccgcgcactccgcttctaccagtgggggcagcgccggctcaccaccgtccagccgcagcgagcagcacgcccccgacggtgctgccaagggtcccgccctcggggccgcgcccgcggcggccgcgtccacgccggccagcgacagcacgttcctccgcttgaataatctcgacatcaacggcgacgacgcgccgtcgtcgcaggctcctacgagcaagaagaaaaggagaggcacacgggcagtgggtcctgataaaggtaaccggggactgcgccagtttagtatgaaagtttgtgagaaagttgaaagtaaagggagaacaacatataatgaggtggcagatgaacttgttgctgagtttacagaccccaacaataatattgaggcaccagatcctgataaccctaacgcgataaaaaggagatccagtggaagggcttgccgcgtactagtataagtgacattgaagaaatgaagacggagcttgtgggactgaaaggtaggattgaaaagaaaagtgcttatctacaggagctacaagaccaatatgtaggtctgcaaaacctgattcaacgaaatgaacagtcatatggttcaggaaacacgccttctggtggagtggctttgccatttatcctagttcagacccgacctcatgctaccgtggaagttgagatatcagaagatatgcagctggtgcattttgacttcaatagcaccccattcgagctgcacgacgactcatacgtcctaaaagaaatgcgattctgtggaagagaacaacatgacagcactcaagagtcgatatcaaatggaggtgagagctcaagcgtgtcaaatatttattggcaacacgtacagcatgtggaaaggccaaacaatggcacaggtaggttaccgagctcaccgcctattccagggatcttgaaagggcgtgcgaagcacgagcactaacgctagggtgttggttcactttccttttcgtctgagcagttggttttattgcatttctccgttgtgtaaagggccctgtaaattattaggcaagcgggagcgtagcttgatctaatttagctctgcaccagattggtagaacgacgggtgctctaagtagttgtgtaactataactatccttgaatcggtttctttagtatggttgagagaagggttgacatgtaattttgtagagccttgtaaaattaaaattgttgatttctatcagggtgaaatttctgggcacaatctttatttcgtgttccttttcccatcagtgaacgtaaa

SEQ ID NO: 379 - DNA, 1622 bp, Zea Mays
cctccccacctccacctcccctcctttcggttgttgtctgacttgtctcctactctcctcgccttcccccttgccttagggtttatcccgcgctccgcctcgctccgtccctccctgattcgcgcgatctccgcgcggccatggtctccggcgcggcgcccaacccggacgggggcggcgcccaaaacacccagcgcccgccgccgcttactcaggccggggcccggacggccctcgccacgccgccggcggtctccggcggcgccgcgcactccgcttctaccagtgggggcagcgccggctcaccaccgtccagccgcagcgagcagcacgcccccgacggtgctgccaagggtcccgccctcggggccgcgcccgcggcggccgcgtccacgccggccagcgacagcacgttcctccgcttgaataatctcgacatcaacggcgacgacgcgccgtcgtcgcaggctcctacgagcaagaagaaaaggagaggcacacgggcagtgggtcctgataaaggtaaccggggactgcgccagtttagtatgaaagtttgtgagaaagttgaaagtaaagggagaacaacatataatgagatgaacttgttgctgagtttacagaccccaacaataatattgaggcaccagatcctgataaccctaacgcgcaacaatatgatgagaaaaatatacgacgaagagtttatgatgctttgaatgttctgatggctatggacattatatctaaagataaaaaggagatccagtggaagggcttgccgcgtactagtataagtgacattgaagaaatgaagacggagcttgtgggactgaaaggtaggattgaaaagaaaagtgcttatctacaggagctacaagaccaatatgtaggtctgcaaaacctgattcaacgaaatgaacagtcatatggttcaggaaacacgccttctggtggagtggctttgccatttatcctagttcagacccgacctcatgctaccgtggaagttgagatatcagaagatatgcagctggtgcattttgacttcaatagcaccccattcgagctgcacgacgactcatacgtcctaaaagaaatgcgattctgtggaagagaacaacatgacagcactcaagagtcgatatcaaatggaggtgagagctcaagcgtgtcaaatatttattggcaacacgtacagcatgtggaaaggccaaacaatggcacaggtaggttaccgagctcaccgcctattccagggatcttgaaagggcgtgcgaagcacgagcactaacgctagggtgttggttcactttccttttcgtctgagcagttggttttattgcatttctccgttgtgtaaagggccctgtaaattattaggcaagcgggagcgtagcttgatctaatttagctctgcaccagattggtagaacgacgggtgctctaagtagttgtgtaactataactatccttgaatcggtttctttagtatggttgagagaagggttgacatgtaattttgtagagccttgtaaaattaaaattgttgatttctatcagggtgaaatttctgggcacaatctttatttcgtgttccttttcccatcagtgaacgtaaa

SEQ ID NO: 380 - DNA, 1527 bp, Zea Mays
cctccccacctccacctcccctcctttcggttgttgtctgacttgtctcctactctcctcgccttcccccttgccttagggtttatcccgcgctccgcctcgctccgtccctccctgattcgcgcgatctccgcgcggccatggtctccggcgcggcgcccaacccggacgggggcggcgcccaaaacacccagcgcccgccgccgcttactcaggccggggcccggacggccctcgccacgccgccggcggtctccggcggcgccgcgcactccgcttctaccagtgggggcagcgccggctcaccaccgtccagccgcagcgagcagcacgcccccgacggtgctgccaagggtcccgccctcggggccgcgcccgcggcggccgcgtccacgccggccagcgacagcacgttcctccgcttgaataatctcgacatcaacggcgacgacgcgccgtcgtcgcaggctcctacgagcaagaagaaaaggagaggcacacgggcagtgggtcctgataaaggtaaccggggactgcgccagtttagtatgaaagtttgtgagaaagttgaaagtaaagggagaacaacatataatgaggtggcagatgaacttgttgctgagtttacagaccccaacaataatattgaggcaccagatcctgataaccctaacgcgcaacaatatgatgagaaaaatatacgacgaagagtttatgatgctttgaatgttctgatggctatggacattatatctaaagataaaaaggagatccagtggaagggcttgccgcgtactagtataagtgacattgaagaaatgaagacggagcttgtgggactgaaaggtaggattgaaaagaaaagtgcttatctacaggagctacaagaccaatatgtaggtctgcaaaacctgattcaacgaaatgaacagtcatatggttcaggaaacacgccttctggtggagtggctttgccatttatcctagttcagacccgacctcatgctaccgtggaagttgagatatcagaagatatgcagctggtgcattttgacttcaatagcaccccattcgagctgcacgacgactcatacgtcctaaaagaaatgcgattctgtggaagagaacaacatgacagcactcaagagtcgatatcaaatggagggatcttgaaagggcgtgcgaagcacgagcactaacgctagggtgttggttcactttccttttcgtctgagcagttggttttattgcatttctccgttgtgtaaagggccctgtaaattattaggcaagcgggagcgtagcttgatctaatttagctctgcaccagattggtagaacgacgggtgctctaagtagttgtgtaactataactatccttgaatcggtttctttagtatggttgagagaagggttgacatgtaattttgtagagccttgtaaaattaaaattgttgatttctatcagggtgaaatttctgggcacaatctttatttcgtgttccttttcccatcagtgaacgtaaa

SEQ ID NO: 381 - DNA, 1297 bp, Zea Mays
gttcgaactacgggggtgctttggttgttgtgctgccatgttggagataggcatccatacagtcatacagtctgtcgacatgaaaaagcttgtcctggagaatacaggaaggatactgtgggaagttgctcattctgtgtagcaatcaagaagaaaaggagaggcacacgggcagtgggtcctgataaaggtaaccggggactgcgccagtttagtatgaaagtttgtgagaaagttgaaagtaaagggagaacaacatataatgaggtggcagatgaacttgttgctgagtttacagaccccaacaataatattgaggcaccagatcctgataaccctaacgcgcaacaatatgatgagaaaaatatacgacgaagagtttatgatgctttgaatgttctgatggctatggacattatatctaaagataaaaaggagatccagtggaagggcttgccgcgtactagtataagtgacattgaagaaatgaagacggagcttgtgggactgaaaggtaggattgaaaagaaaagtgcttatctacaggagctacaagaccaatatgtaggtctgcaaaacctgattcaacgaaatgaacagtcatatggttcaggaaacacgccttctggtggagtggctttgccatttatcctagttcagacccgacctcatgctaccgtggaagttgagatatcagaagatatgcagctggtgcattttgacttcaatagcaccccattcgagctgcacgacgactcatacgtcctaaaagaaatgcgattctgtggaagagaacaacatgacagcactcaagagtcgatatcaaatggaggtgagagctcaagcgtgtcaaatatttattggcaacacgtacagcatgtggaaaggccaaacaatggcacaggtaggttaccgagctcaccgcctattccagggatcttgaaagggcgtgcgaagcacgagcactaacgctagggtgttggttcactttccttttcgtctgagcagttggttttattgcatttctccgttgtgtaaagggccctgtaaattattaggcaagcgggagcgtagcttgatctaatttagctctgcaccagattggtagaacgacgggtgctctaagtagttgtgtaactataactatccttgaatcggtttctttagtatggttgagagaagggttgacatgtaattttgtagagccttgtaaaattaaaattgttgatttctatcagggtgaaatttctgggcacaatctttatttcgtgttccttttcccatcagtgaacgtaaa

SEQ ID NO: 382 - DNA, 1262 bp, Zea Mays
gatactgtgggaagttgctcattctgtgtagcaatcaagaagaaaaggagaggcacacgggcagtgggtcctgataaaggtaaccggggactgcgccagtttagtatgaaagtttgtgagaaagttgaaagtaaagggagaacaacatataatgaggtggcagatgaacttgttgctgagtttacagaccccaacaataatattgaggcaccagatcctgataaccctaacgcggtaagaaatgtggctactccttggcatgaatttatttacttaatctgatatgggctcggtcctcaccgtatgttaacatgtagcaacaatatgatgagaaaaatatacgacgaagagtttatgatgctttgaatgttctgatggctatggacattatatctaaagataaaaaggagatccagtggaagggcttgccgcgtactagtataagtgacattgaagaaatgaagacggagcttgtgggactgaaaggtaggattgaaaagaaaagtgcttatctacaggagctacaagaccaagtctgcaaaacctgattcaacgaaatgaacagtcatatggttcaggaaacacgccttctggtggagtggctttgccatttatcctagttcagacccgacctcatgctaccgtggaagttgagatatcagaagatatgcagctggtgcattttgacttcaatagcaccccattcgagctgcacgacgactcatacgtcctaaaagaaatgcgattctgtggaagagaacaacatgacagcactcaagagtcgatatcaaatggaggtgagagctcaagcgtgtcaaatatttattggcaacacgtacagcatgtggaaaggccaaacaatggcacaggtaggttaccgagctcaccgcctattccagggatcttgaaagggcgtgcgaagcacgagcactaacgctagggtgttggttcactttccttttcgtctgagcagttggttttattgcatttctccgttgtgtaaagggccctgtaaattattaggcaagcgggagcgtagcttgatctaatttagctctgcaccagattggtagaacgacgggtgctctaagtagttgtgtaactataactatccttgaatcggtttctttagtatggttgagagaagggttgacatgtaattttgtagagccttgtaaaattaaaattgttgatttctatcagggtgaaatttctgggcacaatctttatttcgtgttccttttcccatcagtgaacgtaaa

SEQ ID NO: 383 - DNA, 1908 bp, Zea Mays
gaattttcgtctgggtgcgtttgcgtcggctcccaggccccagcttctccgtggcgatatgccgatatccgataaaccccgcacatcctgactgcaactctgaacagcgaagcacccatggccctcgccaccacagccgtctccctccaccttttcctcacccggcccgcctccgtgctccgcgtaggccgcggcctcccatgcctcctcctccgagccacttcgtccacctccgcctccccggacttcaacatcaccttcgcggagcccgcgccgtccaaaaaggccccgtccgcgcagccgctggtcccgtggatcgtccgcggggaggacggcaagccccgcctcagcacctccccgccgccggacgtaatccaggccatcgcgctcgcggaggcggaggccaagaaggccgccaagaaggaaaccctcaagggccagaatggcgcagttgccgccgccgccgcggctgcttccaatgccagcgtcaagggcaaggaaaggaagcccgccccgaccgtgccgcccaagttctccaaggcagccaggaggttttacaatgagaatatcaaggagcgggagccgcaacggctcgccaaggtccttgccgccgcaggagtggcatcaagaaggaccagtgaggagctcatcttccaagggaaggtgactgtcaatggttcagtctgtacttctcctcagaccaaagttgacatctcaaaggattctatctacgttaacgggaaccgcatttccaagaagttgcctccaaagctgtattttgctgttaacaagccaaaggggtacatttgctcatgtggtgaagagtcaaaatctgttgtctccttatttaatgattatttgaagggctggaacaagattcaaccagggttgccaaaaccacgcttgtttactgtgggtcgtcttgatgttgccacggctggtctgataatagtcacaaatgatggtgagtttgctcaaaagcttgcacatccttcttcaaatgtaacaaaagaatatgtggtgactattgatggtgccgtgcacaaaaaacatctcatagctatcagtgaaggcacaaaaattgatggggtcatgtgcattcctgatttagtagaaccattggctgcccaatcagatacaagaaagacccgcctaaggatagtggttcatgaaggacggaatcatgaagttcgtgaacttgtacagaatgcagggctacaggtttatgcattgaaacgtgttcggataggcaggttcaggcttccagcagatctgggaattgggaagtttgttgagctcaaacaggctgatatcaaggcactagatggcaacaactagagatgacatctgatgtggctaataagcgcatcttgtccaaagatggtagtaatcctcaaagtcacaatacatgagctgctactcaactcagaaagcttgtgaatgttctggatgtccattggtggtggtggctgatgatcaagtgtggcaaacatgttttgccttgaagaacttgtgaactactccatacttcgcctgcgctgcgaatctccacatcatatcaaacggcagaaccaagtccgcgatgcagcagtcgtttggtgaggatggaacattgtcaaatagcgatcttctgttggcatatacattttactctctattctaaattataatttttttagatgcattgtttttactaaattaaaatatcttatagtttagaatgcatcttgtccaacaggtagtcaataatggcagacgagttatatttggccaaattacattgtactccgtgtaccgagaactgtttttttaagaatcctttattgaccaggaatttttttcttgtaattgtggcactgttatttctatagtcatgagaatcccttcatttttagggctagtttggga

SEQ ID NO: 384 - DNA, 1964 bp, Zea Mays
gcgtttgcgtcggctcccaggccccagcttctccgtggcgatatgccgatatccgataaaccccgcacatcctgactgcaactctgaacagcgaagcacccatggccctcgccaccacagccgtctccctccaccttttcctcacccggcccgcctccgtgctccgcgtaggccgcggcctcccatgcctcctcctccgagccacttcgtccacctccgcctccccggacttcaacatcaccttcgcggagcccgcgccgtccaaaaaggccccgtccgcgcagccgctggtcccgtggatcgtccgcggggaggacggcaagccccgcctcagcacctccccgccgccggacgtaatccaggccatcgcgctcgcggaggcggaggccaagaaggccgccaagaaggaaaccctcaagggccagaatggcgcagttgccgccgccgccgcggctgcttccaatgccagcgtcaagggcaaggaaaggaagcccgccccgaccgtgccgcccaagttctccaaggcagccaggaggttttacaatgagaatatcaaggagcgggagccgcaacggctcgccaaggtccttgccgccgcaggagaaggaccagtgaggagctcatcttccaagggaaggtgactgtcaatggttcagtctgtacttctcctcagaccaaagttgacatctcaaaggattctatctacgttaacgggaaccgcatttccaagaagttgcctccaaagctgtattttgctgttaacaagccaaaggggtacatttgctcatgtggtgaagagtcaaaatctgttgtctccttatttaatgattatttgaagggctgggtatgttccatacagggctggcataacattcattttgtacatatattgggtaaatctctattatacctatgcatatttacagaacaagattcaaccagggttgccaaaaccacgcttgtttactgtgggtcgtcttgatgttgccacggctggtctgataatagtcacaaatgatggtgagtttgctcaaaagcttgcacatccttcttcaaatgtaacaaaagaatatgtggtgactattgatggtgccgtgcacaaaaaacatctcatagctatcagtgaaggcacaaaaattgatggggtcatgtgcattcctgatttagtagaaccattggctgcccaatcagatacaagaaagacccgcctaaggatagtggttcatgaaggacggaatcatgaagttcgtgaacttgtacagaatgcagggctacaggtttatgcattgaaacgtgttcggataggcaggttcaggcttccagcagatctgggaattgggaagtttgttgagctcaaacaggctgatatcaaggcactagatggcaacaactagagatgacatctgatgtggctaataagcgcatcttgtccaaagatggtagtaatcctcaaagtcacaatacatgagctgctactcaactcagaaagcttgtgaatgttctggatgtccattggtggtggtggctgatgatcaagtgtggcaaacatgttttgccttgaagaacttgtgaactactccatacttcgcctgcgctgcgaatctccacatcatatcaaacggcagaaccaagtccgcgatgcagcagtcgtttggtgaggatggaacattgtcaaatagcgatcttctgttggcatatacattttactctctattctaaattataatttttttagatgcattgtttttactaaattaaaatatcttatagtttagaatgcatcttgtccaacaggtagtcaataatggcagacgagttatatttggccaaattacattgtactccgtgtaccgagaactgtttttttaagaatcctttattgaccaggaatttttttcttgtaattgtggcactgttatttctatagtcatgagaatcccttcatttttagggctagtttggga

SEQ ID NO: 385 - DNA, 1995 bp, Zea Mays
gcgtttgcgtcggctcccaggccccagcttctccgtggcgatatgccgatatccgataaaccccgcacatcctgactgcaactctgaacagcgaagcacccatggccctcgccaccacagccgtctccctccaccttttcctcacccggcccgcctccgtgctccgcgtaggccgcggcctcccatgcctcctcctccgagccacttcgtccacctccgcctccccggacttcaacatcaccttcgcggagcccgcgccgtccaaaaaggccccgtccgcgcagccgctggtcccgtggatcgtccgcggggaggacggcaagccccgcctcagcacctccccgccgccggacgtaatccaggccatcgcgctcgcggaggcggaggccaagaaggccgccaagaaggaaaccctcaagggccagaatggcgcagttgccgccgccgccgcggctgcttccaatgccagcgtcaagggcaaggaaaggaagcccgccccgaccgtgccgcccaagttctccaaggcagccaggaggttttacaatgagaatatcaaggagcgggagccgcaacggctcgccaaggtccttgccgccgcaggagtggcatcaagaaggaccagtgaggagctcatcttccaagggaaggtgactgtcaatggttcagtctgtacttctcctcagaccaaagttgacatctcaaaggattctatctacgttaacgggaaccgcatttccaagaagttgcctccaaagctgtattttgctgttaacaagccaaaggggtacatttgctcatgtggtgaagagtcaaaatctgttgtctccttatttaatgattatttgaagggctggaacaagattcaaccagggttgccaaaaccacgcttgtttactgtgggtcgtcttgatgttgccacggctggtctgataatagtcacaaatgatggtgagtttgctcaaaagcttgcacatccttcttcaaatgtaacaaaagaatatgtggtgactattgatggtgccgtgcacaaaaaacatctcatagctatcagtgaaggcacaaaaattgatggggtcatgtgcattcctgatttagtagaaccattggctgcccaatcagatacaagaaagacccgcctaaggatagtggtaatttttttctagcttcatttattctgttctgttcctctttgcttttggattcacttaagcaatgctgctgctgtctatcctcaggactattaaacaataggttcatgaaggacggaatcatgaagttcgtgaacttgtacagaatgcagggctacaggtttatgcattgaaacgtgttcggataggcaggttcaggcttccagcagatctgggaattgggaagtttgttgagctcaaacaggctgatatcaaggcactagatggcaacaactagagatgacatctgatgtggctaataagcgcatcttgtccaaagatggtagtaatcctcaaagtcacaatacatgagctgctactcaactcagaaagcttgtgaatgttctggatgtccattggtggtggtggctgatgatcaagtgtggcaaacatgttttgccttgaagaacttgtgaactactccatacttcgcctgcgctgcgaatctccacatcatatcaaacggcagaaccaagtccgcgatgcagcagtcgtttggtgaggatggaacattgtcaaatagcgatcttctgttggcatatacattttactctctattctaaattataatttttttagatgcattgtttttactaaattaaaatatcttatagtttagaatgcatcttgtccaacaggtagtcaataatggcagacgagttatatttggccaaattacattgtactccgtgtaccgagaactgtttttttaagaatcctttattgaccaggaatttttttcttgtaattgtggcactgttatttctatagtcatgagaatcccttcatttttagggctagtttggga

SEQ ID NO: 386 - DNA, 1753 bp, Zea Mays
gcgtttgcgtcggctcccaggccccagcttctccgtggcgatatgccgatatccgataaaccccgcacatcctgactgcaactctgaacagcgaagcacccatggccctcgccaccacagccgtctccctccaccttttcctcacccggcccgcctccgtgctccgcgtaggccgcggcctcccatgcctcctcctccgagccacttcgtccacctccgcctccccggacttcaacatcaccttcgcggagcccgcgccgtccaaaaaggccccgtccgcgcagccgctggtcccgtggatcgtccgcggggaggacggcaagccccgcctcagcacctccccgccgccggacgtaatccaggccatcgcgctcgcggaggcggaggccaagaaggccgccaagaaggaaaccctcaagggccagaatggcgcagttgccgccgccgccgcggctgcttccaatgccagcgtcaagggcaaggaaaggaagcccgccccgaccgtgccgcccaagttctccaaggcagccaggaggttttacaatgagaatatcaaggagcgggagccgcaacggctcgccaaggtccttgccgccgcaggagtggcatcaagaaggaccagtgaggagctcatcttccaagggaaggtgactgtcaatggttcagtctgtacttctcctcagaccaaagttgacatctcaaaggattctatctacgttaacgggaaccgcatttccaagaagttgcctccaaagctgtattttgctgttaacaagccaaaggggtacatttgctcatgtggtgaagagtcaaaatctgttgtctccttatttaatgattatttgaagggctggaacaagattcaaccagggttgccaaaaccacgcttgtttactgtgggtcgtcttgatgttgccacggctggtctgataatagtcacaaatgatggtgagtttgctcaaaagcttgcacatccttcttcaaatgtaacaaaagaatatgtggtgactattgatggtgccgtgcacaaaaaacatctcatagctatcagtgaaggcacaaaaattgatggggtcatgtgcattcctgatttagtagaaccattggctgcccaatcagatacaagaaagacccgcctaaggatagtgggttcatgaaggacggaatcatgaagttcgtgaacttgtacagaatgcagggctacaggtttatgcattgaaacgtgttcggataggcaggttcaggcttccagcagatctgggaattgggaagtttgttgagctcaaacaggctgatatcaaggcactagatggcaacaactagagatgacatctgatgtggctaataagcgcatcttgtccaaagatggtagtaatcctcaaagtcacaatacatgagctgctactcaactcagaaagcttgtgaatgttctggatgtccattggtggtggtggctgatgatcaagtgtggcaaacatgttttgccttgaagaacttgtgaactactccatacttcgcctgcgctgcgaatctccacatcatatcaaacggcagaaccaagtccgcgatgcagcagtcgtttggtagtcaataatggcagacgagttatatttggccaaattacattgtactccgtgtaccgagaactgtttttttaagaatcctttattgaccaggaatttttttcttgtaattgtggcactgttatttctatagtcatgagaatcccttcatttttagggctagtttggga

SEQ ID NO: 387 - DNA, 1876 bp, Zea Mays
gcgtttgcgtcggctcccaggccccagcttctccgtggcgatatgccgatatccgataaaccccgcacatcctgactgcaactctgaacagcgaagcacccatggccctcgccaccacagccgtctccctccaccttttcctcacccggcccgcctccgtgctccgcgtaggccgcggcctcccatgcctcctcctccgagccacttcgtccacctccgcctccccggacttcaacatcaccttcgcggagcccgcgccgtccaaaaaggccccgtccgcgcagccgctggtcccgtggatcgtccgcggggaggacggcaagccccgcctcagcacctccccgccgccggacgtaatccaggccatcgcgctcgcggaggcggaggccaagaaggccgccaagaaggaaaccctcaagggccagaatggcgcagttgccgccgccgccgcggctgcttccaatgccagcgtcaagggcaaggaaaggaagcccgccccgaccgtgccgcccaagttctccaaggcagccaggaggttttacaatgagaatatcaaggagcgggagccgcaacggctcgccaaggtccttgccgccgcaggagtggcatcaagaaggaccagtgaggagctcatcttccaagggaaggtgactgtcaatggttcagtctgtacttctcctcagaccaaagttgacatctcaaaggattctatctacgttaacgggaaccgcatttccaagaagttgcctccaaagctgtattttgctgttaacaagccaaaggggtacatttgctcatgtggtgaagagtcaaaatctgttgtctccttatttaatgattatttgaagggctggggttgccaaaaccacgcttgtttactgtgggtcgtcttgatgttgccacggctggtctgataatagtcacaaatgatggtgagtttgctcaaaagcttgcacatccttcttcaaatgtaacaaaagaatatgtggtgactattgatggtgccgtgcacaaaaaacatctcatagctatcagtgaaggcacaaaaattgatggggtcatgtgcattcctgatttagtagaaccattggctgcccaatcagatacaagaaagacccgcctaaggatagtggttcatgaaggacggaatcatgaagttcgtgaacttgtacagaatgcagggctacaggtttatgcattgaaacgtgttcggataggcaggttcaggcttccagcagatctgggaattgggaagtttgttgagctcaaacaggctgatatcaaggcactagatggcaacaactagagatgacatctgatgtggctaataagcgcatcttgtccaaagatggtagtaatcctcaaagtcacaatacatgagctgctactcaactcagaaagcttgtgaatgttctggatgtccattggtggtggtggctgatgatcaagtgtggcaaacatgttttgccttgaagaacttgtgaactactccatacttcgcctgcgctgcgaatctccacatcatatcaaacggcagaaccaagtccgcgatgcagcagtcgtttggtgaggatggaacattgtcaaatagcgatcttctgttggcatatacattttactctctattctaaattataatttttttagatgcattgtttttactaaattaaaatatcttatagtttagaatgcatcttgtccaacaggtagtcaataatggcagacgagttatatttggccaaattacattgtactccgtgtaccgagaactgtttttttaagaatcctttattgaccaggaatttttttcttgtaattgtggcactgttatttctatagtcatgagaatcccttcatttttagggctagtttggga

SEQ ID NO: 388 - DNA, 2256 bp, Zea Mays
cgcctaacgccgcctcaatccctcccgtttcaacgattctctccgcctccagctcgccccgccgccgagtgagatccacccgcactcggcccttccgcggcggcgatggcaactggcgccgggtgggcacctgggcggcccgtcgagaggcatggcgcgccccgcggaggcaacgcgcggtccaagtcggtcgtgccgggtccgcgccgcccctccccgtcccccgcgaggtcgcggccagccgccgaccacagcggcagcgctgatttgtgcagagtgagagttgctgtaaggctccggccgaagaattcagaggatttagctcatggtgctgactttgatagctgtgttgagttgcagcctgagtccaagaggctgaaactgaagaaaaataattggagctgtgagtcctacaaatttgatgaggtcttcagtgaaagtgcttcacagaaacgtgtgtatgaggcagttgcaaagcctgtggttgagagtgtattagaaggctataatgggacagtaatggcctatggtcaaacaggtactggcaaaacatacacagttggtcgacttgggaaagatgacccttctgaacgtggtataatggtcagagcattggagcatatcctctctagcctgtcttttgagacagactgtgtcgccatatcatatctacagctgtacttagaatctgtacatgatttactggctccagagaagactaatattccaatagtagaagatgcaaaaactggtgaagtttccttgccaggtgctgcgatagttgaagttaaagatcttgaacatgtttttcaacttttgcaaattggtgaggcaaatcgtcatgctgctaatactaagatgaacacggagtcatctcgtagtcatgcaattttaattatccatttgcaaagaaacacaagaacaaaagaagaaaatggtagctctttatatgatgttagacatgacacttttcctgatgatctgccacttgttctcaaaagtaaactcttgattgtcgaccttgctggatcagaacgaattgataaatcaggaagtgagggtcacatgatcgaagaagccaagttcatcaatctctcgttaacttccttaggaaaatgcattaatgcgctagcagaaaatagttctcatgtacccacaagagattcaaagcttacaaggatacttcgtgattcatttggagggactgctaggacttctcttgttgtgacaataggtccatctgctaggcattactcagaaacttcaagcacaatcatgtttgggcagagggcaatgaaagtagtgaacacaataaagctgaaggaagaggttgattatgaaattctttacaagaagatggagcgtgaggttgaccaactcacatccgagatggagagacaacagaaggttataagaagtgagaaaatgcagatggataaaaggttgaaagaatctgagaggtccttccatgatttaagaatgacatttaacatgcaaattgagcagcagcaacaacttgagaacctctcaaaaacgaaaattattactgatgagtttaaagagtatgaaaaggaaatgggagaattagtaaggaaacttgaggaagaaaggtgctgttcgtcaagcatgaaagatcgcatgagtttactacaacagcaactatgtgatgctcagagttctgcccaggaaagtatggcccgtgaattggaaaaggaattaaccaaagcgactgaagaatttacaattgaaatacaatcattaaaaggaaagatcagcggacttatttcagagaaggaatcaatatatgatgaactgaagtctactcaagaaaaggtgcagctggaaatgagccagagaaaaggccttgaagatcaaattctaaggttcaaacagtctgtgtctgatagttgtgctgaagagtctaaaacatcatgtagtatggttagatcaggatctggattaggcaacacagcttttgtgtccaaatcagaaaaattaagagaggctctatctggtcagagaggtaccatatcaaagatatttgaagaaggcgtgaaccttcagactctcctgcccaggaatcaaaccgtcatagggatcgggcaattcgctgtctgcgggaaagcgcaccacatccccggcgcgggcaatcgcttccagccgtggatgcccttccagcgcaaagcgtctaccgagtacatcctttgccagaccgtcgatggcaagcggaataaactgccgcgaatcgtaacgtag

SEQ ID NO: 389 - DNA, 2337 bp, Zea Mays
atggcaactggcgccgggtgggcacctgggcggcccgtcgagaggcatggcgcgccccgcggaggcaacgcgcggtccaagtcggtcgtgccgggtccgcgccgcccctccccgtcccccgcgaggtcgcggccagccgccgaccacagcggcagcgctgatttgtgcagagtgagagttgctgtaaggctccggccgaagaattcagaggatttagctcatggtgctgactttgatagctgtgttgagttgcagcctgagtccaagaggctgaaactgaagaaaaataattggagctgtgagtcctacaaatttgatgaggtcttcagtgaaagtgcttcacagaaacgtgtgtatgaggcagttgcaaagcctgtggttgagagtgtattagaaggctataatgggacagtaatggcctatggtcaaacaggtactggcaaaacatacacagttggtcgacttgggaaagatgacccttctgaacgtggtataatggtcagagcattggagcatatcctctctagcctgtcttttgagacagactgtgtcgccatatcatatctacagctgtacttagaatctgtacatgatttactggctccagagaagactaatattccaatagtagaagatgcaaaaactggtgaagtttccttgccaggtgctgcgatagttgaagttaaagatcttgaacatgtttttcaacttttgcaaattggtgaggcaaatcgtcatgctgctaatactaagatgaacacggagtcatctcgtagtcatgcaattttaattatccatttgcaaagaaacacaagaacaaaagaagaaaatggtagctctttatatgatgttagacatgacacttttcctgatgatctgccacttgttctcaaaagtaaactcttgattgtcgaccttgctggatcagaacgaattgataaatcaggaagtgagggtcacatgatcgaagaagccaagttcatcaatctctcgttaacttccttaggaaaatgcattaatgcgctagcagaaaatagttctcatgtacccacaagagattcaaagcttacaaggatacttcgtgattcatttggagggactgctaggacttctcttgttgtgacaataggtccatctgctaggcattactcagaaacttcaagcacaatcatgtttgggcagagggcaatgaaagtagtgaacacaataaagctgaaggaagaggttgattatgaaattctttacaagaagatggagcgtgaggttgaccaactcacatccgagatggagagacaacagaaggttataagaagtgagaaaatgcagatggataaaaggttgaaagaatctgagaggtccttccatgatttaagaatgacatttaacatgcaaattgagaatctggagaaggaaaaccgtcatttggaatcttcagtcaaaagattgacgcaggacttagacaaagagagaggccaaaacaatttgttgtccaaacaagtcactgagcttgagaaattgctcgacgaaaacaagaagtccatctcatgacaatgttgctattctggcatctgttgttagcagcagcaacaacttgagaacctctcaaaaacgaaaattattactgatgagtttaaagagtatgaaaaggaaatgggagaattagtaaggaaacttgaggaagaaaggtgctgttcgtcaagcatgaaagatcgcatgagtttactacaacagcaactatgtgatgctcagagttctgcccagttgcaggaaagtatggcccgtgaattggaaaaggaattaaccaaagcgactgaagaatttacaattgaaatacaatcattaaaaggaaagatcagcggacttatttcagagaaggaatcaatatatgatgaactgaagtctactcaagaaaaggtgcagctggaaatgagccagagaaaaggccttgaagatcaaattctaaggttcaaacagtctgtgtctgatagttgtgctgaagagtctaaaacatcatgtagtatggttagatcaggatctggattaggcaacacagcttttgtgtccaaatcagaaaaattaagagaggctctatctggtcagagaggtaccatatcaaagatatttgaagaaggcgtgaaccttcagactctcctgcccaggaatcaaaccgtcatagggatcgggcaattcgctgtctgcgggaaagcgcaccacatccccggcgcgggcaatcgcttccagccgtggatgcccttccagcgcaaagcgtctaccgagtacatcctttgccagaccgtcgatggcaagcggaataaactgccgcgaatcgtaacgtag

SEQ ID NO: 390 - DNA, 2324 bp, Zea Mays
atggcaactggcgccgggtgggcacctgggcggcccgtcgagaggcatggcgcgccccgcggaggcaacgcgcggtccaagtcggtcgtgccgggtccgcgccgcccctccccgtcccccgcgaggtcgcggccagccgccgaccacagcggcagcgctgatttgtgcagagtgagagttgctgtaaggctccggccgaagaattcagaggatttagctcatggtgctgactttgatagctgtgttgagttgcagcctgagtccaagaggctgaaactgaagaaaaataattggagctgtgagtcctacaaatttgatgaggtcttcagtgaaagtgcttcacagaaacgtgtgtatgaggcagttgcaaagcctgtggttgagagtgtattagaaggctataatgggacagtaatggcctatggtcaaacaggtactggcaaaacatacacagttggtcgacttgggaaagatgacccttctgaacgtggtataatggtcagagcattggagcatatcctctctagcctgtcttttgagacagactgtgtcgccatatcatatctacagctgtacttagaatctgtacatgatttactggctccagagaagactaatattccaatagtagaagatgcaaaaactggtgaagtttccttgccaggtgctgcgatagttgaagttaaagatcttgaacatgtttttcaacttttgcaaattggtgaggcaaatcgtcatgctgctaatactaagatgaacacggagtcatctcgtagtcatgcaattttaattatccatttgcaaagaaacacaagaacaaaagaagaaaatggtagctctttatatgatgttagacatgacacttttcctgatgatctgccacttgttctcaaaagtaaactcttgattgtcgaccttgctggatcagaacgaattgataaatcaggaagtgagggtcacatgatcgaagaagccaagttcatcaatctctcgttaacttccttaggaaaatgcattaatgcgctagcagaaaatagttctcatgtacccacaagagattcaaagcttacaaggatacttcgtgattcatttggagggactgctaggacttctcttgttgtgacaataggtccatctgctaggcattactcagaaacttcaagcacaatcatgtttgggcagagggcaatgaaagtagtgaacacaataaagctgaaggaagaggttgattatgaaattctttacaagaagatggagcgtgaggttgaccaactcacatccgagatggagagacaacagaaggttataagaagtgagaaaatgcagatggataaaaggttgaaagaatctgagaggtccttccatgatttaagaatgacatttaacatgcaaattgagggggcaagaatataacaagtgatttattaacccagaatctggagaaggaaaaccgtcatttggaatcttcagtcaaaagattgacgcaggacttagacaaagagagaggccaaaacaatttgttgtccaaacaagtcactgagcttgagaaattgctcgacgaaaacaagcagcaacaacttgagaacctctcaaaaacgaaaattattactgatgagtttaaagagtatgaaaaggaaatgggagaattagtaaggaaacttgaggaagaaaggtgctgttcgtcaagcatgaaagatcgcatgagtttactacaacagcaactatgtgatgctcagagttctgcccagttgcaggaaagtatggcccgtgaattggaaaaggaattaaccaaagcgactgaagaatttacaattgaaatacaatcattaaaaggaaagatcagcggacttatttcagagaaggaatcaatatatgatgaactgaagtctactcaagaaaaggtgcagctggaaatgagccagagaaaaggccttgaagatcaaattctaaggttcaaacagtctgtgtctgatagttgtgctgaagagtctaaaacatcatgtagtatggttagatcaggatctggattaggcaacacagcttttgtgtccaaatcagaaaaattaagagaggctctatctggtcagagaggtaccatatcaaagatatttgaagaaggcgtgaaccttcagactctcctgcccaggaatcaaaccgtcatagggatcgggcaattcgctgtctgcgggaaagcgcaccacatccccggcgcgggcaatcgcttccagccgtggatgcccttccagcgcaaagcgtctaccgagtacatcctttgccagaccgtcgatggcaagcggaataaactgccgcgaatcgtaacgtag

SEQ ID NO: 391 - DNA, 2283 bp, Zea Mays
atggcaactggcgccgggtgggcacctgggcggcccgtcgagaggcatggcgcgccccgcggaggcaacgcgcggtccaagtcggtcgtgccgggtccgcgccgcccctccccgtcccccgcgaggtcgcggccagccgccgaccacagcggcagcgctgatttgtgcagagtgagagttgctgtaaggctccggccgaagaattcagaggatttagctcatggtgctgactttgatagctgtgttgagttgcagcctgagtccaagaggctgaaactgaagaaaaataattggagctgtgagtcctacaaatttgatgaggtcttcagtgaaagtgcttcacagaaacgtgtgtatgaggcagttgcaaagcctgtggttgagagtgtattagaaggctataatgggacagtaatggcctatggtcaaacaggtactggcaaaacatacacagttggtcgacttgggaaagatgacccttctgaacgtggtataatggtcagagcattggagcatatcctctctagcctgtcttttgagacagactgtgtcgccatatcatatctacagctgtacttagaatctgtacatgatttactggctccagagaagactaatattccaatagtagaagatgcaaaaactggtgaagtttccttgccaggtgctgcgatagttgaagttaaagatcttgaacatgtttttcaacttttgcaaattggtgaggcaaatcgtcatgctgctaatactaagatgaacacggagtcatctcgtagtcatgcaattttaattatccatttgcaaagaaacacaagaacaaaagaagaaaatggtagctctttatatgatgttagacatgacacttttcctgatgatctgccacttgttctcaaaagtaaactcttgattgtcgaccttgctggatcagaacgaattgataaatcaggaagtgagggtcacatgatcgaagaagccaagttcatcaatctctcgttaacttccttaggaaaatgcattaatgcgctagcagaaaatagttctcatgtacccacaagagattcaaagcttacaaggatacttcgtgattcatttggagggactgctaggacttctcttgttgtgacaataggtccatctgctaggcattactcagaaacttcaagcacaatcatgtttgggcagagggcaatgaaagtagtgaacacaataaagctgaaggaagaggttgattatgaaattctttacaagaagatggagcgtgaggttgaccaactcacatccgagatggagagacaacagaaggttataagaagtgagaaaatgcagatggataaaaggttgaaagaatctgagaggtccttccatgatttaagaatgacatttaacatgcaaattgagaatctggagaaggaaaaccgtcatttggaatcttcagtcaaaagattgacgcaggacttagacaaagagagaggccaaaacaatttgttgtccaaacaagtcactgagcttgagaaattgctcgacgaaaacaagcagcaacaacttgagaacctctcaaaaacgaaaattattactgatgagtttaaagagtatgaaaaggaaatgggagaattagtaaggaaacttgaggaagaaaggtgctgttcgtcaagcatgaaagatcgcatgagtttactacaacagcaactatgtgatgctcagagttctgcccaggaaagtatggcccgtgaattggaaaaggaattaaccaaagcgactgaagaatttacaattgaaatacaatcattaaaaggaaagatcagcggacttatttcagagaaggaatcaatatatgatgaactgaagtctactcaagaaaaggtgcagctggaaatgagccagagaaaaggccttgaagatcaaattctaaggttcaaacagtctgtgtctgatagttgtgctgaagagtctaaaacatcatgtagtatggttagatcaggatctggattaggcaacacagcttttgtgtccaaatcagaaaaattaagagaggctctatctggtcagagaggtaccatatcaaagatatttgaagaaggcgtgaaccttcagactctcctgcccaggaatcaaaccgtcatagggatcgggcaattcgctgtctgcgggaaagcgcaccacatccccggcgcgggcaatcgcttccagccgtggatgcccttccagcgcaaagcgtctaccgagtacatcctttgccagaccgtcgatggcaagcggaataaactgccgcgaatcgtaacgtag

SEQ ID NO: 392 - DNA, 2289 bp, Zea Mays
atggcaactggcgccgggtgggcacctgggcggcccgtcgagaggcatggcgcgccccgcggaggcaacgcgcggtccaagtcggtcgtgccgggtccgcgccgcccctccccgtcccccgcgaggtcgcggccagccgccgaccacagcggcagcgctgatttgtgcagagtgagagttgctgtaaggctccggccgaagaattcagaggatttagctcatggtgctgactttgatagctgtgttgagttgcagcctgagtccaagaggctgaaactgaagaaaaataattggagctgtgagtcctacaaatttgatgaggtcttcagtgaaagtgcttcacagaaacgtgtgtatgaggcagttgcaaagcctgtggttgagagtgtattagaaggctataatgggacagtaatggcctatggtcaaacaggtactggcaaaacatacacagttggtcgacttgggaaagatgacccttctgaacgtggtataatggtcagagcattggagcatatcctctctagcctgtcttttgagacagactgtgtcgccatatcatatctacagctgtacttagaatctgtacatgatttactggctccagagaagactaatattccaatagtagaagatgcaaaaactggtgaagtttccttgccaggtgctgcgatagttgaagttaaagatcttgaacatgtttttcaacttttgcaaattggtgaggcaaatcgtcatgctgctaatactaagatgaacacggagtcatctcgtagtcatgcaattttaattatccatttgcaaagaaacacaagaacaaaagaagaaaatggtagctctttatatgatgttagacatgacacttttcctgatgatctgccacttgttctcaaaagtaaactcttgattgtcgaccttgctggatcagaacgaattgataaatcaggaagtgagggtcacatgatcgaagaagccaagttcatcaatctctcgttaacttccttaggaaaatgcattaatgcgctagcagaaaatagttctcatgtacccacaagagattcaaagcttacaaggatacttcgtgattcatttggagggactgctaggacttctcttgttgtgacaataggtccatctgctaggcattactcagaaacttcaagcacaatcatgtttgggcagagggcaatgaaagtagtgaacacaataaagctgaaggaagaggttgattatgaaattctttacaagaagatggagcgtgaggttgaccaactcacatccgagatggagagacaacagaaggttataagaagtgagaaaatgcagatggataaaaggttgaaagaatctgagaggtccttccatgatttaagaatgacatttaacatgcaaattgagaatctggagaaggaaaaccgtcatttggaatcttcagtcaaaagattgacgcaggacttagacaaagagagaggccaaaacaatttgttgtccaaacaagtcactgagcttgagaaattgctcgacgaaaacaagcagcaacaacttgagaacctctcaaaaacgaaaattattactgatgagtttaaagagtatgaaaaggaaatgggagaattagtaaggaaacttgaggaagaaaggtgctgttcgtcaagcatgaaagatcgcatgagtttactacaacagcaactatgtgatgctcagagttctgcccagttgcaggaaagtatggcccgtgaattggaaaaggaattaaccaaagcgactgaagaatttacaattgaaatacaatcattaaaaggaaagatcagcggacttatttcagagaaggaatcaatatatgatgaactgaagtctactcaagaaaaggtgcagctggaaatgagccagagaaaaggccttgaagatcaaattctaaggttcaaacagtctgtgtctgatagttgtgctgaagagtctaaaacatcatgtagtatggttagatcaggatctggattaggcaacacagcttttgtgtccaaatcagaaaaattaagagaggctctatctggtcagagaggtaccatatcaaagatatttgaagaaggcgtgaaccttcagactctcctgcccaggaatcaaaccgtcatagggatcgggcaattcgctgtctgcgggaaagcgcaccacatccccggcgcgggcaatcgcttccagccgtggatgcccttccagcgcaaagcgtctaccgagtacatcctttgccagaccgtcgatggcaagcggaataaactgccgcgaatcgtaacgtag

SEQ ID NO: 393 - DNA, 3476 bp, Zea Mays
atggcaactggcgccgggtgggcacctgggcggcccgtcgagaggcatggcgcgccccgcggaggcaacgcgcggtccaagtcggtcgtgccgggtccgcgccgcccctccccgtcccccgcgaggtcgcggccagccgccgaccacagcggcagcgctgatttgtgcagagtgagagttgctgtaaggctccggccgaagaattcagaggatttagctcatggtgctgactttgatagctgtgttgagttgcagcctgagtccaagaggctgaaactgaagaaaaataattggagctgtgagtcctacaaatttgatgaggtcttcagtgaaagtgcttcacagaaacgtgtgtatgaggcagttgcaaagcctgtggttgagagtgtattagaaggctataatgggacagtaatggcctatggtcaaacaggtactggcaaaacatacacagttggtcgacttgggaaagatgacccttctgaacgtggtataatggtcagagcattggagcatatcctctctagcctgtcttttgagacagactgtgtcgccatatcatatctacagctgtacttagaatctgtacatgatttactggctccagagaagactaatattccaatagtagaagatgcaaaaactggtgaagtttccttgccaggtgctgcgatagttgaagttaaagatcttgaacatgtttttcaacttttgcaaattggtgaggcaaatcgtcatgctgctaatactaagatgaacacggagtcatctcgtagtcatgcaattttaattatccatttgcaaagaaacacaagaacaaaagaagaaaatggtagctctttatatgatgttagacatgacacttttcctgatgatctgccacttgttctcaaaagtaaactcttgattgtcgaccttgctggatcagaacgaattgataaatcaggaagtgagggtcacatgatcgaagaagccaagttcatcaatctctcgttaacttccttaggaaaatgcattaatgcgctagcagaaaatagttctcatgtacccacaagagattcaaagcttacaaggatacttcgtgattcatttggagggactgctaggacttctcttgttgtgacaataggtccatctgctaggcattactcagaaacttcaagcacaatcatgtttgggcagagggcaatgaaagtagtgaacacaataaagctgaaggaagaggttgattatgaaattctttacaagaagatggagcgtgaggttgaccaactcacatccgagatggagagacaacagaaggttataagaagtgagaaaatgcagatggataaaaggttgaaagaatctgagaggtccttccatgatttaagaatgacatttaacatgcaaattgagaatctggagaaggaaaaccgtcatttggaatcttcagtcaaaagattgacgcaggacttagacaaagagagaggccaaaacaatttgttgtccaaacaagtcactgagcttgagaaattgctcgacgaaaacaagcagcaacaacttgagaacctctcaaaaacgaaaattattactgatgagtttaaagagtatgaaaaggaaatgggagaattagtaaggaaacttgaggaagaaaggtgctgttcgtcaagcatgaaagatcgcatgagtttactacaacagcaactatgtgatgctcagagttctgcccagttgcaggaaagtatggcccgtgaattggaaaaggaattaaccaaagcgactgaagaatttacaattgaaatacaatcattaaaaggaaagatcagcggacttatttcagagaaggaatcaatatatgatgaactgaagtctactcaagaaaaggtgcagctggaaatgagccagagaaaaggccttgaagatcaaattctaaggttcaaacagtctgtgtctgatagttgtgctgaagagtctaaaacatcatgtagtatggttagatcaggatctggattaggcaacacagcttttgtgtccaaatcagaaaaattaagagaggctctatctggtcagagaggtaccatatcaaagatatttgaagaagttggtcttccaaacgtgcttgctctgttgaagtctgaagatctagatgtgcagatccatgctgtcaaggtggttgctaatcttgctgctgaagatgttaatcaggaaagaatcgttgaggaaggagggctcgatgctcttctatcccttctagaaacatcagaaaacaccactattcatcgagtcactgctggtgctgttgctaacttggcaatgaatggatcaaaccagggagtgattatgaataaaggtggagctcgattattagcaaatgttgcttctgaaactgatgatcctcaaactttgcggatggtggctggcgcaattgccaatttatgtgggaatgaaaagctgcacttaatgttgaaacaagatggtggaatcaaggcactactgggaatgtttcgtagtggacacgccgatgtcatagcccagatagcacgaggaatagcaaactttgcaaaatgcgaatcccggatgataagccaaggtcacaggaaagggaggtcccttctgattgaagatggtgttctttcttggatggtggcccattcaactatgttttctgcttcaacacgaagacatattgagcttgctttttgccacctagctcagaacgaagacaacacttgtgacatcattgcttctggcggaatcaaggagctgcttcgcatatcgagggagtccccgagagaagatacacgtaatttagctaagaaggctttagattcgaatcctgcttttttaagagagatccaatgactcttctatggccaagacaaacatttcattgtagactcatccatgatactatacatatgcagatgatgttccattttctcaaggtcccacgctgccacgctcatgctcatccaaacagcaaaaaaaaaaaaaaaaagataagagctccgtttggatgagtagtccaatagctgaaatcgcagtggtcaatagtaatggttatatcaatggttataagtgcattaaatatgttgttagatgtcagataaaatagtcgcggatgatctggccgtgtacccaagatggtccgcgaggacgctaaaaatgaattttgtcaaactcggagagagaaagaagcatgatggcgaacgaggtggcaacaactgaggcgaggactgtcattatcgtgcggaggtatagatggtcaaatgggctgtgtctggctggctcgagacacgacccatttaatagtgcctagacctgctcgacacaagcgttatgtcgtagccttagcctgtagtgctggcacggtccaacacgattatattttttatttttacaaaaaacgtgtatacatatgtacaatttatattcaatattaaaacacataaacatgctgttatactggttagatggtttcacctaatgtctcg

SEQ ID NO: 394 - DNA, 2083 bp, Zea Mays
gttcattcatagtgtattgtgtaataatattttacaagtcaatcatcacttctgcatttccatgatttccttttctagttctcttgcttgacaaactacttcaactaatatttcttttttgcatccccttttatttctctactgagattttggggttgccttgtaagggtccactctttctctaaagatacacatctcacctgcgtgtttgagggaaaaaggaggaggtactggcaaaacatacacagttggtcgacttgggaaagatgacccttctgaacgtggtataatggtcagagcattggagcatatcctctctagcctgtcttttgagacagactgtgtcgccatatcatatctacagctgtacttagaatctgtacatgatttactggctccagagaagactaatattccaatagtagaagatgcaaaaactggtgaagtttccttgccaggtgctgcgatagttgaagttaaagatcttgaacatgtttttcaacttttgcaaattggtgaggcaaatcgtcatgctgctaatactaagatgaacacggagtcatctcgtagtcatgcaattttaattatccatttgcaaagaaacacaagaacaaaagaagaaaatggtagctctttatatgatgttagacatgacacttttcctgatgatctgccacttgttctcaaaagtaaactcttgattgtcgaccttgctggatcagaacgaattgataaatcaggaagtgagggtcacatgatcgaagaagccaagttcatcaatctctcgttaacttccttaggaaaatgcattaatgcgctagcagaaaatagttctcatgtacccacaagagattcaaagcttacaaggatacttcgtgattcatttggagggactgctaggacttctcttgttgtgacaataggtccatctgctaggcattactcagaaacttcaagcacaatcatgtttgggcagagggcaatgaaagtagtgaacacaataaagctgaaggaagaggttgattatgaaattctttacaagaagatggagcgtgaggttgaccaactcacatccgagatggagagacaacagaaggttataagaagtgagaaaatgcagatggataaaaggttgaaagaatctgagaggtccttccatgatttaagaatgacatttaacatgcaaattgagaatctggagaaggaaaaccgtcatttggaatcttcagtcaaaagattgacgcaggacttagacaaagagagaggccaaaacaatttgttgtccaaacaagtcactgagcttgagaaattgctcgacgaaaacaagcagcaacaacttgagaacctctcaaaaacgaaaattattactgatgagtttaaagagtatgaaaaggaaatgggagaattagtaaggaaacttgaggaagaaaggtgctgttcgtcaagcatgaaagatcgcatgagtttactacaacagcaactatgtgatgctcagagttctgcccagttgcaggaaagtatggcccgtgaattggaaaaggaattaaccaaagcgactgaagaatttacaattgaaatacaatcattaaaaggaaagatcagcggacttatttcagagaaggaatcaatatatgatgaactgaagtctactcaagaaaaggtgcagctggaaatgagccagagaaaaggccttgaagatcaaattctaaggttcaaacagtctgtgtctgatagttgtgctgaagagtctaaaacatcatgtagtatggttagatcaggatctggattaggcaacacagcttttgtgtccaaatcagaaaaattaagagaggctctatctggtcagagaggtaccatatcaaagatatttgaagaaggcgtgaaccttcagactctcctgcccaggaatcaaaccgtcatagggatcgggcaattcgctgtctgcgggaaagcgcaccacatccccggcgcgggcaatcgcttccagccgtggatgcccttccagcgcaaagcgtctaccgagtacatcctttgccagaccgtcgatggcaagcggaataaactgccgcgaatcgtaacgtag

SEQ ID NO: 395 - DNA, 2093 bp, Zea Mays
aatattttacaagtcaatcatcacttctgcatttccatgatttccttttctagttctcttgcttgacaaactacttcaactaatatttcttttttgcatccccttttatttctctactgagattttggggttgccttgtaagggtccactctttctctaaagatacacatctcacctgcgtgtttgagggaaaaaggaggaggtactggcaaaacatacacagttggtcgacttgggaaagatgacccttctgaacgtggtataatggtcagagcattggagcatatcctctctagcctgtcttttgagacagactgtgtcgccatatcatatctacagctgtacttagaatctgtacatgatttactggctccagagaagactaatattccaatagtagaagatgcaaaaactggtgaagtttccttgccaggtgctgcgatagttgaagttaaagatcttgaacatgtttttcaacttttgcaaattggtgaggcaaatcgtcatgctgctaatactaagatgaacacggagtcatctcgtagtcatgcaattttaattatccatttgcaaagaaacacaagaacaaaagaagaaaatggtagctctttatatgatgttagacatgacacttttcctgatgatctgccacttgttctcaaaagtaaactcttgattgtcgaccttgctggatcagaacgaattgataaatcaggaagtgagggtcacatgatcgaagaagccaagttcatcaatctctcgttaacttccttaggaaaatgcattaatgcgctagcagaaaatagttctcatgtacccacaagagattcaaagcttacaaggatacttcgtgattcatttggagggactgctaggacttctcttgttgtgacaataggtccatctgctaggcattactcagaaacttcaagcacaatcatgtttgggcagagggcaatgaaagtagtgaacacaataaagctgaaggaagaggttgattatgaaattctttacaagaagatggagcgtgaggttgaccaactcacatccgagatggagagacaacagaaggttataagaagtgagaaaatgcagatggataaaaggttgaaagaatctgagaggtccttccatgatttaagaatgacatttaacatgcaaattgagggggcaagaatataacaagtgatttattaacccagaatctggagaaggaaaaccgtcatttggaatcttcagtcaaaagattgacgcaggacttagacaaagagagaggccaaaacaatttgttgtccaaacaagtcactgagcttgagaaattgctcgacgaaaacaagcagcaacaacttgagaacctctcaaaaacgaaaattattactgatgagtttaaagagtatgaaaaggaaatgggagaattagtaaggaaacttgaggaagaaaggtgctgttcgtcaagcatgaaagatcgcatgagtttactacaacagcaactatgtgatgctcagagttctgcccagttgcaggaaagtatggcccgtgaattggaaaaggaattaaccaaagcgactgaagaatttacaattgaaatacaatcattaaaaggaaagatcagcggacttatttcagagaaggaatcaatatatgatgaactgaagtctactcaagaaaaggtgcagctggaaatgagccagagaaaaggccttgaagatcaaattctaaggttcaaacagtctgtgtctgatagttgtgctgaagagtctaaaacatcatgtagtatggttagatcaggatctggattaggcaacacagcttttgtgtccaaatcagaaaaattaagagaggctctatctggtcagagaggtaccatatcaaagatatttgaagaaggcgtgaaccttcagactctcctgcccaggaatcaaaccgtcatagggatcgggcaattcgctgtctgcgggaaagcgcaccacatccccggcgcgggcaatcgcttccagccgtggatgcccttccagcgcaaagcgtctaccgagtacatcctttgccagaccgtcgatggcaagcggaataaactgccgcgaatcgtaacgtag

SEQ ID NO: 396 - DNA, 1809 bp, Zea Mays
ctctactgagattttggggttgccttgtaagggtccactctttctctaaagatacacatctcacctgcgtgtttgagggaaaaaggaggaggtactggcaaaacatacacagttggtcgacttgggaaagatgacccttctgaacgtggtataatggtcagagcattggagcatatcctctctagcctgtcttttgagacagactgtgtcgccatatcatatctacagctgtacttagaatctgtacatgatttactggctccagagaagactaatattccaatagtagaagatgcaaaaactggtgaagtttccttgccaggtgctgcgatagttgaagttaaagatcttgaacatgtttttcaacttttgcaaattggtgaggcaaatcgtcatgctgctaatactaagatgaacacggagtcatctcgtagtcatgcaattttaattatccatttgcaaagaaacacaagaacaaaagaagaaaatggtagctctttatatgatgttagacatgacacttttcctgatgatctgccacttgttctcaaaagtaaactcttgattgtcgaccttgctggatcagaacgaattgataaatcaggaagtgagggtcacatgatcgaagaagccaagttcatcaatctctcgttaacttccttaggaaaatgcattaatgcgctagcagaaaatagttctcatgtacccacaagagattcaaagcttacaaggatacttcgtgattcatttggagggactgctaggacttctcttgttgtgacaataggtccatctgctaggcattactcagaaacttcaagcacaatcatgtttgggcagagggcaatgaaagtagtgaacacaataaagctgaaggaagaggttgattatgaaattctttacaagaagatggagcgtgaggttgaccaactcacatccgagatggagagacaacagaaggttataagaagtgagaaaatgcagatggataaaaggttgaaagaatctgagaggtccttccatgatttaagaatgacatttaacatgcaaattgagcagcagcaacaacttgagaacctctcaaaaacgaaaattattactgatgagtttaaagagtatgaaaaggaaatgggagaattagtaaggaaacttgaggaagaaaggtgctgttcgtcaagcatgaaagatcgcatgagtttactacaacagcaactatgtgatgctcagagttctgcccaggaaagtatggcccgtgaattggaaaaggaattaaccaaagcgactgaagaatttacaattgaaatacaatcattaaaaggaaagatcagcggacttatttcagagaaggaatcaatatatgatgaactgaagtctactcaagaaaaggtgcagctggaaatgagccagagaaaaggccttgaagatcaaattctaaggttcaaacagtctgtgtctgatagttgtgctgaagagtctaaaacatcatgtagtatggttagatcaggatctggattaggcaacacagcttttgtgtccaaatcagaaaaattaagagaggctctatctggtcagagaggtaccatatcaaagatatttgaagaaggcgtgaaccttcagactctcctgcccaggaatcaaaccgtcatagggatcgggcaattcgctgtctgcgggaaagcgcaccacatccccggcgcgggcaatcgcttccagccgtggatgcccttccagcgcaaagcgtctaccgagtacatcctttgccagaccgtcgatggcaagcggaataaactgccgcgaatcgtaacgtag

SEQ ID NO: 397 - DNA, 1920 bp, Zea Mays
gccttgtaagggtccactctttctctaaagatacacatctcacctgcgtgtttgagggaaaaaggaggaggtactggcaaaacatacacagttggtcgacttgggaaagatgacccttctgaacgtggtataatggtcagagcattggagcatatcctctctagcctgtcttttgagacagactgtgtcgccatatcatatctacagctgtacttagaatctgtacatgatttactggctccagagaagactaatattccaatagtagaagatgcaaaaactggtgaagtttccttgccaggtgctgcgatagttgaagttaaagatcttgaacatgtttttcaacttttgcaaattggtgaggcaaatcgtcatgctgctaatactaagatgaacacggagtcatctcgtagtcatgcaattttaattatccatttgcaaagaaacacaagaacaaaagaagaaaatggtagctctttatatgatgttagacatgacacttttcctgatgatctgccacttgttctcaaaagtaaactcttgattgtcgaccttgctggatcagaacgaattgataaatcaggaagtgagggtcacatgatcgaagaagccaagttcatcaatctctcgttaacttccttaggaaaatgcattaatgcgctagcagaaaatagttctcatgtacccacaagagattcaaagcttacaaggatacttcgtgattcatttggagggactgctaggacttctcttgttgtgacaataggtccatctgctaggcattactcagaaacttcaagcacaatcatgtttgggcagagggcaatgaaagtagtgaacacaataaagctgaaggaagaggttgattatgaaattctttacaagaagatggagcgtgaggttgaccaactcacatccgagatggagagacaacagaaggttataagaagtgagaaaatgcagatggataaaaggttgaaagaatctgagaggtccttccatgatttaagaatgacatttaacatgcaaattgagaatctggagaaggaaaaccgtcatttggaatcttcagtcaaaagattgacgcaggacttagacaaagagagaggccaaaacaatttgttgtccaaacaagtcactgagcttgagaaattgctcgacgaaaacaagcagcaacaacttgagaacctctcaaaaacgaaaattattactgatgagtttaaagagtatgaaaaggaaatgggagaattagtaaggaaacttgaggaagaaaggtgctgttcgtcaagcatgaaagatcgcatgagtttactacaacagcaactatgtgatgctcagagttctgcccaggaaagtatggcccgtgaattggaaaaggaattaaccaaagcgactgaagaatttacaattgaaatacaatcattaaaaggaaagatcagcggacttatttcagagaaggaatcaatatatgatgaactgaagtctactcaagaaaaggtgcagctggaaatgagccagagaaaaggccttgaagatcaaattctaaggttcaaacagtctgtgtctgatagttgtgctgaagagtctaaaacatcatgtagtatggttagatcaggatctggattaggcaacacagcttttgtgtccaaatcagaaaaattaagagaggctctatctggtcagagaggtaccatatcaaagatatttgaagaaggcgtgaaccttcagactctcctgcccaggaatcaaaccgtcatagggatcgggcaattcgctgtctgcgggaaagcgcaccacatccccggcgcgggcaatcgcttccagccgtggatgcccttccagcgcaaagcgtctaccgagtacatcctttgccagaccgtcgatggcaagcggaataaactgccgcgaatcgtaacgtag

SEQ ID NO: 398 - DNA, 2598 bp, Zea Mays
cgctggtgttgcgggcggcaagtcgtgcagtaactcacgagcgcgactatcaaccgagtttcttcactttcttggaagtgagggtcacatgatcgaagaagccaagttcatcaatctctcgttaacttccttaggaaaatgcattaatgcgctagcagaaaatagttctcatgtacccacaagagattcaaagcttacaaggatacttcgtgattcatttggagggactgctaggacttctcttgttgtgacaataggtccatctgctaggcattactcagaaacttcaagcacaatcatgtttgggcagagggcaatgaaagtagtgaacacaataaagctgaaggaagaggttgattatgaaattctttacaagaagatggagcgtgaggttgaccaactcacatccgagatggagagacaacagaaggttataagaagtgagaaaatgcagatggataaaaggttgaaagaatctgagaggtccttccatgatttaagaatgacatttaacatgcaaattgagaatctggagaaggaaaaccgtcatttggaatcttcagtcaaaagattgacgcaggacttagacaaagagagaggccaaaacaatttgttgtccaaacaagtcactgagcttgagaaattgctcgacgaaaacaagcagcaacaacttgagaacctctcaaaaacgaaaattattactgatgagtttaaagagtatgaaaaggaaatgggagaattagtaaggaaacttgaggaagaaaggtgctgttcgtcaagcatgaaagatcgcatgagtttactacaacagcaactatgtgatgctcagagttctgcccaggaaagtatggcccgtgaattggaaaaggaattaaccaaagcgactgaagaatttacaattgaaatacaatcattaaaaggaaagatcagcggacttatttcagagaaggaatcaatatatgatgaactgaagtctactcaagaaaaggtgcagctggaaatgagccagagaaaaggccttgaagatcaaattctaaggttcaaacagtctgtgtctgatagttgtgctgaagagtctaaaacatcatgtagtatggttagatcaggatctggattaggcaacacagcttttgtgtccaaatcagaaaaattaagagaggctctatctggtcagagaggtaccatatcaaagatatttgaagaagttggtcttccaaacgtgcttgctctgttgaagtctgaagatctagatgtgcagatccatgctgtcaaggtggttgctaatcttgctgctgaagatgttaatcaggaaagaatcgttgaggaaggagggctcgatgctcttctatcccttctagaaacatcagaaaacaccactattcatcgagtcactgctggtgctgttgctaacttggcaatgaatggatcaaaccagggagtgattatgaataaaggtggagctcgattattagcaaatgttgcttctgaaactgatgatcctcaaactttgcggatggtggctggcgcaattgccaatttatgtgggaatgaaaagctgcacttaatgttgaaacaagatggtggaatcaaggcactactgggaatgtttcgtagtggacacgccgatgtcatagcccagatagcacgaggaatagcaaactttgcaaaatgcgaatcccggatgataagccaaggtcacaggaaagggaggtcccttctgattgaagatggtgttctttcttggatggtggcccattcaactatgttttctgcttcaacacgaagacatattgagcttgctttttgccacctagctcagaacgaagacaacacttgtgacatcattgcttctggcggaatcaaggagctgcttcgcatatcgagggagtccccgagagaagatacacgtaatttagctaagaaggctttagattcgaatcctgcttttttaagagagatccaatgactcttctatggccaagacaaacatttcattgtagactcatccatgatactatacatatgcagatgatgttccattttctcaaggtcccacgctgccacgctcatgctcatccaaacagcaaaaaaaaaaaaaaaaagataagagctccgtttggatgagtagtccaatagctgaaatcgcagtggtcaatagtaatggttatatcaatggttataagtgcattaaatatgttgttagatgtcagataaaatagtcgcggatgatctggccgtgtacccaagatggtccgcgaggacgctaaaaatgaattttgtcaaactcggagagagaaagaagcatgatggcgaacgaggtggcaacaactgaggcgaggactgtcattatcgtgcggaggtatagatggtcaaatgggctgtgtctggctggctcgagacacgacccatttaatagtgcctagacctgctcgacacaagcgttatgtcgtagccttagcctgtagtgctggcacggtccaacacgattatattttttatttttacaaaaaacgtgtatacatatgtacaatttatattcaatattaaaacacataaacatgctgttatactggttagatggtttcacctaatgtctcg

SEQ ID NO: 399 - DNA, 2187 bp, Zea Mays
cccaccacggcaaagaggcagcagagggatcccccgtccgcctccatccaccgcccgtgggaagggaaggcaagggaagagcagcgagcgtcgcaggcatcggccccagctccggctccgcccgccgccgcaccgcccccctcctcctcccccgatccgatcgccgatcgccagcctttgcgtcgcctcgcggcaatatttggaacccctgttaccgatcgcctcatgccgtaccactgaccgatcccgtcccgtcccctccgacccccgcctttcgtctgctaccccgtcgagaccctacctcccgatcggactagggtgcgtacgatggctagcagcgccgacccgcatgctgccgttgccgcggccatggccgggacgaccccgtccgatagcctgctcggggcgaagaaggctggggcggcggccgccgtatggaagctccccgaggccgcgacggttcccgtcgcggtggtggtcgaaaaccccatcatggatgccgactcctggccggcgctgcccgggctgtcgtctccgccgccgccggctgcggggccagtggccaaggcatctccaaaggccgcttctccggcttccactggggcggtgatgtcgccgccgtctttggccaatcccggcgctccggatgctaaccctggtagtgaggctccggtgcgcaatcctgtggtccagcgtgccctggtgatgcctgcggcaaatgggctggagaagattgcccctgcaccggagccgtcccctgtttatgtgcctaacgctcggagcaacggtgcggatcctcatcagaatggacgttttggctcccatccccatggccgtggtggtggttatgttgggggaaacaggaggggtaatggtggaggtggggggcggcgtgggagtgagcaccatgggttttttgatgggcaacggcgtggaggtggccgcagagatggtcatggaccagttcatcatcagcgtggccaccagccaacatacattaggactcctactctagctgttgtagcaggagcacctcccccaccgcctccatttgttagccctgctactcctcaggcaccaccttatgggacacctatgggcttccctgacatggcaccacaagtttactattacgcggcacccacctcggagggcattcaaggcctgccttttatgtctcatccagcaagcccccaagctgttttaattgatccttttagaaagggtcttctggaccagatagaatactatttcagtgatgccaatttgtgcaaggacctatacttgcggcaacgcatggatgaccaaggttgggtgccattacccctgattgctgggtttccccaggtccagaagattactaacaatattcagtttatcttggaaacagtcatgctatctaacgttgtggaagtgcagggcgacaagctacgaaggcgtggtgcatgggagaattggctgcttccaaaacaaaattattctgctgggagttcttctggttcgttgccccctgtgacatctaacattgattctctgacgtctcagtttcgatttgttggactcgagggggcaacataccatgctaccatgccagtaatgcatggtgaagctctcttgacaagatcagcaacttcagttagtttaggttatcatgcatcaaccatgggtgggctaccgagcaacgggagtgaaccacttttggggccgaagtctgcaagaaatttactcaggagcgataccttttgaggctatatatttcaagatgaagaagtataacggcaggccgagttttcacagtgacggcctgcacactatctcgtgtgaggtgaagatcagttggtcaaaaaaaaaacaaaaaaaaagaggaaaagcataatataccaaaaaaatagagataggtatacacagaactgaaaaaaaacaaaaaaaggcaaaatacaaaaataaaaataaaataaaaaagcaagaggcaacttttgtgctggtactcatgccctttgtgttatgtggtcttagtgggtttgttttcgaatgttagcagtttgatggttctattgtgtaaaccggagttattgaagtgtcttggtatcattcggagactgctgagtggatgaagttatataagtacaagacattattattaattctgctgctgctccctgctgatttgtgtgatggcgatttaac

SEQ ID NO: 400 - DNA, 1413 bp, Zea Mays
cgtccgcctccatccaccgcccgtgggaagggaaggcaagggaagagcagcgagcgtcgcaggcatcggccccagctccggctccgcccgccgccgcaccgcccccctcctcctcccccgatccgatcgccgatcgccagcctttgcgtcgcctcgcggcaatatttggaacccctgttaccgatcgcctcatgccgtaccactgaccgatcccgtcccgtcccctccgacccccgcctttcgtctgctaccccgtcgagaccctacctcccgatcggactagggtgcgtacgatggctagcagcgccgacccgcatgctgccgttgccgcggccatggccgggacgaccccgtccgatagcctgctcggggcgaagaaggctggggcggcggccgccgtatggaagctccccgaggccgcgacggttcccgtcgcggtggtggtcgaaaaccccatcatggatgccgactcctggccggcgctgcccgggctgtcgtctccgccgccgccggctgcggggccagtggccaaggcatctccaaaggccgcttctccggcttccactggggcggtgatgtcgccgccgtctttggccaatcccggcgctccggatgctaaccctggtagtgaggctccggtgcgcaatcctgtggtccagcgtgccctggtgatgcctgcggcaaatgggctggagaagattgcccctgcaccggagccgtcccctgtttatgtgcctaacgctcggagcaacggtgcggatcctcatcagaatggacgttttggctcccatccccatggccgtggtggtggttatgttgggggaaacaggaggggtaatggtggaggtggggggcggcgtgggagtgagcaccatgggttttttgatgggcaacggcgtggaggtggccgcagagatggtcatggaccagttcatcatcagcgtggccaccagccaacatacattaggactcctactctagctgttgtagcaggagcacctcccccaccgcctccatttgttagccctgctactcctcaggcaccaccttatgggacacctatgggcttccctgacatggcaccacaagtttactattacgcggcacccacctcggagggcattcaaggcctgccttttatgtctcatccagcaagcccccaagctgttttaattgatccttttagaaagggtcttctggaccagatagaatactatttcagtgatgccaatttgtgcaaggacctatacttgcggcaacgcatggatgaccaaggttgggtgccattacccctgattgctgggtttccccaggtccagaagattactaacaatattcagtttatcttggaaacagtcatgctatctaacgttgtggaagtgcagagtctatatcgtttgcttggttgctgaa

SEQ ID NO: 401 - DNA, 2804 bp, Zea Mays
cggagaaggacacggggaacgcaacatggctgtggtcattgcctcattggagtgaaccggtggtgggcagtgcggagtgccagcccagccagcagtaaccgccgaagcaaccggtgaggagggaggggaggggctggccgcatccactctccccttccacttgcaggcattgcctgttctccactccagttcccagctccgcagctcgaggacggaacggagggagatagggccaggggaagggacggagagccccgtctccaattcacaacactgccacggccggagccggaggaggaaggcgccagccgtagtccacaggcaacgcaagggaatgccactgttctagtctcgctctcgcagatctgctccgccgcgccctgttcaccgggaattctggagctgagggcgcaggttcgagcagaagctcggagcatggccatggccgagggggagaagcaccatgcccggtgccggtggtaggtagggctctctgatatcgcaggcctttcacgcggcccggcccaaaggcttcccgtccgtaccgtcggctagccgaggacggaaaccgagatcgggtgattgcttgactcgggagctgagccgaggtcgcaatggcgtcgtgggacaacctcggagagctctccaacatcgcgcagctcacggggctggacgccgtcaagctcatttccctcatcgtcagggcggcgtccacggcgcggctgcacaagcgcaactgccgccgcttcgcgcagcacctcaagctcatcggcggcctgctggagcagctccgcgtgtcggagctcaggaagtacccggagacgcgggagccgctggagcagctcgaggacgcgctccgccggggctacctgctcgtcaactcctgccaggaccgctcctacctctacctcctcgccatgggctggaacatcgtctaccagttccgcaaggcgcagagcgagatcgacaattacctccgcctcgtcccgctcatcacgctcgtcgacaatgcccgcattcgggatcggcttgagtatattgagagggaccaatgtgaatattcctttgacgaggaagacaagaaagtgcaagatgctcttttgaatcctgacccttgctcgaatcctacaattgtgctcaagaagactctctcatgttcctatccaaacttgcctttcaatgaggccctccgaaaggaaagtgagaagcttcaggttgaacttcaaaggtcacagagcaacatggatctgggttcgtgtgaggttatccaacacctgcttggagtaaccaaaactgtggaatctacaattccagagaaagaaacaaatgttaaagctccagaaaagaagggttcaaactacagtgaatccaaaggagagactgcaaaatcgtttgatgatgatgacgactatcctaagaagcaaaacgatgactatcctaagaagcaaaaggaaacctgcagcacacaacgatgctcttcacaagttccatatggtcatgatcttgtctcaagtagaggatcgtacagcgatgaatggcatgcagatttacttggctgctgttcagaaccggctttgtgtttgaagaccttgttcttcccctgtggaaccttctcgagaattgcttcaatcgccaaggacaggccaatgtcttctggggaggcttgcaatgatattatggcgtactccctaatattgtcctgctgctgttatacatgctgtgtaaggagaaagcttcgtcaaaagttggacattgcgggaggctgctgtgacgacttcctttcacatctgctgtgttgttgctgcgcgcttgttcaagaatggcgggaagttgagattcgcggagcttatagtgagtttcctacttgaatgcttctagtaaaccatggattaaattagggctgggttattcagttccggaaacagaagggctagctgcctccctgataataataaatttaaaacattgtagtagagcgccttgtatcttccacgagtacttagcgtggtggtaggtcctctggttcggaggctctagtttggaagaaagggaagccaaacccaagaaggggaaacctctcataaataaatgacacctctagacattgctcactttagaaaaaagtcagtggctaaaggaatttgagtttccaaactagcccttagtgctatacctcgtggaggtcaccccaaggagtcgagttttattctcaacatcgattcagtaatattaacttccttgtgactccccaggggtcatgtttttttaagcaccgtctttcgacatcgattcagtaatactagtttccgtgtgcctcatttcgtgcaggcgaaaagacgaaggtcacaccaccagcatgccagtatatggagcactgaacagctgtatgcccgtacgggtagacccgaacttctgtaaagatattaacagaatatctgatatcgtactgcaagagcagtggtactacactgctcctgtgtagtgtttattcttactgtctattgttcgtcctggtcctggaacttgcatgtatatgttggggcatagcaccagagtatgtactctgtaaaaacacatcagttacaggctggtagagcctaacatcgcttaacaccgtcagttattggcaaaaaagttctttgtgcgtgtgcgtgtttaccttaatagcagttaaaaaaaagaagagctttagtcacagattggaaagatcgatggagcccagaattttagaacatatgaacattgcagaaatgggaccgtataagggtgatgtagatgaatcaaacactgatcataccttccct

SEQ ID NO: 402 - DNA, 2838 bp, Zea Mays
gggaacgcaacatggctgtggtcattgcctcattggagtgaaccggtggtgggcagtgcggagtgccagcccagccagcagtaaccgccgaagcaaccggtgaggagggaggggaggggctggccgcatccactctccccttccacttgcaggcattgcctgttctccactccagttcccagctccgcagctcgaggacggaacggagggagatagggccaggggaagggacggagagccccgtctccaattcacaacactgccacggccggagccggaggaggaaggcgccagccgtagtccacaggcaacgcaagggaatgccactgttctagtctcgctctcgcagatctgctccgccgcgccctgttcaccgggaattctggagctgagggcgcaggttcgagcagaagctcggagcatggccatggccgagggggagaagcaccatgcccggtgccggtggtaggtagggctctctgatatcgcaggcctttcacgcggcccggcccaaaggcttcccgtccgtaccgtcggctagccgaggacggaaaccgagatcgggtgattgcttgactcgggagctgagccgaggtcgcaatggcgtcgtgggacaacctcggagagctctccaacatcgcgcagctcacggggctggacgccgtcaagctcatttccctcatcgtcagggcggcgtccacggcgcggctgcacaagcgcaactgccgccgcttcgcgcagcacctcaagctcatcggcggcctgctggagcagctccgcgtgtcggagctcaggaagtacccggagacgcgggagccgctggagcagctcgaggacgcgctccgccggggctacctgctcgtcaactcctgccaggaccgctcctacctctacctcctcgccatgggctggaacatcgtctaccagttccgcaaggcgcagagcgagatcgacaattacctccgcctcgtcccgctcatcacgctcgtcgacaatgcccgcattcgggtcggtaatcggctttcatctctctcccttttctacccaagctgtttgtttacattcttctcacgcattcgggtaggctcctagactggatgtgggccttgtaggctttttcaaccagaaacactggaattcttatctgatggggatattctggtttatgcgcaccattctttggttctactagagtactggactactggtatcgatcggggtgcctagaatatcttctattcttcttttgaggttctaatagtcactaggggtggtttttctgcatgatctgattggattcttgttttctgttagttggccatgaagctggcacgaccaagaatctctgatgtttttgggtacttctttatgctgtcgttttcattgttcacgcacctgcaaagtgaacttgtagacagttgtaggttaagttgaattctgtatagtgttgccaattgttttgctccagtgaaatacatttttttttcttaactataccctgtttatcttattcttcatcttttcttttcctaggatcggcttgagtatattgagagggaccaatgtgaatattcctttgacgaggaagacaagaaagtgcaagatgctcttttgaatcctgacccttgctcgaatcctacaattgtgctcaagaagactctctcatgttcctatccaaacttgcctttcaatgaggccctccgaaaggaaagtgagaagcttcaggttgaacttcaaaggtcacagagcaacatggatctgggttcgtgtgaggttatccaacacctgcttggagtaaccaaaactgtggaatctacaattccagagaaagaaacaaatgttaaagctccagaaaagaagggttcaaactacagtgaatccaaaggagagactgcaaaatcgtttgatgatgatgacgactatcctaagaagcaaaacgatgactatcctaagaagcaaaaggaaacctgcagcacacaacgatgctcttcacaagttccatatggtcatgatcttgtctcaagtagaggatcgtacagcgatgaatggcatgcagatttacttggctgctgttcagaaccggctttgtgtttgaagaccttgttcttcccctgtggaaccttctcgagaattgcttcaatcgccaaggacaggccaatgtcttctggggaggcttgcaatgatattatggcgtactccctaatattgtcctgctgctgttatacatgctgtgtaaggagaaagcttcgtcaaaagttggacattgcgggaggctgctgtgacgacttcctttcacatctgctgtgttgttgctgcgcgcttgttcaagaatggcgggaagttgagattcgcggagcttatagcgaaaagacgaaggtcacaccaccagcatgccagtatatggagcactgaacagctgtatgcccgtacgggtagacccgaacttctgtaaagatattaacagaatatctgatatcgtactgcaagagcagtggtactacactgctcctgtgtagtgtttattcttactgtctattgttcgtcctggtcctggaacttgcatgtatatgttggggcatagcaccagagtatgtactctgtaaaaacacatcagttacaggctggtagagcctaacatcgcttaacaccgtcagttattggcaaaaaagttctttgtgcgtgtgcgtgtttaccttaatagcagttaaaaaaaagaagagctttagtcacagattggaaagatcgatggagcccagaattttagaacatatgaacattgcagaaatgggaccgtataagggtgatgtagatgaatcaaacactgatcataccttccct

SEQ ID NO: 403 - DNA, 1592 bp, Zea Mays
gtcattgcctcattggagtgaaccggtggtgggcagtgcggagtgccagcccagccagcagtaaccgccgaagcaaccggtgaggagggaggggaggggctggccgcatccactctccccttccacttgcaggcattgcctgttctccactccagttcccagctccgcagctcgaggacggaacggagggagatagggccaggggaagggacggagagccccgtctccaattcacaacactgccacggccggagccggaggaggaaggcgccagccgtagtccacaggatcggcttgagtatattgagagggaccaatgtgaatattcctttgacgaggaagacaagaaagtgcaagatgctcttttgaatcctgacccttgctcgaatcctacaattgtgctcaagaagactctctcatgttcctatccaaacttgcctttcaatgaggccctccgaaaggaaagtgagaagcttcaggttgaacttcaaaggtcacagagcaacatggatctgggttcgtgtgaggttatccaacacctgcttggagtaaccaaaactgtggaatctacaattccagagaaagaaacaaatgttaaagctccagaaaagaagggttcaaactacagtgaatccaaaggagagactgcaaaatcgtttgatgatgatgacgactatcctaagaagcaaaacgatgactatcctaagaagcaaaaggaaacctgcagcacacaacgatgctcttcacaagttccatatggtcatgatcttgtctcaagtagaggatcgtacagcgatgaatggcatgcagatttacttggctgctgttcagaaccggctttgtgtttgaagaccttgttcttcccctgtggaaccttctcgagaattgcttcaatcgccaaggacaggccaatgtcttctggggaggcttgcaatgatattatggcgtactccctaatattgtcctgctgctgttatacatgctgtgtaaggagaaagcttcgtcaaaagttggacattgcgggaggctgctgtgacgacttcctttcacatctgctgtgttgttgctgcgcgcttgttcaagaatggcgggaagttgagattcgcggagcttatagcgaaaagacgaaggtcacaccaccagcatgccagtatatggagcactgaacagctgtatgcccgtacgggtagacccgaacttctgtaaagatattaacagaatatctgatatcgtactgcaagagcagtggtactacactgctcctgtgtagtgtttattcttactgtctattgttcgtcctggtcctggaacttgcatgtatatgttggggcatagcaccagagtatgtactctgtaaaaacacatcagttacaggctggtagagcctaacatcgcttaacaccgtcagttattggcaaaaaagttctttgtgcgtgtgcgtgtttaccttaatagcagttaaaaaaaagaagagctttagtcacagattggaaagatcgatggagcccagaattttagaacatatgaacattgcagaaatgggaccgtataagggtgatgtagatgaatcaaacactgatcataccttccct

SEQ ID NO: 404 - DNA, 1474 bp, Zea Mays
attggagtgaaccggtggtgggcagtgcggagtgccagcccagccagcagtaaccgccgaagcaaccggtgaggagggaggggaggggctggccgcatccactctccccttccacttgcaggcattgcctgttctccactccagttcccagctccgcagctcgaggacggaacggagggagatagggccaggggaagggacggagagccccgtctccaattcacaacactgccacggccggagccggaggaggaaggcgccagccgtagtccacaggatcggcttgagtatattgagagggaccaatgtgaatattcctttgacgaggaagacaagaaagtgcaagatgctcttttgaatcctgacccttgctcgaatcctacaattgtgctcaagaagactctctcatgttcctatccaaacttgcctttcaatgaggccctccgaaaggaaagtgagaagcttcaggttgaacttcaaaggtcacagagcaacatggatctgggttcgtgtgaggttatccaacacctgcttggagtaaccaaaactgtggaatctacaattccagagaaagaaacaaatgttaaagctccagaaaagaagggttcaaactacagtgaatccaaaggagagactgcaaaatcgtttgatgatgatgacgactatcctaagaagcaaaacgatgactatcctaagaagcaaaaggaaacctgcagcacacaacggtttgaagaccttgttcttcccctgtggaaccttctcgagaattgcttcaatcgccaaggacaggccaatgtcttctggggaggcttgcaatgatattatggcgtactccctaatattgtcctgctgctgttatacatgctgtgtaaggagaaagcttcgtcaaaagttggacattgcgggaggctgctgtgacgacttcctttcacatctgctgtgttgttgctgcgcgcttgttcaagaatggcgggaagttgagattcgcggagcttatagcgaaaagacgaaggtcacaccaccagcatgccagtatatggagcactgaacagctgtatgcccgtacgggtagacccgaacttctgtaaagatattaacagaatatctgatatcgtactgcaagagcagtggtactacactgctcctgtgtagtgtttattcttactgtctattgttcgtcctggtcctggaacttgcatgtatatgttggggcatagcaccagagtatgtactctgtaaaaacacatcagttacaggctggtagagcctaacatcgcttaacaccgtcagttattggcaaaaaagttctttgtgcgtgtgcgtgtttaccttaatagcagttaaaaaaaagaagagctttagtcacagattggaaagatcgatggagcccagaattttagaacatatgaacattgcagaaatgggaccgtataagggtgatgtagatgaatcaaacactgatcataccttccct

SEQ ID NO: 405 - DNA, 2576 bp, Zea Mays
ccggtggtgggcagtgcggagtgccagcccagccagcagtaaccgccgaagcaaccggtgaggagggaggggaggggctggccgcatccactctccccttccacttgcaggcattgcctgttctccactccagttcccagctccgcagctcgaggacggaacggagggagatagggccaggggaagggacggagagccccgtctccaattcacaacactgccacggccggagccggaggaggaaggcgccagccgtagtccacaggcaacgcaagggaatgccactgttctagtctcgctctcgcagatctgctccgccgcgccctgttcaccgggaattctggagctgagggcgcaggttcgagcagaagctcggagcatggccatggccgagggggagaagcaccatgcccggtgccggtggtagggcggcgtccacggcgcggctgcacaagcgcaactgccgccgcttcgcgcagcacctcaagctcatcggcggcctgctggagcagctccgcgtgtcggagctcaggaagtacccggagacgcgggagccgctggagcagctcgaggacgcgctccgccggggctacctgctcgtcaactcctgccaggaccgctcctacctctacctcctcgccatgggctggaacatcgtctaccagttccgcaaggcgcagagcgagatcgacaattacctccgcctcgtcccgctcatcacgctcgtcgacaatgcccgcattcgggtcggtaatcggctttcatctctctcccttttctacccaagctgtttgtttacattcttctcacgcattcgggtaggctcctagactggatgtgggccttgtaggctttttcaaccagaaacactggaattcttatctgatggggatattctggtttatgcgcaccattctttggttctactagagtactggactactggtatcgatcggggtgcctagaatatcttctattcttcttttgaggttctaatagtcactaggggtggtttttctgcatgatctgattggattcttgttttctgttagttggccatgaagctggcacgaccaagaatctctgatgtttttgggtacttctttatgctgtcgttttcattgttcacgcacctgcaaagtgaacttgtagacagttgtaggttaagttgaattctgtatagtgttgccaattgttttgctccagtgaaatacatttttttttcttaactataccctgtttatcttattcttcatcttttcttttcctaggatcggcttgagtatattgagagggaccaatgtgaatattcctttgacgaggaagacaagaaagtgcaagatgctcttttgaatcctgacccttgctcgaatcctacaattgtgctcaagaagactctctcatgttcctatccaaacttgcctttcaatgaggccctccgaaaggaaagtgagaagcttcaggttgaacttcaaaggtcacagagcaacatggatctgggttcgtgtgaggttatccaacacctgcttggagtaaccaaaactgtggaatctacaattccagagaaagaaacaaatgttaaagctccagaaaagaagggttcaaactacagtgaatccaaaggagagactgcaaaatcgtttgatgatgatgacgactatcctaagaagcaaaacgatgactatcctaagaagcaaaaggaaacctgcagcacacaacgatgctcttcacaagttccatatggtcatgatcttgtctcaagtagaggatcgtacagcgatgaatggcatgcagatttacttggctgctgttcagaaccggctttgtgtttgaagaccttgttcttcccctgtggaaccttctcgagaattgcttcaatcgccaaggacaggccaatgtcttctggggaggcttgcaatgatattatggcgtactccctaatattgtcctgctgctgttatacatgctgtgtaaggagaaagcttcgtcaaaagttggacattgcgggaggctgctgtgacgacttcctttcacatctgctgtgttgttgctgcgcgcttgttcaagaatggcgggaagttgagattcgcggagcttatagcgaaaagacgaaggtcacaccaccagcatgccagtatatggagcactgaacagctgtatgcccgtacgggtagacccgaacttctgtaaagatattaacagaatatctgatatcgtactgcaagagcagtggtactacactgctcctgtgtagtgtttattcttactgtctattgttcgtcctggtcctggaacttgcatgtatatgttggggcatagcaccagagtatgtactctgtaaaaacacatcagttacaggctggtagagcctaacatcgcttaacaccgtcagttattggcaaaaaagttctttgtgcgtgtgcgtgtttaccttaatagcagttaaaaaaaagaagagctttagtcacagattggaaagatcgatggagcccagaattttagaacatatgaacattgcagaaatgggaccgtataagggtgatgtagatgaatcaaacactgatcataccttccct

SEQ ID NO: 406 - DNA, 932 bp, Zea Mays
cgacttgcgagtgtatgagatctgactcctgtgcatcatcagaactatgactgatcattgccttgatgtaattctgatgctcttcacaagttccatatggtcatgatcttgtctcaagtagaggatcgtacagcgatgaatggcatgcagatttacttggctgctgttcagaaccggctttgtgtttgaagaccttgttcttcccctgtggaaccttctcgagaattgcttcaatcgccaaggacaggccaatgtcttctggggaggcttgcaatgatattatggcgtactccctaatattgtcctgctgctgttatacatgctgtgtaaggagaaagcttcgtcaaaagttggacattgcgggaggctgctgtgacgacttcctttcacatctgctgtgttgttgctgcgcgcttgttcaagaatggcgggaagttgagattcgcggagcttatagcgaaaagacgaaggtcacaccaccagcatgccagtatatggagcactgaacagctgtatgcccgtacgggtagacccgaacttctgtaaagatattaacagaatatctgatatcgtactgcaagagcagtggtactacactgctcctgtgtagtgtttattcttactgtctattgttcgtcctggtcctggaacttgcatgtatatgttggggcatagcaccagagtatgtactctgtaaaaacacatcagttacaggctggtagagcctaacatcgcttaacaccgtcagttattggcaaaaaagttctttgtgcgtgtgcgtgtttaccttaatagcagttaaaaaaaagaagagctttagtcacagattggaaagatcgatggagcccagaattttagaacatatgaacattgcagaaatgggaccgtataagggtgatgtagatgaatcaaacactgatcataccttccct

SEQ ID NO: 407 - DNA, 2085 bp, Zea Mays
aaacctccaccgccgtcaatataagcgacagctgcaggagggcccgggccgggcccgcagttgaaaccgccagccgttccttcccacgctcctccccgcccccggtccgccccccacctcaattccacaccccgcggcgaggccgcggggcgcccgcgcccaaacgccaaaaccctagctccccacccacccaccccaagcaccgcggggccgccgcgcgctcgcccacggtcgccacggatgcgcgcggcccgctcgcggacctcgacgacaccccgctcgcttgccgcggctgttccgccatggacgagcccgagaaagtgaggggcagggaggatgcggcgtcgggccgcgaggctggcggcgccgaggaggccggggatgggttccagctcgtgatccatggcaagaagaagaagagggcggccagcggccaggactgcgggactgctggctctggctctggcgctggcgccgggccagtgcgggcgttgaccagggagaagggagccgcgccggcgccgggggccaaggccaaggtgcctttccacgatccaagcattccccggccgcaggacgtatacaaaatcagagtggataactacaagccattcgagcatgtctggctggagcgcagcgaagacggcacccgacgtgttcacccgctggaaaacctgcctgttgaacagttcgttgacagaaatgttcctgacagagaaccagtgaagccagctgatttagaggatacaccatttacgctggttcaagatcacaaaggcttaacagaattagctaagaagttgaagagcgtaactgaatttgctgtagatctggagcataatcaatataggtcatttcagggcttgacctgcttgatgcagatttcaacaagaacagaagactttattgtggacactcttaagctacgcatatacattggtctctatttgcaagagcctttcaaagatccaacaaagagaaaggtaatgcatggtgcggatcgtgatataatgtggctccagcgggacttccacatctatgtgtgcaatctttttgacacaggacaggcttcaagggtcttacagatggagagaaacagccttgagcacctattgcttcatttttgtggagtaacagcaaagaaggagtatcaaaatgcagactggaggtcgagaccacttcctgatgaaatgatcaagtatgctagagaagatacacactatctgttgtacatatatgatttaatgagacagagactacagagggagtcaacatttgaaaatgatcttcttctagaggtccataagcgcagtaatgaaatttgcttacagttctatgagaaggagcttctgacagatacatcctatctccacatatacgggttgcaggaacatgaactggatgcaagacagctggctgttgttgctgctctacatgagtggagagatcgtatagctcgtcaggaagatgagagtactggttatatactgccaaataaggctttaattgagatagcaaagcagatgcctacagatgttggacatttgaaaagaattgtgaaatcaaaatatccatatgttgagagcaatcttgagctaattgcttacactgtctggaatgcacttgagtattcttatgccttcgaaggaatagctgagcaactaaagaaggaacggctggaacaggtggcactgaaaagtggtcagaccagtgatgaagtgactcctttggatgctgacattgataggagtaattttgattcatctgatcagtctgcaaatgtcaatgttgcttctggtagtagggctggttttatgagtgaagcagctttgatcagcagcatccacctagaggacaaaactcaaaccatgtcctcagttaagacctctcagaccttgctaggccagatcagaccagtgaataaggatgtcctgagcaataatatacatcagcaggctattcaggacctaagtctcactttaaaagctctaaaaggaaacttggcatctggaggagagtcaaatgagcaggacacacccaggtttgatctgcgacgcttagaagctgtagcacctgacatcttat

SEQ ID NO: 408 - DNA, 1494 bp, Zea Mays
cactatcctgttgccacttctctatgttttggcgagttctaacggaatggaggagctataaactcattgatcgatgtgaaaacctgcctgttgaacagttcgttgacagaaatgttcctgacagagaaccagtgaagccagctgatttagaggatacaccatttacgctggttcaagatcacaaaggcttaacagaattagctaagaagttgaagagcgtaactgaatttgctgtagatctggagcataatcaatataggtcatttcagggcttgacctgcttgatgcagatttcaacaagaacagaagactttattgtggacactcttaagctacgcatatacattggtctctatttgcaagagcctttcaaagatccaacaaagagaaaggtaatgcatggtgcggatcgtgatataatgtggctccagcgggacttccacatctatgtgtgcaatctttttgacacaggacaggcttcaagggtcttacagatggagagaaacagccttgagcacctattgcttcatttttgtggagtaacagcaaagaaggagtatcaaaatgcagactggaggtcgagaccacttcctgatgaaatgatcaagtatgctagagaagatacacactatctgttgtacatatatgatttaatgagacagagactacagagggagtcaacatttgaaaatgatcttcttctagaggtccataagcgcagtaatgaaatttgcttacagttctatgagaaggagcttctgacagatacatcctatctccacatatacgggttgcaggaacatgaactggatgcaagacagctggctgttgttgctgctctacatgagtggagagatcgtatagctcgtcaggaagatgagagtactggttatatactgccaaataaggctttaattgagatagcaaagcagatgcctacagatgttggacatttgaaaagaattgtgaaatcaaaatatccatatgttgagagcaatcttgagctaattgcttacactgtctggaatgcacttgagtattcttatgccttcgaaggaatagctgagcaactaaagaaggaacggctggaacaggtggcactgaaaagtggtcagaccagtgatgaagtgactcctttggatgctgacattgataggagtaattttgattcatctgatcagtctgcaaatgtcaatgttgcttctggtagtagggctggttttatgagtgaagcagctttgatcagcagcatccacctagaggacaaaactcaaaccatgtcctcagttaagacctctcagaccttgctaggccagatcagaccagtgaataaggatgtcctgagcaataatatacatcagcaggctattcaggacctaagtctcactttaaaagctctaaaaggaaacttggcatctggaggagagtcaaatgagcaggacacacccaggtttgatctgcgacgcttagaagctgtagcacctgacatcttat

SEQ ID NO: 409 - DNA, 2211 bp, Zea Mays
caacgatatgtaccatactaacaggaaaacctgcctgttgaacagttcgttgacagaaatgttcctgacagagaaccagtgaagccagctgatttagaggatacaccatttacgctggttcaagatcacaaaggcttaacagaattagctaagaagttgaagagcgtaactgaatttgctgtagatctggagcataatcaatataggtcatttcagggcttgacctgcttgatgcagatttcaacaagaacagaagactttattgtggacactcttaagctacgcatatacattggtctctatttgcaagagcctttcaaagatccaacaaagagaaaggtaatgcatggtgcggatcgtgatataatgtggctccagcgggacttccacatctatgtgtgcaatctttttgacacaggacaggcttcaagggtcttacagatggagagaaacagccttgagcacctattgcttcatttttgtggagtaacagcaaagaaggagtatcaaaatgcagactggaggtcgagaccacttcctgatgaaatgatcaagtatgctagagaagatacacactatctgttgtacatatatgatttaatgagacagagactacagagggagtcaacatttgaaaatgatcttcttctagaggtccataagcgcagtaatgaaatttgcttacagttctatgagaaggagcttctgacagatacatcctatctccacatatacgggttgcaggaacatgaactggatgcaagacagctggctgttgttgctgctctacatgagtggagagatcgtatagctcgtcaggaagatgagagtactggttatatactgccaaataaggctttaattgagatagcaaagcagatgcctacagatgttggacatttgaaaagaattgtgaaatcaaaatatccatatgttgagagcaatcttgagctaattgcttacactgtctggaatgcacttgagtattcttatgccttcgaaggaatagctgagcaactaaagaaggaacggctggaacaggtggcactgaaaagtggtcagaccagtgatgaagtgactcctttggatgctgacattgataggagtaattttgattcatctgatcagtctgcaaatgtcaatgttgcttctggtagtagggctggttttatgagtgaagcagctttgatcagcagcatccacctagaggacaaaactcaaaccatgtcctcagttaagacctctcagaccttgctaggccagatcagaccagtgaataaggatgtcctgagcaataatatacatcagcaggctattcaggacctaagtctcactttaaaagctctaaaaggaaacttggcatctggaggagagtcaaatgagcaggctgggatcaacgtggagaactttagatcttctgtatttccttcccggcagttgtctggtgaggtaaaaccattttatccaaatcctggaatgcacagtgagaatgtttggattcaaacaactcagacaaacgagacaatgaagctgtgcaacacaacttactacagacagcttccaggacatagcactgagtcaataaaccaaagaagtacaggaagtttccagagttcggtgagacgtcaatctttcccaccttcaagttacaagaaatgagattcataccagtagccgtcctgatgtatagcagaaagggagaaaaagatgaacccctgtcattgatccttgttgtgctagtgcacatattgactgtagagaacaaagacttggggctgttttacttgccctctgaatgcctctttggatttttggcattcggttaactgaaaggtgaggaacccaatattgactgtaggtgcagggtatcggaagtgccatctcattgcccattggctcatggaatgggtggatgggactaacaaacatgttctggttcaatgatgaatactggaatcgcacaggaaaaatatactgtgacattgcgacagtgcaacacctaaatacaaagacttggaaacaaacaacttgctttgttctgttctttttccctcgtgtcaatgcctcttcttttaatttttctgtatatttctttacatgcgtttcattattgaactttttatttctatagacgtgtagttgtatagcgtcctggtgcgtgtggccatattggctaggaaagtactcattccctcagttctaaattagtag

SEQ ID NO: 410 - DNA, 1947 bp, Zea Mays
gctggcttgccatcagttatatataagtggatttacttctgcctaggtatgctagagaagatacacattatctgctgtacatatatgacttaatgagacaggccatattctgaatttcttttttgttgtgtttggtgttggatatttttttgtttgctgcttttctttatttctgacttgccatcagttatatataagtggctttacttctgcccaggtatgctagagaagatacaaactatctgctgtacatatatgacttatttcttttttattgtgtttggtgttggatattttttgtttgcttcttttctttatttctgacttgccatcagttatatataagtggctttacttctgcccaggtatgctagagaagatacacactatctgttgtacatatatgatttaatgagacagagactacagagggagtcaacatttgaaaatgatcttcttctagaggtccataagcgcagtaatgaaatttgcttacagttctatgagaaggagcttctgacagatacatcctatctccacatatacgggttgcaggaacatgaactggatgcaagacagctggctgttgttgctgctctacatgagtggagagatcgtatagctcgtcaggaagatgagagtactggttatatactgccaaataaggctttaattgagatagcaaagcagatgcctacagatgttggacatttgaaaagaattgtgaaatcaaaatatccatatgttgagagcaatcttgagctaattgcttacactgtctggaatgcacttgagtattcttatgccttcgaaggaatagctgagcaactaaagaaggaacggctggaacaggtggcactgaaaagtggtcagaccagtgatgaagtgactcctttggatgctgacattgataggagtaattttgattcatctgatcagtctgcaaatgtcaatgttgcttctggtagtagggctggttttatgagtgaagcagctttgatcagcagcatccacctagaggacaaaactcaaaccatgtcctcagttaagacctctcagaccttgctaggccagatcagaccagtgaataaggatgtcctgagcaataatatacatcagcaggctgggatcaacgtggagaactttagatcttctgtatttccttcccggcagttgtctggtgaggtaaaaccattttatccaaatcctggaatgcacagtgagaatgtttggattcaaacaactcagacaaacgagacaatgaagctgtgcaacacaacttactacagacagcttccaggacatagcactgagtcaataaaccaaagaagtacaggaagtttccagagttcggtgagacgtcaatctttcccaccttcaagttacaagaaatgagattcataccagtagccgtcctgatgtatagcagaaagggagaaaaagatgaacccctgtcattgatccttgttgtgctagtgcacatattgactgtagagaacaaagacttggggctgttttacttgccctctgaatgcctctttggatttttggcattcggttaactgaaaggtgaggaacccaatattgactgtaggtgcagggtatcggaagtgccatctcattgcccattggctcatggaatgggtggatgggactaacaaacatgttctggttcaatgatgaatactggaatcgcacaggaaaaatatactgtgacattgcgacagtgcaacacctaaatacaaagacttggaaacaaacaacttgctttgttctgttctttttccctcgtgtcaatgcctcttcttttaatttttctgtatatttctttacatgcgtttcattattgaactttttatttctatagacgtgtagttgtatagcgtcctggtgcgtgtggccatattggctaggaaagtactcattccctcagttctaaattagtag

SEQ ID NO: 411 - DNA, 1568 bp, Zea Mays
gccgccccctttctccccatttccgcaccacgcccagtcgcccacgcagccggcccaagcccaaaaacctttctccatcctctactctcatccccacgatggccgccgccgccaccacgccgcactccctcctcctccagcgcgccgcgatcccggccgcgccgtcgagggcgtccgccgccgcctctcccgtccgcctcccggtccgcgccgccaggatctcgtgcgcggcggtggcggcgccgtccccggccgcagccgccgcggcggacgaggtggagcgcggcgtctacaacttcgcggcgggtcccgcgacgctccctctctccgtgctcaagcgggcgcaggcggagctggtggactaccacggctccgggatgagcatcatggagatgagccaccgcgggaaggagttcgacgccgccatcaagaaggccgagtccgacctgcgcgcgctcctcgcggtgcccgacacccacgccgtgctcttcctccagggcggcgccaccacgcagttcgccgccgtcccgctcaacctctgcacggggccctccgacccggccgacttcgtcgtgtccggatcctggagcgacaaggccttcaaggaggccaagaagttctccgccgcctccgtcgcctggtcgggtaaagacggcaagtacacggccctcccgccgttcgacgccatcgcccagaaccccgaggccaggttcctccacatctgctccaacgagaccatccacggcgtcgagttcaaggactacccggagccccgcaacaggtcgggcatcctcgtcgccgacatgtcctccaacttctgctccaagcccgtcgacgtctcccgcttcggcgtcatctacgccggcgcacagaagaacgtcgggccctccggcgtcaccatcgccatcgtgcgcaaggacctcatcggcgccgctcagcccatcacgcccgtcatgctcgacttcaagacgcacgccgacaacgcctccctctacaacaccccgccctgcttcgccatctacgtctgcggtctcgtcttcgaggacctgctcgcgcagggcggcctcgccgaggtcgagaagaagaacgcgcgcaaggccggcgccctctacgacaccatcgatgccagcggagggtactacgtctgccccgtcgacaagtccgtgcgctcgcacatgaacgtgcccttcaccctggccaagggcccggacttcgagaagcagttcatcgccgaggcggccaaggagggcatggtgcagctcaaggggcacaggtctgtcggcggtgtccgcgcctccatctacaatgccatgccgctcgccggcgtcgagaagctcgtcgccttcatgaaggacttccaagccaggaacccttgattgccttgtgcttatgatcatttgttgtaatgtgtttttgctggaaataaggaataaggtagatggccggttgcctcgcctcgatggagatcagctattcaggagtgacttgtcgaagcttatataaaacattaatacgaaggttgcttggtttttgcctcttcaaaaaaaaggagcaaattttgttggttt

SEQ ID NO: 412 - DNA, 1922 bp, Zea Mays
ccacactccatcctcaaacggccgccgccaaagtgggcgtggcccaacgagagcgcggattaaccgctgcccgctgcgtaaatcgcaagcagagaacacacggtgacacggaggcagtccgcttgaaagctaagctaaactgctctagcacgcatataaacccttgacaaatcaagagtggagaaaaaaaaacacgaacccactagccctctctgcttcctctccgtttctcctccactcaccagtcaccactcctgattgctgtcgagtctcgatctgccagcgcgcggcgcgatggccgacaaggcggcgtccccggagaagaagtcatgggccgacgtcgaagaggaggaggaggccaaggctaaggcgaccgcggcagccgaagcggcggcggcggccgccgcggcgtcctcttcctcctccatcaccgagccggcggtggaggagcaggccaagcagatcgaggcgctctccctcgccccgtcggtggacgacgccgcaggcgaagagggcccgcccctcctcgatgactccgacgactcgcaaatccaagccgtgatttcgggtggcacggtgtacgagtcggccaccacgttcgaggatctgaagctgtcgcccgagctgcttaaggggctgcacgacgagatggggttcagccgcccgagcaagatccaggcgatcaccctgcccatgatcctcacgccgccctacaaggacctcgtcgcgcaggcgcacaacggctctggcaagaccacctgtttcgtcctcggcatgctcagccgcgtcgacccgcaacgcaagataccccaggctatctgcatttgccccaccagggagcttgcgcagcagaataaggcagttctcatgaggatgggcaagtttactggcattacatgcgcctgtgcaatcccgccagctcaaaaagactacatgccgatctcgaaaatggctccgatcactgaccagatcgttatcggcacatctgatcatatgcttgctgaggatggctttaggagtgattctgaaaggatgatgagggatatacaaagaagcgctggtggttgtcaggtgcttctcttttctgcgaccttcaatgatagggtgaaggattttgttacaaaggtcattagggatggaaatcagatatttgtgaagaaggaagagcttactttggaaaaagttaaacagtacaaagttcaagtacctgatgaatcggcaaaaatagaggttataagggacaagatatttgaatttggacagaaagttggccaggttatcatatttgttagaacaaagcaaagtactaagaatgttcacaatgctttgacgagggaggactatgtgtgctcctcaatccaaggatcccttgaccaatcagagagggaaaagataatacaggaattcaaagatggctacaccaaggttcttatatcaactgatgttcttgctcgaggttttgaccaagcacaggttaacctcgtcatcaactacgacatgccaatcaaatttggtacaagagatgaacctgattatgaggtgtacttgcacagaattggcagagctgggcgcttttggccggaaaggtgctgtgttcaacttgctgtgtggtcaaaccgataatgttgtgatgaagaagatcgaggactatttccagcacagtgtgcctgaggggtgtaactaaatcttgtgcatgcttttatcttatgctcttatgcatattcttattgtgttgtgttaactttaggttcggaattggcaacgtgaagaagattttgaggctgctctcaaggatgcaggtttactttaaagtaaccaccgaaacctgtggtgagcagcgctctccggctcaggacaattgaccggtgattttttttgtcgagcctgctgcacaacgttagtgtgctctttctgctcatcct

SEQ ID NO: 413 - DNA, 1583 bp, Zea Mays
aaaaaaaacacgaacccactagccctctctgcttcctctccgtttctcctccactcaccagtcaccactcctgattgctgtcgagtctcgatctgccagcgcgcggcgcgatggccgacaaggcggcgtccccggagaagaagtcatgggccgacgtcgaagaggaggaggaggccaaggctaaggcgaccgcggcagccgaagcggcggcggcggccgccgcggcgtcctcttcctcctccatcaccgagccggcggtggaggagcaggccaagcagatcgaggcgctctccctcgccccgtcggtggacgacgccgcaggcgaagagggcccgcccctcctcgatgactccgacgactcgcaaatccaagccgtgatttcgggtggcacggtgtacgagtcggccaccacgttcgaggatctgaagctgtcgcccgagctgcttaaggggctgcacgacgagatggggttcagccgcccgagcaagatccaggcgatcaccctgcccatgatcctcacgccgccctacaaggacctcgtcgcgcaggcgcacaacggctctggcaagaccacctgtttcgtcctcggcatgctcagccgcgtcgacccgcaacgcaagataccccaggctatctgcatttgccccaccagggagcttgcgcagcagaataaggcagttctcatgaggatgggcaagtttactggcattacatgcgcctgtgcaatcccgccagctcaaaaagactacatgccgatctcgaaaatggctccgatcactgaccagatcgttatcggcacatctgatgcagatcatatgcttgctgaggatggctttaggagtgattctgaaaggatgatgagggatatacaaagaagcgctggtggttgtcaggtgcttctcttttctgcgaccttcaatgatagggtgaaggattttgttacaaaggtcattagggatggaaatcagatatttgtgaagaaggaagagcttactttggaaaaagttaaacagtacaaagttcaagtacctgatgaatcggcaaaaatagaggttataagggacaagatatttgaatttggacagaaagttggccaggttatcatatttgttagaacaaagcaaagtactaagaatgttcacaatgctttgacgagggaggactatgtgtgctcctcaatccaaggatcccttgaccaatcagagagggaaaagataatacaggaattcaaagatggctacaccaaggttcttatatcaactgatgttcttgctcgaggttttgaccaagcacaggttaacctcgtcatcaactacgacatgccaatcaaatttggtacaagagatgaacctgattatgaggtgtacttgcacagaattggcagagctgggcgcttttggccggaaaggttcggaattggcaacgtgaagaagattttgaggctgctctcaaggatgcaggtttactttaaagtaaccaccgaaacctgtggtgagcagcgctctccggctcaggacaattgaccggtgattttttttgtcgagcctgctgcacaacgttagtgtgctctttctgctcatcct

SEQ ID NO: 414 - DNA, 2418 bp, Zea Mays
ggaaacggactaccagcgctgagccgttccgtttcttttcaatcttggcgttttgtctccattcaatagggaaagggatgtttcgcttgaggctttcctttgtgcctgtgtcttctctgtagctttcaagagaataaaaatttggagcttctctcgcaccagcgtcctttccttcttccttggtttcatgctgacaactagggctgatcttcaggacggcctgttcttggttcggttcctgagagcgattgataggtctgagattatatattggtgtcgttgttgtttgttttttttcgtgctcatccgttgctaaataagcaaaccatcagcccatcagcttactacaagcactcttttgcctccttttctgttcttggtgttcttggtgagacacagcgccagacggagtttcttctttaggagtcgtgcactatgggtaattgctggtttaaggggaatccatactttaacagggtttcttccaatgcaaccaaagcaggtacgactatttattactttggtttgatctctgtgatgatgtaactgcaactgtagtatgcagaagtttcatatatttgtttgatgccctcaatttagacattaacgaaactgctgctatgtgtgtgttctctcgtcttgatagaatcagggaccatgtccctgctcttgtttagtccaattacggctatttcagtactgaatattttcttcacaaaaaatcagtcctaatgttcaatcttatccaacccaatgattcttttttccctaaccttgacagttgattttatgattattccatgtaatgatcagatacttttgttctgccgtatgaaattcttgttcatcttttggtaacttatttacaaagtttctgaataatctgcaccctgtatttcagtccccgtacttgacttgtctatttgttttctgcagaatctcccaaaattcagagcccctcggagagaactgaaaaggaggattgccagctaccatccaacccgaaagaggtggaggcgctgagaaaggatacagctcgcaatcctttgatagcgttcacatttgaggagctcaagagaatgacaaaaaatttcaggcaagattcgttactaggcggtggtggatttggcagagtctacaaaggttttatcaccaaggatctccgcgaagggttagagatagaagagcccacaagagttgccgttaaggctgaggttatatttcttggacagctctctcacccgaatttagtgaagttgatcggctattgttgtgaagatgaccacagggtccttgtttacgagttcatgcctctaggaagtgtggagtctcatttgttttcaagggttatggtgccacttacgtggtcgatcagaatgaaaattgcgctcggtgctgcgaaaggacttgcttttctgcatgaagctgagaagcccgtcatctatcgggacttcaagacatcaaatatattactagatgaggaatataatgcaaaactatctgactttgggcttgcaaaagatggaccagttggcgataagtcccatgtttcaactcgtattatgggtacctacggttatgctgcaccagagtacattatgacagggcatctaacggcgatgagtgatgtctacagctatggtgttgtactactggagctcctcacgggccggaagtcactggacaagtcccggccagtcagggagcagatgctggcagactgggcactcccattgttggcacagaagaagaaggtgcttggcatagtagacccaaggcttgccgaggactacccagtgaaggcagtgcagaagacggcgatgctggcgtaccattgcctcagccgcaacccaaaggctaggccgctgatgcgcgacatcgtcgcgactttggagcctcttcaacagctggaggagacccctggagacagcgtggcagtgacacttgaagggacttgaagcagtgttccattcacagctcacatcacagtcacacacagctctggaaaactcgggtgccacgtacttaactatgcatgataatagtagctagctagtgttcttgatatgcaggatgatttcttgattgtttaattaatccatggagacagtagctttgttcagcagaaagttagtgtgtatctcagtaggacggttcatgtgtgtgtatccaggtgttcagtcctggcgtagcgaactccctggcatttcggatgcgggcaagtctgtgcaatctgtatttgcaatgcttgttgcccgcagaggaagcttgcttaccagtgtttgtaacctagtattgtgcagttcatgatctatgcatgttgaataatgtgtgtgtatatatatatataacaggtataacgggagcactgagcttccaatagttaaagaaagcctaagccgaccaaccctgcaacct

SEQ ID NO: 415 - DNA, 2318 bp, Zea Mays
ggaaacggactaccagcgctgagccgttccgtttcttttcaatcttggcgttttgtctccattcaatagggaaagggatgtttcgcttgaggctttcctttgtgcctgtgtcttctctgtagctttcaagagaataaaaatttggagcttctctcgcaccagcgtcctttccttcttccttggtttcatgctgacaactagggctgatcttcaggacggcctgttcttggttcggttcctgagagcgattgataggtctgagattatatattggtgtcgttgttgtttgttttttttcgtgctcatccgttgctaaataagcaaaccatcagcccatcagcttactacaagcactcttttgcctccttttctgttcttggtgttcttggtgagacacagcgccagacggagtttcttctttaggagtcgtgcactatgggtaattgctggtttaaggggaatccatactttaacagggtttcttccaatgcaaccaaagcagaatctcccaaaattcagagcccctcggagagaactgaaaaggaggattgccagctaccatccaacccgaaagaggtggaggcgctgagaaaggatacagctcgcaatcctttgatagcgttcacatttgaggagctcaagagaatgacaaaaaatttcaggcaagattcgttactaggcggtggtggatttggcagagtctacaaaggttttatcaccaaggatctccgcgaagggttagagatagaagagcccacaagagttgccgttaaggtccatgatggtgacaatagcttccagggccatagggagtggctggctgaggttatatttcttggacagctctctcacccgaatttagtgaagttgatcggctattgttgtgaagatgaccacagggtccttgtttacgagttcatgcctctaggaagtgtggagtctcatttgttttcaagtaattcttatcctattcttgacagattgttgattggttttatatagtttcttgtcattttgtcataacactgactatggtatatccacacatggcattcatgcaaattctcatactcataactgaaaagaatcgattgaaaacgagcataaacctgtccctcactcctatcctgaaccagtataatttaacttgcttcgagtggcagcattataaatttctgcatgacctatgtggtcagttctgcattattatttgtccatttgagatccaccagtgtatattatcagatcagtggagtatttgttttcataatgcaggggttatggtgccacttacgtggtcgatcagaatgaaaattgcgctcggtgctgcgaaaggacttgcttttctgcatgaagctgagaagcccgtcatctatcgggacttcaagacatcaaatatattactagatgaggaatataatgcaaaactatctgactttgggcttgcaaaagatggaccagttggcgataagtcccatgtttcaactcgtattatgggtacctacggttatgctgcaccagagtacattatgacagctatggtgttgtactactggagctcctcacgggccggaagtcactggacaagtcccggccagtcagggagcagatgctggcagactgggcactcccattgttggcacagaagaagaaggtgcttggcatagtagacccaaggcttgccgaggactacccagtgaaggcagtgcagaagacggcgatgctggcgtaccattgcctcagccgcaacccaaaggctaggccgctgatgcgcgacatcgtcgcgactttggagcctcttcaacagctggaggagacccctggagacagcgtggcagtgacacttgaagggacttgaagcagtgttccattcacagctcacatcacagtcacacacagctctggaaaactcgggtgccacgtacttaactatgcatgataatagtagctagctagtgttcttgatatgcaggatgatttcttgattgtttaattaatccatggagacagtagctttgttcagcagaaagttagtgtgtatctcagtaggacggttcatgtgtgtgtatccaggtgttcagtcctggcgtagcgaactccctggcatttcggatgcgggcaagtctgtgcaatctgtatttgcaatgcttgttgcccgcagaggaagcttgcttaccagtgtttgtaacctagtattgtgcagttcatgatctatgcatgttgaataatgtgtgtgtatatatatatataacaggtataacgggagcactgagcttccaatagttaaagaaagcctaagccgaccaaccctgcaacct

SEQ ID NO: 416 - DNA, 2202 bp, Zea Mays
ggaaacggactaccagcgctgagccgttccgtttcttttcaatcttggcgttttgtctccattcaatagggaaagggatgtttcgcttgaggctttcctttgtgcctgtgtcttctctgtagctttcaagagaataaaaatttggagcttctctcgcaccagcgtcctttccttcttccttggtttcatgctgacaactagggctgatcttcaggacggcctgttcttggttcggttcctgagagcgattgatagcgccagacggagtttcttctttaggagtcgtgcactatgggtaattgctggtttaaggggaatccatactttaacagggtttcttccaatgcaaccaaagcaggtacgactatttattactttggtttgatctctgtgatgatgtaactgcaactgtagtatgcagaagtttcatatatttgtttgatgccctcaatttagacattaacgaaactgctgctatgtgtgtgttctctcgtcttgatagaatcagggaccatgtccctgctcttgtttagtccaattacggctatttcagtactgaatattttcttcacaaaaaatcagtcctaatgttcaatcttatccaacccaatgattcttttttccctaaccttgacagttgattttatgattattccatgtaatgatcagatacttttgttctgccgtatgaaattcttgttcatcttttggtaacttatttacaaagtttctgaataatctgcaccctgtatttcagtccccgtacttgacttgtctatttgttttctgcagaatctcccaaaattcagagcccctcggagagaactgaaaaggaggattgccagctaccatccaacccgaaagaggcaagattcgttactaggcggtggtggatttggcagagtctacaaaggttttatcaccaaggatctccgcgaagggttagagatagaagagcccacaagagttgccgttaaggtccatgatggtgacaatagcttccagggccatagggagtggctggctgaggttatatttcttggacagctctctcacccgaatttagtgaagttgatcggctattgttgtgaagatgaccacagggtccttgtttacgagttcatgcctctaggaagtgtggagtctcatttgttttcaagggttatggtgccacttacgtggtcgatcagaatgaaaattgcgctcggtgctgcgaaaggacttgcttttctgcatgaagctgagaagcccgtcatctatcgggacttcaagacatcaaatatattactagatgaggaatataatgcaaaactatctgactttgggcttgcaaaagatggaccagttggcgataagtcccatgtttcaactcgtattatgggtacctacggttatgctgcaccagagtacattatgacagctatggtgttgtactactggagctcctcacgggccggaagtcactggacaagtcccggccagtcagggagcagatgctggcagactgggcactcccattgttggcacagaagaagaaggtgcttggcatagtagacccaaggcttgccgaggactacccagtgaaggcagtgcagaagacggcgatgctggcgtaccattgcctcagccgcaacccaaaggctaggccgctgatgcgcgacatcgtcgcgactttggagcctcttcaacagctggaggagacccctggagacagcgtggcagtgacacttgaagggacttgaagcagtgttccattcacagctcacatcacagtcacacacagctctggaaaactcgggtgccacgtacttaactatgcatgataatagtagctagctagtgttcttgatatgcaggatgatttcttgattgtttaattaatccatggagacagtagctttgttcagcagaaagttagtgtgtatctcagtaggacggttcatgtgtgtgtatccaggtgttcagtcctggcgtagcgaactccctggcatttcggatgcgggcaagtctgtgcaatctgtatttgcaatgcttgttgcccgcagaggaagcttgcttaccagtgtttgtaacctagtattgtgcagttcatgatctatgcatgttgaataatgtgtgtgtatatatatatataacaggtataacgggagcactgagcttccaatagttaaagaaagcctaagccgaccaaccctgcaacct

SEQ ID NO: 417 - DNA, 1885 bp, Zea Mays
ggaaacggactaccagcgctgagccgttccgtttcttttcaatcttggcgttttgtctccattcaatagggaaagggatgtttcgcttgaggctttcctttgtgcctgtgtcttctctgtagctttcaagagaataaaaatttggagcttctctcgcaccagcgtcctttccttcttccttggtttcatgctgacaactagggctgatcttcaggacggcctgttcttggttcggttcctgagagcgattgatagcgccagacggagtttcttctttaggagtcgtgcactatgggtaattgctggtttaaggggaatccatactttaacagggtttcttccaatgcaaccaaagcagaatctcccaaaattcagagcccctcggagagaactgaaaaggaggattgccagctaccatccaacccgaaagaggtggaggcgctgagaaaggatacagctcgcaatcctttgatagcgttcacatttgaggagctcaagagaatgacaaaaaatttcaggcaagattcgttactaggcggtggtggatttggcagagtctacaaaggttttatcaccaaggatctccgcgaagggttagagatagaagagcccacaagagttgccgttaaggtccatgatggtgacaatagcttccagggccatagggagtggctggctgaggttatatttcttggacagctctctcacccgaatttagtgaagttgatcggctattgttgtgaagatgaccacagggtccttgtttacgagttcatgcctctaggaagtgtggagtctcatttgttttcaagggttatggtgccacttacgtggtcgatcagaatgaaaattgcgctcggtgctgcgaaaggacttgcttttctgcatgaagctgagaagcccgtcatctatcgggacttcaagacatcaaatatattactagatgaggaatataatgcaaaactatctgactttgggcttgcaaaagatggaccagttggcgataagtcccatgtttcaactcgtattatgggtacctacggttatgctgcaccagagtacattatgacagggcatctaacggcgatgagtgatgtctacagctatggtgttgtactactggagctcctcacgggccggaagtcactggacaagtcccggccagtcagggagcagatgctggcagactgggcactcccattgttggcacagaagaagaaggtgcttggcatagtagacccaaggcttgccgaggactacccagtgaaggcagtgcagaagacggcgatgctggcgtaccattgcctcagccgcaacccaaaggctaggccgctgatgcgcgacatcgtcgcgactttggagcctcttcaacagctggaggagacccctggagacagcgtggcagtgacacttgaagggacttgaagcagtgttccattcacagctcacatcacagtcacacacagctctggaaaactcgggtgccacgtacttaactatgcatgataatagtagctagctagtgttcttgatatgcaggatgatttcttgattgtttaattaatccatggagacagtagctttgttcagcagaaagttagtgtgtatctcagtaggacggttcatgtgtgtgtatccaggtgttcagtcctggcgtagcgaactccctggcatttcggatgcgggcaagtctgtgcaatctgtatttgcaatgcttgttgcccgcagaggaagcttgcttaccagtgtttgtaacctagtattgtgcagttcatgatctatgcatgttgaataatgtgtgtgtatatatatatataacaggtataacgggagcactgagcttccaatagttaaagaaagcctaagccgaccaaccctgcaacct

SEQ ID NO: 418 - DNA, 2349 bp, Zea Mays
ggaaacggactaccagcgctgagccgttccgtttcttttcaatcttggcgttttgtctccattcaatagggaaagggatgtttcgcttgaggctttcctttgtgcctgtgtcttctctgtagctttcaagagaataaaaatttggagcttctctcgcaccagcgtcctttccttcttccttggtttcatgctgacaactagggctgatcttcaggacggcctgttcttggttcggttcctgagagcgattgataggtctgagattatatattggtgtcgttgttgtttgttttttttcgtgctcatccgttgctaaataagcaaaccatcagcccatcagcttactacaagcactcttttgcctccttttctgttcttggtgttcttggtgagacacagcgccagacggagtttcttctttaggagtcgtgcactatgggtaattgctggtttaaggggaatccatactttaacagggtttcttccaatgcaaccaaagcagaatctcccaaaattcagagcccctcggagagaactgaaaaggaggattgccagctaccatccaacccgaaagaggtggaggcgctgagaaaggatacagctcgcaatcctttgatagcgttcacatttgaggagctcaagagaatgacaaaaaatttcaggcaagattcgttactaggcggtggtggatttggcagagtctacaaaggttttatcaccaaggatctccgcgaagggttagagatagaagagcccacaagagttgccgttaaggtccatgatggtgacaatagcttccagggccatagggagtggctggctgaggttatatttcttggacagctctctcacccgaatttagtgaagttgatcggctattgttgtgaagatgaccacagggtccttgtttacgagttcatgcctctaggaagtgtggagtctcatttgttttcaagtaattcttatcctattcttgacagattgttgattggttttatatagtttcttgtcattttgtcataacactgactatggtatatccacacatggcattcatgcaaattctcatactcataactgaaaagaatcgattgaaaacgagcataaacctgtccctcactcctatcctgaaccagtataatttaacttgcttcgagtggcagcattataaatttctgcatgacctatgtggtcagttctgcattattatttgtccatttgagatccaccagtgtatattatcagatcagtggagtatttgttttcataatgcaggggttatggtgccacttacgtggtcgatcagaatgaaaattgcgctcggtgctgcgaaaggacttgcttttctgcatgaagctgagaagcccgtcatctatcgggacttcaagacatcaaatatattactagatgaggaatataatgcaaaactatctgactttgggcttgcaaaagatggaccagttggcgataagtcccatgtttcaactcgtattatgggtacctacggttatgctgcaccagagtacattatgacagggcatctaacggcgatgagtgatgtctacagctatggtgttgtactactggagctcctcacgggccggaagtcactggacaagtcccggccagtcagggagcagatgctggcagactgggcactcccattgttggcacagaagaagaaggtgcttggcatagtagacccaaggcttgccgaggactacccagtgaaggcagtgcagaagacggcgatgctggcgtaccattgcctcagccgcaacccaaaggctaggccgctgatgcgcgacatcgtcgcgactttggagcctcttcaacagctggaggagacccctggagacagcgtggcagtgacacttgaagggacttgaagcagtgttccattcacagctcacatcacagtcacacacagctctggaaaactcgggtgccacgtacttaactatgcatgataatagtagctagctagtgttcttgatatgcaggatgatttcttgattgtttaattaatccatggagacagtagctttgttcagcagaaagttagtgtgtatctcagtaggacggttcatgtgtgtgtatccaggtgttcagtcctggcgtagcgaactccctggcatttcggatgcgggcaagtctgtgcaatctgtatttgcaatgcttgttgcccgcagaggaagcttgcttaccagtgtttgtaacctagtattgtgcagttcatgatctatgcatgttgaataatgtgtgtgtatatatatatataacaggtataacgggagcactgagcttccaatagttaaagaaagcctaagccgaccaaccctgcaacct

SEQ ID NO: 419 - DNA, 1768 bp, Zea Mays
ggaaacggactaccagcgctgagccgttccgtttcttttcaatcttggcgttttgtctccattcaatagggaaagggatgtttcgcttgaggctttcctttgtgcctgtgtcttctctgtagctttcaagagaataaaaatttggagcttctctcgcaccagcgtcctttccttcttccttggtttcatgctgacaactagggctgatcttcaggacggcctgttcttggttcggttcctgagagcgattgatagcgccagacggagtttcttctttaggagtcgtgcactatgggtaattgctggtttaaggggaatccatactttaacagggtttcttccaatgcaaccaaagcagaatctcccaaaattcagagcccctcggagagaactgaaaaggaggattgccagctaccatccaacccgaaagaggcaagattcgttactaggcggtggtggatttggcagagtctacaaaggttttatcaccaaggatctccgcgaagggttagagatagaagagcccacaagagttgccgttaaggtccatgatggtgacaatagcttccagggccatagggagtggctggctgaggttatatttcttggacagctctctcacccgaatttagtgaagttgatcggctattgttgtgaagatgaccacagggtccttgtttacgagttcatgcctctaggaagtgtggagtctcatttgttttcaagggttatggtgccacttacgtggtcgatcagaatgaaaattgcgctcggtgctgcgaaaggacttgcttttctgcatgaagctgagaagcccgtcatctatcgggacttcaagacatcaaatatattactagatgaggaatataatgcaaaactatctgactttgggcttgcaaaagatggaccagttggcgataagtcccatgtttcaactcgtattatgggtacctacggttatgctgcaccagagtacattatgacagctatggtgttgtactactggagctcctcacgggccggaagtcactggacaagtcccggccagtcagggagcagatgctggcagactgggcactcccattgttggcacagaagaagaaggtgcttggcatagtagacccaaggcttgccgaggactacccagtgaaggcagtgcagaagacggcgatgctggcgtaccattgcctcagccgcaacccaaaggctaggccgctgatgcgcgacatcgtcgcgactttggagcctcttcaacagctggaggagacccctggagacagcgtggcagtgacacttgaagggacttgaagcagtgttccattcacagctcacatcacagtcacacacagctctggaaaactcgggtgccacgtacttaactatgcatgataatagtagctagctagtgttcttgatatgcaggatgatttcttgattgtttaattaatccatggagacagtagctttgttcagcagaaagttagtgtgtatctcagtaggacggttcatgtgtgtgtatccaggtgttcagtcctggcgtagcgaactccctggcatttcggatgcgggcaagtctgtgcaatctgtatttgcaatgcttgttgcccgcagaggaagcttgcttaccagtgtttgtaacctagtattgtgcagttcatgatctatgcatgttgaataatgtgtgtgtatatatatatataacaggtataacgggagcactgagcttccaatagttaaagaaagcctaagccgaccaaccctgcaacct

SEQ ID NO: 420 - DNA, 2626 bp, Zea Mays
ggaaacggactaccagcgctgagccgttccgtttcttttcaatcttggcgttttgtctccattcaatagggaaagggatgtttcgcttgaggctttcctttgtgcctgtgtcttctctgtagctttcaagagaataaaaatttggagcttctctcgcaccagcgtcctttccttcttccttggtttcatgctgacaactagggctgatcttcaggacggcctgttcttggttcggttcctgagagcgattgataggtctgagattatatattggtgtcgttgttgtttgttttttttcgtgctcatccgttgctaaataagcaaaccatcagcccatcagcttactacaagcactcttttgcctccttttctgttcttggtgttcttggtgagacacagcgccagacggagtttcttctttaggagtcgtgcactatgggtaattgctggtttaaggggaatccatactttaacagggtttcttccaatgcaaccaaagcaggtacgactatttattactttggtttgatctctgtgatgatgtaactgcaactgtagtatgcagaagtttcatatatttgtttgatgccctcaatttagacattaacgaaactgctgctatgtgtgtgttctctcgtcttgatagaatcagggaccatgtccctgctcttgtttagtccaattacggctatttcagtactgaatattttcttcacaaaaaatcagtcctaatgttcaatcttatccaacccaatgattcttttttccctaaccttgacagttgattttatgattattccatgtaatgatcagatacttttgttctgccgtatgaaattcttgttcatcttttggtaacttatttacaaagtttctgaataatctgcaccctgtatttcagtccccgtacttgacttgtctatttgttttctgcagaatctcccaaaattcagagcccctcggagagaactgaaaaggaggattgccagctaccatccaacccgaaagaggtggaggcgctgagaaaggatacagctcgcaatcctttgatagcgttcacatttgaggagctcaagagaatgacaaaaaatttcaggctgaggttatatttcttggacagctctctcacccgaatttagtgaagttgatcggctattgttgtgaagatgaccacagggtccttgtttacgagttcatgcctctaggaagtgtggagtctcatttgttttcaagtaattcttatcctattcttgacagattgttgattggttttatatagtttcttgtcattttgtcataacactgactatggtatatccacacatggcattcatgcaaattctcatactcataactgaaaagaatcgattgaaaacgagcataaacctgtccctcactcctatcctgaaccagtataatttaacttgcttcgagtggcagcattataaatttctgcatgacctatgtggtcagttctgcattattatttgtccatttgagatccaccagtgtatattatcagatcagtggagtatttgttttcataatgcaggggttatggtgccacttacgtggtcgatcagaatgaaaattgcgctcggtgctgcgaaaggacttgcttttctgcatgaagctgagaagcccgtcatctatcgggacttcaagacatcaaatatattactagatgaggaatataatgcaaaactatctgactttgggcttgcaaaagatggaccagttggcgataagtcccatgtttcaactcgtattatgggtacctacggttatgctgcaccagagtacattatgacagggcatctaacggcgatgagtgatgtctacagctatggtgttgtactactggagctcctcacgggccggaagtcactggacaagtcccggccagtcagggagcagatgctggcagactgggcactcccattgttggcacagaagaagaaggtgcttggcatagtagacccaaggcttgccgaggactacccagtgaaggcagtgcagaagacggcgatgctggcgtaccattgcctcagccgcaacccaaaggctaggccgctgatgcgcgacatcgtcgcgactttggagcctcttcaacagctggaggagacccctggagacagcgtggcagtgacacttgaagggacttgaagcagtgttccattcacagctcacatcacagtcacacacagctctggaaaactcgggtgccacgtacttaactatgcatgataatagtagctagctagtgttcttgatatgcaggatgatttcttgattgtttaattaatccatggagacagtagctttgttcagcagaaagttagtgtgtatctcagtaggacggttcatgtgtgtgtatccaggtgttcagtcctggcgtagcgaactccctggcatttcggatgcgggcaagtctgtgcaatctgtatttgcaatgcttgttgcccgcagaggaagcttgcttaccagtgtttgtaacctagtattgtgcagttcatgatctatgcatgttgaataatgtgtgtgtatatatatatataacaggtataacgggagcactgagcttccaatagttaaagaaagcctaagccgaccaaccctgcaacct

SEQ ID NO: 421 - DNA, 2233 bp, Zea Mays
ggaaacggactaccagcgctgagccgttccgtttcttttcaatcttggcgttttgtctccattcaatagggaaagggatgtttcgcttgaggctttcctttgtgcctgtgtcttctctgtagctttcaagagaataaaaatttggagcttctctcgcaccagcgtcctttccttcttccttggtttcatgctgacaactagggctgatcttcaggacggcctgttcttggttcggttcctgagagcgattgatagcgccagacggagtttcttctttaggagtcgtgcactatgggtaattgctggtttaaggggaatccatactttaacagggtttcttccaatgcaaccaaagcaggtacgactatttattactttggtttgatctctgtgatgatgtaactgcaactgtagtatgcagaagtttcatatatttgtttgatgccctcaatttagacattaacgaaactgctgctatgtgtgtgttctctcgtcttgatagaatcagggaccatgtccctgctcttgtttagtccaattacggctatttcagtactgaatattttcttcacaaaaaatcagtcctaatgttcaatcttatccaacccaatgattcttttttccctaaccttgacagttgattttatgattattccatgtaatgatcagatacttttgttctgccgtatgaaattcttgttcatcttttggtaacttatttacaaagtttctgaataatctgcaccctgtatttcagtccccgtacttgacttgtctatttgttttctgcagaatctcccaaaattcagagcccctcggagagaactgaaaaggaggattgccagctaccatccaacccgaaagaggcaagattcgttactaggcggtggtggatttggcagagtctacaaaggttttatcaccaaggatctccgcgaagggttagagatagaagagcccacaagagttgccgttaaggtccatgatggtgacaatagcttccagggccatagggagtggctggctgaggttatatttcttggacagctctctcacccgaatttagtgaagttgatcggctattgttgtgaagatgaccacagggtccttgtttacgagttcatgcctctaggaagtgtggagtctcatttgttttcaagggttatggtgccacttacgtggtcgatcagaatgaaaattgcgctcggtgctgcgaaaggacttgcttttctgcatgaagctgagaagcccgtcatctatcgggacttcaagacatcaaatatattactagatgaggaatataatgcaaaactatctgactttgggcttgcaaaagatggaccagttggcgataagtcccatgtttcaactcgtattatgggtacctacggttatgctgcaccagagtacattatgacagggcatctaacggcgatgagtgatgtctacagctatggtgttgtactactggagctcctcacgggccggaagtcactggacaagtcccggccagtcagggagcagatgctggcagactgggcactcccattgttggcacagaagaagaaggtgcttggcatagtagacccaaggcttgccgaggactacccagtgaaggcagtgcagaagacggcgatgctggcgtaccattgcctcagccgcaacccaaaggctaggccgctgatgcgcgacatcgtcgcgactttggagcctcttcaacagctggaggagacccctggagacagcgtggcagtgacacttgaagggacttgaagcagtgttccattcacagctcacatcacagtcacacacagctctggaaaactcgggtgccacgtacttaactatgcatgataatagtagctagctagtgttcttgatatgcaggatgatttcttgattgtttaattaatccatggagacagtagctttgttcagcagaaagttagtgtgtatctcagtaggacggttcatgtgtgtgtatccaggtgttcagtcctggcgtagcgaactccctggcatttcggatgcgggcaagtctgtgcaatctgtatttgcaatgcttgttgcccgcagaggaagcttgcttaccagtgtttgtaacctagtattgtgcagttcatgatctatgcatgttgaataatgtgtgtgtatatatatatataacaggtataacgggagcactgagcttccaatagttaaagaaagcctaagccgaccaaccctgcaacct

SEQ ID NO: 422 - DNA, 2640 bp, Zea Mays
ggaaacggactaccagcgctgagccgttccgtttcttttcaatcttggcgttttgtctccattcaatagggaaagggatgtttcgcttgaggctttcctttgtgcctgtgtcttctctgtagctttcaagagaataaaaatttggagcttctctcgcaccagcgtcctttccttcttccttggtttcatgctgacaactagggctgatcttcaggacggcctgttcttggttcggttcctgagagcgattgataggcgccagacggagtttcttctttaggagtcgtgcactatgggtaattgctggtttaaggggaatccatactttaacagggtttcttccaatgcaaccaaagcaggtacgactatttattactttggtttgatctctgtgatgatgtaactgcaactgtagtatgcagaagtttcatatatttgtttgatgccctcaatttagacattaacgaaactgctgctatgtgtgtgttctctcgtcttgatagaatcagggaccatgtccctgctcttgtttagtccaattacggctatttcagtactgaatattttcttcacaaaaaatcagtcctaatgttcaatcttatccaacccaatgattcttttttccctaaccttgacagttgattttatgattattccatgtaatgatcagatacttttgttctgccgtatgaaattcttgttcatcttttggtaacttatttacaaagtttctgaataatctgcaccctgtatttcagtccccgtacttgacttgtctatttgttttctgcagaatctcccaaaattcagagcccctcggagagaactgaaaaggaggattgccagctaccatccaacccgaaagaggtggaggcgctgagaaaggatacagctcgcaatcctttgatagcgttcacatttgaggagctcaagagaatgacaaaaaatttcaggcaagattcgttactaggcggtggtggatttggcagagtctacaaaggttttatcaccaaggatctccgcgaagggttagagatagaagagcccacaagagttgccgttaaggtccatgatggtgacaatagcttccagggccatagggagtggctggctgaggttatatttcttggacagctctctcacccgaatttagtgaagttgatcggctattgttgtgaagatgaccacagggtccttgtttacgagttcatgcctctaggaagtgtggagtctcatttgttttcaagtaattcttatcctattcttgacagattgttgattggttttatatagtttcttgtcattttgtcataacactgactatggtatatccacacatggcattcatgcaaattctcatactcataactgaaaagaatcgattgaaaacgagcataaacctgtccctcactcctatcctgaaccagtataatttaacttgcttcgagtggcagcattataaatttctgcatgacctatgtggtcagttctgcattattatttgtccatttgagatccaccagtgtatattatcagatcagtggagtatttgttttcataatgcaggggttatggtgccacttacgtggtcgatcagaatgaaaattgcgctcggtgctgcgaaaggacttgcttttctgcatgaagctgagaagcccgtcatctatcgggacttcaagacatcaaatatattactagatgaggaatataatgcaaaactatctgactttgggcttgcaaaagatggaccagttggcgataagtcccatgtttcaactcgtattatgggtacctacggttatgctgcaccagagtacattatgacagggcatctaacggcgatgagtgatgtctacagctatggtgttgtactactggagctcctcacgggccggaagtcactggacaagtcccggccagtcagggagcagatgctggcagactgggcactcccattgttggcacagaagaagaaggtgcttggcatagtagacccaaggcttgccgaggactacccagtgaaggcagtgcagaagacggcgatgctggcgtaccattgcctcagccgcaacccaaaggctaggccgctgatgcgcgacatcgtcgcgactttggagcctcttcaacagctggaggagacccctggagacagcgtggcagtgacacttgaagggacttgaagcagtgttccattcacagctcacatcacagtcacacacagctctggaaaactcgggtgccacgtacttaactatgcatgataatagtagctagctagtgttcttgatatgcaggatgatttcttgattgtttaattaatccatggagacagtagctttgttcagcagaaagttagtgtgtatctcagtaggacggttcatgtgtgtgtatccaggtgttcagtcctggcgtagcgaactccctggcatttcggatgcgggcaagtctgtgcaatctgtatttgcaatgcttgttgcccgcagaggaagcttgcttaccagtgtttgtaacctagtattgtgcagttcatgatctatgcatgttgaataatgtgtgtgtatatatatatataacaggtataacgggagcactgagcttccaatagttaaagaaagcctaagccgaccaaccctgcaacct

SEQ ID NO: 423 - DNA, 808 bp, Zea Mays
ctgggccctcactcgggcctatgtagctatggtgttgtactactggagctcctcacgggccggaagtcactggacaagtcccggccagtcagggagcagatgctggcagactgggcactcccattgttggcacagaagaagaaggtgcttggcatagtagacccaaggcttgccgaggactacccagtgaaggcagtgcagaagacggcgatgctggcgtaccattgcctcagccgcaacccaaaggctaggccgctgatgcgcgacatcgtcgcgactttggagcctcttcaacagctggaggagacccctggagacagcgtggcagtgacacttgaagggacttgaagcagtgttccattcacagctcacatcacagtcacacacagctctggaaaactcgggtgccacgtacttaactatgcatgataatagtagctagctagtgttcttgatatgcaggatgatttcttgattgtttaattaatccatggagacagtagctttgttcagcagaaagttagtgtgtatctcagtaggacggttcatgtgtgtgtatccaggtgttcagtcctggcgtagcgaactccctggcatttcggatgcgggcaagtctgtgcaatctgtatttgcaatgcttgttgcccgcagaggaagcttgcttaccagtgtttgtaacctagtattgtgcagttcatgatctatgcatgttgaataatgtgtgtgtatatatatatataacaggtataacgggagcactgagcttccaatagttaaagaaagcctaagccgaccaaccctgcaacct

SEQ ID NO: 424 - DNA, 804 bp, Zea Mays
cgttgactatagcacgccgcacgcccggctaaatatattggtttgtacgactggggtaacacatcttcaccatatacagcatgcaccttaattatgtgcatacggagtatatcttacaccggtcacgcttttgacgcgcgcgtatcttactttattatattgcacgaaggtacaacactacatatttacacagctcgatcgcctgatgtcgagttacacacactgacacgttctgagccgtcacattgacacgacggtacttcgcaggctacctacatggacgtaggtaaagcgtgcgctgaggtacagagctagctagcgaactaaaaaaaaaaagacgaggacttcagagtccaggacacgcacgtgtctcctctccaggcagctgcttcactcccagaccgcctcgttacggttgagccgtgcggccgcagccatggacgccgccacgcctccgggcctcgccgtcccgtcgttcctgttgcggttctccgcgccagccacccccaacgcatcggcgctctccaccggcttgtccgccaccaacctcgccgtcgcgttctgcacgtacgacaaagaacaaatagtcaaaagatctctgctctgttgcaccaccaacacgcactgtcagatatatagcagcagcggcacgaaacgaaaacgatggcacgtcgtgttcgtgactcgtaccgccaggacgtcgccgagcgtggccttgtcctcgtctccccacgcccacgagttggccgccgcggccgactgcgcctgcgcggccagcctgcccggcgacgaactcggtgacga

SEQ ID NO: 425 - DNA, 1734 bp, Zea Mays
atccattaggcccgtttccagtttccaccgtcaacagaggatggctatcgccgccgttcgccggctcttgtggcgcgaggtggggactgcggccgccgccgcggccttggggacggacgggaatctgttcgctcgcctggtctcggagccggagtgccgtgtcaaggcgaccatggaggaggctgcctcctccgggacccaccgcgacggcgccttctgggagccccccgtcaccgcgctcctccgcgcgtcgtctcctaccaaggcgcacctcatattggaatggaaactagagaagctgctgaaggaagacattcaagattgcgagccctactccaggataattcgtttctgtggtcagacaaggaatgcaacgtttgcaatgagagttttcgaatgcgtggaggcgaagggaatccagctgaacactaacatttgcaatgcccttgtcgatgctttcttgtcagccggagacctcctttctgcaatgaccttatacgagactatggaaagcatggacgcttgcagtcccaattccgctacatatgatgcattcatctgtgcattttcgctgcttggaagtggccatgctatgatgagctggtatgtagctgcaaagaacgccgggtttacgccaagtattcaagcttttgaatctttgatcactgggtttgttcggttgaacatgctagacgatgccaaaacggtgtttgaggaaatgattgccttggagattaagccaaactctactattttggaggccagccttgagattctctctagaaaggaggagaccagcagagtaggagactttttaaaacgtgcaagggatggcaattgggagttgaacaaagccacagttgtgaggttgacaagaatatgcctagatggaggggtaatagatgaaatggagcagctgcttgccctaatacaaaagggaacacacttgaattctgaaacacaactgcaccatggaattatcaggttctatgctaatgcagatcgattagcggatatggaggatgcaatttatcggatgttggacaatggtgtgatgtttacgtgcccggaggatgttgatgtcataatctgttgttattttcgtcacagggaatttgataggttggatctctttttgaatcgcatccgaagtttgttcaagctcaataggtctacatatgacatactggttgctggataccgaaagtttgatttacatgaaagacttgattcaaccatagctgatatgatgagggaagctggatttgcatgagatcacaaagaactatctgtgcaccatgactttccacggtaaggccatctccagcggaacgtggatatgggcgtgcaaaacactgtttgcactgtagagtgcactgtttacagagcgaagtttgaaataggaagtgagataagaagtgttatagagaggctgctggagatagcctaatatttccatagccttaagtgcattgagcctgaaaaatgaaatccaggattaagatacattatcatgtcatggatgcatttgactttgagaagccgtaagcgtgaaattacatggatgctgtgctcaggctgcagaaggtattatttagaaagaactaaagaagatctatgtgatgtttattgtcaacttgaaaaaatctctagtcacttgacttgtcatctagttatgtaccctctgtttttctctagtcacttgacttgttatctagttatgtaccctctgtc

SEQ ID NO: 426 - DNA, 1766 bp, Zea Mays
atccattaggcccgtttccagtttccaccgtcaacagaggatggctatcgccgccgttcgccggctcttgtggcgcgaggtggggactgcggccgccgccgcggccttggggacggacgggaatctgttcgctcgcctggtctcggagccggagtgccgtgtcaaggcgaccatggaggaggctgcctcctccgggacccaccgcgacggcgccttctgggagccccccgtcaccgcgctcctccgcgcgtcgtctcctaccaaggcgcacctcaatacgggtcagaaagaggtattcaatgccgccaattaacactgtttgaatggtgaacattgacttagatattggaatggaaactagagaagctgctgaaggaagacattcaagattgcgagccctactccaggataattcgtttctgtggtcagacaaggaatgcaacgtttgcaatgagagttttcgaatgcgtggaggcgaagggaatccagctgaacactaacatttgcaatgcccttgtcgatgctttcttgtcagccggagacctcctttctgcaatgaccttatacgagactatggaaagcatggacgcttgcagtcccaattccgctacatatgatgcattcatctgtgcattttcgctgcttggaagtggccatgctatgatgagctggtatgtagctgcaaagaacgccgggtttacgccaagtattcaagcttttgaatctttgatcactgggtttgttcggttgaacatgctagacgatgccaaaacggtgtttgaggaaatgattgccttggagattaagccaaactctactattttggaggccagccttgagattctctctagaaaggaggagaccagcagagtaggagactttttaaaacgtgcaagggatggcaattgggagttgaacaaagccacagttgtgaggttgacaagaatatgcctagatggaggggtaatagatgaaatggagcagctgcttgccctaatacaaaagggaacacacttgaattctgaaacacaactgcaccatggaattatcaggttctatgctaatgcagatcgattagcggatatggaggatgcaatttatcggatgttggacaatggtgtgatgtttacgtgcccggaggatgttgatgtcataatctgttgttattttcgtcacagggaatttgataggttggatctctttttgaatcgcatccgaagtttgttcaagctcaataggtctacatatgacatactggttgctggataccgaaagtttgatttacatgaaagacttgattcaaccatagctgatatgatgagggaagctggatttgcatgagatcacaaagaactatctgtgcaccatgactttccacggtaaggccatctccagcggaacgtggatatgggcgtgcaaaacactgtttgcactgtagagtgcactgtttacagagcgaagtttgaaataggaagtgagataagaagtgttatagagaggctgctggagatagcctaatatttccatagccttaagtgcattgagcctgaaaaatgaaatccagggtgggatattttttataacagttcagttcaaaattgtttgatcagttctgtgtttgacttggaaaatatctcagattaagatacattatcatgtcatggatgcatttgactttgagaagccgtaagcgtgaaattacatggatgctgtgctcaggctgcagaagctggcaactgtattgactgggacatgtagaatatcag

SEQ ID NO: 427 - DNA, 1784 bp, Zea Mays
atccattaggcccgtttccagtttccaccgtcaacagaggatggctatcgccgccgttcgccggctcttgtggcgcgaggtggggactgcggccgccgccgcggccttggggacggacgggaatctgttcgctcgcctggtctcggagccggagtgccgtgtcaaggcgaccatggaggaggctgcctcctccgggacccaccgcgacggcgccttctgggagccccccgtcaccgcgctcctccgcgcgtcgtctcctaccaaggcgcacctcaatacgggtcagaaagaggtattcaatgccgccaattaacactgtttgaatggtgaacattgacttagatattggaatggaaactagagaagctgctgaaggaagacattcaagattgcgagccctactccaggataattcgtttctgtggtcagacaaggaatgcaacgtttgcaatgagagttttcgaatgcgtggaggcgaagggaatccagctgaacactaacatttgcaatgcccttgtcgatgctttcttgtcagccggagacctcctttctgcaatgaccttatacgagactatggaaagcatggacgcttgcagtcccaattccgctacatatgatgcattcatctgtgcattttcgctgcttggaagtggccatgctatgatgagctggtatgtagctgcaaagaacgccgggtttacgccaagtattcaagcttttgaatctttgatcactgggtttgttcggttgaacatgctagacgatgccaaaacggtgtttgaggaaatgattgccttggagattaagccaaactctactattttggaggccagccttgagattctctctagaaaggaggagaccagcagagtaggagactttttaaaacgtgcaagggatggcaattgggagttgaacaaagccacagttgtgaggttgacaagaatatgcctagatggaggggtaatagatgaaatggagcagctgcttgccctaatacaaaagggaacacacttgaattctgaaacacaactgcaccatggaattatcaggttctatgctaatgcagatcgattagcggatatggaggatgcaatttatcggatgttggacaatggtgtgatgtttacgtgcccggaggatgttgatgtcataatctgttgttattttcgtcacagggaatttgataggttggatctctttttgaatcgcatccgaagtttgttcaagctcaataggtctacatatgacatactggttgctggataccgaaagtttgatttacatgaaagacttgattcaaccatagctgatatgatgagggaagctggatttgcatgagatcacaaagaactatctgtgcaccatgactttccacggtaaggccatctccagcggaacgtggatatgggcgtgcaaaacactgtttgcactgtagagtgcactgtttacagagcgaagtttgaaataggaagtgagataagaagtgttatagagaggctgctggagatagcctaatatttccatagccttaagtgcattgagcctgaaaaatgaaatccagggtgggatattttttataacagttcagttcaaaattgtttgatcagttctgtgtttgacttggaaaatatctcagattaagatacattatcatgtcatggatgcatttgactttgagaagccgtaagcgtgaaattacatggatgctgtgctcaggctgcagaaggactaacagacactaggctgcaaactgtgggccatgaaaaaaatggagagatttg

SEQ ID NO: 428 - DNA, 4436 bp, Zea Mays
aaagcagccgcgccattttgcagtcacgccacgccccgcggagacggacgactaggactccacccgctttcggctttccttcgcatttcccgttccccccacctgctcgcggcatccgcttctcgtcgttgtcgtcgctcctcctcgccgaccgggacgcggagacgatcgacgcaagcagaccctagccgacgagctcgcagggagccgggagggatgaagagcctgttcaagagtaagatcaggtggcagcaccggtccaacgacccggcgtccccgtcggggcagccgcagccacagccgcagcaggcgttgggcccgccgtcgccgtcgccttcgagctccccgtcgtctgcggcgccgctctccgtgtcaacggcggccacctcctccccctcctcgcccccctccgcggcggcgacgcccacgggtgctggggcagcagcggcagcgggagcgggagcggcaggggaggactacatagcgtcggaggaggagttccagatgcagctggccatggcgctgtccgcgtcttccaacagcgattgcgtgggggacctggacggggagcagatcaggaaggccaagctcataagcctcgatcgcttcgctgcccaccgcgacgagggccacaccgcggagtcgctctcccgccgatactgggactataactttcttgattatcatgagaaagttattgatggcttctatgacatctttggctctatggaatcctctaggcagggaaatatgccatcattagcagatctccaaacaggcataggggacctaggctttgaagtcattgtagtaaaccgtgccattgatagtaccttgcaggagatggagcaagtggcacagtgcatcctgttggacttccctgttgccaatattgcactcttagtgcaaagaatagctgagcttgttacagataatatgggtggacctgtcaaagatgctaacgacatgctcacaaggtggctggagaagagtactgagttgagaacctcgctacaaacaagtttgttgcctattggttgcatcaagatagggctatcacgtcaccgtgccttacttttcaagatccttgcagatagtgttgggattctatgcaaacttgtcaaagggagcaattatactggtggtgatgatgacgatgctataaacataattaagatggacaatgaaagggagtttttggttgatctgatggctgctcctggtgctcttattccagcagatatcttaagttggaaaggcaattcgttaaattctaatagaaaacttggcctgagtcagacagctggatcatcgagtaccgttggtgctaatatgggtcctagtgtattgccacttgaacctaaaggtgatcagctgcctttgttcagcagtggtgattggatatcagagagtggttctggatatggggcagcagaaactgcagcttctactcaaacctcttctggtgccacatcatctgttcctgctggaagtgcttttgacagttcatggatgctgattaatcatgaccaatcagatggaccatcaacttctgctggtacatcatcccagcagaaagttgtacctcaaaacgaacatccacggaatttaaaccgtcttccagatttgcaggaaattccagagtcaaaaaacctttttgctgaccttaatccttttggggatacgaagtccaagaaaacttcagtaccattcaaaggaccagatcaaaggaacaatgagttgcaaaagcgcagagagaacattgtccctaatggtggaagaccacagcagcggttagttatgaagaattggtctccttataatgatgtttctaacaacaaacagtacaattatgtcgaggattcatttgcacgtagaaatgttggcaacaatgccgcatcatcatcatcccagataacacaacaagccgcaaggtctaatcttaattctggattgcgtaatgatgcatcatatcataattatgatagtattatggctggtacctctgccacgaatattacatctacagctgagactgggaaggttcctgaaagggttctgcgtggtgatttggataaaggtcaaacaaattatagacttcaggatcaacatgttgtaggtcaaccaccacaggaaagacttccatggggtaatcctgctgaaggaagagttccaatgaatagatttcagaatcaagcaaaacaacacatgggaaacattgatacaaagcaagaccataagaaattgctccctgatccaaaaaaatctccccttgacagattcatggacacgtcattgccatcaagaaacttggacgtgaggtcacagaggcttgactttgatgatgtgtctgaatgtgaaattccttgggaagatcttgtgattggtgaaaggattggcttaggttcatatggagaggtttaccgtgctgactggaatggaacagaagtagctgtaaaaaaattcttggatcaagatttctatggtgatgctctggatgagtttaggagtgaagtccgaattatgcgtcggctgcgccatccaaatattgttctctttatgggtgctgttacacgccctccgaacttatctattgtatctgaataccttccaaggtgcgacgtttacagctttggtgtcatattatgggagctggcaacgcttagaatgccatggagtgggatgaatccaatgcaggttgtgggggcagttggtttccaggatagacggcttgatattcccaaggaagttgatcctctggtagcaaggatcatattcgaatgctggcagaaggacccaaatctgcgcccttcatttgcacagttaacaagtgccctaaagactgttcaaagactagtgaccccttctcaccaggagacccagagcccccatcccgcaaatgcgggcgcggcttgtagattgagcgccccaggcggtggtagacactctgccgtctgcgacaaggaccccgtggtaggatgtgcaagcagtccttctgtgcaagcgtccactttcgttggaccgctgggaagatgtaccgtgggcccgtggcagacaaaccctgagccccattctttttccgctcctcgcaagacacgcatacgtcacctcccgaccatgcgtcctcccgatcaccgtccacgcgcgccgacagccgagatccaacggtctattgccttcccctctgctgctctgctctgttcgcttgtgctccttctttccatggcggcatacgccggaatcctagttccaccgctccccgtccgcctctcggtctctcaccttagatccgttaccccggcttcctactccctgaaccaccgtcccccccgccccgcggtcgcccgtgcggcttcccgcggcaacggcaacggcgggccaccggtggagggggagaaggagcggcgacgctcgtcgctcccggcgctgtcggagatccggttgggagagcttctgtccccggaccccgccaatgccgtggctgtggtgctcacgggcgcgctcgtatgggctggcgcctcactgctgctgcagctcacgctcatctccgcagcaatcttcgccgccgccgtcaagtactcgtttgtcgccgcgctcctgctaatcgtccttatcgccctgctgtgatcgacccggccaagaaaaaagctgtaagttcgcacgaagcattccgattgaagatcacgtagagggcaaagcagcggatttcaaatgtttccatttttgtatggagcagtactgcagtagaaaatatttgcctgccagtgccagttcaatatggccagcaactccagcagggtgagaaagatcatcatcaggttctaaaggatttctcaaagttgcttgatgatcaggagtttaatagtaagtattatcatccaagcaacgctaggatctggttctatggtgatgatgacccaaaagagcacacattctaagtgaataccttgatcagtttgaagccagccctgctcctaaatgttcggcagtggtgtgcatgaaggatttgagctccccgtgctctactcgccaggccagtcgacatcccagtcttgcgctacagatcggtgtgagagcaaagcagttgttgtcccaagaaccatatgctaccagaacaagaaagatgagagcggttggtggccaaggctcatgaaaaaggacttgtgttcttgaaggttgactggataaatggtaggatgaggatggcgaagatgttggatgttagtatttcacttttggttgattatattttttcttatgcgcctgacaaatctagatttgcaaccagacatgctttattcttgttcctgttttgttttccttatgtattaattccttaacttgtaatgcacacgatgttttccttatgtattaattccttaacttgtaatgcacatgatgttttctttatgcattaattccttaacttttaaagc

SEQ ID NO: 429 - DNA, 3288 bp, Zea Mays
gacggacgactaggactccacccgctttcggctttccttcgcatttcccgttccccccacctgctcgcggcatccgcttctcgtcgttgtcgtcgctcctcctcgccgaccgggacgcggagacgatcgacgcaagcagaccctagccgacgagctcgcagggagccgggagggatgaagagcctgttcaagagtaagatcaggtggcagcaccggtccaacgacccggcgtccccgtcggggcagccgcagccacagccgcagcaggcgttgggcccgccgtcgccgtcgccttcgagctccccgtcgtctgcggcgccgctctccgtgtcaacggcggccacctcctccccctcctcgcccccctccgcggcggcgacgcccacgggtgctggggcagcagcggcagcgggagcgggagcggcaggggaggactacatagcgtcggaggaggagttccagatgcagctggccatggcgctgtccgcgtcttccaacagcgattgcgtgggggacctggacggggagcagatcaggaaggccaagctcataagcctcgatcgcttcgctgcccaccgcgacgagggccacaccgcggagtcgctctcccgccgatactgggactataactttcttgattatcatgagaaagttattgatggcttctatgacatctttggctctatggaatcctctaggcagggaaatatgccatcattagcagatctccaaacaggcataggggacctaggctttgaagtcattgtagtaaaccgtgccattgatagtaccttgcaggagatggagcaagtggcacagtgcatcctgttggacttccctgttgccaatattgcactcttagtgcaaagaatagctgagcttgttacagataatatgggtggacctgtcaaagatgctaacgacatgctcacaaggtggctggagaagagtactgagttgagaacctcgctacaaacaagtttgttgcctattggttgcatcaagatagggctatcacgtcaccgtgccttacttttcaagatccttgcagatagtgttgggattctatgcaaacttgtcaaagggagcaattatactggtggtgatgatgacgatgctataaacataattaagatggacaatgaaagcagatatcttaagttggaaaggcaattcgttaaattctaatagaaaacttggcctgagtcagacagctggatcatcgagtaccgttggtgctaatatgggtcctagtgtattgccacttgaacctaaaggtgatcagctgcctttgttcagcagtggtgattggatatcagagagtggttctggatatggggcagcagaaactgcagcttctactcaaacctcttctggtgccacatcatctgttcctgctggaagtgcttttgacagttcatggatgctgattaatcatgaccaatcagatggaccatcaacttctgctggtacatcatcccagcagaaagttgtacctcaaaacgaacatccacggaatttaaaccgtcttccagatttgcaggaaattccagagtcaaaaaacctttttgctgaccttaatccttttggggatacgaagtccaagaaaacttcagtaccattcaaaggaccagatcaaaggaacaatgagttgcaaaagcgcagagagaacattgtccctaatggtggaagaccacagcagcggttagttatgaagaattggtctccttataatgatgtttctaacaacaaacagtacaattatgtcgaggattcatttgcacgtagaaatgttggcaacaatgccgcatcatcatcatcccagataacacaacaagccgcaaggtctaatcttaattctggattgcgtaatgatgcatcatatcataattatgatagtattatggctggtacctctgccacgaatattacatctacagctgagactgggaaggttcctgaaagggttctgcgtggtgatttggataaaggtcaaacaaattatagacttcaggatcaacatgttgtaggtcaaccaccacaggaaagacttccatggggtaatcctgctgaaggaagagttccaatgaatagatttcagaatcaagcaaaacaacacatgggaaacattgatacaaagcaagaccataagaaattgctccctgatccaaaaaaatctccccttgacagattcatggacacgtcattgccatcaagaaacttggacgtgaggtcacagaggcttgactttgatgatgtgtctgaatgtgaaattccttgggaagatcttgtgattggtgaaaggattggcttaggttcatatggagaggtttaccgtgctgactggaatggaacagaagtagctgtaaaaaaattcttggatcaagatttctatggtgatgctctggatgagtttaggagtgaagtccgaattatgcgtcggctgcgccatccaaatattgttctctttatgggtgctgttacacgccctccgaacttatctattgtatctgaataccttccaaggtgcgacgtttacagctttggtgtcatattatgggagctggcaacgcttagaatgccatggagtgggatgaatccaatgcaggttgtgggggcagttggtttccaggatagacggcttgatattcccaaggaagttgatcctctggtagcaaggatcatattcgaatgctggcagaaggacccaaatctgcgcccttcatttgcacagttaacaagtgccctaaagactgttcaaagactagtgaccccttctcaccaggagacccagagcccccatgttcatcaagaaatctcagtgaacttgactccataggagggctgtcaacttcccgttgtgcatagtttttgttcttttgccgtttgtgttttgtccaagagcccgcaaatgcgggcgcggcttgtagattgagcgccccaggcggtggtagacactctgccgtctgcgacaaggaccccgtggtagggtatgtatagagttgcccatcatcgggagaagtgattcagtgtgtagcaactgatcgtcaatccctcttttagtcctttgtacacccaaccggtcgaccgggtgcgagccctctgaaagcagtgagctctgtgttcattgtgaagtgcgtggctatgctaagtggattttctgtcttgctgcgcaataggcagcagcgtatctggaagtttgaagcgttgtaaaactctgtacaatcaggacacttgaatacaggatacatacattgtgttctttgtttttgaagatgtgcaagcagt

SEQ ID NO: 430 - DNA, 2741 bp, Zea Mays
atgaagagcctgttcaagagtaagatcaggtggcagcaccggtccaacgacccggcgtccccgtcggggcagccgcagccacagccgcagcaggcgttgggcccgccgtcgccgtcgccttcgagctccccgtcgtctgcggcgccgctctccgtgtcaacggcggccacctcctccccctcctcgcccccctccgcggcggcgacgcccacgggtgctggggcagcagcggcagcgggagcgggagcggcaggggaggactacatagcgtcggaggaggagttccagatgcagctggccatggcgctgtccgcgtcttccaacagcgattgcgtgggggacctggacggggagcagatcaggaaggccaagctcataagcctcgatcgcttcgctgcccaccgcgacgagggccacaccgcggagtcgctctcccgccgatactggatccttgcagatagtgttgggattctatgcaaacttgtcaaagggagcaattatactggtggtgatgatgacgatgctataaacataattaagatggacaatgaaagggagtttttggttgatctgatggctgctcctggtgctcttattccagcagatatcttaagttggaaaggcaattcgttaaattctaatagaaaacttggcctgagtcagacagctggatcatcgagtaccgttggtgctaatatgggtcctagtgtattgccacttgaacctaaaggtgatcagctgcctttgttcagcagtggtgattggatatcagagagtggttctggatatggggcagcagaaactgcagcttctactcaaacctcttctggtgccacatcatctgttcctgctggaagtgcttttgacagttcatggatgctgattaatcatgaccaatcagatggaccatcaacttctgctggtacatcatcccagcagaaagttgtacctcaaaacgaacatccacggaatttaaaccgtcttccagatttgcaggaaattccagagtcaaaaaacctttttgctgaccttaatccttttggggatacgaagtccaagaaaacttcagtaccattcaaaggaccagatcaaaggaacaatgagttgcaaaagcgcagagagaacattgtccctaatggtggaagaccacagcagcggttagttatgaagaattggtctccttataatgatgtttctaacaacaaacagtacaattatgtcgaggattcatttgcacgtagaaatgttggcaacaatgccgcatcatcatcatcccagataacacaacaagccgcaaggtctaatcttaattctggattgcgtaatgatgcatcatatcataattatgatagtattatggctggtacctctgccacgaatattacatctacagctgagactgggaaggttcctgaaagggttctgcgtggtgatttggataaaggtcaaacaaattatagacttcaggatcaacatgttgtaggtcaaccaccacaggaaagacttccatggggtaatcctgctgaaggaagagttccaatgaatagatttcagaatcaagcaaaacaacacatgggaaacattgatacaaagcaagaccataagaaattgctccctgatccaaaaaaatctccccttgacagattcatggacacgtcattgccatcaagaaacttggacgtgaggtcacagaggcttgactttgatgatgtgtctgaatgtgaaattccttgggaagatcttgtgattggtgaaaggattggcttaggttcatatggagaggtttaccgtgctgactggaatggaacagaagtagctgtaaaaaaattcttggatcaagatttctatggtgatgctctggatgagtttaggagtgaagtccgaattatgcgtcggctgcgccatccaaatattgttctctttatgggtgctgttacacgccctccgaacttatctattgtatctgaataccttccaaggtgcgacgtttacagctttggtgtcatattatgggagctggcaacgcttagaatgccatggagtgggatgaatccaatgcaggttgtgggggcagttggtttccaggatagacggcttgatattcccaaggaagttgatcctctggtagcaaggatcatattcgaatgctggcagaaggacccaaatctgcgcccttcatttgcacagttaacaagtgccctaaagactgttcaaagactagtgaccccttctcaccaggagacccagagcccccatgttcatcaagaaatctcagtgaacttgactccataggagggctgtcaacttcccgttgtgcatagtttttgttcttttgccgtttgtgttttgtccaagagcccgcaaatgcgggcgcggcttgtagattgagcgccccaggcggtggtagacactctgccgtctgcgacaaggaccccgtggtagggtatgtatagagttgcccatcatcgggagaagtgattcagtgtgtagcaactgatcgtcaatccctcttttagtcctttgtacacccaaccggtcgaccgggtgcgagccctctgaaagcagtgagctctgtgttcattgtgaagtgcgtggctatgctaagtggattttctgtcttgctgcgcaataggcagcagcgtatctggaagtttgaagcgttgtaaaactctgtacaatcaggacacttgaatacaggatacatacattgtgttctttgtttttgaagatgtgcaagcagt

SEQ ID NO: 431 - DNA, 3190 bp, Zea Mays
atgaagagcctgttcaagagtaagatcaggtggcagcaccggtccaacgacccggcgtccccgtcggggcagccgcagccacagccgcagcaggcgttgggcccgccgtcgccgtcgccttcgagctccccgtcgtctgcggcgccgctctccgtgtcaacggcggccacctcctccccctcctcgcccccctccgcggcggcgacgcccacgggtgctggggcagcagcggcagcgggagcgggagcggcaggggaggactacatagcgtcggaggaggagttccagatgcagctggccatggcgctgtccgcgtcttccaacagcgattgcgtgggggacctggacggggagcagatcaggaaggccaagctcataagcctcgatcgcttcgctgcccaccgcgacgagggccacaccgcggagtcgctctcccgccgatactgggactataactttcttgattatcatgagaaagttattgatggcttctatgacatctttggctctatggaatcctctaggcagggaaatatgccatcattagcagatctccaaacaggcataggggacctaggctttgaagtcattgtagtaaaccgtgccattgatagtaccttgcaggagatggagcaagtggcacagtgcatcctgttggacttccctgttgccaatattgcactcttagtgcaaagaatagctgagcttgttacagataatatgggtggacctgtcaaagatgctaacgacatgctcacaaggtggctggagaagagtactgagttgagaacctcgctacaaacaagtttgttgcctattggttgcatcaagatagggctatcacgtcaccgtgccttacttttcaagatccttgcagatagtgttgggattctatgcaaacttgtcaaagggagcaattatactggtggtgatgatgacgatgctataaacataattaagatggacaatgaaagggagtttttggttgatctgatggctgctcctggtgctcttattccagcagatatcttaagttggaaaggcaattcgttaaattctaatagaaaacttggcctgagtcagacagctggatcatcgagtaccgttggtgctaatatgggtcctagtgtattgccacttgaacctaaaggtgatcagctgcctttgttcagcagtggtgattggatatcagagagtggttctggatatggggcagcagaaactgcagcttctactcaaacctcttctggtgccacatcatctgttcctgctggaagtgcttttgacagttcatggatgctgattaatcatgaccaatcagatggaccatcaacttctgctggtacatcatcccagcagaaagttgtacctcaaaacgaacatccacggaatttaaaccgtcttccagatttgcaggaaattccagagtcaaaaaacctttttgctgaccttaatccttttggggatacgaagtccaagaaaacttcagtaccattcaaaggaccagatcaaaggaacaatgagttgcaaaagcgcagagagaacattgtccctaatggtggaagaccacagcagcggttagttatgaagaattggtctccttataatgatgtttctaacaacaaacagtacaattatgtcgaggattcatttgcacgtagaaatgttggcaacaatgccgcatcatcatcatcccagataacacaacaagccgcaaggtctaatcttaattctggattgcgtaatgatgcatcatatcataattatgatagtattatggctggtacctctgccacgaatattacatctacagctgagactgggaaggttcctgaaagggttctgcgtggtgatttggataaaggtcaaacaaattatagacttcaggatcaacatgttgtaggtcaaccaccacaggaaagacttccatggggtaatcctgctgaaggaagagttccaatgaatagatttcagaatcaagcaaaacaacacatgggaaacattgatacaaagcaagaccataagaaattgctccctgatccaaaaaaatctccccttgacagattcatggacacgtcattgccatcaagaaacttggacgtgaggtcacagaggcttgactttgatgatgtgtctgaatgtgaaattccttgggaagatcttgtgattggtgaaaggattggcttaggttcatatggagaggtttaccgtgctgactggaatggaacagaagtagctgtaaaaaaattcttggatcaagatttctatggtgatgctctggatgagtttaggagtgaagtccgaattatgcgtcggctgcgccatccaaatattgttctctttatgggtgctgttacacgccctccgaacttatctattgtatctgaataccttccaagaaaaaagctgtaagttcgcacgaagcattccgattgaagatcacgtagagggcaaagcagcggatttcaaatgtttccatttttgtatggagcagtactgcagtagaaaatatttgcctgccagtgccagttcaatatggccagcaactccagcagggtgagaaagatcatcatcaggttctaaaggatttctcaaagttgcttgatgatcaggagtttaatagtaagtattatcatccaagcaacgctaggatctggttctatggtgatgatgacccaaaagagcacacattctaagtgaataccttgatcagtttgaagccagccctgctcctaaatgttcggcagtggtgtgcatgaaggatttgagctccccgtgctctactcgccaggccagtcgacatcccagtcttgcgctacagatcggagagcaaagcagttgttgtcccaagaaccatatgctaccagaacaagaaagatgagagcggttggtggccaaggctcatgaaaaaggacttgtgttcttgaaggttgactggataaatggtaggatgaggatggcgaagatgttggatgttagtatttcacttttggttgattatattttttcttatgcgcctgacaaatctagatttgcaaccagacatgctttattcttgttcctgttttgttttccttatgtattaattccttaacttgtaatgcacacgatgttttccttatgtattaattccttaacttgtaatgcacatgatgttttctttatgcattaattccttaacttttaaagc

SEQ ID NO: 432 - DNA, 986 bp, Zea Mays
gctagttttacaattttccaaccaatcatgtagaaagcagaaccgtacaggttaattgatctatcttccgtccagaactataggtttcactttcacactttcgctcttctcctgcaacacctttttatactttgcaaaaactgaagtatgataggatactcacctcttaacttagttaaattcagtaacgatcttgatgctgccactacctgaattttgtacaggtgcgacgtttacagctttggtgtcatattatgggagctggcaacgcttagaatgccatggagtgggatgaatccaatgcaggttgtgggggcagttggtttccaggatagacggcttgatattcccaaggaagttgatcctctggtagcaaggatcatattcgaatgctggcagaaggacccaaatctgcgcccttcatttgcacagttaacaagtgccctaaagactgttcaaagactagtgaccccttctcaccaggagacccagagcccccatgttcatcaagaaatctcagtgaacttgactccataggagggctgtcaacttcccgttgtgcatagtttttgttcttttgccgtttgtgttttgtccaagagcccgcaaatgcgggcgcggcttgtagattgagcgccccaggcggtggtagacactctgccgtctgcgacaaggaccccgtggtagggtatgtatagagttgcccatcatcgggagaagtgattcagtgtgtagcaactgatcgtcaatccctcttttagtcctttgtacacccaaccggtcgaccgggtgcgagccctctgaaagcagtgagctctgtgttcattgtgaagtgcgtggctatgctaagtggattttctgtcttgctgcgcaataggcagcagcgtatctggaagtttgaagcgttgtaaaactctgtacaatcaggacacttgaatacaggatacatacattgtgttctttgtttttgaagatgtgcaagcagt

SEQ ID NO: 433 - DNA, 636 bp, Zea Mays
ctcatgagtcatgatgtatccagttttgcatcaaatgcttccagatctacaagagagtttaatagtaagtattatcatccaagcaacgctaggatctggttctatggtgatgatgacccaaaagagcacacattctaagtgaataccttgatcagtttgaagccagccctgctcctaaatgttcggcagtggtgtgcatgaaggatttgagctccccgtgctctactcgccaggccagtcgacatcccagtcttgcgctacagatcggtgtgagagcaaagcagttgttgtcccaagaaccatatgctaccagaacaagaaagatgagagcggttggtggccaaggctcatgaaaaaggacttgtgttcttgaaggttgactggataaatggtaggatgaggatggcgaagatgttggatgttagtatttcacttttggttgattatattttttcttatgcgcctgacaaatctagatttgcaaccagacatgctttattcttgttcctgttttgttttccttatgtattaattccttaacttgtaatgcacacgatgttttccttatgtattaattccttaacttgtaatgcacatgatgttttctttatgcattaattccttaacttttaaagc

SEQ ID NO: 434 - DNA, 634 bp, Zea Mays
atggagggcgtcctggagttcgcgccgacgtacaagtacgagctcggctcgaggaggagtttaatagtaagtattatcatccaagcaacgctaggatctggttctatggtgatgatgacccaaaagagcacacattctaagtgaataccttgatcagtttgaagccagccctgctcctaaatgttcggcagtggtgtgcatgaaggatttgagctccccgtgctctactcgccaggccagtcgacatcccagtcttgcgctacagatcggagagcaaagcagttgttgtcccaagaaccatatgctaccagaacaagaaagatgagagcggttggtggccaaggctcatgaaaaaggacttgtgttcttgaaggttgactggataaatggtaggatgaggatggcgaagatgttggatgttagtatttcacttttggttgattatattttttcttatgcgcctgacaaatctagatttgcaaccagacatgctttattcttgttcctgttttgttttccttatgtattaattccttaacttgtaatgcacacgatgttttccttatgtattaattccttaacttgtaatgcacatgatgttttctttatgcattaattccttaacttttaaagc

SEQ ID NO: 435 - DNA, 638 bp, Zea Mays
atggagggcgtcctggagttcgcgccgacgtacaagtacgagctcggctcgaggaggagtttaatagtaagtattatcatccaagcaacgctaggatctggttctatggtgatgatgacccaaaagagcacacattctaagtgaataccttgatcagtttgaagccagccctgctcctaaatgttcggcagtggtgtgcatgaaggatttgagctccccgtgctctactcgccaggccagtcgacatcccagtcttgcgctacagatcggtgtgagagcaaagcagttgttgtcccaagaaccatatgctaccagaacaagaaagatgagagcggttggtggccaaggctcatgaaaaaggacttgtgttcttgaaggttgactggataaatggtaggatgaggatggcgaagatgttggatgttagtatttcacttttggttgattatattttttcttatgcgcctgacaaatctagatttgcaaccagacatgctttattcttgttcctgttttgttttccttatgtattaattccttaacttgtaatgcacacgatgttttccttatgtattaattccttaacttgtaatgcacatgatgttttctttatgcattaattccttaacttttaaagc

SEQ ID NO: 436 - DNA, 825 bp, Zea Mays
atggagggcgtcctggagttcgcgccgacgtacaagtacgagctcggctcgaggaggagtttaatagtaagtattatcatccaagcaacgctaggatctggttctatggtgatgatgacccaaaagagcacacattctaagtgaataccttgatcagtttgaagccagccctgctcctaaatgttcggcagtggtgtgcatgaaggatttgagctccccgtgctctactcgccaggccagtcgacatcccagtcttgcgctacagatcgggtgtttttgacgatagagttgcctgacgccaagggtgtgaagcagagcttaaagcctaaaggccatttcaacttgtctagctcagatgactcgccttgcgagtttgatcttgagttgtttgatgttgtcgatttaatacatgttgaattagcgtttcagattttgattgtattggtcttcctatttgcaggagagcaaagcagttgttgtcccaagaaccatatgctaccagaacaagaaagatgagagcggttggtggccaaggctcatgaaaaaggacttgtgttcttgaaggttgactggataaatggtaggatgaggatggcgaagatgttggatgttagtatttcacttttggttgattatattttttcttatgcgcctgacaaatctagatttgcaaccagacatgctttattcttgttcctgttttgttttccttatgtattaattccttaacttgtaatgcacacgatgttttccttatgtattaattccttaacttgtaatgcacatgatgttttctttatgcattaattccttaacttttaaagc

SEQ ID NO: 437 - DNA, 586 bp, Zea Mays
atggagggcgtcctggagttcgcgccgacgtacaagtacgagctcggctcgaggaggagtttaatagtaagtattatcatccaagcaacgctaggatctggttctatggtgatgatgacccaaaagagcacacattctaagtgtggtgtgcatgaaggatttgagctccccgtgctctactcgccaggccagtcgacatcccagtcttgcgctacagatcggagagcaaagcagttgttgtcccaagaaccatatgctaccagaacaagaaagatgagagcggttggtggccaaggctcatgaaaaaggacttgtgttcttgaaggttgactggataaatggtaggatgaggatggcgaagatgttggatgttagtatttcacttttggttgattatattttttcttatgcgcctgacaaatctagatttgcaaccagacatgctttattcttgttcctgttttgttttccttatgtattaattccttaacttgtaatgcacacgatgttttccttatgtattaattccttaacttgtaatgcacatgatgttttctttatgcattaattccttaacttttaaagc

SEQ ID NO: 438 - DNA, 1470 bp, Zea Mays
gatagaacatagctgtcttctgggttcgaagagaaaattcttacactccacagatttacagattcaggagaggtattctcaatctgtatggtatcagctgatgtttctccgacaagtgcagattttggttttccatcctcgaaagggaaaggagctgagacaagcacaggggtatcttcacatgaataatcctgaaaggtgtcgtcgttctggaagtccatgaattctacttctggcctctcgccagcaactgaaaattcatcatctgaataattcctacggtgaacccccatcttgaatcctgagaagcaaaaattgtagtaacagttttttttttaaaaaaaaacaacaacaatcaaaagttagaattaaaaattaagtccaaaaagaaaagggaaaacattctactcgtggtattacgaccatctacaactaggacaagtggacaacaagcatacaaacaaatattgcaccacaccccagacaccaaatacactataacggtaaaaccaactatgtgaaatagacacgatatactcacaccctgtggcaatcaccaagtcagtgcggttcccagaatcatgcatctcaagagctgctgttttgttgagctatagatagagatttccccttcacaccaaactactcccagaggcgttttggcactgcattactccacttcctttttttgcacacgacttatgtgatgaagcagttatataatgaggcatctcaaagctgcagcaatcactctgcatatcctagtagcccagatgaatcggcagacgcagtacataatatacactcacttgtaattagatcagatccgaatacacatacccaaacccaaacagttcaggttacggttcggatgcccggttttcgcgcagcaggaatgaagggaggaggaggagcgcgcatacctagtaggcgctcctcgccggcgcagggcccgaggaagacctggcgaaggatccgacgaggctactacaccggggcacctggcgtagccgcgtagggaagtggcgtgggtgaacggcgggagaagaaaaaggcagggggaacggtgtaggggtgtactggagtagatgatggctcttacggaggtagacgaagcgaatcaagaggtcatgaaaccaccattgattcgcaccggcactgtgtgtgttcctccgtagaagttccaactgcaactatgtccggcactgccatgaagacagaaagaagattcggcagacaataggctatctccacggcctcctgagtctgttttggctttaacccttacctaccttagaagtgttttgtctctacgaattcgaataactgatccaaaaaaatagataatatttatagagtaaaatttaaaataaaagtaagataaggagtggcataagaagactgctagagatagccaactctaaagattagagcatatgtgtagctaggaaaaaaaaggtgggagtagat

SEQ ID NO: 439 - DNA, 433 bp, Zea Mays
ccagtcttgagcgcgagcatcatgtagggcggtgagaattgcaggcttgtcaccgacggtggattcaggcctttcttcagcgtgcgtgaggtacaccagaacgctcccgagcacgacggacgtcaacggcgccgccgcggagatccagaacagcttgggacgcctcttgctctgtaaaaaaaaaaaacaaattattagcatctaaaactacaccggctttgaaacgtgaagctcagtcagccagctctcgcgattaatgttttcagcgggaaattaagctgcgatcgattgcgccaagagaaacaaaggcgatcgattgagaaactactgctacgagccaaggaagtttggttggtggatcttggcctcttgcaattattgcatattcttttttttttcttctcaacactagccatgaagcggtatatcgtcc

SEQ ID NO: 440 - DNA, 2799 bp, Zea Mays
attctttcagggatcacgggtggtatgtattttgtgtatgtaggtttcctacttggttaagttctctttttaggggtagtgtgtattgcgtgtgtgtctgtcatgtgcgtgtgccttgggggataaatactatatcacatttggaagaaagctacatatttgttgttttagcttctattattttcaaattacttgttgtttacaactccaaggcaaccttgaccaattttatccaatcctgcccctaaatagaaacacacctaagagtgagtttgtgcctttgagattataaacgcacacttaagagggggttaatagggtcaatgtttacaagtcgtccgactaatcgcgattagtcgggctggtcgcctgttagttggcgattagaaggacgacacgaccagatttccaagtcgcccgactagtcgtcgacctgagcgattaatcatccgatcgttaggaatctggtcgcccactgatgtctgcgcgtttaacatggttttgaaagcggtaaggcggtccaaggcgttggaccaccgcttggacgcctaggcgacgccttaagaacagaggcgtttatactgggctaatgggcttaactcattttttcagcccatctacagttgcaacatatatgttgcccctggtcagccgaaaccctaccccagcctaacacaaaacctgccagccaccagcctttgttcaggcgtaaaccctattgctctctggtgccgtccagctccagtcatcggcgtccagtggtccagtcaccggcggctgctccaagctccagtcatcttctctggcagcgtctgtagcccaccggcggcgtgccggcgtctccactctccagtccagcagaccaacatcagtcaccctgagtcgagatgagttcgtcatctgaacttctgctttcagttctgcacttctgctgctactaagttcagtaactactgttttcagttttagttttatgcctatattactttcagtttctgttttacacttttactgaattactgctactaattatgcctatattactttcagtttcagtatgttgctactttttaagagtaaagacttatataatgtcactctattgcagtattgcagaaatgcagactaacattattgcttatatatagttatatacataatacatatacatatgtccataaatctataggacgactaatagacgaccagagctcgaccaggaccgattaggcgtcctaatcgtcgccctaatcatgattagacttctggtcgctgctctagctcgaccagctggtggcccgacttgtaaatattgatagggtagcatggtcgttccactcccatccttattcttgtgcctaagccaaaaacatcaattattgtgaaaaggagggaatgttgcaacaagtgttttcttcagtgaaattgcaactgcagtttgtagagagcatgttagcagtgccaatgatggtgcagtgtgtactagttttagcggcgcctatgcctcccaaagttcgtggtgagaacatatgcactgcaacgtcggtatggccgtgctttatcgtctggagagacaggaattgaatccacatcgtggttccaagcttggcttcacagaaggtttcggtgaccattcaacactggcacaacaacatataaccgccctagggcagttactagaggctcctagtgaggccgtctctagcagaccgtgcatatggtcacacaagaaattgttttacactgagtagagtttgaaataggagatgtgataggaaagttgttaaagacaacctgagagcctacccacccaggattgcaccagctactcaaaaaaatcaacaagggacaaattccctctttcaacacacataaaaaagatgcaatgcaaattatttattagtcgtatgtgagtgtttattctgtaactatttctagaaattgcagtgtcaggagtgaactgccaacatttgatgttgagtccataaataatacataggcaatctatgtgaagcagataatcttttcaaaatacaaagagggggatcaatccaaatgcataaaacaaatataacagaacaccaaaatcaggggcgtctgagttttttgggccccggtgcaaaacataaaaataggtcctatgacctataatatataaagataaaattaatctacaatgggtccttttaaatttgatctattatcatattcttgtcctcttatattatctatttcaagattttgcagtttaatttataaaacagcatacaatatttgccttcttatattatttatattcacaaaactcaaaaaatgggcccctaaaaatttgggggccatgtgccatcgccccagttgcacttggcactggacgggcctgccaaaatgccttccaataattatgatatgctcaaagcctcttcatcgcttcacttgcacccacagcccctcaaaagaagttatggaatggaagtcactaagatggagtttaaaagggaaaaatcattccgaatatgccttcaaaattcattcgtacggcggaaggcgccatctccatgcaccataagtagctgcaatggggtgtgttacatgtacatgccacagtagccagaaataacaagcactgcagcctctgctaggctatagcactactgagagaaacattaaaaaatatgcttccaacagcaacacatgaaagatgaataacttatgctccacatcagagagacagacagtgacaagtaattccttttttctgtccaatgcaaactgaagctatatacataacaaggatggttt

SEQ ID NO: 441 - DNA, 1566 bp, Zea Mays
ctcctgtacaactctagacgtgctgaaactacctagtgtatcttataacaagaaaaagcagcaccatataactagagctgaatttataagtgcacgcgaaagaaaagaactcaagattgatttatatacactattgtttataaacctacaaacaactagtcccttggattagtactctttttatggaatgaagataacgtatagcagtttgaagtcctaaaaacaaaggtaaggaagaattagtatatatatatatatatttgaagttcaattggatcaaccaagataaaacaagtatagcatattctgaggcactagctatgtttaaatgtttttaaatcgtccatgctatctgcattgtaaaacctttccattagtgacattatgcacgcacatttcgatatataattggtgtggagtcatagaaactatactagtatttttggaaggcactagctatgttcatgaatatagattagcataggttttggtgaggatcaaccacttggattctattgtttggtatctttatgacaatatttttgtattagggtcggttttcacttgcttcacaaacaaaatcaatccaccaggtaatcagagcacaaaacaaacacaagaaaaagcaccaccatatagctatagctgaatttatacatgcacgcaaaaggaaagaacgcatgattgatttatatacactactatttataagttgtaagtactgaagcagctgctagctacagcatgtcacgtgaagctggttggataataagggacactatggcaagttgtctcagtcaagtgatgatacgtgaaatctacaaataactagtcccttggattagtactctctttatgcaacgaggataacagatagcagtttatagtcctaaaacaaaggcaaggaagaatcagtatatatgtttgaagatcaattggatcaaccaagataaaaacaagtacaaacggtagaatccactctcttcacctgctatgacaaataaaatattcctaggcatttttttccagaagtagatggaatgagtacctcttaggctcttgtttggttattctcatcccatgtggattagaggggattggaaaaaattaagaaaggtttcgacttgctggtgatttaaactcactcaatctcctccaatccatatggattgggattaaaacaaataagcccttagtttgcttttagtttttaggaagaaaaatcacacgaatccataggttcgtggccattgtttccagctgctaatttagtccataaccaccaagctaacataataagacacacacacacacacgaaacacagggacatgaatgatgcacgatcgagacacatatacatgttttcgatccattccttgcttacctaacgcaacctacaatagaaggtaaactatagatcatattcagacagggacaagacatacaatttcaattcaatagttaacaataggttcctatgaacattaattgaagaaacagaaagcacagagatgaacagcagtggcggctctgaatttgttctggttgtacaagtcccaaagcag

SEQ ID NO: 442 - DNA, 376 bp, Zea Mays
atgcagcttgatgtagtaaaggcaacttgtggcatggttcaagcaggaagacatcaggtgttactgcttgggcttctctttgttttggttcgccaggctttgtacttggatgctttgttttttttcccaacttctcttaatggaatacatgcaatgaacattcttggaaaccttactccttggacaacttctgtagctgataaacagctagaaagaagcatctctaaccttttggtacaccctcctgtatatcgttgctccttcaagctctgcatggatttctcgctctgtccggattcccattgggttgtccagaagccatcctttccctcatgtctacagatacttccagtacatcagattgtatgaaaaccta

SEQ ID NO: 443 - DNA, 2181 bp, Zea Mays
ctttcccgcgcagcaggagaagagagacgacacagcagcttttttggtttccccttccctttccccgcgcggtgatcgctgggttctccgcgagcgaggcagagcactgcgcgtcctccgtgaccgcctggtgatcgctgggggttctggacgttggcgtttcatttggttggttggtggttggcagcagccgtggcgagatggacctgatgctgccggtgacggtgaaggaggagtggccgccggaagaggaggaggaggaggacgtggacgcggacgcggacgctccgcggccgatggaggggctgcacgaggtcgggccaccgccgttcctgaccaagacgttcgacctggtggccgacccggccaccgacgaggtcatctcctggggccgcgccggcaacagtttcgtggtctgggatccccacgtgttcgccgccgtgctgctccccaggttctttaagcacaacaacttctccagctttgtccgccagctgaacacctatgtgagtgccccaagtactctgcttgctcagttgctgtcgtgtgattttttgtttctggttggctttgtgctcgcgcgctctggttttgcagttcatctcgcctcttgcattgtggagtacagtagcatgagctatcagtcgacaagtctgtctctattattattacttaccgaaagaacaagtctgtatatatatataagcattttgtgtgattcacaatgacttggagctgatacaatcgttgaacgcgtattgcttttctttggcggcctagcaaatacaatggcaaaatgggcaaatgttttgaatggttcagaagcagaacgacaatgggggagattgcagaaccagcatctccatgacaagatgttaaattcctctgacatgctctttgttcgccttgttactgtgtagctagatggaccaggacaagggatgaacgaagctactacagcctacgagaaagaaacaaactgcttgtttgtcctaaagataaagaagactcactcctttgatcaccactcaccaccaagcaatatactgctagtggcttcagaaagatcgacccggacagctgggagttcgcgaacgaaggattcctgaggggccagaggcatcttctccggctgatcaagcgtcgaaggccggcgccaccgccgccgtacctccaggcgtcgcagtcgcaggggtcgtgcctggaggtgggccggttcggagggctggacggagagatggagcggctgaggcgtgacaagagcatcctgctggcggaggtggtgaagctgcggcaggagcagcagagcacgcgggcgggcatgcgggccatggaggagcggctgcggcacgcggagcacaagcaggtgcagatgatggggttcctggcgcgggcggtgcagagcccagacttgttccagctgctggcacagcagcaagcccggcggagggagctggagggcgcggcgctgctctccgccgcctcccggaagcggaggcggcccatcggcgccgcgccggccaacggcggcttgcagcagcaggaggaggagcagcagcagggcgacgacgacgaccccaccgccacgcgggcgctgttcgcggagctggacgagcgagggaccacgtcggagctggagaacctggcgctcaacatccaggggctcggcaagcgcaggcaggacgggagcgagaagcagggtggccgcgcgcggagccagcagcagggcgggttcgagacggcggagctcaccgacgacttttgggaggagctgctgaacgaagggatgaagggcggtgcggaggctgagacgctgccgccggagaggagacgaccggcttggtacgtcgacgcgctggcgcagaagttgagctccatgagcaataacaccacggcgaagtagagatgatcgcgttaattaatcctatacgactagtaacagtagcttaattatccctccgacaggggtcagtgaatactcttagcgatagctccattgttgtagattatagtatataggagtgggatcgtggtggttacactatgtcattttgtgcagagtgcagacgtgtagtgtatatagtattcttggtacctaccctgtgttgtacccagcgcaagtatattccacagtcgccgggccgtgtcattattgatgttctttctactttaccatcatca

SEQ ID NO: 444 - DNA, 1591 bp, Zea Mays
agcaggagaagagagacgacacagcagcttttttggtttccccttccctttccccgcgcggtgatcgctgggttctccgcgagcgaggcagagcactgcgcgtcctccgtgaccgcctggtgatcgctgggggttctggacgttggcgtttcatttggttggttggtggttggcagcagccgtggcgagatggacctgatgctgccggtgacggtgaaggaggagtggccgccggaagaggaggaggaggaggacgtggacgcggacgcggacgctccgcggccgatggaggggctgcacgaggtcgggccaccgccgttcctgaccaagacgttcgacctggtggccgacccggccaccgacgaggtcatctcctggggccgcgccggcaacagtttcgtggtctgggatccccacgtgttcgccgccgtgctgctccccaggttctttaagcacaacaacttctccagctttgtccgccagctgaacacctatctagatggaccaggacaagggatgaacgaagctactacagcctacgagaaagaaacaaactgcttgtttgtcctaaagataaagaagactcactcctttgatcaccactcaccaccaagcaatatactgctagtggcttcagaaagatcgacccggacagctgggagttcgcgaacgaaggattcctgaggggccagaggcatcttctccggctgatcaagcgtcgaaggccggcgccaccgccgccgtacctccaggcgtcgcagtcgcaggggtcgtgcctggaggtgggccggttcggagggctggacggagagatggagcggctgaggcgtgacaagagcatcctgctggcggaggtggtgaagctgcggcaggagcagcagagcacgcgggcgggcatgcgggccatggaggagcggctgcggcacgcggagcacaagcaggtgcagatgatggggttcctggcgcgggcggtgcagagcccagacttgttccagctgctggcacagcagcaagcccggcggagggagctggagggcgcggcgctgctctccgccgcctcccggaagcggaggcggcccatcggcgccgcgccggccaacggcggcttgcagcagcaggaggaggaccagcagcagggcgggttcgagacggcggagctcaccgacgacttttgggaggagctgctgaacgaagggatgaagggcggtgcggaggctgagacgctgccgccggagaggagacgaccggcttggtacgtcgacgcgctggcgcagaagttgagctccatgagcaataacaccacggcgaagtagagatgatcgcgttaattaatcctatacgactagtaacagtagcttaattatccctccgacaggggtcagtgaatactcttagcgatagctccattgttgtagattatagtatataggagtgggatcgtggtggttacactatgtcattttgtgcagagtgcagacgtgtagtgtatatagtattcttggtacctaccctgtgttgtacccagcgcaagtatattccacagtcgccgggccgtgtcattattgatgttctttctactttaccatcatca

SEQ ID NO: 445 - DNA, 1601 bp, Zea Mays
accgaatccaccagcccactacacatcccaaatcccccaaccctaactaatccgccgtcacccctcccggatcgccagcaggcctcatcccttccacagttccacggctacgccgccgtcgtcggctcatccctcctccccctcccgcccgcagttccaggtggtgcacccctcgaccccatcagactcgatctgtcgtttcctggctcccttaggtcccctcttcgccaccactccgccgcatgctccccaaatccgccgctctatgggtgcatcaggtctcgctgccagttccaatggagggaataaatgggcaaaggcggccaacgaggaagctacgatgacggtggtggctgtggagtcagatgagcctaggacagaatcgccgttggagcggggaacaatcatctacaacctcctcgtcacgctcccctttccctccggcctgatctcgcgcctccgccgtgcattcctcctctgccgcttcaccaccgacctggtctctagatcctccctccacatgctccaactcctggtacaagagtgcctgaggtccgctatcgacctgagctccgctcaggtcgccgctaccactgataatcggcctccagcccactgctttacttttggcgacgagtcgacgactgggcaactaccgctgcccaaggtcaggtgctcgagtatccgtcgaccccttcgctaggccattcccgttgacagcaagcatcagttcaataattccaataaggatctcaagacctacagctggggaatgttatttgacaatggtttcaagttgaccaaacagagtggatacagtcatgctcaaagttggcaagctgtgtcaacaagcaggccccatctgctactcgcttcatgggcatgcaacaaagccttggtattcagccgacgcagcttgggaaggatgcacctgcagcaggagttgcacgtagagttagtgcttaatgaaagatgatcgaggttgagtctgttgcagctgctgattaacaagagattcgagaagtagtgaagaagtgattctgtgctgaggatgattatgcagcagaaaaacttgatattgagctgagtggaagttacctgttaccaccacgttattctaagggtgcattggcactgcattggcgtactggtcataaaaatgattgactccagataataagttctgctgcttcaaattcagttctgccagctgtaggaataggaatcataaaagcatatggaggaactacgtataggctacaaagaagcataagaagcatgtttatagcagaagcaaagtgttctgatgattttgttttttcaattgtgttttctgttattggttcagtatgcacatatattgacatgatttatggcatgacatctgccatctttgttatatttatgacatcgttcttgattgatgtgtgcagacatgaatgatggatcttttttaacatcctgaccatcattatcgtattttgtatatcatttatgggttcacagatatgaaatgacaggtttcttatttttgagatctgaaccatgtgttgccttttggttgttacataataaatggtcctgtcgatgtgctttacgtt

SEQ ID NO: 446 - DNA, 1531 bp, Zea Mays
accgaatccaccagcccactacacatcccaaatcccccaaccctaactaatccgccgtcacccctcccggatcgccagcaggcctcatcccttccacagttccacggctacgccgccgtcgtcggctcatccctcctccccctcccgcccgcagttccaggtggtgcacccctcgaccccatcagactcgatctgtcgtttcctggctcccttaggtcccctcttcgccaccactccgccgcatgctccccaaatccgccgctctatgggtgcatcaggtctcgctgccagttccaatggagggaataaatgggcaaaggcggccaacgaggaagctacgatgacggtggtggctgtggagtcagatgagcctaggacagaatcgccgttggagcggggaacaatcatctacaacctcctcgtcacgctcccctttccctccggcctgatctcgcgcctccgccgtgcattcctcctctgccgcttcaccaccgacctggtctctagatcctccctccacatgctccaactcctggtacaagagtgcctgaggtccgctatcgacctgagctccgctcaggtcgccgctaccactgataatcggcctccagcccactgctttacttttggcgacgagtcgacgactgggcaactaccgctgcccaaggtcaggtgctcgagtatccgtcgaccccttcgctaggccattcccgttgacagcaagcatcagttcaataattccaataaggatctcaagacctacagctggggaatgttatttgacaatggtttcaagttgaccaaacagagtggatacagtcatgctcaaagttggcaagctgtgtcaacaagcaggccccatctgctactcgcttcatgggcatgcaacaaagccttggtattcagccgacgcagcttgggaaggatgcacctgcagcaggagttgcacgtagagttagtgcttaatgaaagatgatcgaggttgagtctgttgcagctgctgattaacaagagattcgagaagtagtgaagaagtgattctgtgctgaggatgattatgcagcagaaaaacttgatattgagctgagtggaagttacctgttaccaccacgttattctaagggtgcattgttctgccagctgtaggaataggaatcataaaagcatatggaggaactacgtataggctacaaagaagcataagaagcatgtttatagcagaagcaaagtgttctgatgattttgttttttcaattgtgttttctgttattggttcagtatgcacatatattgacatgatttatggcatgacatctgccatctttgttatatttatgacatcgttcttgattgatgtgtgcagacatgaatgatggatcttttttaacatcctgaccatcattatcgtattttgtatatcatttatgggttcacagatatgaaatgacaggtttcttatttttgagatctgaaccatgtgttgccttttggttgttacataataaatggtcctgtcgatgtgctttacgtt

SEQ ID NO: 447 - DNA, 1591 bp, Zea Mays
acacatcccaaatcccccaaccctaactaatccgccgtcacccctcccggatcgccagcaggcctcatcccttccacagttccacggctacgccgccgtcgtcggctcatccctcctccccctcccgcccgcagttccaggtggtgcacccctcgaccccatcagactcgatctgtcgtttcctggctcccttaggtcccctcttcgccaccactccgccgcatgctccccaaatccgccgctctatgggtgcatcaggtctcgctgccagttccaatggagggaataaatgggcaaaggcggccaacgaggaagctacgatgacggtggtggctgtggagtcagatgagcctaggacagaatcgccgttggagcggggaacaatcatctacaacctcctcgtcacgctcccctttccctccggcctgatctcgcgcctccgccgtgcattcctcctctgccgcttcaccaccgacctggtctctagatcctccctccacatgctccaactcctggtacaagagtgcctgaggtccgctatcgacctgagctccgctcaggtcgccgctaccactgataatcggcctccagcccactgctttacttttggcgacgagtcgacgactgggcaactaccgctgcccaagttggaggtgtccatcctgcgacctctggtttggtctgggatggagcacccatctgtatttgatagattcaactatgatcgcgcatatgctccgctttgtaaacacgtagaccaccaatcctacattccagggtttcaagttgaccaaacagagtggatacagtcatgctcaaagttggcaagctgtgtcaacaagcaggccccatctgctactcgcttcatgggcatgcaacaaagccttggtattcagccgacgcagcttgggaaggatgcacctgcagcaggagttgcacgtagagttagtgcttaatgaaagatgatcgaggttgagtctgttgcagctgctgattaacaagagattcgagaagtagtgaagaagtgattctgtgctgaggatgattatgcagcagaaaaacttgatattgagctgagtggaagttacctgttaccaccacgttattctaagggtgcattggcactgcattggcgtactggtcataaaaatgattgactccagataataagttctgctgcttcaaattcagttctgccagctgtaggaataggaatcataaaagcatatggaggaactacgtataggctacaaagaagcataagaagcatgtttatagcagaagcaaagtgttctgatgattttgttttttcaattgtgttttctgttattggttcagtatgcacatatattgacatgatttatggcatgacatctgccatctttgttatatttatgacatcgttcttgattgatgtgtgcagacatgaatgatggatcttttttaacatcctgaccatcattatcgtattttgtatatcatttatgggttcacagatatgaaatgacaggtttcttatttttgagatctgaaccatgtgttgccttttggttgttacataataaatggtcctgtcgatgtgctttacgtt

SEQ ID NO: 448 - DNA, 1464 bp, Zea Mays
cccaaatcccccaaccctaactaatccgccgtcacccctcccggatcgccagcaggcctcatcccttccacagttccacggctacgccgccgtcgtcggctcatccctcctccccctcccgcccgcagttccaggtggtgcacccctcgaccccatcagactcgatctgtcgtttcctggctcccttaggtcccctcttcgccaccactccgccgcatgctccccaaatccgccgctctatgggtgcatcaggtctcgctgccagttccaatggagggaataaatgggcaaaggcggccaacgaggaagctacgatgacggtggtggctgtggagtcagatgagcctaggacagaatcgccgttggagcggggaacaatcatctacaacctcctcgtcacgctcccctttccctccggcctgatctcgcgcctccgccgtgcattcctcctctgccgcttcaccaccgacctggtctctagatcctccctccacatgctccaactcctggtacaagagtgcctgaggtccgctatcgacctgagctccgctcaggtcgccgctaccactgataatcggcctccagcccactgctttacttttggcgacgagtcgacgactgggcaactaccgctgcccaaggtcaggtgctcgagtatccgtcgaccccttcgctaggccattcccgttgacagcaagcatcagttcaataattccaataaggatctcaagacctacagctggggaatgttatttgacaatggtttcaagttgaccaaacagagtggatacagtcatgctcaaagttggcaagctgtgtcaacaagcaggccccatctgctactcgcttcatgggcatgcaacaaagccttggtattcagccgacgcagcttgggaaggatgcacctgcagcagatgattatgcagcagaaaaacttgatattgagctgagtggaagttacctgttaccaccacgttattctaagggtgcattggcactgcattggcgtactggtcataaaaatgattgactccagataataagttctgctgcttcaaattcagttctgccagctgtaggaataggaatcataaaagcatatggaggaactacgtataggctacaaagaagcataagaagcatgtttatagcagaagcaaagtgttctgatgattttgttttttcaattgtgttttctgttattggttcagtatgcacatatattgacatgatttatggcatgacatctgccatctttgttatatttatgacatcgttcttgattgatgtgtgcagacatgaatgatggatcttttttaacatcctgaccatcattatcgtattttgtatatcatttatgggttcacagatatgaaatgacaggtttcttatttttgagatctgaaccatgtgttgccttttggttgttacataataaatggtcctgtcgatgtgctttacgtt

SEQ ID NO: 449 - DNA, 1474 bp, Zea Mays
cccaaatcccccaaccctaactaatccgccgtcacccctcccggatcgccagcaggcctcatcccttccacagttccacggctacgccgccgtcgtcggctcatccctcctccccctcccgcccgcagttccaggtggtgcacccctcgaccccatcagactcgatctgtcgtttcctggctcccttaggtcccctcttcgccaccactccgccgcatgctccccaaatccgccgctctatgggtgcatcaggtctcgctgccagttccaatggagggaataaatgggcaaaggcggccaacgaggaagctacgatgacggtggtggctgtggagtcagatgagcctaggacagaatcgccgttggagcggggaacaatcatctacaacctcctcgtcacgctcccctttccctccggcctgatctcgcgcctccgccgtgcattcctcctctgccgcttcaccaccgacctggtctctagatcctccctccacatgctccaactcctggtacaagagtgcctgaggtccgctatcgacctgagctccgctcaggtcgccgctaccactgataatcggcctccagcccactgctttacttttggcgacgagtcgacgactgggcaactaccgctgcccaagttggaggtgtccatcctgcgacctctggtttggtctgggatggagcacccatctgtatttgatagattcaactatgatcgcgcatatgctccgctttgtaaacacgtagaccaccaatcctacattccagggtttcaagttgaccaaacagagtggatacagtcatgctcaaagttggcaagctgtgtcaacaagcaggccccatctgctactcgcttcatgggcatgcaacaaagccttggtattcagccgacgcagcttgggaaggatgcacctgcagcagatgattatgcagcagaaaaacttgatattgagctgagtggaagttacctgttaccaccacgttattctaagggtgcattggcactgcattggcgtactggtcataaaaatgattgactccagataataagttctgctgcttcaaattcagttctgccagctgtaggaataggaatcataaaagcatatggaggaactacgtataggctacaaagaagcataagaagcatgtttatagcagaagcaaagtgttctgatgattttgttttttcaattgtgttttctgttattggttcagtatgcacatatattgacatgatttatggcatgacatctgccatctttgttatatttatgacatcgttcttgattgatgtgtgcagacatgaatgatggatcttttttaacatcctgaccatcattatcgtattttgtatatcatttatgggttcacagatatgaaatgacaggtttcttatttttgagatctgaaccatgtgttgccttttggttgttacataataaatggtcctgtcgatgtgctttacgtt

SEQ ID NO: 450 - DNA, 1515 bp, Zea Mays
cccaaatcccccaaccctaactaatccgccgtcacccctcccggatcgccagcaggcctcatcccttccacagttccacggctacgccgccgtcgtcggctcatccctcctccccctcccgcccgcagttccaggtggtgcacccctcgaccccatcagactcgatctgtcgtttcctggctcccttaggtcccctcttcgccaccactccgccgcatgctccccaaatccgccgctctatgggtgcatcaggtctcgctgccagttccaatggagggaataaatgggcaaaggcggccaacgaggaagctacgatgacggtggtggctgtggagtcagatgagcctaggacagaatcgccgttggagcggggaacaatcatctacaacctcctcgtcacgctcccctttccctccggcctgatctcgcgcctccgccgtgcattcctcctctgccgcttcaccaccgacctggtctctagatcctccctccacatgctccaactcctggtacaagagtgcctgaggtccgctatcgacctgagctccgctcaggtcgccgctaccactgataatcggcctccagcccactgctttacttttggcgacgagtcgacgactgggcaactaccgctgcccaagttggaggtgtccatcctgcgacctctggtttggtctgggatggagcacccatctgtatttgatagattcaactatgatcgcgcatatgctccgctttgtaaacacgtagaccaccaatcctacattccagggtttcaagttgaccaaacagagtggatacagtcatgctcaaagttggcaagctgtgtcaacaagcaggccccatctgctactcgcttcatgggcatgcaacaaagccttggtattcagccgacgcagcttgggaaggatgcacctgcagcaggagttgcacgtagagttagtgcttaatgaaagatgatcgaggttgagtctgttgcagctgctgattaacaagagattcgagaagtagtgaagaagtgattctgtgctgaggatgattatgcagcagaaaaacttgatattgagctgagtggaagttacctgttaccaccacgttattctaagggtgcattgttctgccagctgtaggaataggaatcataaaagcatatggaggaactacgtataggctacaaagaagcataagaagcatgtttatagcagaagcaaagtgttctgatgattttgttttttcaattgtgttttctgttattggttcagtatgcacatatattgacatgatttatggcatgacatctgccatctttgttatatttatgacatcgttcttgattgatgtgtgcagacatgaatgatggatcttttttaacatcctgaccatcattatcgtattttgtatatcatttatgggttcacagatatgaaatgacaggtttcttatttttgagatctgaaccatgtgttgccttttggttgttacataataaatggtcctgtcgatgtgctttacgtt

SEQ ID NO: 451 - DNA, 1497 bp, Zea Mays
cccaaatcccccaaccctaactaatccgccgtcacccctcccggatcgccagcaggcctcatcccttccacagttccacggctacgccgccgtcgtcggctcatccctcctccccctcccgcccgcagttccaggtggtgcacccctcgaccccatcagactcgatctgtcgtttcctggctcccttaggtcccctcttcgccaccactccgccgcatgctccccaaatccgccgctctatgggtgcatcaggtctcgctgccagttccaatggagggaataaatgggcaaaggcggccaacgaggaagctacgatgacggtggtggctgtggagtcagatgagcctaggacagaatcgccgttggagcggggaacaatcatctacaacctcctcgtcacgctcccctttccctccggcctgatctcgcgcctccgccgtgcattcctcctctgccgcttcaccaccgacctggtctctagatcctccctccacatgctccaactcctggtacaagagtgcctgaggtccgctatcgacctgagctccgctcaggtcgccgctaccactgataatcggcctccagcccactgctttacttttggcgacgagtcgacgactgggcaactaccgctgcccaaggtcaggtgctcgagtatccgtcgaccccttcgctaggccattcccgttgacagcaagcatcagagtggatacagtcatgctcaaagttggcaagctgtgtcaacaagcaggccccatctgctactcgcttcatgggcatgcaacaaagccttggtattcagccgacgcagcttgggaaggatgcacctgcagcaggagttgcacgtagagttagtgcttaatgaaagatgatcgaggttgagtctgttgcagctgctgattaacaagagattcgagaagtagtgaagaagtgattctgtgctgaggatgattatgcagcagaaaaacttgatattgagctgagtggaagttacctgttaccaccacgttattctaagggtgcattggcactgcattggcgtactggtcataaaaatgattgactccagataataagttctgctgcttcaaattcagttctgccagctgtaggaataggaatcataaaagcatatggaggaactacgtataggctacaaagaagcataagaagcatgtttatagcagaagcaaagtgttctgatgattttgttttttcaattgtgttttctgttattggttcagtatgcacatatattgacatgatttatggcatgacatctgccatctttgttatatttatgacatcgttcttgattgatgtgtgcagacatgaatgatggatcttttttaacatcctgaccatcattatcgtattttgtatatcatttatgggttcacagatatgaaatgacaggtttcttatttttgagatctgaaccatgtgttgccttttggttgttacataataaatggtcctgtcgatgtgctttacgtt

SEQ ID NO: 452 - DNA, 1394 bp, Zea Mays
cccaaatcccccaaccctaactaatccgccgtcacccctcccggatcgccagcaggcctcatcccttccacagttccacggctacgccgccgtcgtcggctcatccctcctccccctcccgcccgcagttccaggtggtgcacccctcgaccccatcagactcgatctgtcgtttcctggctcccttaggtcccctcttcgccaccactccgccgcatgctccccaaatccgccgctctatgggtgcatcaggtctcgctgccagttccaatggagggaataaatgggcaaaggcggccaacgaggaagctacgatgacggtggtggctgtggagtcagatgagcctaggacagaatcgccgttggagcggggaacaatcatctacaacctcctcgtcacgctcccctttccctccggcctgatctcgcgcctccgccgtgcattcctcctctgccgcttcaccaccgacctggtctctagatcctccctccacatgctccaactcctggtacaagagtgcctgaggtccgctatcgacctgagctccgctcaggtcgccgctaccactgataatcggcctccagcccactgctttacttttggcgacgagtcgacgactgggcaactaccgctgcccaaggtcaggtgctcgagtatccgtcgaccccttcgctaggccattcccgttgacagcaagcatcagttcaataattccaataaggatctcaagacctacagctggggaatgttatttgacaatggtttcaagttgaccaaacagagtggatacagtcatgctcaaagttggcaagctgtgtcaacaagcaggccccatctgctactcgcttcatgggcatgcaacaaagccttggtattcagccgacgcagcttgggaaggatgcacctgcagcagatgattatgcagcagaaaaacttgatattgagctgagtggaagttacctgttaccaccacgttattctaagggtgcattgttctgccagctgtaggaataggaatcataaaagcatatggaggaactacgtataggctacaaagaagcataagaagcatgtttatagcagaagcaaagtgttctgatgattttgttttttcaattgtgttttctgttattggttcagtatgcacatatattgacatgatttatggcatgacatctgccatctttgttatatttatgacatcgttcttgattgatgtgtgcagacatgaatgatggatcttttttaacatcctgaccatcattatcgtattttgtatatcatttatgggttcacagatatgaaatgacaggtttcttatttttgagatctgaaccatgtgttgccttttggttgttacataataaatggtcctgtcgatgtgctttacgtt

SEQ ID NO: 453 - DNA, 920 bp, Zea Mays
gctatttgtttggggatcataaacattaagttatatatataaagttggacaaacttaaaatatgtgatctgcacgcaagccaatgatgattagatattacatctggaattaccttcattacatctggaattaccttcagattcgtttatgacgaggcatatgcattatacatctcctgttttggttatgtactctctcaatttaatctgattatgtggacgtcgttgtagttcaataattccaataaggatctcaagacctacagctggggaatgttatttgacaatggtttcaagttgaccaaacagagtggatacagtcatgctcaaagttggcaagctgtgtcaacaagcaggccccatctgctactcgcttcatgggcatgcaacaaagccttggtattcagccgacgcagcttgggaaggatgcacctgcagcagatgattatgcagcagaaaaacttgatattgagctgagtggaagttacctgttaccaccacgttattctaagggtgcattgttctgccagctgtaggaataggaatcataaaagcatatggaggaactacgtataggctacaaagaagcataagaagcatgtttatagcagaagcaaagtgttctgatgattttgttttttcaattgtgttttctgttattggttcagtatgcacatatattgacatgatttatggcatgacatctgccatctttgttatatttatgacatcgttcttgattgatgtgtgcagacatgaatgatggatcttttttaacatcctgaccatcattatcgtattttgtatatcatttatgggttcacagatatgaaatgacaggtttcttatttttgagatctgaaccatgtgttgccttttggttgttacataataaatggtcctgtcgatgtgctttacgtt

SEQ ID NO: 454 - DNA, 1101 bp, Zea Mays
gctatttgtttggggatcataaacattaagttatatatataaagttggacaaacttaaaatatgtgatctgcacgcaagccaatgatgattagatattacatctggaattaccttcattacatctggaattaccttcagattcgtttatgacgaggcatatgcattatacatctcctgttttggttatgtactctctcaatttaatctgattatgtggacgtcgttgtagttcaataattccaataaggatctcaagacctacagctggggaatgttatttgacaatggtttcaagttgaccaaacagagtggatacagtcatgctcaaagttggcaagctgtgtcaacaagcaggccccatctgctactcgcttcatgggcatgcaacaaagccttggtattcagccgacgcagcttgggaaggatgcacctgcagcaggagttgcacgtagagttagtgcttaatgaaagatgatcgaggttgagtctgttgcagctgctgattaacaagagattcgagaagtagtgaagaagtgattctgtgctgaggatgattatgcagcagaaaaacttgatattgagctgagtggaagttacctgttaccaccacgttattctaagggtgcattggcactgcattggcgtactggtcataaaaatgattgactccagataataagttctgctgcttcaaattcagttctgccagctgtaggaataggaatcataaaagcatatggaggaactacgtataggctacaaagaagcataagaagcatgtttatagcagaagcaaagtgttctgatgattttgttttttcaattgtgttttctgttattggttcagtatgcacatatattgacatgatttatggcatgacatctgccatctttgttatatttatgacatcgttcttgattgatgtgtgcagacatgaatgatggatcttttttaacatcctgaccatcattatcgtattttgtatatcatttatgggttcacagatatgaaatgacaggtttcttatttttgagatctgaaccatgtgttgccttttggttgttacataataaatggtcctgtcgatgtgctttacgtt

SEQ ID NO: 455 - DNA, 692 bp, Zea Mays
tgcagctgctgattaacaagagattcgagaagtagtgaagaagtgattctgtgctgaggatgattatgcagcagaaaaacttgatattgagctgagtggaagttacctgttaccaccacgttattctaagggtgcattggcactgcattggcgtactggtcataaaaatgattgactccagataataagttctgctgcttcaaattcagttctgccagctgtaggaataggtgattatctttttttatatggctgacaatgatagtatactcattatcaaagaatatagtttttgaattgtgttttctgctaggaatcataaaagcatatggaggaactacgtataggctacaaagaagcataagaagcatgtttatagcagaagcaaagtgttctgatgattttgttttttcaattgtgttttctgttattggttcagtatgcacatatattgacatgatttatggcatgacatctgccatctttgttatatttatgacatcgttcttgattgatgtgtgcagacatgaatgatggatcttttttaacatcctgaccatcattatcgtattttgtatatcatttatgggttcacagatatgaaatgacaggtttcttatttttgagatctgaaccatgtgttgccttttggttgttacataataaatggtcctgtcgatgtgctttacgtt

SEQ ID NO: 456 - DNA, 1904 bp, Zea Mays
ctcaatcgcacgcgcagcgcttctctctctcttctccctctcactctctctctctctctctggtcgagatagtagcgtgtgtttgtgtttgtgcagcacaagaagatgaagctgccagcatgatctgaaaccatacgtgttctttgattcccatctgaagaaagagttggctttcatggagaaccgacggtcagatcatgtggcagtttcattttctcgtggcagcacaccgtcgccaattcgccatgcatgcttgtttggaaaccctagctaaatcgatggagtcagccaagcagccagctttcttctttgcagcggcgccgtacgtcccagggaaaatacaaggtggtgttttcatcaggaagaaattagcccttgaatccgcagatatatagatgatcatcagatctgatgcgtgctaatagctcaaggcaatatcgttctttgttagttccgtttctgcagatcgaattgtgtctatgatagtctacttttttgtaattctttaggacttgttcggttatttctataatacataaattggatgagattggaaaacatttagaagaactttgacttgggatttaaacatacccaatccaactcaattcacatggattgagagctaaccgaataagcccttagcaggtaacatgcactacggttcggatctatgcatgacatcgatcttaatttcattatatatatatatatatatatatatatatatatatatatatatatatatatatatatatatatcttcacatggcaaaacttaattcagtaacctgattgctagatcaacatgtaggtcacgagattaaatgcatgcctctccatatatataaatgtgtactgcagcatttagacacgtatctattccaaagtagaagataacacgctaaccagtgttaacaaaatcagacatacgatccagacaacgccccgcgcgccccaaacaactgcacttgagttgaattctgatctagttcaaattttgccttgaaagcttctgatgttctgatctctccaaccatgaataaaaggaccaaataagtaaaatattcacatgataaatgtctcttaggctaatcatcagcatgctgcacagttacgtactttgcaagtgcttatatgctaccccgtcttcaaataactatagttttagatttcgtgcagaccaaactgttttaagttaaactagatttatgcaaacatcagcaacatccatatttttaatgtaagaatttattgtaaacatacattattcaatatttaatctaataaagtactggttatcagcaacatatatagatattgatttttttatatatatgatcaaactttaaagtatttgactttttaggaaatgaaaatggaacttacttttattttttgggacagaggaaaaagtacaagtgaggttcaatcaatcgtgggttgagcccctaaacatggcagcacttgatgttccatcggaaaaggacacatgcattcaccggaagtacaaatcgacatactatcatcttggggacaccactgtcctaagacaagattccaagacatcgttttcatgaacacaacgaggagagcacggcctccgcttggcccgactttcacgggctcctgctccggcacttgtcttacaagattaacacagtctaagattaatttgatcatattgtgtaatacataaaagaatacagatttactagcatataactaaactgatgctagtacttcataaatattgattaaaccatgacaataaacacacagaaaataaataaacatcagaactatccaaaagatctgcatcacaataatcagaaaatgcagatctacttacaatgcttcccacgactggagttgaagaacacgagcggagaggcgtactttct

SEQ ID NO: 457 - DNA, 2776 bp, Zea Mays
gcaaaagctcggaatggtaaaagatgttgttctattcacacagcggtgtgaaattcaactgaacagcgagagaggatttctcctccattgatctactttattttactgatcaccatgttagactactgtatttgtatttatagtatgtctaatattggtagttagtccttgattgtaggcccttgattgtaggcatgtagggctgtgcgttgccatgtgtgccacgacgcacggcctatgtatactgtacatctccatggaatacaatcaagcaattcctaacaattcacactttcatggtatctcacgcggttccgatccgcacgcttccgcaacccacgaccgcgctgtcgctgatccgatcgtcgctcttgtcgagctcgtcacccagagcgccgccgatcccatcgccgcgttgtccgtgaagatcgcctgtcccgttgctggatcagccgggtgcggccgctggtctccccaaatctgctcgcgccgccgatccgccagcaggcgcggcgcttcttctcctacaggctcccgccaggcgagttggatctgctcgcgccgccgatcctccagcaggcgcggcgccttttcttctcctgccagccgaggtcgcgcggctcttctccagctaggcgcgctctcgatggcggccgacgatgcagcagccgtccaggccgcggaggaccgccgcctcgcagttgaggccgaagcccgccgtgctgaagacgcccgccgcgccgaagaaggccgcctccgtgctgccgctttggacgagtttgagcgcgcccatgaggccctctgggcgcaagccactgccgtcgtcaacgtcaaggcgctcatccctgtcatcctcgaccaggcaacgaacacctacaccaagtggcgcggcatgttcatcaccgtcctcggcaaatacgccctgactcgtcacgtccttgaggatgaagccttcccatcacgcccggcgtgggttcaagccgattgctgtgtcttgacatggatctacagcaccatctccggcgacctgcaacaatctctgatgatgcggcagggccttgctcgcggggcgtggtgctacctcgaggatgagttccttggccaaagggaatcccgggcgcttctacttgagacaaaattccgcaacttccgccaagagtccttgagcatcactgactactgccgccagcttgagtcaatggcggcatcccttgccggtttcggcgatcccatcggcgataggcagatggtgctcacgctccttcgtggcctcggcggcaagttccgtcacatggtgtccatcctcaagatgcaccagccgttccccacgttcgcagaggctcgtgcgcacctgctgttggaggagctggaaatcgacgcacgacctccatcaccgccatcggcacttgttgctgcagcgccgcggcatgcgactccgggggccccagtacctccacgtccaggggcgcctcctccagcacgcccccccggcacctaacggccaacgcaccggccgtcgtcgcggtcgcggtggtcgcaatagccaccagcagggccaatcagtgccccatggtggcgcacttcctgctggacagggaggtgcaacccctgccatgcatccgtccttcgcgcatccatgggctggcactgtccggctgtggccatatgaccagtccgggcgcccaccaccgccgccagcgttcaacgcccttccacaatacaacagcttcggcagcacacccagtgcctatggaggcttctacggtgctcctccccctccgtatggcatgccctacgggggagctgcaccccctggtttccaggcgcccgcaccagcataccaagcgacgccctggaaccccactcacggtggtgcatggcatcaggacgcccttgcacactccttcaacactatgacgctcaatccaccgaacgctacttccgagtggtatgccgactccggtgcaggatcacacatgacctcggacgctgggatcaaattgctagggacttagtgatatgaccacaccatcaagcaacacgttacaacctccaagtcatactacatcaactcaagtacaaccaacatcatcaccgacccaagtctttgctggaccaattacacgtagccgagctaagaagctacagcaagaggtgcacgcgctactttatgaatttcgattaaacactaatgagaattttatgctacctaagtcgtgtatgttgatattacttaggttcaccaaagaggaaggacaaaacatatcaaaggcgaatcaccaagaagagctatgtccgagtcagtccagcgctacagaaccgtctagaagaaacagtcatatcttttgattcccaaaagctatgaaggtccataagtacttttcggaaagctcttgaagtctagtttccaatgcttctaaagccgacttaaccacatctaccagaaaggcagccgacctactttagtgctgactggtcagaaggtcaacagtctgcttgatgaccaagttttcgtattaaactgcaacgttctacgaagtttcattaagcatgatatatatggtgagaaagcttataaagttagatttccaatgcaaccagtcccacatcatttgaaaattcctagaagaagttattgccaaaatactgaaggctgcgcagaagtcaaacagccacacggaaatcagctctgcagatcttccgaagaggctccttcacattagctcgtgaaaatacttttgttttgtgtttatacctcgctaaggctggttgttac

SEQ ID NO: 458 - DNA, 2526 bp, Zea Mays
gaccacaccgcggtggacacgtaggataacgttcgcgttcccgtccggcacgtcaccggccgcgcctcctttaaaacccggtccccctcctcgtgttcttcttcccaacagatcaagcctagcaggaaataaaaatctgtaagagagaacaaaaaaaaaggagtcaatcgccggcgacgggtacgggtgtgtacgcctgaggcgatcggcagagaagaccgagaccgacggctccagtgccgctgtgccactgccagtctgccacagccagccgcctagcttgatccgccttttgtgctgtgcggatatgagggccgcgcagatcgatccgtcccccgcggcgccgcccaagtcgcggctgaagcgcctcttcgagcgccagctgctgcgggtctcgccggccgagcgcctcccgtcggcgcctcccggtggcggggacaaggatgagctgccggagcctagctcgctgtgcctggacggcatggtgcggagcttcctggaggacggcggcggcggcggcggagccgagcgggcggcagcggccgcgcggtgctgcaactgcttccacgccggcgacacctccgacgacgaggacggcccggctgccgccgacgccgcggccgctgacatcgcggagacaatcaaggggctcgtccactgcgccagcctccgggagcgcaacctgctggccgacgtgtcgacgctggtggagcgccaccgcgcgtcgggggcgcgcaagcgcgacctgctccgcctgctggcggggtccctccgcgcggcgggccacgacgccgcggtctgcctctcccgctgggacaggtcgccgtcccaccccgccggggaccacgcgtacctggacgtgctcctcccggccgcgtcggagcgcgccgggcgcgagcgcgtgctggtggacgtcgacttccggtccgccttcgaggtggcgcggcccaccaaggcgtaccgcgccgtgctgcagcgtctgccgccggtcttcgtcgggcgggacgaccgcctgcgcctcctcgtggcggccgccgccgacgcggcccgcgccagcctcaagaagcgcggcctccacctgccgccgtggcgcaagcccgagtacatgcgcgccaggtggctttccccctacgaccgcgaggctccgcagcccgaggccagcaccggtgagctcgccggcgacggcgagggaggtgggcccactgcttaatcaccgaggtcgtttttggaatttcctttttgctcttgcccttggggaatttgccgtgtggtccttgtgtgcgtacagggactagacgcgaatgtcctgctctgtttgtttttttcccttttcacccttttgatgggggtgtctgtttcgccgcgccggaagtcgtagtactgtagtagtagtagctagtgctggtaatgatggagaagagaaaggacacaccaaaaaaaattgcagctttattagattgatgatgaggtaaaagaaaaaggagattccggacagagacccgtcgttgttccaggcagcggaacctgacagcgaagaaagaaccacggagatgcatgatttgttgctcgcgatcctgtatgatctgtcttcgttctggagaagccgctcccaccctcgatttggatttgggatggtgtgtcggggaaagaggtcgacgcatcggaatcgcagtagctcgcttgcgggatggaaacgccattacgaagttgtttatgctgagtttgttgtgctgcgggttaatctcaggtgggataaagtggggatctggtcagcaaagtgcaaggggtgggatagcaagcgggcgggctatcctgtcggattcaacgagatcgttttgcccccgctactatgaaaattccccgctcgcgggtatcaattcgttttgcgtgcggcggctgctggagaggaagacgtgtgacggtgtgtgagttagggttagaaaacattctacatgtttgcatttggctggaaacctggaaccaaatttttttttttgctaggccattaggctaactctaaccatttttctcttccaaatttattcctttaaaaatctatcacacaaagattcttccaatatatttcacctaccgtgcgatcgttcctcttacacagctctcctctaatcttagcttattcgttgcgactttaatctaaccgtggctgcaacttatacagtattttgtctatatgaaatatagctattgcggctgaatcatagggtttagggttttagacaattaaacttaaaaatgtttaatttgcaattaaaaaagaactagggttatatatatattcgggattcaagtggttagggttatatcatgcagtcttcaaactgttccttaggcgactcctattttcatcacctaacaaacgacgaagggcttatttctcttgttgcctcgcttgccagttgtcatagttttgcacatctaaagttatataggattaattgagttagacgcgtgtttggtttatggtcatagttgtggcacggtttttcttctgttgtgtaggtcaca

SEQ ID NO: 459 - DNA, 1121 bp, Zea Mays
gccgatagtaattgtggttgggtggcggtttgttagggtgcacccggagacgtacgcgctggtggtgagcacggagaacatcacgctcaacgcctacctgggcaaccaccgcccgatgctggtgaccaacacgctgttccggatgggcggcgccgcggtgctcctctccaaccgccgcgccgaccgggcccgcgccaggtaccggctggtgcacacggtgcggacgcaccggggcggcgccagcgacgagagctacgcgtgcgtcacgcaggaggaggacgccgagggcaacgtcggcgtctcgctctccaggggcctcatgtccgtggccggcgacgcgctgcgctccaacatcacggcgctgggcccgctcgtcctcccgctgtcggagcagctgcgcttcctggccgccgcgctgctccgccgcgtcgccgcggtcaagccctacgtgccggacttcaagctcgcgctggagcacttctgcatccacgccggcggccgcggcgtgctggacgagctggagcgcagcctcggcctcagcgcctggcacatggagccgtcgaggatgacgctctaccgcttcggcaacacctccagcagctcgctctggtacgagctcgcctactgcgaggccaagggccggatcaagagaggggaccgcgtctggcagatcgcctttgggtcgggcttcaagtgcaacagcgccgtctggaaggcgctacggacggtggacgacgccggccgccgggacaccaacccctgggccgacgacatccacgacctgccggtgcacgtgcccaaggtgtcgcccttcgcttcttccgaccaggcgccgcccaccaacgcccagcatgcctagctatagccaacgttgcccgtgctacgccaatcttgcttctgctgctactacctacgtatactgtatgccccaagcaaagaaccggagcatgtgcctgcacttctgcttattggccgccattgttatcatcattgttgttactaattatacagggcattattgctcagtttgtactgctacgaattacaattactagtagtgtgtaaatcgcaatggactgtctgaattagaattataataataattgttttttgttgaaaat

SEQ ID NO: 460 - DNA, 3233 bp, Zea Mays
tgtaaacccagcccacgaccacgagcaaaatgctttgcttgtttatcttcatcttcctcctcagtccctcacccggcacgaatttctctctctcccagcaatggcgggctggccgccgccgccctaggcgtgctagcctactgtatggtgcagaatataggtggcagggctcctttgctggcttcgggcgacgcccagtatttgctccgcgcctgctcctgctcctgctccagccaggtctgcccatcagccctcatcaaacccggctcctaccccgtcccgcgggggcctggctgccttcaccaccgaagccgaagcggtagccgcgcctcctaggatccgccacctgctagcggtgaaagagacccggcggtccgagctcctcgccaccgccagcacgtcgtgtcgggcgtgaacctgcgccgacaaccgggtggataacagcagggtgacatgctgaccccgtgcgattgctttctccatgtccccgcccatccacggccgagtcttaaagctccggcgccctggagagacaatgttctcagcttccagataaacacagtctctgcgccagataggactgttgaaatttgcccagatttggtagttccatgcacggtttccaaacgggctgtcagagggaggaagaagaaaggcaactgggtccattacggtgggttgcttccggcaatgctggagacactagaggatgttcgggatgttggggaagcgctctgggcgtggaaggacaccctgagcaacagggagaagactatcatcctcaaggagcagaaagattggcgacgggcagtcgaaatctttgactggtttcgcagggagcaaggccatgagcttaatgtgattcactacaatgtcgtgctcaatacagttgggaaggcaaggaggtgggacctcgttcttaggctgtggtatgagatgcattcctttggcgtggctccggacaactcaacatatggtacgctgatcaatgtctgttgtcaaggcggaagagaatggacggctttgctttggcttggggacatgtgcaagcgtggtctgatgcctgatgaggtcactatgagtattgtgatgcaggcacataagaaggctggagagtatgaaacagctgagattttctttgaaaggtggtcctcagattcaatcagaaggatggagggacgttctcactacaacctatatacttacaacaccttgattgatacttatggaaaggctggtcatcttgagaaagtatcagatacattcaaccaaatgttgagcgaaggtgttgcaccaagcgttgttacatttaactcaatgattcatgcttggggtaagcaccaccgaatggagaaagttgcttctttggttcgaatgatggaggaattccagtgctttcctgacaccaggacttacaatatactgatcgcactttacagagaaagcgatgatattgatattgcagagtactactactggaagatgaaaacagaaaacttggtaccagatgttgtgagctgccgcacgctcttatatggatactctatcaggggcatggtcactaaagcggaagcccttctgaaggaaatggatgagaggggcttcatggtagatgaatacacacaatcagctttgacaaggatgtatgtaaatgttgggatgcttgaacaagcttggcgttggtttgacaggttccaccaccatatgaattctgaatgcttttctgcaaatattgatgcttttggagagaaaggatacatagttcttgcagagaaggcttttgtatgttgcctaaagaagaagatgatcagtgtttctgcatgcaatgttatgatcaaagcatatgggttggtagggatgcttgatgaggcatgcgagatagctaatggcatggagaggtatgacattttgcctgattatgtgacatacacttctctcattcaacttctgtcaactgctaaactgccaaagaaggctatttactacttagaaaaaatgaaagttgtgaaattgctgtcagattgtatcccatactctgtggtaattagtagctttgctaagaatggtgatctacgaatgtccgaatacctatttagagaaatgatcatgtcaggggtccgtcctgatatttttgtctactctatcttaattgatgcatacgctgaagttggaaatgtccaacaagcttcagcatattttggtttaatgaaaaaggatggtttatatgagaatgttacaatctacaattctttgataaagctctacacaaaagtagggtatgtgccagaggcccgaggagcatataagttactcaaatcattggataccaatgccatcctttatgcatctaattgcatgattgatctctatagtgatcattgtatggtgaaggaagcatgtgaggtttttgacagtttgaaagttaggggaattgccaatgaattctcacatgcaatgatggtgtgtatgtacaagaaagttggtcgctatgatgtggctcacagggtttgcaaggaaatgcaagctttaggacttctaactcagttactaagctacaattctgtaatccaaatgtatgtgtctggtggaagaacggaggaggctcttaaaatattcaagaagatgttggcatcgaacacaccaccaaatgatgcaacattccaggcactaaaggttattctagtaagaagtggagtcacaaagaatgagacaagaaagttagaattgttaagaagaaataacagtcatgattgcttgcatcagtggtacagggcaatatcttcagctgtaagatcaaatgcaaattcttttcaaacataatggtgcctggaatgtttgaaaagaaacataatggcaccaccattccaggcactacagggttattgatcgatctgctacaagggcacatccttttgacattaataattgtaggagtagaaaaggaagtacacaaaaaatggggtgaaccatctttgagaaaaagaatgttgacagttgattggctgtctggctgatgcacggtgaattcataggaatcattttcacatgggtgtggatcctgctgaaatcttctgcagtctacactaggaggcgcagggccagggacgtacgtcgagcagaggaacgtgcggccaggggggacgcgcgcacagctggctcgagctgatcgagtagataagattagcacagcgtatgaggaggccggttgccgcacccaaaatgtgacggttcac

SEQ ID NO: 461 - DNA, 4403 bp, Zea Mays
gtatcacgcagttctcagtttcgtctcggcactgctctgcctcttcccttgccttgccctgcccttttcccccttctcccccgcgggcgcggggcgggcctgcggccgccttcggggctagggtttcgtgctcgcctcgcccagtcggtatcttgcgcgtcgtcgtccgggatcgatccgagcgcgccccctaccgctccgtgccccgtttttccggcccgctcggctcgatcgtgctctccccgacggcatcggtttgaagggtgaggccatggggagtggagcgaaagctggtgatggtagggaatggcaacttgaggccccggaggaattccttgtacataccgctctctacttggtcttggagaagataacctgagaccccgctcaggtgaaagccccaacgcagctgacccctcgcaagaggagttactcgtctgcacgtgcccatcaactactcctgcaactattctccacactaacactgatgagctcatcccggtggttctccatcaagttgaggtctagtgatagctaactatatagtacgctactaccacccttggtttctcatttcttcaagcttgacagcgcgctttattttgtttgtggtcgacccctaaagtgagctagtgttgcgcgctcaactcaagatggaccttcaaagcgtcgtgtcgtgtgttttaggcgtgagtgtattgtagactggggattggtggactggatgcttatatatattattattatactaaatttgcaatgcaattgtaatcctgatcctgaataatcgcgtcacccgtgttatacagttctgacgtggttatcttaaaagggcaaggctcaatttgtgccagtgccacatgatctccgtctccgcgggtggctgcaacgtgcgatttgccttctgctgtaggaaaatgaaggcatgccaacagcgcagataagacaggctccagattacgatgcactgttcgtttctggccggaatatccgaaaagaccagcgtgccgagagtacagggacatacaagagtcggtacaagagagtccacagccaccccatccggcgccctcatcctgttttgcttgcccgcatccccgtcagtcattttggtgaaaaccgaaaagcgcctcccctcctgctctgctcctgcctctctcgtcactcgtcattgcggccgggcactgggccactggcatcgtaacaactgccgatacgcccgagacagcgcgggcggagccagcgagagggaaggccatgaggtcgcagctcaacgcgtccttctcgccgccgccctcgctccggcgagctctcccctctgccacgccccgcgccctcaggttccacgcgttcccgtggcggttccgcgctcctcagcaccacggccgcggcgctggagctcgctgcgctaccaatctgcccgcgcccggcagccatggagtcggagtgctcgcctccgagaggagggccgacgatggcgacactaccgtgaaaaatgcagatgcgcctagcacttcaacggcgacgcagggaaacctcaacatggctgccattgttagcatagcattctgctttctacacagaattgtttctggacggatgcagtcgatgatgaatttgttcccttggatgtcaaacggcattgcaagcttgccatttgcttgcatatctgatcctaccagaaaacccatgcctcttaagctagatttgactcttccaccactgcctgatttcggatggaatttttcgcgactgtactatcggttcaattctcagcttgatcggaacattgccttgtctatcattaccttgctcatcacttgcttttcatttgtcattgttggaggattactgtttcataagttcaggaagcaacaacaatccctggaggactgcttttgggaagcttgggcatgtctatgttcatcatctacccatctaaggcaaaagacacgtgttgagcgtgtcattgggttctttcttgctatctggggtatattattctattctcgattattaagtgcaatgacagaacaatttagaaaccagatgcataaagtaagggaaggggcacaggtgcaggttattgaggatgatcatatcattatttgtggagtcaatagtcatctgatgtctatattgaaccaattgaataagtaccatgaatcatcaattcgcttaggtttagctacagcaaggaagcagaaaatccttcttctctccgatcttccaaggaagcagattgataaacttgcagatagcttggccaaagatttaaaccatattgatgtattcaccaagagttgtagtcttagcatgtcaacgtcatttgagagagcagcagcacacaaagcaaaatctataattatcttgccagcacagcatgaacgatatgaagtggatacagatgcatttgtctctctattggctctacaaccctgtaaacaaattgcacctgttcctatcattgtcgaggcttccaatgcaaccacttgtgaacttctgaaatcaatcactggcttaaatgtgcaacctgtggagatggttgcttctaagttatttgtgcagtgctctaggcaaaaggaccttctgaaaatctacaagcacttgcttaatcagcacaaaaatgttttcaaccttttcaggcggcctgaattagagggcatgaagtatatggatgtgagacgtaaaatccatgatgcagtcgtttgtggtatcttccggtctggaaaaattcattttcacccaagcgaggaagaactactgaaagaaacagacaaattgcttcttattgctcctgttcgtgggatgaaaagaccacaatatagagcattaagtgtacggaaagaaacacaaacattgagtcgtaactcagagccaagagagggtcaaggatcatttaatatggctactaccatggataatgaaacacggctaaataacattgtaaagcgccccttgaaatctctttctaagagcagtgattatatgcttggacccaaggaatgtgtacttattgttggttggcggccaaaagttaccgaaatgatacgggagtacgataattaccttggacctggtagtacagtggaaatcttgtcggaaacccctattaaagagaggagcagtatcatcaacccccttttgcagagccagcttaaaaatgttaaagttactcaccgggtggggtgtcctttgaactacgatactctgaaggaaacaataattaacgtacgagaatctgccaagtcagataaagaggttccactgtcaatagttgtgatatctgacagagactggtttgttggagatgctgcacaggctgataaacagttggcatacacccttcttcttgctgaaaacatttgccagaaacatggcgttatggttgagaatcttgtatcagaaatcgttgacatgggactaggaaaacaaatatctaaaataagaccatccctttcatttattggagcagaggaaataatgagtcgtgtgacagcacaagttgcggaaagtagtgagctgaatgaagtatggaaggatatcctgaacgctgaaggcgatgagatctatattaaggaaattgggctgtacatgaaggaaggagagaaaatatcattcttggagctctctgaaagagcagttttacgccgtgaagttgcgattggttacatcaaggacggcaagcagcatattaatcctatcaacaaatcggagccgctgtcccttgaaatgaatgattcgctcattgtgatatcggagtttgaaggtgaacaaccaattatgatgggcggagaaacttcaggatgaaattttcagctttatatctcttcacagaaactctaacaactcttgctaccatgaagagatgacatataacctgtttataatccttttctttttgtacaaagggaaagcaaaatatagtttaaaggccacaaatcaagttttgttcctcccatagccgtagaacttctttgatgcaaatattttactgcacagtttaaccgcagaatcttttctatttatctgtaaacatagtgaataacacaggcaacttgtatggtacagatgtctgaataaaggaaggatgaaggaaaattgattgactatgttccttgttgtttccttctgactaatgaatacaatgtttccatttttttagtcctgagctagacaaaatcagctaggtatggccttgctgttctctttgggagataaattcgtcgcctctagcatttggcacaagaaaagtttgttttacactttgcttcattaaccaagccactgcttcagccttttgggatctaagaggtctgttaaatattcttcttctcttgcttgtccatttcttttacctacaggctgcatctccgcatatatacatgccatcatgagatgct

SEQ ID NO: 462 - DNA, 5646 bp, Zea Mays
gtatcacgcagttctcagtttcgtctcggcactgctctgcctcttcccttgccttgccctgcccttttcccccttctcccccgcgggcgcggggcgggcctgcggccgccttcggggctagggtttcgtgctcgcctcgcccagtcggtatcttgcgcgtcgtcgtccgggatcgatccgagcgcgccccctaccgctccgtgccccgtttttccggcccgctcggctcgatcgtgctctccccgacggcatcggtttgaagggtgaggccatggggagtggagcgaaagctggtgatggtagggaatggcaacttgaggccccggaggaattccttgtacataccgctctctacttggtcttggagaagataacctgagaccccgctcaggtgaaagccccaacgcagctgacccctcgcaagaggagttactcgtctgcacgtgcccatcaactactcctgcaactattctccacactaacactgatgagctcatcccggtggttctccatcaagttgaggtctagtgatagctaactatatagtacgctactaccacccttggtttctcatttcttcaagcttgacagcgcgctttattttgtttgtggtcgacccctaaagtgagctagtgttgcgcgctcaactcaagatggaccttcaaagcgtcgtgtcgtgtgttttaggcgtgagtgtattgtagactggggattggtggactggatgcttatatatattattattatactaaatttgcaatgcaattgtaatcctgatcctgaataatcgcgtcacccgtgttatacagttctgacgtggttatcttaaaagggcaaggctcaatttgtgccagtgccacatgatctccgtctccgcgggtggctgcaacgtgcgatttgccttctgctgtaggaaaatgaaggcatgccaacagcgcagataagacaggctccagattacgatgcactgttcgtttctggccggaatatccgaaaagaccagcgtgccgagagtacagggacatacaagagtcggtacaagagagtccacagccaccccatccggcgccctcatcctgttttgcttgcccgcatccccgtcagtcattttggtgaaaaccgaaaagcgcctcccctcctgctctgctcctgcctctctcgtcactcgtcattgcggccgggcactgggccactggcatcgtaacaactgccgatacgcccgagacagcgcgggcggagccagcgagagggaaggccatgaggtcgcagctcaacgcgtccttctcgccgccgccctcgctccggcgagctctcccctctgccacgccccgcgccctcaggtacggcgagcgcaccgcttcgatcggctccgcgtttctgctccgcagagcgacggaggctggcaggctgctgaacacagctctccctggttccaggttccacgcgttcccgtggcggttccgcgctcctcagcaccacggccgcggcgctggagctcgctgcgctaccaatctgcccgcgcccggcagccatggagtcggagtgctcgcctccgagaggagggccgacgatggcgacactaccgtgaaaaatgcagatgcgcctagcacttcaacggcgacgcagggaaacctcaacatggctgccattgttagcatagcattctgctttctacacagaattgtttctggacggatgcagtcgatgatgaatttgttcccttggatgtcaaacggcattgcaagcttgccatttgcttgcatatctgatcctaccagaaaacccatgcctcttaagctagatttgactcttccaccactgcctgatttcggatggaatttttcgcgactgtactatcggttcaattctcagcttgatcggaacattgccttgtctatcattaccttgctcatcacttgcttttcatttgtcattgttggaggattactgtttcataagttcaggaagcaacaacaatccctggaggactgcttttgggaagcttgggcatgtctatgttcatcatctacccatctaaggcaaaagacacgtgttgagcgtgtcattgggttctttcttgctatctggggtatattattctattctcgattattaagtgcaatgacagaacaatttagaaaccagatgcataaagtaagggaaggggcacaggtgcaggttattgaggatgatcatatcattatttgtggagtcaatagtcatctgatgtctatattgaaccaattgaataagtaccatgaatcatcaattcgcttaggtttagctacagcaaggaagcagaaaatccttcttctctccgatcttccaaggaagcagattgataaacttgcagatagcttggccaaagatttaaaccatattgatgtattcaccaagagttgtagtcttagcatgtcaacgtcatttgagagagcagcagcacacaaagcaaaatctataattatcttgccagcacagcatgaacgatatgaagtggatacagatgcatttgtctctctattggctctacaaccctgtaaacaaattgcacctgttcctatcattgtcgaggcttccaatgcaaccacttgtgaacttctgaaatcaatcactggcttaaatgtgcaacctgtggagatggttgcttctaagttatttgtgcagtgctctaggcaaaaggaccttctgaaaatctacaagcacttgcttaatcagcacagtaatgttcttattttctgccatgatatttatgaaaaaacaatttctatattggtgcatttccgagcaaaactgtgttacccaggtctttcacgcttgaatttttttgccatcctttagttcatgatttctactgcaatcacctaaaaatgaccatactcatacataaaagttgaatgtacttagccgtgcattatatgacattgtcttgctcttgccagatttgttgccagttttattacatctatatgccaaacatgacctactttatcattcttcagaacttctgaatcagcattcactaatatagtacaaatgtaccatagaacatatttctacgtatgcaaattgttctgatattcccatgtttctgtacttttgtcattctacatttctgctttgctggcgttgttaaatttcatcagcagcactgtgattactttagtctttaggcaggcccgggcgggggcatgtgcgaccggtgcacaagaacagggccccctccctccaatggcccctaaaataatagtcaacgatagtttaatcaatacaaattttagtaatgattagatggtctagctaagtcagctcgacaagaataaaacatagtgtttgtcgtaacaaccgagtaccaatctctcatgcaactcattttggctatatggcgaagtgcagctagcacatactggcataacatccaagctagcacatactggcataacattcaaacgttaagatcactcgttaccgttattatgccatttcctacattaataattcaatcactgttaataaatgagattaatctatatcatctattcttaacaaagaaaaaaagaaaaaaaatcgatacagggccttgaattatgtcggcccggccgtgactttaggttctagatatagaggtagctatgctactttgtttgttacatgcgttgttttgtcctgcagaaaatgttttcaaccttttcaggcggcctgaattagagggcatgaagtatatggatgtgagacgtaaaatccatgatgcagtcgtttgtggtatcttccggtctggaaaaattcattttcacccaagcgaggaagaactactgaaagaaacagacaaattgcttcttattgctcctgttcgtgggatgaaaagaccacaatatagagcattaagtgtacggaaagaaacacaaacattgagtcgtaactcagagccaagagagggtcaaggatcatttaatatggctactaccatggataatgaaacacggctaaataacattgtaaagcgccccttgaaatctctttctaaggtaaagtttggtataaggatgcatctatggtaattcattgctttccaaattattgggttcatctgcggttaattttatgcagagcagtgattatatgcttggacccaaggaatgtgtacttattgttggttggcggccaaaagttaccgaaatgatacgggagtacgataattaccttggacctggtagtacagtggaaatcttgtcggaaacccctattaaagagaggagcagtatcatcaacccccttttgcagagccagcttaaaaatgttaaagttactcaccgggtggggtgtcctttgaactacgatactctgaaggaaacaataattaacgtacgagaatctgccaagtcagataaagaggttccactgtcaatagttgtgatatctgacagagactggtttgttggaggtaccagtaaattaacgaggatgtttatctgttatcatcatcggtgatggtattttttatcatcatatgataattattataagtgaagttttatttgtaactttggttccagcagatgctgcacaggctgataaacagttggcatacacccttcttcttgctgaaaacatttgccagaaacatggcgttatggttgagaatcttgtatcagaaatcgttgacatgggactaggaaaacaaatatctaaaataagaccatccctttcatttattggagcagaggaaataatgagtcgtgtgacagcacaagttgcggaaagtagtgagctgaatgaagtatggaaggatatcctgaacgctgaaggcgatgagatctatattaaggaaattgggctgtacatgaaggaaggagagaaaatatcattcttggagctctctgaaagagcagttttacgccgtgaagttgcgattggttacatcaaggacggcaagcagcatattaatcctatcaacaaatcggagccgctgtcccttgaaatgaatgattcgctcattgtgatatcggagtttgaaggtgaacaaccaattatgatgggcggagaaacttcaggatgaaattttcagctttatatctcttcacagaaactctaacaactcttgctaccatgaagagatgacatataacctgtttataatccttttctttttgtacaaagggaaagcaaaatatagtttaaaggccacaaatcaagttttgttcctcccatagccgtagaacttctttgatgcaaatattttactgcacagtttaaccgcagaatcttttctatttatctgtaaacatagtgaataacacaggcaacttgtatggtacagatgtctgaataaaggaaggatgaaggaaaattgattgactatgttccttgttgtttccttctgactaatgaatacaatgtttccatttttttagtcctgagctagacaaaatcagctaggtatggccttgctgttctctttgggagataaattcgtcgcctctagcatttggcacaagaaaagtttgttttacactttgcttcattaaccaagccactgcttcagccttttgggatctaagaggtctgttaaatattcttcttctcttgcttgtccatttcttttacctacaggctgcatctccgcatatatacatgccatcatgagatgct

SEQ ID NO: 463 - DNA, 3477 bp, Zea Mays
caacagcgcagataagacaggctccagattacgatgcactgttcgtttctggccggaatatccgaaaagaccagcgtgccgagagtacagggacatacaagagtcggtacaagagagtccacagccaccccatccggcgccctcatcctgttttgcttgcccgcatccccgtcagtcattttggtgaaaaccgaaaagcgcctcccctcctgctctgctcctgcctctctcgtcactcgtcattgcggccgggcactgggccactggcatcgtaacaactgccgatacgcccgagacagcgcgggcggagccagcgagagggaaggccatgaggtcgcagctcaacgcgtccttctcgccgccgccctcgctccggcgagctctcccctctgccacgccccgcgccctcaggttccacgcgttcccgtggcggttccgcgctcctcagcaccacggccgcggcgctggagctcgctgcgctaccaatctgcccgcgcccggcagccatggagtcggagtgctcgcctccgagaggagggccgacgatggcgacactaccgtgaaaaatgcagatgcgcctagcacttcaacggcgacgcagggaaacctcaacatggctgccattgttagcatagcattctgctttctacacagaattgtttctggacggatgcagtcgatgatgaatttgttcccttggatgtcaaacggcattgcaagcttgccatttgcttgcatatctgatcctaccagaaaacccatgcctcttaagctagatttgactcttccaccactgcctgatttcggatggaatttttcgcgactgtactatcggttcaattctcagcttgatcggaacattgccttgtctatcattaccttgctcatcacttgcttttcatttgtcattgttggaggattactgtttcataagttcaggaagcaacaacaatccctggaggactgcttttgggaagcttgggcatgtctatgttcatcatctacccatctaaggcaaaagacacgtgttgagcgtgtcattgggttctttcttgctatctggggtatattattctattctcgattattaagtgcaatgacagaacaatttagaaaccagatgcataaagtaagggaaggggcacaggtgcaggttattgaggatgatcatatcattatttgtggagtcaatagtcatctgatgtctatattgaaccaattgaataagtaccatgaatcatcaattcgcttaggtttagctacagcaaggaagcagaaaatccttcttctctccgatcttccaaggaagcagattgataaacttgcagatagcttggccaaagatttaaaccatattgatgtattcaccaagagttgtagtcttagcatgtcaacgtcatttgagagagcagcagcacacaaagcaaaatctataattatcttgccagcacagcatgaacgatatgaagtggatacagatgcatttgtctctctattggctctacaaccctgtaaacaaattgcacctgttcctatcattgtcgaggcttccaatgcaaccacttgtgaacttctgaaatcaatcactggcttaaatgtgcaacctgtggagatggttgcttctaagttatttgtgcagtgctctaggcaaaaggaccttctgaaaatctacaagcacttgcttaatcagcacaaaaatgttttcaaccttttcaggcggcctgaattagagggcatgaagtatatggatgtgagacgtaaaatccatgatgcagtcgtttgtggtatcttccggtctggaaaaattcattttcacccaagcgaggaagaactactgaaagaaacagacaaattgcttcttattgctcctgttcgtgggatgaaaagaccacaatatagagcattaagtgtacggaaagaaacacaaacattgagtcgtaactcagagccaagagagggtcaaggatcatttaatatggctactaccatggataatgaaacacggctaaataacattgtaaagcgccccttgaaatctctttctaagagcagtgattatatgcttggacccaaggaatgtgtacttattgttggttggcggccaaaagttaccgaaatgatacgggagtacgataattaccttggacctggtagtacagtggaaatcttgtcggaaacccctattaaagagaggagcagtatcatcaacccccttttgcagagccagcttaaaaatgttaaagttactcaccgggtggggtgtcctttgaactacgatactctgaaggaaacaataattaacgtacgagaatctgccaagtcagataaagaggttccactgtcaatagttgtgatatctgacagagactggtttgttggagcagatgctgcacaggctgataaacagttggcatacacccttcttcttgctgaaaacatttgccagaaacatggcgttatggttgagaatcttgtatcagaaatcgttgacatgggactaggaaaacaaatatctaaaataagaccatccctttcatttattggagcagaggaaataatgagtcgtgtgacagcacaagttgcggaaagtagtgagctgaatgaagtatggaaggatatcctgaacgctgaaggcgatgagatctatattaaggaaattgggctgtacatgaaggaaggagagaaaatatcattcttggagctctctgaaagagcagttttacgccgtgaagttgcgattggttacatcaaggacggcaagcagcatattaatcctatcaacaaatcggagccgctgtcccttgaaatgaatgattcgctcattgtgatatcggagtttgaaggtgaacaaccaattatgatgggcggagaaacttcaggatgaaattttcagctttatatctcttcacagaaactctaacaactcttgctaccatgaagagatgacatataacctgtttataatccttttctttttgtacaaagggaaagcaaaatatagtttaaaggccacaaatcaagttttgttcctcccatagccgtagaacttctttgatgcaaatattttactgcacagtttaaccgcagaatcttttctatttatctgtaaacatagtgaataacacaggcaacttgtatggtacagatgtctgaataaaggaaggatgaaggaaaattgattgactatgttccttgttgtttccttctgactaatgaatacaatgtttccatttttttagtcctgagctagacaaaatcagctaggtatggccttgctgttctctttgggagataaattcgtcgcctctagcatttggcacaagaaaagtttgttttacactttgcttcattaaccaagccactgcttcagccttttgggatctaagaggtctgttaaatattcttcttctcttgcttgtccatttcttttacctacaggctgcatctccgcatatatacatgccatcatgagatgct

SEQ ID NO: 464 - DNA, 3456 bp, Zea Mays
agataagacaggctccagattacgatgcactgttcgtttctggccggaatatccgaaaagaccagcgtgccgagagtacagggacatacaagagtcggtacaagagagtccacagccaccccatccggcgccctcatcctgttttgcttgcccgcatccccgtcagtcattttggtgaaaaccgaaaagcgcctcccctcctgctctgctcctgcctctctcgtcactcgtcattgcggccgggcactgggccactggcatcgtaacaactgccgatacgcccgagacagcgcgggcggagccagcgagagggaaggccatgaggtcgcagctcaacgcgtccttctcgccgccgccctcgctccggcgagctctcccctctgccacgccccgcgccctcaggttccacgcgttcccgtggcggttccgcgctcctcagcaccacggccgcggcgctggagctcgctgcgctaccaatctgcccgcgcccggcagccatggagtcggagtgctcgcctccgagaggagggccgacgatggcgacactaccgtgaaaaatgcagatgcgcctagcacttcaacggcgacgcagggaaacctcaacatggctgccattgttagcatagcattctgctttctacacagaattgtttctggacggatgcagtcgatgatgaatttgttcccttggatgtcaaacggcattgcaagcttgccatttgcttgcatatctgatcctaccagaaaacccatgcctcttaagctagatttgactcttccaccactgcctgatttcggatggaatttttcgcgactgtactatcggttcaattctcagcttgatcggaacattgccttgtctatcattaccttgctcatcacttgcttttcatttgtcattgttggaggattactgtttcataagttcaggaagcaacaacaatccctggaggactgcttttgggaagcttgggcatgtctatgttcatcatctacccatctaaggcaaaagacacgtgttgagcgtgtcattgggttctttcttgctatctggggtatattattctattctcgattattaagtgcaatgacagaacaatttagaaaccagatgcataaagtaagggaaggggcacaggtgcaggttattgaggatgatcatatcattatttgtggagtcaatagtcatctgatgtctatattgaaccaattgaataagtaccatgaatcatcaattcgcttaggtttagctacagcaagaaaatccttcttctctccgatcttccaaggaagcagattgataaacttgcagatagcttggccaaagatttaaaccatattgatgtattcaccaagagttgtagtcttagcatgtcaacgtcatttgagagagcagcagcacacaaagcaaaatctataattatcttgccagcacagcatgaacgatatgaagtggatacagatgcatttgtctctctattggctctacaaccctgtaaacaaattgcacctgttcctatcattgtcgaggcttccaatgcaaccacttgtgaacttctgaaatcaatcactggcttaaatgtgcaacctgtggagatggttgcttctaagttatttgtgcagtgctctaggcaaaaggaccttctgaaaatctacaagcacttgcttaatcagcacaaaaatgttttcaaccttttcaggcggcctgaattagagggcatgaagtatatggatgtgagacgtaaaatccatgatgcagtcgtttgtggtatcttccggtctggaaaaattcattttcacccaagcgaggaagaactactgaaagaaacagacaaattgcttcttattgctcctgttcgtgggatgaaaagaccacaatatagagcattaagtgtacggaaagaaacacaaacattgagtcgtaactcagagccaagagagggtcaaggatcatttaatatggctactaccatggataatgaaacacggctaaataacattgtaaagcgccccttgaaatctctttctaagtgattatatgcttggacccaaggaatgtgtacttattgttggttggcggccaaaagttaccgaaatgatacgggagtacgataattaccttggacctggtagtacagtggaaatcttgtcggaaacccctattaaagagaggagcagtatcatcaacccccttttgcagagccagcttaaaaatgttaaagttactcaccgggtggggtgtcctttgaactacgatactctgaaggaaacaataattaacgtacgagaatctgccaagtcagataaagaggttccactgtcaatagttgtgatatctgacagagactggtttgttggagcagatgctgcacaggctgataaacagttggcatacacccttcttcttgctgaaaacatttgccagaaacatggcgttatggttgagaatcttgtatcagaaatcgttgacatgggactaggaaaacaaatatctaaaataagaccatccctttcatttattggagcagaggaaataatgagtcgtgtgacagcacaagttgcggaaagtagtgagctgaatgaagtatggaaggatatcctgaacgctgaaggcgatgagatctatattaaggaaattgggctgtacatgaaggaaggagagaaaatatcattcttggagctctctgaaagagcagttttacgccgtgaagttgcgattggttacatcaaggacggcaagcagcatattaatcctatcaacaaatcggagccgctgtcccttgaaatgaatgattcgctcattgtgatatcggagtttgaaggtgaacaaccaattatgatgggcggagaaacttcaggatgaaattttcagctttatatctcttcacagaaactctaacaactcttgctaccatgaagagatgacatataacctgtttataatccttttctttttgtacaaagggaaagcaaaatatagtttaaaggccacaaatcaagttttgttcctcccatagccgtagaacttctttgatgcaaatattttactgcacagtttaaccgcagaatcttttctatttatctgtaaacatagtgaataacacaggcaacttgtatggtacagatgtctgaataaaggaaggatgaaggaaaattgattgactatgttccttgttgtttccttctgactaatgaatacaatgtttccatttttttagtcctgagctagacaaaatcagctaggtatggccttgctgttctctttgggagataaattcgtcgcctctagcatttggcacaagaaaagtttgttttacactttgcttcattaaccaagccactgcttcagccttttgggatctaagaggtctgttaaatattcttcttctcttgcttgtccatttcttttacctacaggctgcatctccgcatatatacatgccatcatgagatgct

SEQ ID NO: 465 - DNA, 4695 bp, Zea Mays
ataagacaggctccagattacgatgcactgttcgtttctggccggaatatccgaaaagaccagcgtgccgagagtacagggacatacaagagtcggtacaagagagtccacagccaccccatccggcgccctcatcctgttttgcttgcccgcatccccgtcagtcattttggtgaaaaccgaaaagcgcctcccctcctgctctgctcctgcctctctcgtcactcgtcattgcggccgggcactgggccactggcatcgtaacaactgccgatacgcccgagacagcgcgggcggagccagcgagagggaaggccatgaggtcgcagctcaacgcgtccttctcgccgccgccctcgctccggcgagctctcccctctgccacgccccgcgccctcaggtacggcgagcgcaccgcttcgatcggctccgcgtttctgctccgcagagcgacggaggctggcaggctgctgaacacagctctccctggttccaggttccacgcgttcccgtggcggttccgcgctcctcagcaccacggccgcggcgctggagctcgctgcgctaccaatctgcccgcgcccggcagccatggagtcggagtgctcgcctccgagaggagggccgacgatggcgacactaccgtgaaaaatgcagatgcgcctagcacttcaacggcgacgcagggaaacctcaacatggctgccattgttagcatagcattctgctttctacacagaattgtttctggacggatgcagtcgatgatgaatttgttcccttggatgtcaaacggcattgcaagcttgccatttgcttgcatatctgatcctaccagaaaacccatgcctcttaagctagatttgactcttccaccactgcctgatttcggatggaatttttcgcgactgtactatcggttcaattctcagcttgatcggaacattgccttgtctatcattaccttgctcatcacttgcttttcatttgtcattgttggaggattactgtttcataagttcaggaagcaacaacaatccctggaggactgcttttgggaagcttgggcatgtctatgttcatcatctacccatctaaggcaaaagacacgtgttgagcgtgtcattgggttctttcttgctatctggggtatattattctattctcgattattaagtgcaatgacagaacaatttagaaaccagatgcataaagtaagggaaggggcacaggtgcaggttattgaggatgatcatatcattatttgtggagtcaatagtcatctgatgtctatattgaaccaattgaataagtaccatgaatcatcaattcgcttaggtttagctacagcaagaaaatccttcttctctccgatcttccaaggaagcagattgataaacttgcagatagcttggccaaagatttaaaccatattgatgtattcaccaagagttgtagtcttagcatgtcaacgtcatttgagagagcagcagcacacaaagcaaaatctataattatcttgccagcacagcatgaacgatatgaagtggatacagatgcatttgtctctctattggctctacaaccctgtaaacaaattgcacctgttcctatcattgtcgaggcttccaatgcaaccacttgtgaacttctgaaatcaatcactggcttaaatgtgcaacctgtggagatggttgcttctaagttatttgtgcagtgctctaggcaaaaggaccttctgaaaatctacaagcacttgcttaatcagcacagtaatgttcttattttctgccatgatatttatgaaaaaacaatttctatattggtgcatttccgagcaaaactgtgttacccaggtctttcacgcttgaatttttttgccatcctttagttcatgatttctactgcaatcacctaaaaatgaccatactcatacataaaagttgaatgtacttagccgtgcattatatgacattgtcttgctcttgccagatttgttgccagttttattacatctatatgccaaacatgacctactttatcattcttcagaacttctgaatcagcattcactaatatagtacaaatgtaccatagaacatatttctacgtatgcaaattgttctgatattcccatgtttctgtacttttgtcattctacatttctgctttgctggcgttgttaaatttcatcagcagcactgtgattactttagtctttaggcaggcccgggcgggggcatgtgcgaccggtgcacaagaacagggccccctccctccaatggcccctaaaataatagtcaacgatagtttaatcaatacaaattttagtaatgattagatggtctagctaagtcagctcgacaagaataaaacatagtgtttgtcgtaacaaccgagtaccaatctctcatgcaactcattttggctatatggcgaagtgcagctagcacatactggcataacatccaagctagcacatactggcataacattcaaacgttaagatcactcgttaccgttattatgccatttcctacattaataattcaatcactgttaataaatgagattaatctatatcatctattcttaacaaagaaaaaaagaaaaaaaatcgatacagggccttgaattatgtcggcccggccgtgactttaggttctagatatagaggtagctatgctactttgtttgttacatgcgttgttttgtcctgcagaaaatgttttcaaccttttcaggcggcctgaattagagggcatgaagtatatggatgtgagacgtaaaatccatgattcgtttgtggtatcttccggtctggaaaaattcattttcacccaagcgaggaagaactactgaaagaaacagacaaattgcttcttattgctcctgttcgtgggatgaaaagaccacaatatagagcattaagtgtacggaaagaaacacaaacattgagtcgtaactcagagccaagagagggtcaaggatcatttaatatggctactaccatggataatgaaacacggctaaataacattgtaaagcgccccttgaaatctctttctaaggtaaagtttggtataaggatgcatctatggtaattcattgctttccaaattattgggttcatctgcggttaattttatgcagagcagtgattatatgcttggacccaaggaatgtgtacttattgttggttggcggccaaaagttaccgaaatgatacgggagtacgataattaccttggacctggtagtacagtggaaatcttgtcggaaacccctattaaagagaggagcagtatcatcaacccccttttgcagagccagcttaaaaatgttaaagttactcaccgggtggggtgtcctttgaactacgatactctgaaggaaacaataattaacgtacgagaatctgccaagtcagataaagaggttccactgtcaatagttgtgatatctgacagagactggtttgttggaggtaccagtaaattaacgaggatgtttatctgttatcatcatcggtgatggtattttttatcatcatatgataattattataagtgaagttttatttgtaactttggttccagcagatgctgcacaggctgataaacagttggcatacacccttcttcttgctgaaaacatttgccagaaacatggcgttatggttgagaatcttgtatcagaaatcgttgacatgggactaggaaaacaaatatctaaaataagaccatccctttcatttattggagcagaggaaataatgagtcgtgtgacagcacaagttgcggaaagtagtgagctgaatgaagtatggaaggatatcctgaacgctgaaggcgatgagatctatattaaggaaattgggctgtacatgaaggaaggagagaaaatatcattcttggagctctctgaaagagcagttttacgccgtgaagttgcgattggttacatcaaggacggcaagcagcatattaatcctatcaacaaatcggagccgctgtcccttgaaatgaatgattcgctcattgtgatatcggagtttgaaggtgaacaaccaattatgatgggcggagaaacttcaggatgaaattttcagctttatatctcttcacagaaactctaacaactcttgctaccatgaagagatgacatataacctgtttataatccttttctttttgtacaaagggaaagcaaaatatagtttaaaggccacaaatcaagttttgttcctcccatagccgtagaacttctttgatgcaaatattttactgcacagtttaaccgcagaatcttttctatttatctgtaaacatagtgaataacacaggcaacttgtatggtacagatgtctgaataaaggaaggatgaaggaaaattgattgactatgttccttgttgtttccttctgactaatgaatacaatgtttccatttttttagtcctgagctagacaaaatcagctaggtatggccttgctgttctctttgggagataaattcgtcgcctctagcatttggcacaagaaaagtttgttttacactttgcttcattaaccaagccactgcttcagccttttgggatctaagaggtctgttaaatattcttcttctcttgcttgtccatttcttttacctacaggctgcatctccgcatatatacatgccatcatgagatgct

SEQ ID NO: 466 - DNA, 3448 bp, Zea Mays
cagattacgatgcactgttcgtttctggccggaatatccgaaaagaccagcgtgccgagagtacagggacatacaagagtcggtacaagagagtccacagccaccccatccggcgccctcatcctgttttgcttgcccgcatccccgtcagtcattttggtgaaaaccgaaaagcgcctcccctcctgctctgctcctgcctctctcgtcactcgtcattgcggccgggcactgggccactggcatcgtaacaactgccgatacgcccgagacagcgcgggcggagccagcgagagggaaggccatgaggtcgcagctcaacgcgtccttctcgccgccgccctcgctccggcgagctctcccctctgccacgccccgcgccctcaggttccacgcgttcccgtggcggttccgcgctcctcagcaccacggccgcggcgctggagctcgctgcgctaccaatctgcccgcgcccggcagccatggagtcggagtgctcgcctccgagaggagggccgacgatggcgacactaccgtgaaaaatgcagatgcgcctagcacttcaacggcgacgcagggaaacctcaacatggctgccattgttagcatagcattctgctttctacacagaattgtttctggacggatgcagtcgatgatgaatttgttcccttggatgtcaaacggcattgcaagcttgccatttgcttgcatatctgatcctaccagaaaacccatgcctcttaagctagatttgactcttccaccactgcctgatttcggatggaatttttcgcgactgtactatcggttcaattctcagcttgatcggaacattgccttgtctatcattaccttgctcatcacttgcttttcatttgtcattgttggaggattactgtttcataagttcaggaagcaacaacaatccctggaggactgcttttgggaagcttgggcatgtctatgttcatcatctacccatctaaggcaaaagacacgtgttgagcgtgtcattgggttctttcttgctatctggggtatattattctattctcgattattaagtgcaatgacagaacaatttagaaaccagatgcataaagtaagggaaggggcacaggtgcaggttattgaggatgatcatatcattatttgtggagtcaatagtcatctgatgtctatattgaaccaattgaataagtaccatgaatcatcaattcgcttaggtttagctacagcaaggaagcagaaaatccttcttctctccgatcttccaaggaagcagattgataaacttgcagatagcttggccaaagatttaaaccatattgatgtattcaccaagagttgtagtcttagcatgtcaacgtcatttgagagagcagcagcacacaaagcaaaatctataattatcttgccagcacagcatgaacgatatgaagtggatacagatgcatttgtctctctattggctctacaaccctgtaaacaaattgcacctgttcctatcattgtcgaggcttccaatgcaaccacttgtgaacttctgaaatcaatcactggcttaaatgtgcaacctgtggagatggttgcttctaagttatttgtgcagtgctctaggcaaaaggaccttctgaaaatctacaagcacttgcttaatcagcacaaaaatgttttcaaccttttcaggcggcctgaattagagggcatgaagtatatggatgtgagacgtaaaatccatgatgcagtcgtttgtggtatcttccggtctggaaaaattcattttcacccaagcgaggaagaactactgaaagaaacagacaaattgcttcttattgctcctgttcgtgggatgaaaagaccacaatatagagcattaagtgtacggaaagaaacacaaacattgagtcgtaactcagagccaagagagggtcaaggatcatttaatatggctactaccatggataatgaaacacggctaaataacattgtaaagcgccccttgaaatctctttctaagtgattatatgcttggacccaaggaatgtgtacttattgttggttggcggccaaaagttaccgaaatgatacgggagtacgataattaccttggacctggtagtacagtggaaatcttgtcggaaacccctattaaagagaggagcagtatcatcaacccccttttgcagagccagcttaaaaatgttaaagttactcaccgggtggggtgtcctttgaactacgatactctgaaggaaacaataattaacgtacgagaatctgccaagtcagataaagaggttccactgtcaatagttgtgatatctgacagagactggtttgttggagcagatgctgcacaggctgataaacagttggcatacacccttcttcttgctgaaaacatttgccagaaacatggcgttatggttgagaatcttgtatcagaaatcgttgacatgggactaggaaaacaaatatctaaaataagaccatccctttcatttattggagcagaggaaataatgagtcgtgtgacagcacaagttgcggaaagtagtgagctgaatgaagtatggaaggatatcctgaacgctgaaggcgatgagatctatattaaggaaattgggctgtacatgaaggaaggagagaaaatatcattcttggagctctctgaaagagcagttttacgccgtgaagttgcgattggttacatcaaggacggcaagcagcatattaatcctatcaacaaatcggagccgctgtcccttgaaatgaatgattcgctcattgtgatatcggagtttgaaggtgaacaaccaattatgatgggcggagaaacttcaggatgaaattttcagctttatatctcttcacagaaactctaacaactcttgctaccatgaagagatgacatataacctgtttataatccttttctttttgtacaaagggaaagcaaaatatagtttaaaggccacaaatcaagttttgttcctcccatagccgtagaacttctttgatgcaaatattttactgcacagtttaaccgcagaatcttttctatttatctgtaaacatagtgaataacacaggcaacttgtatggtacagatgtctgaataaaggaaggatgaaggaaaattgattgactatgttccttgttgtttccttctgactaatgaatacaatgtttccatttttttagtcctgagctagacaaaatcagctaggtatggccttgctgttctctttgggagataaattcgtcgcctctagcatttggcacaagaaaagtttgttttacactttgcttcattaaccaagccactgcttcagccttttgggatctaagaggtctgttaaatattcttcttctcttgcttgtccatttcttttacctacaggctgcatctccgcatatatacatgccatcatgagatgct

SEQ ID NO: 467 - DNA, 3453 bp, Zea Mays
gagagtccacagccaccccatccggcgccctcatcctgttttgcttgcccgcatccccgtcagtcattttggtgaaaaccgaaaagcgcctcccctcctgctctgctcctgcctctctcgtcactcgtcattgcggccgggcactgggccactggcatcgtaacaactgccgatacgcccgagacagcgcgggcggagccagcgagagggaaggccatgaggtcgcagctcaacgcgtccttctcgccgccgccctcgctccggcgagctctcccctctgccacgccccgcgccctcaggtacggcgagcgcaccgcttcgatcggctccgcgtttctgctccgcagagcgacggaggctggcaggctgctgaacacagctctccctggttccaggttccacgcgttcccgtggcggttccgcgctcctcagcaccacggccgcggcgctggagctcgctgcgctaccaatctgcccgcgcccggcagccatggagtcggagtgctcgcctccgagaggagggccgacgatggcgacactaccgtgaaaaatgcagatgcgcctagcacttcaacggcgacgcagggaaacctcaacatggctgccattgttagcatagcattctgctttctacacagaattgtttctggacggatgcagtcgatgatgaatttgttcccttggatgtcaaacggcattgcaagcttgccatttgcttgcatatctgatcctaccagaaaacccatgcctcttaagctagatttgactcttccaccactgcctgatttcggatggaatttttcgcgactgtactatcggttcaattctcagcttgatcggaacattgccttgtctatcattaccttgctcatcacttgcttttcatttgtcattgttggaggattactgtttcataagttcaggaagcaacaacaatccctggaggactgcttttgggaagcttgggcatgtctatgttcatcatctacccatctaaggcaaaagacacgtgttgagcgtgtcattgggttctttcttgctatctggggtatattattctattctcgattattaagtgcaatgacagaacaatttagaaaccagatgcataaagtaagggaaggggcacaggtgcaggttattgaggatgatcatatcattatttgtggagtcaatagtcatctgatgtctatattgaaccaattgaataagtaccatgaatcatcaattcgcttaggtttagctacagcaaggaagcagaaaatccttcttctctccgatcttccaaggaagcagattgataaacttgcagatagcttggccaaagatttaaaccatattgatgtattcaccaagagttgtagtcttagcatgtcaacgtcatttgagagagcagcagcacacaaagcaaaatctataattatcttgccagcacagcatgaacgatatgaagtggatacagatgcatttgtctctctattggctctacaaccctgtaaacaaattgcacctgttcctatcattgtcgaggcttccaatgcaaccacttgtgaacttctgaaatcaatcactggcttaaatgtgcaacctgtggagatggttgcttctaagttatttgtgcagtgctctaggcaaaaggaccttctgaaaatctacaagcacttgcttaatcagcacaaaaatgttttcaaccttttcaggcggcctgaattagagggcatgaagtatatggatgtgagacgtaaaatccatgatgcagtcgtttgtggtatcttccggtctggaaaaattcattttcacccaagcgaggaagaactactgaaagaaacagacaaattgcttcttattgctcctgttcgtgggatgaaaagaccacaatatagagcattaagtgtacggaaagaaacacaaacattgagtcgtaactcagagccaagagagggtcaaggatcatttaatatggctactaccatggataatgaaacacggctaaataacattgtaaagcgccccttgaaatctctttctaagtgattatatgcttggacccaaggaatgtgtacttattgttggttggcggccaaaagttaccgaaatgatacgggagtacgataattaccttggacctggtagtacagtggaaatcttgtcggaaacccctattaaagagaggagcagtatcatcaacccccttttgcagagccagcttaaaaatgttaaagttactcaccgggtggggtgtcctttgaactacgatactctgaaggaaacaataattaacgtacgagaatctgccaagtcagataaagaggttccactgtcaatagttgtgatatctgacagagactggtttgttggagatgctgcacaggctgataaacagttggcatacacccttcttcttgctgaaaacatttgccagaaacatggcgttatggttgagaatcttgtatcagaaatcgttgacatgggactaggaaaacaaatatctaaaataagaccatccctttcatttattggagcagaggaaataatgagtcgtgtgacagcacaagttgcggaaagtagtgagctgaatgaagtatggaaggatatcctgaacgctgaaggcgatgagatctatattaaggaaattgggctgtacatgaaggaaggagagaaaatatcattcttggagctctctgaaagagcagttttacgccgtgaagttgcgattggttacatcaaggacggcaagcagcatattaatcctatcaacaaatcggagccgctgtcccttgaaatgaatgattcgctcattgtgatatcggagtttgaaggtgaacaaccaattatgatgggcggagaaacttcaggatgaaattttcagctttatatctcttcacagaaactctaacaactcttgctaccatgaagagatgacatataacctgtttataatccttttctttttgtacaaagggaaagcaaaatatagtttaaaggccacaaatcaagttttgttcctcccatagccgtagaacttctttgatgcaaatattttactgcacagtttaaccgcagaatcttttctatttatctgtaaacatagtgaataacacaggcaacttgtatggtacagatgtctgaataaaggaaggatgaaggaaaattgattgactatgttccttgttgtttccttctgactaatgaatacaatgtttccatttttttagtcctgagctagacaaaatcagctaggtatggccttgctgttctctttgggagataaattcgtcgcctctagcatttggcacaagaaaagtttgttttacactttgcttcattaaccaagccactgcttcagccttttgggatctaagaggtctgttaaatattcttcttctcttgcttgtccatttcttttacctacaggctgcatctccgcatatatacatgccatcatgagatgct

SEQ ID NO: 468 - DNA, 3429 bp, Zea Mays
cgccctcatcctgttttgcttgcccgcatccccgtcagtcattttggtgaaaaccgaaaagcgcctcccctcctgctctgctcctgcctctctcgtcactcgtcattgcggccgggcactgggccactggcatcgtaacaactgccgatacgcccgagacagcgcgggcggagccagcgagagggaaggccatgaggtcgcagctcaacgcgtccttctcgccgccgccctcgctccggcgagctctcccctctgccacgccccgcgccctcaggtacggcgagcgcaccgcttcgatcggctccgcgtttctgctccgcagagcgacggaggctggcaggctgctgaacacagctctccctggttccaggttccacgcgttcccgtggcggttccgcgctcctcagcaccacggccgcggcgctggagctcgctgcgctaccaatctgcccgcgcccggcagccatggagtcggagtgctcgcctccgagaggagggccgacgatggcgacactaccgtgaaaaatgcagatgcgcctagcacttcaacggcgacgcagggaaacctcaacatggctgccattgttagcatagcattctgctttctacacagaattgtttctggacggatgcagtcgatgatgaatttgttcccttggatgtcaaacggcattgcaagcttgccatttgcttgcatatctgatcctaccagaaaacccatgcctcttaagctagatttgactcttccaccactgcctgatttcggatggaatttttcgcgactgtactatcggttcaattctcagcttgatcggaacattgccttgtctatcattaccttgctcatcacttgcttttcatttgtcattgttggaggattactgtttcataagttcaggaagcaacaacaatccctggaggactgcttttgggaagcttgggcatgtctatgttcatcatctacccatctaaggcaaaagacacgtgttgagcgtgtcattgggttctttcttgctatctggggtatattattctattctcgattattaagtgcaatgacagaacaatttagaaaccagatgcataaagtaagggaaggggcacaggtgcaggttattgaggatgatcatatcattatttgtggagtcaatagtcatctgatgtctatattgaaccaattgaataagtaccatgaatcatcaattcgcttaggtttagctacagcaagaaaatccttcttctctccgatcttccaaggaagcagattgataaacttgcagatagcttggccaaagatttaaaccatattgatgtattcaccaagagttgtagtcttagcatgtcaacgtcatttgagagagcagcagcacacaaagcaaaatctataattatcttgccagcacagcatgaacgatatgaagtggatacagatgcatttgtctctctattggctctacaaccctgtaaacaaattgcacctgttcctatcattgtcgaggcttccaatgcaaccacttgtgaacttctgaaatcaatcactggcttaaatgtgcaacctgtggagatggttgcttctaagttatttgtgcagtgctctaggcaaaaggaccttctgaaaatctacaagcacttgcttaatcagcacaaaaatgttttcaaccttttcaggcggcctgaattagagggcatgaagtatatggatgtgagacgtaaaatccatgatgcagtcgtttgtggtatcttccggtctggaaaaattcattttcacccaagcgaggaagaactactgaaagaaacagacaaattgcttcttattgctcctgttcgtgggatgaaaagaccacaatatagagcattaagtgtacggaaagaaacacaaacattgagtcgtaactcagagccaagagagggtcaaggatcatttaatatggctactaccatggataatgaaacacggctaaataacattgtaaagcgccccttgaaatctctttctaagagcagtgattatatgcttggacccaaggaatgtgtacttattgttggttggcggccaaaagttaccgaaatgatacgggagtacgataattaccttggacctggtagtacagtggaaatcttgtcggaaacccctattaaagagaggagcagtatcatcaacccccttttgcagagccagcttaaaaatgttaaagttactcaccgggtggggtgtcctttgaactacgatactctgaaggaaacaataattaacgtacgagaatctgccaagtcagataaagaggttccactgtcaatagttgtgatatctgacagagactggtttgttggagcagatgctgcacaggctgataaacagttggcatacacccttcttcttgctgaaaacatttgccagaaacatggcgttatggttgagaatcttgtatcagaaatcgttgacatgggactaggaaaacaaatatctaaaataagaccatccctttcatttattggagcagaggaaataatgagtcgtgtgacagcacaagttgcggaaagtagtgagctgaatgaagtatggaaggatatcctgaacgctgaaggcgatgagatctatattaaggaaattgggctgtacatgaaggaaggagagaaaatatcattcttggagctctctgaaagagcagttttacgccgtgaagttgcgattggttacatcaaggacggcaagcagcatattaatcctatcaacaaatcggagccgctgtcccttgaaatgaatgattcgctcattgtgatatcggagtttgaaggtgaacaaccaattatgatgggcggagaaacttcaggatgaaattttcagctttatatctcttcacagaaactctaacaactcttgctaccatgaagagatgacatataacctgtttataatccttttctttttgtacaaagggaaagcaaaatatagtttaaaggccacaaatcaagttttgttcctcccatagccgtagaacttctttgatgcaaatattttactgcacagtttaaccgcagaatcttttctatttatctgtaaacatagtgaataacacaggcaacttgtatggtacagatgtctgaataaaggaaggatgaaggaaaattgattgactatgttccttgttgtttccttctgactaatgaatacaatgtttccatttttttagtcctgagctagacaaaatcagctaggtatggccttgctgttctctttgggagataaattcgtcgcctctagcatttggcacaagaaaagtttgttttacactttgcttcattaaccaagccactgcttcagccttttgggatctaagaggtctgttaaatattcttcttctcttgcttgtccatttcttttacctacaggctgcatctccgcatatatacatgccatcatgagatgct

SEQ ID NO: 469 - DNA, 3333 bp, Zea Mays
cgccctcatcctgttttgcttgcccgcatccccgtcagtcattttggtgaaaaccgaaaagcgcctcccctcctgctctgctcctgcctctctcgtcactcgtcattgcggccgggcactgggccactggcatcgtaacaactgccgatacgcccgagacagcgcgggcggagccagcgagagggaaggccatgaggtcgcagctcaacgcgtccttctcgccgccgccctcgctccggcgagctctcccctctgccacgccccgcgccctcaggttccacgcgttcccgtggcggttccgcgctcctcagcaccacggccgcggcgctggagctcgctgcgctaccaatctgcccgcgcccggcagccatggagtcggagtgctcgcctccgagaggagggccgacgatggcgacactaccgtgaaaaatgcagatgcgcctagcacttcaacggcgacgcagggaaacctcaacatggctgccattgttagcatagcattctgctttctacacagaattgtttctggacggatgcagtcgatgatgaatttgttcccttggatgtcaaacggcattgcaagcttgccatttgcttgcatatctgatcctaccagaaaacccatgcctcttaagctagatttgactcttccaccactgcctgatttcggatggaatttttcgcgactgtactatcggttcaattctcagcttgatcggaacattgccttgtctatcattaccttgctcatcacttgcttttcatttgtcattgttggaggattactgtttcataagttcaggaagcaacaacaatccctggaggactgcttttgggaagcttgggcatgtctatgttcatcatctacccatctaaggcaaaagacacgtgttgagcgtgtcattgggttctttcttgctatctggggtatattattctattctcgattattaagtgcaatgacagaacaatttagaaaccagatgcataaagtaagggaaggggcacaggtgcaggttattgaggatgatcatatcattatttgtggagtcaatagtcatctgatgtctatattgaaccaattgaataagtaccatgaatcatcaattcgcttaggtttagctacagcaaggaagcagaaaatccttcttctctccgatcttccaaggaagcagattgataaacttgcagatagcttggccaaagatttaaaccatattgatgtattcaccaagagttgtagtcttagcatgtcaacgtcatttgagagagcagcagcacacaaagcaaaatctataattatcttgccagcacagcatgaacgatatgaagtggatacagatgcatttgtctctctattggctctacaaccctgtaaacaaattgcacctgttcctatcattgtcgaggcttccaatgcaaccacttgtgaacttctgaaatcaatcactggcttaaatgtgcaacctgtggagatggttgcttctaagttatttgtgcagtgctctaggcaaaaggaccttctgaaaatctacaagcacttgcttaatcagcacaaaaatgttttcaaccttttcaggcggcctgaattagagggcatgaagtatatggatgtgagacgtaaaatccatgattcgtttgtggtatcttccggtctggaaaaattcattttcacccaagcgaggaagaactactgaaagaaacagacaaattgcttcttattgctcctgttcgtgggatgaaaagaccacaatatagagcattaagtgtacggaaagaaacacaaacattgagtcgtaactcagagccaagagagggtcaaggatcatttaatatggctactaccatggataatgaaacacggctaaataacattgtaaagcgccccttgaaatctctttctaagagcagtgattatatgcttggacccaaggaatgtgtacttattgttggttggcggccaaaagttaccgaaatgatacgggagtacgataattaccttggacctggtagtacagtggaaatcttgtcggaaacccctattaaagagaggagcagtatcatcaacccccttttgcagagccagcttaaaaatgttaaagttactcaccgggtggggtgtcctttgaactacgatactctgaaggaaacaataattaacgtacgagaatctgccaagtcagataaagaggttccactgtcaatagttgtgatatctgacagagactggtttgttggagatgctgcacaggctgataaacagttggcatacacccttcttcttgctgaaaacatttgccagaaacatggcgttatggttgagaatcttgtatcagaaatcgttgacatgggactaggaaaacaaatatctaaaataagaccatccctttcatttattggagcagaggaaataatgagtcgtgtgacagcacaagttgcggaaagtagtgagctgaatgaagtatggaaggatatcctgaacgctgaaggcgatgagatctatattaaggaaattgggctgtacatgaaggaaggagagaaaatatcattcttggagctctctgaaagagcagttttacgccgtgaagttgcgattggttacatcaaggacggcaagcagcatattaatcctatcaacaaatcggagccgctgtcccttgaaatgaatgattcgctcattgtgatatcggagtttgaaggtgaacaaccaattatgatgggcggagaaacttcaggatgaaattttcagctttatatctcttcacagaaactctaacaactcttgctaccatgaagagatgacatataacctgtttataatccttttctttttgtacaaagggaaagcaaaatatagtttaaaggccacaaatcaagttttgttcctcccatagccgtagaacttctttgatgcaaatattttactgcacagtttaaccgcagaatcttttctatttatctgtaaacatagtgaataacacaggcaacttgtatggtacagatgtctgaataaaggaaggatgaaggaaaattgattgactatgttccttgttgtttccttctgactaatgaatacaatgtttccatttttttagtcctgagctagacaaaatcagctaggtatggccttgctgttctctttgggagataaattcgtcgcctctagcatttggcacaagaaaagtttgttttacactttgcttcattaaccaagccactgcttcagccttttgggatctaagaggtctgttaaatattcttcttctcttgcttgtccatttcttttacctacaggctgcatctccgcatatatacatgccatcatgagatgct

SEQ ID NO: 470 - DNA, 4461 bp, Zea Mays
cgccctcatcctgttttgcttgcccgcatccccgtcagtcattttggtgaaaaccgaaaagcgcctcccctcctgctctgctcctgcctctctcgtcactcgtcattgcggccgggcactgggccactggcatcgtaacaactgccgatacgcccgagacagcgcgggcggagccagcgagagggaaggccatgaggtcgcagctcaacgcgtccttctcgccgccgccctcgctccggcgagctctcccctctgccacgccccgcgccctcaggtacggcgagcgcaccgcttcgatcggctccgcgtttctgctccgcagagcgacggaggctggcaggctgctgaacacagctctccctggttccaggttccacgcgttcccgtggcggttccgcgctcctcagcaccacggccgcggcgctggagctcgctgcgctaccaatctgcccgcgcccggcagccatggagtcggagtgctcgcctccgagaggagggccgacgatggcgacactaccgtgaaaaatgcagatgcgcctagcacttcaacggcgacgcagggaaacctcaacatggctgccattgttagcatagcattctgctttctacacagaattgtttctggacggatgcagtcgatgatgaatttgttcccttggatgtcaaacggcattgcaagcttgccatttgcttgcatatctgatcctaccagaaaacccatgcctcttaagctagatttgactcttccaccactgcctgatttcggatggaatttttcgcgactgtactatcggttcaattctcagcttgatcggaacattgccttgtctatcattaccttgctcatcacttgcttttcatttgtcattgttggaggattactgtttcataagttcaggaagcaacaacaatccctggaggactgcttttgggaagcttgggcatgtctatgttcatcatctacccatctaaggcaaaagacacgtgttgagcgtgtcattgggttctttcttgctatctggggtatattattctattctcgattattaagtgcaatgacagaacaatttagaaaccagatgcataaagtaagggaaggggcacaggtgcaggttattgaggatgatcatatcattatttgtggagtcaatagtcatctgatgtctatattgaaccaattgaataagtaccatgaatcatcaattcgcttaggtttagctacagcaaggaagcagaaaatccttcttctctccgatcttccaaggaagcagattgataaacttgcagatagcttggccaaagatttaaaccatattgatgtattcaccaagagttgtagtcttagcatgtcaacgtcatttgagagagcagcagcacacaaagcaaaatctataattatcttgccagcacagcatgaacgatatgaagtggatacagatgcatttgtctctctattggctctacaaccctgtaaacaaattgcacctgttcctatcattgtcgaggcttccaatgcaaccacttgtgaacttctgaaatcaatcactggcttaaatgtgcaacctgtggagatggttgcttctaagttatttgtgcagtgctctaggcaaaaggaccttctgaaaatctacaagcacttgcttaatcagcacagtaatgttcttattttctgccatgatatttatgaaaaaacaatttctatattggtgcatttccgagcaaaactgtgttacccaggtctttcacgcttgaatttttttgccatcctttagttcatgatttctactgcaatcacctaaaaatgaccatactcatacataaaagttgaatgtacttagccgtgcattatatgacattgtcttgctcttgccagatttgttgccagttttattacatctatatgccaaacatgacctactttatcattcttcagaacttctgaatcagcattcactaatatagtacaaatgtaccatagaacatatttctacgtatgcaaattgttctgatattcccatgtttctgtacttttgtcattctacatttctgctttgctggcgttgttaaatttcatcagcagcactgtgattactttagtctttaggcaggcccgggcgggggcatgtgcgaccggtgcacaagaacagggccccctccctccaatggcccctaaaataatagtcaacgatagtttaatcaatacaaattttagtaatgattagatggtctagctaagtcagctcgacaagaataaaacatagtgtttgtcgtaacaaccgagtaccaatctctcatgcaactcattttggctatatggcgaagtgcagctagcacatactggcataacatccaagctagcacatactggcataacattcaaacgttaagatcactcgttaccgttattatgccatttcctacattaataattcaatcactgttaataaatgagattaatctatatcatctattcttaacaaagaaaaaaagaaaaaaaatcgatacagggccttgaattatgtcggcccggccgtgactttaggttctagatatagaggtagctatgctactttgtttgttacatgcgttgttttgtcctgcagaaaatgttttcaaccttttcaggcggcctgaattagagggcatgaagtatatggatgtgagacgtaaaatccatgattcgtttgtggtatcttccggtctggaaaaattcattttcacccaagcgaggaagaactactgaaagaaacagacaaattgcttcttattgctcctgttcgtgggatgaaaagaccacaatatagagcattaagtgtacggaaagaaacacaaacattgagtcgtaactcagagccaagagagggtcaaggatcatttaatatggctactaccatggataatgaaacacggctaaataacattgtaaagcgccccttgaaatctctttctaaggtaaagtttggtataaggatgcatctatggtaattcattgctttccaaattattgggttcatctgcggttaattttatgcagagcagtgattatatgcttggacccaaggaatgtgtacttattgttggttggcggccaaaagttaccgaaatgatacgggagtacgataattaccttggacctggtagtacagtggaaatcttgtcggaaacccctattaaagagaggagcagtatcatcaacccccttttgcagagccagcttaaaaatgttaaagttactcaccgggtggggtgtcctttgaactacgatactctgaaggaaacaataattaacgtacgagaatctgccaagtcagataaagaggttccactgtcaatagttgtgatatctgacagagactggtttgttggagatgctgcacaggctgataaacagttggcatacacccttcttcttgctgaaaacatttgccagaaacatggcgttatggttgagaatcttgtatcagaaatcgttgacatgggactaggaaaacaaatatctaaaataagaccatccctttcatttattggagcagaggaaataatgagtcgtgtgacagcacaagttgcggaaagtagtgagctgaatgaagtatggaaggatatcctgaacgctgaaggcgatgagatctatattaaggaaattgggctgtacatgaaggaaggagagaaaatatcattcttggagctctctgaaagagcagttttacgccgtgaagttgcgattggttacatcaaggacggcaagcagcatattaatcctatcaacaaatcggagccgctgtcccttgaaatgaatgattcgctcattgtgatatcggagtttgaaggtgaacaaccaattatgatgggcggagaaacttcaggatgaaattttcagctttatatctcttcacagaaactctaacaactcttgctaccatgaagagatgacatataacctgtttataatccttttctttttgtacaaagggaaagcaaaatatagtttaaaggccacaaatcaagttttgttcctcccatagccgtagaacttctttgatgcaaatattttactgcacagtttaaccgcagaatcttttctatttatctgtaaacatagtgaataacacaggcaacttgtatggtacagatgtctgaataaaggaaggatgaaggaaaattgattgactatgttccttgttgtttccttctgactaatgaatacaatgtttccatttttttagtcctgagctagacaaaatcagctaggtatggccttgctgttctctttgggagataaattcgtcgcctctagcatttggcacaagaaaagtttgttttacactttgcttcattaaccaagccactgcttcagccttttgggatctaagaggtctgttaaatattcttcttctcttgcttgtccatttcttttacctacaggctgcatctccgcatatatacatgccatcatgagatgct

SEQ ID NO: 471 - DNA, 1648 bp, Zea Mays
gttgaatcatccatcagagtgagttgcttcttattgctcctgttcgtgggatgaaaagaccacaatatagagcattaagtgtacggaaagaaacacaaacattgagtcgtaactcagagccaagagagggtcaaggatcatttaatatggctactaccatggataatgaaacacggctaaataacattgtaaagcgccccttgaaatctctttctaagagcagtgattatatgcttggacccaaggaatgtgtacttattgttggttggcggccaaaagttaccgaaatgatacgggagtacgataattaccttggacctggtagtacagtggaaatcttgtcggaaacccctattaaagagaggagcagtatcatcaacccccttttgcagagccagcttaaaaatgttaaagttactcaccgggtggggtgtcctttgaactacgatactctgaaggaaacaataattaacgtacgagaatctgccaagtcagataaagaggttccactgtcaatagttgtgatatctgacagagactggtttgttggagcagatgctgcacaggctgataaacagttggcatacacccttcttcttgctgaaaacatttgccagaaacatggcgttatggttgagaatcttgtatcagaaatcgttgacatgggactaggaaaacaaatatctaaaataagaccatccctttcatttattggagcagaggaaataatgagtcgtgtgacagcacaagttgcggaaagtagtgagctgaatgaagtatggaaggatatcctgaacgctgaaggcgatgagatctatattaaggaaattgggctgtacatgaaggaaggagagaaaatatcattcttggagctctctgaaagagcagttttacgccgtgaagttgcgattggttacatcaaggacggcaagcagcatattaatcctatcaacaaatcggagccgctgtcccttgaaatgaatgattcgctcattgtgatatcggagtttgaaggtgaacaaccaattatgatgggcggagaaacttcaggatgaaattttcagctttatatctcttcacagaaactctaacaactcttgctaccatgaagagatgacatataacctgtttataatccttttctttttgtacaaagggaaagcaaaatatagtttaaaggccacaaatcaagttttgttcctcccatagccgtagaacttctttgatgcaaatattttactgcacagtttaaccgcagaatcttttctatttatctgtaaacatagtgaataacacaggcaacttgtatggtacagatgtctgaataaaggaaggatgaaggaaaattgattgactatgttccttgttgtttccttctgactaatgaatacaatgtttccatttttttagtcctgagctagacaaaatcagctaggtatggccttgctgttctctttgggagataaattcgtcgcctctagcatttggcacaagaaaagtttgttttacactttgcttcattaaccaagccactgcttcagccttttgggatctaagaggtctgttaaatattcttcttctcttgcttgtccatttcttttacctacaggctgcatctccgcatatatacatgccatcatgagatgct

SEQ ID NO: 472 - DNA, 1723 bp, Zea Mays
catgaacttctcatgcagtgataacaactggaggatgcgtgcttcgtggatgtgttccaaagaaattgctagtgtacgcatccaagtactctcacgagtttgaagagtctcgtggatttggatggacatatgagactgatccgaagcatgattggagcactctcatagccaataaaaatacagagctgcagcgcctggttggcatttacaggaatattttaaacaatgcaggagtcactctgatcgaaggtcgtggaaagatagtcgatcctcatactgtcagtgtgaatggtaagctctacactgctaagcacatactagttagtgttggtggccgaccatcgatgccagatatccctggtatagagcatgttatagattcggatgctgcgctggatttgccttcaaaacctgagaaaattgcaatagtgggaggtgggtatattgctttggagtttgctggcattttcaatggcttaaagagtgaagtccatgtgtttattcgtcagaagaaagttttaagaggatttgatgaagaggttagagattttgtcgctgaacaaatgtctttaaggggcatcacgtttcatacagaacagagccctcaagctataactaaatcaaatgatggtctgttatctttgaagaccaataaagaaaattttggtgggttctcacatgtaatgtttgcaacaggtcgcagaccaaattcaaagaaccttggactggaagcggtgggggttgaaatggataagaacggtgcaatagtggttgatgagtattcacgtacctcagttgattccatttgggctgttggagatgttaccaatagggtcaacctgacaccagttgcactgatggagggtggggcatttgcgaaaactgtctttggcaatgaacctaccaaaccagattacagagctataccttctgctgtgttctcccaaccaccaataggacaagttggtcttactgaggagcaggcaattgaagagtatggagatgttgatgtcttcgttgccaacttcaggcccctcaaggccactctgtctggactacctgatcgtgtattgatgaagattcttgtgtgcgctacgtcaaacaaagttgtaggagtgcacatgtgtggtgatgatgcacctgagataattcagggaattgcaattgctgttaaagctggattgacgaagcaagattttgatgccaccattggcattcaccccacatccgctgaggaattcgtcacaatgaggagcccgactagaaaaattcgaaaaagttctacagatcaggtagaatctaaagatgaggttgtaagtaagcagtagatagcattttttcctaggaggtgttctcgggggagggagtattcctgctgcaggacgacagctggacggaattttggaatacaccggcagagtagctgaaataacggctaggaatttctgagaaatttcatgttagggaaccaacgatgctgtttaatagaattggctgtacatacctgtccgccgagctattttcctgtgtcttgtacgttgaaataaaatactgcaaatgtttgccttacggtcatgaaattttgcaataaccaataagtaatcaatgcgccttcctaagcgttcgctgtgatatttgacaaacaaaactgcacgtttttttttctttcaagaatctaccatctaccttatttctgtatactgatctactatttaccttattt

SEQ ID NO: 473 - DNA, 3388 bp, Zea Mays
cacacctgacgttctgcctcccatagtcccacccgacatcctcgcccagatcgcgtcgctaatctcgcggtcgcgcctcggccgatccgcgcccgcctgccgccgcctgcgattgtagctcaccccgacaccgcgccccctcctctcccctgacgtgatgcccgcctcccacccccttctccgcatcgcacggatctagcgcgggaattgctcggccacggctccgcacaccctcccttcccatgagacggagccgccgtatcctgctcgcgaggcaacggaagggtacgtgatcctctgtctacatggaaggtgaggcagatcagggggagagtggctcgtggcagtcgcctcgacggcgtccttcgcgccgtccggcgaggtgtcgtccaagcacggcgtcgtcggctacgggatcgtgggcgggcccaatggcaacgccgtcgcgcccgccgccaagtccaccgtcgtcgagaccaccgtcgagagggttatcttcgatttctggttcctggcgctcctccccaccgctcgggaaccactccaccgccgagaccgtcttaacgatcagctccgttgtggcccgcccgcgaccccgtatccgctcgcgctcagctagggttcagatctgaaaatggctgatgacggtgcgaggaggggaatgcccgctgaaggctgaagctgcccccacgggctacagtaggtgccatcgctcaccacaccgaacaccccactgcccccagaccgtgctccagggccctacggcgataggaggccactgaggatggcccggtgcggtactgctgccttccagaggacgccgagcgccggagaggggctcttctattggacttggagcaagcccacggcgacaacgccggaagcaaaatggcctcttctctagaaggacatgagttcgatccaccacagggaggcgcgcccgccaggctccatcttcggatctgatcgcccaccaagtgggttgagttcgaaaaatgaagtcagcaaggaatacttcttaaaaactgtaaggaatattgttggtgataaaagctgcttcacgatatcaaatgcaggtaaataatatttccacttcattgtgttatatgtaaacataacctatcttgccaccatagctttgtatttttggtgtgatgcaatcttattagtcattcttactagcactttttgttttgttttgtgggttatttactcatgtttgctcaggcacaacgaagccctcagacaaacccaagcaactattctttatcaggtcaagtttttggtcagcagactgctcccagtggttctgtgataggagatgaacagaagggatatccatgggcgcacaccatccctatgagacaagctattgccagcactcgaccacctcaattttggccttcctcgtctggccaaatgcggagtaatatggtacaaacaatgcagcatcacatgcagtgaccacaaacatcttcaccagtgtttggggcaaatagtattcatgcacgtccatttccgcggccagttggaggtccaactgcaccatttagaccacaaatggcagattccaatccaagagcacacttgattcagggagctgcgaccacagtatctgggagtgtgccaacacgatccatagtgtctggaaatgcgccagtcaatcaagccttgggatcttcaaaagtcagtgctggcatggaaagccagtcacaacaattgagtgcgcctaagcctttagctgcaacaagcttaagtcagactcaatctcttggcattcaagaagagcctaaaattcaggggaagaaacaactattattcgagagtttgcctgcaaccgatctaaaggttagagcgagcggcatgtgatgcggattacgaactaaacttaaatcaaatacttcagtattggtctctagagaggaagctctgccaaccattactaataactgagaagatgttcgcgtacagggagacggtgttggaggaggcacatcggggcatggagctgcgtgagcactgccgccatatagttgacaacgatgaccgacactatagattccattctctgtgtgtacaccaaggttactgcgaccgtgatgggcatctaggtgctcgaaccattagttgggctaaggaacacggagcagcagcaacaatatcgtaaggagagtgcagacgttggacaaatggtatgccatatcttcagttctcttatgatgcttcagcgctgcatcttcagttttctcggctaaaaagagatcatagtcaatagtatacctatgtgtgaaatactgtcaaacttgcatggtatatggacctcagaaagtataggaaagcgctatgctatttgcatgtttgctgggagaaagaaaagatagatgaaggtaattatacagtttctaatacattgttcagcttttgttatttatgccatatgatacacactggtcatgaggacatgtcgattgtagttcactggtattgttttttttgaaaggaagcggcaaaagacttgcctcttcattgtattagattaggaaaaataagataatccacaggaccgaaacacacaccggaagagaaaaaacaaaatcaaaatacaaaaaaagttcaccggtattgtaagctttgcagataagagcacaacttttccccctcttttctaaaagggaagctcatgttcatttcagcaattcagcttcaaccatttggcattcatgtaatatttcataggagttaaagggcacatacctaatcaagtctgtgggtctccaattctgaaatagaaagataatttatgttctcatctttctgaaatgaacaagatgactggcttatgggttaaggtttttttatagagcaccatgacttatcagttttgtgaacaaccctaacttatgtggtcctggcaccacaaaaccttgtcctgatgctcctcccttttctccacctcctccatacaaccctacaaccccgatgcaatcaccaggaagtagctcttccactactggagcaattgttggtggagtggctgctggcgcagccttgctatttgctgttcctgctatcagttttgcctattggcggcacaggaaaccacaagagcaagcatttttttcaatgtatctggcttcaaagttagtctttgattattatctttctcgcaacataagggcaaacaatgtttatatgtagcaaacaaatacggtttgcaaacgttttaggaacatgtttttacaataaagatatacttatagtttcaccaatggatggccaaaaaatacaaccttttacatttgtcaaccttttagttaaggaaatatagaacaacagcaagtagattttgataaacccattagaatctcaatataaatatagatatcga

SEQ ID NO: 474 - DNA, 3076 bp, Zea Mays
cacacctgacgttctgcctcccatagtcccacccgacatcctcgcccagatcgcgtcgctaatctcgcggtcgcgcctcggccgatccgcgcccgcctgccgccgcctgcgattgtagctcaccccgacaccgcgccccctcctctcccctgacgtgatgcccgcctcccacccccttctccgcatcgcacggatctagcgcgggaattgctcggccacggctccgcacaccctcccttcccatgagacggagccgccgtatcctgctcgcgaggcaacggaagggtacgtgatcctctgtctacatggaaggtgaggcagatcagggggagagtggctcgtggcagtcgcctcgacggcgtccttcgcgccgtccggcgaggtgtcgtccaagcacggcgtcgtcggctacgggatcgtgggcgggcccaatggcaacgccgtcgcgcccgccgccaagtccaccgtcgtcgagaccaccgtcgagagggttatcttcgatttctggttcctggcgctcctccccaccgctcgggaaccactccaccgccgagaccgtcttaacgatcagctccgttgtggcccgcccgcgaccccgtatccgctcgcgctcagctagggttcagatctgaaaatggctgatgacggtgcgaggaggggaatgcccgctgaaggctgaagctgcccccacgggctacagtaggtgccatcgctcaccacaccgaacaccccactgcccccagaccgtgctccagggccctacggcgataggaggccactgaggatggcccggtgcggtactgctgccttccagaggacgccgagcgccggagaggggctcttctattggacttggagcaagcccacggcgacaacgccggaagcaaaatggcctcttctctagaaggacatgagttcgatccaccacagggaggcgcgcccgccaggctccatcttcggatctgatcgcccaccaagtgggttgagttcgaaaaatgaagtcagcaaggaatacttcttaaaaactgtaaggaatattgttggtgataaaagctgcttcacgatatcaaatgcaggtaaataatatttccacttcattgtgttatatgtaaacataacctatcttgccaccatagctttgtatttttggtgtgatgcaatcttattagtcattcttactagcactttttgttttgttttgtgggttatttactcatgtttgctcaggcacaacgaagccctcagacaaacccaagcaactattctttatcaggtcaagtttttggtcagcagactgctcccagtggttctgtgataggagatgaacagaagggatatccatgggcgcacaccatccctatgagacaagctattgccagcactcgaccacctcaattttggccttcctcgtctggccaaatgcggagtaatatggtacaaacaatgcagcatcacatgcagtgaccacaaacatcttcaccagtgtttggggcaaatagtattcatgcacgtccatttccgcggccagttggaggtccaactgcaccatttagaccacaaatggcagattccaatccaagagcacacttgattcagggagctgcgaccacagtatctgggagtgtgccaacacgatccatagtgtctggaaatgcgccagtcaatcaagccttgggatcttcaaaagtcagtgctggcatggaaagccagtcacaacaattgagtgcgcctaagcctttagctgcaacaagcttaagtcagactcaatctcttggcattcaagaagagcctaaaattcaggggaagaaacaactattattcgagagtttgcctgcaaccgatctaaaggttagagcgagcggcatgtgatgcggattacgaactaaacttaaatcaaatacttcagtattggtctctagagaggaagctctgccaaccattactaataactgagaagatgttcgcgtacagggagacggtgttggaggaggcacatcggggcatggagctgcgtgagcactgccgccatatagttgacaacgatgaccgacactatagattccattctctgtgtgtacaccaaggtgctcgaaccattagttgggctaaggaacacggagcagcagcaacaatatcgtaaggagagtgcagacgttggacaaatggtatgccatatcttcagttctcttatgatgcttcagcgctgcatcttcagttttctcggctaaaaagagatcatagtcaatagtatacctatgtgtgaaatactgtcaaacttgcatggtatatggacctcagaaagtataggaaagcgctatgctatttgcatgtttgctgggagaaagaaaagatagatgaagggaagctcatgttcatttcagcaattcagcttcaaccatttggcattcatgtaatatttcataggagttaaagggcacatacctaatcaagtctgtgggtctccaattctgaaatagaaagataatttatgttctcatctttctgaaatgaacaagatgactggcttatgggttaaggtttttttatagagcaccatgacttatcagttttgtgaacaaccctaacttatgtggtcctggcaccacaaaaccttgtcctgatgctcctcccttttctccacctcctccatacaaccctacaaccccgatgcaatcaccaggaagtagctcttccactactggagcaattgttggtggagtggctgctggcgcagccttgctatttgctgttcctgctatcagttttgcctattggcggcacaggaaaccacaagagcaagcatttttttcaatgtatctggcttcaaagttagtctttgattattatctttctcgcaacataagggcaaacaatgtttatatgtagcaaacaaatacggtttgcaaacgttttaggaacatgtttttacaataaagatatacttatagtttcaccaatggatggccaaaaaatacaaccttttacatttgtcaaccttttagttaaggaaatatagaacaacagcaagtagattttgataaacccattagaatctcaatataaatatagatatcga

SEQ ID NO: 475 - DNA, 2895 bp, Zea Mays
cacacctgacgttctgcctcccatagtcccacccgacatcctcgcccagatcgcgtcgctaatctcgcggtcgcgcctcggccgatccgcgcccgcctgccgccgcctgcgattgtagctcaccccgacaccgcgccccctcctctcccctgacgtgatgcccgcctcccacccccttctccgcatcgcacggatctagcgcgggaattgctcggccacggctccgcacaccctcccttcccatgagacggagccgccgtatcctgctcgcgaggcaacggaagggtacgtgatcctctgtctacatggaaggtgaggcagatcagggggagagtggctcgtggcagtcgcctcgacggcgtccttcgcgccgtccggcgaggtgtcgtccaagcacggcgtcgtcggctacgggatcgtgggcgggcccaatggcaacgccgtcgcgcccgccgccaagtccaccgtcgtcgagaccaccgtcgagagggttatcttcgatttctggttcctggcgctcctccccaccgctcgggaaccactccaccgccgagaccgtcttaacgatcagctccgttgtggcccgcccgcgaccccgtatccgctcgcgctcagctagggttcagatctgaaaatggctgatgacggtgcgaggaggggaatgcccgctgaaggctgaagctgcccccacgggctacagtaggtgccatcgctcaccacaccgaacaccccactgcccccagaccgtgctccagggccctacggcgataggaggccactgaggatggcccggtgcggtactgctgccttccagaggacgccgagcgccggagaggggctcttctattggacttggagcaagcccacggcgacaacgccggaagcaaaatggcctcttctctagaaggacatgagttcgatccaccacagggaggcgcgcccgccaggctccatcttcggatctgatcgcccaccaagtgggttgagttcgaaaaatgaagtcagcaaggaatacttcttaaaaactgtaaggaatattgttggtgataaaagctgcttcacgatatcaaatgcaggtaaataatatttccacttcattgtgttatatgtaaacataacctatcttgccaccatagctttgtatttttggtgtgatgcaatcttattagtcattcttactagcactttttgttttgttttgtgggttatttactcatgtttgctcaggcacaacgaagccctcagacaaacccaagcaactattctttatcaggtcaagtttttggtcagcagactgctcccagtggttctgtgataggagatgaacagaagggatatccatgggcgcacaccatccctatgagacaagctattgccagcactcgaccacctcaattttggccttcctcgtctggccaaatgcggagtaatatggtacaaacaatgcagcatcacatgcagtgaccacaaacatcttcaccagtgtttggggcaaatagtattcatgcacgtccatttccgcggccagttggaggtccaactgcaccatttagaccacaaatggcagattccaatccaagagcacacttgattcagggagctgcgaccacagtatctgggagtgtgccaacacgatccatagtgtctggaaatgcgccagtcaatcaagccttgggatcttcaaaagtcagtgctggcatggaaagccagtcacaacaattgagtgcgcctaagcctttagctgcaacaagcttaagtcagactcaatctcttggcattcaagaagagcctaaaattcaggggaagaaacaactattattcgagagtttgcctgcaaccgatctaaaggttagagcgagcggcatgtgatgcggattacgaactaaacttaaatcaaatacttcagtattggtctctagagaggaagctctgccaaccattactaataactgagaagatgttcgcgtacagggagacggtgttggaggaggcacatcggggcatggagctgcgtgagcactgccgccatatagttgacaacgatgaccgacactatagattccattctctgtgtgtacaccaaggtgctcgaaccattagttgggctaaggaacacggagcagcagcaacaatatcgtaaggagagtgcagacgttggacaaatggagttaaagggcacatacctaatcaagtctgtgggtctccaattctgaaatagaaagataatttatgttctcatctttctgaaatgaacaagatgactggcttatgggttaaggtttttttatagagcaccatgacttatcaggtaaagttatagttgtgcacaaaatgtcattttttaatccttaatgcgtgtgctattcacacctgtcttcttttgcagttttgtgaacaaccctaacttatgtggtcctggcaccacaaaaccttgtcctgatgctcctcccttttctccacctcctccatacaaccctacaaccccgatgcaatcaccaggaagtagctcttccactactggagcaattgttggtggagtggctgctggcgcagccttgctatttgctgttcctgctatcagttttgcctattggcggcacaggaaaccacaagagcaagcatttttttcaatgtatctggcttcaaagttagtctttgattattatctttctcgcaacataagggcaaacaatgtttatatgtagcaaacaaatacggtttgcaaacgttttaggaacatgtttttacaataaagatatacttatagtttcaccaatggatggccaaaaaatacaaccttttacatttgtcaaccttttagttaaggaaatatagaacaacagcaagtagattttgataaacccattagaatctcaatataaatatagatatcga

SEQ ID NO: 476 - DNA, 2561 bp, Zea Mays
cacacctgacgttctgcctcccatagtcccacccgacatcctcgcccagatcgcgtcgctaatctcgcggtcgcgcctcggccgatccgcgcccgcctgccgccgcctgcgattgtagctcaccccgacaccgcgccccctcctctcccctgacgtgatgcccgcctcccacccccttctccgcatcgcacggatctagcgcgggaattgctcggccacggctccgcacaccctcccttcccatgagacggagccgccgtatcctgctcgcgaggcaacggaagggtacgtgatcctctgtctacatggaaggtgaggcagatcagggggagagtggctcgtggcagtcgcctcgacggcgtccttcgcgccgtccggcgaggtgtcgtccaagcacggcgtcgtcggctacgggatcgtgggcgggcccaatggcaacgccgtcgcgcccgccgccaagtccaccgtcgtcgagaccaccgtcgagagggttatcttcgatttctggttcctggcgctcctccccaccgctcgggaaccactccaccgccgagaccgtcttaacgatcagctccgttgtggcccgcccgcgaccccgtatccgctcgcgctcagctagggttcagatctgaaaatggctgatgacggtgcgaggaggggaatgcccgctgaaggctgaagctgcccccacgggctacagtaggtgccatcgctcaccacaccgaacaccccactgcccccagaccgtgctccagggccctacggcgataggaggccactgaggatggcccggtgcggtactgctgccttccagaggacgccgagcgccggagaggggctcttctattggacttggagcaagcccacggcgacaacgccggaagcaaaatggcctcttctctagaaggacatgagttcgatccaccacagggaggcgcgcccgccaggctccatcttcggatctgatcgcccaccaagtgggttgagttcgaaaaatgaagtcagcaaggaatacttcttaaaaactgtaaggaatattgttggtgataaaagctgcttcacgatatcaaatgcaggtaaataatatttccacttcattgtgttatatgtaaacataacctatcttgccaccatagctttgtatttttggtgtgatgcaatcttattagtcattcttactagcactttttgttttgttttgtgggttatttactcatgtttgctcaggcacaacgaagccctcagacaaacccaagcaactattctttatcaggtcaagtttttggtcagcagactgctcccagtggttctgtgataggagatgaacagaagggatatccatgggcgcacaccatccctatgagacaagctattgccagcactcgaccacctcaattttggccttcctcgtctggccaaatgcggagtaatatggtacaaacaatgcagcatcacatgcagtgaccacaaacatcttcaccagtgtttggggcaaatagtattcatgcacgtccatttccgcggccagttggaggtccaactgcaccatttagaccacaaatggcagattccaatccaagagcacacttgattcagggagctgcgaccacagtatctgggagtgtgccaacacgatccatagtgtctggaaatgcgccagtcaatcaagccttgggatcttcaaaagtcagtgctggcatggaaagccagtcacaacaattgagtgcgcctaagcctttagctgcaacaagcttaagtcagactcaatctcttggcattcaagaagagcctaaaattcaggggaagaaacaactattattcgagagtttgcctgcaaccgatctaaaggttagagcgagcggcatgtgatgcggattacgaactaaacttaaatcaaatacttcagtattggtctctagagaggaagctctgccaaccattactaataactgagaagatgttcgcgtacagggagacggtgttggaggaggcacatcggggcatggagctgcgtgagcactgccgccatatagttgacaacgatgaccgacactatagattccattctctgtgtgtacaccaaggtgctcgaaccattagttgggctaaggaacacggagcagcagcaacaatatcgtaaggagagtgcagacgttggacaaatggaagtagctcttccactactggagcaattgttggtggagtggctgctggcgcagccttgctatttgctgttcctgctatcagttttgcctattggcggcacaggaaaccacaagagcaagcatttttttcaatgtatctggcttcaaagttagtctttgattattatctttctcgcaacataagggcaaacaatgtttatatgtagcaaacaaatacggtttgcaaacgttttaggaacatgtttttacaataaagatatacttatagtttcaccaatggatggccaaaaaatacaaccttttacatttgtcaaccttttagttaaggaaatatagaacaacagcaagtagattttgataaacccattagaatctcaatataaatatagatatcga

SEQ ID NO: 477 - DNA, 2651 bp, Zea Mays
tagcgacttaatgtgctgggatgtgctgcgtgtgtggcattttggaccatgttaggcgagatctggtgtcaatagtttgcatatgcttctggtgtgccacgattgctacttctgcaggatgacgagagtttgcctgcaaccgatctaaaggttagagcgagcggcatgtgatgcggaaaaatgaagtcagcaaggaatacttcttaaaaactgtaaggaatattgttggtgataaaagctgcttcacgatatcaaatgcaggtaaataatatttccacttcattgtgttatatgtaaacataacctatcttgccaccatagctttgtatttttggtgtgatgcaatcttattagtcattcttactagcactttttgttttgttttgtgggttatttactcatgtttgctcaggcacaacgaagccctcagacaaacccaagcaactattctttatcaggtcaagtttttggtcagcagactgctcccagtggttctgtgataggagatgaacagaagggatatccatgggcgcacaccatccctatgagacaagctattgccagcactcgaccacctcaattttggccttcctcgtctggccaaatgcggagtaatatggtacaaacaatgcagcatcacatgcagtgaccacaaacatcttcaccagtgtttggggcaaatagtattcatgcacgtccatttccgcggccagttggaggtccaactgcaccatttagaccacaaatggcagattccaatccaagagcacacttgattcagggagctgcgaccacagtatctgggagtgtgccaacacgatccatagtgtctggaaatgcgccagtcaatcaagccttgggatcttcaaaagtcagtgctggcatggaaagccagtcacaacaattgagtgcgcctaagcctttagctgcaacaagcttaagtcagactcaatctcttggcattcaagaagagcctaaaattcaggggaagaaacaactattattcgagagtttgcctgcaaccgatctaaaggttagagcgagcggcatgtgatgcggattacgaactaaacttaaatcaaatacttcagtattggtctctagagaggaagctctgccaaccattactaataactgagaagatgttcgcgtacagggagacggtgttggaggaggcacatcggggcatggagctgcgtgagcactgccgccatatagttgacaacgatgaccgacactatagattccattctctgtgtgtacaccaaggttactgcgaccgtgatgggcatctaggtgctcgaaccattagttgggctaaggaacacggagcagcagcaacaatatcgtaaggagagtgcagacgttggacaaatggtatgccatatcttcagttctcttatgatgcttcagcgctgcatcttcagttttctcggctaaaaagagatcatagtcaatagtatacctatgtgtgaaatactgtcaaacttgcatggtatatggacctcagaaagtataggaaagcgctatgctatttgcatgtttgctgggagaaagaaaagatagatgaaggtaattatacagtttctaatacattgttcagcttttgttatttatgccatatgatacacactggtcatgaggacatgtcgattgtagttcactggtattgttttttttgaaaggaagcggcaaaagacttgcctcttcattgtattagattaggaaaaataagataatccacaggaccgaaacacacaccggaagagaaaaaacaaaatcaaaatacaaaaaaagttcaccggtattgtaagctttgcagataagagcacaacttttccccctcttttctaaaagggaagctcatgttcatttcagcaattcagcttcaaccatttggcattcatgtaatatttcataggagttaaagggcacatacctaatcaagtctgtgggtctccaattctgaaatagaaagataatttatgttctcatctttctgaaatgaacaagatgactggcttatgggttaaggtttttttatagagcaccatgacttatcaggtaaagttatagttgtgcacaaaatgtcattttttaatccttaatgcgtgtgctattcacacctgtcttcttttgcagttttgtgaacaaccctaacttatgtggtcctggcaccacaaaaccttgtcctgatgctcctcccttttctccacctcctccatacaaccctacaaccccgatgcaatcaccaggaagtagctcttccactactggagcaattgttggtggagtggctgctggcgcagccttgctatttgctgttcctgctatcagttttgcctattggcggcacaggaaaccacaagagcaagcatttttttcaatgtatctggcttcaaagttagtctttgattattatctttctcgcaacataagggcaaacaatgtttatatgtagcaaacaaatacggtttgcaaacgttttaggaacatgtttttacaataaagatatacttatagtttcaccaatggatggccaaaaaatacaaccttttacatttgtcaaccttttagttaaggaaatatagaacaacagcaagtagattttgataaacccattagaatctcaatataaatatagatatcga

SEQ ID NO: 478 - DNA, 1639 bp, Zea Mays
atgggttgacgtcgctgggccctaaggttctctcgatgctgattaggggagctgcaccgccgcgatcagcctcagcttcttcttgctgcacgagaaccatagatgcttgatctcttagaggctgctgccctgcaatttgtcttcacgaatttagttaattgaagctgatcgagaggtatttgagagacaagaggggtttcagctggcaattggaaatgagaaaaatgcagagggaggagaaggggatgatggattgcttctttggaactatgctatataaaagatttttttctagcttgacttctagcattggctgaggcatgagcatggacgactgagcatgtaatagtcttcaaaattctgctttagttctcatataatctttgttccactctccccgtgtgctatgccatgatctggaatcatctctgaactcttcttgaatactgaatattctgatactgatatcagaacatgtatttgtttaacaaaaaattatatcctgacctactgtttccagatgttcgcgtacagggagacggtgttggaggaggcacatcggggcatggagctgcgtgagcactgccgccatatagttgacaacgatgaccgacactatagattccattctctgtgtgtacaccaaggtgctcgaaccattagttgggctaaggaacacggagcagcagcaacaatatcgtaaggagagtgcagacgttggacaaatggtatgccatatcttcagttctcttatgatgcttcagcgctgcatcttcagttttctcggctaaaaagagatcatagtcaatagtatacctatgtgtgaaatactgtcaaacttgcatggtatatggacctcagaaagtataggaaagcgctatgctatttgcatgtttgctgggagaaagaaaagatagatgaagggaagctcatgttcatttcagcaattcagcttcaaccatttggcattcatgtaatatttcataggagttaaagggcacatacctaatcaagtctgtgggtctccaattctgaaatagaaagataatttatgttctcatctttctgaaatgaacaagatgactggcttatgggttaaggtttttttatagagcaccatgacttatcagttttgtgaacaaccctaacttatgtggtcctggcaccacaaaaccttgtcctgatgctcctcccttttctccacctcctccatacaaccctacaaccccgatgcaatcaccaggaagtagctcttccactactggagcaattgttggtggagtggctgctggcgcagccttgctatttgctgttcctgctatcagttttgcctattggcggcacaggaaaccacaagagcaagcatttttttcaatgtatctggcttcaaagttagtctttgattattatctttctcgcaacataagggcaaacaatgtttatatgtagcaaacaaatacggtttgcaaacgttttaggaacatgtttttacaataaagatatacttatagtttcaccaatggatggccaaaaaatacaaccttttacatttgtcaaccttttagttaaggaaatatagaacaacagcaagtagattttgataaacccattagaatctcaatataaatatagatatcga

SEQ ID NO: 479 - DNA, 1924 bp, Zea Mays
atgggttgacgtcgctgggccctaaggttctctcgatgctgattaggggagctgcaccgccgcgatcagcctcagcttcttcttgctgcacgagaaccatagatgcttgatctcttagaggctgctgccctgcaatttgtcttcacgaatttagttaattgaagctgatcgagaggtatttgagagacaagaggggtttcagctggcaattggaaatgagaaaaatgcagagggaggagaaggggatgatggattgcttctttggaactatgctatataaaagatttttttctagcttgacttctagcattggctgaggcatgagcatggacgactgagcatgtaatagtcttcaaaattctgctttagttctcatataatctttgttccactctccccgtgtgctatgccatgatctggaatcatctctgaactcttcttgaatactgaatattctgatactgatatcagaacatgtatttgtttaacaaaaaattatatcctgacctactgtttccagatgttcgcgtacagggagacggtgttggaggaggcacatcggggcatggagctgcgtgagcactgccgccatatagttgacaacgatgaccgacactatagattccattctctgtgtgtacaccaaggtgctcgaaccattagttgggctaaggaacacggagcagcagcaacaatatcgtaaggagagtgcagacgttggacaaatggtatgccatatcttcagttctcttatgatgcttcagcgctgcatcttcagttttctcggctaaaaagagatcatagtcaatagtatacctatgtgtgaaatactgtcaaacttgcatggtatatggacctcagaaagtataggaaagcgctatgctatttgcatgtttgctgggagaaagaaaagatagatgaaggtaattatacagtttctaatacattgttcagcttttgttatttatgccatatgatacacactggtcatgaggacatgtcgattgtagttcactggtattgttttttttgaaaggaagcggcaaaagacttgcctcttcattgtattagattaggaaaaataagataatccacaggaccgaaacacacaccggaagagaaaaaacaaaatcaaaatacaaaaaaagttcaccggtattgtaagctttgcagataagagcacaacttttccccctcttttctaaaagggaagctcatgttcatttcagcaattcagcttcaaccatttggcattcatgtaatatttcataggagttaaagggcacatacctaatcaagtctgtgggtctccaattctgaaatagaaagataatttatgttctcatctttctgaaatgaacaagatgactggcttatgggttaaggtttttttatagagcaccatgacttatcagttttgtgaacaaccctaacttatgtggtcctggcaccacaaaaccttgtcctgatgctcctcccttttctccacctcctccatacaaccctacaaccccgatgcaatcaccaggaagtagctcttccactactggagcaattgttggtggagtggctgctggcgcagccttgctatttgctgttcctgctatcagttttgcctattggcggcacaggaaaccacaagagcaagcatttttttcaatgtatctggcttcaaagttagtctttgattattatctttctcgcaacataagggcaaacaatgtttatatgtagcaaacaaatacggtttgcaaacgttttaggaacatgtttttacaataaagatatacttatagtttcaccaatggatggccaaaaaatacaaccttttacatttgtcaaccttttagttaaggaaatatagaacaacagcaagtagattttgataaacccattagaatctcaatataaatatagatatcga

SEQ ID NO: 480 - DNA, 1346 bp, Zea Mays
atgggttgacgtcgctgggccctaaggttctctcgatgctgattaggggagctgcaccgccgcgatcagcctcagcttcttcttgctgcacgagaaccatagatgcttgatctcttagaggctgctgccctgcaatttgtcttcacgaatttagttaattgaagctgatcgagaggtatttgagagacaagaggggtttcagctggcaattggaaatgagaaaaatgcagagggaggagaaggggatgatggattgcttctttggaactatgctatataaaagatttttttctagcttgacttctagcattggctgaggcatgagcatggacgactgagcatgtaatagtcttcaaaattctgctttagttctcatataatctttgttccactctccccgtgtgctatgccatgatctggaatcatctctgaactcttcttgaatactgaatattctgatactgatatcagaacatgtatttgtttaacaaaaaattatatcctgacctactgtttccagatgttcgcgtacagggagacggtgttggaggaggcacatcggggcatggagctgcgtgagcactgccgccatatagttgacaacgatgaccgacactatagattccattctctgtgtgtacaccaaggttactgcgaccgtgatgggcatctaggtgctcgaaccattagttgggctaaggaacacggagcagcagcaacaatatcgtaaggagagtgcagacgttggacaaatggtatgccatatcttcagttctcttatgatgcttcagcgctgcatcttcagttttctcggctaaaaagagatcatagtcaatagtatacctatgtgtgaaatactgtcaaacttgcatggtatatggacctcagaaagtataggaaagcgctatgctatttgcatgtttgctgggagaaagaaaagatagatgaaggaagtagctcttccactactggagcaattgttggtggagtggctgctggcgcagccttgctatttgctgttcctgctatcagttttgcctattggcggcacaggaaaccacaagagcaagcatttttttcaatgtatctggcttcaaagttagtctttgattattatctttctcgcaacataagggcaaacaatgtttatatgtagcaaacaaatacggtttgcaaacgttttaggaacatgtttttacaataaagatatacttatagtttcaccaatggatggccaaaaaatacaaccttttacatttgtcaaccttttagttaaggaaatatagaacaacagcaagtagattttgataaacccattagaatctcaatataaatatagatatcga

SEQ ID NO: 481 - DNA, 1540 bp, Zea Mays
atccgcatcactgcgtgtcctcctcctcctcctcctctccccctcatcgcgtgtccgcatctgccgattccgccacctcctcctcctcctcgcccctgtgccccgagatctcgcatccgctccatctatggaaggccaccacgtgtcgtggatcgccgctctctaccgccacctcaatggaaggttcgccgctctctacgcggatctgccacctccttttcggctgccgccaatggaagaattccagagctgcgattcccgaggccatggagcagcaaacaatatcaattgccaaagctgccattacaatagtactcattttagggacttcagttcttgcagctgtcaatccaattgcaggatgctatgacgctcttaagtgatcatgaacttatacattgaaatcctgacgggcctcgagaggccaggaggtggagatgagttcaacaagtactacatcttgtcagctctctcctatccgtggattgatcactctgtcgaccaatccaaggaaggcacctgaagcttagggaggacacctcacaagtcacggctacccgtgctgcatctgtgtgattttgtaatttgaatgagcaaatctatctggcgtcagtgcggggttgggtttcctagagggaggaacatcgtgggatgcaggtcccaaggaacaccagatattttgaggcagaccgtggcgaggtgcccaagggcagcgcctagatcttcttctggatggtcaagttctggaacgataatgtggcagaggagatgccctggtcttcgtacgtatatgttacttactcccactctcaacatagcagtagtgttatgcaatgacatgtctttccctaatgcaccgaagcttggatgggtccgttgaaggttgtgttgtttaggttgaaggatgtatgcatggaatagaagtcagataaaacttttgtgcaacaggctgaagtcattcttgttgatgggaaattaatagaggctaatgctgaccaacttgctaaggtttaaatgcaggatattacaaaagtcaggttggagaactcccttgtttaggcttttgtcttgcttctgcagaaggagagatgacgtgtttcatctctgcatgacatgatggcatgtgaggcagcagtctctgctccgcaacccttgtcatggcttggagttggtattctaggaaggggcacaattttattagggtagccactagagttgaggtcccttttcaatggacgaacttggtgctgtggacgacatctgctattgtagctaggcgcatacatgttttcctataaatgctagctctgcaatcaccaaaggaaaacacaagagtactcttggaggaaagtttagcattcaatttaaaaaaccttaccaactcatgccttatttgaatgcaataatgcatgttctgttgccatgctgttgcttggacacatgcttggcatggctattttctggttatgtcacaactcatatctcccatgtaaatttatggctatgatatgcatcaaacaagcttatattttgctctcaa

SEQ ID NO: 482 - DNA, 1254 bp, Zea Mays
ttatattctatattcttttggtttctgaaagggtgcctgaaatatcctatagatgtctttagtagagggtccaaataatggcctgcaaggtttcttgaattggatcgcacaaaattccatctgcttcagaattgagctaagcgcatcctaacatcttgactcctaataccgactaagaattactagcatttcatctcgaaagatcactctgtcgaccaatccaaggaaggcacctgaagcttagggaggacacctcacaagtcacggctacccgtgctgcatctgtgtgattttgtaatttgaatgagcaaatctatctggcgtcagtgcggggttgggtttcctagagggaggaacatcgtgggatgcaggtcccaaggaacaccagatattttgaggcagaccgtggcgaggtgcccaagggcagcgcctagatcttcttctggatggtcaagttctggaacgataatgtggcagaggagatgccctggtcttcgtacgtatatgttacttactcccactctcaacatagcagtagtgttatgcaatgacatgtctttccctaatgcaccgaagcttggatgggtccgttgaaggttgtgttgtttaggttgaaggatgtatgcatggaatagaagtcagataaaacttttgtgcaacaggctgaagtcattcttgttgatgggaaattaatagaggctaatgctgaccaacttgctaaggtttaaatgcaggatattacaaaagtcaggttggagaactcccttgtttaggcttttgtcttgcttctgcagaaggagagatgacgtgtttcatctctgcatgacatgatggcatgtgaggcagcagtctctgctccgcaacccttgtcatggcttggagttggtattctaggaaggggcacaattttattagggtagccactagagttgaggtcccttttcaatggacgaacttggtgctgtggacgacatctgctattgtagctaggcgcatacatgttttcctataaatgctagctctgcaatcaccaaaggaaaacacaagagtactcttggaggaaagtttagcattcaatttaaaaaaccttaccaactcatgccttatttgaatgcaataatgcatgttctgttgccatgctgttgcttggacacatgcttggcatggctattttctggttatgtcacaactcatatctcccatgtaaatttatggctatgatatgcatcaaacaagcttatattttgctctcaa

SEQ ID NO: 483 - DNA, 1720 bp, Zea Mays
ttatattctatattcttttggtttctgaaagggtgcctgaaatatcctatagatgtctttagtagagggtccaaataatggcctgcaaggtttcttgaattggatcgcacaaaattccatctgcttcagaattgagctaagcgcatcctaacatcttgactcctaataccgactaagaattactagcatttcatctcgaaagatcactctgtcgaccaatccaaggaaggcacctgaagcttagggaggacacctcacaagtcacggctacccgtgctgcatctgtgtgattttgtaatttgaatgagcaaatctatctggcgtcagtgcggggttggggtagtttcctagagggaggaacatcgtgggatgcaggtcccaaggaacaccagatattttgaggcagaccgtggcgaggtgcccaagggcagcgcctagatcttcttctggatggtcaagttctggaacgataatgtggcagaggagatgccctggtcttcgtgttatgcaatgacatgtctttccctaatgcaccgaagcttggatgggtccgttgaaggttgtgttgtttagtcaggtggtggctataattcctagagatgtgtgagggcacatatctagaggacgtccacaccatgcctccaccccctggccctagccgcctcgcgtcgtcagtgcctccctcgcctcacccccatcatcgacgttggaaatcgccccgaccctggctcccagatcggcgttcacccaagatcccccggcgcgatgcggcaaccacgtggtctccccttcaaggaagtggaatgggggccttgaccaccaccactcgtgtctctagctgtttttgttatatcatttcatttttccataatagtgaatttgtttgtgaggtatagtctttgttggcttaaaatggtaattttttctatttttcacatgagataatttatgccgagctgagcaattgtcgtttatcttagtgcaactgatgctggagctgaagttagcgtctgtttctaatttctaggtttctgtgtttcaatggcctcttgaaaattgaaaatggcctcttgtaggttgaaggatgtatgcatggaatagaagtcagataaaacttttgtgcaacaggctgaagtcattcttgttgatgggaaattaatagaggctaatgctgaccaacttgctaaggtttaaatgcaggatattacaaaagtcaggttggagaactcccttgtttaggcttttgtcttgcttctgcagaaggagagatgacgtgtttcatctctgcatgacatgatggcatgtgaggcagcagtctctgctccgcaacccttgtcatggcttggagttggtattctaggaaggggcacaattttattagggtagccactagagttgaggtcccttttcaatggacgaacttggtgctgtggacgacatctgctattgtagctaggcgcatacatgttttcctataaatgctagctctgcaatcaccaaaggaaaacacaagagtactcttggaggaaagtttagcattcaatttaaaaaaccttaccaactcatgccttatttgaatgcaataatgcatgttctgttgccatgctgttgcttggacacatgcttggcatggctattttctggttatgtcacaactcatatctcccatgtaaatttatggctatgatatgcatcaaacaagcttatattttgctctcaa

SEQ ID NO: 484 - DNA, 985 bp, Zea Mays
ggttgggagagggaggaacatcgtgggatgcaggtcccaaggaacaccagatattttgaggcagaccgtggcgaggtgcccaagggcagcgcctagatcttcttctggatggtcaagttctggaacgataatgtggcagaggagatgccctggtcttcgtacgtatatgttacttactcccactctcaacatagcagtagtgttatgcaatgacatgtctttccctaatgcaccgaagcttggatgggtccgttgaaggttgtgttgtttaggttgaaggatgtatgcatggaatagaagtcagataaaacttttgtgcaacaggctgaagtcattcttgttgatgggaaattaatagaggctaatgctgaccaacttgctaaggtttaaatgcaggtcagtttgcctactaagcatccacaaaatctcattataagttctgagaaggccaagtcaattgttcaggatattacaaaagtcaggttggagaactcccttgtttaggcttttgtcttgcttctgcagaaggagagatgacgtgtttcatctctgcatgacatgatggcatgtgaggcagcagtctctgctccgcaacccttgtcatggcttggagttggtattctaggaaggggcacaattttattagggtagccactagagttgaggtcccttttcaatggacgaacttggtgctgtggacgacatctgctattgtagctaggcgcatacatgttttcctataaatgctagctctgcaatcaccaaaggaaaacacaagagtactcttggaggaaagtttagcattcaatttaaaaaaccttaccaactcatgccttatttgaatgcaataatgcatgttctgttgccatgctgttgcttggacacatgcttggcatggctattttctggttatgtcacaactcatatctcccatgtaaatttatggctatgatatgcatcaaacaagcttatattttgctctcaa

SEQ ID NO: 485 - DNA, 1451 bp, Zea Mays
gttggtccttatttgcgaaaggttagcagtcaattgctggagttgtatgagcaaaaccgtacaacgcaggcacaatcatcacagggaagtgaagcggaggggagctctgctggtgtgtgtaatcaacgttcaactgtaaagtctgaagcgaactccaaggaaccatctgctcatggtcatcttcaggcatccagaccgccaaatttgcagcactcgtcctcaacaggtgcttcaggtcaccatgacgatgggcagtcaaattcagacaagcatatttctggccacaaaatgcttcaaaatgacaattttaaccatggtggtagcagagaaaagaacaaaagtggaaccaaaactggtactgttatggacaaattgcacaatgacaaaaagttctcgcctggacatcattattccaaggccagccatgagtctcataatccagtggaagaacatcaaccacatggatcagatgataattccaatgaaacaagagatggtgttggtggcaatgaagctcctgttgtgtcaacatccagaatggatgcgatgaataaaattgacaaggataaggtaaaagcagctttggagaagcgaaggaaatcgaaaggtggttttgccacgaaggtaaatgtgattgatgatgatgatctacttgagagagagctagaacaaggtgttgagttggctgttgagtttgagaagattaatcaagataagaagcagaactcgtccgatggtagcatgcatccaccagaccttgaaaacgctgacgaattaatggagaatggccaccatgtcaagcagagtctaccaacgacagctgaagacatgggctgtccgatggacagtaaagaacgacatcctccagcacttcataagcaaaatgatgtttctgagcacaagtcacagcagcttgatgacacattgaaacaccaaaagagctgtgatcatcctcaacctgtaggaagccctgagcaggatggaaaagactacaagaggcctaagcttgacggataggtttatatatatgattttggatgggttttctggaagctgacaagcaatttggtgccggattcattgtatgatgacgtatacatgttgatgagcacgtgtcttcttcgctggtgcctgaagaagtgaagatgccgcgccacaaaattgctgtgctgcggagagcaccaagatgatgcgccccacaactgattgcagcttacagtttgaggaaagtcgggcagcaattattgttaggttccaacaaacattggaatataatatatatatgaacgaaacatgctgtcgcgcttctggtatcagctgcattcgtttcttgtatgtaatgttctggttaaagcgatggaaaggttttatcaaggtcgcaaatattaatgcagctttccatttctgggtttacatattttccaaattaaacggcttccttttttatgtcc

SEQ ID NO: 486 - DNA, 1507 bp, Zea Mays
agtgacttctgaggaatttgaaccatctcaattctagcgcgaaggtcctgaaacttgacccttccaagtgacttgaggttagcagtcaattgctggagttgtatgagcaaaaccgtacaacgcaggcacaatcatcacagggaagtgaagcggaggggagctctgctggtgtgtgtaatcaacgttcaactgtaaagtctgaagcgaactccaaggaaccatctgctcatggtcatcttcaggcatccagaccgccaaatttgcagcactcgtcctcaacaggtgcttcaggtcaccatgacgatgggcagtcaaattcagacaagcatatttctggccacaaaatgcttcaaaatgacaattttaaccatggtggtagcagagaaaagaacaaaagtggaaccaaaactggtactgttatggacaaattgcacaatgacaaaaagttctcgcctggacatcattattccaaggccagccatgagtctcataatccagtggaagaacatcaaccacatggatcagatgataattccaatgaaacaagagatggtgttggtggcaatgaagctcctgttgtgtcaacatccagaatggatgcgatgaataaaattgacaaggataaggtaaaagcagctttggagaagcgaaggaaatcgaaaggtggttttgccacgaaggtaaatgtgattgatgatgatgatctacttgagagagagctagaacaaggtgttgagttggctgttgagtttgagaagattaatcaagataagaagcagaactcgtccgatggtagcatgcatccaccagaccttgaaaacgctgacgaattaatggagaatggccaccatgtcaagcagagtctaccaacgacagctgaagacatgggctgtccgatggacagtaaagaacgacatcctccagcacttcataagcaaaatgatgtttctgagcacaagtcacagcagcttgatgacacattgaaacaccaaaagagctgtgatcatcctcaacctgtaggaagccctgagcaggatggaaaagactacaagaggcctaagcttgacggataggtttatatatatgattttggatgggttttctggaagctgacaagcaatttggtgccggattcattgtatgatgacgtatacatgttgatgagcacgtgtcttcttcgctggtgcctgaagaagtgaagatgccgcgccacaaaattgctgtgctgcggagagcaccaagatgatgcgccccacaactgattgcagcttacagtttgaggaaagtcgggcagcaattattgttaggttccaacaaacattggaatataatatatatatgaacgaaacatgctgtcgcgcttctggtatcagctgcattcgtttcttgtatgtaatgttctggttaaagcgatggaaaggttttatcaaggtcgcaaatattaatgcagctttccatttctgggtttacatattttccaaattaaacggcttccttttttatgtcc

SEQ ID NO: 487 - DNA, 276 bp, Zea Mays
accaggcttcattccccccaactcaacactcagctgcgtcgctcttccgtctccgatccgaatacaccggccggcggacgacgatgacgaccacgacggcggcggcgcttcctcaaggctcgctctgttggcctgtcctagctaggaaccgttccgtcccatgcatatgatcgaacgacaactctttctccagaaaaactcgagtggatggagaacgcagttccgaaggagctatgaggatctcaactgttcacacgagcctttccaagtaaggac

SEQ ID NO: 488 - DNA, 2978 bp, Zea Mays
aaaacggtttacgtcatttttcgagccactccaggactcaacagcagaggagagtgttcactgccggtcgccgtcgctgatggcgatcccccgtcgcctatcttgccttcccacggttgccgcggccaccaagtggtcggccgggaatctcgccatagacatcggcacaatcggcgcgagaccctcaacggcagccctggctgccgccgcgacggcggccgccgccgccggccgcgcctcggagtgccagtccctcctcctccgcatgtcgcgccgccgcggcgcctctcgacgcgagatcgtctcttccctcctcgcctcgtcccccactccgcagccgcaggtgttcgacctcctcatccgcacctacacccagtcgcggaagccccgggaggcctttgaggccttccgcctcctcctcgaccaccgcgtccccgtcccagcctctgcgtccaacgctctccttgccgtgctctcccgcgccgggtggcctcacctcgcccaggaggcctaccgcctcgtcctctcgtctgactcggagattccgtgctggagatgtggatgcagcgatcgcattggttgattccatggccaatagggggttgaagcctgggattgtgacatacaattcggttttgaaggggttgtgtaagcacagaaggtttgataaggcaaaggaggtgttcaggacaatggaccagtgcagtgttgcaccagatgttcggagtttcaatattttgatcggaggattttgtagggttggggaggttaaggaggcagtgaagttttacaaggagatgcaacatcgttatgttacaccagatgtggtcagctttagctgtttgattggattattctcgaggagaggggagatggaccatgcaggggcatacttgagggaaatgaaggggcttggattggtgcctgatggtgtgatttacacaatggtcataggtgggttttgtagggctggatcaatgtcagaggctctaagagttagggatgagatggttggctttggatgtctgccagatgtggtaacatacaataccctgttgaatgggctctgtaagcagcacaggttgcttgacgcggagaaacttttgaatgagatggaggagagaggggttacaccagatttatgcactttcacaactttgattcatgggtactgtaggcaaggtaactttgagaatgcattgcaattgtttgacacactgttgcgccagcgtttgaggccagatgtcgtgacatacaatagtttgattgatgggatgtgcagaaaaggtgatctggccaaagctaatgagctatgggatgatatgcatgctcgagaaatcttacccaatcacattacctacagtatcctaatagacagccactgtgagaagggacaagttgaggatgcattcggttttctggatgaaatggtcaagaagggaaatttgcctaatatcaggacctataattccatcatcaagggttattgccgatcaggtaatgtaaaaaaggggcagcagtttttgcaaaagatgaggcaagataacgtattcccagatctgattactttcaacaccctgatccatggttatataaaagaagaaaacatgcatggagctttcaatgtgtttaatataatggagaaggaaatggtacggccagatgctgtcacgtataatatgatcataaatgggttttctgaacaaggcaatatgcaagatgctggtcgtgttttcaagggaatgggtgacagtggaattgaaccggatagatatacatacatgtcattgataaatggtcatgttacagctggcaactcgaagcaggcgttccaacttcatgacgagatgatccatagagggtttgctcccgatgacaaattttgaggcttgtcagttctgacctattggacataagcaagagaaatgcatgtgttgtgtgtttgacagtgtctttgaaaatcacacctccagaaatttgtgatttcgaagcgtcgaagggacaggtccagaaaaaaaggggagattgttaaaattccattacttgggagtgaccgcacgaactatggtaatgttggcatgttgctccaactatgttctaaagattccatggcgtggctaagcaaaactgctgcacaaaaaggaaacagaatttgactggacgtctgaatatcttcccttcagtctgagctccagaccagagtgcaaaaagaaacattgaaccaatggaaaaaatgaataaaagaacaatcagtaactacagtgcatgtctgaagattctcatgggcgtgggcatcttcctccaggattgttgggatcaaatgtgcagccagacgctccaggcatcgaggatgtcagggacaccgagcttcctcgttgtggctgtgatttctctctcaggacacggaatgcagcgatggtagtggcttgtgccgccagggccaggcagattatgagaaccagaggtagaacttggtttctttggaacatcgtggtatcttgtgaacttcagtatcgagtgagatgcgaagctaggatttgaggctattatatattaagtttatggtctgcgtgttggtttccttggcgatcacggtttttacgcgttctcccatgtggacgagtattcacaaggttgaccgcatgtatacagagtcgctcaactcgtcgtgaacaagttcacagaaggatctctattgcacaagcacaatgtatttcagaagtagaaataagaccattggttactgtgtcgcaatgtcttccttaggaaaaaataatccacagcaataccacaaaacttctgcgtcagttctgtcatctttcattggagcatccctgatccgtgcctcgcaaggttctacaaatgtcaacctcatttcgttgcaggttcacaactataattttatagttttacctgaccgaccaggctcacgtgagactgggtgtgcggacacagtaaaccaatcaggcgcaatataa

SEQ ID NO: 489 - DNA, 3115 bp, Zea Mays
aaaacggtttacgtcatttttcgagccactccaggactcaacagcagaggagagtgttcactgccggtcgccgtcgctgatggcgatcccccgtcgcctatcttgccttcccacggttgccgcggccaccaagtggtcggccgggaatctcgccatagacatcggcacaatcggcgcgagaccctcaacggcagccctggctgccgccgcgacggcggccgccgccgccggccgcgcctcggagtgccagtccctcctcctccgcatgtcgcgccgccgcggcgcctctcgacgcgagatcgtctcttccctcctcgcctcgtcccccactccgcagccgcaggtgttcgacctcctcatccgcacctacacccagtcgcggaagccccgggaggcctttgaggccttccgcctcctcctcgaccaccgcgtccccgtcccagcctctgcgtccaacgctctccttgccgtgctctcccgcgccgggtggcctcacctcgcccaggaggcctaccgcctcgtcctctcgtctgactcggaggtaaacgcctacacgcttaacatcatggtccacagctactgtaaaaccctagagttcgatggggctgacactgtcatctccgagatggagaagagatgcgtgttcccggatgtggttacacacaatgtgttgattgatgccagattccgtgctggagatgtggatgcagcgatcgcattggttgattccatggccaatagggggttgaagcctgggattgtgacatacaattcggttttgaaggggttgtgtaagcacagaaggtttgataaggcaaaggaggtgttcaggacaatggaccagtgcagtgttgcaccagatgttcggagtttcaatattttgatcggaggattttgtagggttggggaggttaaggaggcagtgaagttttacaaggagatgcaacatcgttatgttacaccagatgtggtcagctttagctgtttgattggattattctcgaggagaggggagatggaccatgcaggggcatacttgagggaaatgaaggggcttggattggtgcctgatggtgtgatttacacaatggtcataggtgggttttgtagggctggatcaatgtcagaggctctaagagttagggatgagatggttggctttggatgtctgccagatgtggtaacatacaataccctgttgaatgggctctgtaagcagcacaggttgcttgacgcggagaaacttttgaatgagatggaggagagaggggttacaccagatttatgcactttcacaactttgattcatgggtactgtaggcaaggtaactttgagaatgcattgcaattgtttgacacactgttgcgccagcgtttgaggccagatgtcgtgacatacaatagtttgattgatgggatgtgcagaaaaggtgatctggccaaagctaatgagctatgggatgatatgcatgctcgagaaatcttacccaatcacattacctacagtatcctaatagacagccactgtgagaagggacaagttgaggatgcattcggttttctggatgaaatggtcaagaagggaaatttgcctaatatcaggacctataattccatcatcaagggttattgccgatcaggtaatgtaaaaaaggggcagcagtttttgcaaaagatgaggcaagataacgtattcccagatctgattactttcaacaccctgatccatggttatataaaagaagaaaacatgcatggagctttcaatgtgtttaatataatggagaaggaaatggtacggccagatgctgtcacgtataatatgatcataaatgggttttctgaacaaggcaatatgcaagatgctggtcgtgttttcaagggaatgggtgacagtggaattgaaccggatagatatacatacatgtcattgataaatggtcatgttacagctggcaactcgaagcaggcgttccaacttcatgacgagatgatccatagagggtttgctcccgatgacaaattttgaggcttgtcagttctgacctattggacataagcaagagaaatgcatgtgttgtgtgtttgacagtgtctttgaaaatcacacctccagaaatttgtgatttcgaagcgtcgaaggtccagaaaaaaaggggagattgttaaaattccattacttgggagtgaccgcacgaactatggtaatgttggcatgttgctccaactatgttctaaagattccatggcgtggctaagcaaaactgctgcacaaaaaggaaacagaatttgactggacgtctgaatatcttcccttcagtctgagctccagaccagagtgcaaaaagaaacattgaaccaatggaaaaaatgaataaaagaacaatcagtaactacagtgcatgtctgaagattctcatgggcgtgggcatcttcctccaggattgttgggatcaaatgtgcagccagacgctccaggcatcgaggatgtcagggacaccgagcttcctcgttgtggctgtgatttctctctcaggacacggaatgcagcgatggtagtggcttgtgccgccagggccaggcagattatgagaaccagaggtagaacttggtttctttggaacatcgtggtatcttgtgaacttcagtatcgagtgagatgcgaagctaggatttgaggctattatatattaagtttatggtctgcgtgttggtttccttggcgatcacggtttttacgcgttctcccatgtggacgagtattcacaaggttgaccgcatgtatacagagtcgctcaactcgtcgtgaacaagttcacagaaggatctctattgcacaagcacaatgtatttcagaagtagaaataagaccattggttactgtgtcgcaatgtcttccttaggaaaaaataatccacagcaataccacaaaacttctgcgtcagttctgtcatctttcattggagcatccctgatccgtgcctcgcaaggttctacaaatgtcaacctcatttcgttgcaggttcacaactataattttatagttttacctgaccgaccaggctcacgtgagactgggtgtgcggacacagtaaaccaatcaggcgcaatataa

SEQ ID NO: 490 - DNA, 2675 bp, Zea Mays
aaacggtttacgtcatttttcgagccactccaggactcaacagcagaggagagtgttcactgccggtcgccgtcgctgatggcgatcccccgtcgcctatcttgccttcccacggttgccgcggccaccaagtggtcggccgggaatctcgccatagacatcggcacaatcggcgcgagaccctcaacggcagccctggctgccgccgcgacggcggccgccgccgccggccgcgcctcggagtgccagtccctcctcctccgcatgtcgcgccgccgcggcgcctctcgacgcgagatcgtctcttccctcctcgcctcgtcccccactccgcagccgcaggtgttcgacctcctcatccgcacctacacccagtcgcggaagccccgggaggcctttgaggccttccgcctcctcctcgaccaccgcgtccccgtcccagcctctgcgtccaacgctctccttgccgtgctctcccgcgccgggtggcctcacctcgcccaggaggcctaccgcctcgtcctctcgtctgactcggagattccgtgctggagatgtggatgcagcgatcgcattggttgattccatggccaatagggggttgaagcctgggattgtgacatacaattcggttttgaaggggttgtgtaagcacagaaggtttgataaggcaaaggaggtgttcaggacaatggaccagtgcagtgttgcaccagatgttcggagtttcaatattttgatcggaggattttgtagggttggggaggttaaggaggcagtgaagttttacaaggagatgcaacatcgttatgttacaccagatgtggtcagctttagctgtttgattggattattctcgaggagaggggagatggaccatgcaggggcatacttgagggaaatgaaggggcttggattggtgcctgatggtgtgatttacacaatggtcataggtgggttttgtagggctggatcaatgtcagaggctctaagagttagggatgagatggttggctttggatgtctgccagatgtggtaacatacaataccctgttgaatgggctctgtaagcagcacaggttgcttgacgcggagaaacttttgaatgagatggaggagagaggggttacaccagatttatgcactttcacaactttgattcatgggtactgtaggcaaggtaactttgagaatgcattgcaattgtttgacacactgttgcgccagcgtttgaggccagatgtcgtgacatacaatagtttgattgatgggatgtgcagaaaaggtgatctggccaaagctaatgagctatgggatgatatgcatgctcgagaaatcttacccaatcacattacctacagtatcctaatagacagccactgtgagaagggacaagttgaggatgcattcggttttctggatgaaatggtcaagaagggaaatttgcctaatatcaggacctataattccatcatcaagggttattgccgatcaggtaatgtaaaaaaggggcagcagtttttgcaaaagatgaggcaagataacgtattcccagatctgattactttcaacaccctgatccatggttatataaaagaagaaaacatgcatggagctttcaatgtgtttaatataatggagaaggaaatggtacggccagatgctgtcacgtataatatgatcataaatgggttttctgaacaaggcaatatgcaagatgctggtcgtgttttcaagggaatgggtgacagtggaattgaaccggatagatatacatacatgtcattgataaatggtcatgttacagctggcaactcgaagcaggcgttccaacttcatgacgagatgatccatagagggtttgctcccgatgacaaattttgaggcttgtcagttctgacctattggacataagcaagagaaatgcatgtgttgtgtgtttgacagtgtctttgaaaatcacacctccagaaatttgtgatttcgaagcgtcgaagggacaggtccagaaaaaaaggggagattgttaaaattccattacttgggagtgaccgcacgaactatggtaatgttggcatgttgctccaactatgttctaaagattccatggcgtggctaagcaaaactgctgcacaaaaaggaaacagaatttgactggacgtctgaatatcttcccttcagtctgagctccagaccagagtgcaaaaagaaacattgaaccaatggaaaaaatgaataaaagaacaatcagtaactacagtgcatgtctgaagattctcatgggcgtgggcatcttcctccaggattgttgggatcaaatgtgcagccagacgctccaggcatcgaggatgtcagggacaccgagcttcctcgttgtggctgtgatttctctctcaggacacggaatgcagcgatggtagtggcttgtgccgccagggccaggcagattatgagaaccagaggaaaaaataatccacagcaataccacaaaacttctgcgtcagttctgtcatctttcattggagcatccctgatccgtgcctcgcaaggttctacaaatgtcaacctcatttcgttgcaggttcacaactataattttatagttttacctgaccgaccaggctcacgtgagactgggtgtgcggacacagtaaaccaatcaggcgcaatataa

SEQ ID NO: 491 - DNA, 2775 bp, Zea Mays
caacagcagaggagagtgttcactgccggtcgccgtcgctgatggcgatcccccgtcgcctatcttgccttcccacggttgccgcggccaccaagtggtcggccgggaatctcgccatagacatcggcacaatcggcgcgagaccctcaacggcagccctggctgccgccgcgacggcggccgccgccgccggccgcgcctcggagtgccagtccctcctcctccgcatgtcgcgccgccgcggcgcctctcgacgcgagatcgtctcttccctcctcgcctcgtcccccactccgcagccgcaggtgttcgacctcctcatccgcacctacacccagtcgcggaagccccgggaggcctttgaggccttccgcctcctcctcgaccaccgcgtccccgtcccagcctctgcgtccaacgctctccttgccgtgctctcccgcgccgggtggcctcacctcgcccaggaggcctaccgcctcgtcctctcgtctgactcggaggtaaacgcctacacgcttaacatcatggtccacagctactgtaaaaccctagagttcgatggggctgacactgtcatctccgagatggagaagagatgcgtgttcccggatgtggttacacacaatgtgttgattgatgccagattccgtgctggagatgtggatgcagcgatcgcattggttgattccatggccaatagggggttgaagcctgggattgtgacatacaattcggttttgaaggggttgtgtaagcacagaaggtttgataaggcaaaggaggtgttcaggacaatggaccagtgcagtgttgcaccagatgttcggagtttcaatattttgatcggaggattttgtagggttggggaggttaaggaggcagtgaagttttacaaggagatgcaacatcgttatgttacaccagatgtggtcagctttagctgtttgattggattattctcgaggagaggggagatggaccatgcaggggcatacttgagggaaatgaaggggcttggattggtgcctgatggtgtgatttacacaatggtcataggtgggttttgtagggctggatcaatgtcagaggctctaagagttagggatgagatggttggctttggatgtctgccagatgtggtaacatacaataccctgttgaatgggctctgtaagcagcacaggttgcttgacgcggagaaacttttgaatgagatggaggagagaggggttacaccagatttatgcactttcacaactttgattcatgggtactgtaggcaaggtaactttgagaatgcattgcaattgtttgacacactgttgcgccagcgtttgaggccagatgtcgtgacatacaatagtttgattgatgggatgtgcagaaaaggtgatctggccaaagctaatgagctatgggatgatatgcatgctcgagaaatcttacccaatcacattacctacagtatcctaatagacagccactgtgagaagggacaagttgaggatgcattcggttttctggatgaaatggtcaagaagggaaatttgcctaatatcaggacctataattccatcatcaagggttattgccgatcaggtaatgtaaaaaaggggcagcagtttttgcaaaagatgaggcaagataacgtattcccagatctgattactttcaacaccctgatccatggttatataaaagaagaaaacatgcatggagctttcaatgtgtttaatataatggagaaggaaatggtacggccagatgctgtcacgtataatatgatcataaatgggttttctgaacaaggcaatatgcaagatgctggtcgtgttttcaagggaatgggtgacagtggaattgaaccggatagatatacatacatgtcattgataaatggtcatgttacagctggcaactcgaagcaggcgttccaacttcatgacgagatgatccatagagggtttgctcccgatgacaaattttgaggcttgtcagttctgacctattggacataagcaagagaaatgcatgtgttgtgtgtttgacagtgtctttgaaaatcacacctccagaaatttgtgatttcgaagcgtcgaaggtccagaaaaaaaggggagattgttaaaattccattacttgggagtgaccgcacgaactatggtaatgttggcatgttgctccaactatgttctaaagattccatggcgtggctaagcaaaactgctgcacaaaaaggaaacagaatttgactggacgtctgaatatcttcccttcagtctgagctccagaccagagtgcaaaaagaaacattgaaccaatggaaaaaatgaataaaagaacaatcagtaactacagtgcatgtctgaagattctcatgggcgtgggcatcttcctccaggattgttgggatcaaatgtgcagccagacgctccaggcatcgaggatgtcagggacaccgagcttcctcgttgtggctgtgatttctctctcaggacacggaatgcagcgatggtagtggcttgtgccgccagggccaggcagattatgagaaccagaggaaaaaataatccacagcaataccacaaaacttctgcgtcagttctgtcatctttcattggagcatccctgatccgtgcctcgcaaggttctacaaatgtcaacctcatttcgttgcaggttcacaactataattttatagttttacctgaccgaccaggctcacgtgagactgggtgtgcggacacagtaaaccaatcaggcgcaatataa

SEQ ID NO: 492 - DNA, 3554 bp, Zea Mays
ctgccggtcgccgtcgctgatggcgatcccccgtcgcctatcttgccttcccacggttgccgcggccaccaagtggtcggccgggaatctcgccatagacatcggcacaatcggcgcgagaccctcaacggcagccctggctgccgccgcgacggcggccgccgccgccggccgcgcctcggagtgccagtccctcctcctccgcatgtcgcgccgccgcggcgcctctcgacgcgagatcgtctcttccctcctcgcctcgtcccccactccgcagccgcaggtgttcgacctcctcatccgcacctacacccagtcgcggaagccccgggaggcctttgaggccttccgcctcctcctcgaccaccgcgtccccgtcccagcctctgcgtccaacgctctccttgccgtgctctcccgcgccgggtggcctcacctcgcccaggaggcctaccgcctcgtcctctcgtctgactcggaggtaaacgcctacacgcttaacatcatggtccacagctactgtaaaaccctagagttcgatggggctgacactgtcatctccgagatggagaagagatgcgtgttcccggatgtggttacacacaatgtgttgattgatgccagattccgtgctggagatgtggatgcagcgatcgcattggttgattccatggccaatagggggttgaagcctgggattgtgacatacaattcggttttgaaggggttgtgtaagcacagaaggtttgataaggcaaaggaggtgttcaggacaatggaccagtgcagtgttgcaccagatgttcggagtttcaatattttgatcggaggattttgtagggttggggaggttaaggaggcagtgaagttttacaaggagatgcaacatcgttatgttacaccagatgtggtcagctttagctgtttgattggattattctcgaggagaggggagatggaccatgcaggggcatacttgagggaaatgaaggggcttggattggtgcctgatggtgtgatttacacaatggtcataggtgggttttgtagggctggatcaatgtcagaggctctaagagttagggatgagatggttggctttggatgtctgccagatgtggtaacatacaataccctgttgaatgggctctgtaagcagcacaggttgcttgacgcggagaaacttttgaatgagatggaggagagaggggttacaccagatttatgcactttcacaactttgattcatgggtactgtaggcaaggtaactttgagaatgcattgcaattgtttgacacactgttgcgccagcgtttgaggccagatgtcgtgacatacaatagtttgattgatgggatgtgcagaaaaggtgatctggccaaagctaatgagctatgggatgatatgcatgctcgagaaatcttacccaatcacattacctacagtatcctaatagacagccactgtgagaagggacaagttgaggatgcattcggttttctggatgaaatggtcaagaagggaaatttgcctaatatcaggacctataattccatcatcaagggttattgccgatcaggtaatgtaaaaaaggggcagcagtttttgcaaaagatgaggcaagataacgtattcccagatctgattactttcaacaccctgatccatggttatataaaagaagaaaacatgcatggagctttcaatgtgtttaatataatggagaaggaaatggtacggccagatgctgtcacgtataatatgatcataaatgggttttctgaacaaggcaatatgcaagatgctggtcgtgttttcaagggaatgggtgacagtggaattgaaccggatagatatacatacatgtcattgataaatggtcatgttacagctggcaactcgaagcaggcgttccaacttcatgacgagatgatccatagagggtttgctcccgatgacaaattttgaggcttgtcagttctgacctattggacataagcaagagaaatgcatgtgttgtgtgtttgacagtgtctttgaaaatcacacctccagaaatttgtgatttcgaagcgtcgaagggacaggtccagaaaaaaaggggagattgttaaaattccattacttgggagtgaccgcacgaactatggtaatgttggcatgttgctccaactatgttctaaagattccatggcgtggtaagattttaagaaatacgaacatgttatttgagtatataattattgttcacacttaaatctcatctttcacttaacctttattagacaactacatgatctatggggtcaatcaaacaaaaagtttatgataaaaatgtcctttaattcttttttcccaaatctactgattcactcttttttgaacaaaaaactactgctacacttctttgttatctatagagttacacagtgaccacaccttcagatattgctctgttttataagctttgtctagagattttattttagtgcaaaaagcaacatagtgcctactgcctcctatctgatcaggaaatgttacacacagacctatagacagttacatactgaccacagcttcagatattgctctgcttgataagcttcatatggagagtttattttagtgcaaacaggcctcctactacctgatcagggattgttacacagcactgcatcactaaatttattatgtggtaatttccgctaccttgattatcctaaagatcctgaggtgaaactgtgcctttttgatcgggcactgctgaatttgaaaaaggaaaacaaattgctcttacaatttaaagcctggaggatattatgtgaggagtgagcggatcctaacttctgagcaaaaggcttatgatagcagatatggtaaagatggaattggccccaaaaaactcattatatttatcttctgtatgaacaacagccttctacggaagatgtacaaggtatcatatttacaaacttacactgttttacatgcaggctaagcaaaactgctgcacaaaaaggaaacagaatttgactggacgtctgaatatcttcccttcagtctgagctccagaccagagtgcaaaaagaaacattgaaccaatggaaaaaatgaataaaagaacaatcagtaactacagtgcatgtctgaagattctcatgggcgtgggcatcttcctccaggattgttgggatcaaatgtgcagccagacgctccaggcatcgaggatgtcagggacaccgagcttcctcgttgtggctgtgatttctctctcaggacacggaatgcagcgatggtagtggcttgtgccgccagggccaggcagattatgagaaccagaggaaaaaataatccacagcaataccacaaaacttctgcgtcagttctgtcatctttcattggagcatccctgatccgtgcctcgcaaggttctacaaatgtcaacctcatttcgttgcaggttcacaactataattttatagttttacctgaccgaccaggctcacgtgagactgggtgtgcggacacagtaaaccaatcaggcgcaatataa

SEQ ID NO: 493 - DNA, 3206 bp, Zea Mays
ctgccggtcgccgtcgctgatggcgatcccccgtcgcctatcttgccttcccacggttgccgcggccaccaagtggtcggccgggaatctcgccatagacatcggcacaatcggcgcgagaccctcaacggcagccctggctgccgccgcgacggcggccgccgccgccggccgcgcctcggagtgccagtccctcctcctccgcatgtcgcgccgccgcggcgcctctcgacgcgagatcgtctcttccctcctcgcctcgtcccccactccgcagccgcaggtgttcgacctcctcatccgcacctacacccagtcgcggaagccccgggaggcctttgaggccttccgcctcctcctcgaccaccgcgtccccgtcccagcctctgcgtccaacgctctccttgccgtgctctcccgcgccgggtggcctcacctcgcccaggaggcctaccgcctcgtcctctcgtctgactcggaggtaaacgcctacacgcttaacatcatggtccacagctactgtaaaaccctagagttcgatggggctgacactgtcatctccgagatggagaagagatgcgtgttcccggatgtggttacacacaatgtgttgattgatgccagattccgtgctggagatgtggatgcagcgatcgcattggttgattccatggccaatagggggttgaagcctgggattgtgacatacaattcggttttgaaggggttgtgtaagcacagaaggtttgataaggcaaaggaggtgttcaggacaatggaccagtgcagtgttgcaccagatgttcggagtttcaatattttgatcggaggattttgtagggttggggaggttaaggaggcagtgaagttttacaaggagatgcaacatcgttatgttacaccagatgtggtcagctttagctgtttgattggattattctcgaggagaggggagatggaccatgcaggggcatacttgagggaaatgaaggggcttggattggtgcctgatggtgtgatttacacaatggtcataggtgggttttgtagggctggatcaatgtcagaggctctaagagttagggatgagatggttggctttggatgtctgccagatgtggtaacatacaataccctgttgaatgggctctgtaagcagcacaggttgcttgacgcggagaaacttttgaatgagatggaggagagaggggttacaccagatttatgcactttcacaactttgattcatgggtactgtaggcaaggtaactttgagaatgcattgcaattgtttgacacactgttgcgccagcgtttgaggccagatgtcgtgacatacaatagtttgattgatgggatgtgcagaaaaggtgatctggccaaagctaatgagctatgggatgatatgcatgctcgagaaatcttacccaatcacattacctacagtatcctaatagacagccactgtgagaagggacaagttgaggatgcattcggttttctggatgaaatggtcaagaagggaaatttgcctaatatcaggacctataattccatcatcaagggttattgccgatcaggtaatgtaaaaaaggggcagcagtttttgcaaaagatgaggcaagataacgtattcccagatctgattactttcaacaccctgatccatggttatataaaagaagaaaacatgcatggagctttcaatgtgtttaatataatggagaaggaaatggtacggccagatgctgtcacgtataatatgatcataaatgggttttctgaacaaggcaatatgcaagatgctggtcgtgttttcaagggaatgggtgacagtggaattgaaccggatagatatacatacatgtcattgataaatggtcatgttacagctggcaactcgaagcaggcgttccaacttcatgacgagatgatccatagagggtttgctcccgatgacaaattttgaggcttgtcagttctgacctattggacataagcaagagaaatgcatgtgttgtgtgtttgacagtgtctttgaaaatcacacctccagaaatttgtgatttcgaagcgtcgaaggtccagaaaaaaaggggagattgttaaaattccattacttgggagtgaccgcacgaactatggtaatgttggcatgttgctccaactatgttctaaagattccatggcgtgatcctgaggtgaaactgtgcctttttgatcgggcactgctgaatttgaaaaaggaaaacaaattgctcttacaatttaaagcctggaggatattatgtgaggagtgagcggatcctaacttctgagcaaaaggcttatgatagcagatatggctaagcaaaactgctgcacaaaaaggaaacagaatttgactggacgtctgaatatcttcccttcagtctgagctccagaccagagtgcaaaaagaaacattgaaccaatggaaaaaatgaataaaagaacaatcagtaactacagtgcatgtctgaagattctcatgggcgtgggcatcttcctccaggattgttgggatcaaatgtgcagccagacgctccaggcatcgaggatgtcagggacaccgagcttcctcgttgtggctgtgatttctctctcaggacacggaatgcagcgatggtagtggcttgtgccgccagggccaggcagattatgagaaccagaggtagaacttggtttctttggaacatcgtggtatcttgtgaacttcagtatcgagtgagatgcgaagctaggatttgaggctattatatattaagtttatggtctgcgtgttggtttccttggcgatcacggtttttacgcgttctcccatgtggacgagtattcacaaggttgaccgcatgtatacagagtcgctcaactcgtcgtgaacaagttcacagaaggatctctattgcacaagcacaatgtatttcagaagtagaaataagaccattggttactgtgtcgcaatgtcttccttaggaaaaaataatccacagcaataccacaaaacttctgcgtcagttctgtcatctttcattggagcatccctgatccgtgcctcgcaaggttctacaaatgtcaacctcatttcgttgcaggttcacaactataattttatagttttacctgaccgaccaggctcacgtgagactgggtgtgcggacacagtaaaccaatcaggcgcaatataa

SEQ ID NO: 494 - DNA, 3012 bp, Zea Mays
ctgccggtcgccgtcgctgatggcgatcccccgtcgcctatcttgccttcccacggttgccgcggccaccaagtggtcggccgggaatctcgccatagacatcggcacaatcggcgcgagaccctcaacggcagccctggctgccgccgcgacggcggccgccgccgccggccgcgcctcggagtgccagtccctcctcctccgcatgtcgcgccgccgcggcgcctctcgacgcgagatcgtctcttccctcctcgcctcgtcccccactccgcagccgcaggtgttcgacctcctcatccgcacctacacccagtcgcggaagccccgggaggcctttgaggccttccgcctcctcctcgaccaccgcgtccccgtcccagcctctgcgtccaacgctctccttgccgtgctctcccgcgccgggtggcctcacctcgcccaggaggcctaccgcctcgtcctctcgtctgactcggaggtaaacgcctacacgcttaacatcatggtccacagctactgtaaaaccctagagttcgatggggctgacactgtcatctccgagatggagaagagatgcgtgttcccggatgtggttacacacaatgtgttgattgatgccagattccgtgctggagatgtggatgcagcgatcgcattggttgattccatggccaatagggggttgaagcctgggattgtgacatacaattcggttttgaaggggttgtgtaagcacagaaggtttgataaggcaaaggaggtgttcaggacaatggaccagtgcagtgttgcaccagatgttcggagtttcaatattttgatcggaggattttgtagggttggggaggttaaggaggcagtgaagttttacaaggagatgcaacatcgttatgttacaccagatgtggtcagctttagctgtttgattggattattctcgaggagaggggagatggaccatgcaggggcatacttgagggaaatgaaggggcttggattggtgcctgatggtgtgatttacacaatggtcataggtgggttttgtagggctggatcaatgtcagaggctctaagagttagggatgagatggttggctttggatgtctgccagatgtggtaacatacaataccctgttgaatgggctctgtaagcagcacaggttgcttgacgcggagaaacttttgaatgagatggaggagagaggggttacaccagatttatgcactttcacaactttgattcatgggtactgtaggcaaggtaactttgagaatgcattgcaattgtttgacacactgttgcgccagcgtttgaggccagatgtcgtgacatacaatagtttgattgatgggatgtgcagaaaaggtgatctggccaaagctaatgagctatgggatgatatgcatgctcgagaaatcttacccaatcacattacctacagtatcctaatagacagccactgtgagaagggacaagttgaggatgcattcggttttctggatgaaatggtcaagaagggaaatttgcctaatatcaggacctataattccatcatcaagggttattgccgatcaggtaatgtaaaaaaggggcagcagtttttgcaaaagatgaggcaagataacgtattcccagatctgattactttcaacaccctgatccatggttatataaaagaagaaaacatgcatggagctttcaatgtgtttaatataatggagaaggaaatggtacggccagatgctgtcacgtataatatgatcataaatgggttttctgaacaaggcaatatgcaagatgctggtcgtgttttcaagggaatgggtgacagtggaattgaaccggatagatatacatacatgtcattgataaatggtcatgttacagctggcaactcgaagcaggcgttccaacttcatgacgagatgatccatagagggtttgctcccgatgacaaattttgaggcttgtcagttctgacctattggacataagcaagagaaatgcatgtgttgtgtgtttgacagtgtctttgaaaatcacacctccagaaatttgtgatttcgaagcgtcgaagggacaggtccagaaaaaaaggggagattgttaaaattccattacttgggagtgaccgcacgaactatggctaagcaaaactgctgcacaaaaaggaaacagaatttgactggacgtctgaatatcttcccttcagtctgagctccagaccagagtgcaaaaagaaacattgaaccaatggaaaaaatgaataaaagaacaatcagtaactacagtgcatgtctgaagattctcatgggcgtgggcatcttcctccaggattgttgggatcaaatgtgcagccagacgctccaggcatcgaggatgtcagggacaccgagcttcctcgttgtggctgtgatttctctctcaggacacggaatgcagcgatggtagtggcttgtgccgccagggccaggcagattatgagaaccagaggtagaacttggtttctttggaacatcgtggtatcttgtgaacttcagtatcgagtgagatgcgaagctaggatttgaggctattatatattaagtttatggtctgcgtgttggtttccttggcgatcacggtttttacgcgttctcccatgtggacgagtattcacaaggttgaccgcatgtatacagagtcgctcaactcgtcgtgaacaagttcacagaaggatctctattgcacaagcacaatgtatttcagaagtagaaataagaccattggttactgtgtcgcaatgtcttccttaggaaaaaataatccacagcaataccacaaaacttctgcgtcagttctgtcatctttcattggagcatccctgatccgtgcctcgcaaggttctacaaatgtcaacctcatttcgttgcaggttcacaactataattttatagttttacctgaccgaccaggctcacgtgagactgggtgtgcggacacagtaaaccaatcaggcgcaatataa

SEQ ID NO: 495 - DNA, 3739 bp, Zea Mays
ctgccggtcgccgtcgctgatggcgatcccccgtcgcctatcttgccttcccacggttgccgcggccaccaagtggtcggccgggaatctcgccatagacatcggcacaatcggcgcgagaccctcaacggcagccctggctgccgccgcgacggcggccgccgccgccggccgcgcctcggagtgccagtccctcctcctccgcatgtcgcgccgccgcggcgcctctcgacgcgagatcgtctcttccctcctcgcctcgtcccccactccgcagccgcaggtgttcgacctcctcatccgcacctacacccagtcgcggaagccccgggaggcctttgaggccttccgcctcctcctcgaccaccgcgtccccgtcccagcctctgcgtccaacgctctccttgccgtgctctcccgcgccgggtggcctcacctcgcccaggaggcctaccgcctcgtcctctcgtctgactcggaggtaaacgcctacacgcttaacatcatggtccacagctactgtaaaaccctagagttcgatggggctgacactgtcatctccgagatggagaagagatgcgtgttcccggatgtggttacacacaatgtgttgattgatgccagattccgtgctggagatgtggatgcagcgatcgcattggttgattccatggccaatagggggttgaagcctgggattgtgacatacaattcggttttgaaggggttgtgtaagcacagaaggtttgataaggcaaaggaggtgttcaggacaatggaccagtgcagtgttgcaccagatgttcggagtttcaatattttgatcggaggattttgtagggttggggaggttaaggaggcagtgaagttttacaaggagatgcaacatcgttatgttacaccagatgtggtcagctttagctgtttgattggattattctcgaggagaggggagatggaccatgcaggggcatacttgagggaaatgaaggggcttggattggtgcctgatggtgtgatttacacaatggtcataggtgggttttgtagggctggatcaatgtcagaggctctaagagttagggatgagatggttggctttggatgtctgccagatgtggtaacatacaataccctgttgaatgggctctgtaagcagcacaggttgcttgacgcggagaaacttttgaatgagatggaggagagaggggttacaccagatttatgcactttcacaactttgattcatgggtactgtaggcaaggtaactttgagaatgcattgcaattgtttgacacactgttgcgccagcgtttgaggccagatgtcgtgacatacaatagtttgattgatgggatgtgcagaaaaggtgatctggccaaagctaatgagctatgggatgatatgcatgctcgagaaatcttacccaatcacattacctacagtatcctaatagacagccactgtgagaagggacaagttgaggatgcattcggttttctggatgaaatggtcaagaagggaaatttgcctaatatcaggacctataattccatcatcaagggttattgccgatcaggtaatgtaaaaaaggggcagcagtttttgcaaaagatgaggcaagataacgtattcccagatctgattactttcaacaccctgatccatggttatataaaagaagaaaacatgcatggagctttcaatgtgtttaatataatggagaaggaaatggtacggccagatgctgtcacgtataatatgatcataaatgggttttctgaacaaggcaatatgcaagatgctggtcgtgttttcaagggaatgggtgacagtggaattgaaccggatagatatacatacatgtcattgataaatggtcatgttacagctggcaactcgaagcaggcgttccaacttcatgacgagatgatccatagagggtttgctcccgatgacaaattttgaggcttgtcagttctgacctattggacataagcaagagaaatgcatgtgttgtgtgtttgacagtgtctttgaaaatcacacctccagaaatttgtgatttcgaagcgtcgaagggacaggtccagaaaaaaaggggagattgttaaaattccattacttgggagtgaccgcacgaactatggtaatgttggcatgttgctccaactatgttctaaagattccatggcgtggtaagattttaagaaatacgaacatgttatttgagtatataattattgttcacacttaaatctcatctttcacttaacctttattagacaactacatgatctatggggtcaatcaaacaaaaagtttatgataaaaatgtcctttaattcttttttcccaaatctactgattcactcttttttgaacaaaaaactactgctacacttctttgttatctatagagttacacagtgaccacaccttcagatattgctctgttttataagctttgtctagagattttattttagtgcaaaaagcaacatagtgcctactgcctcctatctgatcaggaaatgttacacacagacctatagacagttacatactgaccacagcttcagatattgctctgcttgataagcttcatatggagagtttattttagtgcaaacaggcctcctactacctgatcagggattgttacacagcactgcatcactaaatttattatgtggtaatttccgctaccttgattatcctaaagatcctgaggtgaaactgtgcctttttgatcgggcactgctgaatttgaaaaaggaaaacaaattgctcttacaatttaaagcctggaggatattatgtgaggagtgagcggatcctaacttctgagcaaaaggcttatgatagcagatatggctaagcaaaactgctgcacaaaaaggaaacagaatttgactggacgtctgaatatcttcccttcagtctgagctccagaccagagtgcaaaaagaaacattgaaccaatggaaaaaatgaataaaagaacaatcagtaactacagtgcatgtctgaagattctcatgggcgtgggcatcttcctccaggattgttgggatcaaatgtgcagccagacgctccaggcatcgaggatgtcagggacaccgagcttcctcgttgtggctgtgatttctctctcaggacacggaatgcagcgatggtagtggcttgtgccgccagggccaggcagattatgagaaccagaggtagaacttggtttctttggaacatcgtggtatcttgtgaacttcagtatcgagtgagatgcgaagctaggatttgaggctattatatattaagtttatggtctgcgtgttggtttccttggcgatcacggtttttacgcgttctcccatgtggacgagtattcacaaggttgaccgcatgtatacagagtcgctcaactcgtcgtgaacaagttcacagaaggatctctattgcacaagcacaatgtatttcagaagtagaaataagaccattggttactgtgtcgcaatgtcttccttaggaaaaaataatccacagcaataccacaaaacttctgcgtcagttctgtcatctttcattggagcatccctgatccgtgcctcgcaaggttctacaaatgtcaacctcatttcgttgcaggttcacaactataattttatagttttacctgaccgaccaggctcacgtgagactgggtgtgcggacacagtaaaccaatcaggcgcaatataa

SEQ ID NO: 496 - DNA, 3467 bp, Zea Mays
gttcaaaccattccgaaatccgaaacctcccgcggtctcgcccccacccctcacaccaccgcaccaccggccaccccctgccccgatgcagcccgacggcggcggcgcgattcgcgtgctgaacgtggcggagaagccgtcggtggcgaaggcagtggctgagatcctgtcgcgccgctcggcgcagtcgcgtgcgggccggtcccagtacaaccgcattttcgagttcaactacgccatcaatggccgcgcctgccacatgctcgtcacctccgtcacgggccacctcatggaactcgaattcgatgaccgcttccgccgctggcactcctgcgaccccgccgaacttttccacgccccagtccgcaagtccgtgccccaggacaagcaggccataaaacaaactttggaagaagaagctaggagatgccagtggctggtgctatggcttgattgtgatagagagggtgagaacatagcatatgaagtgatcgatgtttgtacacgtgccaacagtcatcttaacatttggagggctcgcttctcagctttgattgatagggagatacatgaatctgtgcaacatcttggcaggcccaacaagctctttgcagatgctgtggatgcaagacaggaaattgaccttcgcattggtgcctccttcacaaggtttcaaaccatgctgttaaaggatgcatttgtaattgatgtgactggggatgagagaagtttggttctgagctatggtccttgtcagtttccaaccctaggattcattgttgagcgtttctgggagattcaagctcatgaacctgaagagttctggacaataaattgtactcatacttcagatgaaggcactgcatcttttggttggatacgtggtcatttgtttgattattcatgtgctattagtatctatgaaatgtgtgtttcagaaccaatggcaacagtacaaaatgttaggaatcaagagaagctaaaataccccccatatccactaagtacagtggagcttcagaaacgtgcttctaggtactttagaatgagttcagagcacacaatgaaggtctaagaatatcttgtcttatagttttaatttcccttccagttccactatctaataatggacatacctcagtagcttcgttgtttgcttgttttttctttggtggtctcttccctttcaacaccaggtggctgaagaactttatcaagctggattcattagttatccgaggacagaaactgataacttctccccaaacactgacctgcatgcaatcgtacgtgaacaagtgaatcatccagtttggggagcatatgctcagcgacttctaaatcctgaagcaagactttggaggaatcccagtaatggtggtcatgatgacaaggcacatcctcctattcatccaaccaaattttcagaagagattgtatgagtttgttgtccgacatttccttgcatgttgctctcaaccggccgttggagctgaaacaactgtggaaattgacatagctggtgaacagtttaatgcatcagggcgtgtcatacttgctaaaaattatctggatgtttaccgctttgactcatggggtggaacgttacttccaacatacaacattgggcagcagtttgttccgacaactttaacacttgattctggagtgactcggccaccgcctcttctggctgaagccgaccttcttagctgtatggataaagaattggcactgatgcaaccatgcatgatcacataaaaaagttgcttgaccgttgttatgcaaccaaagatgaaaacacacgtttctccccgacaaatcttggtgaggcattggtgatgggttatgatgaaatggggtgagttgactcttaaagttgctgcacttactgaatatataaaggatgatctggttgctttgctcaaacactactttttaggtatgagctttggaagccttatttaagatcaatgatggaagctgatatgaaatcagttagcgtgggtactaagagtaaatcagaagtacttgagagttgtttgcagcagatgaaggcctgttttcttgacgcaagggtgaagaaagcaaaactccttgatgcaatggggacattctttgcaaggcctataaatgaaactcaaaatccagtagaggttgtgaggccttgtggtgcatgcaatggatctgaaatgttgcttaagcgaagggcgagtggtgaatttatggttgggtgccgaagttatccacaatgtagaaacgtggtatggctcccaggatctctttcagaagcggctgtaactaatcaagtttgtcctatctgcgcaccaggccctgtttataagattcaattcaagttccgtcggagggatattccaccaaatttcgatgttgatcacctaggttgtgttggtggttgtgatgatatcctcaaagaccttatggagataagtaggtttggaagtcgcagccaggctgcaacaccaggtttttgaatctctgatctctgattgatatatgggctcatcttttttattgctctaaatgcgatgcacttgtttctgttgaacctacccccatctatctccagtattcaggttctactaaaacaaccagtgtaattttcattctaaaatatttaattacttctgtgaccatattacttcacagcaagaggaccaacaccaaatggtgtgggtcaggggactccaagacaggatttacatactatttttcgtccggcaagccagcttaataatgataacccatcggttatgcattctcaaggtttccgttcaacccatacccaaaatccaagtaatgcatcagatgcaggtcaagtgctgtgcacctcatgtggagcgctttgcatatcacgaattgctaatacagaggctaacagggggaggaggttctacaaatgtcaagatcctggctgtggcttcttcaaatgggaagacgaagtggacaatggtacggggagaggccgccgtgggcgcggcagcagcaggcaggcgtctgcgtctgcatctgcaggacggagaggcggaggccggagaggcagaggccgtaacgctgacggcgggatgttcgtttcagcgacgggcgacaccgtgctcggctgctgctttaactgcggcgatccttcccacttcgcaaacgcctgcccgaaccggagatagttatcagggagctgctcgctatgcgtgtacagagactggcagcgtccgccaaacgatgaagccttcggatggttttcgtgtactgaggtgcatataagtgcacctgacaagctcattttctagacaattactaatatttttaaacaaaatgcagctattaggctgatgctagttcagcaaatctgacggcacttatttacaaaagttagggcgcgaaaaactgacaaaggaagagatgcaaacacgagctgatctactaaggtttcgataacaagtttctactca

SEQ ID NO: 497 - DNA, 3088 bp, Zea Mays
ttcaaaccattccgaaatccgaaacctcccgcggtctcgcccccacccctcacaccaccgcaccaccggccaccccctgccccgatgcagcccgacggcggcggcgcgattcgcgtgctgaacgtggcggagaagccgtcggtggcgaaggcagtggctgagatcctgtcgcgccgctcggcgcagtcgcgtgcgggccggtcccagtacaaccgcattttcgagttcaactacgccatcaatggccgcgcctgccacatgctcgtcacctccgtcacgggccacctcatggaactcgaattcgatgaccgcttccgccgctggcactcctgcgaccccgccgaacttttccacgccccagtccgcaagtccgtgccccaggacaagcaggccataaaacaaactttggaagaagaagctaggagatgccagtggctggtgctatggcttgattgtgatagagagggtgagaacatagcatatgaagtgatcgatgtttgtacacgtgccaacagtcatcttaacatttggagggctcgcttctcagctttgattgatagggagatacatgaatctgtgcaacatcttggcaggcccaacaagctctttgcagatgctgtggatgcaagacaggaaattgaccttcgcattggtgcctccttcacaaggtttcaaaccatgctgttaaaggatgcatttgtaattgatgtgactggggatgagagaagtttggttctgagctatggtccttgtcagtttccaaccctaggattcattgttgagcgtttctgggagattcaagctcatgaacctgaagagttctggacaataaattgtactcatacttcagatgaaggcactgcatcttttggttggatacgtggtcatttgtttgattattcatgtgctattagtatctatgaaatgtgtgtttcagaaccaatggcaacagtacaaaatgttaggaatcaagagaagctaaaataccccccatatccactaagtacagtggagcttcagaaacgtgcttctaggtactttagaatgagttcagagcacacaatgaaggtggctgaagaactttatcaagctggattcattagttatccgaggacagaaactgataacttctccccaaacactgacctgcatgcaatcgtacgtgaacaagtgaatcatccagtttggggagcatatgctcagcgacttctaaatcctgaagcaagactttggaggaatcccagtaatggtggtcatgatgacaaggcacatcctcctattcatccaaccaaattttcagaagagattgtatgagtttgttgtccgacatttccttgcatgttgctctcaaccggccgttggagctgaaacaactgtggaaattgacatagctggtgaacagtttaatgcatcagggcgtgtcatacttgctaaaaattatctggatgtttaccgctttgactcatggggtggaacgttacttccaacatacaacattgggcagcagtttgttccgacaactttaacacttgattctggagtgactcggccaccgcctcttctggctgaagccgaccttcttagctgtatggataaagcaggaattggcactgatgcaaccatgcatgatcacataaaaaagttgcttgaccgttgttatgcaaccaaagatgaaaacacacgtttctccccgacaaatcttggtgaggcattggtgatgggttatgatgaaatggggtatgagctttggaagccttatttaagatcaatgatggaagctgatatgaaatcagttagcgtgggtactaagagtaaatcagaagtacttgagagttgtttgcagcagatgaaggcctgttttcttgacgcaagggtgaagaaagcaaaactccttgatgcaatggggacattctttgcaaggtctaataggcctataaatgaaactcaaaatccagtagaggttgtgaggccttgtggtgcatgcaatggatctgaaatgttgcttaagcgaagggcgagtggtgaatttatggttgggtgccgaagttatccacaatgtagaaacgtggtatggctcccaggatctctttcagaagcggctgtaactaatcaagtttgtcctatctgcgcaccaggccctgtttataagattcaattcaagttccgtcggagggatattccaccaaatttcgatgttgatcacctaggttgtgttggtggttgtgatgatatcctcaaagaccttatggagataagtaggtttggaagtcgcagccaggctgcaacaccagcaagaggaccaacaccaaatggtgtgggtcaggggactccaagacaggatttacatactatttttcgtccggcaagccagcttaataatgataacccatcggttatgcattctcaaggtttccgttcaacccatacccaaaatccaagtaatgcatcagatgcaggtcaagtgctgtgcacctcatgtggagcgctttgcatatcacgaattgctaatacagaggctaacagggggaggaggttctacaaatgtcaagatcctggctgtggcttcttcaaatgggaagacgaagtggacaatggtacggggagaggccgccgtgggcgcggcagcagcaggcaggcgtctgcgtctgcatctgcaggacggagaggcggaggccggagaggcagaggccgtaacgctgacggcgggatgttcgtttcagcgacgggcgacaccgtgctcggctgctgctttaactgcggcgatccttcccacttcgcaaacgcctgcccgaaccggagatagttatcagggagctgctcgctatgcgtgtacagagactggcagcgtccgccaaacgatgaagccttcggatggttttcgtgtactgaggtgcatataagtgcacctgacaagctcattttctagacaattactaatatttttaaacaaaatgcagctattaggctgatgctagttcagcaaatctgacggcacttatttacaaaagttagggcgcgaaaaactgacaaaggaagagatgcaaacacgagctgatctactaaggtttcgataacaagtttctactca

SEQ ID NO: 498 - DNA, 3107 bp, Zea Mays
aaccattccgaaatccgaaacctcccgcggtctcgcccccacccctcacaccaccgcaccaccggccaccccctgccccgatgcagcccgacggcggcggcgcgattcgcgtgctgaacgtggcggagaagccgtcggtggcgaaggcagtggctgagatcctgtcgcgccgctcggcgcagtcgcgtgcgggccggtcccagtacaaccgcattttcgagttcaactacgccatcaatggccgcgcctgccacatgctcgtcacctccgtcacgggccacctcatggaactcgaattcgatgaccgcttccgccgctggcactcctgcgaccccgccgaacttttccacgccccagtccgcaagtccgtgccccaggacaagcaggccataaaacaaactttggaagaagaagctaggagatgccagtggctggtgctatggcttgattgtgatagagagggtgagaacatagcatatgaagtgatcgatgtttgtacacgtgccaacagtcatcttaacatttggagggctcgcttctcagctttgattgatagggagatacatgaatctgtgcaacatcttggcaggcccaacaagctctttgcagatgctgtggatgcaagacaggaaattgaccttcgcattggtgcctccttcacaaggtttcaaaccatgctgttaaaggatgcatttgtaattgatgtgactggggatgagagaagtttggttctgagctatggtccttgtcagtttccaaccctaggattcattgttgagcgtttctgggagattcaagctcatgaacctgaagagttctggacaataaattgtactcatacttcagatgaaggcactgcatcttttggttggatacgtggtcatttgtttgattattcatgtgctattagtatctatgaaatgtgtgtttcagaaccaatggcaacagtacaaaatgttaggaatcaagagaagctaaaataccccccatatccactaagtacagtggagcttcagaaacgtgcttctaggtactttagaatgagttcagagcacacaatgaaggtggctgaagaactttatcaagctggattcattagttatccgaggacagaaactgataacttctccccaaacactgacctgcatgcaatcgtacgtgaacaagtgaatcatccagtttggggagcatatgctcagcgacttctaaatcctgaagcaagactttggaggaatcccagtaatggtggtcatgatgacaaggcacatcctcctattcatccaaccaaattttcagaaggtgaaagaaactggagtccagaccacactagattgtatgagtttgttgtccgacatttccttgcatgttgctctcaaccggccgttggagctgaaacaactgtggaaattgacatagctggtgaacagtttaatgcatcagggcgtgtcatacttgctaaaaattatctggatgtttaccgctttgactcatggggtggaacgttacttccaacatacaacattgggcagcagtttgttccgacaactttaacacttgattctggagtgactcggccaccgcctcttctggctgaagccgaccttcttagctgtatggataaagcaggaattggcactgatgcaaccatgcatgatcacataaaaaagttgcttgaccgttgttatgcaaccaaagatgaaaacacacgtttctccccgacaaatcttggtgaggcattggtgatgggttatgatgaaatggggtatgagctttggaagccttatttaagatcaatgatggaagctgatatgaaatcagttagcgtgggtactaagagtaaatcagaagtacttgagagttgtttgcagcagatgaaggcctgttttcttgacgcaagggtgaagaaagcaaaactccttgatgcaatggggacattctttgcaaggtctaataggcctataaatgaaactcaaaatccagtagaggttgtgaggccttgtggtgcatgcaatggatctgaaatgttgcttaagcgaagggcgagtggtgaatttatggttgggtgccgaagttatccacaatgtagaaacgtggtatggctcccaggatctctttcagaagcggctgtaactaatcaagtttgtcctatctgcgcaccaggccctgtttataagattcaattcaagttccgtcggagggatattccaccaaatttcgatgttgatcacctaggttgtgttggtggttgtgatgatatcctcaaagaccttatggagataagtaggtttggaagtcgcagccaggctgcaacaccagcaagaggaccaacaccaaatggtgtgggtcaggggactccaagacaggatttacatactatttttcgtccggcaagccagcttaataatgataacccatcggttatgcattctcaaggtttccgttcaacccatacccaaaatccaagtaatgcatcaggtcaagtgctgtgcacctcatgtggagcgctttgcatatcacgaattgctaatacagaggctaacagggggaggaggttctacaaatgtcaagatcctggctgtggcttcttcaaatgggaagacgaagtggacaatggtacggggagaggccgccgtgggcgcggcagcagcaggcaggcgtctgcgtctgcatctgcaggacggagaggcggaggccggagaggcagaggccgtaacgctgacggcgggatgttcgtttcagcgacgggcgacaccgtgctcggctgctgctttaactgcggcgatccttcccacttcgcaaacgcctgcccgaaccggagatagttatcagggagctgctcgctatgcgtgtacagagactggcagcgtccgccaaacgatgaagccttcggatggttttcgtgtactgaggtgcatataagtgcacctgacaagctcattttctagacaattactaatatttttaaacaaaatgcagctattaggctgatgctagttcagcaaatctgacggcacttatttacaaaagttagggcgcgaaaaactgacaaaggaagagatgcaaacacgagctgatctactaaggtttcgataacaagtttctactca

SEQ ID NO: 499 - DNA, 3074 bp, Zea Mays
ttccgaaatccgaaacctcccgcggtctcgcccccacccctcacaccaccgcaccaccggccaccccctgccccgatgcagcccgacggcggcggcgcgattcgcgtgctgaacgtggcggagaagccgtcggtggcgaaggcagtggctgagatcctgtcgcgccgctcggcgcagtcgcgtgcgggccggtcccagtacaaccgcattttcgagttcaactacgccatcaatggccgcgcctgccacatgctcgtcacctccgtcacgggccacctcatggaactcgaattcgatgaccgcttccgccgctggcactcctgcgaccccgccgaacttttccacgccccagtccgcaagtccgtgccccaggacaagcaggccataaaacaaactttggaagaagaagctaggagatgccagtggctggtgctatggcttgattgtgatagagagggtgagaacatagcatatgaagtgatcgatgtttgtacacgtgccaacagtcatcttaacatttggagggctcgcttctcagctttgattgatagggagatacatgaatctgtgcaacatcttggcaggcccaacaagctctttgcagatgctgtggatgcaagacaggaaattgaccttcgcattggtgcctccttcacaaggtttcaaaccatgctgttaaaggatgcatttgtaattgatgtgactggggatgagagaagtttggttctgagctatggtccttgtcagtttccaaccctaggattcattgttgagcgtttctgggagattcaagctcatgaacctgaagagttctggacaataaattgtactcatacttcagatgaaggcactgcatcttttggttggatacgtggtcatttgtttgattattcatgtgctattagtatctatgaaatgtgtgtttcagaaccaatggcaacagtacaaaatgttaggaatcaagagaagctaaaataccccccatatccactaagtacagtggagcttcagaaacgtgcttctaggtggctgaagaactttatcaagctggattcattagttatccgaggacagaaactgataacttctccccaaacactgacctgcatgcaatcgtacgtgaacaagtgaatcatccagtttggggagcatatgctcagcgacttctaaatcctgaagcaagactttggaggaatcccagtaatggtggtcatgatgacaaggcacatcctcctattcatccaaccaaattttcagaaggtgaaagaaactggagtccagaccacactagattgtatgagtttgttgtccgacatttccttgcatgttgctctcaaccggccgttggagctgaaacaactgtggaaattgacatagctggtgaacagtttaatgcatcagggcgtgtcatacttgctaaaaattatctggatgtttaccgctttgactcatggggtggaacgttacttccaacatacaacattgggcagcagtttgttccgacaactttaacacttgattctggagtgactcggccaccgcctcttctggctgaagccgaccttcttagctgtatggataaagcaggaattggcactgatgcaaccatgcatgatcacataaaaaagttgcttgaccgttgttatgcaaccaaagatgaaaacacacgtttctccccgacaaatcttggtgaggcattggtgatgggttatgatgaaatggggtatgagctttggaagccttatttaagatcaatgatggaagctgatatgaaatcagttagcgtgggtactaagagtaaatcagaagtacttgagagttgtttgcagcagatgaaggcctgttttcttgacgcaagggtgaagaaagcaaaactccttgatgcaatggggacattctttgcaaggtctaataggcctataaatgaaactcaaaatccagtagaggttgtgaggccttgtggtgcatgcaatggatctgaaatgttgcttaagcgaagggcgagtggtgaatttatggttgggtgccgaagttatccacaatgtagaaacgtggtatggctcccaggatctctttcagaagcggctgtaactaatcaagtttgtcctatctgcgcaccaggccctgtttataagattcaattcaagttccgtcggagggatattccaccaaatttcgatgttgatcacctaggttgtgttggtggttgtgatgatatcctcaaagaccttatggagataagtaggtttggaagtcgcagccaggctgcaacaccagcaagaggaccaacaccaaatggtgtgggtcaggggactccaagacaggatttacatactatttttcgtccggcaagccagcttaataatgataacccatcggttatgcattctcaaggtttccgttcaacccatacccaaaatccaagtaatgcatcagatgcaggtcaagtgctgtgcacctcatgtggagcgctttgcatatcacgaattgctaatacagaggctaacagggggaggaggttctacaaatgtcaagatcctggctgtggcttcttcaaatgggaagacgaagtggacaatggtacggggagaggccgccgtgggcgcggcagcagcaggcaggcgtctgcgtctgcatctgcaggacggagaggcggaggccggagaggcagaggccgtaacgctgacggcgggatgttcgtttcagcgacgggcgacaccgtgctcggctgctgctttaactgcggcgatccttcccacttcgcaaacgcctgcccgaaccggagatagttatcagggagctgctcgctatgcgtgtacagagactggcagcgtccgccaaacgatgaagccttcggatggttttcgtgtactgaggtgcatataagtgcacctgacaagctcattttctagacaattactaatatttttaaacaaaatgcagctattaggctgatgctagttcagcaaatctgacggcacttatttacaaaagttagggcgcgaaaaactgacaaaggaagagatgcaaacacgagctgatctactaaggtttcgataacaagtttctactca

SEQ ID NO: 500 - DNA, 3092 bp, Zea Mays
gtctcgcccccacccctcacaccaccgcaccaccggccaccccctgccccgatgcagcccgacggcggcggcgcgattcgcgtgctgaacgtggcggagaagccgtcggtggcgaaggcagtggctgagatcctgtcgcgccgctcggcgcagtcgcgtgcgggccggtcccagtacaaccgcattttcgagttcaactacgccatcaatggccgcgcctgccacatgctcgtcacctccgtcacgggccacctcatggaactcgaattcgatgaccgcttccgccgctggcactcctgcgaccccgccgaacttttccacgccccagtccgcaagtccgtgccccaggacaagcaggccataaaacaaactttggaagaagaagctaggagatgccagtggctggtgctatggcttgattgtgatagagagggtgagaacatagcatatgaagtgatcgatgtttgtacacgtgccaacagtcatcttaacatttggagggctcgcttctcagctttgattgatagggagatacatgaatctgtgcaacatcttggcaggcccaacaagctctttgcagatgctgtggatgcaagacaggaaattgaccttcgcattggtgcctccttcacaaggtttcaaaccatgctgttaaaggatgcatttgtaattgatgtgactggggatgagagaagtttggttctgagctatggtccttgtcagtttccaaccctaggattcattgttgagcgtttctgggagattcaagctcatgaacctgaagagttctggacaataaattgtactcatacttcagatgaaggcactgcatcttttggttggatacgtggtcatttgtttgattattcatgtgctattagtatctatgaaatgtgtgtttcagaaccaatggcaacagtacaaaatgttaggaatcaagagaagctaaaataccccccatatccactaagtacagtggagcttcagaaacgtgcttctaggtactttagaatgagttcagagcacacaatgaaggtctaagaatatcttgtcttatagttttaatttcccttccagttccactatctaataatggacatacctcagtagcttcgttgtttgcttgttttttctttggtggtctcttccctttcaacaccaggtggctgaagaactttatcaagctggattcattagttatccgaggacagaaactgataacttctccccaaacactgacctgcatgcaatcgtacgtgaacaagtgaatcatccagtttggggagcatatgctcagcgacttctaaatcctgaagcaagactttggaggaatcccagtaatggtggtcatgatgacaaggcacatcctcctattcatccaaccaaattttcagaagagattgtatgagtttgttgtccgacatttccttgcatgttgctctcaaccggccgttggagctgaaacaactgtggaaattgacatagctggtgaacagtttaatgcatcagggcgtgtcatacttgctaaaaattatctggatgtttaccgctttgactcatggggtggaacgttacttccaacatacaacattgggcagcaggcaggaattggcactgatgcaaccatgcatgatcacataaaaaagttgcttgaccgttgttatgcaaccaaagatgaaaacacacgtttctccccgacaaatcttggtgaggcattggtgatgggttatgatgaaatggggtatgagctttggaagccttatttaagatcaatgatggaagctgatatgaaatcagttagcgtgggtactaagagtaaatcagaagtacttgagagttgtttgcagcagatgaaggcctgttttcttgacgcaagggtgaagaaagcaaaactccttgatgcaatggggacattctttgcaaggtctaataggcctataaatgaaactcaaaatccagtagaggttgtgaggccttgtggtgcatgcaatggatctgaaatgttgcttaagcgaagggcgagtggtgaatttatggttgggtgccgaagttatccacaatgtagaaacgtggtatggctcccaggatctctttcagaagcggctgtaactaatcaagtttgtcctatctgcgcaccaggccctgtttataagattcaattcaagttccgtcggagggatattccaccaaatttcgatgttgatcacctaggttgtgttggtggttgtgatgatatcctcaaagaccttatggagataagtaggtttggaagtcgcagccaggctgcaacaccagcaagaggaccaacaccaaatggtgtgggtcaggggactccaagacaggatttacatactatttttcgtccggcaagccagcttaataatgataacccatcggttatgcattctcaaggtttccgttcaacccatacccaaaatccaagtaatgcatcagatgcaggtcaagtgctgtgcacctcatgtggagcgctttgcatatcacgaattgctaatacagaggctaacagggggaggaggttctacaaatgtcaagatcctggctgtggcttcttcaaatgggaagacgaagtggacaatggtacggggagaggccgccgtgggcgcggcagcagcaggcaggcgtctgcgtctgcatctgcaggacggagaggcggaggccggagaggcagaggccgtaacgctgacggcgggatgttcgtttcagcgacgggcgacaccgtgctcggctgctgctttaactgcggcgatccttcccacttcgcaaacgcctgcccgaaccggagatagttatcagggagctgctcgctatgcgtgtacagagactggcagcgtccgccaaacgatgaagccttcggatggttttcgtgtactgaggtgcatataagtgcacctgacaagctcattttctagacaattactaatatttttaaacaaaatgcagctattaggctgatgctagttcagcaaatctgacggcacttatttacaaaagttagggcgcgaaaaactgacaaaggaagagatgcaaacacgagctgatctactaaggtttcgataacaagtttctactca

SEQ ID NO: 501 - DNA, 2919 bp, Zea Mays
gtctcgcccccacccctcacaccaccgcaccaccggccaccccctgccccgatgcagcccgacggcggcggcgcgattcgcgtgctgaacgtggcggagaagccgtcggtggcgaaggcagtggctgagatcctgtcgcgccgctcggcgcagtcgcgtgcgggccggtcccagtacaaccgcattttcgagttcaactacgccatcaatggccgcgcctgccacatgctcgtcacctccgtcacgggccacctcatggaactcgaattcgatgaccgcttccgccgctggcactcctgcgaccccgccgaacttttccacgccccagtccgcaagtccgtgccccaggacaagcaggccataaaacaaactttggaagaagaagctaggagatgccagtggctggtgctatggcttgattgtgatagagagggtgagaacatagcatatgaagtgatcgatgtttgtacacgtgccaacagtcatcttaacatttggagggctcgcttctcagctttgattgatagggagatacatgaatctgtgcaacatcttggcaggcccaacaagctctttgcagatgctgtggatgcaagacaggaaattgaccttcgcattggtgcctccttcacaaggtttcaaaccatgctgttaaaggatgcatttgtaattgatgtgactggggatgagagaagtttggttctgagctatggtccttgtcagtttccaaccctaggattcattgttgagcgtttctgggagattcaagctcatgaacctgaagagttctggacaataaattgtactcatacttcagatgaaggcactgcatcttttggttggatacgtggtcatttgtttgattattcatgtgctattagtatctatgaaatgtgtgtttcagaaccaatggcaacagtacaaaatgttaggaatcaagagaagctaaaataccccccatatccactaagtacagtggagcttcagaaacgtgcttctaggtactttagaatgagttcagagcacacaatgaaggtggctgaagaactttatcaagctggattcattagttatccgaggacagaaactgataacttctccccaaacactgacctgcatgcaatcgtacgtgaacaagtgaatcatccagtttggggagcatatgctcagcgacttctaaatcctgaagcaagactttggaggaatcccagtaatggtggtcatgatgacaaggcacatcctcctattcatccaaccaaattttcagaaggtgaaagaaactggagtccagaccacactagattgtatgagtttgttgtccgacatttccttgcatgttgctctcaaccggccgttggagctgaaacaactgtggaaattgacatagctggtgaacagtttaatgcatcagggcgtgtcatacttgctaaaaattatctggatgtttaccgctttgactcatggggtggaacgttacttccaacatacaacattgggcagcagtttgttccgacaactttaacacttgattctggagtgactcggccaccgcctcttctggctgaagccgaccttcttagctgtatggataaagcaggaattggcactgatgcaaccatgcatgatcacataaaaaagttgcttgaccgttgttatgcaaccaaagatgaaaacacacgtttctccccgacaaatcttggtgaggcattggtgatgggttatgatgaaatggggtatgagctttggaagccttatttaagatcaatgatggaagctgatatgaaatcagttagcgtgggtactaagagtaaatcagaagtacttgagagttgtttgcagcagatgaaggcctgttttcttgacgcaagggtgaagaaagcaaaactccttgatgcaatggggacattctttgcaaggtctaataggcctataaatgaaactcaaaatccagtagaggttgtgaggccttgtggtgcatgcaatggatctgaaatgttgcttaagcgaagggcgagtggtgaatttatggttgggtgccgaagttatccacaatgtagaaacgtggtatggctcccaggatctctttcagaagcggctgtaactaatcaagtttgtcctatctgcgcaccaggccctgtttataagattcaattcaagttccgtcggagggatattccaccaaatttcgatgttgatcacctaggttgtgttggtggttgtgatgatatcctcaaagaccttatggagataagtaggtttggaagtcgcagccaggctgcaacaccaggtcaagtgctgtgcacctcatgtggagcgctttgcatatcacgaattgctaatacagaggctaacagggggaggaggttctacaaatgtcaagatcctggctgtggcttcttcaaatgggaagacgaagtggacaatggtacggggagaggccgccgtgggcgcggcagcagcaggcaggcgtctgcgtctgcatctgcaggacggagaggcggaggccggagaggcagaggccgtaacgctgacggcgggatgttcgtttcagcgacgggcgacaccgtgctcggctgctgctttaactgcggcgatccttcccacttcgcaaacgcctgcccgaaccggagatagttatcagggagctgctcgctatgcgtgtacagagactggcagcgtccgccaaacgatgaagccttcggatggttttcgtgtactgaggtgcatataagtgcacctgacaagctcattttctagacaattactaatatttttaaacaaaatgcagctattaggctgatgctagttcagcaaatctgacggcacttatttacaaaagttagggcgcgaaaaactgacaaaggaagagatgcaaacacgagctgatctactaaggtttcgataacaagtttctactca

SEQ ID NO: 502 - DNA, 3288 bp, Zea Mays
gtctcgcccccacccctcacaccaccgcaccaccggccaccccctgccccgatgcagcccgacggcggcggcgcgattcgcgtgctgaacgtggcggagaagccgtcggtggcgaaggcagtggctgagatcctgtcgcgccgctcggcgcagtcgcgtgcgggccggtcccagtacaaccgcattttcgagttcaactacgccatcaatggccgcgcctgccacatgctcgtcacctccgtcacgggccacctcatggaactcgaattcgatgaccgcttccgccgctggcactcctgcgaccccgccgaacttttccacgccccagtccgcaagtccgtgccccaggacaagcaggccataaaacaaactttggaagaagaagctaggagatgccagtggctggtgctatggcttgattgtgatagagagggtgagaacatagcatatgaagtgatcgatgtttgtacacgtgccaacagtcatcttaacatttggagggctcgcttctcagctttgattgatagggagatacatgaatctgtgcaacatcttggcaggcccaacaagctctttgcagatgctgtggatgcaagacaggaaattgaccttcgcattggtgcctccttcacaaggtttcaaaccatgctgttaaaggatgcatttgtaattgatgtgactggggatgagagaagtttggttctgagctatggtccttgtcagtttccaaccctaggattcattgttgagcgtttctgggagattcaagctcatgaacctgaagagttctggacaataaattgtactcatacttcagatgaaggcactgcatcttttggttggatacgtggtcatttgtttgattattcatgtgctattagtatctatgaaatgtgtgtttcagaaccaatggcaacagtacaaaatgttaggaatcaagagaagctaaaataccccccatatccactaagtacagtggagcttcagaaacgtgcttctaggtactttagaatgagttcagagcacacaatgaaggtctaagaatatcttgtcttatagttttaatttcccttccagttccactatctaataatggacatacctcagtagcttcgttgtttgcttgttttttctttggtggtctcttccctttcaacaccaggtggctgaagaactttatcaagctggattcattagttatccgaggacagaaactgataacttctccccaaacactgacctgcatgcaatcgtacgtgaacaagtgaatcatccagtttggggagcatatgctcagcgacttctaaatcctgaagcaagactttggaggaatcccagtaatggtggtcatgatgacaaggcacatcctcctattcatccaaccaaattttcagaaggtgaaagaaactggagtccagaccacactagattgtatgagtttgttgtccgacatttccttgcatgttgctctcaaccggccgttggagctgaaacaactgtggaaattgacatagctggtgaacagtttaatgcatcagggcgtgtcatacttgctaaaaattatctggatgtttaccgctttgactcatggggtggaacgttacttccaacatacaacattgggcagcagtttgttccgacaactttaacacttgattctggagtgactcggccaccgcctcttctggctgaagccgaccttcttagctgtatggataaagaattggcactgatgcaaccatgcatgatcacataaaaaagttgcttgaccgttgttatgcaaccaaagatgaaaacacacgtttctccccgacaaatcttggtgaggcattggtgatgggttatgatgaaatggggtgagttgactcttaaagttgctgcacttactgaatatataaaggatgatctggttgctttgctcaaacactactttttaggtatgagctttggaagccttatttaagatcaatgatggaagctgatatgaaatcagttagcgtgggtactaagagtaaatcagaagtacttgagagttgtttgcagcagatgaaggcctgttttcttgacgcaagggtgaagaaagcaaaactccttgatgcaatggggacattctttgcaaggtctaataggcctataaatgaaactcaaaatccagtagaggttgtgaggccttgtggtgcatgcaatggatctgaaatgttgcttaagcgaagggcgagtggtgaatttatggttgggtgccgaagttatccacaatgtagaaacgtggtatggctcccaggatctctttcagaagcggctgtaactaatcaagtttgtcctatctgcgcaccaggccctgtttataagattcaattcaagttccgtcggagggatattccaccaaatttcgatgttgatcacctaggttgtgttggtggttgtgatgatatcctcaaagaccttatggagataagtaggtttggaagtcgcagccaggctgcaacaccagcaagaggaccaacaccaaatggtgtgggtcaggggactccaagacaggatttacatactatttttcgtccggcaagccagcttaataatgataacccatcggttatgcattctcaaggtttccgttcaacccatacccaaaatccaagtaatgcatcagatgcaggtcaagtgctgtgcacctcatgtggagcgctttgcatatcacgaattgctaatacagaggctaacagggggaggaggttctacaaatgtcaagatcctggctgtggcttcttcaaatgggaagacgaagtggacaatggtacggggagaggccgccgtgggcgcggcagcagcaggcaggcgtctgcgtctgcatctgcaggacggagaggcggaggccggagaggcagaggccgtaacgctgacggcgggatgttcgtttcagcgacgggcgacaccgtgctcggctgctgctttaactgcggcgatccttcccacttcgcaaacgcctgcccgaaccggagatagttatcagggagctgctcgctatgcgtgtacagagactggcagcgtccgccaaacgatgaagccttcggatggttttcgtgtactgaggtgcatataagtgcacctgacaagctcattttctagacaattactaatatttttaaacaaaatgcagctattaggctgatgctagttcagcaaatctgacggcacttatttacaaaagttagggcgcgaaaaactgacaaaggaagagatgcaaacacgagctgatctactaaggtttcgataacaagtttctactca

SEQ ID NO: 503 - DNA, 3379 bp, Zea Mays
gtctcgcccccacccctcacaccaccgcaccaccggccaccccctgccccgatgcagcccgacggcggcggcgcgattcgcgtgctgaacgtggcggagaagccgtcggtggcgaaggcagtggctgagatcctgtcgcgccgctcggcgcagtcgcgtgcgggccggtcccagtacaaccgcattttcgagttcaactacgccatcaatggccgcgcctgccacatgctcgtcacctccgtcacgggccacctcatggaactcgaattcgatgaccgcttccgccgctggcactcctgcgaccccgccgaacttttccacgccccagtccgcaagtccgtgccccaggacaagcaggccataaaacaaactttggaagaagaagctaggagatgccagtggctggtgctatggcttgattgtgatagagagggtgagaacatagcatatgaagtgatcgatgtttgtacacgtgccaacagtcatcttaacatttggagggctcgcttctcagctttgattgatagggagatacatgaatctgtgcaacatcttggcaggcccaacaagctctttgcagatgctgtggatgcaagacaggaaattgaccttcgcattggtgcctccttcacaaggtttcaaaccatgctgttaaaggatgcatttgtaattgatgtgactggggatgagagaagtttggttctgagctatggtccttgtcagtttccaaccctaggattcattgttgagcgtttctgggagattcaagctcatgaacctgaagagttctggacaataaattgtactcatacttcagatgaaggcactgcatcttttggttggatacgtggtcatttgtttgattattcatgtgctattagtatctatgaaatgtgtgtttcagaaccaatggcaacagtacaaaatgttaggaatcaagagaagctaaaataccccccatatccactaagtacagtggagcttcagaaacgtgcttctaggtactttagaatgagttcagagcacacaatgaaggtctaagaatatcttgtcttatagttttaatttcccttccagttccactatctaataatggacatacctcagtagcttcgttgtttgcttgttttttctttggtggtctcttccctttcaacaccaggtggctgaagaactttatcaagctggattcattagttatccgaggacagaaactgataacttctccccaaacactgacctgcatgcaatcgtacgtgaacaagtgaatcatccagtttggggagcatatgctcagcgacttctaaatcctgaagcaagactttggaggaatcccagtaatggtggtcatgatgacaaggcacatcctcctattcatccaaccaaattttcagaaggtgaaagaaactggagtccagaccacactagattgtatgagtttgttgtccgacatttccttgcatgttgctctcaaccggccgttggagctgaaacaactgtggaaattgacatagctggtgaacagtttaatgcatcagggcgtgtcatacttgctaaaaattatctggatgtttaccgctttgactcatggggtggaacgttacttccaacatacaacattgggcagcagtttgttccgacaactttaacacttgattctggagtgactcggccaccgcctcttctggctgaagccgaccttcttagctgtatggataaagcaggaattggcactgatgcaaccatgcatgatcacataaaaaagttgcttgaccgttgttatgcaaccaaagatgaaaacacacgtttctccccgacaaatcttggtgaggcattggtgatgggttatgatgaaatggggtatgagctttggaagccttatttaagatcaatgatggaagctgatatgaaatcagttagcgtgggtactaagagtaaatcagaagtacttgagagttgtttgcagcagatgaaggcctgttttcttgacgcaagggtgaagaaagcaaaactccttgatgcaatggggacattctttgcaaggcctataaatgaaactcaaaatccagtagaggttgtgaggccttgtggtgcatgcaatggatctgaaatgttgcttaagcgaagggcgagtggtgaatttatggttgggtgccgaagttatccacaatgtagaaacgtggtatggctcccaggatctctttcagaagcggctgtaactaatcaagtttgtcctatctgcgcaccaggccctgtttataagattcaattcaagttccgtcggagggatattccaccaaatttcgatgttgatcacctaggttgtgttggtggttgtgatgatatcctcaaagaccttatggagataagtaggtttggaagtcgcagccaggctgcaacaccaggtttttgaatctctgatctctgattgatatatgggctcatcttttttattgctctaaatgcgatgcacttgtttctgttgaacctacccccatctatctccagtattcaggttctactaaaacaaccagtgtaattttcattctaaaatatttaattacttctgtgaccatattacttcacagcaagaggaccaacaccaaatggtgtgggtcaggggactccaagacaggatttacatactatttttcgtccggcaagccagcttaataatgataacccatcggttatgcattctcaaggtttccgttcaacccatacccaaaatccaagtaatgcatcaggtcaagtgctgtgcacctcatgtggagcgctttgcatatcacgaattgctaatacagaggctaacagggggaggaggttctacaaatgtcaagatcctggctgtggcttcttcaaatgggaagacgaagtggacaatggtacggggagaggccgccgtgggcgcggcagcagcaggcaggcgtctgcgtctgcatctgcaggacggagaggcggaggccggagaggcagaggccgtaacgctgacggcgggatgttcgtttcagcgacgggcgacaccgtgctcggctgctgctttaactgcggcgatccttcccacttcgcaaacgcctgcccgaaccggagatagttatcagggagctgctcgctatgcgtgtacagagactggcagcgtccgccaaacgatgaagccttcggatggttttcgtgtactgaggtgcatataagtgcacctgacaagctcattttctagacaattactaatatttttaaacaaaatgcagctattaggctgatgctagttcagcaaatctgacggcacttatttacaaaagttagggcgcgaaaaactgacaaaggaagagatgcaaacacgagctgatctactaaggtttcgataacaagtttctactca

SEQ ID NO: 504 - DNA, 3177 bp, Zea Mays
gtctcgcccccacccctcacaccaccgcaccaccggccaccccctgccccgatgcagcccgacggcggcggcgcgattcgcgtgctgaacgtggcggagaagccgtcggtggcgaaggcagtggctgagatcctgtcgcgccgctcggcgcagtcgcgtgcgggccggtcccagtacaaccgcattttcgagttcaactacgccatcaatggccgcgcctgccacatgctcgtcacctccgtcacgggccacctcatggaactcgaattcgatgaccgcttccgccgctggcactcctgcgaccccgccgaacttttccacgccccagtccgcaagtccgtgccccaggacaagcaggccataaaacaaactttggaagaagaagctaggagatgccagtggctggtgctatggcttgattgtgatagagagggtgagaacatagcatatgaagtgatcgatgtttgtacacgtgccaacagtcatcttaacatttggagggctcgcttctcagctttgattgatagggagatacatgaatctgtgcaacatcttggcaggcccaacaagctctttgcagatgctgtggatgcaagacaggaaattgaccttcgcattggtgcctccttcacaaggtttcaaaccatgctgttaaaggatgcatttgtaattgatgtgactggggatgagagaagtttggttctgagctatggtccttgtcagtttccaaccctaggattcattgttgagcgtttctgggagattcaagctcatgaacctgaagagttctggacaataaattgtactcatacttcagatgaaggcactgcatcttttggttggatacgtggtcatttgtttgattattcatgtgctattagtatctatgaaatgtgtgtttcagaaccaatggcaacagtacaaaatgttaggaatcaagagaagctaaaataccccccatatccactaagtacagtggagcttcagaaacgtgcttctaggtactttagaatgagttcagagcacacaatgaaggtctaagaatatcttgtcttatagttttaatttcccttccagttccactatctaataatggacatacctcagtagcttcgttgtttgcttgttttttctttggtggtctcttccctttcaacaccaggtggctgaagaactttatcaagctggattcattagttatccgaggacagaaactgataacttctccccaaacactgacctgcatgcaatcgtacgtgaacaagtgaatcatccagtttggggagcatatgctcagcgacttctaaatcctgaagcaagactttggaggaatcccagtaatggtggtcatgatgacaaggcacatcctcctattcatccaaccaaattttcagaagagattgtatgagtttgttgtccgacatttccttgcatgttgctctcaaccggccgttggagctgaaacaactgtggaaattgacatagctggtgaacagtttaatgcatcagggcgtgtcatacttgcttttgttccgacaactttaacacttgattctggagtgactcggccaccgcctcttctggctgaagccgaccttcttagctgcaggaattggcactgatgcaaccatgcatgatcacataaaaaagttgcttgaccgttgttatgcaaccaaagatgaaaacacacgtttctccccgacaaatcttggtgaggcattggtgatgggttatgatgaaatggggtgagttgactcttaaagttgctgcacttactgaatatataaaggatgatctggttgctttgctcaaacactactttttaggtatgagctttggaagccttatttaagatcaatgatggaagctgatatgaaatcagttagcgtgggtactaagagtaaatcagaagtacttgagagttgtttgcagcagatgaaggcctgttttcttgacgcaagggtgaagaaagcaaaactccttgatgcaatggggacattctttgcaaggtctaataggcctataaatgaaactcaaaatccagtagaggttgtgaggccttgtggtgcatgcaatggatctgaaatgttgcttaagcgaagggcgagtggtgaatttatggttgggtgccgaagttatccacaatgtagaaacgtggtatggctcccaggatctctttcagaagcggctgtaactaatcaagtttgtcctatctgcgcaccaggccctgtttataagattcaattcaagttccgtcggagggatattccaccaaatttcgatgttgatcacctaggttgtgttggtggttgtgatgatatcctcaaagaccttatggagataagtaggtttggaagtcgcagccaggctgcaacaccagcaagaggaccaacaccaaatggtgtgggtcaggggactccaagacaggatttacatactatttttcgtccggcaagccagcttaataatgataacccatcggttatgcattctcaaggtttccgttcaacccatacccaaaatccaagtaatgcatcagatgcaggtcaagtgctgtgcacctcatgtggagcgctttgcatatcacgaattgctaatacagaggctaacagggggaggaggttctacaaatgtcaagatcctggctgtggcttcttcaaatgggaagacgaagtggacaatggtacggggagaggccgccgtgggcgcggcagcagcaggcaggcgtctgcgtctgcatctgcaggacggagaggcggaggccggagaggcagaggccgtaacgctgacggcgggatgttcgtttcagcgacgggcgacaccgtgctcggctgctgctttaactgcggcgatccttcccacttcgcaaacgcctgcccgaaccggagatagttatcagggagctgctcgctatgcgtgtacagagactggcagcgtccgccaaacgatgaagccttcggatggttttcgtgtactgaggtgcatataagtgcacctgacaagctcattttctagacaattactaatatttttaaacaaaatgcagctattaggctgatgctagttcagcaaatctgacggcacttatttacaaaagttagggcgcgaaaaactgacaaaggaagagatgcaaacacgagctgatctactaaggtttcgataacaagtttctactca

SEQ ID NO: 505 - DNA, 3049 bp, Zea Mays
gtctcgcccccacccctcacaccaccgcaccaccggccaccccctgccccgatgcagcccgacggcggcggcgcgattcgcgtgctgaacgtggcggagaagccgtcggtggcgaaggcagtggctgagatcctgtcgcgccgctcggcgcagtcgcgtgcgggccggtcccagtacaaccgcattttcgagttcaactacgccatcaatggccgcgcctgccacatgctcgtcacctccgtcacgggccacctcatggaactcgaattcgatgaccgcttccgccgctggcactcctgcgaccccgccgaacttttccacgccccagtccgcaagtccgtgccccaggacaagcaggccataaaacaaactttggaagaagaagctaggagatgccagtggctggtgctatggcttgattgtgatagagagggtgagaacatagcatatgaagtgatcgatgtttgtacacgtgccaacagtcatcttaacatttggagggctcgcttctcagctttgattgatagggagatacatgaatctgtgcaacatcttggcaggcccaacaagctctttgcagatgctgtggatgcaagacaggaaattgaccttcgcattggtgcctccttcacaaggtttcaaaccatgctgttaaaggatgcatttgtaattgatgtgactggggatgagagaagtttggttctgagctatggtccttgtcagtttccaaccctaggattcattgttgagcgtttctgggagattcaagctcatgaacctgaagagttctggacaataaattgtactcatacttcagatgaaggcactgcatcttttggttggatacgtggtcatttgtttgattattcatgtgctattagtatctatgaaatgtgtgtttcagaaccaatggcaacagtacaaaatgttaggaatcaagagaagctaaaataccccccatatccactaagtacagtggagcttcagaaacgtgcttctaggtactttagaatgagttcagagcacacaatgaaggtggctgaagaactttatcaagctggattcattagttatccgaggacagaaactgataacttctccccaaacactgacctgcatgcaatcgtacgtgaacaagtgaatcatccagtttggggagcatatgctcagcgacttctaaatcctgaagcaagactttggaggaatcccagtaatggtggtcatgatgacaaggcacatcctcctattcatccaaccaaattttcagaagagattgtatgagtttgttgtccgacatttccttgcatgttgctctcaaccggccgttggagctgaaacaactgtggaaattgacatagctggtgaacagtttaatgcatcagggcgtgtcatacttgctaaaaattatctggatgtttaccgctttgactcatggggtggaacgttacttccaacatacaacattgggcagcagtttgttccgacaactttaacacttgattctggagtgactcggccaccgcctcttctggctgaagccgaccttcttagctgtatggataaagcaggaattggcactgatgcaaccatgcatgatcacataaaaaagttgcttgaccgttgttatgcaaccaaagatgaaaacacacgtttctccccgacaaatcttggtgaggcattggtgatgggttatgatgaaatggggtatgagctttggaagccttatttaagatcaatgatggaagctgatatgaaatcagttagcgtgggtactaagagtaaatcagaagtacttgagagttgtttgcagcagatgaaggcctgttttcttgacgcaagggtgaagaaagcaaaactccttgatgcaatggggacattctttgcaaggtctaataggcctataaatgaaactcaaaatccagtagaggttgtgaggccttgtggtgcatgcaatggatctgaaatgttgcttaagcgaagggcgagtggtgaatttatggttgggtgccgaagttatccacaatgtagaaacgtggtatggctcccaggatctctttcagaagcggctgtaactaatcaagtttgtcctatctgcgcaccaggccctgtttataagattcaattcaagttccgtcggagggatattccaccaaatttcgatgttgatcacctaggttgtgttggtggttgtgatgatatcctcaaagaccttatggagataagtaggtttggaagtcgcagccaggctgcaacaccagcaagaggaccaacaccaaatggtgtgggtcaggggactccaagacaggatttacatactatttttcgtccggcaagccagcttaataatgataacccatcggttatgcattctcaaggtttccgttcaacccatacccaaaatccaagtaatgcatcaggtcaagtgctgtgcacctcatgtggagcgctttgcatatcacgaattgctaatacagaggctaacagggggaggaggttctacaaatgtcaagatcctggctgtggcttcttcaaatgggaagacgaagtggacaatggtacggggagaggccgccgtgggcgcggcagcagcaggcaggcgtctgcgtctgcatctgcaggacggagaggcggaggccggagaggcagaggccgtaacgctgacggcgggatgttcgtttcagcgacgggcgacaccgtgctcggctgctgctttaactgcggcgatccttcccacttcgcaaacgcctgcccgaaccggagatagttatcagggagctgctcgctatgcgtgtacagagactggcagcgtccgccaaacgatgaagccttcggatggttttcgtgtactgaggtgcatataagtgcacctgacaagctcattttctagacaattactaatatttttaaacaaaatgcagctattaggctgatgctagttcagcaaatctgacggcacttatttacaaaagttagggcgcgaaaaactgacaaaggaagagatgcaaacacgagctgatctactaaggtttcgataacaagtttctactca

SEQ ID NO: 506 - DNA, 1483 bp, Zea Mays
gaacaatttacgtaatattttatttatatttgtactaatgtgcttgataacataagaaaagaacaacatcaaattttatacatatctattttaaaatattaaatttgttctaatagttcggattaccactttcatccatagatgcagccaccaccgccttcacccatcgcctccgccattgacacctgcctcacccaccgcctcggaagaagaagacgtggatctaaggaagaagacgcggatccaagggttgactgctgaggaagaagacgctactcctcgtcttcgatctgagctgatggctacatcagagccagtacaagagagtttggtggtgcactactcacaacctagtaggccccgggtcctccttgctgcttcaggaagtgtagccgctataaaatttgaaagcctttgccgtagcttctctgagtgggcggatgtccgagctgtggccaccacgtcatccttgcacttcgttgatagatcatctctaccaagtggcatcgttctttacactgatgacgatgaatggtctacctggaagaagataggagatgaagtcttacacatcgagctgcggaaatgggcagacgttatggtgattgctccattgtcagcaaataccctggctaagatcgccggtgggttatgcgacaacctcttgacctgcatcgtgagagcgtgggactacagcaaaccgctctttgttgccccagccatgaacacgttaatgtggaacaacccattcacggagcggcatcttcacacaatcaaccaactgggcatagccttgatccccccagttaccaaaaggctggcctgtggcgattacgggaacggcgcaatggccgaaacctcgcagatccatacttccgtgaggctcgcgtgcaagacgcaaccgcacgatgcgagcagttcactcgcgggtcctgtcagtaataaccggccatctagctgatgcagcggttggccacttgattgtcaagcttaggaatttgttttatctgcagtgtgcatctggagtgttgtaccagattttttttcaactagagtttgtgtgtattgaattagggggaaaggttgttgtcacatgataacaataacttccaatgatgactctattcagtttgtaattgtctgtgggagtacaattatgcagctgtattgtctgctacaatattgtttgtttgtgtgtgtgggagtggggggtgctgttgccacagagatagattcctccctgcccagtaatggtagtgattattcagtttgtagttgttagtggaagtgtccagcaaacttttctacccttcgatattcctggtacaaatgttgaaacgactgtcccgaccatttgagtgatttgctttccacctgccattgatgtgcgcatgtcgcttcttcattctcggattcttgcctatctgtttttactggtgtagctgtccgaaatctggatgttgtcgatgcatatctttacgac

SEQ ID NO: 507 - DNA, 1361 bp, Zea Mays
ccactttcatccatagatgcagccaccaccgccttcacccatcgcctccgccattgacacctgcctcacccaccgcctcggaagaagaagacgtggatctaaggaagaagacgcggatccaagggttgactgctgaggaagaagacgctactcctcgtcttcgatctgcagagctgatggctacatcagagccagtacaagagagtttggtggtgcactactcacaacctagtaggccccgggtcctccttgctgcttcaggaagtgtagccgctataaaatttgaaagcctttgccgtagcttctctgagtgggcggatgtccgagctgtggccaccacgtcatccttgcacttcgttgatagatcatctctaccaagtggcatcgttctttacactgatgacgatgaatggtctacctggaagaagataggagatgaagtcttacacatcgagctgcggaaatgggcagacgttatggtgattgctccattgtcagcaaataccctggctaagatcgccggtgggttatgcgacaacctcttgacctgcatcgtgagagcgtgggactacagcaaaccgctctttgttgccccagccatgaacacgttaatgtggaacaacccattcacggagcggcatcttcacacaatcaaccaactgggcatagccttgatccccccagttaccaaaaggctggcctgtggcgattacgggaacggcgcaatggccgaaacctcgcagatccatacttccgtgaggctcgcgtgcaagacgcaaccgcacgatgcgagcagttcactcgcgggtcctgtcagtaataaccggccatctagctgatgcagcggttggccacttgattgtcaagcttaggaatttgttttatctgcagtgtgcatctggagtgttgtaccagattttttttcaactagagtttgtgtgtattgaattagggggaaaggttgttgtcacatgataacaataacttccaatgatgactctattcagtttgtaattgtctgtgggagtacaattatgcagctgtattgtctgctacaatattgtttgtttgtgtgtgtgggagtggggggtgctgttgccacagagatagattcctccctgcccagtaatggtagtgattattcagtttgtagttgttagtggaagtgtccagcaaacttttctacccttcgatattcctggtacaaatgttgaaacgactgtcccgaccatttgagtgatttgctttccacctgccattgatgtgcgcatgtcgcttcttcattctcggattcttgcctatctgtttttactggtgtagctgtccgaaatctggatgttgtcgatgcatatctttacgac

SEQ ID NO: 508 - DNA, 1238 bp, Zea Mays
gcgccatggcccatggttgcatgcttgtgcgaagagaatacagactgaagctgatggctacatcagagccagtacaagagagtttggtggtgcactactcacaacctagtaggccccgggtcctccttgctgcttcaggaagtgtagccgctataaaatttgaaagcctttgccgtagcttctctgagtgggcggatgtccgagctgtggccaccacgtcatccttgcacttcgttgatagatcatctctaccaagtggcatcgttctttacactgatgacgatgaatggtctacctggaagaagataggagatgaagtcttacacatcgagctgcggaaatgggcagacgttatggtgattgctccattgtcagcaaataccctggctaagatcgccggtgggttatgcgacaacctcttgacctgcatcgtgagagcgtgggactacagcaaaccgctctttgttgccccagccatgaacacgttaatgtggaacaacccattcacggagcggcatcttcacacaatcaaccaactgggcatagccttgatccccccagttaccaaaaggctggcctgtggcgattacgggaacggcgcaatggccgaaacctcgcagatccatacttccgtgaggctcgcgtgcaagacgcaaccgcacgatgcgagcagttcactcgcgggtcctgtcagtaataaccggccatctagctgatgcagcggttggccacttgattgtcaagcttaggaatttgttttatctgcagtgtgcatctggagtgttgtaccagattttttttcaactagagtttgtgtgtattgaattagggggaaaggttgttgtcacatgataacaataacttccaatgatgactctattcagtttgtaattgtctgtgggagtacaattatgcagctgtattgtctgctacaatattgtttgtttgtgtgtgtgggagtggggggtgctgttgccacagagatagattcctccctgcccagtaatggtagtgattattcagtttgtagttgttagtggaagtgtccagcaaacttttctacccttcgatattcctggtacaaatgttgaaacgactgtcccgaccatttgagtgatttgctttccacctgccattgatgtgcgcatgtcgcttcttcattctcggattcttgcctatctgtttttactggtgtagctgtccgaaatctggatgttgtcgatgcatatctttacgac

SEQ ID NO: 509 - DNA, 1408 bp, Zea Mays
atggagctcgatcgaaagatgatgatgctgctgctaatctatatcagccatctgctattctgctcgcgagatctcctcaaagaccggcagcctcctgctcttcttccggtacggcaccgccacgtcgagcaaagccagcatctggttctcgacccagtcatcgtcgtcgctctcgctcccgctcccgctcttatccgccgggcgtcgtcgtccgtcaccgccgccaccgcccggccacgtcgtatgcgccatgatccgggccagcagctcctccactttccggacgatcttgccgtcctgctggtcgcgggcctgcaggtacctcccggcgagcacgtcggcgaggacgagctcggcgtcggcgagccgggcctgctcgatgaggcagagggcgaggttgcacgccttgttggcgtccgggtcgatcatctgcgccttccggtacaccacctccgccgccatgaagttgcgctgctgcatgtacgcccacgcgaggttgcccaggacgcgcgatgtctcttgcttgacggagacgtggatcttgcggccgtgcgagcgggcgcgcttggtggtcctgccatggaacgcctcgccgaggtagatcttgcggagcttctgcttgagcagctcgatctcctccttggtccgcccgctggccttgtagaggtccaggaggatgttgtccagcggctcctgggactgcttcgggcacaggtgccgcagcgacctgatggcgtcgatggcctccgccaggtacccgcgctgcttcatcaccaccgccatgtccttgagcgcgctgtccaacttgtcgcccgcgctgatcgccttccagaaccacgcgatcgacgcgtccaggtccttctccaccagcttaattattcgatcatcacagcaacggtattaataataaataatttaaaagttcatttcaatcagatcactccgttccaaattattgtgagtcgttttgcctttttctctctctctagatcactagtaaataaatgatgttgctaaattttactcggtaatagaaaattcagaaatgcctatagatctcaagctaatactgttagtaattgtgattatttgtgtgaaattaacttaatcaccagattatacagatctaaccaataatgagacctagaatcaagctagaacaaccatccgtcgacagcaaaaaaataaaaaaataaaaaaacagttatgagcatgctgagctaacagctaatgattggtaatctagatcctaattgatggaggcttttacctggaagtgcttggccctcgcgtaaggcccgtcgccgggcgggatcttgtgcgcgacgtgcggcgaggtcgggctcgccggctgagccaccgctgccatggcgacaagttgatgattatccatgcctcttcctactag

SEQ ID NO: 510 - DNA, 2845 bp, Zea Mays
gaatgcaaaccattaccgttaccatttacgttacattttaggaaccaaacggcacctaagttcttataatagtttagattagatatagataattctaacatttaaaatgtaacatgttgcattctaaattattatcgtgtgaacgtgaacggcgaacctgcagtcagacttaccaccaagtggacgcagcagctttaaccccccaaagcctcgacgccgcgagcacagctccgccgccaccgcccccttctcatccgcggtctcctccgcctgctgcatctctatcgatctagcgggactggctccttcccgtgctgggtccttcgtcaatcgtcagcgcgcaagatcggcacttgtgtacatctgagcagtttccggtgccctaattcaggcgcgggcgttgttgggttttcgataattttgggggttcacctgaaccctcatgacccaggtgaagcccgcccctgggggaaggatgctgaccgtgctgcgggtgcacctcccgtcggagatcccgatcgtcggctgtgagatcacgccgtatgtgctcctgcggcgccccgacggaggcgtcttcaccgacgacgtgtctgagaccgcgcccgtggatgggtacttcatgcgctacaagtggtaccgcatacaaagtgatcgtagagctgctatctgcagtgtacacccaacagaacaagcaacacttcagtgcatagggtgtctgaagtcaaaaatacctgttgctaagagctaccattgttcttctaagtgcttctccgatgcttggcaacaccacaaggttttgcatgaccgtgctataagtgctttaaatgaaaacggaaccgaagatgatgagttgtttggcagatttggtagcggcagttcgagctcaggggttattagtgctgcgttgtctggttcaacatcaaacctttcactgagctcaggtgttaataatggacctacacctgtgtatccaacaggcactgagaagagttctggtgaaacttggtttgaagtgggatggtcacgaacatatacggcaactactgatgatattggacatgtgctaagatttgaatgtatagttgtggatgtggaaacacgggggactgtgagagctcctacttcagtcatgacatcccgtgtaatcccagcaccgaccccgacaccacgccgcttgatccctgttaatgcagctgatgcaatggtccacttcgatttagatagccggacttcttcttttgggacatttactgtgctgtcctacaatattcttgctgatacatatgcaacaagtgatacatacagctattgtccaacttgggcacttacatgggcttatagaaggcaaaatttgttgcgtgaaattattggttaccatgctgatattatctgccttcaggaggtacaaagtaatcactttgaagattttttttcaccggagcttgataaacatgggtaccaacctctatataagaaaaggacgacagaggtgtacagcggaagtcctcaagcaattgatggttgcgctactttctttcgtcgggacagattttcgcatgtcaaaaaatatgaggtcgagttcaataaggctgcacagtctttaactgatgcaattattcctgccgctcaaaaaaagataatattgcgctaattgcagttttagaagctaaatttagtaaccatggaactgaaaaccctagtaaaaggcaacttctctgtgtggctaatacacatataaatatccaccatgaccttaaagatgtgaagctatggcagattcataccctcctaaaagggttggaaaaaatagctgttagtgcagacattccaatgttggtctgtggagattttaattcaactcctggaagtacgtcacatgggcttcttgcaaggggcaaagttgatcatttgcatccagatctagcaatagatcctcttggaattttgcgcccactaagcaagctgacacaccagcttcctctggtcagtgcatactcatcattcgtgagtatggctggtgttggctatgatttggatcaccagcgaaggaggatggaccctgggacaaatgagccattgttcacaaattgcacaagggattttaccggtaccctagattacatattttacacagcggattcattgactgtagagtcattattggagctgttggatgaggatagcttgagaaaagacacggctcttccttctcctgaatggtcatcggatcatatagcgctcctagcagaattccggtgcaagcttagagttagacgatgatactttaggaggagctgtaggggagggattcttgacaatcgcatgagatgatgagaatgtaccctggcgaaggcaggaacgagaagcctaagggaaagaggcttgttatgttcctcacccttttacatttccgcctcgatgttctctagtggcactagttggaatgcgacttccaatagaagatatattatcaatgcaaagagaaatgatttaatagattcgtgtgccgtttttagttttccatcctcacattctcgcccccctcccccccccccccccccccctcttcaatgtgagttcattgtccacatttttgtttcctaccatgaatgtgctctagttcttacaaactaaaaatggccccttccatagtgtatgtatgtctcttgagcagggatcagctttggcgtagtttactgtgttgaagatgcttagttgaaaagtgatgtcgggttatctatgatggatattgaacgaatacctggtgactagagagagcttcacattggggaagctatactgaatgaaaactgtgaattttgatgtctctcttgcagtggtttct

SEQ ID NO: 511 - DNA, 2631 bp, Zea Mays
cgaacctgcagtcagacttaccaccaagtggacgcagcagctttaaccccccaaagcctcgacgccgcgagcacagctccgccgccaccgcccccttctcatccgcggtctcctccgcctgctgcatctctatcgatctagcgggactggctccttcccgtgctgggtccttcgtcaatcgtcagcgcgcaagatcggcacttgtgtacatctgagcagtttccggtgccctaattcaggcgcgggcgttgttgggttttcgataattttgggggttcacctgaaccctcatgacccaggtgaagcccgcccctgggggaaggatgctgaccgtgctgcgggtgcacctcccgtcggagatcccgatcgtcggctgtgagatcacgccgtatgtgctcctgcggcgccccgacggaggcgtcttcaccgacgacgtgtctgagaccgcgcccgtggatgggtacttcatgcgctacaagtggtaccgcatacaaagtgatcgtagagctgctatctgcagtgtacacccaacagaacaagcaacacttcagtgcatagggtgtctgaagtcaaaaatacctgttgctaagagctaccattgttcttctaagtgcttctccgatgcttggcaacaccacaaggttttgcatgaccgtgctataagtgctttaaatgaaaacggaaccgaagatgatgagttgtttggcagatttggtagcggcagttcgagctcaggggttattagtgctgcgttgtctggttcaacatcaaacctttcactgagctcaggtgttaataatggacctacacctgtgtatccaacaggcactgagaagagttctggtgaaacttggtttgaagtgggatggtcacgaacatatacggcaactactgatgatattggacatgtgctaagatttgaatgtatagttgtggatgtggaaacacgggggactgtgagagctcctacttcagtcatgacatcccgtgtaatcccagcaccgaccccgacaccacgccgcttgatccctgttaatgcagctgatgcaatggtccacttcgatttagatagccggacttcttcttttgggacatttactgtgctgtcctacaatattcttgctgatacatatgcaacaagtgatacatacagctattgtccaacttgggcacttacatgggcttatagaaggcaaaatttgttgcgtgaaattattggttaccatgctgatattatctgccttcaggaggtacaaagtaatcactttgaagattttttttcaccggagcttgataaacatgggtaccaacctctatataagaaaaggacgacagaggtgtacagcggaagtcctcaagcaattgatggttgcgctactttctttcgtcgggacagattttcgcatgtcaaaaaatatgaggataatattgcgctaattgcagttttagaagctaaatttagtaaccatggaactgaaaaccctagtaaaaggcaacttctctgtgtggctaatacacatataaatatccaccatgaccttaaagatgtgaagctatggcagattcataccctcctaaaagggttggaaaaaatagctgttagtgcagacattccaatgttggtctgtggagattttaattcaactcctggaagtacgtcacatgggcttcttgcaaggggcaaagttgatcatttgcatccagatctagcaatagatcctcttggaattttgcgcccactaagcaagctgacacaccagcttcctctggtcagtgcatactcatcattcgtgagtatggctggtgttggctatgatttggatcaccagcgaaggaggatggaccctgggacaaatgagccattgttcacaaattgcacaagggattttaccggtaccctagattacatattttacacagcggattcattgactgtagagtcattattggagctgttggatgaggatagcttgagaaaagacacggctcttccttctcctgaatggtcatcggatcatatagcgctcctagcagaattccggtgcaagcttagagttagacgatgatactttaggaggagctgtaggggagggattcttgacaatcgcatgagatgatgagaatgtaccctggcgaaggcaggaacgagaagcctaagggaaagaggcttgttatgttcctcacccttttacatttccgcctcgatgttctctagtggcactagttggaatgcgacttccaatagaagatatattatcaatgcaaagagaaatgatttaatagattcgtgtgccgtttttagttttccatcctcacattctcgcccccctcccccccccccccccccccctcttcaatgtgagttcattgtccacatttttgtttcctaccatgaatgtgctctagttcttacaaactaaaaatggccccttccatagtgtatgtatgtctcttgagcagggatcagctttggcgtagtttactgtgttgaagatgcttagttgaaaagtgatgtcgggttatctatgatggatattgaacgaatacctggtgactagagagagcttcacattggggaagctatactgaatgaaaactgtgaattttgatgtctctcttgcagtggtttct

SEQ ID NO: 512 - DNA, 3046 bp, Zea Mays
cgaacctgcagtcagacttaccaccaagtggacgcagcagctttaaccccccaaagcctcgacgccgcgagcacagctccgccgccaccgcccccttctcatccgcggtctcctccgcctgctgcatctctatcgatctagcgggactggctccttcccgtgctgggtccttcgtcaatcgtcagcgcgcaagatcggcacttgtgtacatctgagcagtttccggtgccctaattcaggcgcgggcgttgttgggttttcgataattttgggggttcacctgaaccctcatgacccaggtgaagcccgcccctgggggaaggatgctgaccgtgctgcgggtgcacctcccgtcggagatcccgatcgtcggctgtgagatcacgccgtatgtgctcctgcggcgccccgacggaggcgtcttcaccgacgacgtgtctgagaccgcgcccgtggatgggtacttcatgcgctacaagtggtaccgcatacaaagtgatcgtagagctgctatctgcagtgtacacccaacagaacaagcaacacttcagtgcatagggtgtctgaagtcaaaaatacctgttgctaagagctaccattgttcttctaagtgcttctccgatgcttggcaacaccacaaggttttgcatgaccgtgctataagtgctttaaatgaaaacggaaccgaagatgatgagttgtttggcagatttggtagcggcagttcgagctcaggggttattagtgctgcgttgtctggttcaacatcaaacctttcactgagctcaggtgttaataatggacctacacctgtgtatccaacaggcactgagaagagttctggtgaaacttggtttgaagtgggatggtcacgaacatatacggcaactactgatgatattggacatgtgctaagatttgaatgtatagttgtggatgtggaaacacgggggactgtgagagctcctacttcagtcatgacatcccgtgtaatcccagcaccgaccccgacaccacgccgcttgatccctgttaatgcagctgatgcaatggtccacttcgatttagatagccggacttcttcttttgggacatttactgtgctgtcctacaatattcttgctgatacatatgcaacaagtgatacatacagctattgtccaacttgggcacttacatgggcttatagaaggcaaaatttgttgcgtgaaattattggttaccatgctgatattatctgccttcaggaggtacaaagtaatcactttgaagattttttttcaccggagcttgataaacatgggtaccaacctctatataagaaaaggacgacagaggtgtacagcggaagtcctcaagcaattgatggttgcgctactttctttcgtcgggacagattttcgcatgtcaaaaaatatgaggtcgagttcaataaggctgcacagtctttaactgatgcaattattcctgccgctcaaaaaaagataatattgcgctaattgcagttttagaagctaaatttagtaaccatggaactgaaaaccctagtaaaaggcaacttctctgtgtgggatctatttgcatgttatctatattcataataacccatggaaatgctgagtatcattaggtacaactagttatttgatatcttttggttttgagttctttaggttttgttgttattttttgttgttgtgagtacttgatggtatctttacccatgagaatgctttcttttttctcatcaaggattcactctcatgccacataaatttggcacttctatttttttatcacttgttcatttggaatttagtgatattgatgaagatgttagccataggatcaaagcagggtggacgaaatggtgtcaagcatcgagagtcctatgtgataagagagtgctacaaaagctgaaaggctaatacacatataaatatccaccatgaccttaaagatgtgaagctatggcagattcataccctcctaaaagggttggaaaaaatagctgttagtgcagacattccaatgttggtctgtggagattttaattcaactcctggaagtacgtcacatgggcttcttgcaaggggcaaagttgatcatttgcatccagatctagcaatagatcctcttggaattttgcgcccactaagcaagctgacacaccagcttcctctggtcagtgcatactcatcattcgtgagtatggctggtgttggctatgatttggatcaccagcgaaggaggatggaccctgggacaaatgagccattgttcacaaattgcacaagggattttaccggtaccctagattacatattttacacagcggattcattgactgtagagtcattattggagctgttggatgaggatagcttgagaaaagacacggctcttccttctcctgaatggtcatcggatcatatagcgctcctagcagaattccggtgcaagcttagagttagacgatgatactttaggaggagctgtaggggagggattcttgacaatcgcatgagatgatgagaatgtaccctggcgaaggcaggaacgagaagcctaagggaaagaggcttgttatgttcctcacccttttacatttccgcctcgatgttctctagtggcactagttggaatgcgacttccaatagaagatatattatcaatgcaaagagaaatgatttaatagattcgtgtgccgtttttagttttccatcctcacattctcgcccccctcccccccccccccccccccctcttcaatgtgagttcattgtccacatttttgtttcctaccatgaatgtgctctagttcttacaaactaaaaatggccccttccatagtgtatgtatgtctcttgagcagggatcagctttggcgtagtttactgtgttgaagatgcttagttgaaaagtgatgtcgggttatctatgatggatattgaacgaatacctggtgactagagagagcttcacattggggaagctatactgaatgaaaactgtgaattttgatgtctctcttgcagtggtttct

SEQ ID NO: 513 - DNA, 2768 bp, Zea Mays
gtcagacttaccaccaagtggacgcagcagctttaaccccccaaagcctcgacgccgcgagcacagctccgccgccaccgcccccttctcatccgcggtctcctccgcctgctgcatctctatcgatctagcgggactggctccttcccgtgctgggtccttcgtcaatcgtcagcgcgcaagatcggcacttgtgtacatctgagcagtttccggtgccctaattcaggcgcgggcgttgttgggttttcgataattttgggggttcacctgaaccctcatgacccaggtgaagcccgcccctgggggaaggatgctgaccgtgctgcgggtgcacctcccgtcggagatcccgatcgtcggctgtgagatcacgccgtatgtgctcctgcggcgccccgacggaggcgtcttcaccgacgacgtgtctgagaccgcgcccgtggatgggtacttcatgcgctacaagtggtaccgcatacaaagtgatcgtagagctgctatctgcagtgtacacccaacagaacaagcaacacttcagtgcatagggtgtctgaagtcaaaaatacctgttgctaagagctaccattgttcttctaagtgcttctccgatgcttggcaacaccacaaggttttgcatgaccgtgctataagtgctttaaatgaaaacggaaccgaagatgatgagttgtttggcagatttggtagcggcagttcgagctcaggggttattagtgctgcgttgtctggttcaacatcaaacctttcactgagctcaggtgttaataatggacctacacctgtgtatccaacaggcactgagaagagttctggtgaaacttggtttgaagtgggatggtcacgaacatatacggcaactactgatgatattggacatgtgctaagatttgaatgtatagttgtggatgtggaaacacgggggactgtgagagctcctacttcagtcatgacatcccgtgtaatcccagcaccgaccccgacaccacgccgcttgatccctgttaatgcagctgatgcaatggtccacttcgatttagatagccggacttcttcttttgggacatttactgtgctgtcctacaatattcttgctgatacatatgcaacaagtgatacatacagctattgtccaacttgggcacttacatgggcttatagaaggcaaaatttgttgcgtgaaattattggttaccatgctgatattatctgccttcaggaggtacaaagtaatcactttgaagattttttttcaccggagcttgataaacatgggtaccaacctctatataagaaaaggacgacagaggtgtacagcggaagtcctcaagcaattgatggttgcgctactttctttcgtcgggacagattttcgcatgtcaaaaaatatgaggtcgagttcaataaggctgcacagtctttaactgatgcaattattcctgccgctcaaaaaaagttagctctaaatcgtttggttaaggataatattgcgctaattgcagttttagaagctaaatttagtaaccatggaactgaaaaccctagtaaaaggcaacttctctgtgtggctaatacacatataaatatccaccatgaccttaaagatgtgaagctatggcagattcataccctcctaaaagggttggaaaaaatagctgttagtgcagacattccaatgttggtctgtggagattttaattcaactcctggaagtacgtcacatgggcttcttgcaaggggcaaagttgatcatttgcatccagatctagcaatagatcctcttggaattttgcgcccactaagcaagctgacacaccagcttcctctggtcagtgcatactcatcattcgtgagtatggctggtgttggctatgatttggatcaccagcgaaggaggatggaccctgggacaaatgagccattgttcacaaattgcacaagggattttaccggtaccctagattacatattttacacagcggattcattgactgtagagtcattattggagctgttggatgaggatagcttgagaaaagacacggctcttccttctcctgaatggtcatcggatcatatagcgctcctagcagaattccggtgcaagcttagagttagacgatgatactttaggggtaagtcttgcctcgattattccttccccagaccccactcattgtagataatattaaggaggagctgtaggggagggattcttgacaatcgcatgagatgatgagaatgtaccctggcgaaggcaggaacgagaagcctaagggaaagaggcttgttatgttcctcacccttttacatttccgcctcgatgttctctagtggcactagttggaatgcgacttccaatagaagatatattatcaatgcaaagagaaatgatttaatagattcgtgtgccgtttttagttttccatcctcacattctcgcccccctcccccccccccccccccccctcttcaatgtgagttcattgtccacatttttgtttcctaccatgaatgtgctctagttcttacaaactaaaaatggccccttccatagtgtatgtatgtctcttgagcagggatcagctttggcgtagtttactgtgttgaagatgcttagttgaaaagtgatgtcgggttatctatgatggatattgaacgaatacctggtgactagagagagcttcacattggggaagctatactgaatgaaaactgtgaattttgatgtctctcttgcagtggtttct

SEQ ID NO: 514 - DNA, 2735 bp, Zea Mays
taccaccaagtggacgcagcagctttaaccccccaaagcctcgacgccgcgagcacagctccgccgccaccgcccccttctcatccgcggtctcctccgcctgctgcatctctatcgatctagcgggactggctccttcccgtgctgggtccttcgtcaatcgtcagcgcgcaagatcggcacttgtgtacatctgagcagtttccggtgccctaattcaggcgcgggcgttgttgggttttcgataattttgggggttcacctgaaccctcatgacccaggtgaagcccgcccctgggggaaggatgctgaccgtgctgcgggtgcacctcccgtcggagatcccgatcgtcggctgtgagatcacgccgtatgtgctcctgcggcgccccgacggaggcgtcttcaccgacgacgtgtctgagaccgcgcccgtggatgggtacttcatgcgctacaagtggtaccgcatacaaagtgatcgtagagctgctatctgcagtgtacacccaacagaacaagcaacacttcagtgcatagggtgtctgaagtcaaaaatacctgttgctaagagctaccattgttcttctaagtgcttctccgatgcttggcaacaccacaaggttttgcatgaccgtgctataagtgctttaaatgaaaacggaaccgaagatgatgagttgtttggcagatttggtagcggcagttcgagctcaggggttattagtgctgcgttgtctggttcaacatcaaacctttcactgagctcaggtgttaataatggacctacacctgtgtatccaacaggcactgagaagagttctggtgaaacttggtttgaagtgggatggtcacgaacatatacggcaactactgatgatattggacatgtgctaagatttgaatgtatagttgtggatgtggaaacacgggggactgtgagagctcctacttcagtcatgacatcccgtgtaatcccagcaccgaccccgacaccacgccgcttgatccctgttaatgcagctgatgcaatggtccacttcgatttagatagccggacttcttcttttgggacatttactgtgctgtcctacaatattcttgctgatacatatgcaacaagtgatacatacagctattgtccaacttgggcacttacatgggcttatagaaggcaaaatttgttgcgtgaaattattggttaccatgctgatattatctgccttcaggaggtacaaagtaatcactttgaagattttttttcaccggagcttgataaacatgggtaccaacctctatataagaaaaggacgacagaggtgtacagcggaagtcctcaagcaattgatggttgcgctactttctttcgtcgggacagattttcgcatgtcaaaaaatatgaggtcgagttcaataaggctgcacagtctttaactgatgcaattattcctgccgctcaaaaaaagataatattgcgctaattgcagttttagaagctaaatttagtaaccatggaactgaaaaccctagtaaaaggcaacttctctgtgtggctaatacacatataaatatccaccatgaccttaaagatgtgaagctatggcagattcataccctcctaaaagggttggaaaaaatagctgttagtgcagacattccaatgttggtctgtggagattttaattcaactcctggaagtacgtcacatgggcttcttgcaaggggcaaagttgatcatttgcatccagatctagcaatagatcctcttggaattttgcgcccactaagcaagctgacacaccagcttcctctggtcagtgcatactcatcattcgtgagtatggctggtgttggctatgatttggatcaccagcgaaggaggatggaccctgggacaaatgagccattgttcacaaattgcacaagggattttaccggtaccctagattacatattttacacagcggattcattgactgtagagtcattattggagctgttggatgaggatagcttgagaaaagacacggctcttccttctcctgaatggtcatcggatcatatagcgctcctagcagaattccggtgcaagcttagagttagacgatgatactttaggggtaagtcttgcctcgattattccttccccagaccccactcattgtagataatattaaggaggagctgtaggggagggattcttgacaatcgcatgagatgatgagaatgtaccctggcgaaggcaggaacgagaagcctaagggaaagaggcttgttatgttcctcacccttttacatttccgcctcgatgttctctagtggcactagttggaatgcgacttccaatagaagatatattatcaatgcaaagagaaatgatttaatagattcgtgtgccgtttttagttttccatcctcacattctcgcccccctcccccccccccccccccccctcttcaatgtgagttcattgtccacatttttgtttcctaccatgaatgtgctctagttcttacaaactaaaaatggccccttccatagtgtatgtatgtctcttgagcagggatcagctttggcgtagtttactgtgttgaagatgcttagttgaaaagtgatgtcgggttatctatgatggatattgaacgaatacctggtgactagagagagcttcacattggggaagctatactgaatgaaaactgtgaattttgatgtctctcttgcagtggtttct

SEQ ID NO: 515 - DNA, 2520 bp, Zea Mays
accaccaagtggacgcagcagctttaaccccccaaagcctcgacgccgcgagcacagctccgccgccaccgcccccttctcatccgcggtctcctccgcctgctgcatctctatcgatctagcgggactggctccttcccgtgctgggtccttcgtcaatcgtcagcgcgcaagatcggcacttgtgtacatctgagcagtttccggtgccctaattcaggcgcgggcgttgttgggttttcgataattttgggggttcacctgaaccctcatgacccaggtgaagcccgcccctgggggaaggatgctgaccgtgctgcgggtgcacctcccgtcggagatcccgatcgtcggctgtgagatcacgccgtatgtgctcctgcggcgccccgacggaggcgtcttcaccgacgacgtgtctgagaccgcgcccgtggatgggtacttcatgcgctacaagtggtaccgcatacaaagtgatcgtagagctgctatctgcagtgtacacccaacagaacaagcaacacttcagtgcatagggtgtctgaagtcaaaaatacctgttgctaagagctaccattgttcttctaagtgcttctccgatgcttggcaacaccacaaggttttgcatgaccgtgctataagtgctttaaatgaaaacggaaccgaagatgatgagttgtttggcagatttggtagcggcagttcgagctcaggggttattagtgctgcgttgtctggttcaacatcaaacctttcactgagctcaggtgttaataatggacctacacctgtgtatccaacaggcactgagaagagttctggtgaaacttggtttgaagtgggatggtcacgaacatatacggcaactactgatgatattggacatgtgctaagatttgaatgtatagttgtggatgtggaaacacgggggactgtgagagctcctacttcagtcatgacatcccgtgtaatcccagcaccgaccccgacaccacgccgcttgatccctgttaatgcagctgatgcaatggtccacttcgatttagatagccggacttcttcttttgggacatttactgtgctgtcctacaatattcttgctgatacatatgcaacaagtgatacatacagctattgtccaacttgggcacttacatgggcttatagaaggcaaaatttgttgcgtgaaattattggttaccatgctgatattatctgccttcaggaggtacaaagtaatcactttgaagattttttttcaccggagcttgataaacatgggtaccaacctctatataagaaaaggacgacagaggtgtacagcggaagtcctcaagcaattgatggttgcgctactttctttcgtcgggacagattttcgcatgtcaaaaaatatgaggtcgagttcaataaggctgcacagtctttaactgatgcaattattcctgccgctcaaaaaaagataatattgcgctaattgcagttttagaagctaaatttagtaaccatggaactgaaaaccctagtaaaaggcaacttctctgtgtggctaatacacatataaatatccaccatgaccttaaagatgtgaagctatggcagattcataccctcctaaaagggttggaaaaaatagctgttagtgcagacattccaatgttggtctgtggagattttaattcaactcctggaagtacgtcacatgggcttcttgcaaggggcaaagttgatcatttgcatccagatctagcaatagatcctcttggaattttgcgcccactaagcaagctgacacaccagcttcctctggtcagtgcatactcatcattcgtgagtatggctggtgttggctatgatttggatcaccagcgaaggaggatggaccctgggacaaatgagccattgttcacaaattgcacaagggattttaccggtaccctagattacatattttacacaggaggagctgtaggggagggattcttgacaatcgcatgagatgatgagaatgtaccctggcgaaggcaggaacgagaagcctaagggaaagaggcttgttatgttcctcacccttttacatttccgcctcgatgttctctagtggcactagttggaatgcgacttccaatagaagatatattatcaatgcaaagagaaatgatttaatagattcgtgtgccgtttttagttttccatcctcacattctcgcccccctcccccccccccccccccccctcttcaatgtgagttcattgtccacatttttgtttcctaccatgaatgtgctctagttcttacaaactaaaaatggccccttccatagtgtatgtatgtctcttgagcagggatcagctttggcgtagtttactgtgttgaagatgcttagttgaaaagtgatgtcgggttatctatgatggatattgaacgaatacctggtgactagagagagcttcacattggggaagctatactgaatgaaaactgtgaattttgatgtctctcttgcagtggtttct

SEQ ID NO: 516 - DNA, 1203 bp, Zea Mays
cataagtgctacatgttttagaagctaaatttagtaaccatggaactgaaaaccctagtaaaaggcaacttctctgtgtggctaatacacatataaatatccaccatgaccttaaagatgtgaagctatggcagattcataccctcctaaaagggttggaaaaaatagctgttagtgcagacattccaatgttggtctgtggagattttaattcaactcctggaagtacgtcacatgggcttcttgcaaggggcaaagttgatcatttgcatccagatctagcaatagatcctcttggaattttgcgcccactaagcaagctgacacaccagcttcctctggtcagtgcatactcatcattcgtgagtatggctggtgttggctatgatttggatcaccagcgaaggaggatggaccctgggacaaatgagccattgttcacaaattgcacaagggattttaccggtaccctagattacatattttacacagcggattcattgactgtagagtcattattggagctgttggatgaggatagcttgagaaaagacacggctcttccttctcctgaatggtcatcggatcatatagcgctcctagcagaattccggtgcaagcttagagttagacgatgatactttaggaggagctgtaggggagggattcttgacaatcgcatgagatgatgagaatgtaccctggcgaaggcaggaacgagaagcctaagggaaagaggcttgttatgttcctcacccttttacatttccgcctcgatgttctctagtggcactagttggaatgcgacttccaatagaagatatattatcaatgcaaagagaaatgatttaatagattcgtgtgccgtttttagttttccatcctcacattctcgcccccctcccccccccccccccccccctcttcaatgtgagttcattgtccacatttttgtttcctaccatgaatgtgctctagttcttacaaactaaaaatggccccttccatagtgtatgtatgtctcttgagcagggatcagctttggcgtagtttactgtgttgaagatgcttagttgaaaagtgatgtcgggttatctatgatggatattgaacgaatacctggtgactagagagagcttcacattggggaagctatactgaatgaaaactgtgaattttgatgtctctcttgcagtggtttct

SEQ ID NO: 517 - DNA, 1423 bp, Zea Mays
ataaagagcttcatcagatcagtggcctggaccctgtgacgatcgcgtccatcttctcgacggccgagcacgccggcgagaaggaggtggacggcgaggactgcttcgtgctgcgcctggacgtggggccgtcggtgctgtcgagctggagcgacggaaccgcggaggtgatccggcacgggctgacgggcttcttcagccagcgcagcgggctcctggcgcggctggaggactcgcagctgacccggatccagtcccccggcgcggccgccatgtactgggagaccaccatcgcgtcggcggtgtcggactaccgcgccgtggacggcggcgtggccgtcgcgcacgcgggcacgtccacggcgcacctcgcccggttcggcgtgggcgtccgcgccgcgcgcgtcgtcacgcggatggaggagtcgtggaccatcgacgacgtggcgttcaacgtgccggggctcggcccggacgccttcataccgccggaggaggtcaggaggagccggtcctacggcgccgccatcgcaggcggcaagtgagctctctctccgccgtgtcagtcagggctcaagcgtctgtgtaacatagtctgcaactgcatagagagagctttgctgtttggtagcttcgtcgtctttgtctgtcttccctttattttgtaacctgtgagtgagtgagtgagtgagtgagagtggcatcggtgatcgtgcatgtacatatatggatctgatttacccaaaaataataatgacaaaaattctaaagcctctgaatctagacatctttttttttggggtactactaaggaaaagaagactgtttgaatctgtgattgattgattcagtctactttcatggatacaggatacacactgacacacatcttgaaaatggacagacattatttgcgccttgaacaccagttctagtgttctggaatggaaatctattttgtcttgaggtcgcagaaagattcagattagcgcacatctcaagcagctggctacagtgctgcttgccttttgcgcctggcatcagcacttgcgtatgttcgcagcgcgatcacgtcaccaaaaggctacgcaggtcgcgctccggaggcctgttgtgggatgctgcttgtcttcttcgcggcaccggcacggcaaccaaccgggccggcctgttgctgggtctgcatgcccttccattttcgtcgcggtaattggcttggcaatggcagctgatatgaggagctagtacagtcactctgaatctctctctggtcgagtcccatcccatcccatggcgcgaaagacgtcctgaggggacagtcagcacacgcgcgcgtacgacgttgctcatacgggcagacagccggcacatggcggcccttccatccatcttctagtactcgtagtagtacatcagctctggg

SEQ ID NO: 518 - DNA, 591 bp, Zea Mays
gttgaatgatgttcctacaccactacaccacaccttggacatatatatggaaaatagcttcacagtctagattccatggcatcaaggatggggatggtggctattctgtccttgtttgtttgtgctcttgttgcttcaacatctgtcaatgctaatgtgtggcagactgatgaggatgctttttatagtacaaataaactgggagtcaatggcaacatggagatggcacaacaacaaggtggatttattggccatcgcccaagacttgcattattcaatagggcatcaaaacaactggaccgtgaaaaaagacctgtgcctagcgggccagaccccatacatcacagcatcccatcacatgctcctcagcatccaccatcatatggcaaagctccttatgaagatgacaagagcatagcatctcctggtctgtccaacccgataggccctccaccattaccagatagatactagttcatgcaaaagtagtgagtgtttatacacctatgccaatgaataacttctaactacccacatgtactggcctggtgtttggtaaacatgaagcaataatttcctcttatcaaaata

SEQ ID NO: 519 - DNA, 903 bp, Zea Mays
ccattctccatcccggccattactcggccacgacttgccgactacgatgccagcgccaagcctccgccgcccagctaaaaatcccccaggcgttcctgagcacccgtttatcatcacatgaccggagtcggccagaatttgccgtagctctcgcccccgctcgccgtgcgcttctcgtcccattcccccgggatcgtagattctcgagctgagctgagctgagctgagctgagcgatggatcgcgagctcagccccaggggcaatgctccagggagagggagcggcggcgcgtcgtcatcgaagcacaagaacggcggcggcggcaagaagccgatcaaggctacttctgaatcggaggctgggttcgcagcggagcatgacaatttctggtccaaatgaagctgaacaagttaatacgactatagctacgaatggtttcagtgaggagcatagcacaagacaacactggtacaagagactataagcatgaatacgaagatggctacgtacggcaatggtggtgaaggctacgacgaaaggattgcggcgatattacggttgatgaatggcatgatgtataattttcttgatggacaaaaggatatatacacctccgatctgttttgtccattgagcagcaatctatgtaatcttatgcctaatgaacaggctaaggatgttttagacacaactactctagttggcacaatgttggattcggaagggaaacattgtaaaacgttggttgcttccttgtgtacatgttgcgcgcagcattatattatatgtctattgtttgtcatggtggcatattttgagtggctgttaaggccatcgcaaactcgatcaccacaacggcctgcgcacgccatttcgatcggccggctcccttttcgtttcgg

SEQ ID NO: 520 - DNA, 1190 bp, Zea Mays
attactcggccacgacttgccgactacgatgccagcgccaagcctccgccgcccagctaaaaatcccccaggcgttcctgagcacccgtttatcatcacatgaccggagtcggccagaatttgccgtagctctcgcccccgctcgccgtgcgcttctcgtcccattcccccgggatcgtagattctcgagctgagctgagctgagctgagctgagcgatggatcgcgagctcagccccaggggcaatgctccagggagagggagcggcggcgcgtcgtcatcgaagcacaagaacggcggcggcggcaagaagccgatcaaggtgctttacatcgccaaccccatgcgcgtccagaccagcgccgagggtttccgcgccctcgtgcaggagctcaccggccaacacgccgatccctccaagtacagccccggcgaccttgactccggcgctgccgcacagggtctgagccccagggccagggtcgcggacgtttcgtcggaaaccatcgtcgcaagccacagccctggcagtaaggccgcgccgcacggaggggactactacgacgtcgaggaagacgaagatgacgtcttcaggtcgcctcacatgctgctggagaacaattatacggtgttctcgccgccgacgctactatatgaccatcacccgcacagcaaggctacttctgaatcggaggctgggttcgcagcggagcatgacaatttctggtccaaatgaagctgaacaagacaacactggtacaagagactataagcatgaatacgaagatggctacgtacggcaatggtggtgaaggctacgacgaaaggattgcggcgatattacggttgatgaatggcatgatgtataattttcttgatggacaaaaggatatatacacctccgatctgttttgtccattgagcagcaatctatgtaatcttatgcctaatgaacaggctaaggatgttttagacacaactactctagttggcacaatgttggattcggaagggaaacattgtaaaacgttggttgcttccttgtgtacatgttgcgcgcagcattatattatatgtctattgtttgtcatggtggcatattttgagtggctgttaaggccatcgcaaactcgatcaccacaacggcctgcgcacgccatttcgatcggccggctcccttttcgtttcgg

SEQ ID NO: 521 - DNA, 1157 bp, Zea Mays
attactcggccacgacttgccgactacgatgccagcgccaagcctccgccgcccagctaaaaatcccccaggcgttcctgagcacccgtttatcatcacatgaccggagtcggccagaatttgccgtagctctcgcccccgctcgccgtgcgcttctcgtcccattcccccgggatcgtagattctcgagctgagctgagctgagctgagctgagcgatggatcgcgagctcagccccaggggcaatgctccagggagagggagcggcggcgcgtcgtcatcgaagcacaagaacggcggcggcggcaagaagccgatcaaggtgctttacatcgccaaccccatgcgcgtccagaccagcgccgagggtttccgcgccctcgtgcaggagctcaccggccaacacgccgatccctccaagtacagccccggcgaccttgactccggcgctgccgcacagggtctgagccccagggccagggtcgcggacgtttcgtcggaaaccatcgtcgcaagccacagccctggcagtaaggccgcgccgcacggaggggactactacgacgtcgaggaagacgaagatgacgtcttcaggctacttctgaatcggaggctgggttcgcagcggagcatgacaatttctggtccaaatgaagctgaacaagttaatacgactatagctacgaatggtttcagtgaggagcatagcacaagacaacactggtacaagagactataagcatgaatacgaagatggctacgtacggcaatggtggtgaaggctacgacgaaaggattgcggcgatattacggttgatgaatggcatgatgtataattttcttgatggacaaaaggatatatacacctccgatctgttttgtccattgagcagcaatctatgtaatcttatgcctaatgaacaggctaaggatgttttagacacaactactctagttggcacaatgttggattcggaagggaaacattgtaaaacgttggttgcttccttgtgtacatgttgcgcgcagcattatattatatgtctattgtttgtcatggtggcatattttgagtggctgttaaggccatcgcaaactcgatcaccacaacggcctgcgcacgccatttcgatcggccggctcccttttcgtttcgg

SEQ ID NO: 522 - DNA, 1221 bp, Zea Mays
attactcggccacgacttgccgactacgatgccagcgccaagcctccgccgcccagctaaaaatcccccaggcgttcctgagcacccgtttatcatcacatgaccggagtcggccagaatttgccgtagctctcgcccccgctcgccgtgcgcttctcgtcccattcccccgggatcgtagattctcgagctgagctgagctgagctgagctgagcgatggatcgcgagctcagccccaggggcaatgctccagggagagggagcggcggcgcgtcgtcatcgaagcacaagaacggcggcggcggcaagaagccgatcaaggtgctttacatcgccaaccccatgcgcgtccagaccagcgccgagggtttccgcgccctcgtgcaggagctcaccggccaacacgccgatccctccaagtacagccccggcgaccttgactccggcgctgccgcacagggtctgagccccagggccagggtcgcggacgtttcgtcggaaaccatcgtcgcaagccacagccctggcagtaaggccgcgccgcacggaggggactactacgacgtcgaggaagacgaagatgacgtcttcaggtcgcctcacatgctgctggagaacaattatacggtgttctcgccgccgacgctactatatgaccatcacccgcacagcaaggctacttctgaatcggaggctgggttcgcagcggagcatgacaatttctggtccaaatgaagctgaacaagttaatacgactatagctacgaatggtttcagacaacactggtacaagagactataagcatgaatacgaagatggctacgtacggcaatggtggtgaaggctacgacgaaaggattgcggcgatattacggttgatgaatggcatgatgtataattttcttgatggacaaaaggatatatacacctccgatctgttttgtccattgagcagcaatctatgtaatcttatgcctaatgaacaggctaaggatgttttagacacaactactctagttggcacaatgttggattcggaagggaaacattgtaaaacgttggttgcttccttgtgtacatgttgcgcgcagcattatattatatgtctattgtttgtcatggtggcatattttgagtggctgttaaggccatcgcaaactcgatcaccacaacggcctgcgcacgccatttcgatcggccggctcccttttcgtttcgg

SEQ ID NO: 523 - DNA, 1239 bp, Zea Mays
attactcggccacgacttgccgactacgatgccagcgccaagcctccgccgcccagctaaaaatcccccaggcgttcctgagcacccgtttatcatcacatgaccggagtcggccagaatttgccgtagctctcgcccccgctcgccgtgcgcttctcgtcccattcccccgggatcgtagattctcgagctgagctgagctgagctgagctgagcgatggatcgcgagctcagccccaggggcaatgctccagggagagggagcggcggcgcgtcgtcatcgaagcacaagaacggcggcggcggcaagaagccgatcaaggtgctttacatcgccaaccccatgcgcgtccagaccagcgccgagggtttccgcgccctcgtgcaggagctcaccggccaacacgccgatccctccaagtacagccccggcgaccttgactccggcgctgccgcacagggtctgagccccagggccagggtcgcggacgtttcgtcggaaaccatcgtcgcaagccacagccctggcagtaaggccgcgccgcacggaggggactactacgacgtcgaggaagacgaagatgacgtcttcaggtcgcctcacatgctgctggagaacaattatacggtgttctcgccgccgacgctactatatgaccatcacccgcacagcaaggctacttctgaatcggaggctgggttcgcagcggagcatgacaatttctggtccaaatgaagctgaacaagttaatacgactatagctacgaatggtttcagtgaggagcatagcacaagacaacactggtacaagagactataagcatgaatacgaagatggctacgtacggcaatggtggtgaaggctacgacgaaaggattgcggcgatattacggttgatgaatggcatgatgtataattttcttgatggacaaaaggatatatacacctccgatctgttttgtccattgagcagcaatctatgtaatcttatgcctaatgaacaggctaaggatgttttagacacaactactctagttggcacaatgttggattcggaagggaaacattgtaaaacgttggttgcttccttgtgtacatgttgcgcgcagcattatattatatgtctattgtttgtcatggtggcatattttgagtggctgttaaggccatcgcaaactcgatcaccacaacggcctgcgcacgccatttcgatcggccggctcccttttcgtttcgg

SEQ ID NO: 524 - DNA, 590 bp, Zea Mays
ctctacgactatcactcgcacaacagggctacttctgaatcggaggctgggttcgcagcggagcatgacaatttctggtccaaatgaagctgaacaagttaatacgactatagctacgaatggtttcagtgaggagcatagcacaagacaacactggtacaagagactataagcatgaatacgaagatggctacgtacggcaatggtggtgaaggctacgacgaaaggattgcggcgatattacggttgatgaatggcatgatgtataattttcttgatggacaaaaggatatatacacctccgatctgttttgtccattgagcagcaatctatgtaatcttatgcctaatgaacaggctaaggatgttttagacacaactactctagttggcacaatgttggattcggaagggaaacattgtaaaacgttggttgcttccttgtgtacatgttgcgcgcagcattatattatatgtctattgtttgtcatggtggcatattttgagtggctgttaaggccatcgcaaactcgatcaccacaacggcctgcgcacgccatttcgatcggccggctcccttttcgtttcgg

SEQ ID NO: 525 - DNA, 593 bp, Zea Mays
ctactctacaactatcattcgcacaacaaggctacttctgaatcggaggctgggttcgcagcggagcatgacaatttctggtccaaatgaagctgaacaagttaatacgactatagctacgaatggtttcagtgaggagcatagcacaagacaacactggtacaagagactataagcatgaatacgaagatggctacgtacggcaatggtggtgaaggctacgacgaaaggattgcggcgatattacggttgatgaatggcatgatgtataattttcttgatggacaaaaggatatatacacctccgatctgttttgtccattgagcagcaatctatgtaatcttatgcctaatgaacaggctaaggatgttttagacacaactactctagttggcacaatgttggattcggaagggaaacattgtaaaacgttggttgcttccttgtgtacatgttgcgcgcagcattatattatatgtctattgtttgtcatggtggcatattttgagtggctgttaaggccatcgcaaactcgatcaccacaacggcctgcgcacgccatttcgatcggccggctcccttttcgtttcgg

SEQ ID NO: 526 - DNA, 605 bp, Zea Mays
atgacaaggaaaaagtgaatgatgagaaaaatgaagatgatggctacttctgaatcggaggctgggttcgcagcggagcatgacaatttctggtccaaatgaagctgaacaagttaatacgactatagctacgaatggtttcagtgaggagcatagcacaagacaacactggtacaagagactataagcatgaatacgaagatggctacgtacggcaatggtggtgaaggctacgacgaaaggattgcggcgatattacggttgatgaatggcatgatgtataattttcttgatggacaaaaggatatatacacctccgatctgttttgtccattgagcagcaatctatgtaatcttatgcctaatgaacaggctaaggatgttttagacacaactactctagttggcacaatgttggattcggaagggaaacattgtaaaacgttggttgcttccttgtgtacatgttgcgcgcagcattatattatatgtctattgtttgtcatggtggcatattttgagtggctgttaaggccatcgcaaactcgatcaccacaacggcctgcgcacgccatttcgatcggccggctcccttttcgtttcgg

SEQ ID NO: 527 - DNA, 1094 bp, Zea Mays
ccatccatcatcttcacatgttgagcacttgcacttcatggtccttgccatctccacttcacggttctatatatgtggctcaactatcttgtacactaaatcgcctattcatctcacatgaaataaattagtctggcattcaattatcaaagccaaatcaggtctttcactccagagctcctgcttgactagttgccgctcttccgtgatgtttgccacctcttccacccccagactgcagtggatgtgtctacaacgcagtacctatggctataagttgcagcttcctccacaactggtaggccaatctcccccatgcaggcgcgcacaggagagggaaggctctcacgcgtgagaaactgagaatcgcctgcgggccgcgaatggcgagcgagcacggcttgagaatctgacgatggaggaagcttggatagtggaagggtatttttggagatcaatttgtagatgctggtggaagcgttttctttcctatactggccttctcgaaacctgtaggagttgctctaacaggctacttctgaatcggaggctgggttcgcagcggagcatgacaatttctggtccaaatgaagctgaacaagttaatacgactatagctacgaatggtttcagtgaggagcatagcacaagacaacactggtacaagagactataagcatgaatacgaagatggctacgtacggcaatggtggtgaaggctacgacgaaaggattgcggcgatattacggttgatgaatggcatgatgtataattttcttgatggacaaaaggatatatacacctccgatctgttttgtccattgagcagcaatctatgtaatcttatgcctaatgaacaggctaaggatgttttagacacaactactctagttggcacaatgttggattcggaagggaaacattgtaaaacgttggttgcttccttgtgtacatgttgcgcgcagcattatattatatgtctattgtttgtcatggtggcatattttgagtggctgttaaggccatcgcaaactcgatcaccacaacggcctgcgcacgccatttcgatcggccggctcccttttcgtttcgg

SEQ ID NO: 528 - DNA, 730 bp, Zea Mays
cacgcgtgagaaactgagaatcgcctgcgggccgcgaatggcgagcgagcacggcttgagaatctgacgatggaggaagcttggatagtggaagggtatttttggagatcaatttgtagatgctggtggaagcgttttctttcctatactggccttctcgaaacctgtaggagttgctctaacaggctacttctgaatcggaggctgggttcgcagcggagcatgacaatttctggtccaaatgaagctgaacaagttaatacgactatagctacgaatggtttcagacaacactggtacaagagactataagcatgaatacgaagatggctacgtacggcaatggtggtgaaggctacgacgaaaggattgcggcgatattacggttgatgaatggcatgatgtataattttcttgatggacaaaaggatatatacacctccgatctgttttgtccattgagcagcaatctatgtaatcttatgcctaatgaacaggctaaggatgttttagacacaactactctagttggcacaatgttggattcggaagggaaacattgtaaaacgttggttgcttccttgtgtacatgttgcgcgcagcattatattatatgtctattgtttgtcatggtggcatattttgagtggctgttaaggccatcgcaaactcgatcaccacaacggcctgcgcacgccatttcgatcggccggctcccttttcgtttcgg

SEQ ID NO: 529 - DNA, 749 bp, Zea Mays
gtagatgctggtggaagcgttttctttcctatactggccttctcgaaacctgtaggagttgctctaacagtgtttgcgagccgacatccagatgccctgtgcagtattttcacgtcaagctaagaatttgtaacagtgtgacgagtctgtgccatcgcttaggctgctttggtataaaagaccaaggctacttctgaatcggaggctgggttcgcagcggagcatgacaatttctggtccaaatgaagctgaacaagttaatacgactatagctacgaatggtttcagtgaggagcatagcacaagacaacactggtacaagagactataagcatgaatacgaagatggctacgtacggcaatggtggtgaaggctacgacgaaaggattgcggcgatattacggttgatgaatggcatgatgtataattttcttgatggacaaaaggatatatacacctccgatctgttttgtccattgagcagcaatctatgtaatcttatgcctaatgaacaggctaaggatgttttagacacaactactctagttggcacaatgttggattcggaagggaaacattgtaaaacgttggttgcttccttgtgtacatgttgcgcgcagcattatattatatgtctattgtttgtcatggtggcatattttgagtggctgttaaggccatcgcaaactcgatcaccacaacggcctgcgcacgccatttcgatcggccggctcccttttcgtttcgg

SEQ ID NO: 530 - DNA, 2271 bp, Zea Mays
tgcgttttagaccattagttacttttgggcccagtctgttagttacttttggggttcaatctggttcatgggtgaagttttggtaagccactagcctctctgttttggtatttaacttcatgttattgtctgaaattatgatatattggtattttcctatgttgcctaaaattacatttaaacttcgtttcaattttaaaagtcaaaacttcacccatgagcatttcaacgttttatcgttttaataaccttgccaacactccccctcatgttgagcctctcttatgtaccaaccagttacccaaaagcttaagctgataggaagaggtgggcaattcccttatattatattccaacaaatttgataagtaaaagatttacagagagggcaacatattcacaaaggagacaaaccacaacatcaccatgcaccagcctctgtttcatagaacagtccgccacaacacaacacagattactgactcttcaacacagcaagtataaaaccaaactgagaaagtgagaagcaacatagcacagcatagttgccaccatatcacaacaatttgattctacagctgttggagttgacaaacaaatgaagacaattgatgttcaacagggtgttccaaataattggaacatctgaatacatactctatgctatggttctcaatttccaatccaacatgctctaacgggttaaaagaagttggtcataactcataattcataaatatactgccgactgaagaatctgaaactggtgctaaaaaagaacgatgagattctagctactaagccatttgtggttctatctactacatcattttagtgttttaagattctgcatattgggaagatgatgcatagaatagatgctccagatacaactgaaaaaaggtggttccagtcttaagagtacacaccagagctgtcagaggaaaataatcaaaaagatccgtaaatgtcttccatacatttgcattgccatacctggtttaaaataaagcagttagcaacagaaatgacaagaagctatcattatattgtggacttgtaggaaaaaaaaagtttacatgaaccaatgagtttatataagataacaaacaatatgaccaattgaccattcaactttcattcgtaccaaatcctaagcatagtgatggtgtccatcagacaaaagctatacacaatgaaaagaagtatctacaagtccaaagagtctaatgcagtaatagaaaaggcacaagatgccaaagagattgtgcatgtgtgagaaaactgggaaatctgaagctaacatacaactgtaattaagaaaaaagattaaacatagaccttctcacacaggtaatgatacagtatgtgctatataggtccataggaacatcctacacctggaaatctaacttgaactttaagcacctaaacaaactcacttgcgtagacattcgtcatagaatccatacacctgtgtgatctgcaaccataaaataagagtttcaattggaacaaatgatcattaacagggatgggcatctaaactataagcaaagtaaattctggacagaaaaccgatatgggggtggcatctaaattgtaacaaagcaaattctgaacaggaaaatagtattcatgtatcagcaactagagtaattttctctggtctcaattaaatcctgataacagtagctaaaaagtaagatgtcatatgcatcaagaaaataatatttgattgtacctgccgactctcatggtttccacgaaggattgtaattcgatgtgggtacctcacttttagtgctactagcagctggagaagaaaacaacaataaagccttttagtcccaagcaagtttgggtaagctagagttgaaacctaacagaaatgctggagaaggaacataatgtaaatatataattcttattgataatatgaactgaaattaagaccataagaaatatgttaaagcataacttcataaatcagatttcctttttccagcacaattacatgtgaaacaagacaattccgcaaagcaacaaagaaaactaacttgataaagaaagtaagcagcggttaatttcttacagtgacagtctcaacagaatagtagccacgatctacataatcccccataaataagtaattggtgtctggacactggaaacaggagagaataaaaatgacagggattagaggatggaaatggtggcttcaatcttgggtagaccatactttaagggggggaaataagtaaagtcgag

SEQ ID NO: 531 - DNA, 2062 bp, Zea Mays
gaacgttctgccgcccgcatccgcgccgcaacccgcagccgccctgcaggcaaccgcccgcatccgcggcagcgccgcggctgcttccatccatggcgccgcggcttccatcaatcgccagcgcgtcctccgtactcctgtcatccgaggaaagccttccatccatggcgccgttgctgcaattccccccgcgatccacgctacctccattgcccacacgatccgcgctccctccattgctaccgcgatgccccttcccaggaacccttccatccatggcgtcgttgctgcaggtgccccgcaatcaactccattgccgccacgatccccttccaccgacgacactcaccttccatcgacaaaactgatcttcctccattccaccgacggcactcacctctcagatcccgtgctcatcaccatcgtgcccctcgctcgccgcccccacctcaccaagagccttagccgtccctagagaagacacggaggtgcagtgccagtgctttcctcaagtgcacctcggattttcggtaccggccagattgggacgaattcaacattcatcggctccaccaaaacactgccactatgatgtgtatgcttgcgtcaggacaggagacccaaaagtacttcatagatgaatgtgacattttccacaagaacgagatacgaaatggccaaggactgctgacgatgatgacgacatggccaccatcgctgccctcagttgtcctcagggagataattgtacaaacttttggcatctcacatcaatttactccatccatgatgaatctgagcatgaatggtggtgccaaaaaacttgatgggaaatctatgacaatgctgtggagaaacagctacaatggcatgcaagccaagtttgctgcaaggcagatgccagatgattggcaggaaacaagtacacttttggctacattagagaagattgagtcttggatattttctcgcattgttgagacaatatggtggcaggcactaactcctcacatgcaaaaacgagtagaaggatcatcaactccaaaggctggtagagtgctatgtcctactttgggtgatcagcagtagggcaccttttctgttaacctgtggaaggctgcgtttcacgacgcattcaacagaatgtgccccctcagtgctggcggacatgagtgtggctgtttaccaatattagcaaaactggtgatggagcagtgtgtagcccgtttgaatgttgccatgtttaatgccatccttcgtgaatcatcaagtgagataccaacagactctatatctgacccaattgttgacccaaaagtcctaccaattccagttggtgatctaagctttgggtcaggcgcgcagctgaagaactctattggaaacgggtctagatggctgacagataatcttggcatagatcatgatgactttgaggacataggagatgttgaagacgaaagaagagttgcagctgaaacgaaatcgtttcaacttctcaatgagctaagtgatcatctattttttagtttttcataattttcctttcatggcctccttacatgtttgatttcctatgatccatgagctgccaatcatgataacgcggtttcactatgcaggagatgaacaaggatgcagtcacaactgatgctatcggcagtatcagaacttgatggtgcttgtagactgttcatggtgcttgtagggatgatgtatgtctatggcttactgagctccaaccaactatggcaggagcgttagctaggacagcagtcagtctaacaattgtggacaaagttcagtctaccatacactgaagcgcacccttgttgctaaagctgcaggtgtgaacaactttgctcagcagaatggaggatcattgtcactagcagcaagacctcgagcccaggcagttaaccatcagtttctttccttctttctttgggccgagagagcaaagaaggatgatgcactttccaacctgtgtagcacgttgggacaactcaagaaatggcagtggatatggacatagaaattgacagtttgatggaggtatttt

SEQ ID NO: 532 - DNA, 2562 bp, Zea Mays
ctgccgcccgcatccgcgccgcaacccgcagccgccctgcaggcaaccgcccgcatccgcggcagcgccgcggctgcttccatccatggcgccgcggcttccatcaatcgccagcgcgtcctccgtactcctgtcatccgaggaaagccttccatccatggcgccgttgctgcaattccccccgcgatccacgctacctccattgcccacacgatccgcgctccctccattgctaccgcgatgccccttcccaggaacccttccatccatggcgtcgttgctgcaggtgccccgcaatcaactccattgccgccacgatccccttccaccgacgacactcaccttccatcgacaaaactgatcttcctccattccaccgacggcactcacctctcagatcccgtgctcatcaccatcgtgcccctcgctcgccgcccccacctcaccaagagccttagccgtccctagagaagacacggaggtgcagtgccagtgctttcctcaagtgcacctcggattttcggtaccggccagattgggacgaattcaacattcatcggctccaccaaaacactgccactatgatgtgtatgcttgcgtcaggacaggagacccaaaagtacttcatagatgaatgtgacattttccacaagaacgagatacgaaatggccaaggactgctgacgatgatgacgacatggccaccatcgctgccctcaggctgacattctggctctccaacacagttgtcctcagggagataattgtacaaacttttggcatctcacatcaatttactccatccatgatgaatctgagcatgaatggtggtgccaaaaaacttgatgggaaatctatgacaatgctgtggagaaacagctacaatggcatgcaagccaagtttgctgcaaggcagatgccagatgattggcaggaaacaagtacacttttggctacattagagaagattgagtcttggatattttctcgcattgttgagacaatatggtggcaggtaaatgtctgtcttaggcactaactcctcacatgcaaaaacgagtagaaggatcatcaactccaaaggctggtagagtgctatgtcctactttgggtgatcagcagtagggcaccttttctgttaacctgtggaaggctgcgtttcacgacgcattcaacagaatgtgccccctcagtgctggcggacatgagtgtggctgtttaccaatattagcaaaactggtgatggagcagtgtgtagcccgtttgaatgttgccatgtttaatgccatccttcgtgaatcatcaagtgagataccaacagactctatatctgacccaattgttgacccaaaagtcctaccaattccagttggtgatctaagctttgggtcaggcgcgcagctgaagaactctattggaaacgggtctagatggctgacagataatcttggcatagatcatgatgactttgaggacataggagatgttgaagacgaaagaagagttgcagctgaaacgaaatcgtttcaacttctcaatgagctaagtgatcatctattttttagtttttcataattttcctttcatggcctccttacatgtttgatttcctatgatccatgagctgccaatcatgataacgcggtttcactatgcaggagatgaacaaggatgcagtcacaactgatgctatcggcagtatcagaacttgatggagcgttagctaggacagcagtcagtctaacaattgtggacaaagttcagtctaccatacactgaagcgcacccttgttgctaaagctgcaggtgtgaacaactttgctcagcagaatggaggatcattgtcactagcagcaagacctcgagcccagttaaccatcagtttctttccttctttctttgggccgagagagcaaagaaggatgatgcactttccaacctgtgtagcacgttgggacaactcaagaaatggcagtggatatggacatagaaattgacaggcaaaacaaagcgctggttcctttcagcgacgacatcactgaactgaattttagactgaaaggcgtgaatcagtgtggacaccagttgctgggcaagtgatatggagccagaattcgggcagttcggagactatcgccttgattgcagaatttaagaacattgttgttttacatgtttttttgcagtgaatcaggccacacatgttgtattagtgagagaatgatgatttattttatattattatggatttcatagattattttagttttccctgaactgcaattgtttcaataacataggaggggactaccttcaatgacatttaggtgaatttttaaggtatgtccattattccattatagagcacaaagcctacttcttacaactcactgtatgttttataattgtatcaaaagcactgaacaaacatagttagctatcacgttcactgttgtctaaatagattgaaataatgtggtgaagccgtcatggactcttaagtagcttagccactgcaaaggatacaattaattataaaacaccaatgaatcaataaaaaaa

SEQ ID NO: 533 - DNA, 2623 bp, Zea Mays
ccgcccgcatccgcgccgcaacccgcagccgccctgcaggcaaccgcccgcatccgcggcagcgccgcggctgcttccatccatggcgccgcggcttccatcaatcgccagcgcgtcctccgtactcctgtcatccgaggaaagccttccatccatggcgccgttgctgcaattccccccgcgatccacgctacctccattgcccacacgatccgcgctccctccattgctaccgcgatgccccttcccaggaacccttccatccatggcgtcgttgctgcaggtgccccgcaatcaactccattgccgccacgatccccttccaccgacgacactcaccttccatcgacaaaactgatcttcctccattccaccgacggcactcacctctcagatcccgtgctcatcaccatcgtgcccctcgctcgccgcccccacctcaccaagagccttagccgtccctagagaagacacggaggtgcagtgccagtgctttcctcaagtgcacctcggattttcggtaccggccagattgggacgaattcaacattcatcggctccaccaaaacactgccactatgatgtgtatgcttgcgtcaggacaggagacccaaaagtacttcatagatgaatgtgacattttccacaagaacgagatacgaaatggccaaggactgctgacgatgatgacgacatggccaccatcgctgccctcaggctgacattctggctctccaacacagttgtcctcagggagataattgtacaaacttttggcatctcacatcaatttactccatccatgatgaatctgagcatgaatggtggtgccaaaaaacttgatgggaaatctatgacaatgctgtggagaaacagctacaatggcatgcaagccaagtttgctgcaaggcagatgccagatgattggcaggaaacaagtacacttttggctacattagagaagattgagtcttggatattttctcgcattgttgagacaatatggtggcaggcactaactcctcacatgcaaaaacgagtagaaggatcatcaactccaaaggctggtagagtgctatgtcctactttgggtgatcagcagtagggcaccttttctgttaacctgtggaaggctgcgtttcacgacgcattcaacagaatgtgccccctcagtgctggcggacatgagtgtggctgtttaccaatattagcaaaactggtgatggagcagtgtgtagcccgtttgaatgttgccatgtttaatgccatccttcgtgaatcatcaagtgagataccaacagactctatatctgacccaattgttgacccaaaagtcctaccaattccagttggtgatctaagctttgggtcaggcgcgcagctgaagaactctattggaaacgggtctagatggctgacagataatcttggcatagatcatgatgactttgaggacataggagatgttgaagacgaaagaagagttgcagctgaaacgaaatcgtttcaacttctcaatgagctaagtgatcatctattttttagtttttcataattttcctttcatggcctccttacatgtttgatttcctatgatccatgagctgccaatcatgataacgcggtttcactatgcaggagatgaacaaggatgcagtcacaactgatgctatcggcagtatcagaacttgatggtgcttgtagactgttcatggtgcttgtagggatgatgtatgtctatggcttactgagctccaaccaactatggcaggagcgttagctaggacagcagtcagtctaacaattgtggacaaagttcagtctaccatacactgaagcgcacccttgttgctaaagctgcaggtgtgaacaactttgctcagcagaatggaggatcattgtcactagcagcaagacctcgagcccaggcagttaaccatcagtttctttccttctttctttgggccgagagagcaaagaaggatgatgcactttccaacctgtgtagcacgttgggacaactcaagaaatggcagtggatatggacatagaaattgacaggcaaaacaaagcgctggttcctttcagcgacgacatcactgaactgaattttagactgaaaggcgtgaatcagtgtggacaccagttgctgggcaagtgatatggagccagaattcgggcagttcggagactatcgccttgattgcagaatttaagaacattgttgttttacatgtttttttgcagtgaatcaggccacacatgttgtattagtgagagaatgatgatttattttatattattatggatttcatagattattttagttttccctgaactgcaattgtttcaataacataggaggggactaccttcaatgacatttaggtgaatttttaaggtatgtccattattccattatagagcacaaagcctacttcttacaactcactgtatgttttataattgtatcaaaagcactgaacaaacatagttagctatcacgttcactgttgtctaaatagattgaaataatgtggtgaagccgtcatggactcttaagtagcttagccactgcaaaggatacaattaattataaaacaccaatgaatcaataaaaaaa

SEQ ID NO: 534 - DNA, 7233 bp, Zea Mays
ccgcccgcatccgcgccgcaacccgcagccgccctgcaggcaaccgcccgcatccgcggcagcgccgcggctgcttccatccatggcgccgcggcttccatcaatcgccagcgcgtcctccgtactcctgtcatccgaggaaagccttccatccatggcgccgttgctgcaattccccccgcgatccacgctacctccattgcccacacgatccgcgctccctccattgctaccgcgatgccccttcccaggaacccttccatccatggcgtcgttgctgcaggtgccccgcaatcaactccattgccgccacgatccccttccaccgacgacactcaccttccatcgacaaaactgatcttcctccattccaccgacggcactcacctctcagatcccgtgctcatcaccatcgtgcccctcgctcgccgcccccacctcaccaagagccttagccgtccctagagaagacacggaggtgcagtgccagtgctttcctcaagtgcacctcggattttcggtaccggccagattgggacgaattcaacattcatcggctccaccaaaacactgccactatgatgtgtatgcttgcgtcaggacaggagacccaaaagtacttcatagatgaatgtgacattttccacaagaacgagatacgaaatggccaaggactgctgacgatgatgacgacatggccaccatcgctgccctcaggctgacattctggctctccaacacagttgtcctcagggagataattgtacaaacttttggcatctcacatcaatttactccatccatgatgaatctgagcatgaatggtggtgccaaaaaacttgatgggaaatctatgacaatgctgtggagaaacagctacaatggcatgcaagccaagtttgctgcaaggcagatgccagatgattggcaggaaacaagtacacttttggctacattagagaagattgagtcttggatattttctcgcattgttgagacaatatggtggcaggcactaactcctcacatgcaaaaacgagtagaaggatcatcaactccaaaggctggtagagtgctatgtcctactttgggtgatcagcagtagggcaccttttctgttaacctgtggaaggctgcgtttcacgacgcattcaacagaatgtgccccctcagtgctggcggacatgagtgtggctgtttaccaatattagcaaaactggtgatggagcagtgtgtagcccgtttgaatgttgccatgtttaatgccatccttcgtgaatcatcaagtgagataccaacagactctatatctgacccaattgttgacccaaaagtcctaccaattccagttggtgatctaagctttgggtcaggcgcgcagctgaagaactctattggaaacgggtctagatggctgacagataatcttggcatagatcatgatgactttgaggacataggagatgttgaagacgaaagaagagttgcagctgaaacgaaatcgtttcaacttctcaatgagctaagtgatcatctattttttagtttttcataattttcctttcatggcctccttacatgtttgatttcctatgatccatgagctgccaatcatgataacgcggtttcactatgcaggagatgaacaaggatgcagtcacaactgatgctatcggcagtatcagaacttgatggtgcttgtagactgttcatggtgcttgtagggatgatgtatgtctatggcttactgagctccaaccaactatggcaggagcgttagctaggacagcagtcagtctaacaattgtggacaaagttcagtctaccatacactgaagcgcacccttgttgctaaagctgcaggtgtgaacaactttgctcagcagaatggaggatcattgtcactagcagcaagacctcgagcccaggcagttaaccatcagtttctttccttctttctttgggccgagagagcaaagaaggatgatgcactttccaacctgtgtagcacgttgggacaactcaagaaatggcagtggatatggacatagaaattgacaggcaaaacaaagcgctggttcctttcagcgacgacatcactgaactgaattttagactgaaaggcgtgaatcagtgtggacaccagttgctgggcaagtgatatggagccagaattcgggcagttcggagactatcgccttgattgcagaatttaagaacattgttgttttacatgtttttttgcagtgaatcaggccacacatgttgtattagtgagagaatgatgatttattttatattattatggatttcatagattattttagttttccctgaactgcaattgtttcaataacataggaggggactaccttcaatgacatttaggtgaatttttaaggttgctgaacaaggtcacaaaggatgggattgagaccactcgaggttccgagctcccgcaatcaccagtgaggactggggattcgctgatcagatgcggtgtgtggggccttgctcagcggcggggctgggaggtccgagcggaatagatgtcgatggcatggcggttgctccgcacaatccatttccggcatctgagcccaggtgtcaggcgagcatccaagattgtagaccaaggctttaccaataatgccccagagctgagtaccaacaaagggagtttgctgaggtgtagcagcatccgcttcggggagaagcggaactcaatttttgcttgcgctccagacaatttggagcagaaatctggacaaacgttcgaagctgatgcccattctgcgctaaaattgtgctctggtatcgggagtgtagttatagccaagtgttctcacatatttgagagaaatggggacacctttgatgggaactgcagtttgcaagatatcctcaagcctggtttatggctctcaccggagaccctccgccggttttggcgtgtctctgagctgaagcctaaggattttcttgacattttgaatggttttggactcagtgccgtaaaagtgagaaatgcaagatttctatggaatttgtacaggtggacatcgcggcagagcaaagagttccaacatctgccaaggtcaaatgagacaatggtatccatacttgcagatgctcatatgctcagtcaagcagaatcactactgctttcattgattgatcatatgactccagctgtttctagtgaactattcagtcagattatccaggtgtattcagaagcaggcaaccttgggaaatcagttgcactttatgattatgcaaggggcaagcatttgattccttcagcttcatgctatcaagtacttcttcattttctaaccagaaacagaaaggatgaattgattttgagagtatatctggacatgcttgaagttggatttggttcttgcaccgaaggaaatattcttgattctgttgtcatggctttaatcaggaaaggtaaacttttggaagctcttggtattcttcggcaattaaagagtttgggtcttaaattaagcaagggagccttgtcaaatatagttgaagaatttaacaagaaaaaggatattggggatctgatgaatttcttggaagattggaggtgtatacctgagttgcgtctttgcaacagaatccttgcgtctttgtgcacaaatcttggtacttgtcaggcatggttggtcttccaaagtttggaggccttagggtttgctccagatgctacgacttttggaattttcatttttcacagctgtagagaaatgaaactaaaatctgcacttgtatatttatcagagtgctttgctaggcatgttaaacctggagtgtgtgcctataatgctattttaggtggtgttttcagggaggggctatatagacatgcaaagtatatatttgaagacatgattgaaagagaagtaacacccaatctttcaacatataagataattcttgcagggtattgcaggtataggcggtttgatgatattgaacaagtcttgaggcacatgaaaaccaatggtgtaaatgttcttctctctggaaactgtgtgctctccaaggccttatcattcttggggctagatcacctaggggtgaaaatcaagagagataatgtcactggtttcccaaaagctgagttttttgattcagttggcaatggattgtatttggacactgattccaaaatgtttgaggtttcattgtcacaagttttggatagcgcacttctcccagatattaactcagagctaatcagggcatctcagcaaggcgatgttgcaagtgctcttcttgtgaaagacaaagcttttcaatggggatatgacatttcaccagatagctgctctgagctattcaaggccttatgtgtgagccctgcttatgttatagatgtcattgaccttatggaggagatgccagatatactttacaaacttgatgctcaaaatctagatttggttgcccaaacattgagtaggaatggaatgtctgctcatgcaaaactggttttagaaaaaatgttgagagaagacttgtcaatcagtcacaatacatatacttatttaatgataggtttatgcgaagaaaggaacatagcagggttttgggaatgttggaatcttgcaacaaagtgcagatggtcacctgatagcaaggatatgatgggcctcatcagttacttgtgcaaatggggagtgattgaggaagccctgaaacttatgaactctttatttgactgctaccatgatctgttttttagtgcatattgtgcacttctcaaagagttgtgcaggacaggtcataccagcattggatgcgcaatgttggaggctctcaaagaaaagggtgtggctgtggatcgatcattattcttttatgtgatggagggcttcctaaaggagcaaagaactgctgaatcaattggaatgcatgacatgtggcttagcaaaagcaaagaacttgatgtttttacttaccgatctgtgttgccttcattaccatggctggacacagatcgagccaagaacttggtagaatctatgctgaccgtgaaacttactgaattctcatatcgcggttgcattgtgaatgaattaatgcaaacaaggaatataaaatgggccattccagtcttgcaagaatcagctcctgggaagctcagtgccactttgttaaattccttacttcaagcctatggttggctaaaaaattggagaaagttagatgcagttctttgcaagatgctaaagatgcatgccaccctttctatatctagctaccgctttcttgtgtgcagaatgtgtgagcaaagtcgtttttctagcgcttcaagccttagagcacttttccaacatactgacaagtcaagagaactgattgcatgcaacattctaatattttatctttttcaaagaagaaacagctcacagattcatgatttattgaaggacattgaagggaataaaaccaagcaaccgcagtctcagaatagtgttaagtcattactgcaggctaggaaaccatgagaaatcactagcattatttcacttgattgagcgcaatggatggaagcatggtttaatcattaagaccaccctagcttcatgtctcctttcatttgggagacaattggaagcaaaatcatgtctgaacaacctgagcaaaggtgagtttatcggatgttcaagcaattttgatgatctcatcaaggaattctgcattctaggagatttgaaaatgactctttatctgctaaatacaatgttaaagaaaggcacactgcctaatgaagccagttacagttctgttatatataaactttgtacattgaaggagttcgatcaggcacttgattttcttgctgaaatgcagctggcaagtctaaaatcaagtgaaatctcctgtgatgcacttgtacatggcctttgtgccatgggaagaccttctgatgctagaaaggttttggaaatgctaaccaccttgggatctgcaccatcctatggcatgtttagagttgtttttgataactattgcagaagtagcaatctacagaaagctgcggcacttctgcatgacatgcaacaagcaggacaagtgcccaactttgagatgcattggtctgttataagcaatttaagcagtaccaatgagaaaactgaaggacatggagagtgcattttgccaaacctttttctttctgcaaattccccttaaaggtcataaggcgatatatggcttccagaaaatggtgaactgatgattgttctcaagttgaaccctagtggaactgataaaactcgtgaaaccaaggttatgcaactctggaactcaaacgttctactcgaggattgatggttcacataaatgtgggaacacgtaggaaaaactatgcatcttcgatttaggttgcaaaagagggagcttgaactcattacctgagccatcacaactttcttctctgcaacttggttacaggttatgcccttgctaaagggataatgcaaagagtacgcaaatgccaggtttttcctgtttgggcacaaatggaaacaaaaaagttggactcagcctatcgtgaagctacgaaggaagagcactgtcccattattctgttttttcggacgtggtaccatcctcatcatgtagcctaggatgagttatcactgttaaatatttcaagtggttaaatcatgcatctgcagaatatattattgttgcactctcaaatggtgggttgctaacttgctatgtcatgggagtttgggtgaaggccagaaggatgtgatagacgtcgattcgatgcaggtccatgggatgctctgtacaggggtgggaatatcctagcgttcgccttggtttcggtcttctctggcagcaagtgtgctcccagttttcaagctgtcaaagctgtccaactcagttccttggggaaggcctcgattcgctcatctcctcggacccggaggactacaacaatatgaagcagtatgagaagctgaccgtcgcgtcaatttactttcttgtgatgagtgttgagcatcatcatatgattcatacaattgatatgcaactagaacccagattttaatgtgtacggttatgatttatcttttctcgttaaataatgtgagatattgaggtgtatgataaattatatgttcatctctatgtaatcattatacactaacattttaataacgagagcatagaacgataaatagtgcttct

SEQ ID NO: 535 - DNA, 2073 bp, Zea Mays
cgcatccgcgccgcaacccgcagccgccctgcaggcaaccgcccgcatccgcggcagcgccgcggctgcttccatccatggcgccgcggcttccatcaatcgccagcgcgtcctccgtactcctgtcatccgaggaaagccttccatccatggcgccgttgctgcaattccccccgcgatccacgctacctccattgcccacacgatccgcgctccctccattgctaccgcgatgccccttcccaggaacccttccatccatggcgtcgttgctgcaggtgccccgcaatcaactccattgccgccacgatccccttccaccgacgacactcaccttccatcgacaaaactgatcttcctccattccaccgacggcactcacctctcagatcccgtgctcatcaccatcgtgcccctcgctcgccgcccccacctcaccaagagccttagccgtccctagagaagacacggaggtgcagtgccagtgctttcctcaagtgcacctcggattttcggtaccggccagattgggacgaattcaacattcatcggctccaccaaaacactgccactatgatgtgtatgcttgcgtcaggacaggagacccaaaagtacttcatagatgaatgtgacattttccacaagaacgagatacgaaatggccaaggactgctgacgatgatgacgacatggccaccatcgctgccctcaggctgacattctggctctccaacacagttgtcctcagggagataattgtacaaacttttggcatctcacatcaatttactccatccatgatgaatctgagcatgaatggtggtgccaaaaaacttgatgggaaatctatgacaatgctgtggagaaacagctacaatggcatgcaagccaagtttgctgcaaggcagatgccagatgattggcaggaaacaagtacacttttggctacattagagaagattgagtcttggatattttctcgcattgttgagacaatatggtggcaggcactaactcctcacatgcaaaaacgagtagaaggatcatcaactccaaaggctggtagagtgctatgtcctactttgggtgatcagcagtagggcaccttttctgttaacctgtggaaggctgcgtttcacgacgcattcaacagaatgtgccccctcagtgctggcggacatgagtgtggctgtttaccaatattagcaaaactggtgatggagcagtgtgtagcccgtttgaatgttgccatgtttaatgccatccttcgtgaatcatcaagtgagataccaacagactctatatctgacccaattgttgacccaaaagtcctaccaattccagttggtgatctaagctttgggtcaggcgcgcagctgaagaactctattggaaacgggtctagatggctgacagataatcttggcatagatcatgatgactttgaggacataggagatgttgaagacgaaagaagagttgcagctgaaacgaaatcgtttcaacttctcaatgagctaagtgatcatctattttttagtttttcataattttcctttcatggcctccttacatgtttgatttcctatgatccatgagctgccaatcatgataacgcggtttcactatgcaggagatgaacaaggatgcagtcacaactgatgctatcggcagtatcagaacttgatggtgcttgtagactgttcatggtgcttgtagggatgatgtatgtctatggcttactgagctccaaccaactatggcaggagcgttagctaggacagcagtcagtctaacaattgtggacaaagttcagtctaccatacactgaagcgcacccttgttgctaaagctgcaggtgtgaacaactttgctcagcagaatggaggatcattgtcactagcagcaagacctcgagcccaggcagttaaccatcagtttctttccttctttctttgggccgagagagcaaagaaggatgatgcactttccaacctgtgtagcacgttgggacaactcaagaaatggcagtggatatggacatagaaattgacagtttgatggaggtatttt

SEQ ID NO: 536 - DNA, 2497 bp, Zea Mays
cgcatccgcgccgcaacccgcagccgccctgcaggcaaccgcccgcatccgcggcagcgccgcggctgcttccatccatggcgccgcggcttccatcaatcgccagcgcgtcctccgtactcctgtcatccgaggaaagccttccatccatggcgccgttgctgcaattccccccgcgatccacgctacctccattgcccacacgatccgcgctccctccattgctaccgcgatgccccttcccaggaacccttccatccatggcgtcgttgctgcaggtgccccgcaatcaactccattgccgccacgatccccttccaccgacgacactcaccttccatcgacaaaactgatcttcctccattccaccgacggcactcacctctcagatcccgtgctcatcaccatcgtgcccctcgctcgccgcccccacctcaccaagagccttagccgtccctagagaagacacggaggtgcagtgccagtgctttcctcaagtgcacctcggattttcggtaccggccagattgggacgaattcaacattcatcggctccaccaaaacactgccactatgatgtgtatgcttgcgtcaggacaggagacccaaaagtacttcatagatgaatgtgacattttccacaagaacgagatacgaaatggccaaggactgctgacgatgatgacgacatggccaccatcgctgccctcaggctgacattctggctctccaacacagttgtcctcagggagataattgtacaaacttttggcatctcacatcaatttactccatccatgatgaatctgagcatgaatggtggtgccaaaaaacttgatgggaaatctatgacaatgctgtggagaaacagctacaatggcatgcaagccaagtttgctgcaaggcagatgccagatgattggcaggaaacaagtacacttttggctacattagagaagattgagtcttggatattttctcgcattgttgagacaatatggtggcaggcactaactcctcacatgcaaaaacgagtagaaggatcatcaactccaaaggctggtagagtgctatgtcctactttgggtgatcagcagtagggcaccttttctgttaacctgtggaaggctgcgtttcacgacgcattcaacagaatgtgccccctcagtgctggcggacatgagtgtggctgtttaccaatattagcaaaactggtgatggagcagtgtgtagcccgtttgaatgttgccatgtttaatgccatccttcgtgaatcatcaagtgagataccaacagactctatatctgacccaattgttgacccaaaagtcctaccaattccagttggtgatctaagctttgggtcaggcgcgcagctgaagaactctattggaaacgggtctagatggctgacagataatcttggcatagatcatgatgactttgaggacataggagatgttgaagacgaaagaagagttgcagctgaaacgaaatcgtttcaacttctcaatgagagatgaacaaggatgcagtcacaactgatgctatcggcagtatcagaacttgatggtgcttgtagactgttcatggtgcttgtagggatgatgtatgtctatggcttactgagctccaaccaactatggcaggagcgttagctaggacagcagtcagtctaacaattgtggacaaagttcagtctaccatacactgaagcgcacccttgttgctaaagctgcaggtgtgaacaactttgctcagcagaatggaggatcattgtcactagcagcaagacctcgagcccagttaaccatcagtttctttccttctttctttgggccgagagagcaaagaaggatgatgcactttccaacctgtgtagcacgttgggacaactcaagaaatggcagtggatatggacatagaaattgacaggcaaaacaaagcgctggttcctttcagcgacgacatcactgaactgaattttagactgaaaggcgtgaatcagtgtggacaccagttgctgggcaagtgatatggagccagaattcgggcagttcggagactatcgccttgattgcagaatttaagaacattgttgttttacatgtttttttgcagtgaatcaggccacacatgttgtattagtgagagaatgatgatttattttatattattatggatttcatagattattttagttttccctgaactgcaattgtttcaataacataggaggggactaccttcaatgacatttaggtgaatttttaaggtatgtccattattccattatagagcacaaagcctacttcttacaactcactgtatgttttataattgtatcaaaagcactgaacaaacatagttagctatcacgttcactgttgtctaaatagattgaaataatgtggtgaagccgtcatggactcttaagtagcttagccactgcaaaggatacaattaattataaaacaccaatgaatcaataaaaaaa

SEQ ID NO: 537 - DNA, 2662 bp, Zea Mays
cgcatccgcgccgcaacccgcagccgccctgcaggcaaccgcccgcatccgcggcagcgccgcggctgcttccatccatggcgccgcggcttccatcaatcgccagcgcgtcctccgtactcctgtcatccgaggaaagccttccatccatggcgccgttgctgcaattccccccgcgatccacgctacctccattgcccacacgatccgcgctccctccattgctaccgcgatgccccttcccaggaacccttccatccatggcgtcgttgctgcaggtgccccgcaatcaactccattgccgccacgatccccttccaccgacgacactcaccttccatcgacaaaactgatcttcctccattccaccgacggcactcacctctcagatcccgtgctcatcaccatcgtgcccctcgctcgccgcccccacctcaccaagagccttagccgtccctagagaagacacggaggtgcagtgccagtgctttcctcaagtgcacctcggattttcggtaccggccagattgggacgaattcaacattcatcggctccaccaaaacactgccactatgatgtgtatgcttgcgtcaggacaggagacccaaaagtacttcatagatgaatgtgacattttccacaagaacgagttgtagatctaatttgattcttcctttcctcctgtggtgggatcaatcagatacgaaatggccaaggactgctgacgatgatgacgacatggccaccatcgctgccctcaggctgacattctggctctccaacacagttgtcctcagggagataattgtacaaacttttggcatctcacatcaatttactccatccatgatgaatctgagcatgaatggtggtgccaaaaaacttgatgggaaatctatgacaatgctgtggagaaacagctacaatggcatgcaagccaagtttgctgcaaggcagatgccagatgattggcaggaaacaagtacacttttggctacattagagaagattgagtcttggatattttctcgcattgttgagacaatatggtggcaggcactaactcctcacatgcaaaaacgagtagaaggatcatcaactccaaaggctggtagagtgctatgtcctactttgggtgatcagcagtagggcaccttttctgttaacctgtggaaggctgcgtttcacgacgcattcaacagaatgtgccccctcagtgctggcggacatgagtgtggctgtttaccaatattagcaaaactggtgatggagcagtgtgtagcccgtttgaatgttgccatgtttaatgccatccttcgtgaatcatcaagtgagataccaacagactctatatctgacccaattgttgacccaaaagtcctaccaattccagttggtgatctaagctttgggtcaggcgcgcagctgaagaactctattggaaacgggtctagatggctgacagataatcttggcatagatcatgatgactttgaggacataggagatgttgaagacgaaagaagagttgcagctgaaacgaaatcgtttcaacttctcaatgagctaagtgatcatctattttttagtttttcataattttcctttcatggcctccttacatgtttgatttcctatgatccatgagctgccaatcatgataacgcggtttcactatgcaggagatgaacaaggatgcagtcacaactgatgctatcggcagtatcagaacttgatggtgcttgtagactgttcatggtgcttgtagggatgatgtatgtctatggcttactgagctccaaccaactatggcaggagcgttagctaggacagcagtcagtctaacaattgtggacaaagttcagtctaccatacactgaagcgcacccttgttgctaaaggtgtgaacaactttgctcagcagaatggaggatcattgtcactagcagcaagacctcgagcccaggcagttaaccatcagtttctttccttctttctttgggccgagagagcaaagaaggatgatgcactttccaacctgtgtagcacgttgggacaactcaagaaatggcagtggatatggacatagaaattgacaggcaaaacaaagcgctggttcctttcagcgacgacatcactgaactgaattttagactgaaaggcgtgaatcagtgtggacaccagttgctgggcaagtgatatggagccagaattcgggcagttcggagactatcgccttgattgcagaatttaagaacattgttgttttacatgtttttttgcagtgaatcaggccacacatgttgtattagtgagagaatgatgatttattttatattattatggatttcatagattattttagttttccctgaactgcaattgtttcaataacataggaggggactaccttcaatgacatttaggtgaatttttaaggtatgtccattattccattatagagcacaaagcctacttcttacaactcactgtatgttttataattgtatcaaaagcactgaacaaacatagttagctatcacgttcactgttgtctaaatagattgaaataatgtggtgaagccgtcatggactcttaagtagcttagccactgcaaaggatacaattaattataaaacaccaatgaatcaataaaaaaa

SEQ ID NO: 538 - DNA, 2571 bp, Zea Mays
cgcatccgcgccgcaacccgcagccgccctgcaggcaaccgcccgcatccgcggcagcgccgcggctgcttccatccatggcgccgcggcttccatcaatcgccagcgcgtcctccgtactcctgtcatccgaggaaagccttccatccatggcgccgttgctgcaattccccccgcgatccacgctacctccattgcccacacgatccgcgctccctccattgctaccgcgatgccccttcccaggaacccttccatccatggcgtcgttgctgcaggtgccccgcaatcaactccattgccgccacgatccccttccaccgacgacactcaccttccatcgacaaaactgatcttcctccattccaccgacggcactcacctctcagatcccgtgctcatcaccatcgtgcccctcgctcgccgcccccacctcaccaagagccttagccgtccctagagaagacacggaggtgcagtgccagtgctttcctcaagtgcacctcggattttcggtaccggccagattgggacgaattcaacattcatcggctccaccaaaacactgccactatgatgtgtatgcttgcgtcaggacaggagacccaaaagtacttcatagatgaatgtgacattttccacaagaacgagatacgaaatggccaaggactgctgacgatgatgacgacatggccaccatcgctgccctcaggctgacattctggctctccaacacagttgtcctcagggagataattgtacaaacttttggcatctcacatcaatttactccatccatgatgaatctgagcatgaatggtggtgccaaaaaacttgatgggaaatctatgacaatgctgtggagaaacagctacaatggcatgcaagccaagtttgctgcaaggcagatgccagatgattggcaggaaacaagtacacttttggctacattagagaagattgagtcttggatattttctcgcattgttgagacaatatggtggcaggcactaactcctcacatgcaaaaacgagtagaaggatcatcaactccaaaggctggtagagtgctatgtcctactttgggtgatcagcagtagggcaccttttctgttaacctgtggaaggctgcgtttcacgacgcattcaacagaatgtgccccctcagtgctggcggacatgagtgtggctgtttaccaatattagcaaaactggtgatggagcagtgtgtagcccgtttgaatgttgccatgtttaatgccatccttcgtgaatcatcaagtgagataccaacagactctatatctgacccaattgttgacccaaaagtcctaccaattccagttggtgatctaagctttgggtcaggcgcgcagctgaagaactctattggaaacgggtctagatggctgacagataatcttggcatagatcatgatgactttgaggacataggagatgttgaagacgaaagaagagttgcagctgaaacgaaatcgtttcaacttctcaatgagctaagtgatcatctattttttagtttttcataattttcctttcatggcctccttacatgtttgatttcctatgatccatgagctgccaatcatgataacgcggtttcactatgcaggagatgaacaaggatgcagtcacaactgatgctatcggcagtatcagaacttgatggtgcttgtagactgttcatggtgcttgtagggatgatgtatgtctatggcttactgagctccaaccaactatggcaggagcgttagctaggacagcagtcagtctaacaattgtggacaaagttcagtctaccatacactgaagcgcacccttgttgctaaagctgcaggtgtgaacaactttgctcagcagaatggaggatcattgtcactagcagcaagacctcgagcccaggcagaaggatgatgcactttccaacctgtgtagcacgttgggacaactcaagaaatggcagtggatatggacatagaaattgacaggcaaaacaaagcgctggttcctttcagcgacgacatcactgaactgaattttagactgaaaggcgtgaatcagtgtggacaccagttgctgggcaagtgatatggagccagaattcgggcagttcggagactatcgccttgattgcagaatttaagaacattgttgttttacatgtttttttgcagtgaatcaggccacacatgttgtattagtgagagaatgatgatttattttatattattatggatttcatagattattttagttttccctgaactgcaattgtttcaataacataggaggggactaccttcaatgacatttaggtgaatttttaaggtatgtccattattccattatagagcacaaagcctacttcttacaactcactgtatgttttataattgtatcaaaagcactgaacaaacatagttagctatcacgttcactgttgtctaaatagattgaaataatgtggtgaagccgtcatggactcttaagtagcttagccactgcaaaggatacaattaattataaaacaccaatgaatcaataaaaaaa

SEQ ID NO: 539 - DNA, 2664 bp, Zea Mays
cgcatccgcgccgcaacccgcagccgccctgcaggcaaccgcccgcatccgcggcagcgccgcggctgcttccatccatggcgccgcggcttccatcaatcgccagcgcgtcctccgtactcctgtcatccgaggaaagccttccatccatggcgccgttgctgcaattccccccgcgatccacgctacctccattgcccacacgatccgcgctccctccattgctaccgcgatgccccttcccaggaacccttccatccatggcgtcgttgctgcaggtgccccgcaatcaactccattgccgccacgatccccttccaccgacgacactcaccttccatcgacaaaactgatcttcctccattccaccgacggcactcacctctcagatcccgtgctcatcaccatcgtgcccctcgctcgccgcccccacctcaccaagagccttagccgtccctagagaagacacggaggtgcagtgccagtgctttcctcaagtgcacctcggattttcggtaccggccagattgggacgaattcaacattcatcggctccaccaaaacactgccactatgatgtgtatgcttgcgtcaggacaggagacccaaaagtacttcatagatgaatgtgacattttccacaagaacgagatacgaaatggccaaggactgctgacgatgatgacgacatggccaccatcgctgccctcaggtaggccatcctccaagagctcaacctccacgcctctgttctaaaggctgacattctggctctccaacacagttgtcctcagggagataattgtacaaacttttggcatctcacatcaatttactccatccatgatgaatctgagcatgaatggtggtgccaaaaaacttgatgggaaatctatgacaatgctgtggagaaacagctacaatggcatgcaagccaagtttgctgcaaggcagatgccagatgattggcaggaaacaagtacacttttggctacattagagaagattgagtcttggatattttctcgcattgttgagacaatatggtggcaggcactaactcctcacatgcaaaaacgagtagaaggatcatcaactccaaaggctggtagagtgctatgtcctactttgggtgatcagcagtagggcaccttttctgttaacctgtggaaggctgcgtttcacgacgcattcaacagaatgtgccccctcagtgctggcggacatgagtgtggctgtttaccaatattagcaaaactggtgatggagcagtgtgtagcccgtttgaatgttgccatgtttaatgccatccttcgtgaatcatcaagtgagataccaacagactctatatctgacccaattgttgacccaaaagtcctaccaattccagttggtgatctaagctttgggtcaggcgcgcagctgaagaactctattggaaacgggtctagatggctgacagataatcttggcatagatcatgatgactttgaggacataggagatgttgaagacgaaagaagagttgcagctgaaacgaaatcgtttcaacttctcaatgagctaagtgatcatctattttttagtttttcataattttcctttcatggcctccttacatgtttgatttcctatgatccatgagctgccaatcatgataacgcggtttcactatgcaggagatgaacaaggatgcagtcacaactgatgctatcggcagtatcagaacttgatggtgcttgtagactgttcatggtgcttgtagggatgatgtatgtctatggcttactgagctccaaccaactatggcaggagcgttagctaggacagcagtcagtctaacaattgtggacaaagttcagtctaccatacactgaagcgcacccttgttgctaaagctgcaggtgtgaacaactttgctcagcagaatggaggatcattgtcactagcagcaagacctcgagcccaggcagttaaccatcagtttctttccttctttctttgggccgagagagcaaagaaggatgatgcactttccaacctgtgtagcacgttgggacaactcaagaaatggcagtggatatggacatagaaattgacaggcaaaacaaagcgctggttcctttcagcgacgacatcactgaactgaattttagactgaaaggcgtgaatcagtgtggacaccagttgctgggcaagtgatatggagccagaattcgggcagttcggagactatcgccttgattgcagaatttaagaacattgttgttttacatgtttttttgcagtgaatcaggccacacatgttgtattagtgagagaatgatgatttattttatattattatggatttcatagattattttagttttccctgaactgcaattgtttcaataacataggaggggactaccttcaatgacatttaggtgaatttttaaggtatgtccattattccattatagagcacaaagcctacttcttacaactcactgtatgttttataattgtatcaaaagcactgaacaaacatagttagctatcacgttcactgttgtctaaatagattgaaataatgtggtgaagccgtcatggactcttaagtagcttagccactgcaaaggatacaattaattataaaacaccaatgaatcaataaaaaaa

SEQ ID NO: 540 - DNA, 2578 bp, Zea Mays
cgcatccgcgccgcaacccgcagccgccctgcaggcaaccgcccgcatccgcggcagcgccgcggctgcttccatccatggcgccgcggcttccatcaatcgccagcgcgtcctccgtactcctgtcatccgaggaaagccttccatccatggcgccgttgctgcaattccccccgcgatccacgctacctccattgcccacacgatccgcgctccctccattgctaccgcgatgccccttcccaggaacccttccatccatggcgtcgttgctgcaggtgccccgcaatcaactccattgccgccacgatccccttccaccgacgacactcaccttccatcgacaaaactgatcttcctccattccaccgacggcactcacctctcagatcccgtgctcatcaccatcgtgcccctcgctcgccgcccccacctcaccaagagccttagccgtccctagagaagacacggaggtgcagtgccagtgctttcctcaagtgcacctcggattttcggtaccggccagattgggacgaattcaacattcatcggctccaccaaaacactgccactatgatgtgtatgcttgcgtcaggacaggagacccaaaagtacttcatagatgaatgtgacattttccacaagaacgagatacgaaatggccaaggactgctgacgatgatgacgacatggccaccatcgctgccctcaggctgacattctggctctccaacacagttgtcctcagggagataattgtacaaacttttggcatctcacatcaatttactccatccatgatgaatctgagcatgaatggtggtgccaaaaaacttgatgggaaatctatgacaatgctgtggagaaacagctacaatggcatgcaagccaagtttgctgcaaggcagatgccagatgattggcaggaaacaagtacacttttggctacattagagaagattgagtcttggatattttctcgcattgttgagacaatatggtggcaggcactaactcctcacatgcaaaaacgagtagaaggatcatcaactccaaaggctggtagagtgctatgtcctactttgggtgatcagcagtagggcaccttttctgttaacctgtggaaggctgcgtttcacgacgcattcaacagaatgtgccccctcagtgctggcggacatgagtgtggctgtttaccaatattagcaaaactggtgatggagcagtgtgtagcccgtttgaatgttgccatgtttaatgccatccttcgtgaatcatcaagtgagataccaacagactctatatctgacccaattgttgacccaaaagtcctaccaattccagttggtgatctaagctttgggtcaggcgcgcagctgaagaactctattggaaacgggtctagatggctgacagataatcttggcatagatcatgatgactttgaggacataggagatgttgaagacgaaagaagagttgcagctgaaacgaaatcgtttcaacttctcaatgagctaagtgatcatctattttttagtttttcataattttcctttcatggcctccttacatgtttgatttcctatgatccatgagctgccaatcatgataacgcggtttcactatgcaggagatgaacaaggatgcagtcacaactgatgctatcggcagtatcagaacttgatggtgcttgtagactgttcatggtgcttgtagggatgatgtatgtctatggcttactgagctccaaccaactatggcaggagcgttagctaggacagcagtcagtctaacaattgtggacaaagttcagtctaccatacactgaagcgcacccttgttgctaaagctgcaggtgtgaacaactttgctcagcagaatggaggatcattgtcactagcagcaagacctcgagcccaggcagagcaaagaaggatgatgcactttccaacctgtgtagcacgttgggacaactcaagaaatggcagtggatatggacatagaaattgacaggcaaaacaaagcgctggttcctttcagcgacgacatcactgaactgaattttagactgaaaggcgtgaatcagtgtggacaccagttgctgggcaagtgatatggagccagaattcgggcagttcggagactatcgccttgattgcagaatttaagaacattgttgttttacatgtttttttgcagtgaatcaggccacacatgttgtattagtgagagaatgatgatttattttatattattatggatttcatagattattttagttttccctgaactgcaattgtttcaataacataggaggggactaccttcaatgacatttaggtgaatttttaaggtatgtccattattccattatagagcacaaagcctacttcttacaactcactgtatgttttataattgtatcaaaagcactgaacaaacatagttagctatcacgttcactgttgtctaaatagattgaaataatgtggtgaagccgtcatggactcttaagtagcttagccactgcaaaggatacaattaattataaaacaccaatgaatcaataaaaaaa

SEQ ID NO: 541 - DNA, 1362 bp, Zea Mays
cgcatccgcgccgcaacccgcagccgccctgcaggcaaccgcccgcatccgcggcagcgccgcggctgcttccatccatggcgccgcggcttccatcaatcgccagcgcgtcctccgtactcctgtcatccgaggaaagccttccatccatggcgccgttgctgcaattccccccgcgatccacgctacctccattgcccacacgatccgcgctccctccattgctaccgcgatgccccttcccaggaacccttccatccatggcgtcgttgctgcaggtgccccgcaatcaactccattgccgccacgatccccttccaccgacgacactcaccttccatcgacaaaactgatcttcctccattccaccgacggcactcacctctcagatcccgtgctcatcaccatcgtgcccctcgctcgccgcccccacctcaccaagagccttagccgtccctagagaagacacggaggtgcagtgccagtgctttcctcaagtgcacctcggattttcggtaccggccagattgggacgaattcaacattcatcggctccaccaaaagacagcagtcagtctaacaattgtggacaaagttcagtctaccatacactgaagcgcacccttgttgctaaagctgcaggtgtgaacaactttgctcagcagaatggaggatcattgtcactagcagcaagacctcgagcccaggcagagcaaagaaggatgatgcactttccaacctgtgtagcacgttgggacaactcaagaaatggcagtggatatggacatagaaattgacaggcaaaacaaagcgctggttcctttcagcgacgacatcactgaactgaattttagactgaaaggcgtgaatcagtgtggacaccagttgctgggcaagtgatatggagccagaattcgggcagttcggagactatcgccttgattgcagaatttaagaacattgttgttttacatgtttttttgcagtgaatcaggccacacatgttgtattagtgagagaatgatgatttattttatattattatggatttcatagattattttagttttccctgaactgcaattgtttcaataacataggaggggactaccttcaatgacatttaggtgaatttttaaggtatgtccattattccattatagagcacaaagcctacttcttacaactcactgtatgttttataattgtatcaaaagcactgaacaaacatagttagctatcacgttcactgttgtctaaatagattgaaataatgtggtgaagccgtcatggactcttaagtagcttagccactgcaaaggatacaattaattataaaacaccaatgaatcaataaaaaaa

SEQ ID NO: 542 - DNA, 2550 bp, Zea Mays
cgcatccgcgccgcaacccgcagccgccctgcaggcaaccgcccgcatccgcggcagcgccgcggctgcttccatccatggcgccgcggcttccatcaatcgccagcgcgtcctccgtactcctgtcatccgaggaaagccttccatccatggcgccgttgctgcaattccccccgcgatccacgctacctccattgcccacacgatccgcgctccctccattgctaccgcgatgccccttcccaggaacccttccatccatggcgtcgttgctgcaggtgccccgcaatcaactccattgccgccacgatccccttccaccgacgacactcaccttccatcgacaaaactgatcttcctccattccaccgacggcactcacctctcagatcccgtgctcatcaccatcgtgcccctcgctcgccgcccccacctcaccaagagccttagccgtccctagagaagacacggaggtgcagtgccagtgctttcctcaagtgcacctcggattttcggtaccggccagattgggacgaattcaacattcatcggctccaccaaaagacaggagacccaaaagtacttcatagatgaatgtgacattttccacaagaacgagatacgaaatggccaaggactgctgacgatgatgacgacatggccaccatcgctgccctcagttgtcctcagggagataattgtacaaacttttggcatctcacatcaatttactccatccatgatgaatctgagcatgaatggtggtgccaaaaaacttgatgggaaatctatgacaatgctgtggagaaacagctacaatggcatgcaagccaagtttgctgcaaggcagatgccagatgattggcaggaaacaagtacacttttggctacattagagaagattgagtcttggatattttctcgcattgttgagacaatatggtggcaggcactaactcctcacatgcaaaaacgagtagaaggatcatcaactccaaaggctggtagagtgctatgtcctactttgggtgatcagcagtagggcaccttttctgttaacctgtggaaggctgcgtttcacgacgcattcaacagaatgtgccccctcagtgctggcggacatgagtgtggctgtttaccaatattagcaaaactggtgatggagcagtgtgtagcccgtttgaatgttgccatgtttaatgccatccttcgtgaatcatcaagtgagataccaacagactctatatctgacccaattgttgacccaaaagtcctaccaattccagttggtgatctaagctttgggtcaggcgcgcagctgaagaactctattggaaacgggtctagatggctgacagataatcttggcatagatcatgatgactttgaggacataggagatgttgaagacgaaagaagagttgcagctgaaacgaaatcgtttcaacttctcaatgagctaagtgatcatctattttttagtttttcataattttcctttcatggcctccttacatgtttgatttcctatgatccatgagctgccaatcatgataacgcggtttcactatgcaggagatgaacaaggatgcagtcacaactgatgctatcggcagtatcagaacttgatggtgcttgtagactgttcatggtgcttgtagggatgatgtatgtctatggcttactgagctccaaccaactatggcaggagcgttagctaggacagcagtcagtctaacaattgtggacaaagttcagtctaccatacactgaagcgcacccttgttgctaaaggtgtgaacaactttgctcagcagaatggaggatcattgtcactagcagcaagacctcgagcccagttaaccatcagtttctttccttctttctttgggccgagagagcaaagaaggatgatgcactttccaacctgtgtagcacgttgggacaactcaagaaatggcagtggatatggacatagaaattgacaggcaaaacaaagcgctggttcctttcagcgacgacatcactgaactgaattttagactgaaaggcgtgaatcagtgtggacaccagttgctgggcaagtgatatggagccagaattcgggcagttcggagactatcgccttgattgcagaatttaagaacattgttgttttacatgtttttttgcagtgaatcaggccacacatgttgtattagtgagagaatgatgatttattttatattattatggatttcatagattattttagttttccctgaactgcaattgtttcaataacataggaggggactaccttcaatgacatttaggtgaatttttaaggtatgtccattattccattatagagcacaaagcctacttcttacaactcactgtatgttttataattgtatcaaaagcactgaacaaacatagttagctatcacgttcactgttgtctaaatagattgaaataatgtggtgaagccgtcatggactcttaagtagcttagccactgcaaaggatacaattaattataaaacaccaatgaatcaataaaaaaa

SEQ ID NO: 543 - DNA, 2499 bp, Zea Mays
cgcatccgcgccgcaacccgcagccgccctgcaggcaaccgcccgcatccgcggcagcgccgcggctgcttccatccatggcgccgcggcttccatcaatcgccagcgcgtcctccgtactcctgtcatccgaggaaagccttccatccatggcgccgttgctgcaattccccccgcgatccacgctacctccattgcccacacgatccgcgctccctccattgctaccgcgatgccccttcccaggaacccttccatccatggcgtcgttgctgcaggtgccccgcaatcaactccattgccgccacgatccccttccaccgacgacactcaccttccatcgacaaaactgatcttcctccattccaccgacggcactcacctctcagatcccgtgctcatcaccatcgtgcccctcgctcgccgcccccacctcaccaagagccttagccgtccctagagaagacacggaggtgcagtgccagtgctttcctcaagtgcacctcggattttcggtaccggccagattgggacgaattcaacattcatcggctccaccaaaacactgccactatgatgtgtatgcttgcgtcaggacaggagacccaaaagtacttcatagatgaatgtgacattttccacaagaacgagatacgaaatggccaaggactgctgacgatgatgacgacatggccaccatcgctgccctcaggctgacattctggctctccaacacagttgtcctcagggagataattgtacaaacttttggcatctcacatcaatttactccatccatgatgaatctgagcatgaatggtggtgccaaaaaacttgatgggaaatctatgacaatgctgtggagaaacagctacaatggcatgcaagccaagtttgctgcaaggcagatgccagatgattggcaggaaacaagtacacttttggctacattagagaagattgagtcttggatattttctcgcattgttgagacaatatggtggcaggcactaactcctcacatgcaaaaacgagtagaaggatcatcaactccaaaggctggtagagtgctatgtcctactttgggtgatcagcagtagggcaccttttctgttaacctgtggaaggctgcgtttcacgacgcattcaacagaatgtgccccctcagtgctggcggacatgagtgtggctgtttaccaatattagcaaaactggtgatggagcagtgtgtagcccgtttgaatgttgccatgtttaatgccatccttcgtgaatcatcaagtgagataccaacagactctatatctgacccaattgttgacccaaaagtcctaccaattccagttggtgatctaagctttgggtcaggcgcgcagctgaagaactctatcatgatgactttgaggacataggagatgttgaagacgaaagaagagttgcagctgaaacgaaatcgtttcaacttctcaatgagctaagtgatcatctattttttagtttttcataattttcctttcatggcctccttacatgtttgatttcctatgatccatgagctgccaatcatgataacgcggtttcactatgcaggagatgaacaaggatgcagtcacaactgatgctatcggcagtatcagaacttgatggtgcttgtagactgttcatggtgcttgtagggatgatgtatgtctatggcttactgagctccaaccaactatggcaggagcgttagctaggacagcagtcagtctaacaattgtggacaaagttcagtctaccatacactgaagcgcacccttgttgctaaagctgcaggtgtgaacaactttgctcagcagaatggaggatcattgtcactagcagcaagacctcgagcccaggcagcacgttgggacaactcaagaaatggcagtggatatggacatagaaattgacaggcaaaacaaagcgctggttcctttcagcgacgacatcactgaactgaattttagactgaaaggcgtgaatcagtgtggacaccagttgctgggcaagtgatatggagccagaattcgggcagttcggagactatcgccttgattgcagaatttaagaacattgttgttttacatgtttttttgcagtgaatcaggccacacatgttgtattagtgagagaatgatgatttattttatattattatggatttcatagattattttagttttccctgaactgcaattgtttcaataacataggaggggactaccttcaatgacatttaggtgaatttttaaggtatgtccattattccattatagagcacaaagcctacttcttacaactcactgtatgttttataattgtatcaaaagcactgaacaaacatagttagctatcacgttcactgttgtctaaatagattgaaataatgtggtgaagccgtcatggactcttaagtagcttagccactgcaaaggatacaattaattataaaacaccaatgaatcaataaaaaaa

SEQ ID NO: 544 - DNA, 2592 bp, Zea Mays
cgcatccgcgccgcaacccgcagccgccctgcaggcaaccgcccgcatccgcggcagcgccgcggctgcttccatccatggcgccgcggcttccatcaatcgccagcgcgtcctccgtactcctgtcatccgaggaaagccttccatccatggcgccgttgctgcaattccccccgcgatccacgctacctccattgcccacacgatccgcgctccctccattgctaccgcgatgccccttcccaggaacccttccatccatggcgtcgttgctgcaggtgccccgcaatcaactccattgccgccacgatccccttccaccgacgacactcaccttccatcgacaaaactgatcttcctccattccaccgacggcactcacctctcagatcccgtgctcatcaccatcgtgcccctcgctcgccgcccccacctcaccaagagccttagccgtccctagagaagacacggaggtgcagtgccagtgctttcctcaagtgcacctcggattttcggtaccggccagattgggacgaattcaacattcatcggctccaccaaaacactgccactatgatgtgtatgcttgcgtcaggacaggagacccaaaagtacttcatagatgaatgtgacattttccacaagaacgagatacgaaatggccaaggactgctgacgatgatgacgacatggccaccatcgctgccctcaggctgacattctggctctccaacacagttgtcctcagggagataattgtacaaacttttggcatctcacatcaatttactccatccatgatgaatctgagcatgaatggtggtgccaaaaaacttgatgggaaatctatgacaatgctgtggagaaacagctacaatggcatgcaagccaagtttgctgcaaggcagatgccagatgattggcaggaaacaagtacacttttggctacattagagaagattgagtcttggatattttctcgcattgttgagacaatatggtggcaggtaaatgtctgtcttaggcactaactcctcacatgcaaaaacgagtagaaggatcatcaactccaaaggctggtagagtgctatgtcctactttgggtgatcagcagtagggcaccttttctgttaacctgtggaaggctgcgtttcacgacgcattcaacagaatgtgccccctcagtgctggcggacatgagtgtggctgtttaccaatattagcaaaactggtgatggagcagtgtgtagcccgtttgaatgttgccatgtttaatgccatccttcgtgaatcatcaagtgagataccaacagactctatatctgacccaattgttgacccaaaagtcctaccaattccagttggtgatctaagctttgggtcaggcgcgcagctgaagaactctatcatgatgactttgaggacataggagatgttgaagacgaaagaagagttgcagctgaaacgaaatcgtttcaacttctcaatgagctaagtgatcatctattttttagtttttcataattttcctttcatggcctccttacatgtttgatttcctatgatccatgagctgccaatcatgataacgcggtttcactatgcaggagatgaacaaggatgcagtcacaactgatgctatcggcagtatcagaacttgatggtgcttgtagactgttcatggtgcttgtagggatgatgtatgtctatggcttactgagctccaaccaactatggcaggagcgttagctaggacagcagtcagtctaacaattgtggacaaagttcagtctaccatacactgaagcgcacccttgttgctaaagctgcaggtgtgaacaactttgctcagcagaatggaggatcattgtcactagcagcaagacctcgagcccaggcagttaaccatcagtttctttccttctttctttgggccgagagagcaaagaaggatgatgcactttccaacctgtgtagcacgttgggacaactcaagaaatggcagtggatatggacatagaaattgacaggcaaaacaaagcgctggttcctttcagcgacgacatcactgaactgaattttagactgaaaggcgtgaatcagtgtggacaccagttgctgggcaagtgatatggagccagaattcgggcagttcggagactatcgccttgattgcagaatttaagaacattgttgttttacatgtttttttgcagtgaatcaggccacacatgttgtattagtgagagaatgatgatttattttatattattatggatttcatagattattttagttttccctgaactgcaattgtttcaataacataggaggggactaccttcaatgacatttaggtgaatttttaaggtatgtccattattccattatagagcacaaagcctacttcttacaactcactgtatgttttataattgtatcaaaagcactgaacaaacatagttagctatcacgttcactgttgtctaaatagattgaaataatgtggtgaagccgtcatggactcttaagtagcttagccactgcaaaggatacaattaattataaaacaccaatgaatcaataaaaaaa

SEQ ID NO: 545 - DNA, 2653 bp, Zea Mays
cgcatccgcgccgcaacccgcagccgccctgcaggcaaccgcccgcatccgcggcagcgccgcggctgcttccatccatggcgccgcggcttccatcaatcgccagcgcgtcctccgtactcctgtcatccgaggaaagccttccatccatggcgccgttgctgcaattccccccgcgatccacgctacctccattgcccacacgatccgcgctccctccattgctaccgcgatgccccttcccaggaacccttccatccatggcgtcgttgctgcaggtgccccgcaatcaactccattgccgccacgatccccttccaccgacgacactcaccttccatcgacaaaactgatcttcctccattccaccgacggcactcacctctcagatcccgtgctcatcaccatcgtgcccctcgctcgccgcccccacctcaccaagagccttagccgtccctagagaagacacggaggtgcagtgccagtgctttcctcaagtgcacctcggattttcggtaccggccagattgggacgaattcaacattcatcggctccaccaaaacactgccactatgatgtgtatgcttgcgtcaggacaggagacccaaaagtacttcatagatgaatgtgacattttccacaagaacgagttgtagatctaatttgattcttcctttcctcctgtggtgggatcaatcagatacgaaatggccaaggactgctgacgatgatgacgacatggccaccatcgctgccctcagttgtcctcagggagataattgtacaaacttttggcatctcacatcaatttactccatccatgatgaatctgagcatgaatggtggtgccaaaaaacttgatgggaaatctatgacaatgctgtggagaaacagctacaatggcatgcaagccaagtttgctgcaaggcagatgccagatgattggcaggaaacaagtacacttttggctacattagagaagattgagtcttggatattttctcgcattgttgagacaatatggtggcaggtaaatgtctgtcttaggcactaactcctcacatgcaaaaacgagtagaaggatcatcaactccaaaggctggtagagtgctatgtcctactttgggtgatcagcagtagggcaccttttctgttaacctgtggaaggctgcgtttcacgacgcattcaacagaatgtgccccctcagtgctggcggacatgagtgtggctgtttaccaatattagcaaaactggtgatggagcagtgtgtagcccgtttgaatgttgccatgtttaatgccatccttcgtgaatcatcaagtgagataccaacagactctatatctgacccaattgttgacccaaaagtcctaccaattccagttggtgatctaagctttgggtcaggcgcgcagctgaagaactctattggaaacgggtctagatggctgacagataatcttggcatagatcatgatgactttgaggacataggagatgttgaagacgaaagaagagttgcagctgaaacgaaatcgtttcaacttctcaatgagctaagtgatcatctattttttagtttttcataattttcctttcatggcctccttacatgtttgatttcctatgatccatgagctgccaatcatgataacgcggtttcactatgcaggagatgaacaaggatgcagtcacaactgatgctatcggcagtatcagaacttgatggtgcttgtagactgttcatggtgcttgtagggatgatgtatgtctatggcttactgagctccaaccaactatggcaggagcgttagctaggacagcagtcagtctaacaattgtggacaaagttcagtctaccatacactgaagcgcacccttgttgctaaaggtgtgaacaactttgctcagcagaatggaggatcattgtcactagcagcaagacctcgagcccaggcagttaaccatcagtttctttccttctttctttgggccgagagagcaaagaaggatgatgcactttccaacctgtgtagcacgttgggacaactcaagaaatggcagtggatatggacatagaaattgacaggcaaaacaaagcgctggttcctttcagcgacgacatcactgaactgaattttagactgaaaggcgtgaatcagtgtggacaccagttgctgggcaagtgatatggagccagaattcgggcagttcggagactatcgccttgattgcagaatttaagaacattgttgttttacatgtttttttgcagtgaatcaggccacacatgttgtattagtgagagaatgatgatttattttatattattatggatttcatagattattttagttttccctgaactgcaattgtttcaataacataggaggggactaccttcaatgacatttaggtgaatttttaaggtatgtccattattccattatagagcacaaagcctacttcttacaactcactgtatgttttataattgtatcaaaagcactgaacaaacatagttagctatcacgttcactgttgtctaaatagattgaaataatgtggtgaagccgtcatggactcttaagtagcttagccactgcaaaggatacaattaattataaaacaccaatgaatcaataaaaaaa

SEQ ID NO: 546 - DNA, 2492 bp, Zea Mays
cgcatccgcgccgcaacccgcagccgccctgcaggcaaccgcccgcatccgcggcagcgccgcggctgcttccatccatggcgccgcggcttccatcaatcgccagcgcgtcctccgtactcctgtcatccgaggaaagccttccatccatggcgccgttgctgcaattccccccgcgatccacgctacctccattgcccacacgatccgcgctccctccattgctaccgcgatgccccttcccaggaacccttccatccatggcgtcgttgctgcaggtgccccgcaatcaactccattgccgccacgatccccttccaccgacgacactcaccttccatcgacaaaactgatcttcctccattccaccgacggcactcacctctcagatcccgtgctcatcaccatcgtgcccctcgctcgccgcccccacctcaccaagagccttagccgtccctagagaagacacggaggtgcagtgccagtgctttcctcaagtgcacctcggattttcggtaccggccagattgggacgaattcaacattcatcggctccaccaaaacactgccactatgatgtgtatgcttgcgtcaggacaggagacccaaaagtacttcatagatgaatgtgacattttccacaagaacgagatacgaaatggccaaggactgctgacgatgatgacgacatggccaccatcgctgccctcagttgtcctcagggagataattgtacaaacttttggcatctcacatcaatttactccatccatgatgaatctgagcatgaatggtggtgccaaaaaacttgatgggaaatctatgacaatgctgtggagaaacagctacaatggcatgcaagccaagtttgctgcaaggcagatgccagatgattggcaggaaacaagtacacttttggctacattagagaagattgagtcttggatattttctcgcattgttgagacaatatggtggcaggtaaatgtctgtcttaggcactaactcctcacatgcaaaaacgagtagaaggatcatcaactccaaaggctggtagagtgctatgtcctactttgggtgatcagcagtagggcaccttttctgttaacctgtggaaggctgcgtttcacgacgcattcaacagaatgtgccccctcagtgctggcggacatgagtgtggctgtttaccaatattagcaaaactggtgatggagcagtgtgtagcccgtttgaatgttgccatgtttaatgccatccttcgtgaatcatcaagtgagataccaacagactctatatctgacccaattgttgacccaaaagtcctaccaattccagttggtgatctaagctttgggtcaggcgcgcagctgaagaactctattggaaacgggtctagatggctgacagataatcttggcatagatcatgatgactttgaggacataggagatgttgaagacgaaagaagagttgcagctgaaacgaaatcgtttcaacttctcaatgagagatgaacaaggatgcagtcacaactgatgctatcggcagtatcagaacttgatggtgcttgtagactgttcatggtgcttgtagggatgatgtatgtctatggcttactgagctccaaccaactatggcaggagcgttagctaggacagcagtcagtctaacaattgtggacaaagttcagtctaccatacactgaagcgcacccttgttgctaaagctgcaggtgtgaacaactttgctcagcagaatggaggatcattgtcactagcagcaagacctcgagcccaggcagttaaccatcagtttctttccttctttctttgggccgagagagcaaagaaggatgatgcactttccaacctgtgtagcacgttgggacaactcaagaaatggcagtggatatggacatagaaattgacaggcaaaacaaagcgctggttcctttcagcgacgacatcactgaactgaattttagactgaaaggcgtgaatcagtgtggacaccagttgctgggcaagtgatatggagccagaattcgggcagttcggagactatcgccttgattgcagaatttaagaacattgttgttttacatgtttttttgcagtgaatcaggccacacatgttgtattagtgagagaatgatgatttattttatattattatggatttcatagattattttagttttccctgaactgcaattgtttcaataacataggaggggactaccttcaatgacatttaggtgaatttttaaggtatgtccattattccattatagagcacaaagcctacttcttacaactcactgtatgttttataattgtatcaaaagcactgaacaaacatagttagctatcacgttcactgttgtctaaatagattgaaataatgtggtgaagccgtcatggactcttaagtagcttagccactgcaaaggatacaattaattataaaacaccaatgaatcaataaaaaaa

SEQ ID NO: 547 - DNA, 2658 bp, Zea Mays
cgcatccgcgccgcaacccgcagccgccctgcaggcaaccgcccgcatccgcggcagcgccgcggctgcttccatccatggcgccgcggcttccatcaatcgccagcgcgtcctccgtactcctgtcatccgaggaaagccttccatccatggcgccgttgctgcaattccccccgcgatccacgctacctccattgcccacacgatccgcgctccctccattgctaccgcgatgccccttcccaggaacccttccatccatggcgtcgttgctgcaggtgccccgcaatcaactccattgccgccacgatccccttccaccgacgacactcaccttccatcgacaaaactgatcttcctccattccaccgacggcactcacctctcagatcccgtgctcatcaccatcgtgcccctcgctcgccgcccccacctcaccaagagccttagccgtccctagagaagacacggaggtgcagtgccagtgctttcctcaagtgcacctcggattttcggtaccggccagattgggacgaattcaacattcatcggctccaccaaaacactgccactatgatgtgtatgcttgcgtcaggacaggagacccaaaagtacttcatagatgaatgtgacattttccacaagaacgagttgtagatctaatttgattcttcctttcctcctgtggtgggatcaatcagatacgaaatggccaaggactgctgacgatgatgacgacatggccaccatcgctgccctcaggctgacattctggctctccaacacagttgtcctcagggagataattgtacaaacttttggcatctcacatcaatttactccatccatgatgaatctgagcatgaatggtggtgccaaaaaacttgatgggaaatctatgacaatgctgtggagaaacagctacaatggcatgcaagccaagtttgctgcaaggcagatgccagatgattggcaggaaacaagtacacttttggctacattagagaagattgagtcttggatattttctcgcattgttgagacaatatggtggcaggcactaactcctcacatgcaaaaacgagtagaaggatcatcaactccaaaggctggtagagtgctatgtcctactttgggtgatcagcagtagggcaccttttctgttaacctgtggaaggctgcgtttcacgacgcattcaacagaatgtgccccctcagtgctggcggacatgagtgtggctgtttaccaatattagcaaaactggtgatggagcagtgtgtagcccgtttgaatgttgccatgtttaatgccatccttcgtgaatcatcaagtgagataccaacagactctatatctgacccaattgttgacccaaaagtcctaccaattccagttggtgatctaagctttgggtcaggcgcgcagctgaagaactctattggaaacgggtctagatggctgacagataatcttggcatagatcatgatgactttgaggacataggagatgttgaagacgaaagaagagttgcagctgaaacgaaatcgtttcaacttctcaatgagctaagtgatcatctattttttagtttttcataattttcctttcatggcctccttacatgtttgatttcctatgatccatgagctgccaatcatgataacgcggtttcactatgcaggagatgaacaaggatgcagtcacaactgatgctatcggcagtatcagaacttgatggtgcttgtagactgttcatggtgcttgtagggatgatgtatgtctatggcttactgagctccaaccaactatggcaggagcgttagctaggacagcagtcagtctaacaattgtggacaaagttcagtctaccatacactgaagcgcacccttgttgctaaaggtgtgaacaactttgctcagcagaatggaggatcattgtcactagcagcaagacctcgagcccagttaaccatcagtttctttccttctttctttgggccgagagagcaaagaaggatgatgcactttccaacctgtgtagcacgttgggacaactcaagaaatggcagtggatatggacatagaaattgacaggcaaaacaaagcgctggttcctttcagcgacgacatcactgaactgaattttagactgaaaggcgtgaatcagtgtggacaccagttgctgggcaagtgatatggagccagaattcgggcagttcggagactatcgccttgattgcagaatttaagaacattgttgttttacatgtttttttgcagtgaatcaggccacacatgttgtattagtgagagaatgatgatttattttatattattatggatttcatagattattttagttttccctgaactgcaattgtttcaataacataggaggggactaccttcaatgacatttaggtgaatttttaaggtatgtccattattccattatagagcacaaagcctacttcttacaactcactgtatgttttataattgtatcaaaagcactgaacaaacatagttagctatcacgttcactgttgtctaaatagattgaaataatgtggtgaagccgtcatggactcttaagtagcttagccactgcaaaggatacaattaattataaaacaccaatgaatcaataaaaaaa

SEQ ID NO: 548 - DNA, 2603 bp, Zea Mays
cgcatccgcgccgcaacccgcagccgccctgcaggcaaccgcccgcatccgcggcagcgccgcggctgcttccatccatggcgccgcggcttccatcaatcgccagcgcgtcctccgtactcctgtcatccgaggaaagccttccatccatggcgccgttgctgcaattccccccgcgatccacgctacctccattgcccacacgatccgcgctccctccattgctaccgcgatgccccttcccaggaacccttccatccatggcgtcgttgctgcaggtgccccgcaatcaactccattgccgccacgatccccttccaccgacgacactcaccttccatcgacaaaactgatcttcctccattccaccgacggcactcacctctcagatcccgtgctcatcaccatcgtgcccctcgctcgccgcccccacctcaccaagagccttagccgtccctagagaagacacggaggtgcagtgccagtgctttcctcaagtgcacctcggattttcggtaccggccagattgggacgaattcaacattcatcggctccaccaaaacactgccactatgatgtgtatgcttgcgtcaggacaggagacccaaaagtacttcatagatgaatgtgacattttccacaagaacgagatacgaaatggccaaggactgctgacgatgatgacgacatggccaccatcgctgccctcaggctgacattctggctctccaacacagttgtcctcagggagataattgtacaaacttttggcatctcacatcaatttactccatccatgatgaatctgagcatgaatggtggtgccaaaaaacttgatgggaaatctatgacaatgctgtggagaaacagctacaatggcatgcaagccaagtttgctgcaaggcagatgccagatgattggcaggaaacaagtacacttttggctacattagagaagattgagtcttggatattttctcgcattgttgagacaatatggtggcaggcactaactcctcacatgcaaaaacgagtagaaggatcatcaactccaaaggctggtagagtgctatgtcctactttgggtgatcagcagtagggcaccttttctgttaacctgtggaaggctgcgtttcacgacgcattcaacagaatgtgccccctcagtgctggcggacatgagtgtggctgtttaccaatattagcaaaactggtgatggagcagtgtgtagcccgtttgaatgttgccatgtttaatgccatccttcgtgaatcatcaagtgagataccaacagactctatatctgacccaattgttgacccaaaagtcctaccaattccagttggtgatctaagctttgggtcaggcgcgcagctgaagaactctattggaaacgggtctagatggctgacagataatcttggcatagatcatgatgactttgaggacataggagatgttgaagacgaaagaagagttgcagctgaaacgaaatcgtttcaacttctcaatgagctaagtgatcatctattttttagtttttcataattttcctttcatggcctccttacatgtttgatttcctatgatccatgagctgccaatcatgataacgcggtttcactatgcaggagatgaacaaggatgcagtcacaactgatgctatcggcagtatcagaacttgatggtgcttgtagactgttcatggtgcttgtagggatgatgtatgtctatggcttactgagctccaaccaactatggcaggagcgttagctaggacagcagtcagtctaacaattgtggacaaagttcagtctaccatacactgaagcgcacccttgttgctaaagctgcaggtgtgaacaactttgctcagcagaatggaggatcattgtcactagcagcaagacctcgagcccagtttctttccttctttctttgggccgagagagcaaagaaggatgatgcactttccaacctgtgtagcacgttgggacaactcaagaaatggcagtggatatggacatagaaattgacaggcaaaacaaagcgctggttcctttcagcgacgacatcactgaactgaattttagactgaaaggcgtgaatcagtgtggacaccagttgctgggcaagtgatatggagccagaattcgggcagttcggagactatcgccttgattgcagaatttaagaacattgttgttttacatgtttttttgcagtgaatcaggccacacatgttgtattagtgagagaatgatgatttattttatattattatggatttcatagattattttagttttccctgaactgcaattgtttcaataacataggaggggactaccttcaatgacatttaggtgaatttttaaggtatgtccattattccattatagagcacaaagcctacttcttacaactcactgtatgttttataattgtatcaaaagcactgaacaaacatagttagctatcacgttcactgttgtctaaatagattgaaataatgtggtgaagccgtcatggactcttaagtagcttagccactgcaaaggatacaattaattataaaacaccaatgaatcaataaaaaaa

SEQ ID NO: 549 - DNA, 2635 bp, Zea Mays
cgcatccgcgccgcaacccgcagccgccctgcaggcaaccgcccgcatccgcggcagcgccgcggctgcttccatccatggcgccgcggcttccatcaatcgccagcgcgtcctccgtactcctgtcatccgaggaaagccttccatccatggcgccgttgctgcaattccccccgcgatccacgctacctccattgcccacacgatccgcgctccctccattgctaccgcgatgccccttcccaggaacccttccatccatggcgtcgttgctgcaggtgccccgcaatcaactccattgccgccacgatccccttccaccgacgacactcaccttccatcgacaaaactgatcttcctccattccaccgacggcactcacctctcagatcccgtgctcatcaccatcgtgcccctcgctcgccgcccccacctcaccaagagccttagccgtccctagagaagacacggaggtgcagtgccagtgctttcctcaagtgcacctcggattttcggtaccggccagattgggacgaattcaacattcatcggctccaccaaaacactgccactatgatgtgtatgcttgcgtcaggacaggagacccaaaagtacttcatagatgaatgtgacattttccacaagaacgagatacgaaatggccaaggactgctgacgatgatgacgacatggccaccatcgctgccctcaggctgacattctggctctccaacacagttgtcctcagggagataattgtacaaacttttggcatctcacatcaatttactccatccatgatgaatctgagcatgaatggtggtgccaaaaaacttgatgggaaatctatgacaatgctgtggagaaacagctacaatggcatgcaagccaagtttgctgcaaggcagatgccagatgattggcaggaaacaagtacacttttggctacattagagaagattgagtcttggatattttctcgcattgttgagacaatatggtggcaggtaaatgtctgtcttaggcactaactcctcacatgcaaaaacgagtagaaggatcatcaactccaaaggctggtagagtgctatgtcctactttgggtgatcagcagtagggcaccttttctgttaacctgtggaaggctgcgtttcacgacgcattcaacagaatgtgccccctcagtgctggcggacatgagtgtggctgtttaccaatattagcaaaactggtgatggagcagtgtgtagcccgtttgaatgttgccatgtttaatgccatccttcgtgaatcatcaagtgagataccaacagactctatatctgacccaattgttgacccaaaagtcctaccaattccagttggtgatctaagctttgggtcaggcgcgcagctgaagaactctattggaaacgggtctagatggctgacagataatcttggcatagatcatgatgactttgaggacataggagatgttgaagacgaaagaagagttgcagctgaaacgaaatcgtttcaacttctcaatgagctaagtgatcatctattttttagtttttcataattttcctttcatggcctccttacatgtttgatttcctatgatccatgagctgccaatcatgataacgcggtttcactatgcaggagatgaacaaggatgcagtcacaactgatgctatcggcagtatcagaacttgatggtgcttgtagactgttcatggtgcttgtagggatgatgtatgtctatggcttactgagctccaaccaactatggcaggagcgttagctaggacagcagtcagtctaacaattgtggacaaagttcagtctaccatacactgaagcgcacccttgttgctaaagctgcaggtgtgaacaactttgctcagcagaatggaggatcattgtcactagcagcaagacctcgagcccaggcagttaaccatcagtttctttccttctttctttgggccgagagagcaaagaaggatgatgcactttccaacctgtgtagcacgttgggacaactcaagaaatggcagtggatatggacatagaaattgacaggcaaaacaaagcgctggttcctttcagcgacgacatcactgaactgaattttagactgaaaggcgtgaatcagtgtggacaccagttgctgggcaagtgatatggagccagaattcgggcagttcggagactatcgccttgattgcagaatttaagaacattgttgttttacatgtttttttgcagtgaatcaggccacacatgttgtattagtgagagaatgatgatttattttatattattatggatttcatagattattttagttttccctgaactgcaattgtttcaataacataggaggggactaccttcaatgacatttaggtgaatttttaaggtatgtccattattccattatagagcacaaagcctacttcttacaactcactgtatgttttataattgtatcaaaagcactgaacaaacatagttagctatcacgttcactgttgtctaaatagattgaaataatgtggtgaagccgtcatggactcttaagtagcttagccactgcaaaggatacaattaattataaaacaccaatgaatcaataaaaaaa

SEQ ID NO: 550 - DNA, 2577 bp, Zea Mays
cgcatccgcgccgcaacccgcagccgccctgcaggcaaccgcccgcatccgcggcagcgccgcggctgcttccatccatggcgccgcggcttccatcaatcgccagcgcgtcctccgtactcctgtcatccgaggaaagccttccatccatggcgccgttgctgcaattccccccgcgatccacgctacctccattgcccacacgatccgcgctccctccattgctaccgcgatgccccttcccaggaacccttccatccatggcgtcgttgctgcaggtgccccgcaatcaactccattgccgccacgatccccttccaccgacgacactcaccttccatcgacaaaactgatcttcctccattccaccgacggcactcacctctcagatcccgtgctcatcaccatcgtgcccctcgctcgccgcccccacctcaccaagagccttagccgtccctagagaagacacggaggtgcagtgccagtgctttcctcaagtgcacctcggattttcggtaccggccagattgggacgaattcaacattcatcggctccaccaaaacactgccactatgatgtgtatgcttgcgtcaggacaggagacccaaaagtacttcatagatgaatgtgacattttccacaagaacgagatacgaaatggccaaggactgctgacgatgatgacgacatggccaccatcgctgccctcagttgtcctcagggagataattgtacaaacttttggcatctcacatcaatttactccatccatgatgaatctgagcatgaatggtggtgccaaaaaacttgatgggaaatctatgacaatgctgtggagaaacagctacaatggcatgcaagccaagtttgctgcaaggcagatgccagatgattggcaggaaacaagtacacttttggctacattagagaagattgagtcttggatattttctcgcattgttgagacaatatggtggcaggcactaactcctcacatgcaaaaacgagtagaaggatcatcaactccaaaggctggtagagtgctatgtcctactttgggtgatcagcagtagggcaccttttctgttaacctgtggaaggctgcgtttcacgacgcattcaacagaatgtgccccctcagtgctggcggacatgagtgtggctgtttaccaatattagcaaaactggtgatggagcagtgtgtagcccgtttgaatgttgccatgtttaatgccatccttcgtgaatcatcaagtgagataccaacagactctatatctgacccaattgttgacccaaaagtcctaccaattccagttggtgatctaagctttgggtcaggcgcgcagctgaagaactctattggaaacgggtctagatggctgacagataatcttggcatagatcatgatgactttgaggacataggagatgttgaagacgaaagaagagttgcagctgaaacgaaatcgtttcaacttctcaatgagctaagtgatcatctattttttagtttttcataattttcctttcatggcctccttacatgtttgatttcctatgatccatgagctgccaatcatgataacgcggtttcactatgcaggagatgaacaaggatgcagtcacaactgatgctatcggcagtatcagaacttgatggtgcttgtagactgttcatggtgcttgtagggatgatgtatgtctatggcttactgagctccaaccaactatggcaggagcgttagctaggacagcagtcagtctaacaattgtggacaaagttcagtctaccatacactgaagcgcacccttgttgctaaagctgcaggtgtgaacaactttgctcagcagaatggaggatcattgtcactagcagcaagacctcgagcccagtttctttccttctttctttgggccgagagagcaaagaaggatgatgcactttccaacctgtgtagcacgttgggacaactcaagaaatggcagtggatatggacatagaaattgacaggcaaaacaaagcgctggttcctttcagcgacgacatcactgaactgaattttagactgaaaggcgtgaatcagtgtggacaccagttgctgggcaagtgatatggagccagaattcgggcagttcggagactatcgccttgattgcagaatttaagaacattgttgttttacatgtttttttgcagtgaatcaggccacacatgttgtattagtgagagaatgatgatttattttatattattatggatttcatagattattttagttttccctgaactgcaattgtttcaataacataggaggggactaccttcaatgacatttaggtgaatttttaaggtatgtccattattccattatagagcacaaagcctacttcttacaactcactgtatgttttataattgtatcaaaagcactgaacaaacatagttagctatcacgttcactgttgtctaaatagattgaaataatgtggtgaagccgtcatggactcttaagtagcttagccactgcaaaggatacaattaattataaaacaccaatgaatcaataaaaaaa

SEQ ID NO: 551 - DNA, 2588 bp, Zea Mays
cgcatccgcgccgcaacccgcagccgccctgcaggcaaccgcccgcatccgcggcagcgccgcggctgcttccatccatggcgccgcggcttccatcaatcgccagcgcgtcctccgtactcctgtcatccgaggaaagccttccatccatggcgccgttgctgcaattccccccgcgatccacgctacctccattgcccacacgatccgcgctccctccattgctaccgcgatgccccttcccaggaacccttccatccatggcgtcgttgctgcaggtgccccgcaatcaactccattgccgccacgatccccttccaccgacgacactcaccttccatcgacaaaactgatcttcctccattccaccgacggcactcacctctcagatcccgtgctcatcaccatcgtgcccctcgctcgccgcccccacctcaccaagagccttagccgtccctagagaagacacggaggtgcagtgccagtgctttcctcaagtgcacctcggattttcggtaccggccagattgggacgaattcaacattcatcggctccaccaaaacactgccactatgatgtgtatgcttgcgtcaggacaggagacccaaaagtacttcatagatgaatgtgacattttccacaagaacgagatacgaaatggccaaggactgctgacgatgatgacgacatggccaccatcgctgccctcagttgtcctcagggagataattgtacaaacttttggcatctcacatcaatttactccatccatgatgaatctgagcatgaatggtggtgccaaaaaacttgatgggaaatctatgacaatgctgtggagaaacagctacaatggcatgcaagccaagtttgctgcaaggcagatgccagatgattggcaggaaacaagtacacttttggctacattagagaagattgagtcttggatattttctcgcattgttgagacaatatggtggcaggcactaactcctcacatgcaaaaacgagtagaaggatcatcaactccaaaggctggtagagtgctatgtcctactttgggtgatcagcagtagggcaccttttctgttaacctgtggaaggctgcgtttcacgacgcattcaacagaatgtgccccctcagtgctggcggacatgagtgtggctgtttaccaatattagcaaaactggtgatggagcagtgtgtagcccgtttgaatgttgccatgtttaatgccatccttcgtgaatcatcaagtgagataccaacagactctatatctgacccaattgttgacccaaaagtcctaccaattccagttggtgatctaagctttgggtcaggcgcgcagctgaagaactctattggaaacgggtctagatggctgacagataatcttggcatagatcatgatgactttgaggacataggagatgttgaagacgaaagaagagttgcagctgaaacgaaatcgtttcaacttctcaatgagctaagtgatcatctattttttagtttttcataattttcctttcatggcctccttacatgtttgatttcctatgatccatgagctgccaatcatgataacgcggtttcactatgcaggagatgaacaaggatgcagtcacaactgatgctatcggcagtatcagaacttgatggtgcttgtagactgttcatggtgcttgtagggatgatgtatgtctatggcttactgagctccaaccaactatggcaggagcgttagctaggacagcagtcagtctaacaattgtggacaaagttcagtctaccatacactgaagcgcacccttgttgctaaagctgcaggtgtgaacaactttgctcagcagaatggaggatcattgtcactagcagcaagacctcgagcccagttaaccatcagtttctttccttctttctttgggccgagagagcaaagaaggatgatgcactttccaacctgtgtagcacgttgggacaactcaagaaatggcagtggatatggacatagaaattgacaggcaaaacaaagcgctggttcctttcagcgacgacatcactgaactgaattttagactgaaaggcgtgaatcagtgtggacaccagttgctgggcaagtgatatggagccagaattcgggcagttcggagactatcgccttgattgcagaatttaagaacattgttgttttacatgtttttttgcagtgaatcaggccacacatgttgtattagtgagagaatgatgatttattttatattattatggatttcatagattattttagttttccctgaactgcaattgtttcaataacataggaggggactaccttcaatgacatttaggtgaatttttaaggtatgtccattattccattatagagcacaaagcctacttcttacaactcactgtatgttttataattgtatcaaaagcactgaacaaacatagttagctatcacgttcactgttgtctaaatagattgaaataatgtggtgaagccgtcatggactcttaagtagcttagccactgcaaaggatacaattaattataaaacaccaatgaatcaataaaaaaa

SEQ ID NO: 552 - DNA, 2593 bp, Zea Mays
cgcatccgcgccgcaacccgcagccgccctgcaggcaaccgcccgcatccgcggcagcgccgcggctgcttccatccatggcgccgcggcttccatcaatcgccagcgcgtcctccgtactcctgtcatccgaggaaagccttccatccatggcgccgttgctgcaattccccccgcgatccacgctacctccattgcccacacgatccgcgctccctccattgctaccgcgatgccccttcccaggaacccttccatccatggcgtcgttgctgcaggtgccccgcaatcaactccattgccgccacgatccccttccaccgacgacactcaccttccatcgacaaaactgatcttcctccattccaccgacggcactcacctctcagatcccgtgctcatcaccatcgtgcccctcgctcgccgcccccacctcaccaagagccttagccgtccctagagaagacacggaggtgcagtgccagtgctttcctcaagtgcacctcggattttcggtaccggccagattgggacgaattcaacattcatcggctccaccaaaagacaggagacccaaaagtacttcatagatgaatgtgacattttccacaagaacgagatacgaaatggccaaggactgctgacgatgatgacgacatggccaccatcgctgccctcaggctgacattctggctctccaacacagttgtcctcagggagataattgtacaaacttttggcatctcacatcaatttactccatccatgatgaatctgagcatgaatggtggtgccaaaaaacttgatgggaaatctatgacaatgctgtggagaaacagctacaatggcatgcaagccaagtttgctgcaaggcagatgccagatgattggcaggaaacaagtacacttttggctacattagagaagattgagtcttggatattttctcgcattgttgagacaatatggtggcaggtaaatgtctgtcttaggcactaactcctcacatgcaaaaacgagtagaaggatcatcaactccaaaggctggtagagtgctatgtcctactttgggtgatcagcagtagggcaccttttctgttaacctgtggaaggctgcgtttcacgacgcattcaacagaatgtgccccctcagtgctggcggacatgagtgtggctgtttaccaatattagcaaaactggtgatggagcagtgtgtagcccgtttgaatgttgccatgtttaatgccatccttcgtgaatcatcaagtgagataccaacagactctatatctgacccaattgttgacccaaaagtcctaccaattccagttggtgatctaagctttgggtcaggcgcgcagctgaagaactctattggaaacgggtctagatggctgacagataatcttggcatagatcatgatgactttgaggacataggagatgttgaagacgaaagaagagttgcagctgaaacgaaatcgtttcaacttctcaatgagctaagtgatcatctattttttagtttttcataattttcctttcatggcctccttacatgtttgatttcctatgatccatgagctgccaatcatgataacgcggtttcactatgcaggagatgaacaaggatgcagtcacaactgatgctatcggcagtatcagaacttgatggtgcttgtagactgttcatggtgcttgtagggatgatgtatgtctatggcttactgagctccaaccaactatggcaggagcgttagctaggacagcagtcagtctaacaattgtggacaaagttcagtctaccatacactgaagcgcacccttgttgctaaaggtgtgaacaactttgctcagcagaatggaggatcattgtcactagcagcaagacctcgagcccagttaaccatcagtttctttccttctttctttgggccgagagagcaaagaaggatgatgcactttccaacctgtgtagcacgttgggacaactcaagaaatggcagtggatatggacatagaaattgacaggcaaaacaaagcgctggttcctttcagcgacgacatcactgaactgaattttagactgaaaggcgtgaatcagtgtggacaccagttgctgggcaagtgatatggagccagaattcgggcagttcggagactatcgccttgattgcagaatttaagaacattgttgttttacatgtttttttgcagtgaatcaggccacacatgttgtattagtgagagaatgatgatttattttatattattatggatttcatagattattttagttttccctgaactgcaattgtttcaataacataggaggggactaccttcaatgacatttaggtgaatttttaaggtatgtccattattccattatagagcacaaagcctacttcttacaactcactgtatgttttataattgtatcaaaagcactgaacaaacatagttagctatcacgttcactgttgtctaaatagattgaaataatgtggtgaagccgtcatggactcttaagtagcttagccactgcaaaggatacaattaattataaaacaccaatgaatcaataaaaaaa

SEQ ID NO: 553 - DNA, 8750 bp, Zea Mays
cgcatccgcgccgcaacccgcagccgccctgcaggcaaccgcccgcatccgcggcagcgccgcggctgcttccatccatggcgccgcggcttccatcaatcgccagcgcgtcctccgtactcctgtcatccgaggaaagccttccatccatggcgccgttgctgcaattccccccgcgatccacgctacctccattgcccacacgatccgcgctccctccattgctaccgcgatgccccttcccaggaacccttccatccatggcgtcgttgctgcaggtgccccgcaatcaactccattgccgccacgatccccttccaccgacgacactcaccttccatcgacaaaactgatcttcctccattccaccgacggcactcacctctcagatcccgtgctcatcaccatcgtgcccctcgctcgccgcccccacctcaccaagagccttagccgtccctagagaagacacggaggtgcagtgccagtgctttcctcaagtgcacctcggattttcggtaccggccagattgggacgaattcaacattcatcggctccaccaaaacactgccactatgatgtgtatgcttgcgtcaggacaggagacccaaaagtacttcatagatgaatgtgacattttccacaagaacgagatacgaaatggccaaggactgctgacgatgatgacgacatggccaccatcgctgccctcaggctgacattctggctctccaacacagttgtcctcagggagataattgtacaaacttttggcatctcacatcaatttactccatccatgatgaatctgagcatgaatggtggtgccaaaaaacttgatgggaaatctatgacaatgctgtggagaaacagctacaatggcatgcaagccaagtttgctgcaaggcagatgccagatgattggcaggaaacaagtacacttttggctacattagagaagattgagtcttggatattttctcgcattgttgagacaatatggtggcaggcactaactcctcacatgcaaaaacgagtagaaggatcatcaactccaaaggctggtagagtgctatgtcctactttgggtgatcagcagtagggcaccttttctgttaacctgtggaaggctgcgtttcacgacgcattcaacagaatgtgccccctcagtgctggcggacatgagtgtggctgtttaccaatattagcaaaactggtgatggagcagtgtgtagcccgtttgaatgttgccatgtttaatgccatccttcgtgaatcatcaagtgagataccaacagactctatatctgacccaattgttgacccaaaagtcctaccaattccagttggtgatctaagctttgggtcaggcgcgcagctgaagaactctattggaaacgggtctagatggctgacagataatcttggcatagatcatgatgactttgaggacataggagatgttgaagacgaaagaagagttgcagctgaaacgaaatcgtttcaacttctcaatgagctaagtgatcatctattttttagtttttcataattttcctttcatggcctccttacatgtttgatttcctatgatccatgagctgccaatcatgataacgcggtttcactatgcaggagatgaacaaggatgcagtcacaactgatgctatcggcagtatcagaacttgatggtgcttgtagactgttcatggtgcttgtagggatgatgtatgtctatggcttactgagctccaaccaactatggcaggagcgttagctaggacagcagtcagtctaacaattgtggacaaagttcagtctaccatacactgaagcgcacccttgttgctaaagctgcaggtgtgaacaactttgctcagcagaatggaggatcattgtcactagcagcaagacctcgagcccagttaaccatcagtttctttccttctttctttgggccgagagagcaaagaaggatgatgcactttccaacctgtgtagcacgttgggacaactcaagaaatggcagtggatatggacatagaaattgacaggcaaaacaaagcgctggttcctttcagcgacgacatcactgaactgaattttagactgaaaggcgtgaatcagtgtggacaccagttgctgggcaagtgatatggagccagaattcgggcagttcggagactatcgccttgattgcagaatttaagaacattgttgttttacatgtttttttgcagtgaatcaggccacacatgttgtattagtgagagaatgatgatttattttatattattatggatttcatagattattttagttttccctgaactgcaattgtttcaataacataggaggggactaccttcaatgacatttaggtgaatttttaaggttgctgaacaaggtcacaaaggatgggattgagaccactcgaggttccgagctcccgcaatcaccagtgaggactggggattcgctgatcagatgcggtgtgtggggccttgctcagcggcggggctgggaggtccgagcggaatagatgtcgatggcatggcggttgctccgcacaatccatttccggcatctgagcccaggtgtcaggcgagcatccaagattgtagaccaaggctttaccaataatgccccagagctgagtaccaacaaagggagtttgctgaggtgtagcagcatccgcttcggggagaagcggaactcaatttttgcttgcgctccagacaatttggagcagaaatctggacaaacgttcgaagctgatgcccattctgcgctaaaattgtgctctggtatcgggagtgtagttatagccaagtgttctcacatatttgagagaaatggggacacctttgatgggaactgcagtttgcaagatatcctcaagcctggtttatggctctcaccggagaccctccgccggttttggcgtgtctctgagctgaagcctaaggattttcttgacattttgaatggttttggactcagtgccgtaaaagtgagaaatgcaagatttctatggaatttgtacaggtggacatcgcggcagagcaaagagttccaacatctgccaaggtcaaatgagacaatggtatccatacttgcagatgctcatatgctcagtcaagcagaatcactactgctttcattgattgatcatatgactccagctgtttctagtgaactattcagtcagattatccaggtgtattcagaagcaggcaaccttgggaaatcagttgcactttatgattatgcaaggggcaagcatttgattccttcagcttcatgctatcaagtacttcttcattttctaaccagaaacagaaaggatgaattgattttgagagtatatctggacatgcttgaagttggatttggttcttgcaccgaaggaaatattcttgattctgttgtcatggctttaatcaggaaaggtaaacttttggaagctcttggtattcttcggcaattaaagagtttgggtcttaaattaagcaagggagccttgtcaaatatagttgaagaatttaacaagaaaaaggatattggggatctgatgaatttcttggaagattggaggtgtatacctgagttgcgtctttgcaacagaatccttgcgtctttgtgcacaaatcttggtacttgtcaggcatggttggtcttccaaagtttggaggccttagggtttgctccagatgctacgacttttggaattttcatttttcacagctgtagagaaatgaaactaaaatctgcacttgtatatttatcagagtgctttgctaggcatgttaaacctggagtgtgtgcctataatgctattttaggtggtgttttcagggaggggctatatagacatgcaaagtatatatttgaagacatgattgaaagagaagtaacacccaatctttcaacatataagataattcttgcagggtattgcaggtataggcggtttgatgatattgaacaagtcttgaggcacatgaaaaccaatggtgtaaatgttcttctctctggaaactgtgtgctctccaaggccttatcattcttggggctagatcacctaggggtgaaaatcaagagagataatgtcactggtttcccaaaagctgagttttttgattcagttggcaatggattgtatttggacactgattccaaaatgtttgaggtttcattgtcacaagttttggatagcgcacttctcccagatattaactcagagctaatcagggcatctcagcaaggcgatgttgcaagtgctcttcttgtgaaagacaaagcttttcaatggggatatgacatttcaccagatagctgctctgagctattcaaggccttatgtgtgagccctgcttatgttatagatgtcattgaccttatggaggagatgccagatatactttacaaacttgatgctcaaaatctagatttggttgcccaaacattgagtaggaatggaatgtctgctcatgcaaaactggttttagaaaaaatgttgagagaagacttgtcaatcagtcacaatacatatacttatttaatgataggtttatgcgaagaaaggaacatagcagggttttgggaatgttggaatcttgcaacaaagtgcagatggtcacctgatagcaaggatatgatgggcctcatcagttacttgtgcaaatggggagtgattgaggaagccctgaaacttatgaactctttatttgactgctaccatgatctgttttttagtgcatattgtgcacttctcaaagagttgtgcaggacaggtcataccagcattggatgcgcaatgttggaggctctcaaagaaaagggtgtggctgtggatcgatcattattcttttatgtgatggagggcttcctaaaggagcaaagaactgctgaatcaattggaatgcatgacatgtggcttagcaaaagcaaagaacttgatgtttttacttaccgatctgtgttgccttcattaccatggctggacacagatcgagccaagaacttggtagaatctatgctgaccgtgaaacttactgaattctcatatcgcggttgcattgtgaatgaattaatgcaaacaaggaatataaaatgggccattccagtcttgcaagaatcagctcctgggaagctcagtgccactttgttaaattccttacttcaagcctatggttggctaaaaaattggagaaagttagatgcagttctttgcaagatgctaaagatgcatgccaccctttctatatctagctaccgctttcttgtgtgcagaatgtgtgagcaaagtcgtttttctagcgcttcaagccttagagcacttttccaacatactgacaagtcaagagaactgattgcatgcaacattctaatattttatctttttcaaagaagaaacagctcacagattcatgatttattgaaggacattgaaggtaatggtatttctcttgacaaaaccacatatgatttccttgtctatggatttcacaaatctggggatatcaatgattcagttaatgcgcttgatgcctgcattgctcagggaataaaaccaagcaaccgcagtctcagaatagtgttaagtcattactgcaggctaggaaaccatgagaaatcactagcattatttcacttgattgagcgcaatggatggaagcatggtttaatcattaagaccaccctagcttcatgtctcctttcatttgggagacaattggaagcaaaatcatgtctgaacaacctgagcaaaggtgagtttatcggatgttcaagcaattttgatgatctcatcaaggaattctgcattctaggagatttgaaaatgactctttatctgctaaatacaatgttaaagaaaggcacactgcctaatgaagccagttacagttctgttatatataaactttgtacattgaaggagttcgatcaggcacttgattttcttgctgaaatgcagctggcaagtctaaaatcaagtgaaatctcctgtgatgcacttgtacatggcctttgtgccatgggaagaccttctgatgctagaaaggttttggaaatgctaaccaccttgggatctgcaccatcctatggcatgtttagagttgtttttgataactattgcagaagtagcaatctacagaaagctgcggcacttctgcatgacatgcaacaagcaggacaagtgcccaactttgagatgcattggtctgttataagcaatttaagcagtaccaatgagaaaactgaaggacatggagagtgcattttgccaaacctttttctttctgcaaattccccttaaaggtcataaggcgatatatggcttccagaaaatggtgaactgatgattgttctcaagttgaaccctagtggaactgataaaactcgtgaaaccaaggttatgcaactctggaactcaaacgttctactcgaggattgatggttcacataaatgtgggaacacgtaggaaaaactatgcatcttcgatttaggttgcaaaagagggagcttgaactcattacctgagccatcacaactttcttctctgcaacttggttacaggttatgcccttgctaaagggataatgcaaagatccctacaacaccaattagaattggggaagacgaacctcctcctcagtctcctagcttgttcgttgctctcacctgggatctgccctgggatcacctttgcaacatcagttgaactaaagatttggactggacatggttcagttgtttttgaacgagtacgcaaatgccaggtttttcctgtttgggcacaaatggaaacaaaaaagttggactcagcctatcgtgaagctacgaaggaagagcactgtcccattattctgttttttcgaccatgtttctagcatgaacatgccaacatggtgccatcaacaacttccctgttagctcacggtacaccatgctccagtctgcccccctggttatcactaattcaatcatctgtggtgccgattgtgttcccaagatgcactgaaatagagcagatcaaatgaggatgaagttactgtgtagagatttttgttcaccctttgtagcagcatccatggatttttatttgcacagaattactctcttttacccgtaacttgtgattgctgatatgatgcatagaagtctgaaatctgaattgatgccactgtattttttccatgtttacattatgttgattttctttctgctatttactttcaatgttttggagcagtacctgagcaactgaggcaaccctttcgatcttatgagaccaagatgttttctggtcccaaacccatgatggtatgccttagtttgcttgcagacaaatgcttttttttgacaacttcactcatcccttgttttgaatagatgacataattggagactctggccatttatctgtgttgtttccattaatgtgtcttctcataggtactctgttatggtcgctagatcggtgagggattggagagggatattgatgggcaggaacgtcggtcgggggcctctgcccacggccgagcaagaggagggtttctctcttctaattcttacctactttatttctcatccattgattacataaatagaccagctggctgtccttatctagctagagatccttatctcctaaaaactctcctaaaactactaactgataaccttcctagataatctcaaccaatctcctaaataatcttaactaatcttctaatattactagctgaatgcccgtgcgttgcaacgggaatatataataccagtatactacgataacttatatacaaaatatgtgttataccattatgagaaaatgtttcataatcaatttgtgattctggccatacataaattttgttatttataatctatctgtttcaccactgcattacaaccatcagtatcatgcagacttcgatatatgtcacgatttgtatggtctcattattggagagcatgtttcacacataccagaagaaattccctcgtacatcgttagtcatcggacacgtaccaccatacgcttttgcttaaacaaaaaggtaagtgtgtgtttgcaagactaatggtcaaacaccgtataaccataaagttagaatactatattaatatattaaataaattaatccaatagacatagattaacccaattaacacaggataaataaatatctaattataaaagtatgaaacatggtataatcaatgttgttactgcgtagtaaatattcatacgagactaacacaactggaacggttcaatttagaattaaaatggggaagttacgaatttccaaagtttctatgtatttgatataggattaattaggaaatcaattttattgttgttttcatgacaaaacagaggtattatgtgataaaaaataatattatagaattatagaaattggaatgaattcatttagatttaatatgaaatttccatgaattaaatgggcttttgcaattatttttaaactaaaaatcaatttccaaactcttttccctattttctttatttcctggactgcgtcccaaattccagaaacatcaggggccaagctataaatgtttttctagactcagtgagcatacagagtggacggcgggttaaacacaaataaagccaacatgggtcatgttggctagagggtggaaggctagacattctactcaatagatccaaggtttaatccttgagcaaccacggtttaatttttt

SEQ ID NO: 554 - DNA, 2157 bp, Zea Mays
agagatcagcagagccagttctttactgttgcaagcatataaacaagaataggctgcatttttttggaaaatactgctccttgcagctcatgagcagtaaagcaatgcatgttctttcaagaaacctatttctattctttgcaaaaaaagacaggagacccaaaagtacttcatagatgaatgtgacattttccacaagaacgagatacgaaatggccaaggactgctgacgatgatgacgacatggccaccatcgctgccctcagttgtcctcagggagataattgtacaaacttttggcatctcacatcaatttactccatccatgatgaatctgagcatgaatggtggtgccaaaaaacttgatgggaaatctatgacaatgctgtggagaaacagctacaatggcatgcaagccaagtttgctgcaaggcagatgccagatgattggcaggaaacaagtacacttttggctacattagagaagattgagtcttggatattttctcgcattgttgagacaatatggtggcaggtaaatgtctgtcttaggcactaactcctcacatgcaaaaacgagtagaaggatcatcaactccaaaggctggtagagtgctatgtcctactttgggtgatcagcagtagggcaccttttctgttaacctgtggaaggctgcgtttcacgacgcattcaacagaatgtgccccctcagtgctggcggacatgagtgtggctgtttaccaatattagcaaaactggtgatggagcagtgtgtagcccgtttgaatgttgccatgtttaatgccatccttcgtgaatcatcaagtgagataccaacagactctatatctgacccaattgttgacccaaaagtcctaccaattccagttggtgatctaagctttgggtcaggcgcgcagctgaagaactctattggaaacgggtctagatggctgacagataatcttggcatagatcatgatgactttgaggacataggagatgttgaagacgaaagaagagttgcagctgaaacgaaatcgtttcaacttctcaatgagctaagtgatcatctattttttagtttttcataattttcctttcatggcctccttacatgtttgatttcctatgatccatgagctgccaatcatgataacgcggtttcactatgcaggagatgaacaaggatgcagtcacaactgatgctatcggcagtatcagaacttgatggtgcttgtagactgttcatggtgcttgtagggatgatgtatgtctatggcttactgagctccaaccaactatggcaggagcgttagctaggacagcagtcagtctaacaattgtggacaaagttcagtctaccatacactgaagcgcacccttgttgctaaaggtgtgaacaactttgctcagcagaatggaggatcattgtcactagcagcaagacctcgagcccaggcagttaaccatcagtttctttccttctttctttgggccgagagagcaaagaaggatgatgcactttccaacctgtgtagcacgttgggacaactcaagaaatggcagtggatatggacatagaaattgacaggcaaaacaaagcgctggttcctttcagcgacgacatcactgaactgaattttagactgaaaggcgtgaatcagtgtggacaccagttgctgggcaagtgatatggagccagaattcgggcagttcggagactatcgccttgattgcagaatttaagaacattgttgttttacatgtttttttgcagtgaatcaggccacacatgttgtattagtgagagaatgatgatttattttatattattatggatttcatagattattttagttttccctgaactgcaattgtttcaataacataggaggggactaccttcaatgacatttaggtgaatttttaaggtatgtccattattccattatagagcacaaagcctacttcttacaactcactgtatgttttataattgtatcaaaagcactgaacaaacatagttagctatcacgttcactgttgtctaaatagattgaaataatgtggtgaagccgtcatggactcttaagtagcttagccactgcaaaggatacaattaattataaaacaccaatgaatcaataaaaaaa

SEQ ID NO: 555 - DNA, 1875 bp, Zea Mays
gttgtcctcagggagataattgtacaaacttttggcatctcacatcaatttactccatccatgatgaatctgagcatgaatggtggtgccaaaaaacttgatgggaaatctatgacaatgctgtggagaaacagctacaatggcatgcaagccaagtttgctgcaaggcagatgccagatgattggcaggaaacaagtacacttttggctacattagagaagattgagtcttggatattttctcgcattgttgagacaatatggtggcaggcactaactcctcacatgcaaaaacgagtagaaggatcatcaactccaaaggctggtagagtgctatgtcctactttgggtgatcagcagtagggcaccttttctgttaacctgtggaaggctgcgtttcacgacgcattcaacagaatgtgccccctcagtgctggcggacatgagtgtggctgtttaccaatattagcaaaactggtgatggagcagtgtgtagcccgtttgaatgttgccatgtttaatgccatccttcgtgaatcatcaagtgagataccaacagactctatatctgacccaattgttgacccaaaagtcctaccaattccagttggtgatctaagctttgggtcaggcgcgcagctgaagaactctattggaaacgggtctagatggctgacagataatcttggcatagatcatgatgactttgaggacataggagatgttgaagacgaaagaagagttgcagctgaaacgaaatcgtttcaacttctcaatgagctaagtgatcatctattttttagtttttcataattttcctttcatggcctccttacatgtttgatttcctatgatccatgagctgccaatcatgataacgcggtttcactatgcaggagatgaacaaggatgcagtcacaactgatgctatcggcagtatcagaacttgatggtgcttgtagactgttcatggtgcttgtagggatgatgtatgtctatggcttactgagctccaaccaactatggcaggagcgttagctaggacagcagtcagtctaacaattgtggacaaagttcagtctaccatacactgaagcgcacccttgttgctaaaggtgtgaacaactttgctcagcagaatggaggatcattgtcactagcagcaagacctcgagcccaggcagttaaccatcagtttctttccttctttctttgggccgagagagcaaagaaggatgatgcactttccaacctgtgtagcacgttgggacaactcaagaaatggcagtggatatggacatagaaattgacaggcaaaacaaagcgctggttcctttcagcgacgacatcactgaactgaattttagactgaaaggcgtgaatcagtgtggacaccagttgctgggcaagtgatatggagccagaattcgggcagttcggagactatcgccttgattgcagaatttaagaacattgttgttttacatgtttttttgcagtgaatcaggccacacatgttgtattagtgagagaatgatgatttattttatattattatggatttcatagattattttagttttccctgaactgcaattgtttcaataacataggaggggactaccttcaatgacatttaggtgaatttttaaggtatgtccattattccattatagagcacaaagcctacttcttacaactcactgtatgttttataattgtatcaaaagcactgaacaaacatagttagctatcacgttcactgttgtctaaatagattgaaataatgtggtgaagccgtcatggactcttaagtagcttagccactgcaaaggatacaattaattataaaacaccaatgaatcaataaaaaaa

SEQ ID NO: 556 - DNA, 2078 bp, Zea Mays
gcacgacattcttgtattagggctacttagcttgtattatgagcacttttggctgtcctgggtaacttctgcggacctggtagttgtttctccacatggttctactgtcctgggtagcaaaaaacattgcttctggtcttgttcttgttgtaaagtccagtagcaatgatgcttcgaggctgacattctggctctccaacacagttgtcctcagggagataattgtacaaacttttggcatctcacatcaatttactccatccatgatgaatctgagcatgaatggtggtgccaaaaaacttgatgggaaatctatgacaatgctgtggagaaacagctacaatggcatgcaagccaagtttgctgcaaggcagatgccagatgattggcaggaaacaagtacacttttggctacattagagaagattgagtcttggatattttctcgcattgttgagacaatatggtggcaggcactaactcctcacatgcaaaaacgagtagaaggatcatcaactccaaaggctggtagagtgctatgtcctactttgggtgatcagcagtagggcaccttttctgttaacctgtggaaggctgcgtttcacgacgcattcaacagaatgtgccccctcagtgctggcggacatgagtgtggctgtttaccaatattagcaaaactggtgatggagcagtgtgtagcccgtttgaatgttgccatgtttaatgccatccttcgtgaatcatcaagtgagataccaacagactctatatctgacccaattgttgacccaaaagtcctaccaattccagttggtgatctaagctttgggtcaggcgcgcagctgaagaactctattggaaacgggtctagatggctgacagataatcttggcatagatcatgatgactttgaggacataggagatgttgaagacgaaagaagagttgcagctgaaacgaaatcgtttcaacttctcaatgagctaagtgatcatctattttttagtttttcataattttcctttcatggcctccttacatgtttgatttcctatgatccatgagctgccaatcatgataacgcggtttcactatgcaggagatgaacaaggatgcagtcacaactgatgctatcggcagtatcagaacttgatggtgcttgtagactgttcatggtgcttgtagggatgatgtatgtctatggcttactgagctccaaccaactatggcaggagcgttagctaggacagcagtcagtctaacaattgtggacaaagttcagtctaccatacactgaagcgcacccttgttgctaaaggtgtgaacaactttgctcagcagaatggaggatcattgtcactagcagcaagacctcgagcccaggcagttaaccatcagtttctttccttctttctttgggccgagagagcaaagaaggatgatgcactttccaacctgtgtagcacgttgggacaactcaagaaatggcagtggatatggacatagaaattgacaggcaaaacaaagcgctggttcctttcagcgacgacatcactgaactgaattttagactgaaaggcgtgaatcagtgtggacaccagttgctgggcaagtgatatggagccagaattcgggcagttcggagactatcgccttgattgcagaatttaagaacattgttgttttacatgtttttttgcagtgaatcaggccacacatgttgtattagtgagagaatgatgatttattttatattattatggatttcatagattattttagttttccctgaactgcaattgtttcaataacataggaggggactaccttcaatgacatttaggtgaatttttaaggtatgtccattattccattatagagcacaaagcctacttcttacaactcactgtatgttttataattgtatcaaaagcactgaacaaacatagttagctatcacgttcactgttgtctaaatagattgaaataatgtggtgaagccgtcatggactcttaagtagcttagccactgcaaaggatacaattaattataaaacaccaatgaatcaataaaaaaa

SEQ ID NO: 557 - DNA, 1977 bp, Zea Mays
aaaaaacattgcttctggtcttgttcttgttgtaaagtccagtagcaatgatgcttcgaggctgacattctggctctccaacacagttgtcctcagggagataattgtacaaacttttggcatctcacatcaatttactccatccatgatgaatctgagcatgaatggtggtgccaaaaaacttgatgggaaatctatgacaatgctgtggagaaacagctacaatggcatgcaagccaagtttgctgcaaggcagatgccagatgattggcaggaaacaagtacacttttggctacattagagaagattgagtcttggatattttctcgcattgttgagacaatatggtggcaggtaaatgtctgtcttaggcactaactcctcacatgcaaaaacgagtagaaggatcatcaactccaaaggctggtagagtgctatgtcctactttgggtgatcagcagtagggcaccttttctgttaacctgtggaaggctgcgtttcacgacgcattcaacagaatgtgccccctcagtgctggcggacatgagtgtggctgtttaccaatattagcaaaactggtgatggagcagtgtgtagcccgtttgaatgttgccatgtttaatgccatccttcgtgaatcatcaagtgagataccaacagactctatatctgacccaattgttgacccaaaagtcctaccaattccagttggtgatctaagctttgggtcaggcgcgcagctgaagaactctattggaaacgggtctagatggctgacagataatcttggcatagatcatgatgactttgaggacataggagatgttgaagacgaaagaagagttgcagctgaaacgaaatcgtttcaacttctcaatgagctaagtgatcatctattttttagtttttcataattttcctttcatggcctccttacatgtttgatttcctatgatccatgagctgccaatcatgataacgcggtttcactatgcaggagatgaacaaggatgcagtcacaactgatgctatcggcagtatcagaacttgatggtgcttgtagactgttcatggtgcttgtagggatgatgtatgtctatggcttactgagctccaaccaactatggcaggagcgttagctaggacagcagtcagtctaacaattgtggacaaagttcagtctaccatacactgaagcgcacccttgttgctaaaggtgtgaacaactttgctcagcagaatggaggatcattgtcactagcagcaagacctcgagcccaggcagttaaccatcagtttctttccttctttctttgggccgagagagcaaagaaggatgatgcactttccaacctgtgtagcacgttgggacaactcaagaaatggcagtggatatggacatagaaattgacaggcaaaacaaagcgctggttcctttcagcgacgacatcactgaactgaattttagactgaaaggcgtgaatcagtgtggacaccagttgctgggcaagtgatatggagccagaattcgggcagttcggagactatcgccttgattgcagaatttaagaacattgttgttttacatgtttttttgcagtgaatcaggccacacatgttgtattagtgagagaatgatgatttattttatattattatggatttcatagattattttagttttccctgaactgcaattgtttcaataacataggaggggactaccttcaatgacatttaggtgaatttttaaggtatgtccattattccattatagagcacaaagcctacttcttacaactcactgtatgttttataattgtatcaaaagcactgaacaaacatagttagctatcacgttcactgttgtctaaatagattgaaataatgtggtgaagccgtcatggactcttaagtagcttagccactgcaaaggatacaattaattataaaacaccaatgaatcaataaaaaaa

SEQ ID NO: 558 - DNA, 1928 bp, Zea Mays
cttgttcttgttgtaaagtccagtagcaatgatgcttcgagttgtcctcagggagataattgtacaaacttttggcatctcacatcaatttactccatccatgatgaatctgagcatgaatggtggtgccaaaaaacttgatgggaaatctatgacaatgctgtggagaaacagctacaatggcatgcaagccaagtttgctgcaaggcagatgccagatgattggcaggaaacaagtacacttttggctacattagagaagattgagtcttggatattttctcgcattgttgagacaatatggtggcaggtaaatgtctgtcttaggcactaactcctcacatgcaaaaacgagtagaaggatcatcaactccaaaggctggtagagtgctatgtcctactttgggtgatcagcagtagggcaccttttctgttaacctgtggaaggctgcgtttcacgacgcattcaacagaatgtgccccctcagtgctggcggacatgagtgtggctgtttaccaatattagcaaaactggtgatggagcagtgtgtagcccgtttgaatgttgccatgtttaatgccatccttcgtgaatcatcaagtgagataccaacagactctatatctgacccaattgttgacccaaaagtcctaccaattccagttggtgatctaagctttgggtcaggcgcgcagctgaagaactctattggaaacgggtctagatggctgacagataatcttggcatagatcatgatgactttgaggacataggagatgttgaagacgaaagaagagttgcagctgaaacgaaatcgtttcaacttctcaatgagctaagtgatcatctattttttagtttttcataattttcctttcatggcctccttacatgtttgatttcctatgatccatgagctgccaatcatgataacgcggtttcactatgcaggagatgaacaaggatgcagtcacaactgatgctatcggcagtatcagaacttgatggtgcttgtagactgttcatggtgcttgtagggatgatgtatgtctatggcttactgagctccaaccaactatggcaggagcgttagctaggacagcagtcagtctaacaattgtggacaaagttcagtctaccatacactgaagcgcacccttgttgctaaaggtgtgaacaactttgctcagcagaatggaggatcattgtcactagcagcaagacctcgagcccagttaaccatcagtttctttccttctttctttgggccgagagagcaaagaaggatgatgcactttccaacctgtgtagcacgttgggacaactcaagaaatggcagtggatatggacatagaaattgacaggcaaaacaaagcgctggttcctttcagcgacgacatcactgaactgaattttagactgaaaggcgtgaatcagtgtggacaccagttgctgggcaagtgatatggagccagaattcgggcagttcggagactatcgccttgattgcagaatttaagaacattgttgttttacatgtttttttgcagtgaatcaggccacacatgttgtattagtgagagaatgatgatttattttatattattatggatttcatagattattttagttttccctgaactgcaattgtttcaataacataggaggggactaccttcaatgacatttaggtgaatttttaaggtatgtccattattccattatagagcacaaagcctacttcttacaactcactgtatgttttataattgtatcaaaagcactgaacaaacatagttagctatcacgttcactgttgtctaaatagattgaaataatgtggtgaagccgtcatggactcttaagtagcttagccactgcaaaggatacaattaattataaaacaccaatgaatcaataaaaaaa

SEQ ID NO: 559 - DNA, 1482 bp, Zea Mays
ggtaaatgtctgtcttaggcactaactcctcacatgcaaaaacgagtagaaggatcatcaactccaaaggctggtagagtgctatgtcctactttgggtgatcagcagtagggcaccttttctgttaacctgtggaaggctgcgtttcacgacgcattcaacagaatgtgccccctcagtgctggcggacatgagtgtggctgtttaccaatattagcaaaactggtgatggagcagtgtgtagcccgtttgaatgttgccatgtttaatgccatccttcgtgaatcatcaagtgagataccaacagactctatatctgacccaattgttgacccaaaagtcctaccaattccagttggtgatctaagctttgggtcaggcgcgcagctgaagaactctattggaaacgggtctagatggctgacagataatcttggcatagatcatgatgactttgaggacataggagatgttgaagacgaaagaagagttgcagctgaaacgaaatcgtttcaacttctcaatgagctaagtgatcatctattttttagtttttcataattttcctttcatggcctccttacatgtttgatttcctatgatccatgagctgccaatcatgataacgcggtttcactatgcaggagatgaacaaggatgcagtcacaactgatgctatcggcagtatcagaacttgatggtgcttgtagactgttcatggtgcttgtagggatgatgtgtgaacaactttgctcagcagaatggaggatcattgtcactagcagcaagacctcgagcccagtttctttccttctttctttgggccgagagagcaaagaaggatgatgcactttccaacctgtgtagcacgttgggacaactcaagaaatggcagtggatatggacatagaaattgacaggcaaaacaaagcgctggttcctttcagcgacgacatcactgaactgaattttagactgaaaggcgtgaatcagtgtggacaccagttgctgggcaagtgatatggagccagaattcgggcagttcggagactatcgccttgattgcagaatttaagaacattgttgttttacatgtttttttgcagtgaatcaggccacacatgttgtattagtgagagaatgatgatttattttatattattatggatttcatagattattttagttttccctgaactgcaattgtttcaataacataggaggggactaccttcaatgacatttaggtgaatttttaaggtatgtccattattccattatagagcacaaagcctacttcttacaactcactgtatgttttataattgtatcaaaagcactgaacaaacatagttagctatcacgttcactgttgtctaaatagattgaaataatgtggtgaagccgtcatggactcttaagtagcttagccactgcaaaggatacaattaattataaaacaccaatgaatcaataaaaaaa

SEQ ID NO: 560 - DNA, 1437 bp, Zea Mays
taaatgtctgtcttaggcactaactcctcacatgcaaaaacgagtagaaggatcatcaactccaaaggctggtagagtgctatgtcctactttgggtgatcagcagtagggcaccttttctgttaacctgtggaaggctgcgtttcacgacgcattcaacagaatgtgccccctcagtgctggcggacatgagtgtggctgtttaccaatattagcaaaactggtgatggagcagtgtgtagcccgtttgaatgttgccatgtttaatgccatccttcgtgaatcatcaagtgagataccaacagactctatatctgacccaattgttgacccaaaagtcctaccaattccagttggtgatctaagctttgggtcaggcgcgcagctgaagaactctatcatgatgactttgaggacataggagatgttgaagacgaaagaagagttgcagctgaaacgaaatcgtttcaacttctcaatgagctaagtgatcatctattttttagtttttcataattttcctttcatggcctccttacatgtttgatttcctatgatccatgagctgccaatcatgataacgcggtttcactatgcaggagatgaacaaggatgcagtcacaactgatgctatcggcagtatcagaacttgatggtgcttgtagactgttcatggtgcttgtagggatgatgtgtgaacaactttgctcagcagaatggaggatcattgtcactagcagcaagacctcgagcccagtttctttccttctttctttgggccgagagagcaaagaaggatgatgcactttccaacctgtgtagcacgttgggacaactcaagaaatggcagtggatatggacatagaaattgacaggcaaaacaaagcgctggttcctttcagcgacgacatcactgaactgaattttagactgaaaggcgtgaatcagtgtggacaccagttgctgggcaagtgatatggagccagaattcgggcagttcggagactatcgccttgattgcagaatttaagaacattgttgttttacatgtttttttgcagtgaatcaggccacacatgttgtattagtgagagaatgatgatttattttatattattatggatttcatagattattttagttttccctgaactgcaattgtttcaataacataggaggggactaccttcaatgacatttaggtgaatttttaaggtatgtccattattccattatagagcacaaagcctacttcttacaactcactgtatgttttataattgtatcaaaagcactgaacaaacatagttagctatcacgttcactgttgtctaaatagattgaaataatgtggtgaagccgtcatggactcttaagtagcttagccactgcaaaggatacaattaattataaaacaccaatgaatcaataaaaaaa

SEQ ID NO: 561 - DNA, 1495 bp, Zea Mays
taaatgtctgtcttaggcactaactcctcacatgcaaaaacgagtagaaggatcatcaactccaaaggctggtagagtgctatgtcctactttgggtgatcagcagtagggcaccttttctgttaacctgtggaaggctgcgtttcacgacgcattcaacagaatgtgccccctcagtgctggcggacatgagtgtggctgtttaccaatattagcaaaactggtgatggagcagtgtgtagcccgtttgaatgttgccatgtttaatgccatccttcgtgaatcatcaagtgagataccaacagactctatatctgacccaattgttgacccaaaagtcctaccaattccagttggtgatctaagctttgggtcaggcgcgcagctgaagaactctattggaaacgggtctagatggctgacagataatcttggcatagatcatgatgactttgaggacataggagatgttgaagacgaaagaagagttgcagctgaaacgaaatcgtttcaacttctcaatgagctaagtgatcatctattttttagtttttcataattttcctttcatggcctccttacatgtttgatttcctatgatccatgagctgccaatcatgataacgcggtttcactatgcaggagatgaacaaggatgcagtcacaactgatgctatcggcagtatcagaacttgatggtgcttgtagactgttcatggtgcttgtagggatgatgtgtgaacaactttgctcagcagaatggaggatcattgtcactagcagcaagacctcgagcccaggcagttaaccatcagtttctttccttctttctttgggccgagagagcaaagaaggatgatgcactttccaacctgtgtagcacgttgggacaactcaagaaatggcagtggatatggacatagaaattgacaggcaaaacaaagcgctggttcctttcagcgacgacatcactgaactgaattttagactgaaaggcgtgaatcagtgtggacaccagttgctgggcaagtgatatggagccagaattcgggcagttcggagactatcgccttgattgcagaatttaagaacattgttgttttacatgtttttttgcagtgaatcaggccacacatgttgtattagtgagagaatgatgatttattttatattattatggatttcatagattattttagttttccctgaactgcaattgtttcaataacataggaggggactaccttcaatgacatttaggtgaatttttaaggtatgtccattattccattatagagcacaaagcctacttcttacaactcactgtatgttttataattgtatcaaaagcactgaacaaacatagttagctatcacgttcactgttgtctaaatagattgaaataatgtggtgaagccgtcatggactcttaagtagcttagccactgcaaaggatacaattaattataaaacaccaatgaatcaataaaaaaa

SEQ ID NO: 562 - DNA, 1568 bp, Zea Mays
tctgtcttaggcactaactcctcacatgcaaaaacgagtagaaggatcatcaactccaaaggctggtagagtgctatgtcctactttgggtgatcagcagtagggcaccttttctgttaacctgtggaaggctgcgtttcacgacgcattcaacagaatgtgccccctcagtgctggcggacatgagtgtggctgtttaccaatattagcaaaactggtgatggagcagtgtgtagcccgtttgaatgttgccatgtttaatgccatccttcgtgaatcatcaagtgagataccaacagactctatatctgacccaattgttgacccaaaagtcctaccaattccagttggtgatctaagctttgggtcaggcgcgcagctgaagaactctattggaaacgggtctagatggctgacagataatcttggcatagatcatgatgactttgaggacataggagatgttgaagacgaaagaagagttgcagctgaaacgaaatcgtttcaacttctcaatgagctaagtgatcatctattttttagtttttcataattttcctttcatggcctccttacatgtttgatttcctatgatccatgagctgccaatcatgataacgcggtttcactatgcaggagatgaacaaggatgcagtcacaactgatgctatcggcagtatcagaacttgatggtgcttgtagactgttcatggtgcttgtagggatgatgtatgtctatggcttactgagctccaaccaactatggcaggagcgttagctaggacagcagtcagtctaacaattgtggacaaagttcagtctaccatacactgaagcgcacccttgttgctaaaggtgtgaacaactttgctcagcagaatggaggatcattgtcactagcagcaagacctcgagcccaggcagaaggatgatgcactttccaacctgtgtagcacgttgggacaactcaagaaatggcagtggatatggacatagaaattgacaggcaaaacaaagcgctggttcctttcagcgacgacatcactgaactgaattttagactgaaaggcgtgaatcagtgtggacaccagttgctgggcaagtgatatggagccagaattcgggcagttcggagactatcgccttgattgcagaatttaagaacattgttgttttacatgtttttttgcagtgaatcaggccacacatgttgtattagtgagagaatgatgatttattttatattattatggatttcatagattattttagttttccctgaactgcaattgtttcaataacataggaggggactaccttcaatgacatttaggtgaatttttaaggtatgtccattattccattatagagcacaaagcctacttcttacaactcactgtatgttttataattgtatcaaaagcactgaacaaacatagttagctatcacgttcactgttgtctaaatagattgaaataatgtggtgaagccgtcatggactcttaagtagcttagccactgcaaaggatacaattaattataaaacaccaatgaatcaataaaaaaa

SEQ ID NO: 563 - DNA, 5983 bp, Zea Mays
gttgctgaacaaggtcacaaaggatgggattgagaccactcgaggttccgagctcccgcaatcaccagtgaggactggggattcgctgatcagatgcggtgtgtggggccttgctcagcggcggggctgggaggtccgagcggaatagatgtcgatggcatggcggttgctccgcacaatccatttccggcatctgagcccaggtgtcaggcgagcatccaagattgtagaccaaggctttaccaataatgccccagagctgagtaccaacaaagggagtttgctgaggtgtagcagcatccgcttcggggagaagcggaactcaatttttgcttgcgctccagacaatttggagcagaaatctggacaaacgttcgaagctgatgcccattctgcgctaaaattgtgctctggtatcgggagtgtagttatagccaagtgttctcacatatttgagagaaatggggacacctttgatgggaactgcagtttgcaagatatcctcaagcctggtttatggctctcaccggagaccctccgccggttttggcgtgtctctgagctgaagcctaaggattttcttgacattttgaatggttttggactcagtgccgtaaaagtgagaaatgcaagatttctatggaatttgtacaggtggacatcgcggcagagcaaagagttccaacatctgccaaggtcaaatgagacaatggtatccatacttgcagatgctcatatgctcagtcaagcagaatcactactgctttcattgattgatcatatgactccagctgtttctagtgaactattcagtcagattatccaggtgtattcagaagcaggcaaccttgggaaatcagttgcactttatgattatgcaaggggcaagcatttgattccttcagcttcatgctatcaagtacttcttcattttctaaccagaaacagaaaggatgaattgattttgagagtatatctggacatgcttgaagttggatttggttcttgcaccgaaggaaatattcttgattctgttgtcatggctttaatcaggaaaggtaaacttttggaagctcttggtattcttcggcaattaaagagtttgggtcttaaattaagcaagggagccttgtcaaatatagttgaagaatttaacaagaaaaaggatattggggatctgatgaatttcttggaagattggaggtgtatacctgagttgcgtctttgcaacagaatccttgcgtctttgtgcacaaatcttggtacttgtcaggcatggttggtcttccaaagtttggaggccttagggtttgctccagatgctacgacttttggaattttcatttttcacagctgtagagaaatgaaactaaaatctgcacttgtatatttatcagagtgctttgctaggcatgttaaacctggagtgtgtgcctataatgctattttaggtggtgttttcagggaggggctatatagacatgcaaagtatatatttgaagacatgattgaaagagaagtaacacccaatctttcaacatataagataattcttgcagggtattgcaggtataggcggtttgatgatattgaacaagtcttgaggcacatgaaaaccaatggtgtaaatgttcttctctctggaaactgtgtgctctccaaggccttatcattcttggggctagatcacctaggggtgaaaatcaagagagataatgtcactggtttcccaaaagctgagttttttgattcagttggcaatggattgtatttggacactgattccaaaatgtttgaggtttcattgtcacaagttttggatagcgcacttctcccagatattaactcagagctaatcagggcatctcagcaaggcgatgttgcaagtgctcttcttgtgaaagacaaagcttttcaatggggatatgacatttcaccagatagctgctctgagctattcaaggccttatgtgtgagccctgcttatgttatagatgtcattgaccttatggaggagatgccagatatactttacaaacttgatgctcaaaatctagatttggttgcccaaacattgagtaggaatggaatgtctgctcatgcaaaactggttttagaaaaaatgttgagagaagacttgtcaatcagtcacaatacatatacttatttaatgataggtttatgcgaagaaaggaacatagcagggttttgggaatgttggaatcttgcaacaaagtgcagatggtcacctgatagcaaggatatgatgggcctcatcagttacttgtgcaaatggggagtgattgaggaagccctgaaacttatgaactctttatttgactgctaccatgatctgttttttagtgcatattgtgcacttctcaaagagttgtgcaggacaggtcataccagcattggatgcgcaatgttggaggctctcaaagaaaagggtgtggctgtggatcgatcattattcttttatgtgatggagggcttcctaaaggagcaaagaactgctgaatcaattggaatgcatgacatgtggcttagcaaaagcaaagaacttgatgtttttacttaccgatctgtgttgccttcattaccatggctggacacagatcgagccaagaacttggtagaatctatgctgaccgtgaaacttactgaattctcatatcgcggttgcattgtgaatgaattaatgcaaacaaggaatataaaatgggccattccagtcttgcaagaatcagctcctgggaagctcagtgccactttgttaaattccttacttcaagcctatggttggctaaaaaattggagaaagttagatgcagttctttgcaagatgctaaagatgcatgccaccctttctatatctagctaccgctttcttgtgtgcagaatgtgtgagcaaagtcgtttttctagcgcttcaagccttagagcacttttccaacatactgacaagtcaagagaactgattgcatgcaacattctaatattttatctttttcaaagaagaaacagctcacagattcatgatttattgaaggacattgaaggtaatggtatttctcttgacaaaaccacatatgatttccttgtctatggatttcacaaatctggggatatcaatgattcagttaatgcgcttgatgcctgcattgctcagggaataaaaccaagcaaccgcagtctcagaatagtgttaagtcattactgcaggctaggaaaccatgagaaatcactagcattatttcacttgattgagcgcaatggatggaagcatggtttaatcattaagaccaccctagcttcatgtctcctttcatttgggagacaattggaagcaaaatcatgtctgaacaacctgagcaaaggtgagtttatcggatgttcaagcaattttgatgatctcatcaaggaattctgcattctaggagatttgaaaatgactctttatctgctaaatacaatgttaaagaaaggcacactgcctaatgaagccagttacagttctgttatatataaactttgtacattgaaggagttcgatcaggcacttgattttcttgctgaaatgcagctggcaagtctaaaatcaagtgaaatctcctgtgatgcacttgtacatggcctttgtgccatgggaagaccttctgatgctagaaaggttttggaaatgctaaccaccttgggatctgcaccatcctatggcatgtttagagttgtttttgataactattgcagaagtagcaatctacagaaagctgcggcacttctgcatgacatgcaacaagcaggacaagtgcccaactttgagatgcattggtctgttataagcaatttaagcagtaccaatgagaaaactgaaggacatggagagtgcattttgccaaacctttttctttctgcaaattccccttaaaggtcataaggcgatatatggcttccagaaaatggtgaactgatgattgttctcaagttgaaccctagtggaactgataaaactcgtgaaaccaaggttatgcaactctggaactcaaacgttctactcgaggattgatggttcacataaatgtgggaacacgtaggaaaaactatgcatcttcgatttaggttgcaaaagagggagcttgaactcattacctgagccatcacaactttcttctctgcaacttggttacaggttatgcccttgctaaagggataatgcaaagatccctacaacaccaattagaattggggaagacgaacctcctcctcagtctcctagcttgttcgttgctctcacctgggatctgccctgggatcacctttgcaacatcagttgaactaaagatttggactggacatggttcagttgtttttgaacgagtacgcaaatgccaggtttttcctgtttgggcacaaatggaaacaaaaaagttggactcagcctatcgtgaagctacgaaggaagagcactgtcccattattctgttttttcgtacctgagcaactgaggcaaccctttcgatcttatgagaccaagatgttttctggtcccaaacccatgatggtatgccttagtttgcttgcagacaaatgcttttttttgacaacttcactcatcccttgttttgaatagatgacataattggagactctggccatttatctgtgttgtttccattaatgtgtcttctcataggtactctgttatggtcgctagatcggtgagggattggagagggatattgatgggcaggaacgtcggtcgggggcctctgcccacggccgagcaagaggagggtttctctcttctaattcttacctactttatttctcatccattgattacataaatagaccagctggctgtccttatctagctagagatccttatctcctaaaaactctcctaaaactactaactgataaccttcctagataatctcaaccaatctcctaaataatcttaactaatcttctaatattactagctgaatgcccgtgcgttgcaacgggaatatataataccagtatactacgataacttatatacaaaatatgtgttataccattatgagaaaatgtttcataatcaatttgtgattctggccatacataaattttgttatttataatctatctgtttcaccactgcattacaaccatcagtatcatgcagacttcgatatatgtcacgatttgtatggtctcattattggagagcatgtttcacacataccagaagaaattccctcgtacatcgttagtcatcggacacgtaccaccatacgcttttgcttaaacaaaaaggtaagtgtgtgtttgcaagactaatggtcaaacaccgtataaccataaagttagaatactatattaatatattaaataaattaatccaatagacatagattaacccaattaacacaggataaataaatatctaattataaaagtatgaaacatggtataatcaatgttgttactgcgtagtaaatattcatacgagactaacacaactggaacggttcaatttagaattaaaatggggaagttacgaatttccaaagtttctatgtatttgatataggattaattaggaaatcaattttattgttgttttcatgacaaaacagaggtattatgtgataaaaaataatattatagaattatagaaattggaatgaattcatttagatttaatatgaaatttccatgaattaaatgggcttttgcaattatttttaaactaaaaatcaatttccaaactcttttccctattttctttatttcctggactgcgtcccaaattccagaaacatcaggggccaagctataaatgtttttctagactcagtgagcatacagagtggacggcgggttaaacacaaataaagccaacatgggtcatgttggctagagggtggaaggctagacattctactcaatagatccaaggtttaatccttgagcaaccacggtttaatttttt

SEQ ID NO: 564 - DNA, 5097 bp, Zea Mays
ttgctgaacaaggtcacaaaggatgggattgagaccactcgaggttccgagctcccgcaatcaccagtgaggactggggattcgctgatcagatgcggtgtgtggggccttgctcagcggcggggctgggaggtccgagcggaatagatgtcgatggcatggcggttgctccgcacaatccatttccggcatctgagcccaggtgtcaggcgagcatccaagattgtagaccaaggctttaccaataatgccccagagctgagtaccaacaaagggagtttgctgaggtgtagcagcatccgcttcggggagaagcggaactcaatttttgcttgcgctccagacaatttggagcagaaatctggacaaacgttcgaagctgatgcccattctgcgctaaaattgtgctctggtatcgggagtgtagttatagccaagtgttctcacatatttgagagaaatggggacacctttgatgggaactgcagtttgcaagatatcctcaagcctggtttatggctctcaccggagaccctccgccggttttggcgtgtctctgagctgaagcctaaggattttcttgacattttgaatggttttggactcagtgccgtaaaagtgagaaatgcaagatttctatggaatttgtacaggtggacatcgcggcagagcaaagagttccaacatctgccaaggtcaaatgagacaatggtatccatacttgcagatgctcatatgctcagtcaagcagaatcactactgctttcattgattgatcatatgactccagctgtttctagtgaactattcagtcagattatccaggtgtattcagaagcaggcaaccttgggaaatcagttgcactttatgattatgcaaggggcaagcatttgattccttcagcttcatgctatcaagtacttcttcattttctaaccagaaacagaaaggatgaattgattttgagagtatatctggacatgcttgaagttggatttggttcttgcaccgaaggaaatattcttgattctgttgtcatggctttaatcaggaaaggtaaacttttggaagctcttggtattcttcggcaattaaagagtttgggtcttaaattaagcaagggagccttgtcaaatatagttgaagaatttaacaagaaaaaggatattggggatctgatgaatttcttggaagattggaggtgtatacctgagttgcgtctttgcaacagaatccttgcgtctttgtgcacaaatcttggtacttgtcaggcatggttggtcttccaaagtttggaggccttagggtttgctccagatgctacgacttttggaattttcatttttcacagctgtagagaaatgaaactaaaatctgcacttgtatatttatcagagtgctttgctaggcatgttaaacctggagtgtgtgcctataatgctattttaggtggtgttttcagggaggggctatatagacatgcaaagtatatatttgaagacatgattgaaagagaagtaacacccaatctttcaacatataagataattcttgcagggtattgcaggtataggcggtttgatgatattgaacaagtcttgaggcacatgaaaaccaatggtgtaaatgttcttctctctggaaactgtgtgctctccaaggccttatcattcttggggctagatcacctaggggtgaaaatcaagagagataatgtcactggtttcccaaaagctgagttttttgattcagttggcaatggattgtatttggacactgattccaaaatgtttgaggtttcattgtcacaagttttggatagcgcacttctcccagatattaactcagagctaatcagggcatctcagcaaggcgatgttgcaagtgctcttcttgtgaaagacaaagcttttcaatggggatatgacatttcaccagatagctgctctgagctattcaaggccttatgtgtgagccctgcttatgttatagatgtcattgaccttatggaggagatgccagatatactttacaaacttgatgctcaaaatctagatttggttgcccaaacattgagtaggaatggaatgtctgctcatgcaaaactggttttagaaaaaatgttgagagaagacttgtcaatcagtcacaatacatatacttatttaatgataggtttatgcgaagaaaggaacatagcagggttttgggaatgttggaatcttgcaacaaagtgcagatggtcacctgatagcaaggatatgatgggcctcatcagttacttgtgcaaatggggagtgattgaggaagccctgaaacttatgaactctttatttgactgctaccatgatctgttttttagtgcatattgtgcacttctcaaagagttgtgcaggacaggtcataccagcattggatgcgcaatgttggaggctctcaaagaaaagggtgtggctgtggatcgatcattattcttttatgtgatggagggcttcctaaaggagcaaagaactgctgaatcaattggaatgcatgacatgtggcttagcaaaagcaaagaacttgatgtttttacttaccgatctgtgttgccttcattaccatggctggacacagatcgagccaagaacttggtagaatctatgctgaccgtgaaacttactgaattctcatatcgcggttgcattgtgaatgaattaatgcaaacaaggaatataaaatgggccattccagtcttgcaagaatcagctcctgggaagctcagtgccactttgttaaattccttacttcaagcctatggttggctaaaaaattggagaaagttagatgcagttctttgcaagatgctaaagatgcatgccaccctttctatatctagctaccgctttcttgtgtgcagaatgtgtgagcaaagtcgtttttctagcgcttcaagccttagagcacttttccaacatactgacaagtcaagagaactgattgcatgcaacattctaatattttatctttttcaaagaagaaacagctcacagattcatgatttattgaaggacattgaaggtaatggtatttctcttgacaaaaccacatatgatttccttgtctatggatttcacaaatctggggatatcaatgattcagttaatgcgcttgatgcctgcattgctcagggaataaaaccaagcaaccgcagtctcagaatagtgttaagtcattactgcaggctaggaaaccatgagaaatcactagcattatttcacttgattgagcgcaatggatggaagcatggtttaatcattaagaccaccctagcttcatgtctcctttcatttgggagacaattggaagcaaaatcatgtctgaacaacctgagcaaaggtgagtttatcggatgttcaagcaattttgatgatctcatcaaggaattctgcattctaggagatttgaaaatgactctttatctgctaaatacaatgttaaagaaaggcacactgcctaatgaagccagttacagttctgttatatataaactttgtacattgaaggagttcgatcaggcacttgattttcttgctgaaatgcagctggcaagtctaaaatcaagtgaaatctcctgtgatgcacttgtacatggcctttgtgccatgggaagaccttctgatgctagaaaggttttggaaatgctaaccaccttgggatctgcaccatcctatggcatgtttagagttgtttttgataactattgcagaagtagcaatctacagaaagctgcggcacttctgcatgacatgcaacaagcaggacaagtgcccaactttgagatgcattggtctgttataagcaatttaagcagtaccaatgagaaaactgaaggacatggagagtgcattttgccaaacctttttctttctgcaaattccccttaaaggtcataaggcgatatatggcttccagaaaatggtgaactgatgattgttctcaagttgaaccctagtggaactgataaaactcgtgaaaccaaggttatgcaactctggaactcaaacgttctactcgaggattgatggttcacataaatgtgggaacacgtaggaaaaactatgcatcttcgatttaggttgcaaaagagggagcttgaactcattacctgagccatcacaactttcttctctgcaacttggttacaggttatgcccttgctaaagggataatgcaaagatccctacaacaccaattagaattggggaagacgaacctcctcctcagtctcctagcttgttcgttgctctcacctgggatctgccctgggatcacctttgcaacatcagttgaactaaagatttggactggacatggttcagttgtttttgaacgagtacgcaaatgccaggtttttcctgtttgggcacaaatggaaacaaaaaagttggactcagcctatcgtgaagctacgaaggaagagcactgtcccattattctgttttttcggacgtggtaccatcctcatcatgtagcctaggatgagttatcactgttaaatatttcaagtggttaaatcatgcatctgcagaatatattattgttgcactctcaaatggtgggttgctaacttgctatgtcatgggagtttgggtgaaggccagaaggatgtgatagacgtcgattcgatgcaggtccatgggatgctctgtacaggggtgggaatatcctagcgttcgccttggtttcggtcttctctggcagcaagtgtgctcccagttttcaagctgtcaaagctgtccaactcagttccttggggaaggcctcgattcgctcatctcctcggacccggaggactacaacaatatgaagcagtatgagaagctgaccgtcgcgtcaatttactttcttgtgatgagtgttgagcatcatcatatgattcatacaattgatatgcaactagaacccagattttaatgtgtacggttatgatttatcttttctcgttaaataatgtgagatattgaggtgtatgataaattatatgttcatctctatgtaatcattatacactaacattttaataacgagagcatagaacgataaatagtgcttct

SEQ ID NO: 565 - DNA, 5070 bp, Zea Mays
ttgctgaacaaggtcacaaaggatgggattgagaccactcgaggttccgagctcccgcaatcaccagtgaggactggggattcgctgatcagatgcggtgtgtggggccttgctcagcggcggggctgggaggtccgagcggaatagatgtcgatggcatggcggttgctccgcacaatccatttccggcatctgagcccaggtgtcaggcgagcatccaagattgtagaccaaggctttaccaataatgccccagagctgagtaccaacaaagggagtttgctgaggtgtagcagcatccgcttcggggagaagcggaactcaatttttgcttgcgctccagacaatttggagcagaaatctggacaaacgttcgaagctgatgcccattctgcgctaaaattgtgctctggtatcgggagtgtagttatagccaagtgttctcacatatttgagagaaatggggacacctttgatgggaactgcagtttgcaagatatcctcaagcctggtttatggctctcaccggagaccctccgccggttttggcgtgtctctgagctgaagcctaaggattttcttgacattttgaatggttttggactcagtgccgtaaaagtgagaaatgcaagatttctatggaatttgtacaggtggacatcgcggcagagcaaagagttccaacatctgccaaggtcaaatgagacaatggtatccatacttgcagatgctcatatgctcagtcaagcagaatcactactgctttcattgattgatcatatgactccagctgtttctagtgaactattcagtcagattatccaggtgtattcagaagcaggcaaccttgggaaatcagttgcactttatgattatgcaaggggcaagcatttgattccttcagcttcatgctatcaagtacttcttcattttctaaccagaaacagaaaggatgaattgattttgagagtatatctggacatgcttgaagttggatttggttcttgcaccgaaggaaatattcttgattctgttgtcatggctttaatcaggaaaggtaaacttttggaagctcttggtattcttcggcaattaaagagtttgggtcttaaattaagcaagggagccttgtcaaatatagttgaagaatttaacaagaaaaaggatattggggatctgatgaatttcttggaagattggaggtgtatacctgagttgcgtctttgcaacagaatccttgcgtctttgtgcacaaatcttggtacttgtcaggcatggttggtcttccaaagtttggaggccttagggtttgctccagatgctacgacttttggaattttcatttttcacagctgtagagaaatgaaactaaaatctgcacttgtatatttatcagagtgctttgctaggcatgttaaacctggagtgtgtgcctataatgctattttaggtggtgttttcagggaggggctatatagacatgcaaagtatatatttgaagacatgattgaaagagaagtaacacccaatctttcaacatataagataattcttgcagggtattgcaggtataggcggtttgatgatattgaacaagtcttgaggcacatgaaaaccaatggtgtaaatgttcttctctctggaaactgtgtgctctccaaggccttatcattcttggggctagatcacctaggggtgaaaatcaagagagataatgtcactggtttcccaaaagctgagttttttgattcagttggcaatggattgtatttggacactgattccaaaatgtttgaggtttcattgtcacaagttttggatagcgcacttctcccagatattaactcagagctaatcagggcatctcagcaaggcgatgttgcaagtgctcttcttgtgaaagacaaagcttttcaatggggatatgacatttcaccagatagctgctctgagctattcaaggccttatgtgtgagccctgcttatgttatagatgtcattgaccttatggaggagatgccagatatactttacaaacttgatgctcaaaatctagatttggttgcccaaacattgagtaggaatggaatgtctgctcatgcaaaactggttttagaaaaaatgttgagagaagacttgtcaatcagtcacaatacatatacttatttaatgataggtttatgcgaagaaaggaacatagcagggttttgggaatgttggaatcttgcaacaaagtgcagatggtcacctgatagcaaggatatgatgggcctcatcagttacttgtgcaaatggggagtgattgaggaagccctgaaacttatgaactctttatttgactgctaccatgatctgttttttagtgcatattgtgcacttctcaaagagttgtgcaggacaggtcataccagcattggatgcgcaatgttggaggctctcaaagaaaagggtgtggctgtggatcgatcattattcttttatgtgatggagggcttcctaaaggagcaaagaactgctgaatcaattggaatgcatgacatgtggcttagcaaaagcaaagaacttgatgtttttacttaccgatctgtgttgccttcattaccatggctggacacagatcgagccaagaacttggtagaatctatgctgaccgtgaaacttactgaattctcatatcgcggttgcattgtgaatgaattaatgcaaacaaggaatataaaatgggccattccagtcttgcaagaatcagctcctgggaagctcagtgccactttgttaaattccttacttcaagcctatggttggctaaaaaattggagaaagttagatgcagttctttgcaagatgctaaagatgcatgccaccctttctatatctagctaccgctttcttgtgtgcagaatgtgtgagcaaagtcgtttttctagcgcttcaagccttagagcacttttccaacatactgacaagtcaagagaactgattgcatgcaacattctaatattttatctttttcaaagaagaaacagctcacagattcatgatttattgaaggacattgaaggtaatggtatttctcttgacaaaaccacatatgatttccttgtctatggatttcacaaatctggggatatcaatgattcagttaatgcgcttgatgcctgcattgctcagggaataaaaccaagcaaccgcagtctcagaatagtgttaagtcattactgcaggctaggaaaccatgagaaatcactagcattatttcacttgattgagcgcaatggatggaagcatggtttaatcattaagaccaccctagcttcatgtctcctttcatttgggagacaattggaagcaaaatcatgtctgaacaacctgagcaaaggtgagtttatcggatgttcaagcaattttgatgatctcatcaaggaattctgcattctaggagatttgaaaatgactctttatctgctaaatacaatgttaaagaaaggcacactgcctaatgaagccagttacagttctgttatatataaactttgtacattgaaggagttcgatcaggcacttgattttcttgctgaaatgcagctggcaagtctaaaatcaagtgaaatctcctgtgatgcacttgtacatggcctttgtgccatgggaagaccttctgatgctagaaaggttttggaaatgctaaccaccttgggatctgcaccatcctatggcatgtttagagttgtttttgataactattgcagaagtagcaatctacagaaagctgcggcacttctgcatgacatgcaacaagcaggacaagtgcccaactttgagatgcattggtctgttataagcaatttaagcagtaccaatgagaaaactgaaggacatggagagtgcattttgccaaacctttttctttctgcaaattccccttaaaggtcataaggcgatatatggcttccagaaaatggtgaactgatgattgttctcaagttgaaccctagtggaactgataaaactcgtgaaaccaaggttatgcaactctggaactcaaacgttctactcgaggattgatggttcacataaatgtgggaacacgtaggaaaaactatgcatcttcgatttaggttgcaaaagagggagcttgaactcattacctgagccatcacaactttcttctctgcaacttggttacaggttatgcccttgctaaagggataatgcaaagatccctacaacaccaattagaattggggaagacgaacctcctcctcagtctcctagcttgttcgttgctctcacctgggatctgccctgggatcacctttgcaacatcagttgaactaaagatttggactggacatggttcagttgtttttgaacggtttttcctgtttgggcacaaatggaaacaaaaaagttggactcagcctatcgtgaagctacgaaggaagagcactgtcccattattctgttttttcgtacctgagcaactgaggcaaccctttcgatcttatgagaccaagatgttttctggtcccaaacccatgatgaatatattattgttgcactctcaaatggtgggttgctaacttgctatgtcatgggagtttgggtgaaggccagaaggatgtgatagacgtcgattcgatgcaggtccatgggatgctctgtacaggggtgggaatatcctagcgttcgccttggtttcggtcttctctggcagcaagtgtgctcccagttttcaagctgtcaaagctgtccaactcagttccttggggaaggcctcgattcgctcatctcctcggacccggaggactacaacaatatgaagcagtatgagaagctgaccgtcgcgtcaatttactttcttgtgatgagtgttgagcatcatcatatgattcatacaattgatatgcaactagaacccagattttaatgtgtacggttatgatttatcttttctcgttaaataatgtgagatattgaggtgtatgataaattatatgttcatctctatgtaatcattatacactaacattttaataacgagagcatagaacgataaatagtgcttct

SEQ ID NO: 566 - DNA, 5086 bp, Zea Mays
ttgctgaacaaggtcacaaaggatgggattgagaccactcgaggttccgagctcccgcaatcaccagtgaggactggggattcgctgatcagatgcggtgtgtggggccttgctcagcggcggggctgggaggtccgagcggaatagatgtcgatggcatggcggttgctccgcacaatccatttccggcatctgagcccaggtgtcaggcgagcatccaagattgtagaccaaggctttaccaataatgccccagagctgagtaccaacaaagggagtttgctgaggtgtagcagcatccgcttcggggagaagcggaactcaatttttgcttgcgctccagacaatttggagcagaaatctggacaaacgttcgaagctgatgcccattctgcgctaaaattgtgctctggtatcgggagtgtagttatagccaagtgttctcacatatttgagagaaatggggacacctttgatgggaactgcagtttgcaagatatcctcaagcctggtttatggctctcaccggagaccctccgccggttttggcgtgtctctgagctgaagcctaaggattttcttgacattttgaatggttttggactcagtgccgtaaaagtgagaaatgcaagatttctatggaatttgtacaggtggacatcgcggcagagcaaagagttccaacatctgccaaggtcaaatgagacaatggtatccatacttgcagatgctcatatgctcagtcaagcagaatcactactgctttcattgattgatcatatgactccagctgtttctagtgaactattcagtcagattatccaggtgtattcagaagcaggcaaccttgggaaatcagttgcactttatgattatgcaaggggcaagcatttgattccttcagcttcatgctatcaagtacttcttcattttctaaccagaaacagaaaggatgaattgattttgagagtatatctggacatgcttgaagttggatttggttcttgcaccgaaggaaatattcttgattctgttgtcatggctttaatcaggaaaggtaaacttttggaagctcttggtattcttcggcaattaaagagtttgggtcttaaattaagcaagggagccttgtcaaatatagttgaagaatttaacaagaaaaaggatattggggatctgatgaatttcttggaagattggaggtgtatacctgagttgcgtctttgcaacagaatccttgcgtctttgtgcacaaatcttggtacttgtcaggcatggttggtcttccaaagtttggaggccttagggtttgctccagatgctacgacttttggaattttcatttttcacagctgtagagaaatgaaactaaaatctgcacttgtatatttatcagagtgctttgctaggcatgttaaacctggagtgtgtgcctataatgctattttaggtggtgttttcagggaggggctatatagacatgcaaagtatatatttgaagacatgattgaaagagaagtaacacccaatctttcaacatataagataattcttgcagggtattgcaggtataggcggtttgatgatattgaacaagtcttgaggcacatgaaaaccaatggtgtaaatgttcttctctctggaaactgtgtgctctccaaggccttatcattcttggggctagatcacctaggggtgaaaatcaagagagataatgtcactggtttcccaaaagctgagttttttgattcagttggcaatggattgtatttggacactgattccaaaatgtttgaggtttcattgtcacaagttttggatagcgcacttctcccagatattaactcagagctaatcagggcatctcagcaaggcgatgttgcaagtgctcttcttgtgaaagacaaagcttttcaatggggatatgacatttcaccagatagctgctctgagctattcaaggccttatgtgtgagccctgcttatgttatagatgtcattgaccttatggaggagatgccagatatactttacaaacttgatgctcaaaatctagatttggttgcccaaacattgagtaggaatggaatgtctgctcatgcaaaactggttttagaaaaaatgttgagagaagacttgtcaatcagtcacaatacatatacttatttaatgataggtttatgcgaagaaaggaacatagcagggttttgggaatgttggaatcttgcaacaaagtgcagatggtcacctgatagcaaggatatgatgggcctcatcagttacttgtgcaaatggggagtgattgaggaagccctgaaacttatgaactctttatttgactgctaccatgatctgttttttagtgcatattgtgcacttctcaaagagttgtgcaggacaggtcataccagcattggatgcgcaatgttggaggctctcaaagaaaagggtgtggctgtggatcgatcattattcttttatgtgatggagggcttcctaaaggagcaaagaactgctgaatcaattggaatgcatgacatgtggcttagcaaaagcaaagaacttgatgtttttacttaccgatctgtgttgccttcattaccatggctggacacagatcgagccaagaacttggtagaatctatgctgaccgtgaaacttactgaattctcatatcgcggttgcattgtgaatgaattaatgcaaacaaggaatataaaatgggccattccagtcttgcaagaatcagctcctgggaagctcagtgccactttgttaaattccttacttcaagcctatggttggctaaaaaattggagaaagttagatgcagttctttgcaagatgctaaagatgcatgccaccctttctatatctagctaccgctttcttgtgtgcagaatgtgtgagcaaagtcgtttttctagcgcttcaagccttagagcacttttccaacatactgacaagtcaagagaactgattgcatgcaacattctaatattttatctttttcaaagaagaaacagctcacagattcatgatttattgaaggacattgaaggtaatggtatttctcttgacaaaaccacatatgatttccttgtctatggatttcacaaatctggggatatcaatgattcagttaatgcgcttgatgcctgcattgctcagggaataaaaccaagcaaccgcagtctcagaatagtgttaagtcattactgcaggctaggaaaccatgagaaatcactagcattatttcacttgattgagcgcaatggatggaagcatggtttaatcattaagaccaccctagcttcatgtctcctttcatttgggagacaattggaagcaaaatcatgtctgaacaacctgagcaaaggtgagtttatcggatgttcaagcaattttgatgatctcatcaaggaattctgcattctaggagatttgaaaatgactctttatctgctaaatacaatgttaaagaaaggcacactgcctaatgaagccagttacagttctgttatatataaactttgtacattgaaggagttcgatcaggcacttgattttcttgctgaaatgcagctggcaagtctaaaatcaagtgaaatctcctgtgatgcacttgtacatggcctttgtgccatgggaagaccttctgatgctagaaaggttttggaaatgctaaccaccttgggatctgcaccatcctatggcatgtttagagttgtttttgataactattgcagaagtagcaatctacagaaagctgcggcacttctgcatgacatgcaacaagcaggacaagtgcccaactttgagatgcattggtctgttataagcaatttaagcagtaccaatgagaaaactgaaggacatggagagtgcattttgccaaacctttttctttctgcaaattccccttaaaggtcataaggcgatatatggcttccagaaaatggtgaactgatgattgttctcaagttgaaccctagtggaactgataaaactcgtgaaaccaaggttatgcaactctggaactcaaacgttctactcgaggattgatggttcacataaatgtgggaacacgtaggaaaaactatgcatcttcgatttaggttgcaaaagagggagcttgaactcattacctgagccatcacaactttcttctctgcaacttggttacaggttatgcccttgctaaagggataatgcaaagatccctacaacaccaattagaattggggaagacgaacctcctcctcagtctcctagcttgttcgttgctctcacctgggatctgccctgggatcacctttgcaacatcagttgaactaaagatttggactggacatggttcagttgtttttgaacgagtacgcaaatgccaggtttttcctgtttgggcacaaatggaaacaaaaaagttggactcagcctatcgtgaagctacgaaggaagagcactgtcccattattctgttttttcgtacctgagcaactgaggcaaccctttcgatcttatgagaccaagatgttttctggtcccaaacccatgatgaatatattattgttgcactctcaaatggtgggttgctaacttgctatgtcatgggagtttgggtgaaggccagaaggatgtgatagacgtcgattcgatgcaggtccatgggatgctctgtacaggggtgggaatatcctagcgttcgccttggtttcggtcttctctggcagcaagtgtgctcccagttttcaagctgtcaaagctgtccaactcagttccttggggaaggcctcgattcgctcatctcctcggacccggaggactacaacaatatgaagcagtatgagaagctgaccgtcgcgtcaatttactttcttgtgatgagtgttgagcatcatcatatgattcatacaattgatatgcaactagaacccagattttaatgtgtacggttatgatttatcttttctcgttaaataatgtgagatattgaggtgtatgataaattatatgttcatctctatgtaatcattatacactaacattttaataacgagagcatagaacgataaatagtgcttct

SEQ ID NO: 567 - DNA, 5075 bp, Zea Mays
ttgctgaacaaggtcacaaaggatgggattgagaccactcgaggttccgagctcccgcaatcaccagtgaggactggggattcgctgatcagatgcggtgtgtggggccttgctcagcggcggggctgggaggtccgagcggaatagatgtcgatggcatggcggttgctccgcacaatccatttccggcatctgagcccaggtgtcaggcgagcatccaagattgtagaccaaggctttaccaataatgccccagagctgagtaccaacaaagggagtttgctgaggtgtagcagcatccgcttcggggagaagcggaactcaatttttgcttgcgctccagacaatttggagcagaaatctggacaaacgttcgaagctgatgcccattctgcgctaaaattgtgctctggtatcgggagtgtagttatagccaagtgttctcacatatttgagagaaatggggacacctttgatgggaactgcagtttgcaagatatcctcaagcctggtttatggctctcaccggagaccctccgccggttttggcgtgtctctgagctgaagcctaaggattttcttgacattttgaatggttttggactcagtgccgtaaaagtgagaaatgcaagatttctatggaatttgtacaggtggacatcgcggcagagcaaagagttccaacatctgccaaggtcaaatgagacaatggtatccatacttgcagatgctcatatgctcagtcaagcagaatcactactgctttcattgattgatcatatgactccagctgtttctagtgaactattcagtcagattatccaggtgtattcagaagcaggcaaccttgggaaatcagttgcactttatgattatgcaaggggcaagcatttgattccttcagcttcatgctatcaagtacttcttcattttctaaccagaaacagaaaggatgaattgattttgagagtatatctggacatgcttgaagttggatttggttcttgcaccgaaggaaatattcttgattctgttgtcatggctttaatcaggaaaggtaaacttttggaagctcttggtattcttcggcaattaaagagtttgggtcttaaattaagcaagggagccttgtcaaatatagttgaagaatttaacaagaaaaaggatattggggatctgatgaatttcttggaagattggaggtgtatacctgagttgcgtctttgcaacagaatccttgcgtctttgtgcacaaatcttggtacttgtcaggcatggttggtcttccaaagtttggaggccttagggtttgctccagatgctacgacttttggaattttcatttttcacagctgtagagaaatgaaactaaaatctgcacttgtatatttatcagagtgctttgctaggcatgttaaacctggagtgtgtgcctataatgctattttaggtggtgttttcagggaggggctatatagacatgcaaagtatatatttgaagacatgattgaaagagaagtaacacccaatctttcaacatataagataattcttgcagggtattgcaggtataggcggtttgatgatattgaacaagtcttgaggcacatgaaaaccaatggtgtaaatgttcttctctctggaaactgtgtgctctccaaggccttatcattcttggggctagatcacctaggggtgaaaatcaagagagataatgtcactggtttcccaaaagctgagttttttgattcagttggcaatggattgtatttggacactgattccaaaatgtttgaggtttcattgtcacaagttttggatagcgcacttctcccagatattaactcagagctaatcagggcatctcagcaaggcgatgttgcaagtgctcttcttgtgaaagacaaagcttttcaatggggatatgacatttcaccagatagctgctctgagctattcaaggccttatgtgtgagccctgcttatgttatagatgtcattgaccttatggaggagatgccagatatactttacaaacttgatgctcaaaatctagatttggttgcccaaacattgagtaggaatggaatgtctgctcatgcaaaactggttttagaaaaaatgttgagagaagacttgtcaatcagtcacaatacatatacttatttaatgataggtttatgcgaagaaaggaacatagcagggttttgggaatgttggaatcttgcaacaaagtgcagatggtcacctgatagcaaggatatgatgggcctcatcagttacttgtgcaaatggggagtgattgaggaagccctgaaacttatgaactctttatttgactgctaccatgatctgttttttagtgcatattgtgcacttctcaaagagttgtgcaggacaggtcataccagcattggatgcgcaatgttggaggctctcaaagaaaagggtgtggctgtggatcgatcattattcttttatgtgatggagggcttcctaaaggagcaaagaactgctgaatcaattggaatgcatgacatgtggcttagcaaaagcaaagaacttgatgtttttacttaccgatctgtgttgccttcattaccatggctggacacagatcgagccaagaacttggtagaatctatgctgaccgtgaaacttactgaattctcatatcgcggttgcattgtgaatgaattaatgcaaacaaggaatataaaatgggccattccagtcttgcaagaatcagctcctgggaagctcagtgccactttgttaaattccttacttcaagcctatggttggctaaaaaattggagaaagttagatgcagttctttgcaagatgctaaagatgcatgccaccctttctatatctagctaccgctttcttgtgtgcagaatgtgtgagcaaagtcgtttttctagcgcttcaagccttagagcacttttccaacatactgacaagtcaagagaactgattgcatgcaacattctaatattttatctttttcaaagaagaaacagctcacagattcatgatttattgaaggacattgaaggtaatggtatttctcttgacaaaaccacatatgatttccttgtctatggatttcacaaatctggggatatcaatgattcagttaatgcgcttgatgcctgcattgctcagggaataaaaccaagcaaccgcagtctcagaatagtgttaagtcattactgcaggctaggaaaccatgagaaatcactagcattatttcacttgattgagcgcaatggatggaagcatggtttaatcattaagaccaccctagcttcatgtctcctttcatttgggagacaattggaagcaaaatcatgtctgaacaacctgagcaaaggtgagtttatcggatgttcaagcaattttgatgatctcatcaaggaattctgcattctaggagatttgaaaatgactctttatctgctaaatacaatgttaaagaaaggcacactgcctaatgaagccagttacagttctgttatatataaactttgtacattgaaggagttcgatcaggcacttgattttcttgctgaaatgcagctggcaagtctaaaatcaagtgaaatctcctgtgatgcacttgtacatggcctttgtgccatgggaagaccttctgatgctagaaaggttttggaaatgctaaccaccttgggatctgcaccatcctatggcatgtttagagttgtttttgataactattgcagaagtagcaatctacagaaagctgcggcacttctgcatgacatgcaacaagcaggacaagtgcccaactttgagatgcattggtctgttataagcaatttaagcagtaccaatgagaaaactgaaggacatggagagtgcattttgccaaacctttttctttctgcaaattccccttaaaggtcataaggcgatatatggcttccagaaaatggtgaactgatgattgttctcaagttgaaccctagtggaactgataaaactcgtgaaaccaaggttatgcaactctggaactcaaacgttctactcgaggattgatggttcacataaatgtgggaacacgtaggaaaaactatgcatcttcgatttaggttgcaaaagagggagcttgaactcattacctgagccatcacaactttcttctctgcaacttggttacaggttatgcccttgctaaagggataatgcaaagatccctacaacaccaattagaattggggaagacgaacctcctcctcagtctcctagcttgttcgttgctctcacctgggatctgccctgggatcacctttgcaacatcagttgaactaaagatttggactggacatggttcagttgtttttgaacgagtacgcaaatgccaggtttttcctgtttgggcacaaatggaaacaaaaaagttggactcagcctatcgtgaagctacgaaggaagagcactgtcccattattctgttttttcggacgtggtaccatcctcatcatgtagcctaggatgagttatcactgttaaatatttcaagtggttaaatcatgcatctgcagaatatattattgttgcactctcaaatggtgggttgctaacttgctatgtcatgggagtttgggtgaaggccagaaggatgtgatagacgtcgattcgatgcaggggtgggaatatcctagcgttcgccttggtttcggtcttctctggcagcaagtgtgctcccagttttcaagctgtcaaagctgtccaactcagttccttggggaaggcctcgattcgctcatctcctcggacccggaggactacaacaatatgaagcagtatgagaagctgaccgtcgcgtcaatttactttcttgtgatgagtgttgagcatcatcatatgattcatacaattgatatgcaactagaacccagattttaatgtgtacggttatgatttatcttttctcgttaaataatgtgagatattgaggtgtatgataaattatatgttcatctctatgtaatcattatacactaacattttaataacgagagcatagaacgataaatagtgcttct

SEQ ID NO: 568 - DNA, 5106 bp, Zea Mays
gaacaaggtcacaaaggatgggattgagaccactcgaggttccgagctcccgcaatcaccagtgaggactggggattcgctgatcagatgcggtgtgtggggccttgctcagcggcggggctgggaggtccgagcggaatagatgtcgatggcatggcggttgctccgcacaatccatttccggcatctgagcccaggtgtcaggcgagcatccaagattgtagaccaaggctttaccaataatgccccagagctgagtaccaacaaagggagtttgctgaggtgtagcagcatccgcttcggggagaagcggaactcaatttttgcttgcgctccagacaatttggagcagaaatctggacaaacgttcgaagctgatgcccattctgcgctaaaattgtgctctggtatcgggagtgtagttatagccaagtgttctcacatatttgagagaaatggggacacctttgatgggaactgcagtttgcaagatatcctcaagcctggtttatggctctcaccggagaccctccgccggttttggcgtgtctctgagctgaagcctaaggattttcttgacattttgaatggttttggactcagtgccgtaaaagtgagaaatgcaagatttctatggaatttgtacaggtggacatcgcggcagagcaaagagttccaacatctgccaaggtcaaatgagacaatggtatccatacttgcagatgctcatatgctcagtcaagcagaatcactactgctttcattgattgatcatatgactccagctgtttctagtgaactattcagtcagattatccaggtgtattcagaagcaggcaaccttgggaaatcagttgcactttatgattatgcaaggggcaagcatttgattccttcagcttcatgctatcaagtacttcttcattttctaaccagaaacagaaaggatgaattgattttgagagtatatctggacatgcttgaagttggatttggttcttgcaccgaaggaaatattcttgattctgttgtcatggctttaatcaggaaaggtaaacttttggaagctcttggtattcttcggcaattaaagagtttgggtcttaaattaagcaagggagccttgtcaaatatagttgaagaatttaacaagaaaaaggatattggggatctgatgaatttcttggaagattggaggtgtatacctgagttgcgtctttgcaacagaatccttgcgtctttgtgcacaaatcttggtacttgtcaggcatggttggtcttccaaagtttggaggccttagggtttgctccagatgctacgacttttggaattttcatttttcacagctgtagagaaatgaaactaaaatctgcacttgtatatttatcagagtgctttgctaggcatgttaaacctggagtgtgtgcctataatgctattttaggtggtgttttcagggaggggctatatagacatgcaaagtatatatttgaagacatgattgaaagagaagtaacacccaatctttcaacatataagataattcttgcagggtattgcaggtataggcggtttgatgatattgaacaagtcttgaggcacatgaaaaccaatggtgtaaatgttcttctctctggaaactgtgtgctctccaaggccttatcattcttggggctagatcacctaggggtgaaaatcaagagagataatgtcactggtttcccaaaagctgagttttttgattcagttggcaatggattgtatttggacactgattccaaaatgtttgaggtttcattgtcacaagttttggatagcgcacttctcccagatattaactcagagctaatcagggcatctcagcaaggcgatgttgcaagtgctcttcttgtgaaagacaaagcttttcaatggggatatgacatttcaccagatagctgctctgagctattcaaggccttatgtgtgagccctgcttatgttatagatgtcattgaccttatggaggagatgccagatatactttacaaacttgatgctcaaaatctagatttggttgcccaaacattgagtaggaatggaatgtctgctcatgcaaaactggttttagaaaaaatgttgagagaagacttgtcaatcagtcacaatacatatacttatttaatgataggtttatgcgaagaaaggaacatagcagggttttgggaatgttggaatcttgcaacaaagtgcagatggtcacctgatagcaaggatatgatgggcctcatcagttacttgtgcaaatggggagtgattgaggaagccctgaaacttatgaactctttatttgactgctaccatgatctgttttttagtgcatattgtgcacttctcaaagagttgtgcaggacaggtcataccagcattggatgcgcaatgttggaggctctcaaagaaaagggtgtggctgtggatcgatcattattcttttatgtgatggagggcttcctaaaggagcaaagaactgctgaatcaattggaatgcatgacatgtggcttagcaaaagcaaagaacttgatgtttttacttaccgatctgtgttgccttcattaccatggctggacacagatcgagccaagaacttggtagaatctatgctgaccgtgaaacttactgaattctcatatcgcggttgcattgtgaatgaattaatgcaaacaaggaatataaaatgggccattccagtcttgcaagaatcagctcctgggaagctcagtgccactttgttaaattccttacttcaagcctatggttggctaaaaaattggagaaagttagatgcagttctttgcaagatgctaaagatgcatgccaccctttctatatctagctaccgctttcttgtgtgcagaatgtgtgagcaaagtcgtttttctagcgcttcaagccttagagcacttttccaacatactgacaagtcaagagaactgattgcatgcaacattctaatattttatctttttcaaagaagaaacagctcacagattcatgatttattgaaggacattgaaggtaatggtatttctcttgacaaaaccacatatgatttccttgtctatggatttcacaaatctggggatatcaatgattcagttaatgcgcttgatgcctgcattgctcagggaataaaaccaagcaaccgcagtctcagaatagtgttaagtcattactgcaggctaggaaaccatgagaaatcactagcattatttcacttgattgagcgcaatggatggaagcatggtttaatcattaagaccaccctagcttcatgtctcctttcatttgggagacaattggaagcaaaatcatgtctgaacaacctgagcaaaggtgagtttatcggatgttcaagcaattttgatgatctcatcaaggaattctgcattctaggagatttgaaaatgactctttatctgctaaatacaatgttaaagaaaggcacactgcctaatgaagccagttacagttctgttatatataaactttgtacattgaaggagttcgatcaggcacttgattttcttgctgaaatgcagctggcaagtctaaaatcaagtgaaatctcctgtgatgcacttgtacatggcctttgtgccatgggaagaccttctgatgctagaaaggttttggaaatgctaaccaccttgggatctgcaccatcctatggcatgtttagagttgtttttgataactattgcagaagtagcaatctacagaaagctgcggcacttctgcatgacatgcaacaagcaggacaagtgcccaactttgagatgcattggtctgttataagcaatttaagcagtaccaatgagaaaactgaaggacatggagagtgcattttgccaaacctttttctttctgcaaattccccttaaaggtcataaggcgatatatggcttccagaaaatggtgaactgatgattgttctcaagttgaaccctagtggaactgataaaactcgtgaaaccaaggttatgcaactctggaactcaaacgttctactcgaggattgatggttcacataaatgtgggaacacgtaggaaaaactatgcatcttcgatttaggttgcaaaagagggagcttgaactcattacctgagccatcacaactttcttctctgcaacttggttacaggttatgcccttgctaaagggataatgcaaagatccctacaacaccaattagaattggggaagacgaacctcctcctcagtctcctagcttgttcgttgctctcacctgggatctgccctgggatcacctttgcaacatcagttgaactaaagatttggactggacatggttcagttgtttttgaacggtgatctgtgatatagtacgcaaatgccaggtttttcctgtttgggcacaaatggaaacaaaaaagttggactcagcctatcgtgaagctacgaaggaagagcactgtcccattattctgttttttcggacgtggtaccatcctcatcatgtagcctaggatgagttatcactgttaaatatttcaagtggttaaatcatgcatctgcagaatatattattgttgcactctcaaatggtgggttgctaacttgctatgtcatgggagtttgggtgaaggccagaaggatgtgatagacgtcgattcgatgcaggtccatgggatgctctgtacaggggtgggaatatcctagcgttcgccttggtttcggtcttctctggcagcaagtgtgctcccagttttcaagctgtcaaagctgtccaactcagttccttggggaaggcctcgattcgctcatctcctcggacccggaggactacaacaatatgaagcagtatgagaagctgaccgtcgcgtcaatttactttcttgtgatgagtgttgagcatcatcatatgattcatacaattgatatgcaactagaacccagattttaatgtgtacggttatgatttatcttttctcgttaaataatgtgagatattgaggtgtatgataaattatatgttcatctctatgtaatcattatacactaacattttaataacgagagcatagaacgataaatagtgcttct

SEQ ID NO: 569 - DNA, 6177 bp, Zea Mays
aacaaggtcacaaaggatgggattgagaccactcgaggttccgagctcccgcaatcaccagtgaggactggggattcgctgatcagatgcggtgtgtggggccttgctcagcggcggggctgggaggtccgagcggaatagatgtcgatggcatggcggttgctccgcacaatccatttccggcatctgagcccaggtgtcaggcgagcatccaagattgtagaccaaggctttaccaataatgccccagagctgagtaccaacaaagggagtttgctgaggtgtagcagcatccgcttcggggagaagcggaactcaatttttgcttgcgctccagacaatttggagcagaaatctggacaaacgttcgaagctgatgcccattctgcgctaaaattgtgctctggtatcgggagtgtagttatagccaagtgttctcacatatttgagagaaatggggacacctttgatgggaactgcagtttgcaagatatcctcaagcctggtttatggctctcaccggagaccctccgccggttttggcgtgtctctgagctgaagcctaaggattttcttgacattttgaatggttttggactcagtgccgtaaaagtgagaaatgcaagatttctatggaatttgtacaggtggacatcgcggcagagcaaagagttccaacatctgccaaggtcaaatgagacaatggtatccatacttgcagatgctcatatgctcagtcaagcagaatcactactgctttcattgattgatcatatgactccagctgtttctagtgaactattcagtcagattatccaggtgtattcagaagcaggcaaccttgggaaatcagttgcactttatgattatgcaaggggcaagcatttgattccttcagcttcatgctatcaagtacttcttcattttctaaccagaaacagaaaggatgaattgattttgagagtatatctggacatgcttgaagttggatttggttcttgcaccgaaggaaatattcttgattctgttgtcatggctttaatcaggaaaggtaaacttttggaagctcttggtattcttcggcaattaaagagtttgggtcttaaattaagcaagggagccttgtcaaatatagttgaagaatttaacaagaaaaaggatattggggatctgatgaatttcttggaagattggaggtgtatacctgagttgcgtctttgcaacagaatccttgcgtctttgtgcacaaatcttggtacttgtcaggcatggttggtcttccaaagtttggaggccttagggtttgctccagatgctacgacttttggaattttcatttttcacagctgtagagaaatgaaactaaaatctgcacttgtatatttatcagagtgctttgctaggcatgttaaacctggagtgtgtgcctataatgctattttaggtggtgttttcagggaggggctatatagacatgcaaagtatatatttgaagacatgattgaaagagaagtaacacccaatctttcaacatataagataattcttgcagggtattgcaggtataggcggtttgatgatattgaacaagtcttgaggcacatgaaaaccaatggtgtaaatgttcttctctctggaaactgtgtgctctccaaggccttatcattcttggggctagatcacctaggggtgaaaatcaagagagataatgtcactggtttcccaaaagctgagttttttgattcagttggcaatggattgtatttggacactgattccaaaatgtttgaggtttcattgtcacaagttttggatagcgcacttctcccagatattaactcagagctaatcagggcatctcagcaaggcgatgttgcaagtgctcttcttgtgaaagacaaagcttttcaatggggatatgacatttcaccagatagctgctctgagctattcaaggccttatgtgtgagccctgcttatgttatagatgtcattgaccttatggaggagatgccagatatactttacaaacttgatgctcaaaatctagatttggttgcccaaacattgagtaggaatggaatgtctgctcatgcaaaactggttttagaaaaaatgttgagagaagacttgtcaatcagtcacaatacatatacttatttaatgataggtttatgcgaagaaaggaacatagcagggttttgggaatgttggaatcttgcaacaaagtgcagatggtcacctgatagcaaggatatgatgggcctcatcagttacttgtgcaaatggggagtgattgaggaagccctgaaacttatgaactctttatttgactgctaccatgatctgttttttagtgcatattgtgcacttctcaaagagttgtgcaggacaggtcataccagcattggatgcgcaatgttggaggctctcaaagaaaagggtgtggctgtggatcgatcattattcttttatgtgatggagggcttcctaaaggagcaaagaactgctgaatcaattggaatgcatgacatgtggcttagcaaaagcaaagaacttgatgtttttacttaccgatctgtgttgccttcattaccatggctggacacagatcgagccaagaacttggtagaatctatgctgaccgtgaaacttactgaattctcatatcgcggttgcattgtgaatgaattaatgcaaacaaggaatataaaatgggccattccagtcttgcaagaatcagctcctgggaagctcagtgccactttgttaaattccttacttcaagcctatggttggctaaaaaattggagaaagttagatgcagttctttgcaagatgctaaagatgcatgccaccctttctatatctagctaccgctttcttgtgtgcagaatgtgtgagcaaagtcgtttttctagcgcttcaagccttagagcacttttccaacatactgacaagtcaagagaactgattgcatgcaacattctaatattttatctttttcaaagaagaaacagctcacagattcatgatttattgaaggacattgaagggaataaaaccaagcaaccgcagtctcagaatagtgttaagtcattactgcaggctaggaaaccatgagaaatcactagcattatttcacttgattgagcgcaatggatggaagcatggtttaatcattaagaccaccctagcttcatgtctcctttcatttgggagacaattggaagcaaaatcatgtctgaacaacctgagcaaaggtgagtttatcggatgttcaagcaattttgatgatctcatcaaggaattctgcattctaggagatttgaaaatgactctttatctgctaaatacaatgttaaagaaaggcacactgcctaatgaagccagttacagttctgttatatataaactttgtacattgaaggagttcgatcaggcacttgattttcttgctgaaatgcagctggcaagtctaaaatcaagtgaaatctcctgtgatgcacttgtacatggcctttgtgccatgggaagaccttctgatgctagaaaggttttggaaatgctaaccaccttgggatctgcaccatcctatggcatgtttagagttgtttttgataactattgcagaagtagcaatctacagaaagctgcggcacttctgcatgacatgcaacaagcaggacaagtgcccaactttgagatgcattggtctgttataagcaatttaagcagtaccaatgagaaaactgaaggacatggagagtgcattttgccaaacctttttctttctgcaaattccccttaaaggtcataaggcgatatatggcttccagaaaatggtgaactgatgattgttctcaagttgaaccctagtggaactgataaaactcgtgaaaccaaggttatgcaactctggaactcaaacgttctactcgaggattgatggttcacataaatgtgggaacacgtaggaaaaactatgcatcttcgatttaggttgcaaaagagggagcttgaactcattacctgagccatcacaactttcttctctgcaacttggttacaggttatgcccttgctaaagggataatgcaaagagtacgcaaatgccaggtttttcctgtttgggcacaaatggaaacaaaaaagttggactcagcctatcgtgaagctacgaaggaagagcactgtcccattattctgttttttcggtaattaaagcatcatctccattcttggttgttcccatttttctgttatttactaagtagtttttctggctaatgttaaaaactggaagaagaccatgtttctagcatgaacatgccaacatggtgccatcaacaacttccctgttagctcacggtacaccatgctccagtctgcccccctggttatcactaattcaatcatctgtggtgccgattgtgttcccaagatgcactgaaatagagcagatcaaatgaggatgaagttactgtgtagagatttttgttcaccctttgtagcagcatccatggatttttatttgcacagaattactctcttttacccgtaacttgtgattgctgatatgatgcatagaagtctgaaatctgaattgatgccactgtattttttccatgtttacattatgttgattttctttctgctatttactttcaatgttttggagcagtacctgagcaactgaggcaaccctttcgatcttatgagaccaagatgttttctggtcccaaacccatgatggtatgccttagtttgcttgcagacaaatgcttttttttgacaacttcactcatcccttgttttgaatagatgacataattggagactctggccatttatctgtgttgtttccattaatgtgtcttctcataggtactctgttatggtcgctagatcggtgagggattggagagggatattgatgggcaggaacgtcggtcgggggcctctgcccacggccgagcaagaggagggtttctctcttctaattcttacctactttatttctcatccattgattacataaatagaccagctggctgtccttatctagctagagatccttatctcctaaaaactctcctaaaactactaactgataaccttcctagataatctcaaccaatctcctaaataatcttaactaatcttctaatattactagctgaatgcccgtgcgttgcaacgggaatatataataccagtatactacgataacttatatacaaaatatgtgttataccattatgagaaaatgtttcataatcaatttgtgattctggccatacataaattttgttatttataatctatctgtttcaccactgcattacaaccatcagtatcatgcagacttcgatatatgtcacgatttgtatggtctcattattggagagcatgtttcacacataccagaagaaattccctcgtacatcgttagtcatcggacacgtaccaccatacgcttttgcttaaacaaaaaggtaagtgtgtgtttgcaagactaatggtcaaacaccgtataaccataaagttagaatactatattaatatattaaataaattaatccaatagacatagattaacccaattaacacaggataaataaatatctaattataaaagtatgaaacatggtataatcaatgttgttactgcgtagtaaatattcatacgagactaacacaactggaacggttcaatttagaattaaaatggggaagttacgaatttccaaagtttctatgtatttgatataggattaattaggaaatcaattttattgttgttttcatgacaaaacagaggtattatgtgataaaaaataatattatagaattatagaaattggaatgaattcatttagatttaatatgaaatttccatgaattaaatgggcttttgcaattatttttaaactaaaaatcaatttccaaactcttttccctattttctttatttcctggactgcgtcccaaattccagaaacatcaggggccaagctataaatgtttttctagactcagtgagcatacagagtggacggcgggttaaacacaaataaagccaacatgggtcatgttggctagagggtggaaggctagacattctactcaatagatccaaggtttaatccttgagcaaccacggtttaatttttt

SEQ ID NO: 570 - DNA, 5455 bp, Zea Mays
aacaaggtcacaaaggatgggattgagaccactcgaggttccgagctcccgcaatcaccagtgaggactggggattcgctgatcagatgcggtgtgtggggccttgctcagcggcggggctgggaggtccgagcggaatagatgtcgatggcatggcggttgctccgcacaatccatttccggcatctgagcccaggtgtcaggcgagcatccaagattgtagaccaaggctttaccaataatgccccagagctgagtaccaacaaagggagtttgctgaggtgtagcagcatccgcttcggggagaagcggaactcaatttttgcttgcgctccagacaatttggagcagaaatctggacaaacgttcgaagctgatgcccattctgcgctaaaattgtgctctggtatcgggagtgtagttatagccaagtgttctcacatatttgagagaaatggggacacctttgatgggaactgcagtttgcaagatatcctcaagcctggtttatggctctcaccggagaccctccgccggttttggcgtgtctctgagctgaagcctaaggattttcttgacattttgaatggttttggactcagtgccgtaaaagtgagaaatgcaagatttctatggaatttgtacaggtggacatcgcggcagagcaaagagttccaacatctgccaaggtcaaatgagacaatggtatccatacttgcagatgctcatatgctcagtcaagcagaatcactactgctttcattgattgatcatatgactccagctgtttctagtgaactattcagtcagattatccaggtgtattcagaagcaggcaaccttgggaaatcagttgcactttatgattatgcaaggggcaagcatttgattccttcagcttcatgctatcaagtacttcttcattttctaaccagaaacagaaaggatgaattgattttgagagtatatctggacatgcttgaagttggatttggttcttgcaccgaaggaaatattcttgattctgttgtcatggctttaatcaggaaaggtaaacttttggaagctcttggtattcttcggcaattaaagagtttgggtcttaaattaagcaagggagccttgtcaaatatagttgaagaatttaacaagaaaaaggatattggggatctgatgaatttcttggaagattggaggtgtatacctgagttgcgtctttgcaacagaatccttgcgtctttgtgcacaaatcttggtacttgtcaggcatggttggtcttccaaagtttggaggccttagggtttgctccagatgctacgacttttggaattttcatttttcacagctgtagagaaatgaaactaaaatctgcacttgtatatttatcagagtgctttgctaggcatgttaaacctggagtgtgtgcctataatgctattttaggtggtgttttcagggaggggctatatagacatgcaaagtatatatttgaagacatgattgaaagagaagtaacacccaatctttcaacatataagataattcttgcagggtattgcaggtataggcggtttgatgatattgaacaagtcttgaggcacatgaaaaccaatggtgtaaatgttcttctctctggaaactgtgtgctctccaaggccttatcattcttggggctagatcacctaggggtgaaaatcaagagagataatgtcactggtttcccaaaagctgagttttttgattcagttggcaatggattgtatttggacactgattccaaaatgtttgaggtttcattgtcacaagttttggatagcgcacttctcccagatattaactcagagctaatcagggcatctcagcaaggcgatgttgcaagtgctcttcttgtgaaagacaaagcttttcaatggggatatgacatttcaccagatagctgctctgagctattcaaggccttatgtgtgagccctgcttatgttatagatgtcattgaccttatggaggagatgccagatatactttacaaacttgatgctcaaaatctagatttggttgcccaaacattgagtaggaatggaatgtctgctcatgcaaaactggttttagaaaaaatgttgagagaagacttgtcaatcagtcacaatacatatacttatttaatgataggtttatgcgaagaaaggaacatagcagggttttgggaatgttggaatcttgcaacaaagtgcagatggtcacctgatagcaaggatatgatgggcctcatcagttacttgtgcaaatggggagtgattgaggaagccctgaaacttatgaactctttatttgactgctaccatgatctgttttttagtgcatattgtgcacttctcaaagagttgtgcaggacaggtcataccagcattggatgcgcaatgttggaggctctcaaagaaaagggtgtggctgtggatcgatcattattcttttatgtgatggagggcttcctaaaggagcaaagaactgctgaatcaattggaatgcatgacatgtggcttagcaaaagcaaagaacttgatgtttttacttaccgatctgtgttgccttcattaccatggctggacacagatcgagccaagaacttggtagaatctatgctgaccgtgaaacttactgaattctcatatcgcggttgcattgtgaatgaattaatgcaaacaaggaatataaaatgggccattccagtcttgcaagaatcagctcctgggaagctcagtgccactttgttaaattccttacttcaagcctatggttggctaaaaaattggagaaagttagatgcagttctttgcaagatgctaaagatgcatgccaccctttctatatctagctaccgctttcttgtgtgcagaatgtgtgagcaaagtcgtttttctagcgcttcaagccttagagcacttttccaacatactgacaagtcaagagaactgattgcatgcaacattctaatattttatctttttcaaagaagaaacagctcacagattcatgatttattgaaggacattgaaggtaatggtatttctcttgacaaaaccacatatgatttccttgtctatggatttcacaaatctggggatatcaatgattcagttaatgcgcttgatgcctgcattgctcagggaataaaaccaagcaaccgcagtctcagaatagtgttaagtcattactgcaggctaggaaaccatgagaaatcactagcattatttcacttgattgagcgcaatggatggaagcatggtttaatcattaagaccaccctagcttcatgtctcctttcatttgggagacaattggaagcaaaatcatgtctgaacaacctgagcaaaggtgagtttatcggatgttcaagcaattttgatgatctcatcaaggaattctgcattctaggagatttgaaaatgactctttatctgctaaatacaatgttaaagaaaggcacactgcctaatgaagccagttacagttctgttatatataaactttgtacattgaaggagttcgatcaggcacttgattttcttgctgaaatgcagctggcaagtctaaaatcaagtgaaatctcctgtgatgcacttgtacatggcctttgtgccatgggaagaccttctgatgctagaaaggttttggaaatgctaaccaccttgggatctgcaccatcctatggcatgtttagagttgtttttgataactattgcagaagtagcaatctacagaaagctgcggcacttctgcatgacatgcaacaagcaggacaagtgcccaactttgagatgcattggtctgttataagcaatttaagcagtaccaatgagaaaactgaaggacatggagagtgcattttgccaaacctttttctttctgcaaattccccttaaaggtcataaggcgatatatggcttccagaaaatggtgaactgatgattgttctcaagttgaaccctagtggaactgataaaactcgtgaaaccaaggttatgcaactctggaactcaaacgttctactcgaggattgatggttcacataaatgtgggaacacgtaggaaaaactatgcatcttcgatttaggttgcaaaagagggagcttgaactcattacctgagccatcacaactttcttctctgcaacttggttacaggttatgcccttgctaaagggataatgcaaagatccctacaacaccaattagaattggggaagacgaacctcctcctcagtctcctagcttgttcgttgctctcacctgggatctgccctgggatcacctttgcaacatcagttgaactaaagatttggactggacatggttcagttgtttttgaacgagtacgcaaatgccaggtttttcctgtttgggcacaaatggaaacaaaaaagttggactcagcctatcgtgaagctacgaaggaagagcactgtcccattattctgttttttcgaccatgtttctagcatgaacatgccaacatggtgccatcaacaacttccctgttagctcacggtacaccatgctccagtctgcccccctggttatcactaattcaatcatctgtggtgccgattgtgttcccaagatgcactgaaatagagcagatcaaatgaggatgaagttactgtgtagagatttttgttcaccctttgtagcagcatccatggatttttatttgcacagaattactctcttttacccgtaacttgtgattgctgatatgatgcatagaagtctgaaatctgaattgatgccactgtattttttccatgtttacattatgttgattttctttctgctatttactttcaatgttttggagcagtacctgagcaactgaggcaaccctttcgatcttatgagaccaagatgttttctggtcccaaacccatgatgaatatattattgttgcactctcaaatggtgggttgctaacttgctatgtcatgggagtttgggtgaaggccagaaggatgtgatagacgtcgattcgatgcaggtccatgggatgctctgtacaggggtgggaatatcctagcgttcgccttggtttcggtcttctctggcagcaagtgtgctcccagttttcaagctgtcaaagctgtccaactcagttccttggggaaggcctcgattcgctcatctcctcggacccggaggactacaacaatatgaagcagtatgagaagctgaccgtcgcgtcaatttactttcttgtgatgagtgttgagcatcatcatatgattcatacaattgatatgcaactagaacccagattttaatgtgtacggttatgatttatcttttctcgttaaataatgtgagatattgaggtgtatgataaattatatgttcatctctatgtaatcattatacactaacattttaataacgagagcatagaacgataaatagtgcttct

SEQ ID NO: 571 - DNA, 5363 bp, Zea Mays
aacaaggtcacaaaggatgggattgagaccactcgaggttccgagctcccgcaatcaccagtgaggactggggattcgctgatcagatgcggtgtgtggggccttgctcagcggcggggctgggaggtccgagcggaatagatgtcgatggcatggcggttgctccgcacaatccatttccggcatctgagcccaggtgtcaggcgagcatccaagattgtagaccaaggctttaccaataatgccccagagctgagtaccaacaaagggagtttgctgaggtgtagcagcatccgcttcggggagaagcggaactcaatttttgcttgcgctccagacaatttggagcagaaatctggacaaacgttcgaagctgatgcccattctgcgctaaaattgtgctctggtatcgggagtgtagttatagccaagtgttctcacatatttgagagaaatggggacacctttgatgggaactgcagtttgcaagatatcctcaagcctggtttatggctctcaccggagaccctccgccggttttggcgtgtctctgagctgaagcctaaggattttcttgacattttgaatggttttggactcagtgccgtaaaagtgagaaatgcaagatttctatggaatttgtacaggtggacatcgcggcagagcaaagagttccaacatctgccaaggtcaaatgagacaatggtatccatacttgcagatgctcatatgctcagtcaagcagaatcactactgctttcattgattgatcatatgactccagctgtttctagtgaactattcagtcagattatccaggtgtattcagaagcaggcaaccttgggaaatcagttgcactttatgattatgcaaggggcaagcatttgattccttcagcttcatgctatcaagtacttcttcattttctaaccagaaacagaaaggatgaattgattttgagagtatatctggacatgcttgaagttggatttggttcttgcaccgaaggaaatattcttgattctgttgtcatggctttaatcaggaaaggtaaacttttggaagctcttggtattcttcggcaattaaagagtttgggtcttaaattaagcaagggagccttgtcaaatatagttgaagaatttaacaagaaaaaggatattggggatctgatgaatttcttggaagattggaggtgtatacctgagttgcgtctttgcaacagaatccttgcgtctttgtgcacaaatcttggtacttgtcaggcatggttggtcttccaaagtttggaggccttagggtttgctccagatgctacgacttttggaattttcatttttcacagctgtagagaaatgaaactaaaatctgcacttgtatatttatcagagtgctttgctaggcatgttaaacctggagtgtgtgcctataatgctattttaggtggtgttttcagggaggggctatatagacatgcaaagtatatatttgaagacatgattgaaagagaagtaacacccaatctttcaacatataagataattcttgcagggtattgcaggtataggcggtttgatgatattgaacaagtcttgaggcacatgaaaaccaatggtgtaaatgttcttctctctggaaactgtgtgctctccaaggccttatcattcttggggctagatcacctaggggtgaaaatcaagagagataatgtcactggtttcccaaaagctgagttttttgattcagttggcaatggattgtatttggacactgattccaaaatgtttgaggtttcattgtcacaagttttggatagcgcacttctcccagatattaactcagagctaatcagggcatctcagcaaggcgatgttgcaagtgctcttcttgtgaaagacaaagcttttcaatggggatatgacatttcaccagatagctgctctgagctattcaaggccttatgtgtgagccctgcttatgttatagatgtcattgaccttatggaggagatgccagatatactttacaaacttgatgctcaaaatctagatttggttgcccaaacattgagtaggaatggaatgtctgctcatgcaaaactggttttagaaaaaatgttgagagaagacttgtcaatcagtcacaatacatatacttatttaatgataggtttatgcgaagaaaggaacatagcagggttttgggaatgttggaatcttgcaacaaagtgcagatggtcacctgatagcaaggatatgatgggcctcatcagttacttgtgcaaatggggagtgattgaggaagccctgaaacttatgaactctttatttgactgctaccatgatctgttttttagtgcatattgtgcacttctcaaagagttgtgcaggacaggtcataccagcattggatgcgcaatgttggaggctctcaaagaaaagggtgtggctgtggatcgatcattattcttttatgtgatggagggcttcctaaaggagcaaagaactgctgaatcaattggaatgcatgacatgtggcttagcaaaagcaaagaacttgatgtttttacttaccgatctgtgttgccttcattaccatggctggacacagatcgagccaagaacttggtagaatctatgctgaccgtgaaacttactgaattctcatatcgcggttgcattgtgaatgaattaatgcaaacaaggaatataaaatgggccattccagtcttgcaagaatcagctcctgggaagctcagtgccactttgttaaattccttacttcaagcctatggttggctaaaaaattggagaaagttagatgcagttctttgcaagatgctaaagatgcatgccaccctttctatatctagctaccgctttcttgtgtgcagaatgtgtgagcaaagtcgtttttctagcgcttcaagccttagagcacttttccaacatactgacaagtcaagagaactgattgcatgcaacattctaatattttatctttttcaaagaagaaacagctcacagattcatgatttattgaaggacattgaagggaataaaaccaagcaaccgcagtctcagaatagtgttaagtcattactgcaggctaggaaaccatgagaaatcactagcattatttcacttgattgagcgcaatggatggaagcatggtttaatcattaagaccaccctagcttcatgtctcctttcatttgggagacaattggaagcaaaatcatgtctgaacaacctgagcaaaggtgagtttatcggatgttcaagcaattttgatgatctcatcaaggaattctgcattctaggagatttgaaaatgactctttatctgctaaatacaatgttaaagaaaggcacactgcctaatgaagccagttacagttctgttatatataaactttgtacattgaaggagttcgatcaggcacttgattttcttgctgaaatgcagctggcaagtctaaaatcaagtgaaatctcctgtgatgcacttgtacatggcctttgtgccatgggaagaccttctgatgctagaaaggttttggaaatgctaaccaccttgggatctgcaccatcctatggcatgtttagagttgtttttgataactattgcagaagtagcaatctacagaaagctgcggcacttctgcatgacatgcaacaagcaggacaagtgcccaactttgagatgcattggtctgttataagcaatttaagcagtaccaatgagaaaactgaaggacatggagagtgcattttgccaaacctttttctttctgcaaattccccttaaaggtcataaggcgatatatggcttccagaaaatggtgaactgatgattgttctcaagttgaaccctagtggaactgataaaactcgtgaaaccaaggttatgcaactctggaactcaaacgttctactcgaggattgatggttcacataaatgtgggaacacgtaggaaaaactatgcatcttcgatttaggttgcaaaagagggagcttgaactcattacctgagccatcacaactttcttctctgcaacttggttacaggttatgcccttgctaaagggataatgcaaagagtacgcaaatgccaggtttttcctgtttgggcacaaatggaaacaaaaaagttggactcagcctatcgtgaagctacgaaggaagagcactgtcccattattctgttttttcggtaattaaagcatcatctccattcttggttgttcccatttttctgttatttactaagtagtttttctggctaatgttaaaaactggaagaagaccatgtttctagcatgaacatgccaacatggtgccatcaacaacttccctgttagctcacggtacaccatgctccagtctgcccccctggttatcactaattcaatcatctgtggtgccgattgtgttcccaagatgcactgaaatagagcagatcaaatgaggatgaagttactgtgtagagatttttgttcaccctttgtagcagcatccatggatttttatttgcacagaattactctcttttacccgtaacttgtgattgctgatatgatgcatagaagtctgaaatctgaattgatgccactgtattttttccatgtttacattatgttgattttctttctgctatttactttcaatgttttggagcagtacctgagcaactgaggcaaccctttcgatcttatgagaccaagatgttttctggtcccaaacccatgatggacgtggtaccatcctcatcatgtagcctaggatgagttatcactgttaaatatttcaagtggttaaatcatgcatctgcagaatatattattgttgcactctcaaatggtgggttgctaacttgctatgtcatgggagtttgggtgaaggccagaaggatgtgatagacgtcgattcgatgcaggtccatgggatgctctgtacaggggtgggaatatcctagcgttcgccttggtttcggtcttctctggcagcaagtgtgctcccagttttcaagctgtcaaagctgtccaactcagttccttggggaaggcctcgattcgctcatctcctcggacccggaggactacaacaatatgaagcagtatgagaagctgaccgtcgcgtcaatttactttcttgtgatgagtgttgagcatcatcatatgattcatacaattgatatgcaactagaacccagattttaatgtgtacggttatgatttatcttttctcgttaaataatgtgagatattgaggtgtatgataaattatatgttcatctctatgtaatcattatacactaacattttaataacgagagcatagaacgataaatagtgcttct

SEQ ID NO: 572 - DNA, 4462 bp, Zea Mays
gggattgagaccactcgaggttccgagctcccgcaatcaccagtgaggactggggattcgctgatcagatgcggtgtgtggggccttgctcagcggcggggctgggaggtccgagcggaatagatgtcgatggcatggcggttgctccgcacaatccatttccggcatctgagcccaggtgtcaggcgagcatccaagattgtagaccaaggctttaccaataatgccccagagctgagtaccaacaaagggagtttgctgaggtgtagcagcatccgcttcggggagaagcggaactcaatttttgcttgcgctccagacaatttggagcagaaatctggacaaacgttcgaagctgatgcccattctgcgctaaaattgtgctctggtatcgggagtgtagttatagccaagtgttctcacatatttgagagaaatggggacacctttgatgggaactgcagtttgcaagatatcctcaagcctggtttatggctctcaccggagaccctccgccggttttggcgtgtctctgagctgaagcctaaggattttcttgacattttgaatggttttggactcagtgccgtaaaagtgagaaatgcaagatttctatggaatttgtacaggtggacatcgcggcagagcaaagagttccaacatctgccaaggtcaaatgagacaatggtatccatacttgcagatgctcatatgctcagtcaagcagaatcactactgctttcattgattgatcatatgactccagctgtttctagtgaactattcagtcagattatccaggtgtattcagaagcaggcaaccttgggaaatcagttgcactttatgattatgcaaggggcaagcatttgattccttcagcttcatgctatcaagtacttcttcattttctaaccagaaacagaaaggatgaattgattttgagagtatatctggacatgcttgaagttggatttggttcttgcaccgaaggaaatattcttgattctgttgtcatggctttaatcaggaaagggtattgcaggtataggcggtttgatgatattgaacaagtcttgaggcacatgaaaaccaatggtgtaaatgttcttctctctggaaactgtgtgctctccaaggccttatcattcttggggctagatcacctaggggtgaaaatcaagagagataatgtcactggtttcccaaaagctgagttttttgattcagttggcaatggattgtatttggacactgattccaaaatgtttgaggtttcattgtcacaagttttggatagcgcacttctcccagatattaactcagagctaatcagggcatctcagcaaggcgatgttgcaagtgctcttcttgtgaaagacaaagcttttcaatggggatatgacatttcaccagatagctgctctgagctattcaaggccttatgtgtgagccctgcttatgttatagatgtcattgaccttatggaggagatgccagatatactttacaaacttgatgctcaaaatctagatttggttgcccaaacattgagtaggaatggaatgtctgctcatgcaaaactggttttagaaaaaatgttgagagaagacttgtcaatcagtcacaatacatatacttatttaatgataggtttatgcgaagaaaggaacatagcagggttttgggaatgttggaatcttgcaacaaagtgcagatggtcacctgatagcaaggatatgatgggcctcatcagttacttgtgcaaatggggagtgattgaggaagccctgaaacttatgaactctttatttgactgctaccatgatctgttttttagtgcatattgtgcacttctcaaagagttgtgcaggacaggtcataccagcattggatgcgcaatgttggaggctctcaaagaaaagggtgtggctgtggatcgatcattattcttttatgtgatggagggcttcctaaaggagcaaagaactgctgaatcaattggaatgcatgacatgtggcttagcaaaagcaaagaacttgatgtttttacttaccgatctgtgttgccttcattaccatggctggacacagatcgagccaagaacttggtagaatctatgctgaccgtgaaacttactgaattctcatatcgcggttgcattgtgaatgaattaatgcaaacaaggaatataaaatgggccattccagtcttgcaagaatcagctcctgggaagctcagtgccactttgttaaattccttacttcaagcctatggttggctaaaaaattggagaaagttagatgcagttctttgcaagatgctaaagatgcatgccaccctttctatatctagctaccgctttcttgtgtgcagaatgtgtgagcaaagtcgtttttctagcgcttcaagccttagagcacttttccaacatactgacaagtcaagagaactgattgcatgcaacattctaatattttatctttttcaaagaagaaacagctcacagattcatgatttattgaaggacattgaagggaataaaaccaagcaaccgcagtctcagaatagtgttaagtcattactgcaggctaggaaaccatgagaaatcactagcattatttcacttgattgagcgcaatggatggaagcatggtttaatcattaagaccaccctagcttcatgtctcctttcatttgggagacaattggaagcaaaatcatgtctgaacaacctgagcaaaggtgagtttatcggatgttcaagcaattttgatgatctcatcaaggaattctgcattctaggagatttgaaaatgactctttatctgctaaatacaatgttaaagaaaggcacactgcctaatgaagccagttacagttctgttatatataaactttgtacattgaaggagttcgatcaggcacttgattttcttgctgaaatgcagctggcaagtctaaaatcaagtgaaatctcctgtgatgcacttgtacatggcctttgtgccatgggaagaccttctgatgctagaaaggttttggaaatgctaaccaccttgggatctgcaccatcctatggcatgtttagagttgtttttgataactattgcagaagtagcaatctacagaaagctgcggcacttctgcatgacatgcaacaagcaggacaagtgcccaactttgagatgcattggtctgttataagcaatttaagcagtaccaatgagaaaactgaaggacatggagagtgcattttgccaaacctttttctttctgcaaattccccttaaaggtcataaggcgatatatggcttccagaaaatggtgaactgatgattgttctcaagttgaaccctagtggaactgataaaactcgtgaaaccaaggttatgcaactctggaactcaaacgttctactcgaggattgatggttcacataaatgtgggaacacgtaggaaaaactatgcatcttcgatttaggttgcaaaagagggagcttgaactcattacctgagccatcacaactttcttctctgcaacttggttacaggttatgcccttgctaaagggataatgcaaagatccctacaacaccaattagaattggggaagacgaacctcctcctcagtctcctagcttgttcgttgctctcacctgggatctgccctgggatcacctttgcaacatcagttgaactaaagatttggactggacatggttcagttgtttttgaacgagtacgcaaatgccaggtttttcctgtttgggcacaaatggaaacaaaaaagttggactcagcctatcgtgaagctacgaaggaagagcactgtcccattattctgttttttcggacgtggtaccatcctcatcatgtagcctaggatgagttatcactgttaaatatttcaagtggttaaatcatgcatctgcagaatatattattgttgcactctcaaatggtgggttgctaacttgctatgtcatgggagtttgggtgaaggccagaaggatgtgatagacgtcgattcgatgcaggtccatgggatgctctgtacaggggtgggaatatcctagcgttcgccttggtttcggtcttctctggcagcaagtgtgctcccagttttcaagctgtcaaagctgtccaactcagttccttggggaaggcctcgattcgctcatctcctcggacccggaggactacaacaatatgaagcagtatgagaagctgaccgtcgcgtcaatttactttcttgtgatgagtgttgagcatcatcatatgattcatacaattgatatgcaactagaacccagattttaatgtgtacggttatgatttatcttttctcgttaaataatgtgagatattgaggtgtatgataaattatatgttcatctctatgtaatcattatacactaacattttaataacgagagcatagaacgataaatagtgcttct

SEQ ID NO: 573 - DNA, 5921 bp, Zea Mays
attgagaccactcgaggttccgagctcccgcaatcaccagtgaggactggggattcgctgatcagatgcggtgtgtggggccttgctcagcggcggggctgggaggtccgagcggaatagatgtcgatggcatggcggttgctccgcacaatccatttccggcatctgagcccaggtgtcaggcgagcatccaagattgtagaccaaggctttaccaataatgccccagagctgagtaccaacaaagggagtttgctgaggtgtagcagcatccgcttcggggagaagcggaactcaatttttgcttgcgctccagacaatttggagcagaaatctggacaaacgttcgaagctgatgcccattctgcgctaaaattgtgctctggtatcgggagtgtagttatagccaagtgttctcacatatttgagagaaatggggacacctttgatgggaactgcagtttgcaagatatcctcaagcctggtttatggctctcaccggagaccctccgccggttttggcgtgtctctgagctgaagcctaaggattttcttgacattttgaatggttttggactcagtgccgtaaaagtgagaaatgcaagatttctatggaatttgtacaggtggacatcgcggcagagcaaagagttccaacatctgccaaggtcaaatgagacaatggtatccatacttgcagatgctcatatgctcagtcaagcagaatcactactgctttcattgattgatcatatgactccagctgtttctagtgaactattcagtcagattatccaggtgtattcagaagcaggcaaccttgggaaatcagttgcactttatgattatgcaaggggcaagcatttgattccttcagcttcatgctatcaagtacttcttcattttctaaccagaaacagaaaggatgaattgattttgagagtatatctggacatgcttgaagttggatttggttcttgcaccgaaggaaatattcttgattctgttgtcatggctttaatcaggaaagggtattgcaggtataggcggtttgatgatattgaacaagtcttgaggcacatgaaaaccaatggtgtaaatgttcttctctctggaaactgtgtgctctccaaggccttatcattcttggggctagatcacctaggggtgaaaatcaagagagataatgtcactggtttcccaaaagctgagttttttgattcagttggcaatggattgtatttggacactgattccaaaatgtttgaggtttcattgtcacaagttttggatagcgcacttctcccagatattaactcagagctaatcagggcatctcagcaaggcgatgttgcaagtgctcttcttgtgaaagacaaagcttttcaatggggatatgacatttcaccagatagctgctctgagctattcaaggccttatgtgtgagccctgcttatgttatagatgtcattgaccttatggaggagatgccagatatactttacaaacttgatgctcaaaatctagatttggttgcccaaacattgagtaggaatggaatgtctgctcatgcaaaactggttttagaaaaaatgttgagagaagacttgtcaatcagtcacaatacatatacttatttaatgataggtttatgcgaagaaaggaacatagcagggttttgggaatgttggaatcttgcaacaaagtgcagatggtcacctgatagcaaggatatgatgggcctcatcagttacttgtgcaaatggggagtgattgaggaagccctgaaacttatgaactctttatttgactgctaccatgatctgttttttagtgcatattgtgcacttctcaaagagttgtgcaggacaggtcataccagcattggatgcgcaatgttggaggctctcaaagaaaagggtgtggctgtggatcgatcattattcttttatgtgatggagggcttcctaaaggagcaaagaactgctgaatcaattggaatgcatgacatgtggcttagcaaaagcaaagaacttgatgtttttacttaccgatctgtgttgccttcattaccatggctggacacagatcgagccaagaacttggtagaatctatgctgaccgtgaaacttactgaattctcatatcgcggttgcattgtgaatgaattaatgcaaacaaggaatataaaatgggccattccagtcttgcaagaatcagctcctgggaagctcagtgccactttgttaaattccttacttcaagcctatggttggctaaaaaattggagaaagttagatgcagttctttgcaagatgctaaagatgcatgccaccctttctatatctagctaccgctttcttgtgtgcagaatgtgtgagcaaagtcgtttttctagcgcttcaagccttagagcacttttccaacatactgacaagtcaagagaactgattgcatgcaacattctaatattttatctttttcaaagaagaaacagctcacagattcatgatttattgaaggacattgaaggtaatggtatttctcttgacaaaaccacatatgatttccttgtctatggatttcacaaatctggggatatcaatgattcagttaatgcgcttgatgcctgcattgctcagggaataaaaccaagcaaccgcagtctcagaatagtgttaagtcattactgcaggctaggaaaccatgagaaatcactagcattatttcacttgattgagcgcaatggatggaagcatggtttaatcattaagaccaccctagcttcatgtctcctttcatttgggagacaattggaagcaaaatcatgtctgaacaacctgagcaaaggtgagtttatcggatgttcaagcaattttgatgatctcatcaaggaattctgcattctaggagatttgaaaatgactctttatctgctaaatacaatgttaaagaaaggcacactgcctaatgaagccagttacagttctgttatatataaactttgtacattgaaggagttcgatcaggcacttgattttcttgctgaaatgcagctggcaagtctaaaatcaagtgaaatctcctgtgatgcacttgtacatggcctttgtgccatgggaagaccttctgatgctagaaaggttttggaaatgctaaccaccttgggatctgcaccatcctatggcatgtttagagttgtttttgataactattgcagaagtagcaatctacagaaagctgcggcacttctgcatgacatgcaacaagcaggacaagtgcccaactttgagatgcattggtctgttataagcaatttaagcagtaccaatgagaaaactgaaggacatggagagtgcattttgccaaacctttttctttctgcaaattccccttaaaggtcataaggcgatatatggcttccagaaaatggtgaactgatgattgttctcaagttgaaccctagtggaactgataaaactcgtgaaaccaaggttatgcaactctggaactcaaacgttctactcgaggattgatggttcacataaatgtgggaacacgtaggaaaaactatgcatcttcgatttaggttgcaaaagagggagcttgaactcattacctgagccatcacaactttcttctctgcaacttggttacaggttatgcccttgctaaagggataatgcaaagatccctacaacaccaattagaattggggaagacgaacctcctcctcagtctcctagcttgttcgttgctctcacctgggatctgccctgggatcacctttgcaacatcagttgaactaaagatttggactggacatggttcagttgtttttgaacgagtacgcaaatgccaggtttttcctgtttgggcacaaatggaaacaaaaaagttggactcagcctatcgtgaagctacgaaggaagagcactgtcccattattctgttttttcggtaattaaagcatcatctccattcttggttgttcccatttttctgttatttactaagtagtttttctggctaatgttaaaaactggaagaagaccatgtttctagcatgaacatgccaacatggtgccatcaacaacttccctgttagctcacggtacaccatgctccagtctgcccccctggttatcactaattcaatcatctgtggtgccgattgtgttcccaagatgcactgaaatagagcagatcaaatgaggatgaagttactgtgtagagatttttgttcaccctttgtagcagcatccatggatttttatttgcacagaattactctcttttacccgtaacttgtgattgctgatatgatgcatagaagtctgaaatctgaattgatgccactgtattttttccatgtttacattatgttgattttctttctgctatttactttcaatgttttggagcagtacctgagcaactgaggcaaccctttcgatcttatgagaccaagatgttttctggtcccaaacccatgatggtatgccttagtttgcttgcagacaaatgcttttttttgacaacttcactcatcccttgttttgaatagatgacataattggagactctggccatttatctgtgttgtttccattaatgtgtcttctcataggtactctgttatggtcgctagatcggtgagggattggagagggatattgatgggcaggaacgtcggtcgggggcctctgcccacggccgagcaagaggagggtttctctcttctaattcttacctactttatttctcatccattgattacataaatagaccagctggctgtccttatctagctagagatccttatctcctaaaaactctcctaaaactactaactgataaccttcctagataatctcaaccaatctcctaaataatcttaactaatcttctaatattactagctgaatgcccgtgcgttgcaacgggaatatataataccagtatactacgataacttatatacaaaatatgtgttataccattatgagaaaatgtttcataatcaatttgtgattctggccatacataaattttgttatttataatctatctgtttcaccactgcattacaaccatcagtatcatgcagacttcgatatatgtcacgatttgtatggtctcattattggagagcatgtttcacacataccagaagaaattccctcgtacatcgttagtcatcggacacgtaccaccatacgcttttgcttaaacaaaaaggtaagtgtgtgtttgcaagactaatggtcaaacaccgtataaccataaagttagaatactatattaatatattaaataaattaatccaatagacatagattaacccaattaacacaggataaataaatatctaattataaaagtatgaaacatggtataatcaatgttgttactgcgtagtaaatattcatacgagactaacacaactggaacggttcaatttagaattaaaatggggaagttacgaatttccaaagtttctatgtatttgatataggattaattaggaaatcaattttattgttgttttcatgacaaaacagaggtattatgtgataaaaaataatattatagaattatagaaattggaatgaattcatttagatttaatatgaaatttccatgaattaaatgggcttttgcaattatttttaaactaaaaatcaatttccaaactcttttccctattttctttatttcctggactgcgtcccaaattccagaaacatcaggggccaagctataaatgtttttctagactcagtgagcatacagagtggacggcgggttaaacacaaataaagccaacatgggtcatgttggctagagggtggaaggctagacattctactcaatagatccaaggtttaatccttgagcaaccacggtttaatttttt

SEQ ID NO: 574 - DNA, 4935 bp, Zea Mays
agaccactcgaggttccgagctcccgcaatcaccagtgagatgcggtgtgtggggccttgctcagcggcggggctgggaggtccgagcggaatagatgtcgatggcatggcggttgctccgcacaatccatttccggcatctgagcccaggtgtcaggcgagcatccaagattgtagaccaaggctttaccaataatgccccagagctgagtaccaacaaagggagtttgctgaggtgtagcagcatccgcttcggggagaagcggaactcaatttttgcttgcgctccagacaatttggagcagaaatctggacaaacgttcgaagctgatgcccattctgcgctaaaattgtgctctggtatcgggagtgtagttatagccaagtgttctcacatatttgagagaaatggggacacctttgatgggaactgcagtttgcaagatatcctcaagcctggtttatggctctcaccggagaccctccgccggttttggcgtgtctctgagctgaagcctaaggattttcttgacattttgaatggttttggactcagtgccgtaaaagtgagaaatgcaagatttctatggaatttgtacaggtggacatcgcggcagagcaaagagttccaacatctgccaaggtcaaatgagacaatggtatccatacttgcagatgctcatatgctcagtcaagcagaatcactactgctttcattgattgatcatatgactccagctgtttctagtgaactattcagtcagattatccaggtgtattcagaagcaggcaaccttgggaaatcagttgcactttatgattatgcaaggggcaagcatttgattccttcagcttcatgctatcaagtacttcttcattttctaaccagaaacagaaaggatgaattgattttgagagtatatctggacatgcttgaagttggatttggttcttgcaccgaaggaaatattcttgattctgttgtcatggctttaatcaggaaaggtaaacttttggaagctcttggtattcttcggcaattaaagagtttgggtcttaaattaagcaagggagccttgtcaaatatagttgaagaatttaacaagaaaaaggatattggggatctgatgaatttcttggaagattggaggtgtatacctgagttgcgtctttgcaacagaatccttgcgtctttgtgcacaaatcttggtacttgtcaggcatggttggtcttccaaagtttggaggccttagggtttgctccagatgctacgacttttggaattttcatttttcacagctgtagagaaatgaaactaaaatctgcacttgtatatttatcagagtgctttgctaggcatgttaaacctggagtgtgtgcctataatgctattttaggtggtgttttcagggaggggctatatagacatgcaaagtatatatttgaagacatgattgaaagagaagtaacacccaatctttcaacatataagataattcttgcagggtattgcaggtataggcggtttgatgatattgaacaagtcttgaggcacatgaaaaccaatggtgtaaatgttcttctctctggaaactgtgtgctctccaaggccttatcattcttggggctagatcacctaggggtgaaaatcaagagagataatgtcactggtttcccaaaagctgagttttttgattcagttggcaatggattgtatttggacactgattccaaaatgtttgaggtttcattgtcacaagttttggatagcgcacttctcccagatattaactcagagctaatcagggcatctcagcaaggcgatgttgcaagtgctcttcttgtgaaagacaaagcttttcaatggggatatgacatttcaccagatagctgctctgagctattcaaggccttatgtgtgagccctgcttatgttatagatgtcattgaccttatggaggagatgccagatatactttacaaacttgatgctcaaaatctagatttggttgcccaaacattgagtaggaatggaatgtctgctcatgcaaaactggttttagaaaaaatgttgagagaagacttgtcaatcagtcacaatacatatacttatttaatgataggtttatgcgaagaaaggaacatagcagggttttgggaatgttggaatcttgcaacaaagtgcagatggtcacctgatagcaaggatatgatgggcctcatcagttacttgtgcaaatggggagtgattgaggaagccctgaaacttatgaactctttatttgactgctaccatgatctgttttttagtgcatattgtgcacttctcaaagagttgtgcaggacaggtcataccagcattggatgcgcaatgttggaggctctcaaagaaaagggtgtggctgtggatcgatcattattcttttatgtgatggagggcttcctaaaggagcaaagaactgctgaatcaattggaatgcatgacatgtggcttagcaaaagcaaagaacttgatgtttttacttaccgatctgtgttgccttcattaccatggctggacacagatcgagccaagaacttggtagaatctatgctgaccgtgaaacttactgaattctcatatcgcggttgcattgtgaatgaattaatgcaaacaaggaatataaaatgggccattccagtcttgcaagaatcagctcctgggaagctcagtgccactttgttaaattccttacttcaagcctatggttggctaaaaaattggagaaagttagatgcagttctttgcaagatgctaaagatgcatgccaccctttctatatctagctaccgctttcttgtgtgcagaatgtgtgagcaaagtcgtttttctagcgcttcaagccttagagcacttttccaacatactgacaagtcaagagaactgattgcatgcaacattctaatattttatctttttcaaagaagaaacagctcacagattcatgatttattgaaggacattgaagggaataaaaccaagcaaccgcagtctcagaatagtgttaagtcattactgcaggctaggaaaccatgagaaatcactagcattatttcacttgattgagcgcaatggatggaagcatggtttaatcattaagaccaccctagcttcatgtctcctttcatttgggagacaattggaagcaaaatcatgtctgaacaacctgagcaaaggtgagtttatcggatgttcaagcaattttgatgatctcatcaaggaattctgcattctaggagatttgaaaatgactctttatctgctaaatacaatgttaaagaaaggcacactgcctaatgaagccagttacagttctgttatatataaactttgtacattgaaggagttcgatcaggcacttgattttcttgctgaaatgcagctggcaagtctaaaatcaagtgaaatctcctgtgatgcacttgtacatggcctttgtgccatgggaagaccttctgatgctagaaaggttttggaaatgctaaccaccttgggatctgcaccatcctatggcatgtttagagttgtttttgataactattgcagaagtagcaatctacagaaagctgcggcacttctgcatgacatgcaacaagcaggacaagtgcccaactttgagatgcattggtctgttataagcaatttaagcagtaccaatgagaaaactgaaggacatggagagtgcattttgccaaacctttttctttctgcaaattccccttaaaggtcataaggcgatatatggcttccagaaaatggtgaactgatgattgttctcaagttgaaccctagtggaactgataaaactcgtgaaaccaaggttatgcaactctggaactcaaacgttctactcgaggattgatggttcacataaatgtgggaacacgtaggaaaaactatgcatcttcgatttaggttgcaaaagagggagcttgaactcattacctgagccatcacaactttcttctctgcaacttggttacaggttatgcccttgctaaagggataatgcaaagatccctacaacaccaattagaattggggaagacgaacctcctcctcagtctcctagcttgttcgttgctctcacctgggatctgccctgggatcacctttgcaacatcagttgaactaaagatttggactggacatggttcagttgtttttgaacgagtacgcaaatgccaggtttttcctgtttgggcacaaatggaaacaaaaaagttggactcagcctatcgtgaagctacgaaggaagagcactgtcccattattctgttttttcggacgtggtaccatcctcatcatgtagcctaggatgagttatcactgttaaatatttcaagtggttaaatcatgcatctgcagaatatattattgttgcactctcaaatggtgggttgctaacttgctatgtcatgggagtttgggtgaaggccagaaggatgtgatagacgtcgattcgatgcaggtccatgggatgctctgtacaggggtgggaatatcctagcgttcgccttggtttcggtcttctctggcagcaagtgtgctcccagttttcaagctgtcaaagctgtccaactcagttccttggggaaggcctcgattcgctcatctcctcggacccggaggactacaacaatatgaagcagtatgagaagctgaccgtcgcgtcaatttactttcttgtgatgagtgttgagcatcatcatatgattcatacaattgatatgcaactagaacccagattttaatgtgtacggttatgatttatcttttctcgttaaataatgtgagatattgaggtgtatgataaattatatgttcatctctatgtaatcattatacactaacattttaataacgagagcatagaacgataaatagtgcttct

SEQ ID NO: 575 - DNA, 6135 bp, Zea Mays
agaccactcgaggttccgagctcccgcaatcaccagtgagatgcggtgtgtggggccttgctcagcggcggggctgggaggtccgagcggaatagatgtcgatggcatggcggttgctccgcacaatccatttccggcatctgagcccaggtgtcaggcgagcatccaagattgtagaccaaggctttaccaataatgccccagagctgagtaccaacaaagggagtttgctgaggtgtagcagcatccgcttcggggagaagcggaactcaatttttgcttgcgctccagacaatttggagcagaaatctggacaaacgttcgaagctgatgcccattctgcgctaaaattgtgctctggtatcgggagtgtagttatagccaagtgttctcacatatttgagagaaatggggacacctttgatgggaactgcagtttgcaagatatcctcaagcctggtttatggctctcaccggagaccctccgccggttttggcgtgtctctgagctgaagcctaaggattttcttgacattttgaatggttttggactcagtgccgtaaaagtgagaaatgcaagatttctatggaatttgtacaggtggacatcgcggcagagcaaagagttccaacatctgccaaggtcaaatgagacaatggtatccatacttgcagatgctcatatgctcagtcaagcagaatcactactgctttcattgattgatcatatgactccagctgtttctagtgaactattcagtcagattatccaggtgtattcagaagcaggcaaccttgggaaatcagttgcactttatgattatgcaaggggcaagcatttgattccttcagcttcatgctatcaagtacttcttcattttctaaccagaaacagaaaggatgaattgattttgagagtatatctggacatgcttgaagttggatttggttcttgcaccgaaggaaatattcttgattctgttgtcatggctttaatcaggaaaggtaaacttttggaagctcttggtattcttcggcaattaaagagtttgggtcttaaattaagcaagggagccttgtcaaatatagttgaagaatttaacaagaaaaaggatattggggatctgatgaatttcttggaagattggaggtgtatacctgagttgcgtctttgcaacagaatccttgcgtctttgtgcacaaatcttggtacttgtcaggcatggttggtcttccaaagtttggaggccttagggtttgctccagatgctacgacttttggaattttcatttttcacagctgtagagaaatgaaactaaaatctgcacttgtatatttatcagagtgctttgctaggcatgttaaacctggagtgtgtgcctataatgctattttaggtggtgttttcagggaggggctatatagacatgcaaagtatatatttgaagacatgattgaaagagaagtaacacccaatctttcaacatataagataattcttgcagggtattgcaggtataggcggtttgatgatattgaacaagtcttgaggcacatgaaaaccaatggtgtaaatgttcttctctctggaaactgtgtgctctccaaggccttatcattcttggggctagatcacctaggggtgaaaatcaagagagataatgtcactggtttcccaaaagctgagttttttgattcagttggcaatggattgtatttggacactgattccaaaatgtttgaggtttcattgtcacaagttttggatagcgcacttctcccagatattaactcagagctaatcagggcatctcagcaaggcgatgttgcaagtgctcttcttgtgaaagacaaagcttttcaatggggatatgacatttcaccagatagctgctctgagctattcaaggccttatgtgtgagccctgcttatgttatagatgtcattgaccttatggaggagatgccagatatactttacaaacttgatgctcaaaatctagatttggttgcccaaacattgagtaggaatggaatgtctgctcatgcaaaactggttttagaaaaaatgttgagagaagacttgtcaatcagtcacaatacatatacttatttaatgataggtttatgcgaagaaaggaacatagcagggttttgggaatgttggaatcttgcaacaaagtgcagatggtcacctgatagcaaggatatgatgggcctcatcagttacttgtgcaaatggggagtgattgaggaagccctgaaacttatgaactctttatttgactgctaccatgatctgttttttagtgcatattgtgcacttctcaaagagttgtgcaggacaggtcataccagcattggatgcgcaatgttggaggctctcaaagaaaagggtgtggctgtggatcgatcattattcttttatgtgatggagggcttcctaaaggagcaaagaactgctgaatcaattggaatgcatgacatgtggcttagcaaaagcaaagaacttgatgtttttacttaccgatctgtgttgccttcattaccatggctggacacagatcgagccaagaacttggtagaatctatgctgaccgtgaaacttactgaattctcatatcgcggttgcattgtgaatgaattaatgcaaacaaggaatataaaatgggccattccagtcttgcaagaatcagctcctgggaagctcagtgccactttgttaaattccttacttcaagcctatggttggctaaaaaattggagaaagttagatgcagttctttgcaagatgctaaagatgcatgccaccctttctatatctagctaccgctttcttgtgtgcagaatgtgtgagcaaagtcgtttttctagcgcttcaagccttagagcacttttccaacatactgacaagtcaagagaactgattgcatgcaacattctaatattttatctttttcaaagaagaaacagctcacagattcatgatttattgaaggacattgaagggaataaaaccaagcaaccgcagtctcagaatagtgttaagtcattactgcaggctaggaaaccatgagaaatcactagcattatttcacttgattgagcgcaatggatggaagcatggtttaatcattaagaccaccctagcttcatgtctcctttcatttgggagacaattggaagcaaaatcatgtctgaacaacctgagcaaaggtgagtttatcggatgttcaagcaattttgatgatctcatcaaggaattctgcattctaggagatttgaaaatgactctttatctgctaaatacaatgttaaagaaaggcacactgcctaatgaagccagttacagttctgttatatataaactttgtacattgaaggagttcgatcaggcacttgattttcttgctgaaatgcagctggcaagtctaaaatcaagtgaaatctcctgtgatgcacttgtacatggcctttgtgccatgggaagaccttctgatgctagaaaggttttggaaatgctaaccaccttgggatctgcaccatcctatggcatgtttagagttgtttttgataactattgcagaagtagcaatctacagaaagctgcggcacttctgcatgacatgcaacaagcaggacaagtgcccaactttgagatgcattggtctgttataagcaatttaagcagtaccaatgagaaaactgaaggacatggagagtgcattttgccaaacctttttctttctgcaaattccccttaaaggtcataaggcgatatatggcttccagaaaatggtgaactgatgattgttctcaagttgaaccctagtggaactgataaaactcgtgaaaccaaggttatgcaactctggaactcaaacgttctactcgaggattgatggttcacataaatgtgggaacacgtaggaaaaactatgcatcttcgatttaggttgcaaaagagggagcttgaactcattacctgagccatcacaactttcttctctgcaacttggttacaggttatgcccttgctaaagggataatgcaaagatccctacaacaccaattagaattggggaagacgaacctcctcctcagtctcctagcttgttcgttgctctcacctgggatctgccctgggatcacctttgcaacatcagttgaactaaagatttggactggacatggttcagttgtttttgaacggagtacgcaaatgccaggtttttcctgtttgggcacaaatggaaacaaaaaagttggactcagcctatcgtgaagctacgaaggaagagcactgtcccattattctgttttttcggtaattaaagcatcatctccattcttggttgttcccatttttctgttatttactaagtagtttttctggctaatgttaaaaactggaagaagaccatgtttctagcatgaacatgccaacatggtgccatcaacaacttccctgttagctcacggtacaccatgctccagtctgcccccctggttatcactaattcaatcatctgtggtgccgattgtgttcccaagatgcactgaaatagagcagatcaaatgaggatgaagttactgtgtagagatttttgttcaccctttgtagcagcatccatggatttttatttgcacagaattactctcttttacccgtaacttgtgattgctgatatgatgcatagaagtctgaaatctgaattgatgccactgtattttttccatgtttacattatgttgattttctttctgctatttactttcaatgttttggagcagtacctgagcaactgaggcaaccctttcgatcttatgagaccaagatgttttctggtcccaaacccatgatggtatgccttagtttgcttgcagacaaatgcttttttttgacaacttcactcatcccttgttttgaatagatgacataattggagactctggccatttatctgtgttgtttccattaatgtgtcttctcataggtactctgttatggtcgctagatcggtgagggattggagagggatattgatgggcaggaacgtcggtcgggggcctctgcccacggccgagcaagaggagggtttctctcttctaattcttacctactttatttctcatccattgattacataaatagaccagctggctgtccttatctagctagagatccttatctcctaaaaactctcctaaaactactaactgataaccttcctagataatctcaaccaatctcctaaataatcttaactaatcttctaatattactagctgaatgcccgtgcgttgcaacgggaatatataataccagtatactacgataacttatatacaaaatatgtgttataccattatgagaaaatgtttcataatcaatttgtgattctggccatacataaattttgttatttataatctatctgtttcaccactgcattacaaccatcagtatcatgcagacttcgatatatgtcacgatttgtatggtctcattattggagagcatgtttcacacataccagaagaaattccctcgtacatcgttagtcatcggacacgtaccaccatacgcttttgcttaaacaaaaagaatatattattgttgcactctcaaatggtgggttgctaacttgctatgtcatgggagtttgggtgaaggccagaaggatgtgatagacgtcgattcgatgcaggtccatgggatgctctgtacaggggtgggaatatcctagcgttcgccttggtttcggtcttctctggcagcaagtgtgctcccagttttcaagctgtcaaagctgtccaactcagttccttggggaaggcctcgattcgctcatctcctcggacccggaggactacaacaatatgaagcagtatgagaagctgaccgtcgcgtcaatttactttcttgtgatgagtgttgagcatcatcatatgattcatacaattgatatgcaactagaacccagattttaatgtgtacggttatgatttatcttttctcgttaaataatgtgagatattgaggtgtatgataaattatatgttcatctctatgtaatcattatacactaacattttaataacgagagcatagaacgataaatagtgcttct

SEQ ID NO: 576 - DNA, 4811 bp, Zea Mays
gttccgagctcccgcaatcaccagtgaggactggggattcgctgatcagatgcggtgtgtggggccttgctcagcggcggggctgggaggtccgagcggaatagatgtcgatggcatggcggttgctccgcacaatccatttccggcatctgaggtgtcaggcgagcatccaagattgtagaccaaggctttaccaataatgccccagagctgagtaccaacaaagggagtttgctgaggtgtagcagcatccgcttcggggagaagcggaactcaatttttgcttgcgctccagacaatttggagcagaaatctggacaaacgttcgaagctgatgcccattctgcgctaaaattgtgctctggtatcgggagtgtagttatagccaagtgttctcacatatttgagagaaatggggacacctttgatgggaactgcagtttgcaagatatcctcaagcctggtttatggctctcaccggagaccctccgccggttttggcgtgtctctgagctgaagcctaaggattttcttgacattttgaatggttttggactcagtgccgtaaaagtgagaaatgcaagatttctatggaatttgtacaggtggacatcgcggcagagcaaagagttccaacatctgccaaggtcaaatgagacaatggtatccatacttgcagatgctcatatgctcagtcaagcagaatcactactgctttcattgattgatcatatgactccagctgtttctagtgaactattcagtcagattatccaggtgtattcagaagcaggcaaccttgggaaatcagttgcactttatgattatgcaaggggcaagcatttgattccttcagcttcatgctatcaagtacttcttcattttctaaccagaaacagaaaggatgaattgattttgagagtatatctggacatgcttgaagttggatttggttcttgcaccgaaggaaatattcttgattctgttgtcatggctttaatcaggaaaggtaaacttttggaagctcttggtattcttcggcaattaaagagtttgggtcttaaattaagcaagggagccttgtcaaatatagttgaagaatttaacaagaaaaaggatattggggatctgatgaatttcttggaagattggaggtgtatacctgagttgcgtctttgcaacagaatccttgcgtctttgtgcacaaatcttggtacttgtcaggcatggttggtcttccaaagtttggaggccttagggtttgctccagatgctacgacttttggaattttcatttttcacagctgtagagaaatgaaactaaaatctgcacttgtatatttatcagagtgctttgctaggcatgttaaacctggagtgtgtgcctataatgctattttaggtggtgttttcagggaggggctatatagacatgcaaagtatatatttgaagacatgattgaaagagaagtaacacccaatctttcaacatataagataattcttgcagggtattgcaggtataggcggtttgatgatattgaacaagtcttgaggcacatgaaaaccaatggtgtaaatgttcttctctctggaaactgtgtgctctccaaggccttatcattcttggggctagatcacctaggggtgaaaatcaagagagataatgtcactggtttcccaaaagctgagttttttgattcagttggcaatggattgtatttggacactgattccaaaatgtttgaggtttcattgtcacaagttttggatagcgcacttctcccagatattaactcagagctaatcagggcatctcagcaaggcgatgttgcaagtgctcttcttgtgaaagacaaagcttttcaatggggatatgacatttcaccagatagctgctctgagctattcaaggccttatgtgtgagccctgcttatgttatagatgtcattgaccttatggaggagatgccagatatactttacaaacttgatgctcaaaatctagatttggttgcccaaacattgagtaggaatggaatgtctgctcatgcaaaactggttttagaaaaaatgttgagagaagacttgtcaatcagtcacaatacatatacttatttaatgataggtttatgcgaagaaaggaacatagcagggttttgggaatgttggaatcttgcaacaaagtgcagatggtcacctgatagcaaggatatgatgggcctcatcagttacttgtgcaaatggggagtgattgaggaagccctgaaacttatgaactctttatttgactgctaccatgatctgttttttagtgcatattgtgcacttctcaaagagttgtgcaggacaggtcataccagcattggatgcgcaatgttggaggctctcaaagaaaagggtgtggctgtggatcgatcattattcttttatgtgatggagggcttcctaaaggagcaaagaactgctgaatcaattggaatgcatgacatgtggcttagcaaaagcaaagaacttgatgtttttacttaccgatctgtgttgccttcattaccatggctggacacagatcgagccaagaacttggtagaatctatgctgaccgtgaaacttactgaattctcatatcgcggttgcattgtgaatgaattaatgcaaacaaggaatataaaatgggccattccagtcttgcaagaatcagctcctgggaagctcagtgccactttgttaaattccttacttcaagcctatggttggctaaaaaattggagaaagttagatgcagttctttgcaagatgctaaagatgcatgccaccctttctatatctagctaccgctttcttgtgtgcagaatgtgtgagcaaagtcgtttttctagcgcttcaagccttagagcacttttccaacatactgacaagtcaagagaactgattgcatgcaacattctaatattttatctttttcaaagaagaaacagctcacagattcatgatttattgaaggacattgaaggtaatggtatttctcttgacaaaaccacatatgatttccttgtctatggatttcacaaatctggggatatcaatgattcagttaatgcgcttgatgcctgcattgctcagggaataaaaccaagcaaccgcagtctcagaatagtgttaagtcattactgcaggctaggaaaccatgagaaatcactagcattatttcacttgattgagcgcaatggatggaagcatggtttaatcattaagaccaccctagcttcatgtctcctttcatttgggagacaattggaagcaaaatcatgtctgaacaacctgagcaaaggtgagtttatcggatgttcaagcaattttgatgatctcatcaaggaattctgcattctaggagatttgaaaatgactctttatctgctaaatacaatgttaaagaaaggcacactgcctaatgaagccagttacagttctgttatatataaactttgtacattgaaggagttcgatcaggcacttgattttcttgctgaaatgcagctggcaagtctaaaatcaagtgaaatctcctgtgatgcacttgtacatggcctttgtgccatgggaagaccttctgatgctagaaaggttttggaaatgctaaccaccttgggatctgcaccatcctatggcatgtttagagttgtttttgataactattgcagaagtagcaatctacagaaagctgcggcacttctgcatgacatgcaacaagcaggacaagtgcccaactttgagatgcattggtctgttataagcaatttaagcagtaccaatgagaaaactgaaggacatggagagtgcattttgccaaacctttttctttctgcaaattccccttaaaggtcataaggcgatatatggcttccagaaaatggtgaactgatgattgttctcaagttgaaccctagtggaactgataaaactcgtgaaaccaaggttatgcaactctggaactcaaacgttctactcgaggattgatggttcacataaatgtgggaacacgtaggaaaaactatgcatcttcgatttaggttgcaaaagagggagcttgaactcattacctgagccatcacaactttcttctctgcaacttggttacaggttatgcccttgctaaagggataatgcaaagagtacgcaaatgccaggtttttcctgtttgggcacaaatggaaacaaaaaagttggactcagcctatcgtgaagctacgaaggaagagcactgtcccattattctgttttttcgaatatattattgttgcactctcaaatggtgggttgctaacttgctatgtcatgggagtttgggtgaaggccagaaggatgtgatagacgtcgattcgatgcaggtccatgggatgctctgtacaggggtgggaatatcctagcgttcgccttggtttcggtcttctctggcagcaagtgtgctcccagttttcaagctgtcaaagctgtccaactcagttccttggggaaggcctcgattcgctcatctcctcggacccggaggactacaacaatatgaagcagtatgagaagctgaccgtcgcgtcaatttactttcttgtgatgagtgttgagcatcatcatatgattcatacaattgatatgcaactagaacccagattttaatgtgtacggttatgatttatcttttctcgttaaataatgtgagatattgaggtgtatgataaattatatgttcatctctatgtaatcattatacactaacattttaataacgagagcatagaacgataaatagtgcttct

SEQ ID NO: 577 - DNA, 4763 bp, Zea Mays
cgagctcccgcaatcaccagtgagatgcggtgtgtggggccttgctcagcggcggggctgggaggtccgagcggaatagatgtcgatggcatggcggttgctccgcacaatccatttccggcatctgagcccaggtgtcaggcgagcatccaagattgtagaccaaggctttaccaataatgccccagagctgagtaccaacaaagggagtttgctgaggtgtagcagcatccgcttcggggagaagcggaactcaatttttgcttgcgctccagacaatttggagcagaaatctggacaaacgttcgaagctgatgcccattctgcgctaaaattgtgctctggtatcgggagtgtagttatagccaagtgttctcacatatttgagagaaatggggacacctttgatgggaactgcagtttgcaagatatcctcaagcctggtttatggctctcaccggagaccctccgccggttttggcgtgtctctgagctgaagcctaaggattttcttgacattttgaatggttttggactcagtgccgtaaaagtgagaaatgcaagatttctatggaatttgtacaggtggacatcgcggcagagcaaagagttccaacatctgccaaggtcaaatgagacaatggtatccatacttgcagatgctcatatgctcagtcaagcagaatcactactgctttcattgattgatcatatgactccagctgtttctagtgaactattcagtcagattatccaggtgtattcagaagcaggcaaccttgggaaatcagttgcactttatgattatgcaaggggcaagcatttgattccttcagcttcatgctatcaagtacttcttcattttctaaccagaaacagaaaggatgaattgattttgagagtatatctggacatgcttgaagttggatttggttcttgcaccgaaggaaatattcttgattctgttgtcatggctttaatcaggaaaggtaaacttttggaagctcttggtattcttcggcaattaaagagtttgggtcttaaattaagcaagggagccttgtcaaatatagttgaagaatttaacaagaaaaaggatattggggatctgatgaatttcttggaagattggaggtgtatacctgagttgcgtctttgcaacagaatccttgcgtctttgtgcacaaatcttggtacttgtcaggcatggttggtcttccaaagtttggaggccttagggtttgctccagatgctacgacttttggaattttcatttttcacagctgtagagaaatgaaactaaaatctgcacttgtatatttatcagagtgctttgctaggcatgttaaacctggagtgtgtgcctataatgctattttaggtggtgttttcagggaggggctatatagacatgcaaagtatatatttgaagacatgattgaaagagaagtaacacccaatctttcaacatataagataattcttgcagggtattgcaggtataggcggtttgatgatattgaacaagtcttgaggcacatgaaaaccaatggtgtaaatgttcttctctctggaaactgtgtgctctccaaggccttatcattcttggggctagatcacctaggggtgaaaatcaagagagataatgtcactggtttcccaaaagctgagttttttgattcagttggcaatggattgtatttggacactgattccaaaatgtttgaggtttcattgtcacaagttttggatagcgcacttctcccagatattaactcagagctaatcagggcatctcagcaaggcgatgttgcaagtgctcttcttgtgaaagacaaagcttttcaatggggatatgacatttcaccagatagctgctctgagctattcaaggccttatgtgtgagccctgcttatgttatagatgtcattgaccttatggaggagatgccagatatactttacaaacttgatgctcaaaatctagatttggttgcccaaacattgagtaggaatggaatgtctgctcatgcaaaactggttttagaaaaaatgttgagagaagacttgtcaatcagtcacaatacatatacttatttaatgataggtttatgcgaagaaaggaacatagcagggttttgggaatgttggaatcttgcaacaaagtgcagatggtcacctgatagcaaggatatgatgggcctcatcagttacttgtgcaaatggggagtgattgaggaagccctgaaacttatgaactctttatttgactgctaccatgatctgttttttagtgcatattgtgcacttctcaaagagttgtgcaggacaggtcataccagcattggatgcgcaatgttggaggctctcaaagaaaagggtgtggctgtggatcgatcattattcttttatgtgatggagggcttcctaaaggagcaaagaactgctgaatcaattggaatgcatgacatgtggcttagcaaaagcaaagaacttgatgtttttacttaccgatctgtgttgccttcattaccatggctggacacagatcgagccaagaacttggtagaatctatgctgaccgtgaaacttactgaattctcatatcgcggttgcattgtgaatgaattaatgcaaacaaggaatataaaatgggccattccagtcttgcaagaatcagctcctgggaagctcagtgccactttgttaaattccttacttcaagcctatggttggctaaaaaattggagaaagttagatgcagttctttgcaagatgctaaagatgcatgccaccctttctatatctagctaccgctttcttgtgtgcagaatgtgtgagcaaagtcgtttttctagcgcttcaagccttagagcacttttccaacatactgacaagtcaagagaactgattgcatgcaacattctaatattttatctttttcaaagaagaaacagctcacagattcatgatttattgaaggacattgaagggaataaaaccaagcaaccgcagtctcagaatagtgttaagtcattactgcaggctaggaaaccatgagaaatcactagcattatttcacttgattgagcgcaatggatggaagcatggtttaatcattaagaccaccctagcttcatgtctcctttcatttgggagacaattggaagcaaaatcatgtctgaacaacctgagcaaaggtgagtttatcggatgttcaagcaattttgatgatctcatcaaggaattctgcattctaggagatttgaaaatgactctttatctgctaaatacaatgttaaagaaaggcacactgcctaatgaagccagttacagttctgttatatataaactttgtacattgaaggagttcgatcaggcacttgattttcttgctgaaatgcagctggcaagtctaaaatcaagtgaaatctcctgtgatgcacttgtacatggcctttgtgccatgggaagaccttctgatgctagaaaggttttggaaatgctaaccaccttgggatctgcaccatcctatggcatgtttagagttgtttttgataactattgcagaagtagcaatctacagaaagctgcggcacttctgcatgacatgcaacaagcaggacaagtgcccaactttgagatgcattggtctgttataagcaatttaagcagtaccaatgagaaaactgaaggacatggagagtgcattttgccaaacctttttctttctgcaaattccccttaaaggtcataaggcgatatatggcttccagaaaatggtgaactgatgattgttctcaagttgaaccctagtggaactgataaaactcgtgaaaccaaggttatgcaactctggaactcaaacgttctactcgaggattgatggttcacataaatgtgggaacacgtaggaaaaactatgcatcttcgatttaggttgcaaaagagggagcttgaactcattacctgagccatcacaactttcttctctgcaacttggttacaggttatgcccttgctaaagggataatgcaaagagtacgcaaatgccaggtttttcctgtttgggcacaaatggaaacaaaaaagttggactcagcctatcgtgaagctacgaaggaagagcactgtcccattattctgttttttcggacgtggtaccatcctcatcatgtagcctaggatgagttatcactgttaaatatttcaagtggttaaatcatgcatctgcagaatatattattgttgcactctcaaatggtgggttgctaacttgctatgtcatgggagtttgggtgaaggccagaaggatgtgatagacgtcgattcgatgcaggtccatgggatgctctgtacaggggtgggaatatcctagcgttcgccttggtttcggtcttctctggcagcaagtgtgctcccagttttcaagctgtcaaagctgtccaactcagttccttggggaaggcctcgattcgctcatctcctcggacccggaggactacaacaatatgaagcagtatgagaagctgaccgtcgcgtcaatttactttcttgtgatgagtgttgagcatcatcatatgattcatacaattgatatgcaactagaacccagattttaatgtgtacggttatgatttatcttttctcgttaaataatgtgagatattgaggtgtatgataaattatatgttcatctctatgtaatcattatacactaacattttaataacgagagcatagaacgataaatagtgcttct

SEQ ID NO: 578 - DNA, 4306 bp, Zea Mays
ggcgagcatccaagattgtagaccaaggctttaccaataatgccccagagctgagtaccaacaaagggagtttgctgaggtgtagcagcatccgcttcggggagaagcggaactcaatttttgcttgcgctccagacaatttggagcagaaatctggacaaacgttcgaagctgatgcccattctgcgctaaaattgtgctctggtatcgggagtgtagttatagccaagtgttctcacatatttgagagaaatggggacacctttgatgggaactgcagtttgcaagatatcctcaagcctggtttatggctctcaccggagaccctccgccggttttggcgtgtctctgagctgaagcctaaggattttcttgacattttgaatggttttggactcagtgccgtaaaagtgagaaatgcaagatttctatggaatttgtacaggtggacatcgcggcagagcaaagagttccaacatctgccaaggtcaaatgagacaatggtatccatacttgcagatgctcatatgctcagtcaagcagaatcactactgctttcattgattgatcatatgactccagctgtttctagtgaactattcagtcagattatccaggtgtattcagaagcaggcaaccttgggaaatcagttgcactttatgattatgcaaggggcaagcatttgattccttcagcttcatgctatcaagtacttcttcattttctaaccagaaacagaaaggatgaattgattttgagagtatatctggacatgcttgaagttggatttggttcttgcaccgaaggaaatattcttgattctgttgtcatggctttaatcaggaaagggtattgcaggtataggcggtttgatgatattgaacaagtcttgaggcacatgaaaaccaatggtgtaaatgttcttctctctggaaactgtgtgctctccaaggccttatcattcttggggctagatcacctaggggtgaaaatcaagagagataatgtcactggtttcccaaaagctgagttttttgattcagttggcaatggattgtatttggacactgattccaaaatgtttgaggtttcattgtcacaagttttggatagcgcacttctcccagatattaactcagagctaatcagggcatctcagcaaggcgatgttgcaagtgctcttcttgtgaaagacaaagcttttcaatggggatatgacatttcaccagatagctgctctgagctattcaaggccttatgtgtgagccctgcttatgttatagatgtcattgaccttatggaggagatgccagatatactttacaaacttgatgctcaaaatctagatttggttgcccaaacattgagtaggaatggaatgtctgctcatgcaaaactggttttagaaaaaatgttgagagaagacttgtcaatcagtcacaatacatatacttatttaatgataggtttatgcgaagaaaggaacatagcagggttttgggaatgttggaatcttgcaacaaagtgcagatggtcacctgatagcaaggatatgatgggcctcatcagttacttgtgcaaatggggagtgattgaggaagccctgaaacttatgaactctttatttgactgctaccatgatctgttttttagtgcatattgtgcacttctcaaagagttgtgcaggacaggtcataccagcattggatgcgcaatgttggaggctctcaaagaaaagggtgtggctgtggatcgatcattattcttttatgtgatggagggcttcctaaaggagcaaagaactgctgaatcaattggaatgcatgacatgtggcttagcaaaagcaaagaacttgatgtttttacttaccgatctgtgttgccttcattaccatggctggacacagatcgagccaagaacttggtagaatctatgctgaccgtgaaacttactgaattctcatatcgcggttgcattgtgaatgaattaatgcaaacaaggaatataaaatgggccattccagtcttgcaagaatcagctcctgggaagctcagtgccactttgttaaattccttacttcaagcctatggttggctaaaaaattggagaaagttagatgcagttctttgcaagatgctaaagatgcatgccaccctttctatatctagctaccgctttcttgtgtgcagaatgtgtgagcaaagtcgtttttctagcgcttcaagccttagagcacttttccaacatactgacaagtcaagagaactgattgcatgcaacattctaatattttatctttttcaaagaagaaacagctcacagattcatgatttattgaaggacattgaaggtaatggtatttctcttgacaaaaccacatatgatttccttgtctatggatttcacaaatctggggatatcaatgattcagttaatgcgcttgatgcctgcattgctcagggaataaaaccaagcaaccgcagtctcagaatagtgttaagtcattactgcaggctaggaaaccatgagaaatcactagcattatttcacttgattgagcgcaatggatggaagcatggtttaatcattaagaccaccctagcttcatgtctcctttcatttgggagacaattggaagcaaaatcatgtctgaacaacctgagcaaaggtgagtttatcggatgttcaagcaattttgatgatctcatcaaggaattctgcattctaggagatttgaaaatgactctttatctgctaaatacaatgttaaagaaaggcacactgcctaatgaagccagttacagttctgttatatataaactttgtacattgaaggagttcgatcaggcacttgattttcttgctgaaatgcagctggcaagtctaaaatcaagtgaaatctcctgtgatgcacttgtacatggcctttgtgccatgggaagaccttctgatgctagaaaggttttggaaatgctaaccaccttgggatctgcaccatcctatggcatgtttagagttgtttttgataactattgcagaagtagcaatctacagaaagctgcggcacttctgcatgacatgcaacaagcaggacaagtgcccaactttgagatgcattggtctgttataagcaatttaagcagtaccaatgagaaaactgaaggacatggagagtgcattttgccaaacctttttctttctgcaaattccccttaaaggtcataaggcgatatatggcttccagaaaatggtgaactgatgattgttctcaagttgaaccctagtggaactgataaaactcgtgaaaccaaggttatgcaactctggaactcaaacgttctactcgaggattgatggttcacataaatgtgggaacacgtaggaaaaactatgcatcttcgatttaggttgcaaaagagggagcttgaactcattacctgagccatcacaactttcttctctgcaacttggttacaggttatgcccttgctaaagggataatgcaaagatccctacaacaccaattagaattggggaagacgaacctcctcctcagtctcctagcttgttcgttgctctcacctgggatctgccctgggatcacctttgcaacatcagttgaactaaagatttggactggacatggttcagttgtttttgaacgagtacgcaaatgccaggtttttcctgtttgggcacaaatggaaacaaaaaagttggactcagcctatcgtgaagctacgaaggaagagcactgtcccattattctgttttttcgaatatattattgttgcactctcaaatggtgggttgctaacttgctatgtcatgggagtttgggtgaaggccagaaggatgtgatagacgtcgattcgatgcaggtccatgggatgctctgtacaggggtgggaatatcctagcgttcgccttggtttcggtcttctctggcagcaagtgtgctcccagttttcaagctgtcaaagctgtccaactcagttccttggggaaggcctcgattcgctcatctcctcggacccggaggactacaacaatatgaagcagtatgagaagctgaccgtcgcgtcaatttactttcttgtgatgagtgttgagcatcatcatatgattcatacaattgatatgcaactagaacccagattttaatgtgtacggttatgatttatcttttctcgttaaataatgtgagatattgaggtgtatgataaattatatgttcatctctatgtaatcattatacactaacattttaataacgagagcatagaacgataaatagtgcttct

SEQ ID NO: 579 - DNA, 371 bp, Zea Mays
atttgccatgtgcattactgaagatatgatatattgctggacatggtgctgcggccgagtgaagctaccccacttctattgctgcagtggagaaagaggaaacccaagcgagtcgaactcataaatgttttgttttcctactttgctcactatgctacgtctgaaatctggacatcgtaataccaatgaaataaattgtcagatcgctcttggtattcaccttgttctccttccaagcattgaatcaatacacacttactctagtttgaattcgaagtgtaagactatcatcaagagcctttctaattttctgatatcatttgagtaaaacttattttttatatttttataccctccaacagtttttttta

SEQ ID NO: 580 - DNA, 1668 bp, Zea Mays
ctatgttgattggaagacttccttgagtcgtttcaacatagccggtcccaagcccggtaaaggaggagggttgtgttaggtccggcaaaccaacgtaaaaaaccagccaaatcttatggagatgaaaccacaaagaaaaccgttggggcgtaaccctcttagcgacgcgccatatcggaacccgggtatggtgttaaatgagcaagggccgggtcgtcacccctcaagtgacgcgctgtctcttgatctggagccggtgataagtgagcaaggatcgggtcgtcgcatccttagtggcgcgctacatcggcgcccgggtgtagtgaaaaatgagcaagggtctttgcatcttcctcggcgggtgcgaagggtaaggaagctagtcgagccaactagggtccgtgtaggcagttggaacgtaggttccttaacaggtaagttacgagaaatagttgacgttgcggtgaggagacgggtaaatattttatgcgttcaagagaccaagtggaagggacagaaggcgaaggaagtggaaggtacaggtttcaagttgtggtacacggggactgcaacaaacaagaatggagtaggcgtcttgatcgacaagagcctcaaagatggggtagtagatgttaagagggtaggagatagaatcatcctagtcaagctggtcattggagacttggttctcaatgttatcagcgcgtatgctcctcaagtaggccttaatgagaactcaaagagagagttctgggaaggcctggaggacatggttagtagtgtgccagttggcgagaagctcttcataggaggagatctcaatggccatgtgggtacatctagcaccagtttcgagggtgtacatggaggcttcggctttgggactaggaatcaagaaggagaggaaatcctgaactttgccctagcctatgacatgtttatagcaaacactttctttaagaagaggcaatcccacctggtgaccttcagtagtggccaacacactagccagattgatttcgtcctcttgagaaaagaggacaggcatgcctgcttagattgcaaggttatacctggagagtgtgtggtaacccaacataagcttgtcgttgctgacttccgttttaagattcgtttacaacgaaataagcataacaaggtcactagaacaaagtggtggaagcttaaaggggatgtggcccaaactttcaagaagagagttatcgaggagggcccttgggcaggagaggaagacgcaaatatcatgtggaggaagatggcgacatgcatccgaaagatagcttcagaagagtttgggttgagtcaagggaacagaagggaagttaaagacacttggtggtggaacgaagatgtccaaaaggctatcaaggagaagaaagattgctacaaacgcttacatcatgacaagtgtgcagaaaacatagagaagtacaggatagcgaagaagtctgcaaagcgagcggttagtagagcccggggtcaagcctatgacgacctttatcaacggctggacacaaagcagggagaaaaggatatctataggatggccaagattcgtgaaaggaagacaagggatgtcaaccaagtcaaatgcatcaaggatgaagcaaaccaactattagtgaagagtgaagagatcaagaacag

SEQ ID NO: 581 - DNA, 1781 bp, Zea Mays
ggaaaacaacagctgatgccccccgcgaagatcccgatgctgtttcggtgatggatcgtcggcgtcgcaggcgaggcggcccacgcccacacgccacgagcccacgacggccgagggaagggagaagggaccgacccggcgcccgcggctgcggtcgttgggctcgggcgccgcgctaccaaccaaaccaaaccccgtaaccccaccccatcttcccaaaaaagcgacgaatcgcgcagcgcggaagggggaatcgctgcgatttcttgtggcccggcggctccagccccacggctgccgagcggataacgaacgactggcggcggctcgcgtcggccttcctcctctccttctctctcctcgcatcgcagtcgcagcaggcaacaaaccaaatcgcttaccgcccccgaagcgtctcggttcgcatagcagagctgctcttgcaacaagccaaacaacccagtggctgctagccgagacaggggatagattgagagaggcgcgcagatggcgacgccgtcgtcgtcgctttgctccagcttcgcctccctgcggaccgcctccatcggccacccccgtggcatcgcctcctccacgcccaggcattccatgtgagggcatcagctcgggttgacaagttctcaaagagtgacatcatcgtgtccccttcgattctgtctgcaaactttgcgaagcttggtgatcaggtaaaagctgtggaggtggcaggatgcgactggattcatgttgatgtcatggatgggcgctttgtgccaaacatcacaattggacccttggttgttgatgctctgcgtccagtgactgatcttccgttggatgtacatctgatgattgtggaacctgagcagcgagtccctgattttatcaaggcaggtgctgatattgttagtgtccactgtgaacagacatcgaccatccatttgcaccgaacagtcaatcagattaaaagtctaggagcaaaggcaggagttgttttgaatccagcgactccactcactgcaattgattacgttcttgatgttgttgacctggtgctgattatgtctgtgaatcctgggtttggtggccagagctttatcgagagtcaagtaaagaaaattgcagaactgagaaggttatgtgcagagaagggagtgaacccctggattgaggttgatggtggtgttggtccgaaaaatgcctacaaggttattgaagctggcgcaaatgccattgtcgcaggttctgcagtttttggggctccagactacgctgaagctatcaaaggaataaagaccagccaaagacctctagctgtagccgcataaagagctggacgtgtaatcatttactctgtgcaagtttaccagtgatgcgatctgtatagatgtgtgtcttgtccagctatacgtataccggagatgaaaggagacggaggcagtgaagaaatatccttttttttcttctcatttttcacgaggatgccgtgcactgctcccagaatgctgtgtccaatttacaaacgcacaggtggcacatgaactagcagagtagctctctcttgaaaggaaactgtatttggggtcgatgaaccctctggtgttattcttcagactggtaaacgatgtaacatgtttgataatcaataaagtgcgtcgtatggctttcctaaaaaaaagcacagcagcacacgaatgtaacatgtttgtacatcggcatctgactgagtctgaagcccttgtacatgattggaatttaccttaaaactgtctggaactttg

SEQ ID NO: 582 - DNA, 1636 bp, Zea Mays
ggaaaacaacagctgatgccccccgcgaagatcccgatgctgtttcggtgatggatcgtcggcgtcgcaggcgaggcggcccacgcccacacgccacgagcccacgacggccgagggaagggagaagggaccgacccggcgcccgcggctgcggtcgttgggctcgggcgccgcgctaccaaccaaaccaaaccccgtaaccccaccccatcttcccaaaaaagcgacgaatcgcgcagcgcggaagggggaatcgctgcgatttcttgtggcccggcggctccagccccacggctgccgagcggataacgaacgactggcggcggctcgcgtcggccttcctcctctccttctctctcctcgcatcgcagtcgcagcaggcaacaaaccaaatcgcttaccgcccccgaagcgtctcggttcgcatagcagagctgctcttgcaacaagccaaacaacccagtggctgctagccgagacaggggatagattgagagaggcgcgcagatggcgacgccgtcgtcgtcgctttgctccagcttcgcctccctgcggaccgcctccatcggccacccccgtggcaggatgcgactggattcatgttgatgtcatggatgggcgctttgtgccaaacatcacaattggacccttggttgttgatgctctgcgtccagtgactgatcttccgttggatgtacatctgatgattgtggaacctgagcagcgagtccctgattttatcaaggcaggtgctgatattgttagtgtccactgtgaacagacatcgaccatccatttgcaccgaacagtcaatcagattaaaagtctaggagcaaaggcaggagttgttttgaatccagcgactccactcactgcaattgattacgttcttgatgttgttgacctggtgctgattatgtctgtgaatcctgggtttggtggccagagctttatcgagagtcaagtaaagaaaattgcagaactgagaaggttatgtgcagagaagggagtgaacccctggattgaggttgatggtggtgttggtccgaaaaatgcctacaaggttattgaagctggcgcaaatgccattgtcgcaggttctgcagtttttggggctccagactacgctgaagctatcaaaggaataaagaccagccaaagacctctagctgtagccgcataaagagctggacgtgtaatcatttactctgtgcaagtttaccagtgatgcgatctgtatagatgtgtgtcttgtccagctatacgtataccggagatgaaaggagacggaggcagtgaagaaatatccttttttttcttctcatttttcacgaggatgccgtgcactgctcccagaatgctgtgtccaatttacaaacgcacaggtggcacatgaactagcagagtagctctctcttgaaaggaaactgtatttggggtcgatgaaccctctggtgttattcttcagactggtaaacgatgtaacatgtttgataatcaataaagtgcgtcgtatggctttcctaaaaaaaagcacagcagcacacgaatgtaacatgtttgtacatcggcatctgactgagtctgaagcccttgtacatgattggaatttaccttaaaactgtctggaactttg

SEQ ID NO: 583 - DNA, 1211 bp, Zea Mays
cctcccgttccctgctttctgtttggctgtatcgacgcccgcgtgcaaggaaggcattccatgtgagggcatcagctcgggttgacaagttctcaaagagtgacatcatcgtgtccccttcgattctgtctgcaaactttgcgaagcttggtgatcaggtaaaagctgtggaggtggcaggatgcgactggattcatgttgatgtcatggatgggcgctttgtgccaaacatcacaattggacccttggttgttgatgctctgcgtccagtgactgatcttccgttggatgtacatctgcgagtccctgattttatcaaggcaggtgctgatattgttagtgtccactgtgaacagacatcgaccatccatttgcaccgaacagtcaatcagattaaaagtctaggagcaaaggcaggagttgttttgaatccagcgactccactcactgcaattgattacgttcttgatgttgttgacctggtgctgattatgtctgtgaatcctgggtttggtggccagagctttatcgagagtcaagtaaagaaaattgcagaactgagaaggttatgtgcagagaagggagtgaacccctggattgaggttgatggtggtgttggtccgaaaaatgcctacaaggttattgaagctggcgcaaatgccattgtcgcaggttctgcagtttttggggctccagactacgctgaagctatcaaaggaataaagaccagccaaagacctctagctgtagccgcataaagagctggacgtgtaatcatttactctgtgcaagtttaccagtgatgcgatctgtatagatgtgtgtcttgtccagctatacgtataccggagatgaaaggagacggaggcagtgaagaaatatccttttttttcttctcatttttcacgaggatgccgtgcactgctcccagaatgctgtgtccaatttacaaacgcacaggtggcacatgaactagcagagtagctctctcttgaaaggaaactgtatttggggtcgatgaaccctctggtgttattcttcagactggtaaacgatgtaacatgtttgataatcaataaagtgcgtcgtatggctttcctaaaaaaaagcacagcagcacacgaatgtaacatgtttgtacatcggcatctgactgagtctgaagcccttgtacatgattggaatttaccttaaaactgtctggaactttg

SEQ ID NO: 584 - DNA, 1232 bp, Zea Mays
cctcccgttccctgctttctgtttggctgtatcgacgcccgcgtgcaaggaaggcattccatgtgagggcatcagctcgggttgacaagttctcaaagagtgacatcatcgtgtccccttcgattctgtctgcaaactttgcgaagcttggtgatcaggtaaaagctgtggaggtggcaggatgcgactggattcatgttgatgtcatggatgggcgctttgtgccaaacatcacaattggacccttggttgttgatgctctgcgtccagtgactgatcttccgttggatgtacatctgatgattgtggaacctgagcagcgagtccctgattttatcaaggcaggtgctgatattgttagtgtccactgtgaacagacatcgaccatccatttgcaccgaacagtcaatcagattaaaagtctaggagcaaaggcaggagttgttttgaatccagcgactccactcactgcaattgattacgttcttgatgttgttgacctggtgctgattatgtctgtgaatcctgggtttggtggccagagctttatcgagagtcaagtaaagaaaattgcagaactgagaaggttatgtgcagagaagggagtgaacccctggattgaggttgatggtggtgttggtccgaaaaatgcctacaaggttattgaagctggcgcaaatgccattgtcgcaggttctgcagtttttggggctccagactacgctgaagctatcaaaggaataaagaccagccaaagacctctagctgtagccgcataaagagctggacgtgtaatcatttactctgtgcaagtttaccagtgatgcgatctgtatagatgtgtgtcttgtccagctatacgtataccggagatgaaaggagacggaggcagtgaagaaatatccttttttttcttctcatttttcacgaggatgccgtgcactgctcccagaatgctgtgtccaatttacaaacgcacaggtggcacatgaactagcagagtagctctctcttgaaaggaaactgtatttggggtcgatgaaccctctggtgttattcttcagactggtaaacgatgtaacatgtttgataatcaataaagtgcgtcgtatggctttcctaaaaaaaagcacagcagcacacgaatgtaacatgtttgtacatcggcatctgactgagtctgaagcccttgtacatgattggaatttaccttaaaactgtctggaactttg

SEQ ID NO: 585 - DNA, 1227 bp, Zea Mays
ctcccgttccctgctttctgtttggctgtatcgacgcccgcgtgcaaggcattccatgtgagggcatcagctcgggttgacaagttctcaaagagtgacatcatcgtgtccccttcgattctgtctgcaaactttgcgaagcttggtgatcaggtaaaagctgtggaggtggcaggatgcgactggattcatgttgatgtcatggatgggcgctttgtgccaaacatcacaattggacccttggttgttgatgctctgcgtccagtgactgatcttccgttggatgtacatctgatgattgtggaacctgagcagcgagtccctgattttatcaaggcaggtgctgatattgttagtgtccactgtgaacagacatcgaccatccatttgcaccgaacagtcaatcagattaaaagtctaggagcaaaggcaggagttgttttgaatccagcgactccactcactgcaattgattacgttcttgatgttgttgacctggtgctgattatgtctgtgaatcctgggtttggtggccagagctttatcgagagtcaagtaaagaaaattgcagaactgagaaggttatgtgcagagaagggagtgaacccctggattgaggttgatggtggtgttggtccgaaaaatgcctacaaggttattgaagctggcgcaaatgccattgtcgcaggttctgcagtttttggggctccagactacgctgaagctatcaaaggaataaagaccagccaaagacctctagctgtagccgcataaagagctggacgtgtaatcatttactctgtgcaagtttaccagtgatgcgatctgtatagatgtgtgtcttgtccagctatacgtataccggagatgaaaggagacggaggcagtgaagaaatatccttttttttcttctcatttttcacgaggatgccgtgcactgctcccagaatgctgtgtccaatttacaaacgcacaggtggcacatgaactagcagagtagctctctcttgaaaggaaactgtatttggggtcgatgaaccctctggtgttattcttcagactggtaaacgatgtaacatgtttgataatcaataaagtgcgtcgtatggctttcctaaaaaaaagcacagcagcacacgaatgtaacatgtttgtacatcggcatctgactgagtctgaagcccttgtacatgattggaatttaccttaaaactgtctggaactttg

SEQ ID NO: 586 - DNA, 1284 bp, Zea Mays
cccaagttgctggtgatgagctctgtagactccggatcaaatggcctgactggctatgtgactttgttgtcgctcatggaggagcttatcagtctggaaatgaaggcattccatgtgagggcatcagctcgggttgacaagttctcaaagagtgacatcatcgtgtccccttcgattctgtctgcaaactttgcgaagcttggtgatcaggtaaaagctgtggaggtggcaggatgcgactggattcatgttgatgtcatggatgggcgctttgtgccaaacatcacaattggacccttggttgttgatgctctgcgtccagtgactgatcttccgttggatgtacatctgatgattgtggaacctgagcagcgagtccctgattttatcaaggcaggtgctgatattgttagtgtccactgtgaacagacatcgaccatccatttgcaccgaacagtcaatcagattaaaagtctaggagcaaaggcaggagttgttttgaatccagcgactccactcactgcaattgattacgttcttgatgttgttgacctggtgctgattatgtctgtgaatcctgggtttggtggccagagctttatcgagagtcaagtaaagaaaattgcagaactgagaaggttatgtgcagagaagggagtgaacccctggattgaggttgatggtggtgttggtccgaaaaatgcctacaaggttattgaagctggcgcaaatgccattgtcgcaggttctgcagtttttggggctccagactacgctgaagctatcaaaggaataaagaccagccaaagacctctagctgtagccgcataaagagctggacgtgtaatcatttactctgtgcaagtttaccagtgatgcgatctgtatagatgtgtgtcttgtccagctatacgtataccggagatgaaaggagacggaggcagtgaagaaatatccttttttttcttctcatttttcacgaggatgccgtgcactgctcccagaatgctgtgtccaatttacaaacgcacaggtggcacatgaactagcagagtagctctctcttgaaaggaaactgtatttggggtcgatgaaccctctggtgttattcttcagactggtaaacgatgtaacatgtttgataatcaataaagtgcgtcgtatggctttcctaaaaaaaagcacagcagcacacgaatgtaacatgtttgtacatcggcatctgactgagtctgaagcccttgtacatgattggaatttaccttaaaactgtctggaactttg

SEQ ID NO: 587 - DNA, 2603 bp, Zea Mays
cgcacactccgcaccgcaccgtcgcccttgccctgaaaaaaagaagagagagagaagcactccgagatctggtcttctcggtgtccaacggtccacagcccaaccctctcgagtctcgtcttctcccccggactccgagatcttgccgatctgcaccgacgccgcggtccgcggccatggcggtgccctctcccgccccgcggtccccgcgccgaccggatgccattgtggccccggacccctcgtccgctgacgtgccaccatccctcgacttcggcgacccggcctccctcgccgcgctccgagtcctcaccgacgcgggtgccgccacccgcctcctccacgagtgcgtggcctaccagcgcgggctcgacgcccgtctcgacgctctcctcgcccgccgtgctgacctcgaccgcgccgctgcttcgctcctccgctctgccccgcctctgctctcgctcgcggcttccgacgccgccgcgcttaaggaatcctcctccaccaccgcggcgctcgccgacgcgctctcgtcccgcgtccgccatctcgacgcggcgcactccagggcggacgctgcgctggcacgtgccgaggccgcgctcgatcgttctcgcgcgctcgaagccgcgcggcgggccttggccgccgacgacctcgccgccgccgccaccgccgtgcacgaattcctcgctatcgacgctcggttccccaccgacgacgatctccgccgcgatctgcttgacatgaaacgtcgcctcgaggggctcgcgcgtcggaggctagcggcggtcgttgatgcacaggaccatcctgctgtgcttcgcctcgtccgcctattcccactgctcggactcgctgatgaaggactccaggtctacgtcgcctacctgaagaaggttgtcgctctgcgtgcccgcgcagactttgagcacctcgcggagctgacctccgcgacccagccgacctctgagcggccggattttgttggctgcctcacccgtctctttaaggacattgtgctcgctgttgaggagaatgatgctgtgcttcgtgagctcaggggagacgatggtgttgcttatgccatcattgagctgcaggaggagtgtgattcgcggggcacccagatactacgccgttatgctgattacaggaagcttgcacgacttgcatcggatataaactcctatacaaagaacctcctttcggtcatgggttccatggccagtgctgctggaggtagtgaagggcctgatcccagggaaattgagctttatcttgaggagattcttgcgttgacccagcttggtgaggactacactgaatttatggtgaacaagatccgtggattgagagatgtcaagcctgagcttgggccgcgggcgatgaaggccttccgtaatggtaacttctataaaacggagcaggatctgactgggttctatgtgatctttgaggagtttttcatggtggagaatgtgaggaaagccatacggattgatgagcccatatcagatggtctcacaacgtctatggtggatgatgtattctttgtactgcagagttgctgccgccgggctgcttccactgcaagcataaactctgttcttgctgtgcttggtggggcaatgagccttctaagcaatgagtatcaggaggcactacagtggaggatgcgggagccaaatttgggtgcaaagctcttccttggtggtgttggagtgcagaagacaggtgaggagattgcgactgcactgaacaacattgacattagctctgagtatgttctgaagctccgtcatgagattgaggagctctgcgtggaggtttttcatactccagctgatcgagagaagatcaagtcctgtttatcagagctaggagaggtcagtgcttcatttaagaagatccttcattctgcactggagcatttggtggcatctgtggtaccacgcattcgtccagtccttgacactgttgctactgtcagttatgagttggatgatactgaatatggggaaaatgaggtgaacgatccatgggtgcagaagcttatacttacagttaacactaatgttgcttggctccagccagttatgacattaaacaactacgattcctttgtgcacttgatcattgacttcattgtcaagaggctcgaggtgattatgatgcagaagaggttcagccagctcggcgggctccagctggataaggaggtccgctctctgatcaaccatttctcagagatgtcccagagaccagtcagagacaagttctctaggctttcgcagatgtcgaccattttgaacttcgagcgggtatcggagatattggatttctggggtgacaatgctggccatctgacgtggctgttgacacctgcagagatgccagcatatcatgcagcgcccaaatggtgctggtacagatacaacatatgtcaacttcttcctcttactgcatcgtatctgaactgcatcgacctaccaactacatcactgcaccgactgctatactgcatcaaccaaccgaacggctatcatgaaacgacacaatgtcagccgtcagatatgtctcttcttatctttggttttctc

SEQ ID NO: 588 - DNA, 1661 bp, Zea Mays
aaatcaagcttgtggctctcggccaccgcccgctcgcccacgtggcccccacccccgactccggctcccgctccttaaaactatccccaattccccgtccgctatcccgatcgatccatccatcgatcgcccacgcttccgtccatccagactccagagagataaaatctaattcctggacctggagtgcagaccgatcgccgccgccgccgcgttgtttcttgtctgctcagctgtggtgatggtgcggtaaaagaaggctgctccatcgctccaacaaaaaaaaaggttgggatcgcacgcggcaggcgacaagcagtttccaaagagaagggaagcctagaggaagggagctagagatgggggagggcagagcaggagacggcctcatcaagctgttcgggaagaccatccccgtgccggagacggccgccgtcggcgaggctgccaagagcaagagcgcgtcggccacttcccacttcctccagagggtcagggccggtctgcccgtcgacccgctcgtctgcgcggcagccaagactaacggcacggtgctcagcttcggctctgccatgtccagcttagacctcacggagcagatgaaacagctcaaggaaaagctcgtcccgatagcgggggacgagcgctcagttgggtctcgcactcaaggaccttctgccaaggcagaagacccggaccggaaggagaatgttacagcagataaatccgcgagagttgttcagcatccatgcatgacgaacggggtggccatgtggccatttagctgtgcgccaccagtaccggcctctgcctgttacggcccaggcagcatcgcaatcccgttctacccggcagcagctgctgctgctgcctactggggttgcatggttccaggagcttggagtggcgcatggccgcctcactccggccagtccgagacgggctcgtccattacctccgcctctccagcagcatccaccaagtccaacatctgcttcacgccaggaaagcaccctagagaccgcgacgaggaaggaggcgccaaaggaaatggcaaggtgtgggtgcccaagacgatccggatcgacgacgtggacgaggtggccaggagctctatcctgtcgctaatcgggatcggcggcgacaaggcaggcaaagatggcggcagaggctgcaagctcgcaagggtttttgagcagaacgaagaggcggcaaggacggcaactcctcactcggcagccatcagcggcttgccgttcttgcaggggaacccagctgcgctctcgcggtcactgaccttccaggaggggtcttgagcctcgctcgattcacagctgagaattttgtacattagagggttgtatgtaatctaatctaggtggggaggtggggctcatagctgccagcggacattgaaactatacaatagatagatatttgtagatagccaatatatatgggtcgggggaggaaaaaattgataatgagagcaagtccccttatttgtatatattatggattggaatatttggttgccaagtggtcttccagcaatagcgccagatgttctgatccactggctgttggcccatcgatctcagtggacaaaagtggtccaccttattctgggaaatttcagcatatattcagtttgtttccac

SEQ ID NO: 589 - DNA, 1147 bp, Zea Mays
caacccactcgcccctagcaataatctgcttctacctctcgatcgcttcccagttgcctccgctcaccactcgcttctctctgccagagtgcaagtgctctctccctcgcacactacacacacagtaacaacactccccggagtttcaccagctagctagctcccggttttagcaggcattaaaaccctatcctttcaggcgagccgcgagagaggctgaggcagagacgacgaggacgaaacgatccaggggctgtagcttccgagcgcggctggtgtctccgagcaagctactgccgtcgtcgccgccggaaatatgtcgtcggggcgacgtggcaggatcagcgacgacgagatcaacgagctcatctccaagctccaggcgctcctccctgagtcctcacgccgccggaacgcgagccggtcgtcggcgtcgaagcttctcaaggagacgtgcgcctacatcaagagcctgcaccgggaggtggacgacctctcggaacggctgtcggggctcatgtcgaccatggacaacgacagcccccaggccgagatcatccggagcctcctccggtgacccggccatgccgcccaggcgcgcgcgcgcggggctggccctcttcgattctgcctgccatctagtagctagctgcagcagccagcgcagctgcactgaagacgacgacgacaacgcgacgaccttaattatgttcctttgttcttcttccggtgtgtgtgagtgtgtgtgtttccgtgtttaattaatttgagagcgaggagctggatggagccttcgttcagaagaggatgaccaagagggctctcgatcctctcgatcgtgtaccacgccttggggttagtagagatatatatggacttgtattaaccggcgaggtaccacgtactggtagcttgtagttgcagttgcagtagactactatagcagtttctacgttgcagacgtgtcctaagagttgttgttttgtagatttgcacgctgctcttgtctctgcccttagcttgccaatgggcggacaagcagcttaacgtacgacgactactctggagacaaatatatatatatactatcatgtgcttttcctgtctttgctttcattctgatgtaacatggtgatgcactccatcg

SEQ ID NO: 590 - DNA, 2117 bp, Zea Mays
cgaaacgactctccactcgcacacgccatcactcccaccagatagccaccaaccgattcgtcggcccacatttcagagcgacgagtacacgccgcaccacgtcaggaagataaaataaagatcccacgaggagaatcaagatgcgtccctatcggaatctggacctttgcccacccactgccactaatccttcctacccttgcgtgcttaatccttcttccattgccttatctctccttcctcagtttaatcaccagacggccagccctagcgagctcatattccgctcctggttgtccgtccatggccgcgtcgctgcttcgccgtggcgccgtcaccagccgccggcgatgcccggtggagatgctgcggcggctggtctcgtccgaggcggcggctgatcgggcaccgtcgcggccgccgccggagatgccgccgttcgactaccggccccgcccatatgccgggctgggtggcgccgagatcttcgagaagaggaaggcggtgctcggcccgtctctcttccattactaccagaagccgctcaacattgtggaggggaagatgcagtacctgtatgacgagcatggaaagagatatctcgattgctttgggggcatcgtgacagtgtcgtgtggccactgccatccggatattgtgaatgctgtggtggagcagaccaagttgctccagcacacaaccaccatttacttgcaccacactattgtagagtttgcagaggcactcacctccaaaatgcctggcaatctcaaggttgcgtattttgtgaattctgggaccgaagcgaatgagttggcaatgttgatggcccggctgtatagtgggaatctcagtatggttgcgctcagaaatgcatatcatggcggaagtgccggtacgattggattgactgcttatgctaaggaagtcgaagaacacataacttatggaagttcaggaagggttgcaggcttcattgcagaaacattccaaggtgtgggaggtgctgttgaactagctcctggatacctaaagttagcttatgacattgtgcgcaaggctggtggcgtttgtattgctgatgaagtccagagtggttttggccgtactggcagtcattactggggattccagacacaaggtgtcattcctgacatagtcaccatggcaaagggaattggcaatggcctaccattgggggcagttgtgacaactcctgagattgcaagtgtgttagctcaaaaaatccaatttaacacatttggtggaaatccagtttgttctgctggtgggttagctgtgcttaaggttcttgacaaggagaaacgccaggcacattgtgctgatgttggatctcacttgttggagcgtctaaaatcgcttcaggagaagcacgaaatcataggtgatgttagaggaaggggactgatgcttggggtggaactcgttacggacagaaaggagaagacccctgccaagtcagaaaccattgaactgtttgagaagctcagagatctcggggtactagttggaaagggcggtctgcatggtaacgtcttcagaataaaaccaccgatgtgcttttcgaaggacgatgcagacttcttggtggactccatggactacgcaatgtcaaggctctgaaggaacatgctctgagttgacaatgtgtctgcgtggaaacaacacttcctgcaaccgcaagatgcatggcctgaaatgaaactgaaaggcagatgatttaatgggcatgctccccgggtggtatgttggtggtgttatggtgaagtttaatagtccccctcccccgaataaattgatgaaaggggacagaacgtcttgcccagcttgtgagttgtttgtagaagaactgcagttaataaatagaacagcgagcgagcaagcgtgatatcaatctgcatacggtcattttcatttattaccagataagttgacaactgcatgagcccggccatgtgtggagtctctcgtcgaggttcgggtcgggtgagtcggctcctgtttggtaggcagatccaaagagaggccaaagagtcatggctcactcaattttttataacctttttatacctaatgttaaagatagaaaaaataaa

SEQ ID NO: 591 - DNA, 1713 bp, Zea Mays
ctttgttatccgtgcgatgaaataagattagtgttccaaaaagctcaacattgtggaggggaagatgcagtacctgtatgacgagcatggaaagagatatctcgattgctttgggggcatcgtgacagtgtcgtgtggccactgccatccggatattgtgaatgctgtggtggagcagaccaagttgctccagcacacaaccaccatttacttgcaccacactattgtagagtttgcagaggcactcacctccaaaatgcctggcaatctcaaggttgcgtattttgtgaattctgggaccgaagcgaatgagttggcaatgttgatggcccggctgtatagtgggaatctcagtatggttgcgctcagaaatgcatatcatggcggaagtgccggtacgattggattgactggtatgcagacgtggaaatacccaattcctcagggtgaaatacatcatgtcatgaaccctgatccttatcgggggactttcgggtctgatgctgcagcttatgctaaggaagtcgaagaacacataacttatggaagttcaggaagggttgcaggcttcattgcagaaacattccaaggtgtgggaggtgctgttgaactagctcctggatacctaaagttagcttatgacattgtgcgcaaggctggtggcgtttgtattgctgatgaagtccagagtggttttggccgtactggcagtcattactggggattccagacacaaggtgtcattcctgacatagtcaccatggcaaagggaattggcaatggcctaccattgggggcagttgtgacaactcctgagattgcaagtgtgttagctcaaaaaatccaatttaacacatttggtggaaatccagtttgttctgctggtgggttagctgtgcttaaggttcttgacaaggagaaacgccaggcacattgtgctgatgttggatctcacttgttggagcgtctaaaatcgcttcaggagaagcacgaaatcataggtgatgttagaggaaggggactgatgcttggggtggaactcgttacggacagaaaggagaagacccctgccaagtcagaaaccattgaactgtttgagaagctcagagatctcggggtactagttggaaagggcggtctgcatggtaacgtcttcagaataaaaccaccgatgtgcttttcgaaggacgatgcagacttcttggtggactccatggactacgcaatgtcaaggctctgaaggaacatgctctgagttgacaatgtgtctgcgtggaaacaacacttcctgcaaccgcaagatgcatggcctgaaatgaaactgaaaggcagatgatttaatgggcatgctccccgggtggtatgttggtggtgttatggtgaagtttaatagtccccctcccccgaataaattgatgaaaggggacagaacgtcttgcccagcttgtgagttgtttgtagaagaactgcagttaataaatagaacagcgagcgagcaagcgtgatatcaatctgcatacggtcattttcatttattaccagataagttgacaactgcatgagcccggccatgtgtggagtctctcgtcgaggttcgggtcgggtgagtcggctcctgtttggtaggcagatccaaagagaggccaaagagtcatggctcactcaattttttataacctttttatacctaatgttaaagatagaaaaaataaa

SEQ ID NO: 592 - DNA, 1420 bp, Zea Mays
aaaaaaacagcgacggcccatcagatcgctgcacaaaaccgtcgacggcgcggcagcagaattgaaaaaggcaacgcgcgatgcttatcctccgggagtgatgtagctcgagcagacccaatcgcccgcccggactactatatttatacaccagccccgcccggtccccgctcatcgcgagatcgaccatcatcacagatcatccacagaggagaccatcttccgtgtagagactagactagagagagagggggatatatggcagacatcgtccaaggtgtggagctcgtgggtggagtccgccgccgcgtccggggtgaggttcagcgtcgcgctgcacctggagcccaagaccgcgctcgccctggccgccgccgatggcctcttctccgcctagctagctagctagcctagctgcttccaggcccttctcctgagtgagcagagcactgagcagcagtagtcgagttcttctggaccatataatacaatgcgcggttcacctgtacattcattcttcgcttctcctgcgctcattgatatgcgcatctgcttgattgttttctccttgtcgtgacattttttttaaggacatttacatttgaaccactagtctcgacgccttgctcagatctacacccacccaaattctctcctcacttttctcctctcacctctgcacttagctcggatataacctcacgttccatcccgtcaaagcatcttacaggtggaccaatgtcttacatgtgggccccgccacctccacaccttttcctttcccctgctttctcttcctaaatcgaatcacacgtgagattcgctcccaggttcactcccgtgcggcgtctccggcgtacggcgtctccgacaagcgcggctacggccatttctgagagcatttagagggggtgaataggtgatcctgtaacacttcaaaatcttaagccacaaaacttgattaattgttagcgcagtaatttgccaagtggctgaagaaggatctcaacacaacacaataaccaagagatatcaatcacagagatggcacagtggttatcccgtggttcggccaagaccaacgcttgcctactccatgttgtggcgtcccaacggacgagggttgcaatcaacccctctcaagcggtccaaagaccaacttgaataccacggtgttgctttgcttttcttaatcccacttgcgaggaatctccacagcttggagcctctcgcccttacaaaagatgttcacaaagaatcacggagcaagggagggattagcaactcacatacgacacaaagatcacagtgaatacgcacacgcaaaacccagacttgagctcaagagactagcacactagaacagagctcaaatcactagaatgtcaaacaagtgcgcaagaatgaagtgtgagtgatc

SEQ ID NO: 593 - DNA, 1680 bp, Zea Mays
atcagcgagcacaaatcgaaccgtggtcgtacacgggcctgtttgcagcagcaagcgttcaagaaatcaagcggccgcctcgtcccctccgcgcccggcgcctccgacgcccaagcagcgtgaccgtggaagggacgaagaagagcaccctcaagcggccgcactaatcccaaaccggcctccgacccccaagcagcctcacgctgctcgatggcggcgccgtatcaccagcctacgagcctggaggaggtccgcactctgtggatcggcgacctccagtactggaccgacgagaactacctctacagctgcttcgctcacaccggggaggtacaatctgttaaaataatacgcaacaaagtaacaagccttcctgagggttatgggtttatagagtttgtttcacatgaagctgctgagaaaattctccagacttacaatggcacacagatgcctggaactgaacacacattcagattgaattgggcctctttcagctctggtgagaggcgccctgatccaggatctgatcattcgattttcgtaggggacctggcacctgatgtcacagattacttactacaggaaacattccgagtgaactattcatctgttagaggtgctaaggttgtcacggatccaaataccgggagatctaaaggatatggatttgtaaagttcgcagatgaaaatgaaaagaaccgtgcaatgacagaaatgaatggtgtgtactgttcaacgagacctatgcggataagtgctgcaatacctaagaaatccactggctctcagcttcagtattcagctgctaaagcggtgtatccagcaacagcgtatgcaatgcctcagctccaggcagttctccctgacagtgatcctacaaacactacgggcatcagctgaagaggcagtacaacgtcttcatggcacaatgattggccaacaagctgttcggctttcatggggccgaagtcctgcgagtaaacaggattcatcagctgtgtggagtcagcaagcagatccaaatcagtgggcaaacacttactatggctatgggtatgatgcatatggatatgctcaggatccgtcatacgcttatggtgcttatgcaggatatagccaatatccccaacaggttgagggaactgttgacgccacttctgttgctggtagccatccaggcatggagcaaaaggaggagccatatgatccaatgaacatacctgatgttgacaagttgaatgcttcatacatggctgttcatggtagagccatgctagggcggtccttgtggttgaagaccaacccgctgccccaaccgacataagcatgtttcctcccccgaagactacagccagtgctggtgggcgcagctgggtttcatcgcgcagatgattttgcccttcccagtagtcacgttaaactctgaaattgttgtaggctggccagcagcttcgtctatattgagaacattcgatgtatgataggcgtgactcttttgtactgtatttcttaggctgttggttaatattattaggacaatattgagggagcggtgaaagtcaactgtctgtatttccaactgattattctgctgttcgatactcaactcccgactcccgttcacttggcaggacaatggcatatctgatatttctatcgttgaattacctttactta

SEQ ID NO: 594 - DNA, 2293 bp, Zea Mays
gcactgcctctgctcacacataacacgcgcaacggctctcgccctcgccagtgccccggcacgtctcacgagtgcgacaaaggaggagcggcgaccaagcaatccctctctttctatcgctcggggctcctcctccaccgcgcccgcacggcaggacgcaggagataacagaggggagcgcgcgggagcaaaggggaggacggcatggagttcatggagcccaaggacatcgactggagcagggtggtgtcacggtacgtgcgcgacgagacctacgaggacatcgaggccccgcactgggcggacctcaccgaccccaacgccggccgcgccgccgtcgacgacgaggcctggttctgccgccccgattgccagcatccgaagacggccgacgatttcctcaagctgagccccagccccaagggcaagctgctgcgatcggtttcggccatgctgccgttcgtggaaagggacgccaatgccagtagcctcagggacggcagtggcaatctcaactggcagggcggcggcgccgttaccgcctccacgccgccgaagctaaaggcagcgcccaagaagaggttccaggaggacagcgagaaccaggacccttcgctggccacgccgcccccacggcaggggccaagtaggccgccgttcggtgcccctcggtggaacaagcatgccaaggagaccattaagtccagtgcggagaagcggccggacaacgctgagaaggaggcgctgctcaataagcacgccccgccgaggcagctcaagagcactctctcagcgaggaatctcttctctggaaaggatatacttggacagatttcggagttctacgatgagctgaagcggatggttggcggcagccggcccgttacagacacacaggaggtttacagcttaaacccgatgaatccgagcgatttgatggagaaggtggttcctgatgcccctgacagtttcatcagcaatccagttcccgcagagatcgtgaaggaggtggcgacgcaagaaagagtgaaaaagagtccaagcccaatgaagggaaagaaggtggggttgaaggtggaagcagggaagccaaggtctccctctgtgctcaaggaggtgaaggcaacaccgccgactccgcagcggtttccatccccatcgccgaaccgcattaagaatgttaagcttggaggggcggccatagcaggatcgccactcaagaacccactgaaggagaaggggacccctagtaacagtaaggatccggagagcaaaaaatatgctgtgaggcaaccctttggggttaaggatatgaataatacaagagcatgtgatgcagaagggagctccagcagcatgttttggttcttgaagccctgcactttccttgtggagtagcatcataacactacaaaattttaacgagcaacacttgatgtagctagaatccgttacttcattaatttccaaattttgagttcctatttgattgattcatttgatgggtaccatatccgggaagtaaaaaaaccatgtatagtcatacagattcaaagggtctttccaaatgcataatttgagatgtagcaaaacacttttctgctgcttcattgtttgttcaaacaaactgcattcttgtctcttgaagttatatactaaggttatacaattcagtggtctgtttgaatgttgttgctctcaagtctcaactactacctagcagttcaaaactacaagctgccaaaaatatttttgtagtgcagtctatgcattccatgaggcgatataagttgatggtctatttcttaattcctgaaggtttactgctcttaattgtactgcttgtgcttgccaaattggtgatgttgtttctattccttcaattgtaatttcacaaatttctgtgcaaggattgtagccctaagttataacaatgtggattcgcctggtctgtaaggtaatgccacaagcaaaaaatctgaaatctcttctagaacttacaattttttattagtcttcagctagcatgtgacagacttggtttgcatgtaaaggtttaacattcctaattcctaagttacttctctttagatcaatcaccaggagttggaatacatcgaaagcacataatctgggttgcattgagttgttccttgatccttcatgatgagttatttgacaagatccaaaactcgatttttcatcaattacggtgaaataattcataaatcttgttgggccatcgctggttctatctcggccaagcaagaaaggggaacccggtgggaagagg

SEQ ID NO: 595 - DNA, 2210 bp, Zea Mays
cgacgcaaacgaacaaggccttagaattctcaatccaaacgagcccttggcaacgactcgactgtccccaatccagtatcgcgagaagcgctacgcggccggcgaggcgctccccccaatatggtgcgcgtcgtcgtctccaccctccccgccctccgtccgcttctccgccgtggctctctgctaaaccataaacccctgccccgctcacgccttcagccgtggccgttctgcacgctctcgtcctcgcccgccgccggcgcgcccagcgccgcggtgaagggggaggaggttgcgttggacaagcaccttacccggtgcgcggcggcaggcatagcaccgttgcgggtggcggtgctggtgagcggcggggtggatagcagcgtggcgcttcgcctcctccacgccgccggccatcgctgcaccgcgttctacctgaagatttggttccagatttcaggaatttctggtccgagtgcccatgggacgaggatttgaagtatgcacaagctgtttgtgacaagattgatgtgccattggaggtggtccacctatccgatgaatactggaaccatgtggtatcacatatgatcaatgagtatcgctgtggtcgtacaccaaatcccgatgttctgtgcaacacgagaataaagttcgggtctttcttagaagccattgaaaatttaggatttgactacatagcttcaggacactatgcacacgtagtacatccttccgctgaaaataccgaagcgccatccgtactacaattatcaaaggacaagatcaaggatcaaacctatttcctctcacatctatctcaatctcagcttagaaggcttcttttcccactaggatgtattacaaaggatgaggttcgcagactggctactcaaatgggccttcctaaccaaggtaggaaagactcacaagggatatgctttcttggaaaggtcaagtttagtgagtttgttgaaagacatataggagaaaaggaaggaatcatactggaagctgagtccggagattacctagggatacaccgtgggttttggttttatacaattggtcagcggcaaggattacggcttcctggaggaccttggtacgttgtagagaaagatgttcaaaacaatgtggtttttgtatcaaggaattattattcattggataagcggaggcgcacatttcgtgttggatcactaaactggtttgataattgtggacctggaaacaatgagcaactcaaatgcaaggtgcgacatagccctgaatttcatgattgcactttggtaaaagagcgtagtgaagaaaatggggatgctttggtggtgcatctggctgaagatgaccagggcttggcagctggtcagtttgcagcgttctatagtgaaaatgtatgcctggggtcaggcataattttggattcatgggacaagatgagcttccctgtctgctcaagggcactcgaaatcgcaaagttggcggacaagtcgagcttagggaagccaataagaatcgtgaacctggaacatatcgtgaaacctgaacaacaggaggaaatcaaagttgcctgacagattggtgccgtaaccttctcctagctccgccagctgcccccttcaaatcaattcatcaatcaaccgtatcgcaggccctggaaatcgaaggatgaggggtcttctagaatctaccgatatatacccccagttggaaactccaggtccttcttggaaggatgatatagtggaatatggcatgacttggtgcgctcgtgttgcagaggaacgatgaagcttcgtgcgtggatagggttgatctgaattaactgttgacagtgattttacgatctcgcgggaaagcaacacaatagtttgggcacgtcctctcctgagtggaatgatctggattcagtagtagtcagtggcacttcattaaaactaatacagggaaatcgtgacgttgtatgatagtggtaagatattgtattgtgaattttgacgataatatcggtgcgtgattgtgccactggatttgttcatcagtacttaatccctttttgacgtttcgatcttcttgactgaagcggagcgagttgtcggaaacttggcgtcggtgcgacgtgtacttgtcagcacaggaccgcgcgacagatgtaccgtactacactacaccctagatctgaatctgattcaggtgtagcagcgcgt

SEQ ID NO: 596 - DNA, 2117 bp, Zea Mays
gacgcaaacgaacaaggccttagaattctcaatccaaacgagcccttggcaacgactcgactgtccccaatccagtatcgcgagaagcgctacgcggccggcgaggcgctccccccaatatgccgtggccgttctgcacgctctcgtcctcgcccgccgccggcgcgcccagcgccgcggtgaagggggaggaggttgcgttggacaagcaccttacccggtgcgcggcggcaggcatagcaccgttgcgggtggcggtgctggtgagcggcggggtggatagcagcgtggcgcttcgcctcctccacgccgccggccatcgctgcaccgcgttctacctgaagatttggttccaggaagatttcaggaatttctggtccgagtgcccatgggacgaggatttgaagtatgcacaagctgtttgtgacaagattgatgtgccattggaggtggtccacctatccgatgaatactggaaccatgtggtatcacatatgatcaatgagtatcgctgtggtcgtacaccaaatcccgatgttctgtgcaacacgagaataaagttcgggtctttcttagaagccattgaaaatttaggatttgactacatagcttcaggacactatgcacacgtagtacatccttccgctgaaaataccgaagcgccatccgtactacaattatcaaaggacaagatcaaggatcaaacctatttcctctcacatctatctcaatctcagcttagaaggcttcttttcccactaggatgtattacaaaggatgaggttcgcagactggctactcaaatgggccttcctaaccaaggtaggaaagactcacaagggatatgctttcttggaaaggtcaagtttagtgagtttgttgaaagacatataggagaaaaggaaggaatcatactggaagctgagtccggagattacctagggatacaccgtgggttttggttttatacaattggtcagcggcaaggattacggcttcctggaggaccttggtacgttgtagagaaagatgttcaaaacaatgtggtttttgtatcaaggaattattattcattggataagcggaggcgcacatttcgtgttggatcactaaactggtttgataattgtggacctggaaacaatgagcaactcaaatgcaaggtgcgacatagccctgaatttcatgattgcactttggtaaaagagcgtagtgaagaaaatggggatgctttggtggtgcatctggctgaagatgaccagggcttggcagctggtcagtttgcagcgttctatagtgaaaatgtatgcctggggtcaggcataattttggattcatgggacaagatgagcttccctgtctgctcaagggcactcgaaatcgcaaagttggcggacaagtcgagcttagggaagccaataagaatcgtgaacctggaacatatcgtgaaacctgaacaacaggaggaaatcaaagttgcctgacagattggtgccgtaaccttctcctagctccgccagctgcccccttcaaatcaattcatcaatcaaccgtatcgcaggccctggaaatcgaaggatgaggggtcttctagaatctaccgatatatacccccagttggaaactccaggtccttcttggaaggatgatatagtggaatatggcatgacttggtgcgctcgtgttgcagaggaacgatgaagcttcgtgcgtggatagggttgatctgaattaactgttgacagtgattttacgatctcgcgggaaagcaacacaatagtttgggcacgtcctctcctgagtggaatgatctggattcagtagtagtcagtggcacttcattaaaactaatacagggaaatcgtgacgttgtatgatagtggtaagatattgtattgtgaattttgacgataatatcggtgcgtgattgtgccactggatttgttcatcagtacttaatccctttttgacgtttcgatcttcttgactgaagcggagcgagttgtcggaaacttggcgtcggtgcgacgtgtacttgtcagcacaggaccgcgcgacagatgtaccgtactacactacaccctagatctgaatctgattcaggtgtagcagcgcgt

SEQ ID NO: 597 - DNA, 2153 bp, Zea Mays
tctcaatccaaacgagcccttggcaacgactcgactgtccccaatccagtatcgcgagaagcgctacgcggccggcgaggcgctccccccaatatggtgcgcgtcgtcgtctccaccctccccgccctccgtccgcttctccgccgtggctctctgctaaaccataaacccctgccccgctcacgccttcagccgtggccgttctgcacgctctcgtcctcgcccgccgccggcgcgcccagcgccgcggtgaagggggaggaggttgcgttggacaagcaccttacccggtgcgcggcggcaggcatagcaccgttgcgggtggcggtgctggtgagcggcggggtggatagcagcgtggcgcttcgcctcctccacgccgccggccatcgctgcaccgcgttctacctgaagatttggttccaggaagatttcaggaatttctggtccgagtgcccatgggacgaggatttgaagtatgcacaagctgtttgtgacaagattgatgtgccattggaggtggtccacctatccgatgaatactggaaccatgtggtatcacatatgatcaatgagtatcgctgtggtcgtacaccaaatcccgatgttctgtgcaacacgagaataaagttcgggtctttcttagaagccattgaaaatttaggatttgactacatagcttcaggacactatgcacacgtagtacatccttccgctgaaaataccgaagcgccatccgtactacaattatcaaaggacaagatcaaggatcaaacctatttcctctcacatctatctcaatctcagcttagaaggcttcttttcccactaggatgtattacaaaggatgaggttcgcagactggctactcaaatgggccttcctaaccaaggtaggaaagactcacaagggatatgctttcttggaaaggagaaaaggaaggaatcatactggaagctgagtccggagattacctagggatacaccgtgggttttggttttatacaattggtcagcggcaaggattacggcttcctggaggaccttggtacgttgtagagaaagatgttcaaaacaatgtggtttttgtatcaaggaattattattcattggataagcggaggcgcacatttcgtgttggatcactaaactggtttgataattgtggacctggaaacaatgagcaactcaaatgcaaggtgcgacatagccctgaatttcatgattgcactttggtaaaagagcgtagtgaagaaaatggggatgctttggtggtgcatctggctgaagatgaccagggcttggcagctggtcagtttgcagcgttctatagtgaaaatgtatgcctggggtcaggcataattttggattcatgggacaagatgagcttccctgtctgctcaagggcactcgaaatcgcaaagttggcggacaagtcgagcttagggaagccaataagaatcgtgaacctggaacatatcgtgaaacctgaacaacaggaggaaatcaaagttgcctgacagattggtgccgtaaccttctcctagctccgccagctgcccccttcaaatcaattcatcaatcaaccgtatcgcaggccctggaaatcgaaggatgaggggtcttctagaatctaccgatatatacccccagttggaaactccaggtccttcttggaaggatgatatagtggaatatggcatgacttggtgcgctcgtgttgcagaggaacgatgaagcttcgtgcgtggatagggttgatctgaattaactgttgacagtgattttacgatctcgcgggaaagcaacacaatagtttgggcacgtcctctcctgagtggaatgatctggattcagtagtagtcagtggcacttcattaaaactaatacagggaaatcgtgacgttgtatgatagtggtaagatattgtattgtgaattttgacgataatatcggtgcgtgattgtgccactggatttgttcatcagtacttaatccctttttgacgtttcgatcttcttgactgaagcggagcgagttgtcggaaacttggcgtcggtgcgacgtgtacttgtcagcacaggaccgcgcgacagatgtaccgtactacactacaccctagatctgaatctgattcaggtgtagcagcgcgt

SEQ ID NO: 598 - DNA, 1363 bp, Zea Mays
ctcaatccaaacgagcccttggcaacgactcgactgtccccaatccagtatcgcgagaagcgctacgcggccggcgaggcgctccccccaatatggtgcgcgtcgtcgtctccaccctccccgccctccgtccgcttctccgccgtggctctctgctaaaccataaacccctgccccgctcacgccttcagccgtggccgttctgcacgctctcgtcctcgcccgccgccggcgcgcccagcgccgcggtgaagggggaggaggttgcgttggacaagcaccttacccggtgcgcggcggcaggcatagcaccgttgcgggtggcggtgctggtgagcggcggggtggatagcagcgtggcgcttcgcctcctccacgccgccggccatcgctgcaccgcgttctacctgaagatttggttccaggaagatttcaggaatttctggtccgagtgcccatgggacgaggatttgaagtatgcacaagctgtttgtgacaagattgatgtgccattggaggtggtccacctatccgatgaatactggaaccatgtgtatcgctgtggtcgtacaccaaatcccgatgttctgtgcaacacgagaataaagttcgggtctttcttagaagccattgaaaatttaggatttgactacatagcttcaggacactatgcacacgtagtacatccttccgctgaaaataccgaagcgccatccgtactacaattatcaaaggacaagatcaaggatcaaacctatttcctctcacatctatctcaatctcagcttagaaggcttcttttcccactaggatgtattacaaaggatgaggttcgcagactggctactcaaatgggccttcctaaccaaggtaggaaagactcacaagggatatgctttcttggaaaggtatacactgtacctttttttcttagggatcaatgtttttaacaaatccattgtggagctatacaagtatctctttctaggtcaagtttagtgagtttgttgaaagacatataggagaaaaggaaggaatcatactggaagctgagtccggagattacctagggatacaccgtgggttttggttttatacaattggtcagcggcaaggattacggcttcctggaggaccttggtacgttgtagagaaagatgttcaaaacaatgtggtttttgtatcaaggaattattattcattggataagcggaggcgcacatttcgtgttggatcactaaactggtttgataattgtggacctggaaacaatgagcaactcaaatgcaagaaatcgaaggacaataagatttatgttcggagatgaagctaatgtggactcactccgaatggtaaggcgctg

SEQ ID NO: 599 - DNA, 1794 bp, Zea Mays
aacgactcgactgtccccaatccagtatcgcgagaagcgctacgcggccggcgaggcgctccccccaatatggtgcgcgtcgtcgtctccaccctccccgccctccgtccgcttctccgccgtggctctctgctaaaccataaacccctgccccgctcacgccttcagccgtggccgttctgcacgctctcgtcctcgcccgccgccggcgcgcccagcgccgcggtgaagggggaggaggttgcgttggacaagcaccttacccggtgcgcggcggcaggcatagcaccgttgcgggtggcggtgctggtgagcggcggggtggatagcagcgtggcgcttcgcctcctccacgccgccggccatcgctgcaccgcgttctacctgaagatttggttccaggaagatttcaggaatttctggtccgagtgcccatgggacgaggatttgaagtatgcacaagctgtttgtgacaagattgatgtgccattggaggtggtccacctatccgatgaatactggaaccatgtggtgagtaagcttcatttgagcctttcccccccatagatttgcacacaacactttttagagcctttgctttgagaagaaatactgtgaatttgatatctaggtatcacatatgatcaatgagtatcgctgtggtcgtacaccaaatcccgatgttctgtgcaacacgagaataaagttcgggtctttcttagaagccattgaaaatttaggatttgactacatagcttcaggacactatgcacacgtagtacatccttccgctgaaaataccgaagcgccatccgtactacaattatcaaaggacaagatcaaggatcaaacctatttcctctcacatctatctcaatctcagcttagaaggcttcttttcccactaggatgtattacaaaggatgaggttcgcagactggctactcaaatgggccttcctaaccaaggtaggaaagactcacaagggatatgctttcttggaaaggtatacactgtacctttttttcttagggatcaatgtttttaacaaatccattgtggagctatacaagtatctctttctaggtcaagtttagtgagtttgttgaaagacatataggagaaaaggaaggaatcatactggaagctgagtccggagattacctagggatacaccgtgggttttggttttatacaattggtcagcggcaaggattacggcttcctggaggaccttggtacgttgtagagaaagatgttcaaaacaatgtggtttttgtatcaaggaattattattcattggataagcggaggcgcacatttcgtgttggatcactaaactggtttgataattgtggacctggaaacaatgagcaactcaaatgcaaggaaagctgcttatctttatattaaagagagagcaaaggggggaaccggggaaggaacaccatacagggcaaccatcttaccttatctaggaagtaagaagttgttgcaagagaaaacatttaagctaaacacctacagtcctacactaaaacaatagcatgacctggccagaaaacccctgcatcatacccacaaaataacatctggagctttcaggcgccagtgaaacactaaagctgcaaatcttttttaaagaacaacttggcaggtagcagaggagaaacaccatctgttcctgtgattacacagacaagctctcaaacagcactgctaaaccctttccattgagctttatgaacccttaccattgagctttctgaaccttttccattgaacattgtgaac

SEQ ID NO: 600 - DNA, 2225 bp, Zea Mays
aacgactcgactgtccccaatccagtatcgcgagaagcgctacgcggccggcgaggcgctccccccaatatggtgcgcgtcgtcgtctccaccctccccgccctccgtccgcttctccgccgtggctctctgctaaaccataaacccctgccccgctcacgccttcagccgtggccgttctgcacgctctcgtcctcgcccgccgccggcgcgcccagcgccgcggtgaagggggaggaggttgcgttggacaagcaccttacccggtgcgcggcggcaggcatagcaccgttgcgggtggcggtgctggtgagcggcggggtggatagcagcgtggcgcttcgcctcctccacgccgccggccatcgctgcaccgcgttctacctgaagatttggttccagatttcaggaatttctggtccgagtgcccatgggacgaggatttgaagtatgcacaagctgtttgtgacaagattgatgtgccattggaggtggtccacctatccgatgaatactggaaccatgtggtgagtaagcttcatttgagcctttcccccccatagatttgcacacaacactttttagagcctttgctttgagaagaaatactgtgaatttgatatctaggtatcacatatgatcaatgagtatcgctgtggtcgtacaccaaatcccgatgttctgtgcaacacgagaataaagttcgggtctttcttagaagccattgaaaatttaggatttgactacatagcttcaggacactatgcacacgtagtacatccttccgctgaaaataccgaagcgccatccgtactacaattatcaaaggacaagatcaaggatcaaacctatttcctctcacatctatctcaatctcagcttagaaggcttcttttcccactaggatgtattacaaaggatgaggttcgcagactggctactcaaatgggccttcctaaccaaggtaggaaagactcacaagggatatgctttcttggaaaggagaaaaggaaggaatcatactggaagctgagtccggagattacctagggatacaccgtgggttttggttttatacaattggtcagcggcaaggattacggcttcctggaggaccttggtacgttgtagagaaagatgttcaaaacaatgtggtttttgtatcaaggaattattattcattggataagcggaggcgcacatttcgtgttggatcactaaactggtttgataattgtggacctggaaacaatgagcaactcaaatgcaaggtgcgacatagccctgaatttcatgattgcactttggtaaaagagcgtagtgaagaaaatggggatgctttggtggtgcatctggctgaagatgaccagggcttggcagctggtcagtttgcagcgttctatagtgaaaatgtatgcctggggtcaggcataattttggattcatgggacaagatgagcttccctgtctgctcaagggcactcgaaatcgcaaagttggcggacaagtcgagcttagggaagccaataagaatcgtgaacctggaacatatcgtgaaacctgaacaacaggaggaaatcaaagttgcctgacagattggtgccgtaaccttctcctagctccgccagctgcccccttcaaatcaattcatcaatcaaccgtatcgcaggccctggaaatcgaaggatgaggggtcttctagaatctaccgatatatacccccagttggaaactccaggtccttcttggaaggatgatatagtggaatatggcatgacttggtgcgctcgtgttgcagaggaacgatgaagcttcgtgcgtggatagggttgatctgaattaactgttgacagtgattttacgatctcgcgggaaagcaacacaatagtttgggcacgtcctctcctgagtggaatgatctggattcagtagtagtcagtggcacttcattaaaactaatacagggaaatcgtgacgttgtatgatagtggtaagatattgtattgtgaattttgacgataatatcggtgcgtgattgtgccactggatttgttcatcagtacttaatccctttttgacgtttcgatcttcttgactgaagcggagcgagttgtcggaaacttggcgtcggtgcgacgtgtacttgtcagcacaggaccgcgcgacagatgtaccgtactacactacaccctagatctgaatctgattcaggtgtagcagcgcgt

SEQ ID NO: 601 - DNA, 2252 bp, Zea Mays
aacgactcgactgtccccaatccagtatcgcgagaagcgctacgcggccggcgaggcgctccccccaatatggtgcgcgtcgtcgtctccaccctccccgccctccgtccgcttctccgccgtggctctctgctaaaccataaacccctgccccgctcacgccttcagccgtggccgttctgcacgctctcgtcctcgcccgccgccggcgcgcccagcgccgcggtgaagggggaggaggttgcgttggacaagcaccttacccggtgcgcggcggcaggcatagcaccgttgcgggtggcggtgctggtgagcggcggggtggatagcagcgtggcgcttcgcctcctccacgccgccggccatcgctgcaccgcgttctacctgaagatttggttccaggaatttctggtccgagtgcccatgggacgaggatttgaagtatgcacaagctgtttgtgacaagattgatgtgccattggaggtggtccacctatccgatgaatactggaaccatgtggtgagtaagcttcatttgagcctttcccccccatagatttgcacacaacactttttagagcctttgctttgagaagaaatactgtgaatttgatatctaggtatcacatatgatcaatgagtatcgctgtggtcgtacaccaaatcccgatgttctgtgcaacacgagaataaagttcgggtctttcttagaagccattgaaaatttaggatttgactacatagcttcaggacactatgcacacgtagtacatccttccgctgaaaataccgaagcgccatccgtactacaattatcaaaggacaagatcaaggatcaaacctatttcctctcacatctatctcaatctcagcttagaaggcttcttttcccactaggatgtattacaaaggatgaggttcgcagactggctactcaaatgggccttcctaaccaaggtaggaaagactcacaagggatatgctttcttggaaaggtcaagtttagtgagtttgttgaaagacatataggagaaaaggaaggaatcatactggaagctgagtccggagattacctagggatacaccgtgggttttggttttatacaattggtcagcggcaaggattacggcttcctggaggaccttggtacgttgtagagaaagatgttcaaaacaatgtggtttttgtatcaaggaattattattcattggataagcggaggcgcacatttcgtgttggatcactaaactggtttgataattgtggacctggaaacaatgagcaactcaaatgcaaggtgcgacatagccctgaatttcatgattgcactttggtaaaagagcgtagtgaagaaaatggggatgctttggtggtgcatctggctgaagatgaccagggcttggcagctggtcagtttgcagcgttctatagtgaaaatgtatgcctggggtcaggcataattttggattcatgggacaagatgagcttccctgtctgctcaagggcactcgaaatcgcaaagttggcggacaagtcgagcttagggaagccaataagaatcgtgaacctggaacatatcgtgaaacctgaacaacaggaggaaatcaaagttgcctgacagattggtgccgtaaccttctcctagctccgccagctgcccccttcaaatcaattcatcaatcaaccgtatcgcaggccctggaaatcgaaggatgaggggtcttctagaatctaccgatatatacccccagttggaaactccaggtccttcttggaaggatgatatagtggaatatggcatgacttggtgcgctcgtgttgcagaggaacgatgaagcttcgtgcgtggatagggttgatctgaattaactgttgacagtgattttacgatctcgcgggaaagcaacacaatagtttgggcacgtcctctcctgagtggaatgatctggattcagtagtagtcagtggcacttcattaaaactaatacagggaaatcgtgacgttgtatgatagtggtaagatattgtattgtgaattttgacgataatatcggtgcgtgattgtgccactggatttgttcatcagtacttaatccctttttgacgtttcgatcttcttgactgaagcggagcgagttgtcggaaacttggcgtcggtgcgacgtgtacttgtcagcacaggaccgcgcgacagatgtaccgtactacactacaccctagatctgaatctgattcaggtgtagcagcgcgt

SEQ ID NO: 602 - DNA, 1033 bp, Zea Mays
atacggtatacctaatccatgtggaagctgttcggctggcttctagcatggctgctgctgcagctcgctacagtattttgtgcgacatagccctgaatttcatgattgcactttggtaaaagagcgtagtgaagaaaatggggatgctttggtggtgcatctggctgaagatgaccagggcttggcagctggtcagtttgcagcgttctatagtgaaaatgtatgcctggggtcaggcataattttggattcatgggacaagatgagcttccctgtctgctcaagggcactcgaaatcgcaaagttggcggacaagtcgagcttagggaagccaataagaatcgtgaacctggaacatatcgtgaaacctgaacaacaggaggaaatcaaagttgcctgacagattggtgccgtaaccttctcctagctccgccagctgcccccttcaaatcaattcatcaatcaaccgtatcgcaggccctggaaatcgaaggatgaggggtcttctagaatctaccgatatatacccccagttggaaactccaggtccttcttggaaggatgatatagtggaatatggcatgacttggtgcgctcgtgttgcagaggaacgatgaagcttcgtgcgtggatagggttgatctgaattaactgttgacagtgattttacgatctcgcgggaaagcaacacaatagtttgggcacgtcctctcctgagtggaatgatctggattcagtagtagtcagtggcacttcattaaaactaatacagggaaatcgtgacgttgtatgatagtggtaagatattgtattgtgaattttgacgataatatcggtgcgtgattgtgccactggatttgttcatcagtacttaatccctttttgacgtttcgatcttcttgactgaagcggagcgagttgtcggaaacttggcgtcggtgcgacgtgtacttgtcagcacaggaccgcgcgacagatgtaccgtactacactacaccctagatctgaatctgattcaggtgtagcagcgcgt

SEQ ID NO: 603 - DNA, 3085 bp, Zea Mays
cgggcacatcctactgacaaaccggtcccactagctgctgatgcgcatccatccggcaactactcacgctcaggtcgccgtcgcgactcgcgccgcctctcggctcgctagccgctacgctatctacgccgccccggcacctcccatgagatgagagccgcagccgcagccacatccacagccgccgcgctcctcgcccccggtctaaagctctgcgcgggcggcgcccgcgcgcgcgtctcctgtccctcccgctcccgcctcccactccaccgcatcgccgccatggcctccgcccccaacccctccttccgcccggaggaggcacgctcccctcccgccctcgagctcccgaccccgccgctctccaagttcaaggtggcgctgtgccagctctcggtgacggcggacaagaatcgcaacatcgcgcacgcgcgcgcggccatcgagaaggcggcctccgagggcgctaagctcgtccttctcccagagatatggaatggtccgtattcaaatgacagctttccagagtacgcggaggacattgaagctggcggagatgcggccccttcattttcaatgatgtcggaggttgctcgcatcttacaagtcactcttgttggtgggtccatagctgaacgttcgggaaacaacttatacaatacatgctgcatctttggttcagatggcaaacttaagggtaaacatagaaagatccatctttttgacattgacattccaggaaagatcactttcaaggaatcgaagactcttactgctgggcagaatcctactgttgtagacacagatgttgggcgaattggtattggtatatgttatgacatccgtttccaggaattagcaatgttgtatgctgcaagaggtgctcatttgttatgctatcctggtgcattcaatatgactactggaccactgcattgggagttgctgcaaagggcaaggtaatagatggctttgcagctcaagttatggcaattatgctagggaaatatagggagctaaattctcgctacttttatacacgctaattagcatatctattttttaaactagtcaaaacctcgatcagaactcataatctcttacgggtaatttcatatctgaattatctccattacttttttttgccctgtactgatgacatcatttctccaatgtcagggctacagacaaccagctgtttgttgcaacatgcggcccagctcgagataccagtgcaggatatgttgcttggggacactccactcttgttggaccttttggagaggtgattgcaacaactgagcatgaggaggcaactataatagcagaaattgactactcactgattgagcagaggaggcaatttcttcctctgcaacaccaacgccgtggcgatctctatcagctggttgatgtccagaggctgggttctcattagcacagggacgaagcaggagagcagttgactctgcaggcttgctcgtactacttcgttcatgagatgcatgcccatgcccatcgagagatcgatcaacttgatgtgtgaaggtggagaggacggaataaagcgactatagtttgtaccttcagcgctagtttggcaactctattttacaagagattcttatttttctaaggaaaaattgattaatttttcttaggaaaatagaaatcacttgggaaaatatgattgccagactagccctcagtgtaaatgtctccatgtcaagggcggtattgcccaaggtaggaggacctcggctacgtagatcgtagccttgacccgtggttgccggcagggttatgcccccacgccgagctacccgtcgacaggagaagttctcctggtcgccggtttagagaagagaggaagagacttgataggtaattcttgattgatttccaagtgccaccctacatggctatatatagccggcagcttacacaaatggagaaggttctccttgattgaagatctaatcaaaataggaaggatactaatcagctagctactttctctcctagccaatctccttctatgtttgctgcatgcacaatcaatcaggcggtagccttctatgtttgctgcatgcgcaatcaatcagatggctactttccatcctagccactcacctgctgcgcatgtgcctttgctgcctgctcagctcggcgcacatcgcgggctctcctacgcctggcgtatgtgtggccgtacatgacactccagttgtcgaataaattgattactttaacctatgaagaaaacctttctccatgaaacaaagataaacggaggatcttctccgatttccttttgggccgtaccaatttgaattttgaactagcttgtgcgcctcctggagccgatgtagcaatggatactccagtgtttggccatcagcagccacagtactagagtatgcatgggtatattttcgtatgggtatgatggcagggaagggcaaacctgtgaacaggttccctgtcgatgctgcagagggcggcagacctgcacggtgcacaactgtcagctgtttgttgcagcatgcgctccgggtcgagataccataccagtgcaggttatgttgcttggggatggggacacactactcttgttggacttatgtgattgcaacaaccgagctagcatggagaggcaactatagggaggtacgcagagtgaaacacctttggttgaacggggtggcgcaagatcttctctaggcaatttcttcctctgcaacaccaacggcgtggcgatccctaccagctgcaagatgtcccggagactggatggatcctcagcagcgagcctggatgcagctgtgaggctggctgtgacgaagcaggagagcagttgactctgcaggcttgctcgtactaccgcgttcatcatgacatgcatgtcgatgccctgtctagagatcgatcgacctgatgtgtgaaggtggagagcaggggacgagggcgagtaaaggcgacaatagtacgtaccttcactgtgtctccggttgccaaataataaatagattacagtaggaagaacaccgctctacatgaaacaaagataaacggattatct

SEQ ID NO: 604 - DNA, 1147 bp, Zea Mays
gcacatcctactgacaaaccggtcccactagctgctgatgcgcatccatccggcaactactcacgctcaggtcgccgtcgcgactcgcgccgcctctcggctcgctagccgctacgctatctacgccgccccggcacctcccatgagatgagagccgcagccgcagccacatccacagccgccgcgctcctcgcccccggtctaaagctctgcgcgggcggcgcccgcgcgcgcgtctcctgtccctcccgctcccgcctcccactccaccgcatcgccgccatggcctccgcccccaacccctccttccgcccggaggaggcacgctcccctcccgccctcgagctcccgaccccgccgctctccaagttcaaggtggcgctgtgccagctctcggtgacggcggacaagaatcgcaacatcgcgcacgcgcgcgcggccatcgagaaggcggcctccgagggcgctaagctcgtccttctcccagagatatggaatggtccgtattcaaatgacagctttccagagtacgcggaggacattgaagctggcggagatgcggccccttcattttcaatgatgtcggaggttgctcgcatcttacaagtcactcttgttggtgggtccatagctgaacgttcgggaaacaacttatacaatacatgctgcatctttggttcagatggcaaacttaagggtaaacatagaaagatccatctttttgacattgacattccaggaaagatcactttcaaggaatcgaagactcttactgctgggcagaatcctactgttgtagacacagatgttgggcgaattggtattggtatatgttatgacatccgtttccaggaattagcaatgttgtatgctgcaagaggtgctcatttgttatgctatcctggtgcattcaatatgactactggaccactgcattgggagttgctgcaaagggcaagggctacagacaaccagctgtttgttgcaacatgcggcccagctcgagataccagtgcaggatatgttgcttggggacactccactcttgttggacctactgatactatgcaccaccacaaaactaattctgtacctgttgtggtttttgccaacaatctgtaagttgtacgcttgcaaagaagatatg

SEQ ID NO: 605 - DNA, 747 bp, Zea Mays
cggatactgattccttccacccatggtgggtcaccaccgccccggccggccacacggttcggtttcgagatcagagaaagcgaaaagactggcaggccatgagcgaggcatgcattgcacagcctaaagaaagagcggggcgtgcacgccggaggcagcggcggaggcgacagaaatgggaacggagagcagcagagatgtggagtatagagacagcggtcgacgatgaaggtgaaggtcatacagtttcatgccgatggatcaaaagcggtgaaggatgagtgttgggccttgactgagggactaaagaaattggatgaccaatcatggtgactgatacctgaggacatcaacaagcactggcacattgttgccaatgcgattgaggatcggcaaaacatctgtctaggatatgggagatatgtatggagtacgctacctatggagatttggtggttgagcttcgaaaccaccctacgacagttttatgggcctagcctcaatatgtagtgatgtggtttcaatgggcatcagaggcagtacatagggccattgtaaaggttgtgtcatggcaaaacaacttcgtgaagagagtgtggtcgttagaccgtcaaaatgagagtttgtctattttgatcctaattgagtggataaggtttatgtatctaagggtatattgtgtgaaaaatatcatctataaataggaagggttgcaccaaccagccatctatctagctttttagatct

SEQ ID NO: 606 - DNA, 916 bp, Zea Mays
gatctcagttgatggcatcacaatcttctcataaaggtacttcatgagctgcacaccatgaagaggagagaggaattgcgtctttcacatgatctagttgtcctatgtaagtttgtcgccaactgctagtttaaggactaacatcgagggcaacggcgatggagttgccaccattgttctctcttccttactaaagtctttggaagaggtggcttaggataccattatgaaaacaaggttgatatatgcccttgtggcctggatttatgatgagtgattgttaatggagtaacatcttggtttgagtcatgtggattaactgaggcataagtatgtgcaacatgtatcttggtttattatgtgtagatgtggagtatagagacagcggtcgacgatgaaggtgaaggtcatacagtttcatgccgatggatcaaaagcggtgaaggatgagtgttgggccttgactgagggactaaagaaattggatgaccaatcatggtgactgatacctgaggacatcaacaagcactggcacattgttgccaatgcgattgaggatcggcaaaacatctgtctaggatatgggagatatgtatggagtacgctacctatggagatttggtggttgagcttcgaaaccaccctacgacagttttatgggcctagcctcaatatgtagtgatgtggtttcaatgggcatcagaggcagtacatagggccattgtaaaggttgtgtcatggcaaaacaacttcgtgaagagagtgtggtcgttagaccgtcaaaatgagagtttgtctattttgatcctaattgagtggataaggtttatgtatctaagggtatattgtgtgaaaaatatcatctataaataggaagggttgcaccaaccagccatctatctagctttttagatct

SEQ ID NO: 607 - DNA, 276 bp, Zea Mays
atggcctcccggagccaggacttgatgccggagatggacatggagccgccgacaacgctgccgccgccggcgttgtacatcggcattgctgcgcctgctggcgggcccgcgcttgcggctggggcgcccaggaagtactggccgtggtgcgacgacggcacgaactggtggtgctggtggtccgggaacccgccggtgcagggcggcgcgttcatgttgatccccaggccaatgccgcctccgccgccgccgccgctgctgatgcagccgtggtag

SEQ ID NO: 608 - DNA, 895 bp, Zea Mays
tgagactgtagcagccaagtgttaagatagaaaatatctccttgttaggtaaggcttgtacgcctgattatacgcttgattctgttggagctgcgcctcctttctgggcatggttgttgcctattattgtgtctccttctatacgccatgcatgtactcttcctatattaatacactaacagccagggaggctgattgccttgcgccattaacatagtaccagagctatcgatccaatagatgtcaaacacgtccaccacatcttcccttacgtcttccttctctcctcagatcaccatggctgacaatttttcttcccagcccacacctcccatggtgccgctccatcacgcggtaaccattcgtctaaacaagagcaataacctgctatggcgtgttcaacttctcccctacctgcggagctgcaggttgatcgggttcctcgatgggaccaagccggcgccagcacggatgatcgctgcgtccactgcgccagatgctgcgcaagttatcaaccctgcgtatatcaagtggtatgatcaagaccagcaactcctgagcggattgctgtcgtccatgtcggaggactccctccgtgatgtggttatggccacgactgccaaggaagtctgggattccttacagacgcagttcgcttcctccacacgagcgtgtattctctagatccgcgtcgagcttgccacggcaaagaaactcgatctgacggcggcggattactttcgcaaaatcaagggcctggcaactaagatggctgctgctggttcctctcttcgcgacgacaaggtgattgcttatctgcttgcaggtttgacagccgagtatgacccctttgttacttcaatgacaaccaagggcgactccatctcgcttgatg

SEQ ID NO: 609 - DNA, 3681 bp, Zea Mays
cctcgaccaaaattgatccaaattggtacgtcgacacgggagcaacagatcacatcactagtgatctcgaccgactgatgcttcgtgaacactatcatggtggtgagcaagtccaagtcggcaacggtgcaagtttgcagatcttaaacactggtcattctacaattaattctgttgatcgcccacttgcactacgtaatgtattgcatgtcccagatatctccaagcatcttctttctgtccataaatttacacaagataacgacgtgttttttgaatttcatccaacctattttcctattaaggaccgtcagacgaagagaaggctcctggaaggacaatctaagaacggcctctaccctctaccatcttcggctgtcaaccaccttaagcatgccctcttgagccgacccattactcgtgtcgattggcatgcgcggctaggacatccatctagtcaagtcgtcaactctattttgcacgttaataatatttcttgtcccaaacaactagaatcttcagtctgtaatgcgtgtcaacttgctaagagtcaccaattaccatataattcatctgttcatcgctctacttgtcctttggaacttattttctctgatgtttggggcctgctccaacatctgttggagggtataaatactacattagtttcatcgatgattttagcaaattttcgtgggtttatctcatgcgagatcgttctgaagctgcgagtatatttctacaatttcatgcccatgccgaacgtcttttgggcactaagattaaatgtgtccaatctgattggggtggtgaatatcaaaaaatccacaataccttttttcgatctctcggcattgctcatcgagtatcatgtcctcacacccaccaacaaaatggatccgccgaacgcaaacatcgtcatatcattgaaactggtttaactcttcttgctcatgcccatgtcccccttaaattctgggatgacgcttttctcaccgccgcctatcttatcaatcgaatgcctactagagttattgacaacaaaactcctatagagcgtctttttcataccaccccaaattactctatgcttcgcatttttgggtgtgcatgctggccaaatttgtgaccatataataaacacaaactttcgtttcgctccaaggaatgtgttttcatcggctacagtgctttacataaaggatacaagtgcttagatattgacacagggcgtgtctatatttctagggatgttatatttgatgaaggtgtctttcctttaaactgttctcccagcaatctcagcccaacccttcctcctcctcgcatgatttacgtctgttgcatttgggaaatcacagtaattatattgcaagtgatcatgtgttatctgtacctgctaaccctccggcgacagaaaatacagcaaatccggagctccttccttctgtgcaggcacctgtggcggctagtccacatgcaaattcaggcgatcccgtaatgcgattgatgcatctttggaaactactaatgtgattgattcatttttggaaggcgtgccagctctcatgcggacagctagtgctcagccagatgcgtcatgtgctccaccaaaacagctggcgggctctactgattctatgtctcttccagcaactaccatgcatgcatcagatgtctctcagggcttggatttcttttctggtgcatctcaacctacgtcaagtgatctggttccaacatctgcacaacctgacggtaatacggcccctatacatccgtatggcactcgactccgtaataatctgcgccaaccgaagatacggacagacggtacagtaacctattcagcgattcgctcttcatctcgtgagcctacttctcatattactgctatgaagcacgctctttgcgccaagctatggttgatgaatttcatgcccttctcaaaaataagacctggcatcttgttccgcctcgtccgggtcttaatgtcattgattgcaaatgggtatttaagctgaagcacaaagctgatggctctattgatcgctataaagccagactagtggcaaaaggattcaagcagcagtatggaattgattatgaggagacttttagtctggttgttaaaccgactacaattcgcctgctgctttctctagctgtctcacgagattgggctatttgacagattgatattcaaaatgcttttctccatggttttcttgatgaagtctatatgaagcaaccaccatgttttactgattccactcatccggattatattggtaaattggataaatctctatatggattgaagcaggcgcctcgtgcatggttttctcgtctgagcaagaaacttattgatctgggtttttcaccatccaaggctgatgtctctctgttcattctgaataagggtggtctacagatatatatattgatttatgtagatgacatcatcattattagctcgtcatcatctactgttgataacctcctcagtcaactccgtgctgattttgcaatcaaggatctgggacgtttggcatattttctcggcatagaatgtcaccacacatcacatgggctcatactatgtcagcacaaatatattcaagatcttctaactcggactaatatgattacatccaagccggtttccacgccgatgttgcccactgaaaaattgcaactgaagggcggtacaccactcaggacgcgacacgatattggagtgccgtcggggctctacaatatatcctgctcacacgaccagatattgctttctcggtcaatcatgtgtgtcagttcatgacagcgcccactgttgatcactgggtggccgttaagcggattctgcgatatctacatggcactattaccatgggcctctgtctcaccaagagtaattcatctctcctaagtgctttttccgacgcagattgggctggcaatcttgatgatcggcgaagtacagggggttatgttgtttacattggacctaatcttatttcttgggggtctcgcaaacaacctactgtctcgcgatcgagcacggaagcagagtataaggccatcgtagatggaacggttgaggtgatatggcttaaagtattgctacgagaacttggcatttcttcatcccacgctgccgtcctatggtgtgacaatattggtgctacatatttgagcgctaatccagtatttcatcgccgatcaaaacatgtggaggtcgactatcacttcgtccgagagcgtgttgcttcacaccagctagaggtccgtcctatctcgacgaaggatcaagttgcagatatcatgacaaaggctcttcccatgacattattgagtaaatttcaagacaatctgaacttagtttcactacgtccagattgaggggggtgttaagatagaaaatatctccttgttaggtaaggcttgtacgcctgattatacgcttgattctgttggagctgcgcctcctttctgggcatggttgttgcctattattgcgtctccttctatacgccatgcatgtatctcttcctatattaatacactaacagccagggaggctgattgccttgcgccattaacaccaagaaggtactgataggcagatagaaaatttataagttaaagaacaacttactttgaagatgtcgatgacctgag

SEQ ID NO: 610 - DNA, 1747 bp, Zea Mays
cgcacctctctcctcagctccctcacgtgcgcttctctctctccctcatctccctcctctgccggcgagtagatgccctgctcatgtgctgcctcatcgagttccaggagagttcagggaatacaagcaaggcaggatgggtgcattcatgcggaagatgaaagcggcgttccccgccatggagcaggtgtgcgtgtggcacgcgctgtgcaggtactggggtggcctccgccctggcacgcccggcctgccgcccaccaaggtggtagcgcccaagttctcctccggcctacagcgcaccatggaggacctcgccgtcgacaagatcgtcagcaacggtgtcggcctcatcgagcacaagcgcgcgcaaccgagccctccatggcgcgtcggtccttcttgttccctgctcgtggatctctctcgccggagctccactgcatcacgcccagcccgctcttctccctcctctctgccgcagctcgctgagtccctctgttttctcccatggcgcggggttccctgcaggctgctcgcggcacccatctcctctgctcgaccgcgcgctcacctccccagctcggacgcgcgagcttgctccctatgtctgtctgtctcgccatggagcatatgcaccggtcgacctccgcccaagtctggtcagacgtgcgtcacttctcttctcggaccgccatggccaccacgccgtcgaagctccctggtcatgccgctcccttgcgtaatcgtggtcgcgcgcgtgtgtgtcttctcttggtggtgctcgacctcgggctcaggcagccacgtccgtggtcgtcgggcatgctcgccgtcgaagctcccctgttggctgcgtcctgctcgcctttgcgtcgcacgcatagcgttctgttgttctcacgcgcgcaaagctctttgctcgtcaacgctccagctcgttgcgcgccctgctccctgttgtcgcgagctccaacccggatttcgctttgtcgcccagctcggccctacatctcccatgactgtctgctctagctcgccgtagtccctgcgcgcatcgagctttcatgtggagctctctgctcacgcgcagctagctctttatttgttttccgcgcgcacgaaaattctctgctcgcaagggtgtgtcgagtttccgcgtcgagctcctctcttgcgtgctggtcatcgtctccgagccaattcttggctgtcgcagtatttttagttatccgactgcgtctgtgatcgtcgagtatgtcagctgtcgcgggctcgcctaacccgactgtagtctccagtcttcgcctcgaccaggtcttccattcctgctgtcgtaggttgtcgtcgttcgccttcgcactgtgtgcgacagcatcgacgttttccctgtcttgtgctcgcgtggttttctgctcgctagcacatcctctcggcccgcttaatcttaatccctatctcgtcgtcgacctcgccgtgactagttcgtccgtcgtgctggtcactgacccatactgtgcctattagcttggatcctgctcagctcgtcgtcgcgtcgtttaccgtcgagtcgtcaaacacgtcatcccctgctcgatccccacctcaccagcttactccagacttcaattgagggtcgtcgtcgttcgtgcatccccaagaaatcccaagaattaggtgaagacgaagttaacagcgcgatattccctaagcgctcgacaaattgcttggatcggaaaatcgctaccga

SEQ ID NO: 611 - DNA, 864 bp, Zea Mays
ctcgagcacggtgaactaggactaggagacagtaatcataggctccacactcccggcgccgacttagccgttgctctgctcaacggtcagtcttcccactctgtataaaccttaccccacgcgccacgcacttccccgctcctctgaactcagcattcagcaacagatcagactcacacgatcactgtcgcactgagaacacaagcacccagtaaagcaatggcgtccgccaccgagaactcgagcctacggagatgctcctctcttcccaacctactggtctggctcctcaacctctccctcctcgtcctcgccgccgccgcgctcggcccggtcttcctcctccgcccgcggccgacgcccttcggctgggcgctcgtctccgtgcacgccaccaccctgctctccgcactcgcagcgctccacgcgcagctcacccacctctgcctcgccgcgagcacggcgctcgcgctcgccgcgctgtccggccacgcactggcctccctggccttcttcctccgccacgaccacagcctccgcctcctcggctccgccagggatcgccgggagcagttcgtgctggcgttcctcgaggagctactgctgctggccatgttcatggcgcaggccgtcgcgctagctgcaacatgcgtgctgagccggcgttgggcgagggagtaccaggaggccgagacggagaaggcggccgcggcgagaaagcgagggaggaagatggcgcgtgtgcaggccgagtcggcggcagctgcggaggccggggtgaaggccgtcgacgagaaggtgatgcggagcagcagcggcaagaaggtgcactgggccaacaacgatggatacgaagagtgctag

SEQ ID NO: 612 - DNA, 2557 bp, Zea Mays
catgctggcagagctacccaggtgcaatttgttctcactgctactgttatctatcatatgatggcactggatctgcctaagtgggttattaaagccatcgataaaatccgtcgcgggttcctgtggagagggcgtaaagaggctaatggtggccactgtatggtggcctggggcaaggtaacatgtcccaaagagttggggggccttggtatctctgacatccaatgttcaaatagggcactataggttagatggatctggctccaaaaaaactgattcttccaaaccttggactggtttgcctttccaatcaaatcggtttttggatagcttgtgctatttggcaatagcctccatgatgggtgatgggcagtccactcttttttggcatgacaaatggctcttgggtcagaggattgcagacttggcccctcatgtttttagtttggttcctaaaaggctggtgaagagaaggacagtggctgacgctctgtgtagctcttcatggattggggatttaaggagagtagtaacgtgggaggtcattgttgacttcatcattctggcagatgttgtggctgatgttgatcttcaaccgggagttccagataaacattactggaggttcttttccaatggtatttatccggccaaatctgctcatgagataatgttctgcggctctacctccctggcgggctttgaaagagtgtggaccacctggacgccgcctaagtgtcagtttttcctctggttggtcttacataacaagcgttggacggctatctggctcgctaagaagggacttccccatcctagtacttgccccttatgtgaccagaaaggggagtctattcatcacttgcttgtttcctgtgttttcgcgaggcaattttggtttctccttctccaacatgtcggcctagccgctctttccccggggatggaagatataagttttgaagcttggtggagtagatcggctgaggttgttcctaaggatctcatagatggctttaactccttggtggtcctgggggcttggaatatctggagacaccgaaatgattgtgttttcaatggtgctcaaccttctatagctagattgcttacctcagccggtgatgagttcaatatgtggtgttttgcgggagccaaaggcttgacccgtctttcggatctggcttttgtgttcaaccccggctaggaggcgattgtacctcctcttgttgtttgtgtctgtgtggtgtgttaggttcttgtatatactgttttttttcttcttctcatgaaatgatacgcaactctcctacgtgttcgagaggaaaaaaaagcattttagagtaatgagacatttatttttttcaagaacttaaaatatacagttgattggaaacatcttattggaattagaccaagggtcatgctttcaggcaagaagttctatgcatacccagttcacagttcctgaaaatacaggaagcccagtctccttggctacaggcaaggactctccagtaagcattgattcgtcaacaaaacttgatccttcaatgacattaccctgcaaaatgggtttcagatggattaatcgattgatcgataatactggcaattaagaaaaatgaaactatgtagtgactccgtacatctacaggtatagtctctcccggcaggaccaatattgagtctccaacacggacatcatcaacaggaacctcgactgtgatcgcatcagaattcaaactactgtccgcagaagggttgtcacttgaggaagtaacaattaacctcgactgaggtgataacagtgactgccatggattaccaggcatcattagtttcaacaaaacaatgtttttttctatagggtttgtggaaaatggaagtaaagattatccaccttatcttctgtctctagcattgtaaaatgcaaaagacaaatgcttcttggtggaacaatacatagatataaattagcacttacaatgagctcattcatatcgctggatgccttaagccttgcactttcttcaagagatcgtccaagaagtacaaatccaagaagcatgacctgcatgctacaaaaaaactttcttcaacaaaacttcataatgcaaaacaaaactcgtaactcaattgttattcaatcaaataccaaattggttcgactagtgtggggaaaaaagatcaagttcccatgttctgggaattgacactgctttcgtcaaaagcattgcaagatccaagatcagagcaacactacaacaagagtggaagataataatcacagctcaatcaataggactacaaaagaattggctcaccggttcatcaaaaaaggttgaattccactcccagtcagggttcagcaaggacaccttaagaaatgcaaagctaaattagtatatatctacatggttggacagtaaagttcactatagacaccacttacagcactgatagtaaatgcagctgcagatccaaatcctactagagagttcatgttcggggaaccttgcttgaatgctctaaaaccatcaaagagtatatctgg

SEQ ID NO: 613 - DNA, 1032 bp, Zea Mays
ggcggactcagcgaggaggttgaccgccgccatctccacccgcgggtccgccgccaggatggaccgcacccgcgccgcgcagccgccgcacatcatgccgctcacgtcgagcagcgcggtggtggcaccggcggccccctccccggccgccgcgtcgagcgcggacgacgggtcagccgtggcgcggggccggtccgcgggtgcgccgcgggtggggagacggaggtggagactgcgatggagggagtgatgggaggctggcgccgagcgtcggcagtgaatagggcggaggcgctggaggggaagggggagaagactaccgcccgaagccggaggtcggacgtgctgtaggagggagatggtggcagtggtggccatggtctggagacggacccgagaccagaggcctccccggcgagcggcggatcggaggcggagagggtggtgggtccgctgctggctgctcagggcctggcgccgtgtgggggaagggaggcgacggacatggggtgttgtggtgggaaacggaggagccgatgaggggtgggaaggagcaagagaggtggtggactggtggttgacgagcgccggcattttaactcgagaagggagaggggaggggaggacgatggtgacgtgtctgcaagctgaggcgaggaggacggaggagctccaatccatgtgatgatcgaactcgtgatgatctggacctggacgtctgggacacaggagacactattggagccagttgttggaaccttttagccgtggaaaacgtggcgactgttggttggtttgggataggaatttggaagtgcgctcgggttccggatccgtggtgacccacgagtgctgtcgaaggttaatcaaactgttttaagagggctcatcaaaaaccgataaaaatcgatcagtttggttggttaaaccatatagcaaatttaaagcaatttttcctgtaaaacccggcggtaaaccacaaagaactgctggtaaatcgtctgaaatcgtcggttttccaccaaaatgaac

SEQ ID NO: 614 - DNA, 727 bp, Zea Mays
cgccatcgcagctctgcacgatatgtgacccgtacctgaacatcttccggggcatcatcccgccgctcgggggaacgctggacctgtcgccgatcctcgctttcctcgtcctcaacgccttcaccagcacggcggccgcgcttccggcggagctcccgagctcggcagcggcgcagcaccaccagaggactgctgcttcatccagctcggcgactcccagtcccaaccagaggaaatggatgcggagaatgcgatcaaagacatcacagggagaagatggtggtcactaggcatgtgagcttgtggctgggttcgtcaaatgccttattgttaccagctggggatcatgcttcgcatcagacgctcgagatctgcacagcaatgtgttggacatgcatgctcctcgctctctagccatcgaatgcaaactctgtcaatgccgcatgcagagttcgcccctttggttcaccacgttgcttcagagcttcaaatggtttttgtgcgttgtaatgcgttggcgttgcggagctttcttcaaatggtttttgtgctttgtaatgctttggcggtgagggctgtgctttctgctgcatgtatgtgtagcactttcggtcagctttcttgaattccgatagtgtgatcgcgatgcgtagccaaattcagtcttgagagagtaccaatcgaactttcatctgttgttggttaacaaattcagacaattcgtgaa

SEQ ID NO: 615 - DNA, 2205 bp, Zea Mays
cgcacccgcatttgtgtaccacaccgtgattacaaggtggagtagcaaagaaagaagtgccacagaaaatcaattgggcgtagggcgaaggcaacaggtgaagtgtcaacgtgtggctgcaatctgcctccgcactcactccacgcacacgccgccgctatacgcgacggcgccgagcgcatcgccgccggcccctccctccctgcgcctgtactcagcccgctgcttctcagtccacttcatccacagctcctcttctctcggtctagagatccgtccgggcacggtagtctcgccttcgttttgaggtacatctgtccgtcagcgatgtccatagaagagaggaagataagtatgataagcaagagcactgcactaaatccaaatgcagaggaatttgttccttcgtcccttagatctttcagtgattcctccaagaaatcagatgcaactatgattgtctcagggtcatctaaagaatctagcacagacaagccagaatccattttacgaagtaactctgatgaagaagcacatcagtactggcagcaacagctccctgacgacatcacccctgatttcaaagtcctgggacaagacgaaagtcctggacctgacagtctatcactcacaggcctgtcgattaatgatggcattgacacatcaatattttctccaaaccagacactgggcgtgcagcaccatgcttcaccttttatcagggacaaactgaatacacgcccaaaaattaacttgtctggcccaacttatatggacgaacggtcccaagccgcaattttgagtccaactgcaggttccatgagtccaaatgctgctccatgggtgaagaatctaaggaatgggggacattataacacaagcagaagggatgccactgccagtcactacaatggagattctagcattggggcttcattgcacaacctcactgatgcgtatcatggaagcaggcgcagcttaagcacgactatggatatcatgagtcagctggagagtaaagtcgatgggcgactcaatcagaacctcaggtcactgtcgtttggaaattcaagtcctccatcaccagcatcatatgcccaaaatgatgatattgtttcaccttcagctggacgtgaacatatatccctcgatgttcctagaggaaggtataagacaactagtttgcctgttcctggtcttggttcaagcagaggttctcaggtgttgggtggcccatataatggaaaccatgatatgatctcaaccaataccctacaaaacatggctggaattcagacaggagcagcttggcttgaaactgatgctgcggcaaacacatatttggaatcaaaggatgaagttcatgattttgcaagcctgcgacatgcagttcttgaacaggatagacaggcttttctgatgggaaacaaccctttagcaaaggatctaacattgaaggagctatacagtatacaaagcaggttggctcaggagaaagctagagaaacaacataccgacaaagattccaaataccagagcttcaaggcctcatccaggagcagaatcccccaatcgatctctgtggtcttcacatcagcgaggccatgcacgtcctgaactacgagctcaacaaccgaagaaagatcgtgagatccactggtcgccgactccaggctatgatcatatcaagcgcccgcaccccagcacggctgactgctgccgtcgagcagtacctcatggaacacggccttcagtacacgcaggcacaaccaggcctcttccgcgtcctgctctagtgatggagccggcctagctgttgtcacaactggatcagacgagaaagaagaaaaaaaaagttgtacttttgtatatggcagagatggctagcaggatagaagcgttaagatagctcatgcattcacatatcaggctttagcaaatgtatacatcttaaaatttgcggagttaggtctttggtgctggtggatgcataaggtgatagcatcttcaaaatcatgttctcgttcacaatctttggtgctggtggatgcatagttcttttgttgctggtgcgttcaaattgtgcgtaatgcgtggtggatgcacaagttcttcacaacctttgctgccagtaggtgcgtggtggatgcacaagttcttcacaacctttgctgccagtaggttcaaattgttcgtaatgtttg

SEQ ID NO: 616 - DNA, 2923 bp, Zea Mays
agaaaatcaattgggcgtagggcgaaggcaacaggtgaagtgtcaacgtgtggctgcaatctgcctccgcactcactccacgcacacgccgccgctatacgcgacggcgccgagcgcatcgccgccggcccctccctccctgcgcctgtactcagcccgctgcttctcagtccacttcatccacagctcctcttctctcggtctagagatccgtccgggcacggtagtctcgccttcgttttgaggtacatctgtccgtcagcgatgtccatagaagagaggaagataagtatgataagcaagagcactgcactaaatccaaatgcagaggaatttgttccttcgtcccttagatctttcagtgattcctccaagaaatcagatgcaactatgattgtctcagggtcatctaaagaatctagcacagacaagccagaatccattttacgaagtaactctgatgaagaagcacatcagtactggcagcaacagctccctgacgacatcacccctgatttcaaagtcctgggacaagacgaaagtcctggacctgacagtctatcactcacaggcctgtcgattaatgatggcattgacacatcaatattttctccaaaccagacactgggcgtgcagcaccatgcttcaccttttatcagggacaaactgaatacacgcccaaaaattaacttgtctggcccaacttatatggacgaacggtcccaagccgcaattttgagtccaactgcaggttccatgagtccaaatgctgctccatgggtgaagaatctaaggaatgggggacattataacacaagcagaagggatgccactgccagtcactacaatggagattctagcattggggcttcattgcacaacctcactgatgcgtatcatggaagcaggcgcagcttaagcacgactatggatatcatgagtcagctggagagtaaagtcgatgggcgactcaatcagaacctcaggtcactgtcgtttggaaattcaagtcctccatcaccagcatcatatgcccaaaatggtcttggaaactatagtaatgaagcttttggtctgccaaacagtccatatagatctcattcagctatactcgcagatgatattgtttcaccttcagctggacgtgaacatatatccctcgatgttcctagaggaaggtataagacaactagtttgcctgttcctggtcttggttcaagcagaggttctcaggtgttgggtggcccatataatggaaaccatgatatgatctcaaccaataccctacaaaacatggctggaattcagacaggagcagcttggcttgaaactgatgctgcgggtagtgctcgggaattataatatactttttatgatatgctagtaaatgtgtgttttcttatggtttggacttgttatttatgacagcaaacacatatttggaatcaaaggatgaagttcatgattttgcaagcctgcgacatgcagttcttgaacaggaaatcatgacaccatcactaaggtggacataacactgttgagctagtctgcagtctgcaccaggatgctggaaagagatcccatttccggagaaccaaacggacattatagaaaatggttctactgctgaaaacagagatattggttgcgacataataacatcatgaattacaggaaaactgaagttgactaatggtttgtggtaaatagaacacatcaactgtcagtgttgctcaccttttttaattacaattgtgatcaccctcgattatatgttagacaatataaaacatacttggcattgtgatctgtagctacaatttttggctgatttagtatgctcacatgtatatctgattttttagagagaatcccttatttgccatcgaacgatgacttgtgccttatttgtcgatgaaaagatttttgttcctttatctgccatccactctaactttagaaaactcggccggtgggggaaagactgtccctacggtatttcactaagaagagctcaaccaggccgagaaaagccacaaaagctagcttcctcatacatggggatgccgccccctatggtttgggcctcgacccatgctttgaggctaacctacatgaccaaccacttacatgagggcctgcctaccataggtcggttcacccataccgaccaaaggaactagcgaatgacttttttcaacctcagcctgaaattcgctccgacggggagtcgaacacaggacctgagtagtggtactcagaccatctaaccaactcagatagaggcccattcgcattcactcaactttcattccttatccatcacttccatcaatttctcagttagttgctattaaatggtactagaatagacatttttaccacttcctgtgtacatcatgtagtaaaatttatcctggtttccttccttaccacagataatgtaaatatatgaatgttttagactttgtatggcaccatgtacagaagctaacatgtggtctctcagatgatttttaataaagtgtgtacatccgtacgctcaaaatagcttcataatataaggtgtcaaaacaattgtaagtaaatcacatttgttctgtgcagtaaaaaaatgactgtttttcatgctttaacaactcagtctaaataattgttcatctccaacatgttctattctcaaccaagaaagtatttccgatcaagctattattgtaaaaaaaaactcactggacccatgctgggggtctcacctgtgtgggtggcttggagggggtcctcggtgtggaccagacacagtatgcatacatcgccagctttgaggcatctgtcggcactggctgtgggcagggtcggcctggactagatctgcaacatcctgagggtgagctccatcacttggggaggggcgcggatgttgact

SEQ ID NO: 617 - DNA, 2371 bp, Zea Mays
tgggcgtagggcgaaggcaacaggtgaagtgtcaacgtgtggctgcaatctgcctccgcactcactccacgcacacgccgccgctatacgcgacggcgccgagcgcatcgccgccggcccctccctccctgcgcctgtactcagcccgctgcttctcagtccacttcatccacagctcctcttctctcggtctagagatccgtccgggcacggtagtctcgccttcgttttggcacaacgaacaattactctagaagagttgtactctttggtgtgccgtactctctgtaacaatcttaccaattaccattcttgagaagaggtacatctgtccgtcagcgatgtccatagaagagaggaagataagtatgataagcaagagcactgcactaaatccaaatgcagaggaatttgttccttcgtcccttagatctttcagtgattcctccaagaaatcagatgcaactatgattgtctcagggtcatctaaagaatctagcacagacaagccagaatccattttacgaagtaactctgatgaagaagcacatcagtactggcagcaacagctccctgacgacatcacccctgatttcaaagtcctgggacaagacgaaagtcctggacctgacagtctatcactcacaggcctgtcgattaatgatggcattgacacatcaatattttctccaaaccagacactgggcgtgcagcaccatgcttcaccttttatcagggacaaactgaatacacgcccaaaaattaacttgtctggcccaacttatatggacgaacggtcccaagccgcaattttgagtccaactgcaggttccatgagtccaaatgctgctccatgggtgaagaatctaaggaatgggggacattataacacaagcagaagggatgccactgccagtcactacaatggagattctagcattggggcttcattgcacaacctcactgatgcgtatcatggaagcaggcgcagcttaagcacgactatggatatcatgagtcagctggagagtaaagtcgatgggcgactcaatcagaacctcaggtcactgtcgtttggaaattcaagtcctccatcaccagcatcatatgcccaaaatggtcttggaaactatagtaatgaagcttttggtctgccaaacagtccatatagatctcattcagctatactcgcagatgatattgtttcaccttcagctggacgtgaacatatatccctcgatgttcctagaggaaggtataagacaactagtttgcctgttcctggtcttggttcaagcagaggttctcaggtgttgggtggcccatataatggaaaccatgatatgatctcaaccaataccctacaaaacatggctggaattcagacaggagcagcttggcttgaaactgatgctgcgggtagtgctcgggaattataatatactttttatgatatgctagtaaatgtgtgttttcttatggtttggacttgttatttatgacagcaaacacatatttggaatcaaaggatgaagttcatgattttgcaagcctgcgacatgcagttcttgaacaggcttttctgatgggaaacaaccctttagcaaaggatctaacattgaaggagctatacagtatacaaagcaggttggctcaggagaaagctagagaaacaacataccgacaaagattccaaataccagagcttcaaggcctcatccaggagcagaatcccccaatcgatctctgtggtcttcacatcagcgaggccatgcacgtcctgaactacgagctcaacaaccgaagaaagatcgtgagatccactggtcgccgactccaggctatgatcatatcaagcgcccgcaccccagcacggctgactgctgccgtcgagcagtacctcatggaacacggccttcagtacacgcaggcacaaccaggcctcttccgcgtcctgctctagtgatggagccggcctagctgttgtcacaactggatcagacgagaaagaagaaaaaaaaagttgtacttttgtatatggcagagatggctagcaggatagaagcgttaagatagctcatgcattcacatatcaggctttagcaaatgtatacatcttaaaatttgcggagttaggtctttggtgctggtggatgcataaggtgatagcatcttcaaaatcatgttctcgttcacaatctttggtgctggtggatgcatagttcttttgttgctggtgcgttcaaattgtgcgtaatgcgtggtggatgcacaagttcttcacaacctttgctgccagtaggtgcgtggtggatgcacaagttcttcacaacctttgctgccagtaggttcaaattgttcgtaatgtttg

SEQ ID NO: 618 - DNA, 828 bp, Zea Mays
caaacatttcaagcaaaaattattgatagacaggcttttctgatgggaaacaaccctttagcaaaggatctaacattgaaggagctatacagtatacaaagcaggttggctcaggagaaagctagagaaacaacataccgacaaagattccaaataccagagcttcaaggcctcatccaggagcagaatcccccaatcgatctctgtggtcttcacatcagcgaggccatgcacgtcctgaactacgagctcaacaaccgaagaaagatcgtgagatccactggtcgccgactccaggctatgatcatatcaagcgcccgcaccccagcacggctgactgctgccgtcgagcagtacctcatggaacacggccttcagtacacgcaggcacaaccaggcctcttccgcgtcctgctctagtgatggagccggcctagctgttgtcacaactggatcagacgagaaagaagaaaaaaaaagttgtacttttgtatatggcagagatggctagcaggatagaagcgttaagatagctcatgcattcacatatcaggctttagcaaatgtatacatcttaaaatttgcggagttaggtctttggtgctggtggatgcataaggtgatagcatcttcaaaatcatgttctcgttcacaatctttggtgctggtggatgcatagttcttttgttgctggtgcgttcaaattgtgcgtaatgcgtggtggatgcacaagttcttcacaacctttgctgccagtaggtgcgtggtggatgcacaagttcttcacaacctttgctgccagtaggttcaaattgttcgtaatgtttg

SEQ ID NO: 619 - DNA, 1182 bp, Zea Mays
ctcgcctttcacgtgccgcaatgctttcccctcaccgcccggtgcccgcgcaagccacgaaattagcaagggctgccctatctatctatccggccatctaccttgtctctcgacgctcgagtgtcaatcaccaccgctccagctacgcacagctataaaaccaggggcagccaaacatggtactgctataccgcatgaccgcacctcgtatcgtcgtctagctccgtttcgtttccgggaagcaaccaaccttcgttcccgggcagccgacgacccttgcgccgtcttcgtctgtcaagagtacagtttgacgcgagcagctgccggttccttctctcgtgcgcctttgctagcttgggatcgatcaaagccggtgagcgaccgagcgaccgaggagaggaccaccgtgctggagctcttcccgcagcaggctggcacgctcaaagacgagcagcaaaggaagaggaaggagcgtgctgacgggagagcgccgctgaccatcttctacggcggcaagatggtggtcttcgacgacttccccgccgagaaggccgaggagctgatgcagctcgccggctccggcaacgccgcccaggacgcgctgggacagcccagcctcacagacatgcccctcgcgaggaaggtgtcgctaaagaggttcctggagaagaggaagaaccggctcaccgcggcagatccatacccagcagcggcggcgacggcggcggcaagcgagtcgtcgactaagcctccggcagtgaaagacgagggcgcgccgtgggtcggcgtgaactcggcgctcagcctcagctgaacaatctcatcgacggcagcctgcctacctatcgctatagggaaaaactagctatttcccggccgtaaaaatatgtacgtgtttggccccccttgacatttacaccagtaaaatggctgcttcagttcaggggaattattagctgggtagctaattaccatgatcggtttatttagttgtctgtttgagaattctttggccagaacgaagaagaattctttttttcttccttgctggtattcatcatatctgcgaggatacgaactgattaattagacctagtcgaactcatatatatacatagtgtgtaaattcaaataagatgatggaacaggttatatgcaattctttcgcttcattgattcagt

SEQ ID NO: 620 - DNA, 1250 bp, Zea Mays
agctacgcacagctataaaaccaggggcagccaaacatggtactgctataccgcatgaccgcacctcgtatcgtcgtctagctccgtttcgtttccgggaagcaaccaaccttcgttcccgggcagccgacgacccttgcgccgtcttcgtctgtcaagagtacagtttgacgcgagcagctgccggttccttctctcgtgcgcctttgctagcttgggatcgatcaaagccggtgagcgaccgagcgagcgagtgaggatcggaacatctgccatcatggcctccgagcatgcgcagctgtctgccaaggccgccgccggcagcaggttcgcggtgacgtacggcctgctgaggcagtacatgaaggagcagggcggcagcggcgccaccaggagcctcgcgccggccgtgggcgtgggcctcatgccggaagccgacgctgctgcggcggcggaggcgaccgaggagaggaccaccgtgctggagctcttcccgcagcaggctggcacgctcaaagacgagcagcaaagaggaaggagcgtgctgacgggagagcgccgctgaccatcttctacggcggcaagatggtggtcttcgacgacttccccgccgagaaggccgaggagctgatgcagctcgccggctccggcaacgccgcccaggacgcgctgggacagcccagcctcacagacatgcccctcgcgaggaaggtgtcgctaaagaggttcctggagaagaggaagaaccggctcaccgcggcagatccatacccagcagcggcggcgacggcggcggcaagcgagtcgtcgactaagcctccggcagtgaaagacgagggcgcgccgtgggtcggcgtgaactcggcgctcagcctcagctgaacaatctcatcgacggcagcctgcctacctatcgctatagggaaaaactagctatttcccggccgtaaaaatatgtacgtgtttggccccccttgacatttacaccagtaaaatggctgcttcagttcaggggaattattagctgggtagctaattaccatgatcggtttatttagttgtctgtttgagaattctttggccagaacgaagaagaattctttttttcttccttgctggtattcatcatatctgcgaggatacgaactgattaattagacctagtcgaactcatatatatacatagtgtgtaaattcaaataagatgatggaacaggttatatgcaattctttcgcttcattgattcagt

SEQ ID NO: 621 - DNA, 3306 bp, Zea Mays
acacgcgcctggagagttccagctagatgtaatatgtacactatacggcgagcgaggaagacaccgcatatttcttttctagagccaacgttcgatctttttcttaggatgaggatttcgcttggattcttttttaccgatatgcaacgtactcatcagcgctttctggaaccagcagtacaaaaatatattggacgagatgttcgcccgcgcgggtgaggtatccaccgagctcgcggtcgacctgcgcgttgtcggaacccgtcgtcaacgtcggtgtctctacaggcgcattcctcttcttcgtcgatatatattaggcagcatcgacgcattgcgtgctgctcgcaatagcacagacagggctcgacatgggcgatgcattctcttcattcacttgcacacaacagctggatgtgactatgtgaacgactctacaaaagttgcataccatgtgctcgatagaatgtcgatgaggtatcccgtacaggaagccagtcctaattcctatgcagcaggacaatccgatgaaattgcttttaagaaaagcatgttcgcgcaattgcttgagcgacctgcttcactgccagaggcattggcgatgccgatgcccgtaccagctctctccggcacgaggcatgacgcgtggccgcagtgtgaaggaccggagcaagaagaagcgcgtccacgcgctcgaggtagccaccgagcgctggaaggttctctccaaagtgctcgccgtcgtcgacgcgctcaagaaggaggatgagcacgtcaccccgctcaagcgcctcgagatcctgcggccgcagctcggcctcgtcaagccgcacaaggtggcccacttcgtgcgtcgctcgccgcacctgttcgaggtctgccgcgacagccgcggcgtcatgtgggcaggcctctcgccgcaggcagaggcgctcgtcgaggaggaagcgcgcctgctagaggatcactcccctgtggccgtgcagtacgtcaccaggatgctcatgatgtccgtggaccggcggctgccggtcgacaagatcgcccacttccggcgcgacatgggacttcctcatgactttcgaacacggtgggtgcacatgtttccggagcatttcaggctggtcagattggaggatggtgagtatttggagctcatctcttgggacccaacctgggcagtcactgagcttgagaagaaggcgtctgtgtcgactggcgatgccattgccagttcgccaggagagctgtcgcttccgtttccaatgaaattcccaccaaatttcactacttactacagatttcgaggaaaagctcatcattatgtgaaaatgggcaataccgatcagtttcagaaggtcacctacctgtccccttatgcagaggcaaagggattgactcctggatcgccagagtttgataagagggctgttgcagtgatgcatgagatactgagcttcatgctggaaaagaggctggtgactgatcaccttacacatttccgtcgtgagtttgtaatgccacagaagcttatgaggttactattgaagcattatggcatcttttatgtttctgagaggggaaagaggttgagtgtgttcttaactgaggcatatgatgggaacgaactgatagagaagtgtccgttggtgcggtggagggaaaaactccttcaacttactggttacagagggagattgaagaatcttggtaaagtcgacgtgtgttctgattcagatgagtacttattaggccatgatgatgatgatgatgtattggatgttgaaagtgaaaatccagatgacatcttagatgactgttctatttcagatgattctgagatggatttaggggatgcagatgcagatgaattttgcagagactgagttggtggcatgtgtgtagcagaaaagaacaaaaaaaaaagttgtgttaagtttgttatgaaaacaaagttcagcaataactgtttgtgactttaagctcaggatataattgtgtactatactctagctgctgtcatctatggagttccaagtaacacttgaggcggactgtattcttctctcgtcagttgtatttggactttcaaatattagtcaaagctcaaacagatcacaatgatttgaaatggcacgcttgaatattgcttataccagatcagtgtcctgtgatgtgttctttagaaaaaatgatgggacaaaacatgcaactgctatactcaagttatgatttatcgaagatatcttcatttaaacagtcataggtttcctttaagaactcataaggcaggagccaggaggtgatgaattagaagttcagatgtgtacatgtctacctcagtgtgccaatgcattcactggccgctccgtcgagaagatcggccaccttcgctgcaaacatgctcacatggcgatcagaggcgcggcttaatgcaaccacatgggagcgagacacgcccccatttacttcatcctgggtcgttgccaccatgaatgttgttcctgctctacagatctcccagcccacccatccatccatcctctactccccgtttcctgtttatgcttattcggacgggtgccaccaccatgttcctcatttaaggctccacacggcaacgcgtcctgattctctcgaaggacctaacaatggcggtgctgctggaagttcgccggactgacaaaattgcattcccattggcatgcttccggatattctctcgccgtccagacttccggaatttatgggttatgggcgatggaacggaggatcctcctctcctcatcctaaaaggggttatccatgccggttgtctggatcaatccgacgcctggaccatcggaccggaatacctctccagctgaaaccgttgcgacagtgccattaagagatacgactacgagaacggaacgctactgggatggaagccaaagattgcgagtgatgccgcggactgacgaaccctcaaccaactggttgtatcgtatggatgtccgagactccgagtgcgagaggatgaacgtcactagcagagtggttaaccctcgcggactgtggtcaagctgtcgcttttgctgccgctgtccactctgcctgtcaggcgcgctatgagcctgagtgaggtcttcgctggctggctcgcggttcacatgtggccagcagatcgttcgtgtcactgtgtaaaacactgttatatccttgttttcatacgctacaatcattgtttatttttctaataatgtaatttacttcttatataaaatacatgatttaggactttaaccgatagagcgcaatttgttt

SEQ ID NO: 622 - DNA, 2825 bp, Zea Mays
ggaagcaatttttttgctaaaagccgactttctcacagtgcaaaactgaaagcacccctggacctgttttaagtggctttcggatgaaactgtgaaaacatatatcgaagaatttttaacgactattagtggtttacactaaacgttttttagctttttaatagctcacagcctacaacagcttcttccacatttcacaatctataacattttttttcacaaccacaacgcaaccgaacagacttcgtagactcgtagttccctaaaactgactactagaatcaattcgatcgaaacagggccttatcgtgggcttcacagtcctgacggcaaatatcaagatgagcccatcaaatacagtagagattatgggctctaatttatacctgaccacagcgtcttcctctgtggtcaagcacggcccttttacatttctctttcctcctcctcccgcccggcggccccgcgccgccgctttgttctcctcttctcgccgccgttcagcggcgcgactagcctcgtgctctttgcccctctaggttgttcgtgttacaatagctttgttactgctcctgtttcggccctcctgttttagaagttcctggccgcctcacacgccatgcacgcagcatgttcgcgcaattgcttgagcgacctgcttcactgccagaggcattggcgatgccgatgcccgtaccagctctctccggcacgaggcatgacgcgtggccgcagtgtgaaggaccggagcaagaagaagcgcgtccacgcgctcgaggtagccaccgagcgctggaaggttctctccaaagtgctcgccgtcgtcgacgcgctcaagaaggaggatgagcacgtcaccccgctcaagcgcctcgagatcctgcggccgcagctcggcctcgtcaagccgcacaaggtggcccacttcgtgcgtcgctcgccgcacctgttcgaggtctgccgcgacagccgcggcgtcatgtgggcaggcctctcgccgcaggcagaggcgctcgtcgaggaggaagcgcgcctgctagaggatcactcccctgtggccgtgcagtacgtcaccaggatgctcatgatgtccgtggaccggcggctgccggtcgacaagatcgcccacttccggcgcgacatgggacttcctcatgactttcgaacacggtgggtgcacatgtttccggagcatttcaggctggtcagattggaggatggtgagtatttggagctcatctcttgggacccaacctgggcagtcactgagcttgagaagaaggcgtctgtgtcgactggcgatgccattgccagttcgccaggagagctgtcgcttccgtttccaatgaaattcccaccaaatttcactacttactacagatttcgaggaaaagctcatcattatgtgaaaatgggcaataccgatcagtttcagaaggtcacctacctgtccccttatgcagaggcaaagggattgactcctggatcgccagagtttgataagagggctgttgcagtgatgcatgagatactgagcttcatgctggaaaagaggctggtgactgatcaccttacacatttccgtcgtgagtttgtaatgccacagaagcttatgaggttactattgaagcattatggcatcttttatgtttctgagaggggaaagaggttgagtgtgttcttaactgaggcatatgatgggaacgaactgatagagaagtgtccgttggtgcggtggagggaaaaactccttcaacttactggttacagagggagattgaagaatcttggtaaagtcgacgtgtgttctgattcagatgagtacttattaggccatgatgatgatgatgatgtattggatgttgaaagtgaaaatccagatgacatcttagatgactgttctatttcagatgattctgagatggatttaggggatgcagatgcagatgaattttgcagagactgagttggtggcatgtgtgtagcagaaaagaacaaaaaaaaaagttgtgttaagtttgttatgaaaacaaagttcagcaataactgtttgtgactttaagctcaggatataattgtgtactatactctagctgctgtcatctatggagttccaagtaacacttgaggcggactgtattcttctctcgtcagttgtatttggactttcaaatattagtcaaagctcaaacagatcacaatgatttgaaatggcacgcttgaatattgcttataccagatcagtgtcctgtgatgtgttctttagaaaaaatgatgggacaaaacatgcaactgctatactcaagttatgatttatcgaagatatcttcatttaaacagtcataggtttcctttaagaactcataaggcaggagccaggaggtgatgaattagaagttcagatgtgtacatgtctacctcagtgtgccaatggtaatctttgtatacaagcaattttgcagtatggatgaagaaatcgtttgcaacaatttgtcaattggagttcttctgcactctccttttgttttaactttgctgtgcaaaataagatacactgaccttgataattacccgaataactaagaaatgtactgctggtgacatatcgtaaaaaaaactaaaagtctatataggatatgacaacattctctttgtacatcgatatgccaaggttgtgttgtatcttgatgattagatttgtcgctctcgttgtagagctcttccaacaattgtttttaaaatgcaacaattgtttttaaaatgcttcatttaacttatggtctgcacgttctggacttctggttattgactccgctatacctttt

SEQ ID NO: 623 - DNA, 3404 bp, Zea Mays
ggaagcaatttttttgctaaaagccgactttctcacagtgcaaaactgaaagcacccctggacctgttttaagtggctttcggatgaaactgtgaaaacatatatcgaagaatttttaacgactattagtggtttacactaaacgttttttagctttttaatagctcacagcctacaacagcttcttccacatttcacaatctataacattttttttcacaaccacaacgcaaccgaacagacttcgtagactcgtagttccctaaaactgactactagaatcaattcgatcgaaacagggccttatcgtgggcttcacagtcctgacggcaaatatcaagatgagcccatcaaatacagtagagattatgggctctaatttatacctgaccacagcgtcttcctctgtggtcaagcacggcccttttacatttctctttcctcctcctcccgcccggcggccccgcgccgccgctttgttctcctcttctcgccgccgttcagcggcgcgactagcctcgtgctctttgcccctctaggttgttcgtgttacaatagctttgttactgctcctgtttcggccctcctgttttagaagttcctggccgcctcacacgccatgcacgcagcatgttcgcgcaattgcttgagcgacctgcttcactgccagaggcattggcgatgccgatgcccgtaccagctctctccggcacgaggcatgacgcgtggccgcagtgtgaaggaccggagcaagaagaagcgcgtccacgcgctcgaggtagccaccgagcgctggaaggttctctccaaagtgctcgccgtcgtcgacgcgctcaagaaggaggatgagcacgtcaccccgctcaagcgcctcgagatcctgcggccgcagctcggcctcgtcaagccgcacaaggtggcccacttcgtgcgtcgctcgccgcacctgttcgaggtctgccgcgacagccgcggcgtcatgtgggcaggcctctcgccgcaggcagaggcgctcgtcgaggaggaagcgcgcctgctagaggatcactcccctgtggccgtgcagtacgtcaccaggatgctcatgatgtccgtggaccggcggctgccggtcgacaagatcgcccacttccggcgcgacatgggacttcctcatgactttcgaacacggtgggtgcacatgtttccggagcatttcaggctggtcagattggaggatggtgagtatttggagctcatctcttgggacccaacctgggcagtcactgagcttgagaagaaggcgtctgtgtcgactggcgatgccattgccagttcgccaggagagctgtcgcttccgtttccaatgaaattcccaccaaatttcactacttactacagatttcgaggaaaagctcatcattatgtgaaaatgggcaataccgatcagtttcagaaggtcacctacctgtccccttatgcagaggcaaagggattgactcctggatcgccagagtttgataagagggctgttgcagtgatgcatgagatactgagcttcatgctggaaaagaggctggtgactgatcaccttacacatttccgtcgtgagtttgtaatgccacagaagcttatgaggttactattgaagcattatggcatcttttatgtttctgagaggggaaagaggttgagtgtgttcttaactgaggcatatgatgggaacgaactgatagagaagtgtccgttggtgcggtggagggaaaaactccttcaacttactggttacagagggagattgaagaatcttggtaaagtcgacgtgtgttctgattcagatgagtacttattaggccatgatgatgatgatgatgtattggatgttgaaagtgaaaatccagatgacatcttagatgactgttctatttcagatgattctgagatggatttaggggatgcagatgcagatgaattttgcagagactgagttggtggcatgtgtgtagcagaaaagaacaaaaaaaaaagttgtgttaagtttgttatgaaaacaaagttcagcaataactgtttgtgactttaagctcaggatataattgtgtactatactctagctgctgtcatctatggagttccaagtaacacttgaggcggactgtattcttctctcgtcagttgtatttggactttcaaatattagtcaaagctcaaacagatcacaatgatttgaaatggcacgcttgaatattgcttataccagatcagtgtcctgtgatgtgttctttagaaaaaatgatgggacaaaacatgcaactgctatactcaagttatgatttatcgaagatatcttcatttaaacagtcataggtttcctttaagaactcataaggcaggagccaggaggtgatgaattagaagttcagatgtgtacatgtctacctcagtgtgccaatggacattatctcgcttcagcattcactggccgctccgtcgagaagatcggccaccttcgctgcaaacatgctcacatggcgatcagaggcgcggcttaatgcaaccacatgggagcgagacacgcccccatttacttcatcctgggtcgttgccaccatgaatgttgttcctgctctacagatctcccagcccacccatccatccatcctctactccccgtttcctgtttatgcttattcggacgggtgccaccaccatgttcctcatttaaggctccacacggcaacgcgtcctgattctctcgaaggacctaacaatggcggtgctgctggaagttcgccggactgacaaaattgcattcccattggcatgcttccggatattctctcgccgtccagacttccggaatttatgggttatgggcgatggaacggaggatcctcctctcctcatcctaaaaggggttatccatgccggttgtctggatcaatccgacgcctggaccatcggaccggaatacctctccagctgaaaccgttgcgacagtgccattaagagatacgactacgagaacggaacgctactgggatggaagccaaagattgcgagtgatgccgcggactgacgaaccctcaaccaactggttgtatcgtatggatgtccgagactccgagtgcgagaggatgaacgtcactagcagagtggttaaccctcgcggactgtggtcaagctgtcgcttttgctgccgctgtccactctgcctgtcaggcgcgctatgagcctgagtgaggtcttcgctggctggctcgcggttcacatgtggccagcagatcgttcgtgtcactgtgtaaaacactgttatatccttgttttcatacgctacaatcattgtttatttttctaataatgtaatttacttcttatataaaatacatgatttaggactttaaccgatagagcgcaatttgttt

SEQ ID NO: 624 - DNA, 3386 bp, Zea Mays
ggaagcaatttttttgctaaaagccgactttctcacagtgcaaaactgaaagcacccctggacctgttttaagtggctttcggatgaaactgtgaaaacatatatcgaagaatttttaacgactattagtggtttacactaaacgttttttagctttttaatagctcacagcctacaacagcttcttccacatttcacaatctataacattttttttcacaaccacaacgcaaccgaacagacttcgtagactcgtagttccctaaaactgactactagaatcaattcgatcgaaacagggccttatcgtgggcttcacagtcctgacggcaaatatcaagatgagcccatcaaatacagtagagattatgggctctaatttatacctgaccacagcgtcttcctctgtggtcaagcacggcccttttacatttctctttcctcctcctcccgcccggcggccccgcgccgccgctttgttctcctcttctcgccgccgttcagcggcgcgactagcctcgtgctctttgcccctctaggttgttcgtgttacaatagctttgttactgctcctgtttcggccctcctgttttagaagttcctggccgcctcacacgccatgcacgcagcatgttcgcgcaattgcttgagcgacctgcttcactgccagaggcattggcgatgccgatgcccgtaccagctctctccggcacgaggcatgacgcgtggccgcagtgtgaaggaccggagcaagaagaagcgcgtccacgcgctcgaggtagccaccgagcgctggaaggttctctccaaagtgctcgccgtcgtcgacgcgctcaagaaggaggatgagcacgtcaccccgctcaagcgcctcgagatcctgcggccgcagctcggcctcgtcaagccgcacaaggtggcccacttcgtgcgtcgctcgccgcacctgttcgaggtctgccgcgacagccgcggcgtcatgtgggcaggcctctcgccgcaggcagaggcgctcgtcgaggaggaagcgcgcctgctagaggatcactcccctgtggccgtgcagtacgtcaccaggatgctcatgatgtccgtggaccggcggctgccggtcgacaagatcgcccacttccggcgcgacatgggacttcctcatgactttcgaacacggtgggtgcacatgtttccggagcatttcaggctggtcagattggaggatggtgagtatttggagctcatctcttgggacccaacctgggcagtcactgagcttgagaagaaggcgtctgtgtcgactggcgatgccattgccagttcgccaggagagctgtcgcttccgtttccaatgaaattcccaccaaatttcactacttactacagatttcgaggaaaagctcatcattatgtgaaaatgggcaataccgatcagtttcagaaggtcacctacctgtccccttatgcagaggcaaagggattgactcctggatcgccagagtttgataagagggctgttgcagtgatgcatgagatactgagcttcatgctggaaaagaggctggtgactgatcaccttacacatttccgtcgtgagtttgtaatgccacagaagcttatgaggttactattgaagcattatggcatcttttatgtttctgagaggggaaagaggttgagtgtgttcttaactgaggcatatgatgggaacgaactgatagagaagtgtccgttggtgcggtggagggaaaaactccttcaacttactggttacagagggagattgaagaatcttggtaaagtcgacgtgtgttctgattcagatgagtacttattaggccatgatgatgatgatgatgtattggatgttgaaagtgaaaatccagatgacatcttagatgactgttctatttcagatgattctgagatggatttaggggatgcagatgcagatgaattttgcagagactgagttggtggcatgtgtgtagcagaaaagaacaaaaaaaaaagttgtgttaagtttgttatgaaaacaaagttcagcaataactgtttgtgactttaagctcaggatataattgtgtactatactctagctgctgtcatctatggagttccaagtaacacttgaggcggactgtattcttctctcgtcagttgtatttggactttcaaatattagtcaaagctcaaacagatcacaatgatttgaaatggcacgcttgaatattgcttataccagatcagtgtcctgtgatgtgttctttagaaaaaatgatgggacaaaacatgcaactgctatactcaagttatgatttatcgaagatatcttcatttaaacagtcataggtttcctttaagaactcataaggcaggagccaggaggtgatgaattagaagttcagatgtgtacatgtctacctcagtgtgccaatgcattcactggccgctccgtcgagaagatcggccaccttcgctgcaaacatgctcacatggcgatcagaggcgcggcttaatgcaaccacatgggagcgagacacgcccccatttacttcatcctgggtcgttgccaccatgaatgttgttcctgctctacagatctcccagcccacccatccatccatcctctactccccgtttcctgtttatgcttattcggacgggtgccaccaccatgttcctcatttaaggctccacacggcaacgcgtcctgattctctcgaaggacctaacaatggcggtgctgctggaagttcgccggactgacaaaattgcattcccattggcatgcttccggatattctctcgccgtccagacttccggaatttatgggttatgggcgatggaacggaggatcctcctctcctcatcctaaaaggggttatccatgccggttgtctggatcaatccgacgcctggaccatcggaccggaatacctctccagctgaaaccgttgcgacagtgccattaagagatacgactacgagaacggaacgctactgggatggaagccaaagattgcgagtgatgccgcggactgacgaaccctcaaccaactggttgtatcgtatggatgtccgagactccgagtgcgagaggatgaacgtcactagcagagtggttaaccctcgcggactgtggtcaagctgtcgcttttgctgccgctgtccactctgcctgtcaggcgcgctatgagcctgagtgaggtcttcgctggctggctcgcggttcacatgtggccagcagatcgttcgtgtcactgtgtaaaacactgttatatccttgttttcatacgctacaatcattgtttatttttctaataatgtaatttacttcttatataaaatacatgatttaggactttaaccgatagagcgcaatttgttt

SEQ ID NO: 625 - DNA, 2114 bp, Zea Mays
gcggcccgcggggccggcgtgccagggggcggttagcggcggttgggcgcactgcagccgcgggctcgttttttatggcaccgccgcccgcctaggggacgggggagagagaccaaccgccgcttgggctcttccgcctccagtcctccaccacggcaccacgtcgtcttacctcgcttcggcgccgcctccttctccatctccacccaaaagaaaaagaataagctggctccaagataatggcatctcttactccaggaatactattaaaggttctaaaacatattaactctgatgtcaaagtatgtggagaataccggtccattcttctccaagttattagcatagtccctgcaataactggttcagaactttggccggaccatgggttctttatcaaagtttcagattcttcacactcaacttatgtttccttgtctaaggaggacaatgaactcatcttatcaaacaaactacaacttggacagtttatatatgttgagaaggtccagtcaagtatacctgttccggttcttgttggggtccgcccagttccaggaaggaacccttgcattggaaacccaaaggatttgatgcaaatgtcaactccctctggagttatggaagcactggatcatcaacggacaacttccaagtcagctgatctgtctgaaagtgaaaaggaaaatttgcagagaaaggtagttatcaaagagcagaagacagttgtcgcttcccgttacatgcttggggtgtcaagcaacaacgggaaaattaccaacctcaactccagcattgatagtgaaaaaagtaatggaggaagtaccatatctgaatcaaataaaaaatctgttgccctgaaagtcagacaagaggcaaaacctcagtcaagaagcaaatgccaaaggagagcaaaaaggaagttgctactgagagaagatcaccaccaaagcttcataggagttcgccaacaccagcgaggacttcaccaacaaagctcagtccagcagcaaagcagaatggaaactctggtccagtttcttctgtatctactgttaaaaaaagagttagtgaaactatctcttgggactccctcccaacaagcctaatcaattcaggaaaggctgttgtccggaggaagaacattgctcttattgtagcggctgaggctcaaagggaggctgctgcagctgcgtatcttgtaaaaggccttggaattttttctgagataagggaatcttctgaagtagatccacaagctgcaatcaccaagtttttcgagctgcacaggcttatcgttcagcaaagtgctgtctggaaagcttacactcctgagcctagcaaagaatctcgaccggagaaggaaaaaccgtcgaggaaagcttctgcatctcatcatcaccagaacaaagctggcacacgcgacacagctaagaatcccgaaggtgcccagggcagtgagaagacggaatgggcccgggaggacggtttcaaggagatctgcaggtcatggattgttctgaggaaagaatcgcggtcgtggtttctgagcttcctggaggatgcacttgaatcaggattcatgtccgagggccaaaccaccaagaacacgagagaacgcgtgcggggacaacccaaacccaagggtggggacgggaggatcgcggtcctgctgtcgcagctcaaggagacgagcaactggctcgatcagctgctgcaggacgaggcggacacttccgcggacggtttggccgaaaccgttgaccagctgaagcagaaggtgtacaaatgcttgcttggaacggtcgaaaccgcggcgtcggcactcggaggaagataaaaaaattgatgtaatggtgacgaagacgagcattaagttattgggtgttcagtcctgcaacaggatgttggggtgaagaacacaatgaggggaagatgtaaatagtcgggttgctcatttttaagttataaactaatttatttttattttttgggaggtgggggtgggggaatttcctggtgttgcgtgtgaaatggcaattgattttcttgggtattcgaattgttacaaatgatcttgcgtgtcagcttttgaaatagtcgggtttctgatt

SEQ ID NO: 626 - DNA, 2407 bp, Zea Mays
gcggcccgcggggccggcgtgccagggggcggttagcggcggttgggcgcactgcagccgcgggctcgttttttatggcaccgccgcccgcctaggggacgggggagagagaccaaccgccgcttgggctcttccgcctccagtcctccaccacggcaccacgtcgtcttacctcgcttcggcgccgcctccttctccatctccacccaaaagccgcgaagagatagggagaagaagaaaaaaaactcgcttgctgttcccgtgtctgctccgttgaggcctgcgttgttaattcgtgcggcgcttctcgtccggcggcggagagagcgtgctcttgctctgttggtgtgccgcttacttgctccaggaattggccttcgctgcatataaaaagaataagctggctccaagataatggcatctcttactccaggaatactattaaaggttctaaaacatattaactctgatgtcaaagtatgtggagaataccggtccattcttctccaagttattagcatagtccctgcaataactggttcagaactttggccggaccatgggttctttatcaaagtttcagattcttcacactcaacttatgtttccttgtctaaggaggacaatgaactcatcttatcaaacaaactacaacttggacagtttatatatgttgagaaggtccagtcaagtatacctgttccggttcttgttggggtccgcccagttccaggaaggaacccttgcattggaaacccaaaggatttgatgcaaatgtcaactccctctggagttatggaagcactggatcatcaacggacaacttccaagtcagctgatctgtctgaaagtgaaaaggaaaatttgcagagaaaggtagttatcaaagagcagaagacagttgtcgcttcccgttacatgcttggggtgtcaagcaacaacgggaaaattaccaacctcaactccagcattgatagtgaaaaaagtaatggaggaagtaccatatctgaatcaaataaaaaatctgttgccctgaaagtcagacaagaggcaaaacctcaggaacggtcaaataatacatctcctagtaacgctaagttagtttccacaaagcaagaaattagcaaggacacacgcaagaatattggcacttcacctagtccaaatggttctgctgtagtcaagaagcaaatgccaaaggagagcaaaaaggaagttgctactgagagaagatcaccaccaaagcttcataggagttcgccaacaccagcgaggacttcaccaacaaagctcagtccagcagcaaagcagaatggaaactctggtccagtttcttctgtatctactgttaaaaaaagagttagtgaaactatctcttgggactccctcccaacaagcctaatcaattcaggaaaggctgttgtccggaggaagaacattgctcttattgtagcggctgaggctcaaagggaggctgctgcagctgcgtatcttgtaaaaggccttggaattttttctgagataagggaatcttctgaagtagatccacaagctgcaatcaccaagtttttcgagctgcacaggcttatcgttcagcaaagtgctgtctggaaagcttacactcctgagcctagcaaagaatctcgaccggagaaggaaaaaccgtcgaggaaagcttctgcatctcatcatcaccagaacaaagctggcacacgcgacacagctaagaatcccgaaggtgcccagggcagtgagaagacggaatgggcccgggaggacggtttcaaggagatctgcaggtcatggattgttctgaggaaagaatcgcggtcgtggtttctgagcttcctggaggatgcacttgaatcaggattcatgtccgagggccaaaccaccaagaacacgagagaacgcgtgcggggacaacccaaacccaagggtggggacgggaggatcgcggtcctgctgtcgcagctcaaggagacgagcaactggctcgatcagctgctgcaggacgaggcggacacttccgcggacggtttggccgaaaccgttgaccagctgaagcagaaggtgtacaaatgcttgcttggaacggtcgaaaccgcggcgtcggcactcggaggaagataaaaaaattgatgtaatggtgacgaagacgagcattaagttattgggtgttcagtcctgcaacaggatgttggggtgaagaacacaatgaggggaagatgtaaatagtcgggttgctcatttttaagttataaactaatttatttttattttttgggaggtgggggtgggggaatttcctggtgttgcgtgtgaaatggcaattgattttcttgggtattcgaattgttacaaatgatcttgcgtgtcagcttttgaaatagtcgggtttctgatt

SEQ ID NO: 627 - DNA, 2999 bp, Zea Mays
gcggcccgcggggccggcgtgccagggggcggttagcggcggttgggcgcactgcagccgcgggctcgttttttatggcaccgccgcccgcctaggggacgggggagagagaccaaccgccgcttgggctcttccgcctccagtcctccaccacggcaccacgtcgtcttacctcgcttcggcgccgcctccttctccatctccacccaaaagccgcgaagagatagggagaagaagaaaaaaaactcgcttgctgttcccgtgtctgctccgttgaggcctgcgttgttaattcgtgcggcgcttctcgtccggcggcggagagagcgtgctcttgctctgttggtgtgccgcttacttgctccaggaattggccttcgctgcatatgtttctcatttcctgaattctaagccaagaaacccctaaaggacaggctaccgcagcgggattttggaaggttcacaatcccttcgtcttcgtatgcagacgtgaaggaattgggaaagttggtgttgtctgtgtgtccgtgttcatggccacggagctagagcctagagctttgcaagaaggttcaggcgggacattgtttgatgctgaacagcattattattgggtgtcttgctcttttcatctgtttggttggtgttccaatcatcttgacatctggccaggtttggatttttaggtgttacaggtccacagttatactagtaattacatgcctatattgctcctttatgtgtttctgaagctttaaccaatccatctttgtcctttcctcctttgaaaccatcggccgtatttttaagtaagccattactttcatggagcttaaccatcaattatctaacaattatttctttatattaggccaccatcaggaacacgcatgaatcctcatgcgcgacgcagcattatcagtaatgtggtggataatgcatctaaaattaacttctattactttttctttctttcacagaaaaagaataagctggctccaagataatggcatctcttactccaggaatactattaaaggttctaaaacatattaactctgatgtcaaagtatgtggagaataccggtccattcttctccaagttattagcatagtccctgcaataactggttcagaactttggccggaccatgggttctttatcaaagtttcagattcttcacactcaacttatgtttccttgtctaaggaggacaatgaactcatcttatcaaacaaactacaacttggacagtttatatatgttgagaaggtccagtcaagtatacctgttccggttcttgttggggtccgcccagttccaggaaggaacccttgcattggaaacccaaaggatttgatgcaaatgtcaactccctctggagttatggaagcactggatcatcaacggacaacttccaagtcagctgatctgtctgaaagtgaaaaggaaaatttgcagagaaaggtagttatcaaagagcagaagacagttgtcgcttcccgttacatgcttggggtgtcaagcaacaacgggaaaattaccaacctcaactccagcattgatagtgaaaaaagtaatggaggaagtaccatatctgaatcaaataaaaaatctgttgccctgaaagtcagacaagaggcaaaacctcaggaacggtcaaataatacatctcctagtaacgctaagttagtttccacaaagcaagaaattagcaaggacacacgcaagaatattggcacttcacctagtccaaatggttctgctgtagtcaagaagcaaatgccaaaggagagcaaaaaggaagttgctactgagagaagatcaccaccaaagcttcataggagttcgccaacaccagcgaggacttcaccaacaaagctcagtccagcagcaaagcagaatggaaactctggtccagtttcttctgtatctactgttaaaaaaagagttagtgaaactatctcttgggactccctcccaacaagcctaatcaattcaggaaaggctgttgtccggaggaagaacattgctcttattgtagcggctgaggctcaaagggaggctgctgcagctgcgtatcttgtaaaaggccttggaattttttctgagataagggaatcttctgaagtagatccacaagctgcaatcaccaagtttttcgagctgcacaggcttatcgttcagcaaagtgctgtctggaaagcttacactcctgagcctagcaaagaatctcgaccggagaaggaaaaaccgtcgaggaaagcttctgcatctcatcatcaccagaacaaagctggcacacgcgacacagctaagaatcccgaaggtgcccagggcagtgagaagacggaatgggcccgggaggacggtttcaaggagatctgcaggtcatggattgttctgaggaaagaatcgcggtcgtggtttctgagcttcctggaggatgcacttgaatcaggattcatgtccgagggccaaaccaccaagaacacgagagaacgcgtgcggggacaacccaaacccaagggtggggacgggaggatcgcggtcctgctgtcgcagctcaaggagacgagcaactggctcgatcagctgctgcaggacgaggcggacacttccgcggacggtttggccgaaaccgttgaccagctgaagcagaaggtgtacaaatgcttgcttggaacggtcgaaaccgcggcgtcggcactcggaggaagataaaaaaattgatgtaatggtgacgaagacgagcattaagttattgggtgttcagtcctgcaacaggatgttggggtgaagaacacaatgaggggaagatgtaaatagtcgggttgctcatttttaagttataaactaatttatttttattttttgggaggtgggggtgggggaatttcctggtgttgcgtgtgaaatggcaattgattttcttgggtattcgaattgttacaaatgatcttgcgtgtcagcttttgaaatagtcgggtttctgatt

SEQ ID NO: 628 - DNA, 2206 bp, Zea Mays
gggcggttagcggcggttgggcgcactgcagccgcgggctcgttttttatggcaccgccgcccgcctaggggacgggggagagagaccaaccgccgcttgggctcttccgcctccagtcctccaccacggcaccacgtcgtcttacctcgcttcggcgccgcctccttctccatctccacccaaaagaaaaagaataagctggctccaagataatggcatctcttactccaggaatactattaaaggttctaaaacatattaactctgatgtcaaagtatgtggagaataccggtccattcttctccaagttattagcatagtccctgcaataactggttcagaactttggccggaccatgggttctttatcaaagtttcagattcttcacactcaacttatgtttccttgtctaaggaggacaatgaactcatcttatcaaacaaactacaacttggacagtttatatatgttgagaaggtccagtcaagtatacctgttccggttcttgttggggtccgcccagttccaggaaggaacccttgcattggaaacccaaaggatttgatgcaaatgtcaactccctctggagttatggaagcactggatcatcaacggacaacttccaagtcagctgatctgtctgaaagtgaaaaggaaaatttgcagagaaaggtagttatcaaagagcagaagacagttgtcgcttcccgttacatgcttggggtgtcaagcaacaacgggaaaattaccaacctcaactccagcattgatagtgaaaaaagtaatggaggaagtaccatatctgaatcaaataaaaaatctgttgccctgaaagtcagacaagaggcaaaacctcaggaacggtcaaataatacatctcctagtaacgctaagttagtttccacaaagcaagaaattagcaaggacacacgcaagaatattggcacttcacctagtccaaatggttctgctgtagtcaagaagcaaatgccaaaggagagcaaaaaggaagttgctactgagagaagatcaccaccaaagcttcataggagttcgccaacaccagcgaggacttcaccaacaaagctcagtccagcagcaaagcagaatggaaactctggtccagtttcttctgtatctactgttaaaaaaagagttagtgaaactatctcttgggactccctcccaacaagcctaatcaattcaggaaaggctgttgtccggaggaagaacattgctcttattgtagcggctgaggctcaaagggaggctgctgcagctgcgtatcttgtaaaaggccttggaattttttctgagataagggaatcttctgaagtagatccacaagctgcaatcaccaagtttttcgagctgcacaggcttatcgttcagcaaagtgctgtctggaaagcttacactcctgagcctagcaaagaatctcgaccggagaaggaaaaaccgtcgaggaaagcttctgcatctcatcatcaccagaacaaagctggcacacgcgacacagctaagaatcccgaaggtgcccagggcagtgagaagacggaatgggcccgggaggacggtttcaaggagatctgcaggtcatggattgttctgaggaaagaatcgcggtcgtggtttctgagcttcctggaggatgcacttgaatcaggattcatgtccgagggccaaaccaccaagaacacgagagaacgcgtgcggggacaacccaaacccaagggtggggacgggaggatcgcggtcctgctgtcgcagctcaaggagacgagcaactggctcgatcagctgctgcaggacgaggcggacacttccgcggacggtttggccgaaaccgttgaccagctgaagcagaaggtgtacaaatgcttgcttggaacggtcgaaaccgcggcgtcggcactcggaggaagataaaaaaattgatgtaatggtgacgaagacgagcattaagttattgggtgttcagtcctgcaacaggatgttggggtgaagaacacaatgaggggaagatgtaaatagtcgggttgctcatttttaagttataaactaatttatttttattttttgggaggtgggggtgggggaatttcctggtgttgcgtgtgaaatggcaattgattttcttgggtattcgaattgttacaaatgatcttgcgtgtcagcttttgaaatagtcgggtttctgatt

SEQ ID NO: 629 - DNA, 2131 bp, Zea Mays
ccgctctccctttccatgcttccccaccaccacctgggtcgccgaaacgctgcagccgcgaagagatagggagaagaagaaaaaaaactcgcttgctgttcccgtgtctgctccgttgaggcctgcgttgttaattcgtgcggcgcttctcgtccggcggcggagagagcgtgctcttgctctgttggtgtgccgcttacttgctccaggaattggccttcgctgcatataaaaagaataagctggctccaagataatggcatctcttactccaggaatactattaaaggttctaaaacatattaactctgatgtcaaagtatgtggagaataccggtccattcttctccaagttattagcatagtccctgcaataactggttcagaactttggccggaccatgggttctttatcaaagtttcagattcttcacactcaacttatgtttccttgtctaaggaggacaatgaactcatcttatcaaacaaactacaacttggacagtttatatatgttgagaaggtccagtcaagtatacctgttccggttcttgttggggtccgcccagttccaggaaggaacccttgcattggaaacccaaaggatttgatgcaaatgtcaactccctctggagttatggaagcactggatcatcaacggacaacttccaagtcagctgatctgtctgaaagtgaaaaggaaaatttgcagagaaaggtagttatcaaagagcagaagacagttgtcgcttcccgttacatgcttggggtgtcaagcaacaacgggaaaattaccaacctcaactccagcattgatagtgaaaaaagtaatggaggaagtaccatatctgaatcaaataaaaaatctgttgccctgaaagtcagacaagaggcaaaacctcagtcaagaagcaaatgccaaaggagagcaaaaaggaagttgctactgagagaagatcaccaccaaagcttcataggagttcgccaacaccagcgaggacttcaccaacaaagctcagtccagcagcaaagcagaatggaaactctggtccagtttcttctgtatctactgttaaaaaaagagttagtgaaactatctcttgggactccctcccaacaagcctaatcaattcaggaaaggctgttgtccggaggaagaacattgctcttattgtagcggctgaggctcaaagggaggctgctgcagctgcgtatcttgtaaaaggccttggaattttttctgagataagggaatcttctgaagtagatccacaagctgcaatcaccaagtttttcgagctgcacaggcttatcgttcagcaaagtgctgtctggaaagcttacactcctgagcctagcaaagaatctcgaccggagaaggaaaaaccgtcgaggaaagcttctgcatctcatcatcaccagaacaaagctggcacacgcgacacagctaagaatcccgaaggtgcccagggcagtgagaagacggaatgggcccgggaggacggtttcaaggagatctgcaggtcatggattgttctgaggaaagaatcgcggtcgtggtttctgagcttcctggaggatgcacttgaatcaggattcatgtccgagggccaaaccaccaagaacacgagagaacgcgtgcggggacaacccaaacccaagggtggggacgggaggatcgcggtcctgctgtcgcagctcaaggagacgagcaactggctcgatcagctgctgcaggacgaggcggacacttccgcggacggtttggccgaaaccgttgaccagctgaagcagaaggtgtacaaatgcttgcttggaacggtcgaaaccgcggcgtcggcactcggaggaagataaaaaaattgatgtaatggtgacgaagacgagcattaagttattgggtgttcagtcctgcaacaggatgttggggtgaagaacacaatgaggggaagatgtaaatagtcgggttgctcatttttaagttataaactaatttatttttattttttgggaggtgggggtgggggaatttcctggtgttgcgtgtgaaatggcaattgattttcttgggtattcgaattgttacaaatgatcttgcgtgtcagcttttgaaatagtcgggtttctgatt

SEQ ID NO: 630 - DNA, 2186 bp, Zea Mays
gcggcggagagagcgtgctcttgctctgttggtgtgccgcttacttgctccaggaattggccttcgctgcatatacgtgaaggaattgggaaagttggtgttgtctgtgtgtccgtgttcatggccacggagctagagcctagagctttgcaagaaggttcaggcggaaaaagaataagctggctccaagataatggcatctcttactccaggaatactattaaaggttctaaaacatattaactctgatgtcaaagtatgtggagaataccggtccattcttctccaagttattagcatagtccctgcaataactggttcagaactttggccggaccatgggttctttatcaaagtttcagattcttcacactcaacttatgtttccttgtctaaggaggacaatgaactcatcttatcaaacaaactacaacttggacagtttatatatgttgagaaggtccagtcaagtatacctgttccggttcttgttggggtccgcccagttccaggaaggaacccttgcattggaaacccaaaggatttgatgcaaatgtcaactccctctggagttatggaagcactggatcatcaacggacaacttccaagtcagctgatctgtctgaaagtgaaaaggaaaatttgcagagaaaggtagttatcaaagagcagaagacagttgtcgcttcccgttacatgcttggggtgtcaagcaacaacgggaaaattaccaacctcaactccagcattgatagtgaaaaaagtaatggaggaagtaccatatctgaatcaaataaaaaatctgttgccctgaaagtcagacaagaggcaaaacctcaggaacggtcaaataatacatctcctagtaacgctaagttagtttccacaaagcaagaaattagcaaggacacacgcaagaatattggcacttcacctagtccaaatggttctgctgtagtcaagaagcaaatgccaaaggagagcaaaaaggaagttgctactgagagaagatcaccaccaaagcttcataggagttcgccaacaccagcgaggacttcaccaacaaagctcagtccagcagcaaagcagaatggaaactctggtccagtttcttctgtatctactgttaaaaaaagagttagtgaaactatctcttgggactccctcccaacaagcctaatcaattcaggaaaggctgttgtccggaggaagaacattgctcttattgtagcggctgaggctcaaagggaggctgctgcagctgcgtatcttgtaaaaggccttggaattttttctgagataagggaatcttctgaagtagatccacaagctgcaatcaccaagtttttcgagctgcacaggcttatcgttcagcaaagtgctgtctggaaagcttacactcctgagcctagcaaagaatctcgaccggagaaggaaaaaccgtcgaggaaagcttctgcatctcatcatcaccagaacaaagctggcacacgcgacacagctaagaatcccgaaggtgcccagggcagtgagaagacggaatgggcccgggaggacggtttcaaggagatctgcaggtcatggattgttctgaggaaagaatcgcggtcgtggtttctgagcttcctggaggatgcacttgaatcaggattcatgtccgagggccaaaccaccaagaacacgagagaacgcgtgcggggacaacccaaacccaagggtggggacgggaggatcgcggtcctgctgtcgcagctcaaggagacgagcaactggctcgatcagctgctgcaggacgaggcggacacttccgcggacggtttggccgaaaccgttgaccagctgaagcagaaggtgtacaaatgcttgcttggaacggtcgaaaccgcggcgtcggcactcggaggaagataaaaaaattgatgtaatggtgacgaagacgagcattaagttattgggtgttcagtcctgcaacaggatgttggggtgaagaacacaatgaggggaagatgtaaatagtcgggttgctcatttttaagttataaactaatttatttttattttttgggaggtgggggtgggggaatttcctggtgttgcgtgtgaaatggcaattgattttcttgggtattcgaattgttacaaatgatcttgcgtgtcagcttttgaaatagtcgggtttctgatt

SEQ ID NO: 631 - DNA, 2224 bp, Zea Mays
cttcgctgcatatgtttctcatttcctgaattctaagccaagaaacccctaaaggacaggctaccgcagcgggattttggaaggttcacaatcccttcgtcttcgtatgcagacgtgaaggaattgggaaagttggtgttgtctgtgtgtccgtgttcatggccacggagctagagcctagagctttgcaagaaggttcaggcggaaaaagaataagctggctccaagataatggcatctcttactccaggaatactattaaaggttctaaaacatattaactctgatgtcaaagtatgtggagaataccggtccattcttctccaagttattagcatagtccctgcaataactggttcagaactttggccggaccatgggttctttatcaaagtttcagattcttcacactcaacttatgtttccttgtctaaggaggacaatgaactcatcttatcaaacaaactacaacttggacagtttatatatgttgagaaggtccagtcaagtatacctgttccggttcttgttggggtccgcccagttccaggaaggaacccttgcattggaaacccaaaggatttgatgcaaatgtcaactccctctggagttatggaagcactggatcatcaacggacaacttccaagtcagctgatctgtctgaaagtgaaaaggaaaatttgcagagaaaggtagttatcaaagagcagaagacagttgtcgcttcccgttacatgcttggggtgtcaagcaacaacgggaaaattaccaacctcaactccagcattgatagtgaaaaaagtaatggaggaagtaccatatctgaatcaaataaaaaatctgttgccctgaaagtcagacaagaggcaaaacctcaggaacggtcaaataatacatctcctagtaacgctaagttagtttccacaaagcaagaaattagcaaggacacacgcaagaatattggcacttcacctagtccaaatggttctgctgtagtcaagaagcaaatgccaaaggagagcaaaaaggaagttgctactgagagaagatcaccaccaaagcttcataggagttcgccaacaccagcgaggacttcaccaacaaagctcagtccagcagcaaagcagaatggaaactctggtccagtttcttctgtatctactgttaaaaaaagagttagtgaaactatctcttgggactccctcccaacaagcctaatcaattcaggaaaggctgttgtccggaggaagaacattgctcttattgtagcggctgaggctcaaagggaggctgctgcagctgcgtatcttgtaaaaggccttggaattttttctgagataagggaatcttctgaagtagatccacaagctgcaatcaccaagtttttcgagctgcacaggcttatcgttcagcaaagtgctgtctggaaagcttacactcctgagcctagcaaagaatctcgaccggagaaggaaaaaccgtcgaggaaagcttctgcatctcatcatcaccagaacaaagctggcacacgcgacacagctaagaatcccgaaggtgcccagggcagtgagaagacggaatgggcccgggaggacggtttcaaggagatctgcaggtcatggattgttctgaggaaagaatcgcggtcgtggtttctgagcttcctggaggatgcacttgaatcaggattcatgtccgagggccaaaccaccaagaacacgagagaacgcgtgcggggacaacccaaacccaagggtggggacgggaggatcgcggtcctgctgtcgcagctcaaggagacgagcaactggctcgatcagctgctgcaggacgaggcggacacttccgcggacggtttggccgaaaccgttgaccagctgaagcagaaggtgtacaaatgcttgcttggaacggtcgaaaccgcggcgtcggcactcggaggaagataaaaaaattgatgtaatggtgacgaagacgagcattaagttattgggtgttcagtcctgcaacaggatgttggggtgaagaacacaatgaggggaagatgtaaatagtcgggttgctcatttttaagttataaactaatttatttttattttttgggaggtgggggtgggggaatttcctggtgttgcgtgtgaaatggcaattgattttcttgggtattcgaattgttacaaatgatcttgcgtgtcagcttttgaaatagtcgggtttctgatt

SEQ ID NO: 632 - DNA, 2245 bp, Zea Mays
gtcctttttccttttcctagaacctccacttatccagacattgtttgatgctgaacagcattattattgggtgtcttgctcttttcatctgtttggttggtgttccaatcatcttgacatctggccaggtttggatttttaggtgttacaggtccacagttatactagtaattacatgcctatattgctcctttatgtgtttctgaagctttaaccaatccatctttgtcctttcctcctttgaaaccatcggccgtatttttaagtaagccattactttcatggagcttaaccatcaattatctaacaattatttctttatattaggccaccatcaggaacacgcatgaatcctcatgcgcgacgcagcattatcagtaatgtggtggataatgcatctaaaattaacttctattactttttctttctttcacagaaaaagaataagctggctccaagataatggcatctcttactccaggaatactattaaaggttctaaaacatattaactctgatgtcaaagtatgtggagaataccggtccattcttctccaagttattagcatagtccctgcaataactggttcagaactttggccggaccatgggttctttatcaaagtttcagattcttcacactcaacttatgtttccttgtctaaggaggacaatgaactcatcttatcaaacaaactacaacttggacagtttatatatgttgagaaggtccagtcaagtatacctgttccggttcttgttggggtccgcccagttccaggaaggaacccttgcattggaaacccaaaggatttgatgcaaatgtcaactccctctggagttatggaagcactggatcatcaacggacaacttccaagtcagctgatctgtctgaaagtgaaaaggaaaatttgcagagaaaggtagttatcaaagagcagaagacagttgtcgcttcccgttacatgcttggggtgtcaagcaacaacgggaaaattaccaacctcaactccagcattgatagtgaaaaaagtaatggaggaagtaccatatctgaatcaaataaaaaatctgttgccctgaaagtcagacaagaggcaaaacctcagtcaagaagcaaatgccaaaggagagcaaaaaggaagttgctactgagagaagatcaccaccaaagcttcataggagttcgccaacaccagcgaggacttcaccaacaaagctcagtccagcagcaaagcagaatggaaactctggtccagtttcttctgtatctactgttaaaaaaagagttagtgaaactatctcttgggactccctcccaacaagcctaatcaattcaggaaagaattttttctgagataagggaatcttctgaagtagatccacaagctgcaatcaccaagtttttcgagctgcacaggcttatcgttcagcaaagtgctgtctggaaagcttacactcctgagcctagcaaagaatctcgaccggagaaggaaaaaccgtcgaggaaagcttctgcatctcatcatcaccagaacaaagctggcacacgcgacacagctaagaatcccgaaggtgcccagggcagtgagaagacggaatgggcccgggaggacggtttcaaggagatctgcaggtcatggattgttctgaggaaagaatcgcggtcgtggtttctgagcttcctggaggatgcacttgaatcaggattcatgtccgagggccaaaccaccaagaacacgagagaacgcgtgcggggacaacccaaacccaagggtggggacgggaggatcgcggtcctgctgtcgcagctcaaggagacgagcaactggctcgatcagctgctgcaggacgaggcggacacttccgcggacggtttggccgaaaccgttgaccagctgaagcagaaggtgtacaaatgcttgcttggaacggtcgaaaccgcggcgtcggcactcggaggaagataaaaaaattgatgtaatggtgacgaagacgagcattaagttattgggtgttcagtcctgcaacaggatgttggggtgaagaacacaatgaggggaagatgtaaatagtcgggttgctcatttttaagttataaactaatttatttttattttttgggaggtgggggtgggggaatttcctggtgttgcgtgtgaaatggcaattgattttcttgggtattcgaattgttacaaatgatcttgcgtgtcagcttttgaaatagtcgggtttctgatt

SEQ ID NO: 633 - DNA, 2070 bp, Zea Mays
gctcttttcatctgtttggttggtgttccaatcatcttgacatctggccagaaaaagaataagctggctccaagataatggcatctcttactccaggaatactattaaaggttctaaaacatattaactctgatgtcaaagtatgtggagaataccggtccattcttctccaagttattagcatagtccctgcaataactggttcagaactttggccggaccatgggttctttatcaaagtttcagattcttcacactcaacttatgtttccttgtctaaggaggacaatgaactcatcttatcaaacaaactacaacttggacagtttatatatgttgagaaggtccagtcaagtatacctgttccggttcttgttggggtccgcccagttccaggaaggaacccttgcattggaaacccaaaggatttgatgcaaatgtcaactccctctggagttatggaagcactggatcatcaacggacaacttccaagtcagctgatctgtctgaaagtgaaaaggaaaatttgcagagaaaggtagttatcaaagagcagaagacagttgtcgcttcccgttacatgcttggggtgtcaagcaacaacgggaaaattaccaacctcaactccagcattgatagtgaaaaaagtaatggaggaagtaccatatctgaatcaaataaaaaatctgttgccctgaaagtcagacaagaggcaaaacctcaggaacggtcaaataatacatctcctagtaacgctaagttagtttccacaaagcaagaaattagcaaggacacacgcaagaatattggcacttcacctagtccaaatggttctgctgtagtcaagaagcaaatgccaaaggagagcaaaaaggaagttgctactgagagaagatcaccaccaaagcttcataggagttcgccaacaccagcgaggacttcaccaacaaagctcagtccagcagcaaagcagaatggaaactctggtccagtttcttctgtatctactgttaaaaaaagagttagtgaaactatctcttgggactccctcccaacaagcctaatcaattcaggaaaggctgttgtccggaggaagaacattgctcttattgtagcggctgaggctcaaagggaggctgctgcagctgcgtatcttgtaaaaggccttggaattttttctgagataagggaatcttctgaagtagatccacaagctgcaatcaccaagtttttcgagctgcacaggcttatcgttcagcaaagtgctgtctggaaagcttacactcctgagcctagcaaagaatctcgaccggagaaggaaaaaccgtcgaggaaagcttctgcatctcatcatcaccagaacaaagctggcacacgcgacacagctaagaatcccgaaggtgcccagggcagtgagaagacggaatgggcccgggaggacggtttcaaggagatctgcaggtcatggattgttctgaggaaagaatcgcggtcgtggtttctgagcttcctggaggatgcacttgaatcaggattcatgtccgagggccaaaccaccaagaacacgagagaacgcgtgcggggacaacccaaacccaagggtggggacgggaggatcgcggtcctgctgtcgcagctcaaggagacgagcaactggctcgatcagctgctgcaggacgaggcggacacttccgcggacggtttggccgaaaccgttgaccagctgaagcagaaggtgtacaaatgcttgcttggaacggtcgaaaccgcggcgtcggcactcggaggaagataaaaaaattgatgtaatggtgacgaagacgagcattaagttattgggtgttcagtcctgcaacaggatgttggggtgaagaacacaatgaggggaagatgtaaatagtcgggttgctcatttttaagttataaactaatttatttttattttttgggaggtgggggtgggggaatttcctggtgttgcgtgtgaaatggcaattgattttcttgggtattcgaattgttacaaatgatcttgcgtgtcagcttttgaaatagtcgggtttctgatt

SEQ ID NO: 634 - DNA, 2029 bp, Zea Mays
atggcatctcttactccaggaatactattaaaggttctaaaacatattaactctgatgtcaaagtatgtggagaataccggtccattcttctccaagttattagcatagtccctgcaataactggttcagaactttggccggaccatgggttctttatcaaagtttcagattcttcacactcaacttatgtttccttgtctaaggaggacaatgaactcatcttatcaaacaaactacaacttggacagtttatatatgttgagaaggtccagtcaagtatacctgttccggttcttgttggggtccgcccagttccaggaaggaacccttgcattggaaacccaaaggatttgatgcaaatgtcaactccctctggagttatggaagcactggatcatcaacggacaacttccaagtcagctgatctgtctgaaagtgaaaaggaaaatttgcagagaaaggtagttatcaaagagcagaagacagttgtcgcttcccgttacatgcttggggtgtcaagcaacaacgggaaaattaccaacctcaactccagcattgatagtgaaaaaagtaatggaggaagtaccatatctgaatcaaataaaaaatctgttgccctgaaagtcagacaagaggcaaaacctcagggtaaaaaaaacccgatgcttgatgattactttcaggaacggtcaaataatacatctcctagtaacgctaagttagtttccacaaagcaagaaattagcaaggacacacgcaagaatattggcacttcacctagtccaaatggttctgctgtagtcaagaagcaaatgccaaaggagagcaaaaaggaagttgctactgagagaagatcaccaccaaagcttcataggagttcgccaacaccagcgaggacttcaccaacaaagctcagtccagcagcaaagcagaatggaaactctggtccagtttcttctgtatctactgttaaaaaaagagttagtgaaactatctcttgggactccctcccaacaagcctaatcaattcaggaaaggctgttgtccggaggaagaacattgctcttattgtagcggctgaggctcaaagggaggctgctgcagctgcgtatcttgtaaaaggccttggaattttttctgagataagggaatcttctgaagtagatccacaagctgcaatcaccaagtttttcgagctgcacaggcttatcgttcagcaaagtgctgtctggaaagcttacactcctgagcctagcaaagaatctcgaccggagaaggaaaaaccgtcgaggaaagcttctgcatctcatcatcaccagaacaaagctggcacacgcgacacagctaagaatcccgaaggtgcccagggcagtgagaagacggaatgggcccgggaggacggtttcaaggagatctgcaggtcatggattgttctgaggaaagaatcgcggtcgtggtttctgagcttcctggaggatgcacttgaatcaggattcatgtccgagggccaaaccaccaagaacacgagagaacgcgtgcggggacaacccaaacccaagggtggggacgggaggatcgcggtcctgctgtcgcagctcaaggagacgagcaactggctcgatcagctgctgcaggacgaggcggacacttccgcggacggtttggccgaaaccgttgaccagctgaagcagaaggtgtacaaatgcttgcttggaacggtcgaaaccgcggcgtcggcactcggaggaagataaaaaaattgatgtaatggtgacgaagacgagcattaagttattgggtgttcagtcctgcaacaggatgttggggtgaagaacacaatgaggggaagatgtaaatagtcgggttgctcatttttaagttataaactaatttatttttattttttgggaggtgggggtgggggaatttcctggtgttgcgtgtgaaatggcaattgattttcttgggtattcgaattgttacaaatgatcttgcgtgtcagcttttgaaatagtcgggtttctgatt

SEQ ID NO: 635 - DNA, 3613 bp, Zea Mays
ccacctccttcctctccgcatctccagaaaaatccattattttattcctagtatttagcctcgcggcctcgcctattgttggcacatgtcttcccgcggccgttgtttacgcagaatcctcctgttccactcctcgccaaatgtcttttgttagagttcatatgaaatttctggtcgttcaattttagatcgatttctttacggcgtattttgattgcatcgcgaccggctccggagccatccggtcataagaccgtaccaacgcatttctttggtttgaggtgcgggacggcgggcgccgaacggtcgtgtgccgtagatccaaagtcgcgggaaatctctggtcgaggagtcgatttggatccgtttatcgctagtttggtcgtcgttgatctgaaaggtggagctttggtcgattttctcttccagaagcatttgtgtttctgaggtgctaaggtgctatatctgaagcagccgacgaggagctgagtctttgattttttttttaccaatttctgtcgtcgtttgttgatctgatccgatggaggctatgacgggtggcaaattccttcaaaagtttcggctctacgaaaccagatcgaaattttatcttattggaagagacaagagcaggattcactggagggtgctaaaaattgatcggtcggagttcactgagttgggtgtcgaggaggatccaactatttacacagagaatgaatgccaagaactgcttcggcggatccatgaggggaacaggttgaccggtggactgaaatttgtcacaaaatgttacggaatagttggttttgtaaagtttcttggtccttattacatggttataataaccaggagaaggaaaattggcacaatatgtggccatgaaatttattccgttggcaagagcgaaatgattgcaattccgagtgttacagtctggcccaacatggcttattctagggatgaaaacagatataagcacctgctttgctcagttgatctttcgaaggatttcttcttcagctactcttacaacatcatgcacagccttcagaagaacataaccgagaagaacattgggcaggtttatgaaacaatgtgtgtatggaatgaatttatgacacgagcaattcgggatcatctcatgaatacctgttggactgttgctttagtccatggattttttaagcagtttgagctgtttggggctttcctgagttgaaacctttgctttcaaggttctctgtgtctgggaaggatttttggctgacgcttatagctaggcgctcacgccattttgctgggaccagattcttgaaacgtggtgttaatggaaagggcagggtagccaatgatgttgagactgaacagattgtttttgaagacacatctggtggaatcccaactcagatggcttctgttgtacaacatagaggatcgatacctcttgtctggtttcaggaaacttcaagacttaatattagaccagatattatattaaaacctgatctggactacaaggcaacccgccttcattttgagaaccttgcacttagatatgggaatccaataatcatattgaacttaataaagacccacgagaagaagccccgtgaatctctgctctgtgcagaatttgcaaaggctattcattacattaacaagagcctatctgatgacaagtgtctaaaatttctgcacatggatctgagtaatctttttcgaaggaaaggcaccaatgtgcttgcactgttgagcaaggtggcatcagatgtgttggatctaactgaattcctccactgcgaaataagtacatcaacaaaatctgatgacatctcaagtgaagaaaaaactgttgccaaaccacgtgatgacagaagtagcagagatcaaactgaatgtgcagctaaggcgtcaacttcatgcactgggacttgctgaagcacataaaattgaattgcatgatcctctggttgatgatctgatggatttctatgaacggatgggtgatacattagctattcagtatggtggctctgctgctcacaacaagatcttctgtgagcaaaggggccaatggaaggcaacaacccaatctcaggagttccttcgaacccttcaacgctactacaataacgcctacactgatcacgagaagcaggatgctataaacatgttcttaggtcatttccaacctcagcaagggaaacctgcattgtggaagctggactcagatcagcattacaacattgggaggcaaggaactttaaaagaagagattggaagatcattcataaagaggtcactatcagatggtaacatactgttggagagcagcttgcctgtaactatctgtaacaatgaaacagacaacacagaattgctcccagtgcaacagctggatgatattagagaagcttctgattctgcgccagagatctccatatgcgaacctaacctgtgctccagtatgaactatggcacagtgcctggaagacactccatgtcagaagagcggcagagttatttgaaaagattaggttaccctgaattgcactcttcaaatttctttgaccttgatttgttgtcatcttcaggaaattcgtttgacgaggaagtttttgagaggtcattactgatcaattcacctatggatgtgatcagtcctgaatcatctatgtcatacagtgaacaaggacacactgatgagggaagagatgacacggatctttcccgttctagcagccagctctcagacattcgggactactctgaccactttgcgcagtgggtcgtgaatggagacacgctttgctactaggccctggacttttgtcttggtgacagctcagtagatgtgacacggcaggaaatggaagtctgacggatagagcagatgaaatggctgacgactagccgggctaggtgccgtgcatctacctgcagaggcggcgtagcagaagaggtggtggacatgggagaagtctcgcatcggcatgcttgtggtcactggaaggcttgaacgatgaacgctgatattcgtcggatgcagctttcggtggggtacatgattcaatttgctatggtgaaaattttgaccgtagcttagacaataaataggcaaaatatatctgttcttttagtttagcttaccttgcgtttcccttctccatagaaaagtatcaaaaggaaaaacaatggaaaatctattaggaaaaggaaaaaacaaacaaaccataggtaaagaacacttctgttgtaaatagttagtttgctacagaagtataaatatctggtacttgttgggtttcttggcggtgtctgtttcataattgtttctgtgaaaaagctgaaagaaactcggtatgtcttttaatatgcaccatttttgcttgaggactctccatgacattgcgcagagaggagtgcaagaacttgaatgtctcatgcttctcttgcggtggacatccacgtcgatgacaaaattctagtatatggtacgtagttcattcgaaaggtgcaaggtatccaatttagttttggatatctagagttcacaagatagtacttatctgaaaaatgaaatcaaattaccattgcaaaatataaataa

SEQ ID NO: 636 - DNA, 3473 bp, Zea Mays
cttcctctccgcatctccagaaaaatccattattttattcctagtatttagcctcgcggcctcgcctattgttggcacatgtcttcccgcggccgttgtttacgcagaatcctcctgttccactcctcgccaaatgtcttttgttagagttcatatgaaatttctggtcgttcaattttagatcgatttctttacggcgtattttgattgcatcgcgaccggctccggagccatccggtcataagaccgtaccaacgcatttctttggtttgaggtgcgggacggcgggcgccgaacggtcgtgtgccgtagatccaaagtcgcgggaaatctctggtcgaggagtcgatttggatccgtttatcgctagtttggtcgtcgttgatctgaaaggtggagctttggtcgattttctcttccagaagcatttgtgtttctgaggtgctaaggtgctatatctgaagcagccgacgaggagctgagtctttgattttttttttaccaatttctgtcgtcgtttgttgatctgatccgatggaggctatgacgggtggcaaattccttcaaaagtttcggctctacgaaaccagatcgaaattttatcttattggaagagacaagagcaggattcactggagggtgctaaaaattgatcggtcggagttcactgagttgggtgtcgaggaggatccaactatttacacagagaatgaatgccaagaactgcttcggcggatccatgaggggaacaggttgaccggtggactgaaatttgtcacaaaatgttacggaatagttggttttgtaaagtttcttggtccttattacatggttataataaccaggagaaggaaaattggcacaatatgtggccatgaaatttattccgttggcaagagcgaaatgattgcaattccgagtgttacagtctggcccaacatggcttattctagggatgaaaacagatataagcacctgctttgctcagttgatctttcgaaggatttcttcttcagctactcttacaacatcatgcacagccttcagaagaacataaccgagaagaacattgggcaggtttatgaaacaatgtgtgtatggaatgaatttatgacacgagcaattcgggatcatctcatgaatacctgttggactgttgctttagtccatggattttttaagcagtcaaggttctctgtgtctgggaaggatttttggctgacgcttatagctaggcgctcacgccattttgctgggaccagattcttgaaacgtggtgttaatggaaagggcagggtagccaatgatgttgagactgaacagattgtttttgaagacacatctggtggaatcccaactcagatggcttctgttgtacaacatagaggatcgatacctcttgtctggtttcaggaaacttcaagacttaatattagaccagatattatattaaaacctgatctggactacaaggcaacccgccttcattttgagaaccttgcacttagatatgggaatccaataatcatattgaacttaataaagacccacgagaagaagccccgtgaatctctgctctgtgcagaatttgcaaaggctattcattacattaacaagagcctatctgatgacaagtgtctaaaatttctgcacatggatctgagtaatctttttcgaaggaaaggcaccaatgtgcttgcactgttgagcaaggtggcatcagatgtgttggatctaactgaattcctccactgcgaaataagtacatcaacaaaatctgatgacatctcaagtgaagaaaaaactgttgccaaaccacgtgatgacagaagtagcagagatcaaactgaatgtgcagctaaggcgtcaacttcatgcactgggacttgctgaagcacataaaattgaattgcatgatcctctggttgatgatctgatggatttctatgaacggatgggtgatacattagctattcagtatggtggctctgctgctcacaacaagatcttctgtgagcaaaggggccaatggaaggcaacaacccaatctcaggagttccttcgaacccttcaacgctactacaataacgcctacactgatcacgagaagcaggatgctataaacatgttcttaggtcatttccaacctcagcaagggaaacctgcattgtggaagctggactcagatcagcattacaacattgggaggcaaggaactttaaaagaagagattggaagatcattcataaagaggtcactatcagatggtaacatactgttggagagcagcttgcctgtaactatctgtaacaatgaaacagacaacacagaattgctcccagtgcaacagctggatgatattagagaagcttctgattctgcgccagagatctccatatgcgaacctaacctgtgctccagtatgaactatggcacagtgcctggaagacactccatgaaattcgtttgacgaggaagtttttgagaggtcattactgatcaattcacctatggatgtgatcagtcctgaatcatctatgtcatacagtgaacaaggacacactgatgagggaagagatgacacggatctttcccgttctagcagccagctctcagacattcgggactactctgaccactttgcgcagtgggtcgtgaatggagacacgctttgctactaggccctggacttttgtcttggtgacagctcagtagatgtgacacggcaggaaatggaagtctgacggatagagcagatgaaatggctgacgactagccgggctaggtgccgtgcatctacctgcagaggcggcgtagcagaagaggtggtggacatgggagaagtctcgcatcggcatgcttgtggtcactggaaggcttgaacgatgaacgctgatattcgtcggatgcagctttcggtggggtacatgattcaatttgctatggtgaaaattttgaccgtagcttagacaataaataggcaaaatatatctgttcttttagtttagcttaccttgcgtttcccttctccatagaaaagtatcaaaaggaaaaacaatggaaaatctattaggaaaaggaaaaaacaaacaaaccataggtaaagaacacttctgttgtaaatagttagtttgctacagaagtataaatatctggtacttgttgggtttcttggcggtgtctgtttcataattgtttctgtgaaaaagctgaaagaaactcggtatgtcttttaatatgcaccatttttgcttgaggactctccatgacattgcgcagagaggagtgcaagaacttgaatgtctcatgcttctcttgcggtggacatccacgtcgatgacaaaattctagtatatggtacgtagttcattcgaaaggtgcaaggtatccaatttagttttggatatctagagttcacaagatagtacttatctgaaaaatgaaatcaaattaccattgcaaaatataaataa

SEQ ID NO: 637 - DNA, 4069 bp, Zea Mays
gcctcgcctattgttggcacatgtcttcccgcggccgttgtttacgcagaatcctcctgttccactcctcgccaaatgtcttttgttagagttcatatgaaatttctggtcgttcaattttagatcgatttctttacggcgtattttgattgcatcgcgaccggctccggagccatccggtcataagaccgtaccaacgcatttctttggtttgaggtgcgggacggcgggcgccgaacggtcgtgtgccgtagatccaaagtcgcgggaaatctctggtcgaggagtcgatttggatccgtttatcgctagtttggtcgtcgttgatctgaaaggtggagctttggtcgattttctcttccagaagcatttgtgtttctgaggtgctaaggtgctatatctgaagcagccgacgaggagctgagtctttgattttttttttaccaatttctgtcgtcgtttgttgatctgatccgatggaggctatgacgggtggcaaattccttcaaaagtttcggctctacgaaaccagatcgaaattttatcttattggaagagacaagagcaggattcactggagggtgctaaaaattgatcggtcggagttcactgagttgggtgtcgaggaggatccaactatttacacagagaatgaatgccaagaactgcttcggcggatccatgaggggaacaggttgaccggtggactgaaatttgtcacaaaatgttacggaatagttggttttgtaaagtttcttggtccttattacatggttataataaccaggagaaggaaaattggcacaatatgtggccatgaaatttattccgttggcaagagcgaaatgattgcaattccgagtgttacagtctggcccaacatggcttattctagggatgaaaacagatataagcacctgctttgctcagttgatctttcgaaggatttcttcttcagctactcttacaacatcatgcacagccttcagaagaacataaccgagaagaacattgggcaggtttatgaaacaatgtgtgtatggaatgaatttatgacacgagcaattcgggatcatctcatgaatacctgttggactgttgctttagtccatggattttttaagcaggtatattcttctgcggtaattaacttaaaagttcttttgctagtgtgttaatcaatccttcctttaacattctgattcatcattgaagaccacaagtagactgctgctaactcaacgacatcccactaacttacgcgttttactccatgtctcatgacctgttatatagtgaaagcttgaaacaaggtttgcaaaggcatgactttgtataacctgctgacatttttcagtttgagctgtttggggctttcctgagttgaaacctttgcttgtaagtctcagcagactgttattatttttattcaattcttctaatccatcttttatacatcttgctgatacagagtaacatcatatagtgttaacttttttgccctgatgcttcattatgaaattccattgctgtattttagccattttgatttttctcacaagtgttgggcactgtttcttgatcctagtcgaaggacaacaaaagcatctaaaaaatggcagtcctgaatacatatgcaaattaagtgccatatgaagacatgctaatacatttgttttggcgtgacagtcaaggttctctgtgtctgggaaggatttttggctgacgcttatagctaggcgctcacgccattttgctgggaccagattcttgaaacgtggtgttaatggaaagggcagggtagccaatgatgttgagactgaacagattgtttttgaagacacatctggtggaatcccaactcagatggcttctgttgtacaacatagaggatcgatacctcttgtctggtttcaggaaacttcaagacttaatattagaccagatattatattaaaacctgatctggactacaaggcaacccgccttcattttgagaaccttgcacttagatatgggaatccaataatcatattgaacttaataaagacccacgagaagaagccccgtgaatctctgctctgtgcagaatttgcaaaggctattcattacattaacaagagcctatctgatgacaagtgtctaaaatttctgcacatggatctgagtaatctttttcgaaggaaaggcaccaatgtgcttgcactgttgagcaaggtggcatcagatgtgttggatctaactgaattcctccactgcgaaataagtacatcaacaaaatctgatgacatctcaagtgaagaaaaaactgttgccaaaccacgtgatgacagaagtagcagagatcaaactgaatgtgcagctaaggcgtcaacttcatgcactgggacttgctgaagcacataaaattgaattgcatgatcctctggttgatgatctgatggatttctatgaacggatgggtgatacattagctattcagtatggtggctctgctgctcacaacaagatcttctgtgagcaaaggggccaatggaaggcaacaacccaatctcaggagttccttcgaacccttcaacgctactacaataacgcctacactgatcacgagaagcaggatgctataaacatgttcttaggtcatttccaacctcagcaagggaaacctgcattgtggaagctggactcagatcagcattacaacattgggaggcaaggaactttaaaagaagagattggaagatcattcataaagaggtcactatcagatggtaacatactgttggagagcagcttgcctgtaactatctgtaacaatgaaacagacaacacagaattgctcccagtgcaacagctggatgatattagagaagcttctgattctgcgccagagatctccatatgcgaacctaacctgtgctccagtatgaactatggcacagtgcctggaagacactccatgtcagaagagcggcagagttatttgaaaagattaggttaccctgaattgcactcttcaaatttctttgaccttgatttgttgtcatcttcaggaaattcgtttgacgaggaagtttttgagaggtcattactgatcaattcacctatggatgtgatcagtcctgaatcatctatgtcatacagtgaacaaggacacactgatgagggaagagatgacacggatctttcccgttctagcagccagctctcagacattcgggactactctgaccactttgcgcagtgggtcgtgaatggagacacgctttgctactaggccctggacttttgtcttggtgacagctcagtagatgtgacacggcaggaaatggaagtctgacggatagagcagatgaaatggctgacgactagccgggctaggtgccgtgcatctacctgcagaggcggcgtagcagaagaggtggtggacatgggagaagtctcgcatcggcatgcttgtggtcactggaaggcttgaacgatgaacgctgatattcgtcggatgcagctttcggtggggtacatgattcaatttgctatggtgaaaattttgaccgtagcttagacaataaataggcaaaatatatctgttcttttagtttagcttaccttgcgtttcccttctccatagaaaagtatcaaaaggaaaaacaatggaaaatctattaggaaaaggaaaaaacaaacaaaccataggtaaagaacacttctgttgtaaatagttagtttgctacagaagtataaatatctggtacttgttgggtttcttggcggtgtctgtttcataattgtttctgtgaaaaagctgaaagaaactcggtatgtcttttaatatgcaccatttttgcttgaggactctccatgacattgcgcagagaggagtgcaagaacttgaatgtctcatgcttctcttgcggtggacatccacgtcgatgacaaaattctagtatatggtacgtagttcattcgaaaggtgcaaggtatccaatttagttttggatatctagagttcacaagatagtacttatctgaaaaatgaaatcaaattaccattgcaaaatataaataa

SEQ ID NO: 638 - DNA, 3778 bp, Zea Mays
gcctcgcctattgttggcacatgtcttcccgcggccgttgtttacgcagaatcctcctgttccactcctcgccaaatgtcttttgttagagttcatatgaaatttctggtcgttcaattttagatcgatttctttacggcgtattttgattgcatcgcgaccggctccggagccatccggtcataagaccgtaccaacgcatttctttggtttgaggtgcgggacggcgggcgccgaacggtcgtgtgccgtagatccaaagtcgcgggaaatctctggtcgaggagtcgatttggatccgtttatcgctagtttggtcgtcgttgatctgaaaggtggagctttggtcgattttctcttccagaagcatttgtgtttctgaggtgctaaggtgctatatctgaagcagccgacgaggagctgagtctttgattttttttttaccaatttctgtcgtcgtttgttgatctgatccgatggaggctatgacgggtggcaaattccttcaaaagtttcggctctacgaaaccagatcgaaattttatcttattggaagagacaagagcaggattcactggagggtgctaaaaattgatcggtcggagttcactgagttgggtgtcgaggaggatccaactatttacacagagaatgaatgccaagaactgcttcggcggatccatgaggggaacaggttgaccggtggactgaaatttgtcacaaaatgttacggaatagttggttttgtaaagtttcttggtccttattacatggttataataaccaggagaaggaaaattggcacaatatgtggccatgaaatttattccgttggcaagagcgaaatgattgcaattccgagtgttacagtctggcccaacatggcttattctagggatgaaaacagatataagcacctgctttgctcagttgatctttcgaaggatttcttcttcagctactcttacaacatcatgcacagccttcagaagaacataaccgagaagaacattgggcaggtttatgaaacaatgtgtgtatggaatgaatttatgacacgagcaattcgggatcatctcatgaatacctgttggactgttgctttagtccatggattttttaagcaggtatattcttctgcggtaattaacttaaaagttcttttgctagtgtgttaatcaatccttcctttaacattctgattcatcattgaagaccacaagtagactgctgctaactcaacgacatcccactaacttacgcgttttactccatgtctcatgacctgttatatagtgaaagcttgaaacaaggtttgcaaaggcatgactttgtataacctgctgacatttttcagtttgagctgtttggggctttcctgagttgaaacctttgctttcaaggttctctgtgtctgggaaggatttttggctgacgcttatagctaggcgctcacgccattttgctgggaccagattcttgaaacgtggtgttaatggaaagggcagggtagccaatgatgttgagactgaacagattgtttttgaagacacatctggtggaatcccaactcagatggcttctgttgtacaacatagaggatcgatacctcttgtctggtttcaggaaacttcaagacttaatattagaccagatattatattaaaacctgatctggactacaaggcaacccgccttcattttgagaaccttgcacttagatatgggaatccaataatcatattgaacttaataaagacccacgagaagaagccccgtgaatctctgctctgtgcagaatttgcaaaggctattcattacattaacaagagcctatctgatgacaagtgtctaaaatttctgcacatggatctgagtaatctttttcgaaggaaaggcaccaatgtgcttgcactgttgagcaaggtggcatcagatgtgttggatctaactgaattcctccactgcgaaataagtacatcaacaaaatctgatgacatctcaagtgaagaaaaaactgttgccaaaccacgtgatgacagaagtagcagagatcaaactgaatgtgcagctaaggcgtcaacttcatgcactgggacttgctgaagcacataaaattgaattgcatgatcctctggttgatgatctgatggatttctatgaacggatgggtgatacattagctattcagtatggtggctctgctgctcacaacaagatcttctgtgagcaaaggggccaatggaaggcaacaacccaatctcaggagttccttcgaacccttcaacgctactacaataacgcctacactgatcacgagaagcaggatgctataaacatgttcttaggtcatttccaacctcagcaagggaaacctgcattgtggaagctggactcagatcagcattacaacattgggaggcaaggaactttaaaagaagagattggaagatcattcataaagaggtcactatcagatggtaacatactgttggagagcagcttgcctgtaactatctgtaacaatgaaacagacaacacagaattgctcccagtgcaacagctggatgatattagagaagcttctgattctgcgccagagatctccatatgcgaacctaacctgtgctccagtatgaactatggcacagtgcctggaagacactccatgtcagaagagcggcagagttatttgaaaagattaggttaccctgaattgcactcttcaaatttctttgaccttgatttgttgtcatcttcaggaaattcgtttgacgaggaagtttttgagaggtcattactgatcaattcacctatggatgtgatcagtcctgaatcatctatgtcatacagtgaacaaggacacactgatgagggaagagatgacacggatctttcccgttctagcagccagctctcagacattcgggactactctgaccactttgcgcagtgggtcgtgaatggagacacgctttgctactaggccctggacttttgtcttggtgacagctcagtagatgtgacacggcaggaaatggaagtctgacggatagagcagatgaaatggctgacgactagccgggctaggtgccgtgcatctacctgcagaggcggcgtagcagaagaggtggtggacatgggagaagtctcgcatcggcatgcttgtggtcactggaaggcttgaacgatgaacgctgatattcgtcggatgcagctttcggtggggtacatgattcaatttgctatggtgaaaattttgaccgtagcttagacaataaataggcaaaatatatctgttcttttagtttagcttaccttgcgtttcccttctccatagaaaagtatcaaaaggaaaaacaatggaaaatctattaggaaaaggaaaaaacaaacaaaccataggtaaagaacacttctgttgtaaatagttagtttgctacagaagtataaatatctggtacttgttgggtttcttggcggtgtctgtttcataattgtttctgtgaaaaagctgaaagaaactcggtatgtcttttaatatgcaccatttttgcttgaggactctccatgacattgcgcagagaggagtgcaagaacttgaatgtctcatgcttctcttgcggtggacatccacgtcgatgacaaaattctagtatatggtacgtagttcattcgaaaggtgcaaggtatccaatttagttttggatatctagagttcacaagatagtacttatctgaaaaatgaaatcaaattaccattgcaaaatataaataa

SEQ ID NO: 639 - DNA, 2747 bp, Zea Mays
cctttccctgcaaatgtggagtggctgcttcaaacccatgacctggtgactcagtgagagctctcatcactacacaaggcctgcccttcgattgcacagcaatacaatataagcacctgctttgctcagttgatctttcgaaggatttcttcttcagctactcttacaacatcatgcacagccttcagaagaacataaccgagaagaacattgggcaggtttatgaaacaatgtgtgtatggaatgaatttatgacacgagcaattcgggatcatctcatgaatacctgttggactgttgctttagtccatggattttttaagcagtttgagctgtttggggctttcctgagttgaaacctttgctttcaaggttctctgtgtctgggaaggatttttggctgacgcttatagctaggcgctcacgccattttgctgggaccagattcttgaaacgtggtgttaatggaaagggcagggtagccaatgatgttgagactgaacagattgtttttgaagacacatctggtggaatcccaactcagatggcttctgttgtacaacatagaggatcgatacctcttgtctggtttcaggaaacttcaagacttaatattagaccagatattatattaaaacctgatctggactacaaggcaacccgccttcattttgagaaccttgcacttagatatgggaatccaataatcatattgaacttaataaagacccacgagaagaagccccgtgaatctctgctctgtgcagaatttgcaaaggctattcattacattaacaagagcctatctgatgacaagtgtctaaaatttctgcacatggatctgagtaatctttttcgaaggaaaggcaccaatgtgcttgcactgttgagcaaggtggcatcagatgtgttggatctaactgaattcctccactgcgaaataagtacatcaacaaaatctgatgacatctcaagtgaagaaaaaactgttgccaaaccacgtgatgacagaagtagcagagatcaaactgaatgtgcagctaaggcgtcaacttcatgcactgggacttgctgaagcacataaaattgaattgcatgatcctctggttgatgatctgatggatttctatgaacggatgggtgatacattagctattcagtatggtggctctgctgctcacaacaagatcttctgtgagcaaaggggccaatggaaggcaacaacccaatctcaggagttccttcgaacccttcaacgctactacaataacgcctacactgatcacgagaagcaggatgctataaacatgttcttaggtcatttccaacctcagcaagggaaacctgcattgtggaagctggactcagatcagcattacaacattgggaggcaaggaactttaaaagaagagattggaagatcattcataaagaggtcactatcagatggtaacatactgttggagagcagcttgcctgtaactatctgtaacaatgaaacagacaacacagaattgctcccagtgcaacagctggatgatattagagaagcttctgattctgcgccagagatctccatatgcgaacctaacctgtgctccagtatgaactatggcacagtgcctggaagacactccatgtcagaagagcggcagagttatttgaaaagattaggttaccctgaattgcactcttcaaatttctttgaccttgatttgttgtcatcttcaggaaattcgtttgacgaggaagtttttgagaggtcattactgatcaattcacctatggatgtgatcagtcctgaatcatctatgtcatacagtgaacaaggacacactgatgagggaagagatgacacggatctttcccgttctagcagccagctctcagacattcgggactactctgaccactttgcgcagtgggtcgtgaatggagacacgctttgctactaggccctggacttttgtcttggtgacagctcagtagatgtgacacggcaggaaatggaagtctgacggatagagcagatgaaatggctgacgactagccgggctaggtgccgtgcatctacctgcagaggcggcgtagcagaagaggtggtggacatgggagaagtctcgcatcggcatgcttgtggtcactggaaggcttgaacgatgaacgctgatattcgtcggatgcagctttcggtggggtacatgattcaatttgctatggtgaaaattttgaccgtagcttagacaataaataggcaaaatatatctgttcttttagtttagcttaccttgcgtttcccttctccatagaaaagtatcaaaaggaaaaacaatggaaaatctattaggaaaaggaaaaaacaaacaaaccataggtaaagaacacttctgttgtaaatagttagtttgctacagaagtataaatatctggtacttgttgggtttcttggcggtgtctgtttcataattgtttctgtgaaaaagctgaaagaaactcggtatgtcttttaatatgcaccatttttgcttgaggactctccatgacattgcgcagagaggagtgcaagaacttgaatgtctcatgcttctcttgcggtggacatccacgtcgatgacaaaattctagtatatggtacgtagttcattcgaaaggtgcaaggtatccaatttagttttggatatctagagttcacaagatagtacttatctgaaaaatgaaatcaaattaccattgcaaaatataaataa

SEQ ID NO: 640 - DNA, 1582 bp, Zea Mays
ttccatcaatagatagaagaagatcttctgtgagcaaaggggccaatggaaggcaacaacccaatctcaggagttccttcgaacccttcaacgctactacaataacgcctacactgatcacgagaagcaggatgctataaacatgttcttaggtcatttccaacctcagcaagggaaacctgcattgtggaagctggactcagatcagcattacaacattgggaggcaaggaactttaaaagaagagattggaagatcattcataaagaggtcactatcagatggtaacatactgttggagagcagcttgcctgtaactatctgtaacaatgaaacagacaacacagaattgctcccagtgcaacagctggatgatattagagaagcttctgattctgcgccagagatctccatatgcgaacctaacctgtgctccagtatgaactatggcacagtgcctggaagacactccatgtcagaagagcggcagagttatttgaaaagattaggttaccctgaattgcactcttcaaatttctttgaccttgatttgttgtcatcttcaggaaattcgtttgacgaggaagtttttgagaggtcattactgatcaattcacctatggatgtgatcagtcctgaatcatctatgtcatacagtgaacaaggacacactgatgagggaagagatgacacggatctttcccgttctagcagccagctctcagacattcgggactactctgaccactttgcgcagtgggtcgtgaatggagacacgctttgctactaggccctggacttttgtcttggtgacagctcagtagatgtgacacggcaggaaatggaagtctgacggatagagcagatgaaatggctgacgactagccgggctaggtgccgtgcatctacctgcagaggcggcgtagcagaagaggtggtggacatgggagaagtctcgcatcggcatgcttgtggtcactggaaggcttgaacgatgaacgctgatattcgtcggatgcagctttcggtggggtacatgattcaatttgctatggtgaaaattttgaccgtagcttagacaataaataggcaaaatatatctgttcttttagtttagcttaccttgcgtttcccttctccatagaaaagtatcaaaaggaaaaacaatggaaaatctattaggaaaaggaaaaaacaaacaaaccataggtaaagaacacttctgttgtaaatagttagtttgctacagaagtataaatatctggtacttgttgggtttcttggcggtgtctgtttcataattgtttctgtgaaaaagctgaaagaaactcggtatgtcttttaatatgcaccatttttgcttgaggactctccatgacattgcgcagagaggagtgcaagaacttgaatgtctcatgcttctcttgcggtggacatccacgtcgatgacaaaattctagtatatggtacgtagttcattcgaaaggtgcaaggtatccaatttagttttggatatctagagttcacaagatagtacttatctgaaaaatgaaatcaaattaccattgcaaaatataaataa

SEQ ID NO: 641 - DNA, 1568 bp, Zea Mays
cataccagatcttctgtgagcaaaggggccaatggaaggcaacaacccaatctcaggagttccttcgaacccttcaacgctactacaataacgcctacactgatcacgagaagcaggatgctataaacatgttcttaggtcatttccaacctcagcaagggaaacctgcattgtggaagctggactcagatcagcattacaacattgggaggcaaggaactttaaaagaagagattggaagatcattcataaagaggtcactatcagatggtaacatactgttggagagcagcttgcctgtaactatctgtaacaatgaaacagacaacacagaattgctcccagtgcaacagctggatgatattagagaagcttctgattctgcgccagagatctccatatgcgaacctaacctgtgctccagtatgaactatggcacagtgcctggaagacactccatgtcagaagagcggcagagttatttgaaaagattaggttaccctgaattgcactcttcaaatttctttgaccttgatttgttgtcatcttcaggaaattcgtttgacgaggaagtttttgagaggtcattactgatcaattcacctatggatgtgatcagtcctgaatcatctatgtcatacagtgaacaaggacacactgatgagggaagagatgacacggatctttcccgttctagcagccagctctcagacattcgggactactctgaccactttgcgcagtgggtcgtgaatggagacacgctttgctactaggccctggacttttgtcttggtgacagctcagtagatgtgacacggcaggaaatggaagtctgacggatagagcagatgaaatggctgacgactagccgggctaggtgccgtgcatctacctgcagaggcggcgtagcagaagaggtggtggacatgggagaagtctcgcatcggcatgcttgtggtcactggaaggcttgaacgatgaacgctgatattcgtcggatgcagctttcggtggggtacatgattcaatttgctatggtgaaaattttgaccgtagcttagacaataaataggcaaaatatatctgttcttttagtttagcttaccttgcgtttcccttctccatagaaaagtatcaaaaggaaaaacaatggaaaatctattaggaaaaggaaaaaacaaacaaaccataggtaaagaacacttctgttgtaaatagttagtttgctacagaagtataaatatctggtacttgttgggtttcttggcggtgtctgtttcataattgtttctgtgaaaaagctgaaagaaactcggtatgtcttttaatatgcaccatttttgcttgaggactctccatgacattgcgcagagaggagtgcaagaacttgaatgtctcatgcttctcttgcggtggacatccacgtcgatgacaaaattctagtatatggtacgtagttcattcgaaaggtgcaaggtatccaatttagttttggatatctagagttcacaagatagtacttatctgaaaaatgaaatcaaattaccattgcaaaatataaataa

SEQ ID NO: 642 - DNA, 1681 bp, Zea Mays
tgaactctcccagctggcgctgcatgtcggcgagcatcgtggtgatcaactccaacgatggcggcaccgtggcggaggccaaactatcgccggcgttggaccctggcatatccgataccagatcttctgtgagcaaaggggccaatggaaggcaacaacccaatctcaggagttccttcgaacccttcaacgctactacaataacgcctacactgatcacgagaagcaggatgctataaacatgttcttaggtcatttccaacctcagcaagggaaacctgcattgtggaagctggactcagatcagcattacaacattgggaggcaaggaactttaaaagaagagattggaagatcattcataaagaggtcactatcagatggtaacatactgttggagagcagcttgcctgtaactatctgtaacaatgaaacagacaacacagaattgctcccagtgcaacagctggatgatattagagaagcttctgattctgcgccagagatctccatatgcgaacctaacctgtgctccagtatgaactatggcacagtgcctggaagacactccatgtcagaagagcggcagagttatttgaaaagattaggttaccctgaattgcactcttcaaatttctttgaccttgatttgttgtcatcttcaggaaattcgtttgacgaggaagtttttgagaggtcattactgatcaattcacctatggatgtgatcagtcctgaatcatctatgtcatacagtgaacaaggacacactgatgagggaagagatgacacggatctttcccgttctagcagccagctctcagacattcgggactactctgaccactttgcgcagtgggtcgtgaatggagacacgctttgctactaggccctggacttttgtcttggtgacagctcagtagatgtgacacggcaggaaatggaagtctgacggatagagcagatgaaatggctgacgactagccgggctaggtgccgtgcatctacctgcagaggcggcgtagcagaagaggtggtggacatgggagaagtctcgcatcggcatgcttgtggtcactggaaggcttgaacgatgaacgctgatattcgtcggatgcagctttcggtggggtacatgattcaatttgctatggtgaaaattttgaccgtagcttagacaataaataggcaaaatatatctgttcttttagtttagcttaccttgcgtttcccttctccatagaaaagtatcaaaaggaaaaacaatggaaaatctattaggaaaaggaaaaaacaaacaaaccataggtaaagaacacttctgttgtaaatagttagtttgctacagaagtataaatatctggtacttgttgggtttcttggcggtgtctgtttcataattgtttctgtgaaaaagctgaaagaaactcggtatgtcttttaatatgcaccatttttgcttgaggactctccatgacattgcgcagagaggagtgcaagaacttgaatgtctcatgcttctcttgcggtggacatccacgtcgatgacaaaattctagtatatggtacgtagttcattcgaaaggtgcaaggtatccaatttagttttggatatctagagttcacaagatagtacttatctgaaaaatgaaatcaaattaccattgcaaaatataaataa

SEQ ID NO: 643 - DNA, 3043 bp, Zea Mays
atcgattttagtgcttgatgaacattacactcatatggactaactagtttgccaagactttgattcatatgtaggggtggtactggatcacgatccaaatatttcttcatctgcctcggaaccctagctgtggcacgcacccaggttgtcgtcctccccaccgcaccaccaccacggccactgctgcgacgatgacgagggtgaccgtcgatgcctgtctgctgccacctgaccagtacggtcgcgtgcccgtcgacccggatccgtacgcccagctttcgtgacaccgatgcggcacccaaggagggtgcctcgcgggggacccagacctccacctcttcgtcgtcttcaatggctggtagtgatgtggcgtctctgttgctgcaattgccaagtggatgaaacagatcggtgtgagagtcatgtcaaggccacaaccaacaaaattgacggggtgacgaagggtttgagggattctgctactgcaaaagtcgagccacacgatgatgctccccctatcgatgtcgatgttctatccttggatgatctgataaaaaattgttgactttggttcaagagccttgataggtgaaggtatttatgggacattgtactatgcaactcttggtaatgtaacaaaaatgacagtaaagaaactttactgaaaatgaacccattgtcgagttcttggtcgaggttggtgttgccattgattattgatcacgggggttactaccaaacaatgatgcttacttctgataccaagtctcattggtttcaaggatgacacatgaaaactttgttgacatgttgggggaccgtatcaagcgtaatcttcgcatagtatcctacgaattcgcgaccatgggttctctccatgatgttctacatggaagaaaagtatttcaaggtgctcgacctggcccaacgtttggttggatgcagcgagtgcaaattgttgttgacgctacaaaaggactcgatattttcatgggaaagttcatcagtccattgtccatagggataatagaacaattaatatcatcttgtttgaaggcttcaaggcaaagatagtagacttcagatatggctgtccacttgcacttgaactcacatcaagccttcggatatcatgccgcacaataataatcctttttttaaaggcgatgaggcggctaaactaaatagagtggggttaagtccctaattgccttgcctgcagttgacttgcaacattttccctgggatgtccatttcaagccccacaagctctagaagcttaaagccatccatgtctggcatgtgcacatcgctgatacaagatcaaacaagttcttgttttgactcaacatggtcaagatcacaacagtctgattcatcgttgtgactgcaaatacgaaacaatgtgtcttacaggtgagtagctatagcaaaagccagaacaagaatttgtacatattgcatgagaaactacctaactacttgtagtaaaagctcccaaaaaatgcagcattcagttacatggtgatagtgtgatcatcaatttagtgcttaaatattttggccatttgatgcaaacaaatctatggttgtgggcatataaaagtataatctgcaataaaacttagcaaatggtttatcaagtagaaatatttgttaatggtagtagaatcaaacgaggtacctgttttttggctgatctccatacacaacacttctatgaacttggctagagaagaaataataatatacaactggagtagagaaaaatccattaagatagaagcacggtaagttgcagtttatgagttcaattctaagcaaataagaaaacaatggcaaatcttgagcaacgccaaccttcaataaaacctggcatcagcaagagggtataatagcagggggctaggaactgtcggatccatctatagcctatcctgcataaatttaacaagttattacaataaactggccaaaagaatgtaggctcgtacaaggttgtctgaatacacttccaatcaacttatatctagaaaatatcacttagaacttagatgatgataaatataaaatgtcacacaaattgtctgttttttcaacacgagcattctttctactcagacaaatttgcaaatgtcattgagcacgtaggtgcaacaggagagcaagcaaagcacaagcaaaagtgcaaaattgtccgaagtccaagtagaggttgcagtaccccaagcaaatgcacgagttcccaacaattcaaattagcacattgatgcatcatacattgatccattgatgcatcttcaccaggagagcagcggagttgatgcgtacccaaggtagcggaggaggatcagccatcagggtgagcctcgtgagtaggaaggtctcggcacggcccgaccgacttcgcgacgtggaccacggcgtggagtgcgcacaacacaacatgctgacttgtacttgttttgcttaaacaataaaccatttctcaataattttcccattatactgcttatgaaatgttcattgtgcacatgatttcctgtacatcggttagtgcttattttcaaacgttagtaccactccttgtgttaccatggtatcaagatgatgtgaatggctatttatcttctcttcaaattagttattaggaacaaaatgagctttagtgaatagttatgtcttggattttctccccattcaatagacttagacttctcattgttcggcctcagcagcacaccttggtgttttatcaggcctccaagccgtccctccctctagctgcttcccgccaagcctgatgctcacaagtttgctgtaattcctcatgccagctgagatcttgctctggagcaagttgtttgagatgtcaagatatcatagccggtgcagactgctggcgcttgatgattgaaagaagttgaaacggcatggatgcagtgccttcgtttgctactagcacaaagatctgaaccaagtatatttgtatgtatatcaacaagttggttgcaactaccttgtaaattgatctatcttcttt

SEQ ID NO: 644 - DNA, 3260 bp, Zea Mays
cacgatccaaatatttcttcatctgcctcggaaccctagctgtggcacgcacccaggttgtcgtcctccccaccgcaccaccaccacggccactgctgcgacgatgacgagggtgaccgtcgatgcctgtctgctgccacctgaccagtacggtcgcgtgcccgtcgacccggatccgtacgcccagctttcgtgacaccgatgcggcacccaaggagggtgcctcgcgggggacccagacctccacctcttcgtcgtcttcaatggctggtagtgatgtggcgtctctgttgctgcaattgccaagtggatgaaacagatcggtgtgagagtcatgtcaaggccacaaccaacaaaattgacggggtgacgaagggtttgagggattctgctactgcaaaagtcgagccacacgatgatgctccccctatcgatgtcgatgttctatccttggatgatctgataaaaaattgttgactttggttcaagagccttgataggtgaaggtatttatgggacattgtactatgcaactcttggtaatgtaacaaaaatgacagtaaagaaactttactgaaaatgaacccattgtcgagttcttggtcgaggatgacacatgaaaactttgttgacatgttgggggaccgtatcaagcgtaatcttcgcatagtatcctacgaattcgcgaccatgggttctctccatgatgttctacatggaagaaaagtatttcaaggtgctcgacctggcccaacgtttggttggatgcagcgagtgcaaattgttgttgacgctacaaaaggactcgatattttcatgggaaagttcatcagtccattgtccatagggataatagaacaattaatatcatcttgtttgaaggcttcaaggcaaagatagtagacttcagatatggctgtccacttgcacttgaactcacatcaagccttcggatatcatgccgcacaataataatcctttttttaaagtaactatttgtgttacttaactttagttgtgctttctgcttttgcatgtattgtctgattagttttcgattaggacaacaagttggatggtgtttgtttcttaattgtgtgattatttttttaaaagcatgcctttttattactgaagttaagcataaaaggaacacattatgatttgttttccccttcgatagaatttcttatgatgttagatgcaggcaatctcgttgtacaagcaggtgctagaagcaaacattttgtttggtccataaagtacgcaaacatttactatattgcaatgtggtattaactatattcagtgaaagccccatttatgttgggcaaaggctttggaacccctccaacacccaaacccctcaccaacgtcacctctatgaccaaaagtagtagagaaaaaagattaggacactggcataactgcaatgacatattttaaataaaaactagagtctaaatcctgctgaatagttgctttaggaacagctctaggtgctcaaatgatgcacattgcccttggtccttgttgttttccttataactcaataaatgtcaactttttgcttgttcctgagctctaatcacagcttgtacaattagcttggctaaactgattgccttgtgtgcaaggaggcgttatttttactaatatcatcatttaactattgcgtgcgttgggttaatttggttcattgattctttttcttttttaagcaatcaagcttaaatgattagcttcatagattaggcaatccgttctgaacaaagttttgcaaaaggccaacatcacattgtcattctgtcatacacttcatacaggaaagcatttcgctagatcatgttgcattcctttttttgtttaatttaagttggcggcatagtagcagtgcttttagctggagtttctgaaattgctaaggcttcatttttcacatgtcctttcttccacatttatagctatggaacaaactgtgtcctttcttccacgtttataagattgattgattagcaaaaaaacaaagaacacttcaataaatatattatatatgcgcttgtcatgaattcccgttgtatataatgcctaaacagtactacttgcttaattagggcgatgaggcggctaaactaaatagagtggggttaagtccctaattgccttgcctgcagttgacttgcaacattttccctgggatgtccatttcaagccccacaagctctagaagcttaaagccatccatgtctggcatgtgcacatcgctgatacaagatcaaacaagttcttgttttgactcaacatggtcaagatcacaacagtctgattcatcgttgtgactgcaaatacgaaacaatgtgtcttacaggtgcaacaggagagcaagcaaagcacaagcaaaagtgcaaaattgtccgaagtccaagtagaggttgcagtaccccaagcaaatgcacgagttcccaacaattcaaattagcacattgatgcatcatacattgatccattgatgcatcttcaccaggagagcagcggagttgatgcgtacccaaggtagcggaggaggatcagccatcagggtgagcctcgtgagtaggaaggtctcggcacggcccgaccgacttcgcgacgtggaccacggcgtggagtgcgcacaacacaacatgctgacttgtacttgttttgcttaaacaataaaccatttctcaataattttcccattatactgcttatgaaatgttcattgtgcacatgatttcctgtacatcggttagtgcttattttcaaacgttagtaccactccttgtgttaccatggtatcaagatgatgtgaatggctatttatcttctcttcaaattagttattaggaacaaaatgagctttagtgaatagttatgtcttggattttctccccattcaatagacttagacttctcattgttcggcctcagcagcacaccttggtgttttatcaggcctccaagccgtccctccctctagctgcttcccgccaagcctgatgctcacaagtttgctgtaattcctcatgccagctgagatcttgctctggagcaagttgtttgagatgtcaagatatcatagccggtgcagactgctggcgcttgatgattgaaagaagttgaaacggcatggatgcagtgccttcgtttgctactagcacaaagatctgaaccaagtatatttgtatgtatatcaacaagttggttgcaactaccttgtaaattgatctatcttcttt

SEQ ID NO: 645 - DNA, 2220 bp, Zea Mays
cacgatccaaatatttcttcatctgcctcggaaccctagctgtggcacgcacccaggttgtcgtcctccccaccgcaccaccaccacggccactgctgcgacgatgacgagggtgaccgtcgatgcctgtctgctgccacctgaccagtacggtcgcgtgcccgtcgacccggatccgtacgcccagctttcgtgacaccgatgcggcacccaaggagggtgcctcgcgggggacccagacctccacctcttcgtcgtcttcaatggctggtagtgatgtggcgtctctgttgctgcaattgccaagtggatgaaacagatcggtgtgagagtcatgtcaaggccacaaccaacaaaattgacggggtgacgaagggtttgagggattctgctactgcaaaagtcgagccacacgatgatgctccccctatcgatgtcgatgttctatccttggatgatctgataaaaaattgttgactttggttcaagagccttgataggtgaaggtatttatgggacattgtactatgcaactcttggtaatgtaacaaaaatgacagtaaagaaactttactgaaaatgaacccattgtcgagttcttggtcgaggttggtgttgccattgattattgatcacgggggttactaccaaacaatgatgcttacttctgataccaagtctcattggtttcaaggatgacacatgaaaactttgttgacatgttgggggaccgtatcaagcgtaatcttcgcatagtatcctacgaattcgcgaccatgggttctctccatgatgttctacatggaagaaaagtatttcaaggtgctcgacctggcccaacgtttggttggatgcagcgagtgcaaattgttgttgacgctacaaaaggactcgatattttcatgggaaagttcatcagtccattgtccatagggataatagaacaattaatatcatcttgtttgaaggcttcaaggcaaagatagtagacttcagatatggctgtccacttgcacttgaactcacatcaagccttcggatatcatgccgcacaataataatcctttttttaaaggcgatgaggcggctaaactaaatagagtggggttaagtccctaattgccttgcctgcagttgacttgcaacattttccctgggatgtccatttcaagccccacaagctctagaagcttaaagccatccatgtctggcatgtgcacatcgctgatacaagatcaaacaagttcttgttttgactcaacatggtcaagatcacaacagtctgattcatcgttgtgactgcaaatacgaaacaatgtgtcttacaggtgcaacaggagagcaagcaaagcacaagcaaaagtgcaaaattgtccgaagtccaagtagaggttgcagtaccccaagcaaatgcacgagttcccaacaattcaaattagcacattgatgcatcatacattgatccattgatgcatcttcaccaggagagcagcggagttgatgcgtacccaaggtagcggaggaggatcagccatcagggtgagcctcgtgagtaggaaggtctcggcacggcccgaccgacttcgcgacgtggaccacggcgtggagtgcgcacaacacaacatgctgacttgtacttgttttgcttaaacaataaaccatttctcaataattttcccattatactgcttatgaaatgttcattgtgcacatgatttcctgtacatcggttagtgcttattttcaaacgttagtaccactccttgtgttaccatggtatcaagatgatgtgaatggctatttatcttctcttcaaattagttattaggaacaaaatgagctttagtgaatagttatgtcttggattttctccccattcaatagacttagacttctcattgttcggcctcagcagcacaccttggtgttttatcaggcctccaagccgtccctccctctagctgcttcccgccaagcctgatgctcacaagtttgctgtaattcctcatgccagctgagatcttgctctggagcaagttgtttgagatgtcaagatatcatagccggtgcagactgctggcgcttgatgattgaaagaagttgaaacggcatggatgcagtgccttcgtttgctactagcacaaagatctgaaccaagtatatttgtatgtatatcaacaagttggttgcaactaccttgtaaattgatctatcttcttt

SEQ ID NO: 646 - DNA, 2795 bp, Zea Mays
atttcttcatctgcctcggaaccctagctgtggcacgcacccaggttgtcgtcctccccaccgcaccaccaccacggccactgctgcgacgatgacgagggtgaccgtcgatgcctgtctgctgccacctgaccagtacggtcgcgtgcccgtcgacccggatccgtacgcccagctttcgtgacaccgatgcggcacccaaggagggtgcctcgcgggggacccagacctccacctcttcgtcgtcttcaatggctgcgctatctgtgttaacatgtgtggtgcacgatgcctaaatgcttgcagtgataaaaatgtgatagttctcctcttgatgacatatttgtggtttccataatatgtgtaaattaaatacaaaggtagtgatgtggcgtctctgttgctgcaattgccaagtggatgaaacagatcggtgtgagagtcatgtcaaggccacaaccaacaaaattgacggggtgacgaagggtttgagggattctgctactgcaaaagtcgagccacacgatgatgctccccctatcgatgtcgatgttctatccttggatgatctgataaaaaattgttgactttggttcaagagccttgataggtgaaggtatttatgggacattgtactatgcaactcttggtaatgtaacaaaaatgacagtaaagaaactttactgaaaatgaacccattgtcgagttcttggtcgaggttggtgttgccattgattattgatcacgggggttactaccaaacaatgatgcttacttctgataccaagtctcattggtttcaaggatgacacatgaaaactttgttgacatgttgggggaccgtatcaagcgtaatcttcgcatagtatcctacgaattcgcgaccatgggttctctccatgatgttctacatgggcgatgaggcggctaaactaaatagagtggggttaagtccctaattgccttgcctgcagttgacttgcaacattttccctgggatgtccatttcaagccccacaagctctagaagcttaaagccatccatgtctggcatgtgcacatcgctgatacaagatcaaacaagttcttgttttgactcaacatggtcaagatcacaacagtctgattcatcgttgtgactgcaaatacgaaacaatgtgtcttacaggtgagtagctatagcaaaagccagaacaagaatttgtacatattgcatgagaaactacctaactacttgtagtaaaagctcccaaaaaatgcagcattcagttacatggtgatagtgtgatcatcaatttagtgcttaaatattttggccatttgatgcaaacaaatctatggttgtgggcatataaaagtataatctgcaataaaacttagcaaatggtttatcaagtagaaatatttgttaatggtagtagaatcaaacgaggtacctgttttttggctgatctccatacacaacacttctatgaacttggctagagaagaaataataatatacaactggagtagagaaaaatccattaagatagaagcacggtaagttgcagtttatgagttcaattctaagcaaataagaaaacaatggcaaatcttgagcaacgccaaccttcaataaaacctggcatcagcaagagggtataatagcagggggctaggaactgtcggatccatctatagcctatcctgcataaatttaacaagttattacaataaactggccaaaagaatgtaggctcgtacaaggttgtctgaatacacttccaatcaacttatatctagaaaatatcacttagaacttagatgatgataaatataaaatgtcacacaaattgtctgttttttcaacacgagcattctttctactcagacaaatttgcaaatgtcattgagcacgtaggtgcaacaggagagcaagcaaagcacaagcaaaagtgcaaaattgtccgaagtccaagtagaggttgcagtaccccaagcaaatgcacgagttcccaacaattcaaattagcacattgatgcatcatacattgatccattgatgcatcttcaccaggagagcagcggagttgatgcgtacccaaggtagcggaggaggatcagccatcagggtgagcctcgtgagtaggaaggtctcggcacggcccgaccgacttcgcgacgtggaccacggcgtggagtgcgcacaacacaacatgctgacttgtacttgttttgcttaaacaataaaccatttctcaataattttcccattatactgcttatgaaatgttcattgtgcacatgatttcctgtacatcggttagtgcttattttcaaacgttagtaccactccttgtgttaccatggtatcaagatgatgtgaatggctatttatcttctcttcaaattagttattaggaacaaaatgagctttagtgaatagttatgtcttggattttctccccattcaatagacttagacttctcattgttcggcctcagcagcacaccttggtgttttatcaggcctccaagccgtccctccctctagctgcttcccgccaagcctgatgctcacaagtttgctgtaattcctcatgccagctgagatcttgctctggagcaagttgtttgagatgtcaagatatcatagccggtgcagactgctggcgcttgatgattgaaagaagttgaaacggcatggatgcagtgccttcgtttgctactagcacaaagatctgaaccaagtatatttgtatgtatatcaacaagttggttgcaactaccttgtaaattgatctatcttcttt

SEQ ID NO: 647 - DNA, 3320 bp, Zea Mays
ctgcctcggaaccctagctgtggcacgcacccaggttgtcgtcctccccaccgcaccaccaccacggccactgctgcgacgatgacgagggtgaccgtcgatgcctgtctgctgccacctgaccagtacggtcgcgtgcccgtcgacccggatccgtacgcccagctttcgtgacaccgatgcggcacccaaggagggtgcctcgcgggggacccagacctccacctcttcgtcgtcttcaatggctgtgatgtggcgtctctgttgctgcaattgccaagtggatgaaacagatcggtgtgagagtcatgtcaaggccacaaccaacaaaattgacggggtgacgaagggtttgagggattctgctactgcaaaagtcgagccacacgatgatgctccccctatcgatgtcgatgttctatccttggatgatctgataaaaaattgttgactttggttcaagagccttgataggtgaaggtatttatgggacattgtactatgcaactcttggtaatgtaacaaaaatgacagtaaagaaactttactgaaaatgaacccattgtcgagttcttggtcgaggttggtgttgccattgattattgatcacgggggttactaccaaacaatgatgcttacttctgataccaagtctcattggtttcaaggatgacacatgaaaactttgttgacatgttgggggaccgtatcaagcgtaatcttcgcatagtatcctacgaattcgcgaccatgggttctctccatgatgttctacatggaagaaaagtatttcaaggtgctcgacctggcccaacgtttggttggatgcagcgagtgcaaattgttgttgacgctacaaaaggactcgatattttcatgggaaagttcatcagtccattgtccatagggataatagaacaattaatatcatcttgtttgaaggcttcaaggcaaagatagtagacttcagatatggctgtccacttgcacttgaactcacatcaagccttcggatatcatgccgcacaataataatcctttttttaaagtaactatttgtgttacttaactttagttgtgctttctgcttttgcatgtattgtctgattagttttcgattaggacaacaagttggatggtgtttgtttcttaattgtgtgattatttttttaaaagcatgcctttttattactgaagttaagcataaaaggaacacattatgatttgttttccccttcgatagaatttcttatgatgttagatgcaggcaatctcgttgtacaagcaggtgctagaagcaaacattttgtttggtccataaagtacgcaaacatttactatattgcaatgtggtattaactatattcagtgaaagccccatttatgttgggcaaaggctttggaacccctccaacacccaaacccctcaccaacgtcacctctatgaccaaaagtagtagagaaaaaagattaggacactggcataactgcaatgacatattttaaataaaaactagagtctaaatcctgctgaatagttgctttaggaacagctctaggtgctcaaatgatgcacattgcccttggtccttgttgttttccttataactcaataaatgtcaactttttgcttgttcctgagctctaatcacagcttgtacaattagcttggctaaactgattgccttgtgtgcaaggaggcgttatttttactaatatcatcatttaactattgcgtgcgttgggttaatttggttcattgattctttttcttttttaagcaatcaagcttaaatgattagcttcatagattaggcaatccgttctgaacaaagttttgcaaaaggccaacatcacattgtcattctgtcatacacttcatacaggaaagcatttcgctagatcatgttgcattcctttttttgtttaatttaagttggcggcatagtagcagtgcttttagctggagtttctgaaattgctaaggcttcatttttcacatgtcctttcttccacatttatagctatggaacaaactgtgtcctttcttccacgtttataagattgattgattagcaaaaaaacaaagaacacttcaataaatatattatatatgcgcttgtcatgaattcccgttgtatataatgcctaaacagtactacttgcttaattagggcgatgaggcggctaaactaaatagagtggggttaagtccctaattgccttgcctgcagttgacttgcaacattttccctgggatgtccatttcaagccccacaagctctagaagcttaaagccatccatgtctggcatgtgcacatcgctgatacaagatcaaacaagttcttgttttgactcaacatggtcaagatcacaacagtctgattcatcgttgtgactgcaaatacgaaacaatgtgtcttacaggtgcaacaggagagcaagcaaagcacaagcaaaagtgcaaaattgtccgaagtccaagtagaggttgcagtaccccaagcaaatgcacgagttcccaacaattcaaattagcacattgatgcatcatacattgatccattgatgcatcttcaccaggagagcagcggagttgatgcgtacccaaggtagcggaggaggatcagccatcagggtgagcctcgtgagtaggaaggtctcggcacggcccgaccgacttcgcgacgtggaccacggcgtggagtgcgcacaacacaacatgctgacttgtacttgttttgcttaaacaataaaccatttctcaataattttcccattatactgcttatgaaatgttcattgtgcacatgatttcctgtacatcggttagtgcttattttcaaacgttagtaccactccttgtgttaccatggtatcaagatgatgtgaatggctatttatcttctcttcaaattagttattaggaacaaaatgagctttagtgaatagttatgtcttggattttctccccattcaatagacttagacttctcattgttcggcctcagcagcacaccttggtgttttatcaggcctccaagccgtccctccctctagctgcttcccgccaagcctgatgctcacaagtttgctgtaattcctcatgccagctgagatcttgctctggagcaagttgtttgagatgtcaagatatcatagccggtgcagactgctggcgcttgatgattgaaagaagttgaaacggcatggatgcagtgccttcgtttgctactagcacaaagatctgaaccaagtatatttgtatgtatatcaacaagttggttgcaactaccttgtaaattgatctatcttcttt

SEQ ID NO: 648 - DNA, 2577 bp, Zea Mays
ctgcctcggaaccctagctgtggcacgcacccaggttgtcgtcctccccaccgcaccaccaccacggccactgctgcgacgatgacgagggtgaccgtcgatgcctgtctgctgccacctgaccagtacggtcgcgtgcccgtcgacccggatccgtacgcccagctttcgtgacaccgatgcggcacccaaggagggtgcctcgcgggggacccagacctccacctcttcgtcgtcttcaatggctgtgatgtggcgtctctgttgctgcaattgccaagtggatgaaacagatcggtgtgagagtcatgtcaaggccacaaccaacaaaattgacggggtgacgaagggtttgagggattctgctactgcaaaagtcgagccacacgatgatgctccccctatcgatgtcgatgttctatccttggatgatctgataaaaaattgttgactttggttcaagagccttgataggtgaaggtatttatgggacattgtactatgcaactcttggtaatgtaacaaaaatgacagtaaagaaactttactgaaaatgaacccattgtcgagttcttggtcgaggttggtgttgccattgattattgatcacgggggttactaccaaacaatgatgcttacttctgataccaagtctcattggtttcaaggatgacacatgaaaactttgttgacatgttgggggaccgtatcaagcgtaatcttcgcatagtatcctacgaattcgcgaccatgggttctctccatgatgttctacatgggatgtccatttcaagccccacaagctctagaagcttaaagccatccatgtctggcatgtgcacatcgctgatacaagatcaaacaagttcttgttttgactcaacatggtcaagatcacaacagtctgattcatcgttgtgactgcaaatacgaaacaatgtgtcttacaggtgagtagctatagcaaaagccagaacaagaatttgtacatattgcatgagaaactacctaactacttgtagtaaaagctcccaaaaaatgcagcattcagttacatggtgatagtgtgatcatcaatttagtgcttaaatattttggccatttgatgcaaacaaatctatggttgtgggcatataaaagtataatctgcaataaaacttagcaaatggtttatcaagtagaaatatttgttaatggtagtagaatcaaacgaggtacctgttttttggctgatctccatacacaacacttctatgaacttggctagagaagaaataataatatacaactggagtagagaaaaatccattaagatagaagcacggtaagttgcagtttatgagttcaattctaagcaaataagaaaacaatggcaaatcttgagcaacgccaaccttcaataaaacctggcatcagcaagagggtataatagcagggggctaggaactgtcggatccatctatagcctatcctgcataaatttaacaagttattacaataaactggccaaaagaatgtaggctcgtacaaggttgtctgaatacacttccaatcaacttatatctagaaaatatcacttagaacttagatgatgataaatataaaatgtcacacaaattgtctgttttttcaacacgagcattctttctactcagacaaatttgcaaatgtcattgagcacgtaggtgcaacaggagagcaagcaaagcacaagcaaaagtgcaaaattgtccgaagtccaagtagaggttgcagtaccccaagcaaatgcacgagttcccaacaattcaaattagcacattgatgcatcatacattgatccattgatgcatcttcaccaggagagcagcggagttgatgcgtacccaaggtagcggaggaggatcagccatcagggtgagcctcgtgagtaggaaggtctcggcacggcccgaccgacttcgcgacgtggaccacggcgtggagtgcgcacaacacaacatgctgacttgtacttgttttgcttaaacaataaaccatttctcaataattttcccattatactgcttatgaaatgttcattgtgcacatgatttcctgtacatcggttagtgcttattttcaaacgttagtaccactccttgtgttaccatggtatcaagatgatgtgaatggctatttatcttctcttcaaattagttattaggaacaaaatgagctttagtgaatagttatgtcttggattttctccccattcaatagacttagacttctcattgttcggcctcagcagcacaccttggtgttttatcaggcctccaagccgtccctccctctagctgcttcccgccaagcctgatgctcacaagtttgctgtaattcctcatgccagctgagatcttgctctggagcaagttgtttgagatgtcaagatatcatagccggtgcagactgctggcgcttgatgattgaaagaagttgaaacggcatggatgcagtgccttcgtttgctactagcacaaagatctgaaccaagtatatttgtatgtatatcaacaagttggttgcaactaccttgtaaattgatctatcttcttt

SEQ ID NO: 649 - DNA, 1723 bp, Zea Mays
ctgcctcggaaccctagctgtggcacgcacccaggttgtcgtcctccccaccgcaccaccaccacggccactgctgcgacgatgacgagggtgaccgtcgatgcctgtctgctgccacctgaccagtacggtcgcgtgcccgtcgacccggatccgtacgcccagctttcgtgacaccgatgcggcacccaaggagggtgcctcgcgggggacccagacctccacctcttcgtcgtcttcaatggctgatcggtgtgagagtcatgtcaaggccacaaccaacaaaattgacggggtgacgaagggtttgagggattctgctactgcaaaagtcgagccacacgatgatgctccccctatcgatgtcgatgttctatccttggatgatctgataaaaaattgttgactttggttcaagagccttgataggtgaaggtatttatgggacattgtactatgcaactcttggtaatgtaacaaaaatgacagtaaagaaactttactgaaaatgaacccattgtcgagttcttggtcgaggttggtgttgccattgattattgatcacgggggttactaccaaacaatgatgcttacttctgataccaagtctcattggtttcaaggatgacacatgaaaactttgttgacatgttgggggaccgtatcaagcgtaatcttcgcatagtatcctacgaattcgcgaccatgggttctctccatgatgttctacatgggcgatgaggcggctaaactaaatagagtggggttaagtccctaattgccttgcctgcagttgacttgcaacattttccctgggatgtccatttcaagccccacaagctctagaagcttaaagccatccatgtctggcatgtgcacatcgctgatacaagatcaaacaagttcttgttttgactcaacatggtcaagatcacaacagtctgattcatcgttgtgactgcaaatacgaaacaatgtgtcttacaggagagcagcggagttgatgcgtacccaaggtagcggaggaggatcagccatcagggtgagcctcgtgagtaggaaggtctcggcacggcccgaccgacttcgcgacgtggaccacggcgtggagtgcgcacaacacaacatgctgacttgtacttgttttgcttaaacaataaaccatttctcaataattttcccattatactgcttatgaaatgttcattgtgcacatgatttcctgtacatcggttagtgcttattttcaaacgttagtaccactccttgtgttaccatggtatcaagatgatgtgaatggctatttatcttctcttcaaattagttattaggaacaaaatgagctttagtgaatagttatgtcttggattttctccccattcaatagacttagacttctcattgttcggcctcagcagcacaccttggtgttttatcaggcctccaagccgtccctccctctagctgcttcccgccaagcctgatgctcacaagtttgctgtaattcctcatgccagctgagatcttgctctggagcaagttgtttgagatgtcaagatatcatagccggtgcagactgctggcgcttgatgattgaaagaagttgaaacggcatggatgcagtgccttcgtttgctactagcacaaagatctgaaccaagtatatttgtatgtatatcaacaagttggttgcaactaccttgtaaattgatctatcttcttt

SEQ ID NO: 650 - DNA, 1928 bp, Zea Mays
ctgcctcggaaccctagctgtggcacgcacccaggttgtcgtcctccccaccgcaccaccaccacggccactgctgcgacgatgacgagggtgaccgtcgatgcctgtctgctgccacctgaccagtacggtcgcgtgcccgtcgacccggatccgtacgcccagctttcgtgacaccgatgcggcacccaaggagggtgcctcgcgggggacccagacctccacctcttcgtcgtcttcaatggctggtagtgatgtggcgtctctgttgctgcaattgccaagtggatgaaacagatcggtgtgagagtcatgtcaaggccacaaccaacaaaattgacggggtgacgaagggtttgagggattctgctactgcaaaagtcgagccacacgatgatgctccccctatcgatgtcgatgttctatccttggatgatctgataaaaaattgttgactttggttcaagagccttgataggtgaaggtatttatgggacattgtactatgcaactcttggtaatgtaacaaaaatgacagtaaagaaactttactgaaaatgaacccattgtcgagttcttggtcgaggttggtgttgccattgattattgatcacgggggttactaccaaacaatgatgcttacttctgataccaagtctcattggtttcaaggatgacacatgaaaactttgttgacatgttgggggaccgtatcaagcgtaatcttcgcatagtatcctacgaattcgcgaccatgggttctctccatgatgttctacatgggcgatgaggcggctaaactaaatagagtggggttaagtccctaattgccttgcctgcagttgacttgcaacattttccctgggatgtccatttcaagccccacaagctctagaagcttaaagccatccatgtctggcatgtgcacatcgctgatacaagatcaaacaagttcttgttttgactcaacatggtcaagatcacaacagtctgattcatcgttgtgactgcaaatacgaaacaatgtgtcttacaggtgcaacaggagagcaagcaaagcacaagcaaaagtgcaaaattgtccgaagtccaagtagaggttgcagtaccccaagcaaatgcacgagttcccaacaattcaaattagcacattgatgcatcatacattgatccattgatgcatcttcaccaggagagcagcggagttgatgcgtacccaaggtagcggaggaggatcagccatcagggtgagcctcgtgagtaggaaggtctcggcacggcccgaccgacttcgcgacgtggaccacggcgtggagtgcgcacaacacaacatgctgacttgtacttgttttgcttaaacaataaaccatttctcaataattttcccattatactgcttatgaaatgttcattgtgcacatgatttcctgtacatcggttagtgcttattttcaaacgttagtaccactccttgtgttaccatggtatcaagatgatgtgaatggctatttatcttctcttcaaattagttattaggaacaaaatgagctttagtgaatagttatgtcttggattttctccccattcaatagacttagacttctcattgttcggcctcagcagcacaccttggtgttttatcaggcctccaagccgtccctccctctagctgcttcccgccaagcctgatgctcacaagtttgctgtaattcctcatgccagctgagatcttgctctggagcaagttgtttgagatgtcaagatatcatagccggtgcagactgctggcgcttgatgattgaaagaagttgaaacggcatggatgcagtgccttcgtttgctactagcacaaagatctgaaccaagtatatttgtatgtatatcaacaagttggttgcaactaccttgtaaattgatctatcttcttt

SEQ ID NO: 651 - DNA, 2659 bp, Zea Mays
ctgcctcggaaccctagctgtggcacgcacccaggttgtcgtcctccccaccgcaccaccaccacggccactgctgcgacgatgacgagggtgaccgtcgatgcctgtctgctgccacctgaccagtacggtcgcgtgcccgtcgacccggatccgtacgcccagctttcgtgacaccgatgcggcacccaaggagggtgcctcgcgggggacccagacctccacctcttcgtcgtcttcaatggctgtgatgtggcgtctctgttgctgcaattgccaagtggatgaaacagatcggtgtgagagtcatgtcaaggccacaaccaacaaaattgacggggtgacgaagggtttgagggattctgctactgcaaaagtcgagccacacgatgatgctccccctatcgatgtcgatgttctatccttggatgatctgataaaaaattgttgactttggttcaagagccttgataggtgaaggtatttatgggacattgtactatgcaactcttggtaatgtaacaaaaatgacagtaaagaaactttactgaaaatgaacccattgtcgagttcttggtcgaggttggtgttgccattgattattgatcacgggggttactaccaaacaatgatgcttacttctgataccaagtctcattggtttcaaggatgacacatgaaaactttgttgacatgttgggggaccgtatcaagcgtaatcttcgcatagtatcctacgaattcgcgaccatgggttctctccatgatgttctacatgggcgatgaggcggctaaactaaatagagtggggttaagtccctaattgccttgcctgcagttgacttgcaacattttccctgggatgtccatttcaagccccacaagctctagaagcttaaagccatccatgtctggcatgtgcacatcgctgatacaagatcaaacaagttcttgttttgactcaacatggtcaagatcacaacagtctgattcatcgttgtgactgcaaatacgaaacaatgtgtcttacaggtgagtagctatagcaaaagccagaacaagaatttgtacatattgcatgagaaactacctaactacttgtagtaaaagctcccaaaaaatgcagcattcagttacatggtgatagtgtgatcatcaatttagtgcttaaatattttggccatttgatgcaaacaaatctatggttgtgggcatataaaagtataatctgcaataaaacttagcaaatggtttatcaagtagaaatatttgttaatggtagtagaatcaaacgaggtacctgttttttggctgatctccatacacaacacttctatgaacttggctagagaagaaataataatatacaactggagtagagaaaaatccattaagatagaagcacggtaagttgcagtttatgagttcaattctaagcaaataagaaaacaatggcaaatcttgagcaacgccaaccttcaataaaacctggcatcagcaagagggtataatagcagggggctaggaactgtcggatccatctatagcctatcctgcataaatttaacaagttattacaataaactggccaaaagaatgtaggctcgtacaaggttgtctgaatacacttccaatcaacttatatctagaaaatatcacttagaacttagatgatgataaatataaaatgtcacacaaattgtctgttttttcaacacgagcattctttctactcagacaaatttgcaaatgtcattgagcacgtaggtgcaacaggagagcaagcaaagcacaagcaaaagtgcaaaattgtccgaagtccaagtagaggttgcagtaccccaagcaaatgcacgagttcccaacaattcaaattagcacattgatgcatcatacattgatccattgatgcatcttcaccaggagagcagcggagttgatgcgtacccaaggtagcggaggaggatcagccatcagggtgagcctcgtgagtaggaaggtctcggcacggcccgaccgacttcgcgacgtggaccacggcgtggagtgcgcacaacacaacatgctgacttgtacttgttttgcttaaacaataaaccatttctcaataattttcccattatactgcttatgaaatgttcattgtgcacatgatttcctgtacatcggttagtgcttattttcaaacgttagtaccactccttgtgttaccatggtatcaagatgatgtgaatggctatttatcttctcttcaaattagttattaggaacaaaatgagctttagtgaatagttatgtcttggattttctccccattcaatagacttagacttctcattgttcggcctcagcagcacaccttggtgttttatcaggcctccaagccgtccctccctctagctgcttcccgccaagcctgatgctcacaagtttgctgtaattcctcatgccagctgagatcttgctctggagcaagttgtttgagatgtcaagatatcatagccggtgcagactgctggcgcttgatgattgaaagaagttgaaacggcatggatgcagtgccttcgtttgctactagcacaaagatctgaaccaagtatatttgtatgtatatcaacaagttggttgcaactaccttgtaaattgatctatcttcttt

SEQ ID NO: 652 - DNA, 1772 bp, Zea Mays
ctgcctcggaaccctagctgtggcacgcacccaggttgtcgtcctccccaccgcaccaccaccacggccactgctgcgacgatgacgagggtgaccgtcgatgcctgtctgctgccacctgaccagtacggtcgcgtgcccgtcgacccggatccgtacgcccagctttcgtgacaccgatgcggcacccaaggagggtgcctcgcgggggacccagacctccacctcttcgtcgtcttcaatggctggtagtgatgtggcgtctctgttgctgcaattgccaagtggatgaaacagatcggtgtgagagtcatgtcaaggccacaaccaacaaaattgacggggtgacgaagggtttgagggattctgctactgcaaaagtcgagccacacgatgatgctccccctatcgatgtcgatgttctatccttggatgatctgataaaaaattgttgactttggttcaagagccttgataggtgaaggtatttatgggacattgtactatgcaactcttggtaatgtaacaaaaatgacagtaaagaaactttactgaaaatgaacccattgtcgagttcttggtcgaggttggtgttgccattgattattgatcacgggggttactaccaaacaatgatgcttacttctgataccaagtctcattggtttcaaggatgacacatgaaaactttgttgacatgttgggggaccgtatcaagcgtaatcttcgcatagtatcctacgaattcgcgaccatgggttctctccatgatgttctacatgggcgatgaggcggctaaactaaatagagtggggttaagtccctaattgccttgcctgcagttgacttgcaacattttccctgggatgtccatttcaagccccacaagctctagaagcttaaagccatccatgtctggcatgtgcacatcgctgatacaagatcaaacaagttcttgttttgactcaacatggtcaagatcacaacagtctgattcatcgttgtgactgcaaatacgaaacaatgtgtcttacaggagagcagcggagttgatgcgtacccaaggtagcggaggaggatcagccatcagggtgagcctcgtgagtaggaaggtctcggcacggcccgaccgacttcgcgacgtggaccacggcgtggagtgcgcacaacacaacatgctgacttgtacttgttttgcttaaacaataaaccatttctcaataattttcccattatactgcttatgaaatgttcattgtgcacatgatttcctgtacatcggttagtgcttattttcaaacgttagtaccactccttgtgttaccatggtatcaagatgatgtgaatggctatttatcttctcttcaaattagttattaggaacaaaatgagctttagtgaatagttatgtcttggattttctccccattcaatagacttagacttctcattgttcggcctcagcagcacaccttggtgttttatcaggcctccaagccgtccctccctctagctgcttcccgccaagcctgatgctcacaagtttgctgtaattcctcatgccagctgagatcttgctctggagcaagttgtttgagatgtcaagatatcatagccggtgcagactgctggcgcttgatgattgaaagaagttgaaacggcatggatgcagtgccttcgtttgctactagcacaaagatctgaaccaagtatatttgtatgtatatcaacaagttggttgcaactaccttgtaaattgatctatcttcttt

SEQ ID NO: 653 - DNA, 2929 bp, Zea Mays
ctgcctcggaaccctagctgtggcacgcacccaggttgtcgtcctccccaccgcaccaccaccacggccactgctgcgacgatgacgagggtgaccgtcgatgcctgtctgctgccacctgaccagtacggtcgcgtgcccgtcgacccggatccgtacgcccagctttcgtgacaccgatgcggcacccaaggagggtgcctcgcgggggacccagacctccacctcttcgtcgtcttcaatggctgtgatgtggcgtctctgttgctgcaattgccaagtggatgaaacagatcggtgtgagagtcatgtcaaggccacaaccaacaaaattgacggggtgacgaagggtttgagggattctgctactgcaaaagtcgagccacacgatgatgctccccctatcgatgtcgatgttctatccttggatgatctgataaaaaattgttgactttggttcaagagccttgataggtgaaggtatttatgggacattgtactatgcaactcttggtaatgtaacaaaaatgacagtaaagaaactttactgaaaatgaacccattgtcgagttcttggtcgaggttggtgttgccattgattattgatcacgggggttactaccaaacaatgatgcttacttctgataccaagtctcattggtttcaaggatgacacatgaaaactttgttgacatgttgggggaccgtatcaagcgtaatcttcgcatagtatcctacgaattcgcgaccatgggttctctccatgatgttctacatggaagaaaagtatttcaaggtgctcgacctggcccaacgtttggttggatgcagcgagtgcaaattgttgttgacgctacaaaaggactcgatattttcatgggaaagttcatcagtccattgtccatagggataatagaacaattaatatcatcttgtttgaaggcttcaaggcaaagatagtagacttcagatatggctgtccacttgcacttgaactcacatcaagccttcggatatcatgccgcacaataataatcctttttttaaaggcgatgaggcggctaaactaaatagagtggggttaagtccctaattgccttgcctgcagttgacttgcaacattttccctgggatgtccatttcaagccccacaagctctagaagcttaaagccatccatgtctggcatgtgcacatcgctgatacaagatcaaacaagttcttgttttgactcaacatggtcaagatcacaacagtctgattcatcgttgtgactgcaaatacgaaacaatgtgtcttacaggtgagtagctatagcaaaagccagaacaagaatttgtacatattgcatgagaaactacctaactacttgtagtaaaagctcccaaaaaatgcagcattcagttacatggtgatagtgtgatcatcaatttagtgcttaaatattttggccatttgatgcaaacaaatctatggttgtgggcatataaaagtataatctgcaataaaacttagcaaatggtttatcaagtagaaatatttgttaatggtagtagaatcaaacgaggtacctgttttttggctgatctccatacacaacacttctatgaacttggctagagaagaaataataatatacaactggagtagagaaaaatccattaagatagaagcacggtaagttgcagtttatgagttcaattctaagcaaataagaaaacaatggcaaatcttgagcaacgccaaccttcaataaaacctggcatcagcaagagggtataatagcagggggctaggaactgtcggatccatctatagcctatcctgcataaatttaacaagttattacaataaactggccaaaagaatgtaggctcgtacaaggttgtctgaatacacttccaatcaacttatatctagaaaatatcacttagaacttagatgatgataaatataaaatgtcacacaaattgtctgttttttcaacacgagcattctttctactcagacaaatttgcaaatgtcattgagcacgtaggtgcaacaggagagcaagcaaagcacaagcaaaagtgcaaaattgtccgaagtccaagtagaggttgcagtaccccaagcaaatgcacgagttcccaacaattcaaattagcacattgatgcatcatacattgatccattgatgcatcttcaccaggagagcagcggagttgatgcgtacccaaggtagcggaggaggatcagccatcagggtgagcctcgtgagtaggaaggtctcggcacggcccgaccgacttcgcgacgtggaccacggcgtggagtgcgcacaacacaacatgctgacttgtacttgttttgcttaaacaataaaccatttctcaataattttcccattatactgcttatgaaatgttcattgtgcacatgatttcctgtacatcggttagtgcttattttcaaacgttagtaccactccttgtgttaccatggtatcaagatgatgtgaatggctatttatcttctcttcaaattagttattaggaacaaaatgagctttagtgaatagttatgtcttggattttctccccattcaatagacttagacttctcattgttcggcctcagcagcacaccttggtgttttatcaggcctccaagccgtccctccctctagctgcttcccgccaagcctgatgctcacaagtttgctgtaattcctcatgccagctgagatcttgctctggagcaagttgtttgagatgtcaagatatcatagccggtgcagactgctggcgcttgatgattgaaagaagttgaaacggcatggatgcagtgccttcgtttgctactagcacaaagatctgaaccaagtatatttgtatgtatatcaacaagttggttgcaactaccttgtaaattgatctatcttcttt

SEQ ID NO: 654 - DNA, 4171 bp, Zea Mays
ctgcctcggaaccctagctgtggcacgcacccaggttgtcgtcctccccaccgcaccaccaccacggccactgctgcgacgatgacgagggtgaccgtcgatgcctgtctgctgccacctgaccagtacggtcgcgtgcccgtcgacccggatccgtacgcccagctttcgtgacaccgatgcggcacccaaggagggtgcctcgcgggggacccagacctccacctcttcgtcgtcttcaatggctggttagttcaactaagatattacatgtttacagacatgctcttttccccctttttcctatttaatttacaaaatactcagatcttttagtgagtgcaatgttagctcacagtttagggtttagggttttctttttgcacataagttgtggctcatgagttaacatgtttctctcttcagcgctatctgtgttaacatgtgtggtgcacgatgcctaaatgcttgcagtgataaaaatgtgatagttctcctcttgatgacatatttgtggtttccataatatgtgtaaattaaatacaaaggtagtgatgtggcgtctctgttgctgcaattgccaagtggatgaaacagatcggtgtgagagtcatgtcaaggccacaaccaacaaaattgacggggtgacgaagggtttgagggattctgctactgcaaaagtcgagccacacgatgatgctccccctatcgatgtcgatgttctatccttggatgatctgataaaaaattgttgactttggttcaagagccttgataggtgaaggatgacacatgaaaactttgttgacatgttgggggaccgtatcaagcgtaatcttcgcatagtatcctacgaattcgcgaccatgggttctctccatgatgttctacatggaagaaaagtatttcaaggtgctcgacctggcccaacgtttggttggatgcagcgagtgcaaattgttgttgacgctacaaaaggactcgatattttcatgggaaagttcatcagtccattgtccatagggataatagaacaattaatatcatcttgtttgaaggcttcaaggcaaagatagtagacttcagatatggctgtccacttgcacttgaactcacatcaagccttcggatatcatgccgcacaataataatcctttttttaaagtaactatttgtgttacttaactttagttgtgctttctgcttttgcatgtattgtctgattagttttcgattaggacaacaagttggatggtgtttgtttcttaattgtgtgattatttttttaaaagcatgcctttttattactgaagttaagcataaaaggaacacattatgatttgttttccccttcgatagaatttcttatgatgttagatgcaggcaatctcgttgtacaagcaggtgctagaagcaaacattttgtttggtccataaagtacgcaaacatttactatattgcaatgtggtattaactatattcagtgaaagccccatttatgttgggcaaaggctttggaacccctccaacacccaaacccctcaccaacgtcacctctatgaccaaaagtagtagagaaaaaagattaggacactggcataactgcaatgacatattttaaataaaaactagagtctaaatcctgctgaatagttgctttaggaacagctctaggtgctcaaatgatgcacattgcccttggtccttgttgttttccttataactcaataaatgtcaactttttgcttgttcctgagctctaatcacagcttgtacaattagcttggctaaactgattgccttgtgtgcaaggaggcgttatttttactaatatcatcatttaactattgcgtgcgttgggttaatttggttcattgattctttttcttttttaagcaatcaagcttaaatgattagcttcatagattaggcaatccgttctgaacaaagttttgcaaaaggccaacatcacattgtcattctgtcatacacttcatacaggaaagcatttcgctagatcatgttgcattcctttttttgtttaatttaagttggcggcatagtagcagtgcttttagctggagtttctgaaattgctaaggcttcatttttcacatgtcctttcttccacatttatagctatggaacaaactgtgtcctttcttccacgtttataagattgattgattagcaaaaaaacaaagaacacttcaataaatatattatatatgcgcttgtcatgaattcccgttgtatataatgcctaaacagtactacttgcttaattagggcgatgaggcggctaaactaaatagagtggggttaagtccctaattgccttgcctgcagttgacttgcaacattttccctgggatgtccatttcaagccccacaagctctagaagcttaaagccatccatgtctggcatgtgcacatcgctgatacaagatcaaacaagttcttgttttgactcaacatggtcaagatcacaacagtctgattcatcgttgtgactgcaaatacgaaacaatgtgtcttacaggtgagtagctatagcaaaagccagaacaagaatttgtacatattgcatgagaaactacctaactacttgtagtaaaagctcccaaaaaatgcagcattcagttacatggtgatagtgtgatcatcaatttagtgcttaaatattttggccatttgatgcaaacaaatctatggttgtgggcatataaaagtataatctgcaataaaacttagcaaatggtttatcaagtagaaatatttgttaatggtagtagaatcaaacgaggtacctgttttttggctgatctccatacacaacacttctatgaacttggctagagaagaaataataatatacaactggagtagagaaaaatccattaagatagaagcacggtaagttgcagtttatgagttcaattctaagcaaataagaaaacaatggcaaatcttgagcaacgccaaccttcaataaaacctggcatcagcaagagggtataatagcagggggctaggaactgtcggatccatctatagcctatcctgcataaatttaacaagttattacaataaactggccaaaagaatgtaggctcgtacaaggttgtctgaatacacttccaatcaacttatatctagaaaatatcacttagaacttagatgatgataaatataaaatgtcacacaaattgtctgttttttcaacacgagcattctttctactcagacaaatttgcaaatgtcattgagcacgtaggtgcaacaggagagcaagcaaagcacaagcaaaagtgcaaaattgtccgaagtccaagtagaggttgcagtaccccaagcaaatgcacgagttcccaacaattcaaattagcacattgatgcatcatacattgatccattgatgcatcttcaccaggagagcagcggagttgatgcgtacccaaggtagcggaggaggatcagccatcagggtgagcctcgtgagtaggaaggtctcggcacggcccgaccgacttcgcgacgtggaccacggcgtggagtgcgcacaacacaacatgctgacttgtacttgttttgcttaaacaataaaccatttctcaataattttcccattatactgcttatgaaatgttcattgtgcacatgatttcctgtacatcggttagtgcttattttcaaacgttagtaccactccttgtgttaccatggtatcaagatgatgtgaatggctatttatcttctcttcaaattagttattaggaacaaaatgagctttagtgaatagttatgtcttggattttctccccattcaatagacttagacttctcattgttcggcctcagcagcacaccttggtgttttatcaggcctccaagccgtccctccctctagctgcttcccgccaagcctgatgctcacaagtttgctgtaattcctcatgccagctgagatcttgctctggagcaagttgtttgagatgtcaagatatcatagccggtgcagactgctggcgcttgatgattgaaagaagttgaaacggcatggatgcagtgccttcgtttgctactagcacaaagatctgaaccaagtatatttgtatgtatatcaacaagttggttgcaactaccttgtaaattgatctatcttcttt

SEQ ID NO: 655 - DNA, 2228 bp, Zea Mays
ctgcctcggaaccctagctgtggcacgcacccaggttgtcgtcctccccaccgcaccaccaccacggccactgctgcgacgatgacgagggtgaccgtcgatgcctgtctgctgccacctgaccagtacggtcgcgtgcccgtcgacccggatccgtacgcccagctttcgtgacaccgatgcggcacccaaggagggtgcctcgcgggggacccagacctccacctcttcgtcgtcttcaatggctggttagttcaactaagatattacatgtttacagacatgctcttttccccctttttcctatttaatttacaaaatactcagatcttttagtgagtgcaatgttagctcacagtttagggtttagggttttctttttgcacataagttgtggctcatgagttaacatgtttctctcttcagcgctatctgtgttaacatgtgtggtgcacgatgcctaaatgcttgcagtgataaaaatgtgatagttctcctcttgatgacatatttgtggtttccataatatgtgtaaattaaatacaaaggtagtgatgtggcgtctctgttgctgcaattgccaagtggatgaaacagatcggtgtgagagtcatgtcaaggccacaaccaacaaaattgacggggtgacgaagggtttgagggattctgctactgcaaaagtcgagccacacgatgatgctccccctatcgatgtcgatgttctatccttggatgatctgataaaaaattgttgactttggttcaagagccttgataggtgaaggtatttatgggacattgtactatgcaactcttggtaatgtaacaaaaatgacagtaaagaaactttactgaaaatgaacccattgtcgagttcttggtcgaggttggtgttgccattgattattgatcacgggggttactaccaaacaatgatgcttacttctgataccaagtctcattggtttcaaggatgacacatgaaaactttgttgacatgttgggggaccgtatcaagcgtaatcttcgcatagtatcctacgaattcgcgaccatgggttctctccatgatgttctacatgggcgatgaggcggctaaactaaatagagtggggttaagtccctaattgccttgcctgcagttgacttgcaacattttccctgggatgtccatttcaagccccacaagctctagaagcttaaagccatccatgtctggcatgtgcacatcgctgatacaagatcaaacaagttcttgttttgactcaacatggtcaagatcacaacagtctgattcatcgttgtgactgcaaatacgaaacaatgtgtcttacaggtgcaacaggagagcaagcaaagcacaagcaaaagtgcaaaattgtccgaagtccaagtagaggttgcagtaccccaagcaaatgcacgagttcccaacaattcaaattagcacattgatgcatcatacattgatccattgatgcatcttcaccaggagagcagcggagttgatgcgtacccaaggtagcggaggaggatcagccatcagggtgagcctcgtgagtaggaaggtctcggcacggcccgaccgacttcgcgacgtggaccacggcgtggagtgcgcacaacacaacatgctgacttgtacttgttttgcttaaacaataaaccatttctcaataattttcccattatactgcttatgaaatgttcattgtgcacatgatttcctgtacatcggttagtgcttattttcaaacgttagtaccactccttgtgttaccatggtatcaagatgatgtgaatggctatttatcttctcttcaaattagttattaggaacaaaatgagctttagtgaatagttatgtcttggattttctccccattcaatagacttagacttctcattgttcggcctcagcagcacaccttggtgttttatcaggcctccaagccgtccctccctctagctgcttcccgccaagcctgatgctcacaagtttgctgtaattcctcatgccagctgagatcttgctctggagcaagttgtttgagatgtcaagatatcatagccggtgcagactgctggcgcttgatgattgaaagaagttgaaacggcatggatgcagtgccttcgtttgctactagcacaaagatctgaaccaagtatatttgtatgtatatcaacaagttggttgcaactaccttgtaaattgatctatcttcttt

SEQ ID NO: 656 - DNA, 3233 bp, Zea Mays
ctgcctcggaaccctagctgtggcacgcacccaggttgtcgtcctccccaccgcaccaccaccacggccactgctgcgacgatgacgagggtgaccgtcgatgcctgtctgctgccacctgaccagtacggtcgcgtgcccgtcgacccggatccgtacgcccagctttcgtgacaccgatgcggcacccaaggagggtgcctcgcgggggacccagacctccacctcttcgtcgtcttcaatggctggttagttcaactaagatattacatgtttacagacatgctcttttccccctttttcctatttaatttacaaaatactcagatcttttagtgagtgcaatgttagctcacagtttagggtttagggttttctttttgcacataagttgtggctcatgagttaacatgtttctctcttcagcgctatctgtgttaacatgtgtggtgcacgatgcctaaatgcttgcagtgataaaaatgtgatagttctcctcttgatgacatatttgtggtttccataatatgtgtaaattaaatacaaaggtagtgatgtggcgtctctgttgctgcaattgccaagtggatgaaacagatcggtgtgagagtcatgtcaaggccacaaccaacaaaattgacggggtgacgaagggtttgagggattctgctactgcaaaagtcgagccacacgatgatgctccccctatcgatgtcgatgttctatccttggatgatctgataaaaaattgttgactttggttcaagagccttgataggtgaaggtatttatgggacattgtactatgcaactcttggtaatgtaacaaaaatgacagtaaagaaactttactgaaaatgaacccattgtcgagttcttggtcgaggttggtgttgccattgattattgatcacgggggttactaccaaacaatgatgcttacttctgataccaagtctcattggtttcaaggatgacacatgaaaactttgttgacatgttgggggaccgtatcaagcgtaatcttcgcatagtatcctacgaattcgcgaccatgggttctctccatgatgttctacatggaagaaaagtatttcaaggtgctcgacctggcccaacgtttggttggatgcagcgagtgcaaattgttgttgacgctacaaaaggactcgatattttcatgggaaagttcatcagtccattgtccatagggataatagaacaattaatatcatcttgtttgaaggcttcaaggcaaagatagtagacttcagatatggctgtccacttgcacttgaactcacatcaagccttcggatatcatgccgcacaataataatcctttttttaaaggcgatgaggcggctaaactaaatagagtggggttaagtccctaattgccttgcctgcagttgacttgcaacattttccctgggatgtccatttcaagccccacaagctctagaagcttaaagccatccatgtctggcatgtgcacatcgctgatacaagatcaaacaagttcttgttttgactcaacatggtcaagatcacaacagtctgattcatcgttgtgactgcaaatacgaaacaatgtgtcttacaggtgagtagctatagcaaaagccagaacaagaatttgtacatattgcatgagaaactacctaactacttgtagtaaaagctcccaaaaaatgcagcattcagttacatggtgatagtgtgatcatcaatttagtgcttaaatattttggccatttgatgcaaacaaatctatggttgtgggcatataaaagtataatctgcaataaaacttagcaaatggtttatcaagtagaaatatttgttaatggtagtagaatcaaacgaggtacctgttttttggctgatctccatacacaacacttctatgaacttggctagagaagaaataataatatacaactggagtagagaaaaatccattaagatagaagcacggtaagttgcagtttatgagttcaattctaagcaaataagaaaacaatggcaaatcttgagcaacgccaaccttcaataaaacctggcatcagcaagagggtataatagcagggggctaggaactgtcggatccatctatagcctatcctgcataaatttaacaagttattacaataaactggccaaaagaatgtaggctcgtacaaggttgtctgaatacacttccaatcaacttatatctagaaaatatcacttagaacttagatgatgataaatataaaatgtcacacaaattgtctgttttttcaacacgagcattctttctactcagacaaatttgcaaatgtcattgagcacgtaggtgcaacaggagagcaagcaaagcacaagcaaaagtgcaaaattgtccgaagtccaagtagaggttgcagtaccccaagcaaatgcacgagttcccaacaattcaaattagcacattgatgcatcatacattgatccattgatgcatcttcaccaggagagcagcggagttgatgcgtacccaaggtagcggaggaggatcagccatcagggtgagcctcgtgagtaggaaggtctcggcacggcccgaccgacttcgcgacgtggaccacggcgtggagtgcgcacaacacaacatgctgacttgtacttgttttgcttaaacaataaaccatttctcaataattttcccattatactgcttatgaaatgttcattgtgcacatgatttcctgtacatcggttagtgcttattttcaaacgttagtaccactccttgtgttaccatggtatcaagatgatgtgaatggctatttatcttctcttcaaattagttattaggaacaaaatgagctttagtgaatagttatgtcttggattttctccccattcaatagacttagacttctcattgttcggcctcagcagcacaccttggtgttttatcaggcctccaagccgtccctccctctagctgcttcccgccaagcctgatgctcacaagtttgctgtaattcctcatgccagctgagatcttgctctggagcaagttgtttgagatgtcaagatatcatagccggtgcagactgctggcgcttgatgattgaaagaagttgaaacggcatggatgcagtgccttcgtttgctactagcacaaagatctgaaccaagtatatttgtatgtatatcaacaagttggttgcaactaccttgtaaattgatctatcttcttt

SEQ ID NO: 657 - DNA, 3639 bp, Zea Mays
ctgcctcggaaccctagctgtggcacgcacccaggttgtcgtcctccccaccgcaccaccaccacggccactgctgcgacgatgacgagggtgaccgtcgatgcctgtctgctgccacctgaccagtacggtcgcgtgcccgtcgacccggatccgtacgcccagctttcgtgacaccgatgcggcacccaaggagggtgcctcgcgggggacccagacctccacctcttcgtcgtcttcaatggctggttagttcaactaagatattacatgtttacagacatgctcttttccccctttttcctatttaatttacaaaatactcagatcttttagtgagtgcaatgttagctcacagtttagggtttagggttttctttttgcacataagttgtggctcatgagttaacatgtttctctcttcagcgctatctgtgttaacatgtgtggtgcacgatgcctaaatgcttgcagtgataaaaatgtgatagttctcctcttgatgacatatttgtggtttccataatatgtgtaaattaaatacaaaggtagtgatgtggcgtctctgttgctgcaattgccaagtggatgaaacagatcggtgtgagagtcatgtcaaggccacaaccaacaaaattgacggggtgacgaagggtttgagggattctgctactgcaaaagtcgagccacacgatgatgctccccctatcgatgtcgatgttctatccttggatgatctgataaaaaattgttgactttggttcaagagccttgataggtgaaggtatttatgggacattgtactatgcaactcttggtaatgtaacaaaaatgacagtaaagaaactttactgaaaatgaacccattgtcgagttcttggtcgaggttggtgttgccattgattattgatcacgggggttactaccaaacaatgatgcttacttctgataccaagtctcattggtttcaaggatgacacatgaaaactttgttgacatgttgggggaccgtatcaagcgtaatcttcgcatagtatcctacgaattcgcgaccatgggttctctccatgatgttctacatggtatgattttgcacatcctctgcatcttgctgcataactccacagttaattgaacactattgtttcgactggtaacttgcaatattgttttctaattcatgtcaataggaagaaaagtatttcaaggtgctcgacctggcccaacgtttggttggatgcagcgagtgcaaattgttgttgacgctacaaaaggactcgatattttcatgggaaagttcatcagtccattgtccatagggataatagaacaattaatatcatcttgtttgaaggcttcaaggcaaagatagtagacttcagatatggctgtccacttgcacttgaactcacatcaagccttcggatatcatgccgcacaataataatcctttttttaaagtaactatttgtgttacttaactttagttgtgctttctgcttttgcatgtattgtctgattagttttcgattaggacaacaagttggatggtgtttgtttcttaattgtgtgattatttttttaaaagcatgcctttttattactgaagttaagcataaaaggaacacattatgatttgttttccccttcgatagaatttcttatgatgttagatgcaggcaatctcgttgtacaagcaggtgctagaagcaaacattttgtttggtccataaagtacgcaaacatttactatattgcaatgtggtattaactatattcagtgaaagccccatttatgttgggcaaaggctttggaacccctccaacacccaaacccctcaccaacgtcacctctatgaccaaaagtagtagagaaaaaagattaggacactggcataactgcaatgacatattttaaataaaaactagagtctaaatcctgctgaatagttgctttaggaacagctctaggtgctcaaatgatgcacattgcccttggtccttgttgttttccttataactcaataaatgtcaactttttgcttgttcctgagctctaatcacagcttgtacaattagcttggctaaactgattgccttgtgtgcaaggaggcgttatttttactaatatcatcatttaactattgcgtgcgttgggttaatttggttcattgattctttttcttttttaagcaatcaagcttaaatgattagcttcatagattaggcaatccgttctgaacaaagttttgcaaaaggccaacatcacattgtcattctgtcatacacttcatacaggaaagcatttcgctagatcatgttgcattcctttttttgtttaatttaagttggcggcatagtagcagtgcttttagctggagtttctgaaattgctaaggcttcatttttcacatgtcctttcttccacatttatagctatggaacaaactgtgtcctttcttccacgtttataagattgattgattagcaaaaaaacaaagaacacttcaataaatatattatatatgcgcttgtcatgaattcccgttgtatataatgcctaaacagtactacttgcttaattagggcgatgaggcggctaaactaaatagagtggggttaagtccctaattgccttgcctgcagttgacttgcaacattttccctgggatgtccatttcaagccccacaagctctagaagcttaaagccatccatgtctggcatgtgcacatcgctgatacaagatcaaacaagttcttgttttgactcaacatggtcaagatcacaacagtctgattcatcgttgtgactgcaaatacgaaacaatgtgtcttacaggtgcaacaggagagcaagcaaagcacaagcaaaagtgcaaaattgtccgaagtccaagtagaggagagcagcggagttgatgcgtacccaaggtagcggaggaggatcagccatcagggtgagcctcgtgagtaggaaggtctcggcacggcccgaccgacttcgcgacgtggaccacggcgtggagtgcgcacaacacaacatgctgacttgtacttgttttgcttaaacaataaaccatttctcaataattttcccattatactgcttatgaaatgttcattgtgcacatgatttcctgtacatcggttagtgcttattttcaaacgttagtaccactccttgtgttaccatggtatcaagatgatgtgaatggctatttatcttctcttcaaattagttattaggaacaaaatgagctttagtgaatagttatgtcttggattttctccccattcaatagacttagacttctcattgttcggcctcagcagcacaccttggtgttttatcaggcctccaagccgtccctccctctagctgcttcccgccaagcctgatgctcacaagtttgctgtaattcctcatgccagctgagatcttgctctggagcaagttgtttgagatgtcaagatatcatagccggtgcagactgctggcgcttgatgattgaaagaagttgaaacggcatggatgcagtgccttcgtttgctactagcacaaagatctgaaccaagtatatttgtatgtatatcaacaagttggttgcaactaccttgtaaattgatctatcttcttt

SEQ ID NO: 658 - DNA, 2108 bp, Zea Mays
ctgcctcggaaccctagctgtggcacgcacccaggttgtcgtcctccccaccgcaccaccaccacggccactgctgcgacgatgacgagggtgaccgtcgatgcctgtctgctgccacctgaccagtacggtcgcgtgcccgtcgacccggatccgtacgcccagctttcgtgacaccgatgcggcacccaaggagggtgcctcgcgggggacccagacctccacctcttcgtcgtcttcaatggctgtgatgtggcgtctctgttgctgcaattgccaagtggatgaaacagatcggtgtgagagtcatgtcaaggccacaaccaacaaaattgacggggtgacgaagggtttgagggattctgctactgcaaaagtcgagccacacgatgatgctccccctatcgatgtcgatgttctatccttggatgatctgataaaaaattgttgactttggttcaagagccttgataggtgaaggtatttatgggacattgtactatgcaactcttggtaatgtaacaaaaatgacagtaaagaaactttactgaaaatgaacccattgtcgagttcttggtcgaggatgacacatgaaaactttgttgacatgttgggggaccgtatcaagcgtaatcttcgcatagtatcctacgaattcgcgaccatgggttctctccatgatgttctacatggaagaaaagtatttcaaggtgctcgacctggcccaacgtttggttggatgcagcgagtgcaaattgttgttgacgctacaaaaggactcgatattttcatgggaaagttcatcagtccattgtccatagggataatagaacaattaatatcatcttgtttgaaggcttcaaggcaaagatagtagacttcagatatggctgtccacttgcacttgaactcacatcaagccttcggatatcatgccgcacaataataatcctttttttaaaggcgatgaggcggctaaactaaatagagtggggttaagtccctaattgccttgcctgcagttgacttgcaacattttccctgggatgtccatttcaagccccacaagctctagaagcttaaagccatccatgtctggcatgtgcacatcgctgatacaagatcaaacaagttcttgttttgactcaacatggtcaagatcacaacagtctgattcatcgttgtgactgcaaatacgaaacaatgtgtcttacaggtgcaacaggagagcaagcaaagcacaagcaaaagtgcaaaattgtccgaagtccaagtagaggttgcagtaccccaagcaaatgcacgagttcccaacaattcaaattagcacattgatgcatcatacattgatccattgatgcatcttcaccaggagagcagcggagttgatgcgtacccaaggtagcggaggaggatcagccatcagggtgagcctcgtgagtaggaaggtctcggcacggcccgaccgacttcgcgacgtggaccacggcgtggagtgcgcacaacacaacatgctgacttgtacttgttttgcttaaacaataaaccatttctcaataattttcccattatactgcttatgaaatgttcattgtgcacatgatttcctgtacatcggttagtgcttattttcaaacgttagtaccactccttgtgttaccatggtatcaagatgatgtgaatggctatttatcttctcttcaaattagttattaggaacaaaatgagctttagtgaatagttatgtcttggattttctccccattcaatagacttagacttctcattgttcggcctcagcagcacaccttggtgttttatcaggcctccaagccgtccctccctctagctgcttcccgccaagcctgatgctcacaagtttgctgtaattcctcatgccagctgagatcttgctctggagcaagttgtttgagatgtcaagatatcatagccggtgcagactgctggcgcttgatgattgaaagaagttgaaacggcatggatgcagtgccttcgtttgctactagcacaaagatctgaaccaagtatatttgtatgtatatcaacaagttggttgcaactaccttgtaaattgatctatcttcttt

SEQ ID NO: 659 - DNA, 2447 bp, Zea Mays
ttttttttgcatgtgtacgcatgtaatctatagatagaaggttaaaatatctaaaacgacattgaaactaaatgtaacatctgtttaagtcttattttttggagtcaatattacgaacgataaaagtaggaatcacattattttgcggtcccagaaatctatatctatctagccttctcctttcccttgcccagtttacttactacccacgcttggcgcgtgcatcggatcggatcccggccccgcgtcatcccttcctttccacggcccggtcgtcgactgtctcgcgctccactttccacggcgaatccattcttaaatgatctacactgctgcataaacccctgcggccgggtagtctcgaagactccacctaaaacggccaggccagacttggtcgtgccggcgtgcggcgtgcccccgagctagctgtggacctgggagccacgacggcgatcatgggctcttcttccggggcgccgctgctcgtcgctcacccgagccgggggaaggaggacctgggagatcagcgccgcctccgctggtgctgcggcgtttcgtcggaagggcggtgggcggaggcgacggcggaggccgggcggctggcggcgctggcggcgcccatgatcgccgtggcgctgctgcagctcatgatgcaggtcatctccaccatcatggtgggccacctcggcgaggtgcccctcgccggcgccgctatcgccggctcgctcaccaacgtctccggatttagcgtcctcatgggactggcatgcggattggaaactatttgtggacaggccttcggggcagaacagtatcataaggtagctttatatacctaccggtctatagtcgtactccttattgcgagtgtacccatggccattttatgggttttcctcccagacgtacttcctctcataggtcaggatccacaaatagcgattgaggccgggaggtatgccttgtggcttatccctggtttattcgccttcagtgtggctcaatgcctttcaaagttcctccaatctcagagcttgatttttcccctggttctgagctccttgactacactcgctgtcttcattcctttgtgctggttcatggtttacaaagttgggatgggtaatgctggagctgcttttgcagtcagcatctgtgactgggttgaagtcacggttcttggtctttatattaagttctcaccttcttgtgagaaaactcgtgctccattcacgtgggaagcttttcaagggattggcagtttcatgcggttggctgtaccttcggctcttatggtttgtcttgaatggtggtcatatgagctgcttgttctgctttctgggatgttaccaaatgcagcacttgaaacttctgtgctctctatatgtatctctacagtaatactggtgtacaatctcccatatggcatcggaacagctgcaagcgtgcgtgtgtcaaatgaactaggcgcggggaacccagatagtgcccgcttagtagtagttgtcgccttatccattataatcttcacggcagttctggtgagcgtaactcttctatcgttgcgccatttcatcggaattgctttcagcaatgaggaggaggttgtaaattatgtcaccagaatggtaccgttgctttcgatttcagttattactgacaacctccaaggagtcctttcaggtatttctagaggctgtggttggcagcatttaggcgcctatgttaacttgggcgcgttctatcttgttggcattcctgtggcgctcgttgccggttttgctttgcatctaggaggagctgggttctggattggtatgatagctggtggagccacacaggtcactctcctaacaatcattactgcaatgacaaactggcggaagatggctgacaaagctagagatagagtatatgagggaagtctgcctatacaagcaaattgattattacgaacttgaagtcatatccgattatctccaaatttcgctgcatcctagttgtttgttgaaagagctatccatgccacggacaccctaccccccacccaaaaaaaagttggcaatgaaagtcgtaaaagatgggctatttttatacctactttgaactaggtgatgatgagaaccgtcttatcttatagctgtttggttcagtcccagtagacctgtctggcctaggcagcgtcccaggccattgattttggacgcttgagggctacaatggaatggctgcatgcatatctgcctggtaggctgcaatccagacgtgcccatagtctacggtgcaagcaaacagctatactatacgatctattgattatcaccttagggattaatgcacaagtaggatgaaatttgatatgacagtcatgttaatgagaagagaatgagtataacaacatatgaattggggcaaaggtccttgttatatgtccttatattttt

SEQ ID NO: 660 - DNA, 2537 bp, Zea Mays
ttttttttgcatgtgtacgcatgtaatctatagatagaaggttaaaatatctaaaacgacattgaaactaaatgtaacatctgtttaagtcttattttttggagtcaatattacgaacgataaaagtaggaatcacattattttgcggtcccagaaatctatatctatctagccttctcctttcccttgcccagtttacttactacccacgcttggcgcgtgcatcggatcggatcccggccccgcgtcatcccttcctttccacggcccggtcgtcgactgtctcgcgctccactttccacggcgaatccattcttaaatgatctacactgctgcataaacccctgcggccgggtagtctcgaagactccacctaaaacggccaggccagacttggtcgtgccggcgtgcggcgtgcccccgagctagctgtggacctgggagccacgacggcgatcatgggctcttcttccggggcgccgctgctcgtcgctcacccgagccgggggaaggaggacctgggagatcagcgccgcctccgctggtgctgcggcgtttcgtcggaagggcggtgggcggaggcgacggcggaggccgggcggctggcggcgctggcggcgcccatgatcgccgtggcgctgctgcagctcatgatgcaggtcatctccaccatcatggtgggccacctcggcgaggtgcccctcgccggcgccgctatcgccggctcgctcaccaacgtctccggatttagcgtcctcatgggactggcatgcggattggaaactatttgtggacaggccttcggggcagaacagtatcataaggtagctttatatacctaccggtctatagtcgtactccttattgcgagtgtacccatggccattttatgggttttcctcccagacgtacttcctctcataggtcaggatccacaaatagcgattgaggccgggaggtatgccttgtggcttatccctggtttattcgccttcagtgtggctcaatgcctttcaaagttcctccaatctcagagcttgatttttcccctggttctgagctccttgactacactcgctgtcttcattcctttgtgctggttcatggtttacaaagttgggatgggtaatgctggagctgcttttgcagtcagcatctgtgactgggttgaagtcacggttcttggtctttatattaagttctcaccttcttgtgagaaaactcgtgctccattcacgtgggaagcttttcaagggattggcagtttcatgcggttggctgtaccttcggctcttatggtttgtcttgaatggtggtcatatgagctgcttgttctgctttctgggatgttaccaaatgcagcacttgaaacttctgtgctctctatatgtatctctacagtaatactggtgtacaatctcccatatggcatcggaacagctgcaaggtaggagtaagcatatcttgtcatcaccatttatcaaattaattatatatctctctctactgcccacttaacctgatatcttctgtgtccatgtttcagcgtgcgtgtgtcaaatgaactaggcgcggggaacccagatagtgcccgcttagtagtagttgtcgccttatccattataatcttcacggcagttctggtgagcgtaactcttctatcgttgcgccatttcatcggaattgctttcagcaatgaggaggaggttgtaaattatgtcaccagaatggtaccgttgctttcgatttcagttattactgacaacctccaaggagtcctttcaggaggagctgggttctggattggtatgatagctggtggagccacacaggtcactctcctaacaatcattactgcaatgacaaactggcggaagatggctgacaaagctagagatagagtatatgagggaagtctgcctatacaagcaaattgattattacgaacttgaagtcatatccgattatctccaaatttcgctgcatcctagttgtttgttgaaagagctatccatgccacggacaccctaccccccacccaaaaaaaagttggcaatgaaagtcgtaaaagatgggctatttttatacctactttgaactaggtgatgatgagaaccgtcttatcttataggtgatgatgctgtgtctagcttatagcttagactatctctaggctcaagcaatttatttatcttcatctcattttaaactctattttgtaaacatataggacctgtttggttcagtcccagtagacctgtctggcctaggcagcgtcccaggccattgattttggacgcttgagggctacaatggaatggctgcatgcatatctgcctggtaggctgcaatccagacgtgcccatagtctacggtgcaagcaaacagctatactatacgatctattgattatcaccttagggattaatgcacaagtaggatgaaatttgatatgacagtcatgttaatgagaagagaatgagtataacaacatatgaattggggcaaaggtccttgttatatgtccttatattttt

SEQ ID NO: 661 - DNA, 2555 bp, Zea Mays
ttttttttgcatgtgtacgcatgtaatctatagatagaaggttaaaatatctaaaacgacattgaaactaaatgtaacatctgtttaagtcttattttttggagtcaatattacgaacgataaaagtaggaatcacattattttgcggtcccagaaatctatatctatctagccttctcctttcccttgcccagtttacttactacccacgcttggcgcgtgcatcggatcggatcccggccccgcgtcatcccttcctttccacggcccggtcgtcgactgtctcgcgctccactttccacggcgaatccattcttaaatgatctacactgctgcataaacccctgcggccgggtagtctcgaagactccacctaaaacggccaggccagacttggtcgtgccggcgtgcggcgtgcccccgagctagctgtggacctgggagccacgacggcgatcatgggctcttcttccggggcgccgctgctcgtcgctcacccgagccgggggaaggaggacctgggagatcagcgccgcctccgctggtgctgcggcgtttcgtcggaagggcggtgggcggaggcgacggcggaggccgggcggctggcggcgctggcggcgcccatgatcgccgtggcgctgctgcagctcatgatgcaggtcatctccaccatcatggtgggccacctcggcgaggtgcccctcgccggcgccgctatcgccggctcgctcaccaacgtctccggatttagcgtcctcatgggactggcatgcggattggaaactatttgtggacaggccttcggggcagaacagtatcataaggtagctttatatacctaccggtctatagtcgtactccttattgcgagtgtacccatggccattttatgggttttcctcccagacgtacttcctctcataggtcaggatccacaaatagcgattgaggccgggaggtatgccttgtggcttatccctggtttattcgccttcagtgtggctcaatgcctttcaaagttcctccaatctcagagcttgatttttcccctggttctgagctccttgactacactcgctgtcttcattcctttgtgctggttcatggtttacaaagttgggatgggtaatgctggagctgcttttgcagtcagcatctgtgactgggttgaagtcacggttcttggtctttatattaagttctcaccttcttgtgagaaaactcgtgctccattcacgtgggaagcttttcaagggattggcagtttcatgcggttggctgtaccttcggctcttatggtttgtcttgaatggtggtcatatgagctgcttgttctgctttctgggatgttaccaaatgcagcacttgaaacttctgtgctctctatatgtatctctacagtaatactggtgtacaatctcccatatggcatcggaacagctgcaaggtaggacgtgcgtgtgtcaaatgaactaggcgcggggaacccagatagtgcccgcttagtagtagttgtcgccttatccattataatcttcacggcagttctggtgagcgtaactcttctatcgttgcgccatttcatcggaattgctttcagcaatgaggaggaggttgtaaattatgtcaccagaatggtaccgttgctttcgatttcagttattactgacaacctccaaggagtcctttcaggtatttctagaggctgtggttggcagcatttaggcgcctatgttaacttgggcgcgttctatcttgttggcattcctgtggcgctcgttgccggttttgctttgcatctaggaggagctgggttctggattggtatgatagctggtggagccacacaggtcactctcctaacaatcattactgcaatgacaaactggcggaagatggctgacaaagctagagatagagtatatgagggaagtctgcctatacaagcaaattgattattacgaacttgaagtcatatccgattatctccaaatttcgctgcatcctagttgtttgttgaaagagctatccatgccacggacaccctaccccccacccaaaaaaaagttggcaatgaaagtcgtaaaagatgggctatttttatacctactttgaactaggtgatgatgagaaccgtcttatcttataggtgatgatgctgtgtctagcttatagcttagactatctctaggctcaagcaatttatttatcttcatctcattttaaactctattttgtaaacatataggacctgtttggttcagtcccagtagacctgtctggcctaggcagcgtcccaggccattgattttggacgcttgagggctacaatggaatggctgcatgcatatctgcctggtaggctgcaatccagacgtgcccatagtctacggtgcaagcaaacagctatactatacgatctattgattatcaccttagggattaatgcacaagtaggatgaaatttgatatgacagtcatgttaatgagaagagaatgagtataacaacatatgaattggggcaaaggtccttgttatatgtccttatattttt

SEQ ID NO: 662 - DNA, 1900 bp, Zea Mays
gaacgataaaagtaggaatcacattattttgcggtcccagaaatctatatctatctagccttctcctttcccttgcccagtttacttactacccacgcttggcgcgtgcatcggatcggatcccggccccgcgtcatcccttcctttccacggcccggtcgtcgactgtctcgcgctccactttccacggcgaatccattcttaaatgatctacactgctgcataaacccctgcggccgggtagtctcgaagactccacctaaaacggccaggccagacttggtcgtgccggcgtgcggcgtgcccccgagctagctgtggacctgggagccacgacggcgatcatgggctcttcttccggggcgccgctgctcgtcgctcacccgagccgggggaaggaggacctgggagatcagcgccgcctccgctggtgctgcggcgtttcgtcggaagggcggtgggcggaggcgacggcggaggccgggcggctggcggcgctggcggcgcccatgatcgccgtggcgctgctgcagctcatgatgcaggtcatctccaccatcatggtgggccacctcggcgaggtgcccctcgccggcgccgctatcgccggctcgctcaccaacgtctccggatttagcgtcctcatgggactggcatgcggattggaaactatttgtggacaggccttcggggcagaacagtatcataagtcagcatctgtgactgggttgaagtcacggttcttggtctttatattaagttctcaccttcttgtgagaaaactcgtgctccattcacgtgggaagcttttcaagggattggcagtttcatgcggttggctgtaccttcggctcttatggtttgtcttgaatggtggtcatatgagctgcttgttctgctttctgggatgttaccaaatgcagcacttgaaacttctgtgctctctatatgtatctctacagtaatactggtgtacaatctcccatatggcatcggaacagctgcaagcgtgcgtgtgtcaaatgaactaggcgcggggaacccagatagtgcccgcttagtagtagttgtcgccttatccattataatcttcacggcagttctggtgagcgtaactcttctatcgttgcgccatttcatcggaattgctttcagcaatgaggaggaggttgtaaattatgtcaccagaatggtaccgttgctttcgatttcagttattactgacaacctccaaggagtcctttcaggaggagctgggttctggattggtatgatagctggtggagccacacaggtcactctcctaacaatcattactgcaatgacaaactggcggaagatggctgacaaagctagagatagagtatatgagggaagtctgcctatacaagcaaattgattattacgaacttgaagtcatatccgattatctccaaatttcgctgcatcctagttgtttgttgaaagagctatccatgccacggacaccctaccccccacccaaaaaaaagttggcaatgaaagtcgtaaaagatgggctatttttatacctactttgaactaggtgatgatgagaaccgtcttatcttataggacctgtttggttcagtcccagtagacctgtctggcctaggcagcgtcccaggccattgattttggacgcttgagggctacaatggaatggctgcatgcatatctgcctggtaggctgcaatccagacgtgcccatagtctacggtgcaagcaaacagctatactatacgatctattgattatcaccttagggattaatgcacaagtaggatgaaatttgatatgacagtcatgttaatgagaagagaatgagtataacaacatatgaattggggcaaaggtccttgttatatgtccttatattttt

SEQ ID NO: 663 - DNA, 1157 bp, Zea Mays
cccctctcccctgggttgtctccagttctcctctcctcccacagacttgccacttgcacaattgcatcgcctaccgctatttgcaggaaccaggaagaagggaaccacgagttctcagatgaaaccctgtgcaagctgatgatacctcctcggatctgaagaactgcctgcgtcggctgtattggcttcggcaggaagaggtgaattcagcaaggccccccgagcccttctgcatgtaagtgatggatcgcctattcgtctctgttcttgtgctgtgtcgacatcaacaggctttacttccacggaatggtcgatcgatcggaggcgtttctggttctacaactacggaggagatccgaaatctggttttttgttcgactagaggctttacttccaaggaatggtttttttttgtttctccacatacatgcatggacaagtagccagcagtagtctgaagaagctagagatgcttaatagtagtcattggttgatgcatggttctattggtcccgcatgctctctgtcaagccggagctacgatgaccaaattctgttctttttgcgtaggattaggatgtgctgggagaaccctcaacctctagctagtggaacaacaaaatcaggccatcgtcacgggcaggcccgcgcaaagattattaggtagtagcatacgctgctgccgactgataatgtaatggcgcggcgctcaactggcagccaaacaaacgcaggctctgacggtcgccgatcgagctggccccatgaggccatgaggggaggcgtttgccttttcgccaccacttgtgaatacttgtatgtttgcttgagaatcctgcaactcaaagttttggaagcatagtcgggggtcggggcagatcgctgtcatcgagagagagagagagagagagagagagagagagagagagagagagacaagcaagatgtgcaaattgcagcctaaattcttttcttttcagcaacttgccagcctaaactaataacacccacgcaaggagtccaaaaccggctgtgccgatgccgattaggtgcccaccggatcgcgaggcggttttcgcaatcgcacccgtcggtcagaacagaagacccagaaacttgcaatgccgattaggtgcctaaacgaaatggcaaagaac

SEQ ID NO: 664 - DNA, 1050 bp, Zea Mays
ctatttgcaggaaccaggaagaagggaaccacgaggtgcatcatccccacatcacttgtttctcagatgaaaccctgtgcaagctgatgatacctcctcggatctgaagaactgcctgcgtcggctgtattggcttcggcaggaagaggtgaattcagcaaggccccccgagcccttctgcatgctttacttccacggaatggtcgatcgatcggaggcgtttctggttctacaactacggaggagatccgaaatctggttttttgttcgactagaggctttacttccaaggaatggtttttttttgtttctccacatacatgcatggacaagtagccagcagtagtctgaagaagctagagatgcttaatagtagtcattggttgatgcatggttctattggtcccgcatgctctctgtcaagccggagctacgatgaccaaattctgttctttttgcgtaggattaggatgtgctgggagaaccctcaacctctagctagtggaacaacaaaatcaggccatcgtcacgggcaggcccgcgcaaagattattaggtagtagcatacgctgctgccgactgataatgtaatggcgcggcgctcaactggcagccaaacaaacgcaggctctgacggtcgccgatcgagctggccccatgaggccatgaggggaggcgtttgccttttcgccaccacttgtgaatacttgtatgtttgcttgagaatcctgcaactcaaagttttggaagcatagtcgggggtcggggcagatcgctgtcatcgagagagagagagagagagagagagagagagagagagagagagagacaagcaagatgtgcaaattgcagcctaaattcttttcttttcagcaacttgccagcctaaactaataacacccacgcaaggagtccaaaaccggctgtgccgatgccgattaggtgcccaccggatcgcgaggcggttttcgcaatcgcacccgtcggtcagaacagaagacccagaaacttgcaatgccgattaggtgcctaaacgaaatggcaaagaac

SEQ ID NO: 665 - DNA, 3195 bp, Zea Mays
tagacgtacttgctgctgcattgtttgttttcttgtttttttttccgctctgccttcttcatcttgctgcggatttcctttactattggttttagccttgtaggttttttggccttcctttctgtttcactgcttcagggttcttcagaatttcaactattggtctgctctgattttcagcattgttccctcccactgttcctgtccaaggtccccctattataacttcttctgatgataacatttggcaaaccttttcttgtagtttgtctaattcttcagatatatactgcatagtcttctctgtttttgctgctgctgatgtgagcaatgctgctttccggctcaataggttatgccttagtactgggtgagttgccattgatgcatgcatcagtggtgcatctttttggttttgttttttcttccacctgtccattatgtattcctctgggattttcgtgagcccttcttcaatgattactttaagtatgtgggagcataaaatgccatccttgtcaaacttgccgcatacacaagtgaactcttccattccatatgttaggttagccataacaaggtacctccttgttttatgtggtttgtgttcctggtttgttcttgtatacacctcaaaagtatgcggggcagctgttctgttgtaacttagttttggggttgtttgcaactgggactggaattttttgaatatgttcctattgtatgcttcttgtgcttgcctctctattgtatatccaaacattagttcctttggacgtttccgattgctttcattatcctcatactcctctgacacattcacttgttccacaatcctttggtactcacccaagaagctaatcacactataagttgaagccacattgtctttaaaccttgagtttgtgccctcgcttcttcctgtactttgcaagaatgggaagaagtcatttttgaagtataccggtatgaacctagctcttgtttcccacattttgttgaaatacttattgttttctaggtggtagtcctcaaccattttcttccagtccctctcaaattcatgcacagttagtgaatagttaactatgtcctcaaagtcctctgccattcctaaatttcttgcaaagcaatttccgtttttctggtagcatttactttttatgtggaagaagcaattcctatgcactgaaatgtgttgaatatccacttgaatgtttctattgtttcatcagaaatgaatgcacatgcgaacaagcatgtatgtgcatgccctgtaactcccacaaatggcgcaaatggtaggttgtacttgttagtcatgtatgtggtgtcgaaactgatgcaatctccatacatctcgtagtatttcaaagatgtcccatcagcccaaaacatgtgcttcacttttttatcttctccaatgacaatactatagaagaaattgggatcttccttatgtttttcctggaaaaactgcagtgcttgtgtcatatcatttcctgttacttccttgtttaatttagttctgtagttacttacatctttttttttgtacggcaatgcggtcgtacctcctctcagataagacaatatagcaatcatctttcgagtaggtatgttgttgtggttcaatgttcgtataactcctttttccatttcagtcatgtatttatgtccgctaaacatgttgttgctgtcggctggtctgagatcatgattgtgttccaagtctaacctatcgatcacccacttctgttgatgttcttttataaccatgactactctgcagtctgttttaacctagacatttgtattcctttttggccctttctcgcacccctgatgttctatgcaattatcttgttcctgctgatcagcttttttgtttttccatgcttgttacatttcagctccacctttgtaacctcattgtttctttttttgttggaagttctgaaagtgtgggtgattgctggtttaaaaccagccaaaaacccatagaagaataagaagtgctctgcatctcccctggtcttaaattccatcccaacttgagttttcacgagcacttgatgtttcaactgcccttccatctacatttggtgcacaatcagatcatttggagttttcaagatggatgatttcgtacctcagcgtatgcacttgaacatccatccacttcaaaattcttaccttgtttatggacatatagctagacgaaatgcagctgttgtgctctagtcatcaaataagaaggcataggttgagaagatcatggagaccaagcaagtttggaggcggaggcgtaggggcaagttcatgtaataggtttgttttttgtgtggcagatcatcattggatggctaatggatagtgtcaggtttctctccaattgcagaggttatttttacgtgggtatcactgattgaatgagagaaacaacagtaaaatgagggcgtggggctcagatctggcggcgaggattgttgtatcgaacctgcacaagaacacaaagaagtcattctcggagacgtaagtaacgactggctttggtctaatttcattcattcatttggattgggtggtgagttggggtgtggctgttgtggatgcaggtttaaggacatgtacatgcacttcaacaagagatcgaggctgatgcccctttggtcgctgaagatgtttatgaaatcatcatgaagaatgctgctcgcttggacagtgagataatttatgatagggatttcgactacgactattttggcttcaaaactctagagaggtcttgcctgttgaagcttgatggtaagttaagcagctgttttcttatatgcatgaaagatgacaacattgagagaatctatgaaaccctcaaagagtgtgctgtaataagcaaatctgctggaggaattggtgtctcagttcataatatccgtgctactgagagttatattcgaggaacaaatggaacatcaaatggaattgttcttatgttatgtgtctttaatgatactgctcgctatgttgatcagggtggtggcaaaagaaaggtgcattttgctgtatacttggagccttggcatgctgatatttttgagttccttgatctgagaaagaaccccgggaaggttcttaaggaatcaagtgacgaggaaagggagcaagttgaagagatgatgaagtactaggttc

SEQ ID NO: 666 - DNA, 800 bp, Zea Mays
aagctggcggcgaggattgttgtatcgaacctgcacaagaacacaaagaagtcattctcggagacgtttaaggacatgtacatgcacttcaacaagagatcgaggctgatgcccctttggtcgctgaagatgtttatgaaatcatcatgaagaatgctgctcgcttggacagtgagataatttatgatagggatttcgactacgactattttggcttcaaaactctagagaggtcttgcctgttgaagcttgatggtaaggtcgttgaaaggccacaacagatgttaatgagggtttcactagggatacacaaggaagacatcgagtctgccatcaggacgtaccatctgatgtcccagcgctggttttctcatgcttcaccgatgcttttttcaatgttggcacgtcgaggccccaattaagcagctgttttcttatatgcatgaaagatgacaacattgagagaatctatgaaaccctcaaagagtgtgctgtaataagcaaatctgctggaggaattggtgtctcagttcataatatccgtgctactgagagttatattcgaggaacaaatggaacatcaaatggaattgttcttatgttatgtgtctttaatgatactgctcgctatgttgatcagggtggtggcaaaagaaaggtgcattttgctgtatacttggagccttggcatgctgatatttttgagttccttgatctgagaaagaaccccgggaaggttcttaagaaatcaagtgacgaggaaagggagcaagctgaagagatgatgaagtactaggttc

SEQ ID NO: 667 - DNA, 354 bp, Zea Mays
ccgcgggcagctgctgcttcctcggcgacggctggatgatgaggcggagcccgacgagctgcgggtcgccggcggaagagacctggcgctcttgggatcattacgtactctgcgtgtgcgggactagcgttaatgtagctagcggtctcggactctcttctgtgtacccggagaaggaaggtatttcgcgggaggagacgaacgcgggactggagcaatgtccactggtgaggtgctcctccagctgcactgccggggaggggagggggatgccctgcgctcatttatactagtgcgcatcgctcgtgctgtggcctgtggacacacacacacacacacaatgcaaacgtgttc

SEQ ID NO: 668 - DNA, 2869 bp, Zea Mays
ctgctgccgtgctagcttccactgcgcggacgccgcaggccgcacacgcaatccatctatccatccatccatccgtcttgagaggcggcagcgtcatctgttagagaaaaaacaactgcggtgaatcagtcggatttggaggagccgaataaataaccaaggatactgcgaagggactcctcccggccccaaaagcactttccttgcgtccccgtcagggagggagggagggaggggagcattgctgtgcgggatggcgaggaggaggatgaggaggggaggcggtggcggtggcggtggcggtggcggggtggtggatgtggtgcgggtgcggcggctgctgctgctgtccctgacctgctgcagcagcatttggccaggcggacggatcttcgctgctgcggacactgaccccaacgatcttaacgtcctcaacacgctcttcaccagtctgaattctcctgggcagctcacaggttggcaggcgaatgggggtgatccttgtggccagtcatggaagggcattacttgctcaggatcaggggtcactaaaatccaattaccaaacttgtcactcactggaaatttggcctacaacatgaataacttgggttcattagttgagcttgacatgagccaaaataaccttggcggtggaggtcaaatacagtacaatcttcccaatatgaagcttgagaaactcaatcttgcaggaaatcaatttggtggaaatttaccctactcaatttcgacgatgcctaatcttaagtatttaaaccttaatcataaccaactacaaggaaacatcagtgatgtattttccaacctttacagtttgtcagaactggatctgtcctttaattcccttactggtgatctaccacaaagtttcactggattgtcaagcctgaaaaaagtgtatttgcagaacaaccaatttactggtaatatcaatgtcttagccaatctcccccttgaaactttgaatgttgcgaacaaccatttcactggttggattcctagtcagcttaagaagataaacagtctacagactgatggaaattcttggagcacaggaccagcgccacctccacctccatacacagcgccgcctcctcctccaaaccattggaatgctgatggttcatcaagttcatcaagttctggtggaagatctgggataggtggtggaggtgtagcaggaatcattatatcgttgctggttgttggatcagttgttgcatttcttgtgatcaaaagaagaaaacgcaaagctgctatgaaagaacattttgaacagcaccagccattcacttccttcccttcaaatgaagttaaagacatgaagcctgtctacgaggccaccacagtagacatagagtctttggcttcacctgcttcagttaatctgaaaccacctccgaagatagaacgaaacaaatcatttgatgatgacgatgatttttcaaacaagcttgttgcaaagaaaagtaatataacacctataaatgcaactgtttattcagttgcagatctacagatggcaacagatagctttagcttcgacaaccttgttggagagggtacttttggacgtgtttacagggcacaattcaatgatggaaaggttctggcgatcaagaaattagatagtactgtgatgccatttcaatcatctgatgactttgctgaactggtctcgaacatttcaaaattgcaccatccgaatctgaatgagcttgtgggctattgcatggaacatggccagcacttgcttgtgtatgatttccacaggaatggatcacttcatgatctactccacctttcagatgagtacagcaagccacttagctggaacactcgtatcaagatcgcactcggctctgcccgtgcactggagtaccttcatgaaatatgttctccatccatcatccataagaatttcaagtcgtcaaacattttgctggactcagaattcaatccacacctttcagatgctggacttgcaagctttattcctgatgctgaattccagcagaacaaagtgccggatacactgccccagaagtggacatgaccggtcagtacaccctcaagagtgatgtctacagctttggagttgtcatgcttgaactattgacaggacgtagaccatttgacagctctagacccaggtcagagcagtcacttgtgcggtgggcaacaccccagctgcatgacatcgacgcattggacaggatggtcgatcctgcactcaagggtctatacccagccaaatctctatcccgatttgctgatgtccttgccctgtgtgtccagcctgaaccagaattcaggccaccaatgtcagaggtggtgcaagcattggttcgacttgtgcagagggccaacatgacgaagaggatgcttgatggggatacttctcggcgaccagatgacctggaccaagatttcatatgacaagctgaactcttgtcagattgtatttatttcgttcgactagcggcccagcagagacataatcacacaagaggaagaaacagaactctgtcagcttcgccagtacataatcacaagtttttcttggtagcaaagttgtgctatatggttgtactgtgtctacaaaatagtaccttgatcttacgctaatggcatattgttataattctttggtaacttatatgcaaatgccccagataaacaaaactatggtgaagtgtgccgaatgttaaaataactgattagtccagtactgctgcatcaactgaaacaagttgcacagtggaaatatttatcttggtccctcaactatccccttgaggcttattttcgaccttgaactttcaacatgactttcagacttcatcgg

SEQ ID NO: 669 - DNA, 3304 bp, Zea Mays
cgcacacgcaatccatctatccatccatccatccgtcttgagaggcggcagcgtcatctgttagagaaaaaacaactgcggtgaatcagtcggatttggaggagccgaataaataaccaaggatactgcgaagggactcctcccggccccaaaagcactttccttgcgtccccgtcagggagggagggagggaggggagcattgctgtgcgggatggcgaggaggaggatgaggaggggaggcggtggcggtggcggtggcggtggcggggtggtggatgtggtgcgggtgcggcggctgctgctgctgtccctgacctgctgcagcagcatttggccaggcggacggatcttcgctgctgcggacactgaccccaacgatcttaacgtcctcaacacgctcttcaccagtctgaattctcctgggcagctcacaggttggcaggcgaatgggggtgatccttgtggccagtcatggaagggcattacttgctcaggatcaggggtcactaaaatccaattaccaaacttgtcactcactggaaatttggcctacaacatgaataacttgggttcattagttgagcttgacatgagccaaaataaccttggcggtggaggtcaaatacagtacaatcttcccaatatgaagcttgagaaactcaatcttgcaggaaatcaatttggtggaaatttaccctactcaatttcgacgatgcctaatcttaagtatttaaaccttaatcataaccaactacaaggaaacatcagtgatgtattttccaacctttacagtttgtcagaactggatctgtcctttaattcccttactggtgatctaccacaaagtttcactggattgtcaagcctgaaaaaagtgtatttgcagaacaaccaatttactggtaatatcaatgtcttagccaatctcccccttgaaactttgaatgttgcgaacaaccatttcactggttggattcctagtcagcttaagaagataaacagtctacagactgatggaaattcttggagcacaggaccagcgccacctccacctccatacacagcgccgcctcctcctccaaaccattggaatgctgatggttcatcaagttcatcaagttctggtggaagatctgggataggtggtggaggtgtagcaggaatcattatatcgttgctggttgttggatcagttgttgcatttcttgtgatcaaaagaagaaaacgcaaagctgctatgaaagaacattttgaacagcaccagccattcacttccttcccttcaaatgaagttaaagacatgaagcctgtctacgaggccaccacagtagacatagagtctttggcttcacctgcttcagttaatctgaaaccacctccgaagatagaacgaaacaaatcatttgatgatgacgatgatttttcaaacaagcttgttgcaaagaaaagtaatataacacctataaatgcaactgtttattcagttgcagatctacagatggcaacagatagctttagcttcgacaaccttgttggagagggtacttttggacgtgtttacagggcacaattcaatgatggaaaggttctggcgatcaagaaattagatagtactgtgatgccatttcaatcatctgatgactttgctgaactggtctcgaacatttcaaaattgcaccatccgaatctgaatgagcttgtgggctattgcatggaacatggccagcacttgcttgtgtatgatttccacaggaatggatcacttcatgatctactccacctttcagatgagtacagcaagccacttagctggaacactcgtatcaagatcgcactcggctctgcccgtgcactggagtgtagcttgacataacaggacagtaaaaggaccttgtttgttttcatccatatgtagttgcacaagcaactaattattagttggacatcaaatcactaggtcgcgggttcgaaaccgtctttccgtatttgagaaaggtttgtctcggtttatccctttcctagccttcgggcactgggtctgccctttttacttttgacataacttgctattcatatatgagctggtagcatctttgcgtattatatttttagataataaaaccaaacataggcttctgtttgggcatattttctgctcttttctacttctgtgaatatgcactgaccattgtcaaaatattacactgagtgattgaagaatatgcttcaatgattattgagcttgttcattacttgatatatactataacatttttccttatgaaatgtgtagttccttataactttgaactaaaatataactcgtaggtaccttcatgaaatatgttctccatccatcatccataagaatttcaagtcgtcaaacattttgctggactcagaattcaatccacacctttcagatgctggacttgcaagctttattcctgatgctgaattccaggcagcagaacaaagtgccggatacactgccccagaagtggacatgaccggtcagtacaccctcaagagtgatgtctacagctttggagttgtcatgcttgaactattgacaggacgtagaccatttgacagctctagacccaggtcagagcagtcacttgtgcggtgggcaacaccccagctgcatgacatcgacgcattggacaggatggtcgatcctgcactcaagggtctatacccagccaaatctctatcccgatttgctgatgtccttgccctgtgtgtccagcctgaaccagaattcaggccaccaatgtcagaggtggtgcaagcattggttcgacttgtgcagagggccaacatgacgaagaggatgcttgatggggatacttctcggcgaccagatgacctggaccaagatttcatatgacaagctgaactcttgtcagattgtatttatttcgttcgactagcggcccagcagagacataatcacacaagaggaagaaacagaactctgtcagcttcgccagtacataatcacaagtttttcttggtagcaaagttgtgctatatggttgtactgtgtctacaaaatagtaccttgatcttacgctaatggcatattgttataattctttggtaacttatatgcaaatgccccagataaacaaaactatggtgaagtgtgccgaatgttaaaataactgattagtccagtactgctgcatcaactgaaacaagttgcacagtggaaatatttatcttggtccctcaactatccccttgaggcttattttcgaccttgaactttcaacatgactttcagacttcatcgg

SEQ ID NO: 670 - DNA, 1519 bp, Zea Mays
atcagtcggatttggaggagccgaataaataaccaaggatactgcgaagggactcctcccggccccaaaagcactttccttgcgtccccgtcagggagggagggagggaggggagcattgctgtgcgggatggcgaggaggaggatgaggaggggaggcggtggcggtggcggtggcggtggcggggtggtggatgtggtgcgggtgcggcggctgctgctgctgtccctgacctgctgcagcagcatttggccaggcggacggatcttcgctgctgcggacactgaccccaacgatcttaacgtcctcaacacgctcttcaccagtctgaattctcctgggcagctcacaggttggcaggcgaatgggggtgatccttgtggccagtcatggaagggcattacttgctcaggatcaggggtcactaaaatccaattaccaaacttgtcactcactggaaatttggcctacaacatgaataacttgggttcattagttgagcttgacatgagccaaaataaccttggcggtggaggtcaaatacagtacaatcttcccaatatgaagcttgagaaactgaaatcaatttggtggaaatttaccctactcaatttcgacgatgcctaatcttaagtatttaaaccttaatcataaccaactacaaggaaacatcagtgatgtattttccaacctttacagtttgtcagaactggatctgtcctttaattcccttactggtgatctaccacaaagtttcactggattgtcaagcctgaaaaaagtgtatttgcagaacaaccaatttactggtaatatcaatgtcttagccaatctcccccttgaaactttgaatgttgcgaacaaccatttcactggttggattcctagtcagcttaagaagataaacagtctacagactgatggaaattcttggagcacaggaccagcgccacctccacctccatacacagcgccgcctcctcctccaaaccattggaatgctgatggttcatcaagttcatcaagttctggtggaagatctgggataggtggtggaggtgtagcaggaatcattatatcgttgctggttgttggatcagttgttgcatttcttgtgatcaaaagaagaaaacgcaaagctgctatgaaagaacattttgaacagcaccagccattcacttccttcccttcaaatgaagttaaagacatgaagcctgtctacgaggccaccacagtagacatagagtctttggcttcacctgcttcagttaatctgaaaccacctccgaagatagaacgaaacaaatcatttgatgatgacgatgatttttcaaacaagcttgttgcaaagaaaagtaatataacacctataaatgcaactgtttattcagttgcagatctacagatggcaacagatagctttagcttcgacaaccttgttggagagggtacttttggacgtgtttacagggcacaattcaatgatggaaaggactaatatctttagtcagctagttgc

SEQ ID NO: 671 - DNA, 1270 bp, Zea Mays
gccttcccctcctcttctttgcaggttctggcgatcaagaaattagatagtactgtgatgccatttcaatcatctgatgactttgctgaactggtctcgaacatttcaaaattgcaccatccgaatctgaatgagcttgtgggctattgcatggaacatggccagcacttgcttgtgtatgatttccacaggaatggatcacttcatgatctactccacctttcagatgagtacagcaagccacttagctggaacactcgtatcaagatcgcactcggctctgcccgtgcactggagtaccttcatgaaatatgttctccatccatcatccataagaatttcaagtcgtcaaacattttgctggactcagaattcaatccacacctttcagatgctggacttgcaagctttattcctgatgctgaattccaggcagcagaacaaagtgccggatacactgccccagaagtggacatgaccggtcagtacaccctcaagagtgatgtctacagctttggagttgtcatgcttgaactattgacaggacgtagaccatttgacagctctagacccaggtcagagcagtcacttgtgcggtgggcaacaccccagctgcatgacatcgacgcattggacaggatggtcgatcctgcactcaagggtctatacccagccaaatctctatcccgatttgctgatgtccttgccctgtgtgtccagcctgaaccagaattcaggccaccaatgtcagaggtggtgcaagcattggttcgacttgtgcagagggccaacatgacgaagaggatgcttgatggggatacttctcggcgaccagatgacctggaccaagatttcatatgacaagctgaactcttgtcagattgtatttatttcgttcgactagcggcccagcagagacataatcacacaagaggaagaaacagaactctgtcagcttcgccagtacataatcacaagtttttcttggtagcaaagttgtgctatatggttgtactgtgtctacaaaatagtaccttgatcttacgctaatggcatattgttataattctttggtaacttatatgcaaatgccccagataaacaaaactatggtgaagtgtgccgaatgttaaaataactgattagtccagtactgctgcatcaactgaaacaagttgcacagtggaaatatttatcttggtccctcaactatccccttgaggcttattttcgaccttgaactttcaacatgactttcagacttcatcgg

SEQ ID NO: 672 - DNA, 1215 bp, Zea Mays
ctgacagtggttctggcgatcaagaaattagatagtactgtgatgccatttcaatcatctgatgactttgctgaactggtctcgaacatttcaaaattgcaccatccgaatctgaatgagcttgtgggctattgcatggaacatggccagcacttgcttgtgtatgatttccacaggaatggatcacttcatgatctactccacctttcagatgagtacagcaagccacttagctggaacactcgtatcaagatcgcactcggctctgcccgtgcactggaaatttcaagtcgtcaaacattttgctggactcagaattcaatccacacctttcagatgctggacttgcaagctttattcctgatgctgaattccaggcagcagaacaaagtgccggatacactgccccagaagtggacatgaccggtcagtacaccctcaagagtgatgtctacagctttggagttgtcatgcttgaactattgacaggacgtagaccatttgacagctctagacccaggtcagagcagtcacttgtgcggtgggcaacaccccagctgcatgacatcgacgcattggacaggatggtcgatcctgcactcaagggtctatacccagccaaatctctatcccgatttgctgatgtccttgccctgtgtgtccagcctgaaccagaattcaggccaccaatgtcagaggtggtgcaagcattggttcgacttgtgcagagggccaacatgacgaagaggatgcttgatggggatacttctcggcgaccagatgacctggaccaagatttcatatgacaagctgaactcttgtcagattgtatttatttcgttcgactagcggcccagcagagacataatcacacaagaggaagaaacagaactctgtcagcttcgccagtacataatcacaagtttttcttggtagcaaagttgtgctatatggttgtactgtgtctacaaaatagtaccttgatcttacgctaatggcatattgttataattctttggtaacttatatgcaaatgccccagataaacaaaactatggtgaagtgtgccgaatgttaaaataactgattagtccagtactgctgcatcaactgaaacaagttgcacagtggaaatatttatcttggtccctcaactatccccttgaggcttattttcgaccttgaactttcaacatgactttcagacttcatcgg

SEQ ID NO: 673 - DNA, 1088 bp, Zea Mays
taaaaggaccttgtttgttttcatccatatgtagttgcacaagcaactaattattagttggacatcaaatcactaggtcgcgggttcgaaaccgtctttccgtatttgagaaaggtaccttcatgaaatatgttctccatccatcatccataagaatttcaagtcgtcaaacattttgctggactcagaattcaatccacacctttcagatgctggacttgcaagctttattcctgatgctgaattccaggcagcagaacaaagtgccggatacactgccccagaagtggacatgaccggtcagtacaccctcaagagtgatgtctacagctttggagttgtcatgcttgaactattgacaggacgtagaccatttgacagctctagacccaggtcagagcagtcacttgtgcggtgggcaacaccccagctgcatgacatcgacgcattggacaggatggtcgatcctgcactcaagggtctatacccagccaaatctctatcccgatttgctgatgtccttgccctgtgtgtccagcctgaaccagaattcaggccaccaatgtcagaggtggtgcaagcattggttcgacttgtgcagagggccaacatgacgaagaggatgcttgatggggatacttctcggcgaccagatgacctggaccaagatttcatatgacaagctgaactcttgtcagattgtatttatttcgttcgactagcggcccagcagagacataatcacacaagaggaagaaacagaactctgtcagcttcgccagtacataatcacaagtttttcttggtagcaaagttgtgctatatggttgtactgtgtctacaaaatagtaccttgatcttacgctaatggcatattgttataattctttggtaacttatatgcaaatgccccagataaacaaaactatggtgaagtgtgccgaatgttaaaataactgattagtccagtactgctgcatcaactgaaacaagttgcacagtggaaatatttatcttggtccctcaactatccccttgaggcttattttcgaccttgaactttcaacatgactttcagacttcatcgg

SEQ ID NO: 674 - DNA, 2484 bp, Zea Mays
cgcacatcttcctcatcccggtctcgtcgtgcgcttgtccctttctacggctccaaacaaatgcggaggtctccactcttctctcttcctccatcttatcatcgcccacgtacacacccaattcctcgcaactgggctcccccgcctccacgacactgccccccgcctcaagtccgccgcctccattcttcagctctcctatcctccgtagtctgcctgtacctattggctgaagcagagctgacccccactttatcaagagttgctcaacaatggacactggctgcctgtcatctatgaatattactggagctagccagacaagatcttttgcggggcaacttcctcctcagagatgttttgcgagtagtcactatacaagctttgccgtgaaaaaacttgtctcaaggaataaaggaaggagatcacaccgtagacatcctgccttgcaggttgtctgcaaggattttccaagacctccactagaaagcacaataaactatttggaagctggacagctctcttcattttttagaaacagcgaacgccccagtaagccgttgcaggtcgtggttgctggtgcaggattggctggtctatcaacagcgaagtatctggcagatgctggacataaacccatattgcttgaggcaagagatgttttgggtggaaaggtagctgcttggaaggatgaagatggagattggtacgagactgggcttcatatcttttaatctgtttggcgagcttaggattgaggatcgtttacagtggaaagaacactctatgatattcgccatgccaaacaagccaggagaattcagccggtttgatttcccagaaactttgccagcacctataaatgggatatgggccatattgagaaacaatgaaatgcttacctggcccgagaaggtgaagtttgcaatcggacttctgccagcaatggttggtggtcaaccttatgttgaagctcaagatggcttaaccgtttcagaatggatgaaaaagcagggtgttcctgatcgggtgaacgatgaggtttttattgcaatgtccaaggcactcaatttcataaatcctgatgagctatctatgcagtgcattttgattgctttgaaccgatttcttcaggagaagcatggttctaaaatggcattcttggatggtaatccgcctgaaaggctatgcatgcctattgttgatcacattcggtctaggggtggagaggtccgcctgaattctcgtattaaaaagatagagctgaatcctgatggaactgtaaaacacttcgcacttagtgatggaactcagataactggagatgcttatgtttgtgcaacaccagtcgatatcttcaagcttcttgtacctcaagagtggagtgaaattacttatttcaagaaactggagaagttggtgggagttcctgttatcaatgttcatatatggtttgacagaaaactgaacaacacatatgaccaccttcttttcagcaggagttcacttttaagtgtctatgcagacatgtcagtaacctgcaaggaatactatgacccaaaccgttcaatgctggagttggtctttgctcctgcagacgaatggattggtcgaagtgacactgaaatcatcgatgcaactatggaagagctagccaagttatttcctgatgaaattgctgctgatcagagtaaagcaaagattcttaagtatcatattgtgaagacaccgagatcggtttacaaaactgtcccaaactgtgagccttgccggcctctccaaaggtcacctatcgaaggtttctatctagctggtgattacacaaagcagaaatacctggcttccatggaaggtgcagtcctatccgggaagctttgcgcccagtccattgtgcaggattatagcaggctcacactcaggagccagaaaagcctacaatcaggagaagttcccgtcccatcttagttgtagttggctttagctatcgtcatccccactgggtgctatcttatctcctatttcaatgggaacccacccaatggtcatgttggagacaacacctgttatggtcctttgaccatctcgtggtgactgtagttgatgtcatattcggatatatatgtaaaaggatctgcatagcaattgttagacctttgggaaagcaaaagcgataaagagatctcagatagatattgtgttctttcagacggtggttcctattcctatcaatcggttaatccatcccacatgggaggatttgtggtaagcttagtcagcaaacctctggtggtccctgctccctgaactttatcgggagagctgctgtagcaatccccgaagccgtgtgccgtttatcttgtcgggcatactttatttgccgagttgcagttattaagcacagggaggtgcggaatgcacttcgggcgtcgaagatatttttgctcagattccttgcgtctcaataattgtccttttgaatcccag

SEQ ID NO: 675 - DNA, 2512 bp, Zea Mays
cgcacatcttcctcatcccggtctcgtcgtgcgcttgtccctttctacggctccaaacaaatgcggaggtctccactcttctctcttcctccatcttatcatcgcccacgtacacacccaattcctcgcaactgggctcccccgcctccacgacactgccccccgcctcaagtccgccgcctccattcttcagctctcctatcctccgtagtctgcctgtacctattggctgaagcagagctgacccccactttatcaagagttgctcaacaatggacactggctgcctgtcatctatgaatattactggagctagccagacaagatcttttgcggggcaacttcctcctcagagatgttttgcgagtagtcactatacaagctttgccgtgaaaaaacttgtctcaaggaataaaggaaggagatcacaccgtagacatcctgccttgcaggttgtctgcaaggattttccaagacctccactagaaagcacaataaactatttggaagctggacagctctcttcattttttagaaacagcgaacgccccagtaagccgttgcaggtcgtggttgctggtgcaggattggctggtctatcaacagcgaagtatctggcagatgctggacataaacccatattgcttgaggcaagagatgttttgggtggaaaggtagctgcttggaaggatgaagatggagattggtacgagactgggcttcatatcttttttggagcttatcccaacatacagaatctgtttggcgagcttaggattgaggatcgtttacagtggaaagaacactctatgatattcgccatgccaaacaagccaggagaattcagccggtttgatttcccagaaactttgccagcacctataaatgggatatgggccatattgagaaacaatgaaatgcttacctggcccgagaaggtgaagtttgcaatcggacttctgccagcaatggttggtggtcaaccttatgttgaagctcaagatggcttaaccgtttcagaatggatgaaaaagcagcacagggtgttcctgatcgggtgaacgatgaggtttttattgcaatgtccaaggcactcaatttcataaatcctgatgagctatctatgcagtgcattttgattgctttgaaccgatttcttcaggagaagcatggttctaaaatggcattcttggatggtaatccgcctgaaaggctatgcatgcctattgttgatcacattcggtctaggggtggagaggtccgcctgaattctcgtattaaaaagatagagctgaatcctgatggaactgtaaaacacttcgcacttagtgatggaactcagataactggagatgcttatgtttgtgcaacaccagtcgatatcttcaagcttcttgtacctcaagagtggagtgaaattacttatttcaagaaactggagaagttggtgggagttcctgttatcaatgttcatatatggtttgacagaaaactgaacaacacatatgaccaccttcttttcagcaggagttcacttttaagtgtctatgcagacatgtcagtaacctgcaaggaatactatgacccaaaccgttcaatgctggagttggtctttgctcctgcagacgaatggattggtcgaagtgacactgaaatcatcgatgcaactatggaagagctagccaagttatttcctgatgaaattgctgctgatcagagtaaagcaaagattcttaagtatcatattgtgaagacaccgagatcggtttacaaaactgtcccaaactgtgagccttgccggcctctccaaaggtcacctatcgaaggtttctatctagctggtgattacacaaagcagaaatacctggcttccatggaaggtgcagtcctatccgggaagctttgcgcccagtccattgtgcaggattatagcaggctcacactcaggagccagaaaagcctacaatcaggagaagttcccgtcccatcttagttgtagttggctttagctatcgtcatccccactgggtgctatcttatctcctatttcaatgggaacccacccaatggtcatgttggagacaacacctgttatggtcctttgaccatctcgtggtgactgtagttgatgtcatattcggatatatatgtaaaaggatctgcatagcaattgttagacctttgggaaagcaaaagcgataaagagatctcagatagatattgtgttctttcagacggtggttcctattcctatcaatcggttaatccatcccacatgggaggatttgtggtaagcttagtcagcaaacctctggtggtccctgctccctgaactttatcgggagagctgctgtagcaatccccgaagccgtgtgccgtttatcttgtcgggcatactttatttgccgagttgcagttattaagcacagggaggtgcggaatgcacttcgggcgtcgaagatatttttgctcagattccttgcgtctcaataattgtccttttgaatcccag

SEQ ID NO: 676 - DNA, 2471 bp, Zea Mays
cctcatcccggtctcgtcgtgcgcttgtccctttctacggctccaaacaaatgcggaggtctccactcttctctcttcctccatcttatcatcgcccacgtacacacccaattcctcgcaactgggctcccccgcctccacgacactgccccccgcctcaagtccgccgcctccattcttcagctctcctatcctccgtctgcctgtacctattggctgaagcagagctgacccccactttatcaagagttgctcaacaatggacactggctgcctgtcatctatgaatattactggagctagccagacaagatcttttgcggggcaacttcctcctcagagatgttttgcgagtagtcactatacaagctttgccgtgaaaaaacttgtctcaaggaataaaggaaggagatcacaccgtagacatcctgccttgcaggttgtctgcaaggattttccaagacctccactagaaagcacaataaactatttggaagctggacagctctcttcattttttagaaacagcgaacgccccagtaagccgttgcaggtcgtggttgctggtgcaggattggctggtctatcaacagcgaagtatctggcagatgctggacataaacccatattgcttgaggcaagagatgttttgggtggaaaggtagctgcttggaaggatgaagatggagattggtacgagactgggcttcatatcttttaatctgtttggcgagcttaggattgaggatcgtttacagtggaaagaacactctatgatattcgccatgccaaacaagccaggagaattcagccggtttgatttcccagaaactttgccagcacctataaatgggatatgggccatattgagaaacaatgaaatgcttacctggcccgagaaggtgaagtttgcaatcggacttctgccagcaatggttggtggtcaaccttatgttgaagctcaagatggcttaaccgtttcagaatggatgaaaaagcagggtgttcctgatcgggtgaacgatgaggtttttattgcaatgtccaaggcactcaatttcataaatcctgatgagctatctatgcagtgcattttgattgctttgaaccgatttcttcaggagaagcatggttctaaaatggcattcttggatggtaatccgcctgaaaggctatgcatgcctattgttgatcacattcggtctaggggtggagaggtccgcctgaattctcgtattaaaaagatagagctgaatcctgatggaactgtaaaacacttcgcacttagtgatggaactcagataactggagatgcttatgtttgtgcaacaccagtcgatatcttcaagcttcttgtacctcaagagtggagtgaaattacttatttcaagaaactggagaagttggtgggagttcctgttatcaatgttcatatatggtttgacagaaaactgaacaacacatatgaccaccttcttttcagcaggagttcacttttaagtgtctatgcagacatgtcagtaacctgcaaggaatactatgacccaaaccgttcaatgctggagttggtctttgctcctgcagacgaatggattggtcgaagtgacactgaaatcatcgatgcaactatggaagagctagccaagttatttcctgatgaaattgctgctgatcagagtaaagcaaagattcttaagtatcatattgtgaagacaccgagatcggtttacaaaactgtcccaaactgtgagccttgccggcctctccaaaggtcacctatcgaaggtttctatctagctggtgattacacaaagcagaaatacctggcttccatggaaggtgcagtcctatccgggaagctttgcgcccagtccattgtgcaggattatagcaggctcacactcaggagccagaaaagcctacaatcaggagaagttcccgtcccatcttagttgtagttggctttagctatcgtcatccccactgggtgctatcttatctcctatttcaatgggaacccacccaatggtcatgttggagacaacacctgttatggtcctttgaccatctcgtggtgactgtagttgatgtcatattcggatatatatgtaaaaggatctgcatagcaattgttagacctttgggaaagcaaaagcgataaagagatctcagatagatattgtgttctttcagacggtggttcctattcctatcaatcggttaatccatcccacatgggaggatttgtggtaagcttagtcagcaaacctctggtggtccctgctccctgaactttatcgggagagctgctgtagcaatccccgaagccgtgtgccgtttatcttgtcgggcatactttatttgccgagttgcagttattaagcacagggaggtgcggaatgcacttcgggcgtcgaagatatttttgctcagattccttgcgtctcaataattgtccttttgaatcccag

SEQ ID NO: 677 - DNA, 2465 bp, Zea Mays
gtccctttctacggctccaaacaaatgcggaggtctccactcttctctcttcctccatcttatcatcgcccacgtacacacccaattcctcgcaactgggctcccccgcctccacgacactgccccccgcctcaagtccgccgcctccattcttcagctctcctatcctccgtagtctgcctgtacctattggctgaagcagagctgacccccactttatcaagagttgctcaacaatggacactggctgcctgtcatctatgaatattactggagctagccagacaagatcttttgcggggcaacttcctcctcagagatgttttgcgagtagtcactatacaagctttgccgtgaaaaaacttgtctcaaggaataaaggaaggagatcacaccgtagacatcctgccttgcaggttgtctgcaaggattttccaagacctccactagaaagcacaataaactatttggaagctggacagctctcttcattttttagaaacagcgaacgccccagtaagccgttgcaggtcgtggttgctggtgcaggattggctggtctatcaacagcgaagtatctggcagatgctggacataaacccatattgcttgaggcaagagatgttttgggtggaaaggtagctgcttggaaggatgaagatggagattggtacgagactgggcttcatatcttttcttatcccaacatacagaatctgtttggcgagcttaggattgaggatcgtttacagtggaaagaacactctatgatattcgccatgccaaacaagccaggagaattcagccggtttgatttcccagaaactttgccagcacctataaatgggatatgggccatattgagaaacaatgaaatgcttacctggcccgagaaggtgaagtttgcaatcggacttctgccagcaatggttggtggtcaaccttatgttgaagctcaagatggcttaaccgtttcagaatggatgaaaaagcagggtgttcctgatcgggtgaacgatgaggtttttattgcaatgtccaaggcactcaatttcataaatcctgatgagctatctatgcagtgcattttgattgctttgaaccgatttcttcaggagaagcatggttctaaaatggcattcttggatggtaatccgcctgaaaggctatgcatgcctattgttgatcacattcggtctaggggtggagaggtccgcctgaattctcgtattaaaaagatagagctgaatcctgatggaactgtaaaacacttcgcacttagtgatggaactcagataactggagatgcttatgtttgtgcaacaccagtcgatatcttcaagcttcttgtacctcaagagtggagtgaaattacttatttcaagaaactggagaagttggtgggagttcctgttatcaatgttcatatatggtttgacagaaaactgaacaacacatatgaccaccttcttttcagcaggagttcacttttaagtgtctatgcagacatgtcagtaacctgcaaggaatactatgacccaaaccgttcaatgctggagttggtctttgctcctgcagacgaatggattggtcgaagtgacactgaaatcatcgatgcaactatggaagagctagccaagttatttcctgatgaaattgctgctgatcagagtaaagcaaagattcttaagtatcatattgtgaagacaccgagatcggtttacaaaactgtcccaaactgtgagccttgccggcctctccaaaggtcacctatcgaaggtttctatctagctggtgattacacaaagcagaaatacctggcttccatggaaggtgcagtcctatccgggaagctttgcgcccagtccattgtgcaggattatagcaggctcacactcaggagccagaaaagcctacaatcaggagaagttcccgtcccatcttagttgtagttggctttagctatcgtcatccccactgggtgctatcttatctcctatttcaatgggaacccacccaatggtcatgttggagacaacacctgttatggtcctttgaccatctcgtggtgactgtagttgatgtcatattcggatatatatgtaaaaggatctgcatagcaattgttagacctttgggaaagcaaaagcgataaagagatctcagatagatattgtgttctttcagacggtggttcctattcctatcaatcggttaatccatcccacatgggaggatttgtggtaagcttagtcagcaaacctctggtggtccctgctccctgaactttatcgggagagctgctgtagcaatccccgaagccgtgtgccgtttatcttgtcgggcatactttatttgccgagttgcagttattaagcacagggaggtgcggaatgcacttcgggcgtcgaagatatttttgctcagattccttgcgtctcaataattgtccttttgaatcccag

SEQ ID NO: 678 - DNA, 2955 bp, Zea Mays
ctttctacggctccaaacaaatgcggaggtctccactcttctctcttcctccatcttatcatcgcccacgtacacacccaattcctcgcaactgggctcccccgcctccacgacactgccccccgcctcaagtccgccgcctccattcttcagctctcctatcctccgtagtctgcctgtacctattggctgaagcagagctgacccccactttatcaagagttgctcaacaatggacactggctgcctgtcatctatgaatattactggagctagccagacaagatcttttgcggggcaacttcctcctcagagatgttttgcgagtagtcactatacaagctttgccgtgaaaaaacttgtctcaaggaataaaggaaggagatcacaccgtagacatcctgccttgcaggttgtctgcaaggattttccaagacctccactagaaagcacaataaactatttggaagctggacagctctcttcattttttagaaacagcgaacgccccagtaagccgttgcaggtcgtggttgctggtgcaggattggctggtctatcaacagcgaagtatctggcagatgctggacataaacccatattgcttgaggcaagagatgttttgggtggaaaggtagctgcttggaaggatgaagatggagattggtacgagactgggcttcatatcttttgtaagttacagttctggtccttgaggtcctcttcatcatatttcatgttcttgattatttcttttagaaaaattacagttaaaatgatggtttctacacatattaacaaactgttcagacacaccatcacacaaacttctaaggcactctttccttgtatcatgcctttatttttcctaatggcacaggactttctttcaaggacaatctttaaatatctgtgcaaagtcattattgtgaaaagaaattttgttaacttacagtagttacagaatagcctgaaaagtttgcagacaccttaaacatacagcagcacatgtttcaattcacataaaccatgttgatgatagaccatcatatccataattccacagtcgaatatgtccttatgttcacatatcactggattgctaccattcccttcctagcatatatgacacttattatctatgtgtatgtaaccatgtattttggatttttggtttaagttggagcttatcccaacatacagaatctgtttggcgagcttaggattgaggatcgtttacagtggaaagaacactctatgatattcgccatgccaaacaagccaggagaattcagccggtttgatttcccagaaactttgccagcacctataaatgggatatgggccatattgagaaacaatgaaatgcttacctggcccgagaaggtgaagtttgcaatcggacttctgccagcaatggttggtggtcaaccttatgttgaagctcaagatggcttaaccgtttcagaatggatgaaaaagcagggtgttcctgatcgggtgaacgatgaggtttttattgcaatgtccaaggcactcaatttcataaatcctgatgagctatctatgcagtgcattttgattgctttgaaccgatttcttcaggagaagcatggttctaaaatggcattcttggatggtaatccgcctgaaaggctatgcatgcctattgttgatcacattcggtctaggggtggagaggtccgcctgaattctcgtattaaaaagatagagctgaatcctgatggaactgtaaaacacttcgcacttagtgatggaactcagataactggagatgcttatgtttgtgcaacaccagtcgatatcttcaagcttcttgtacctcaagagtggagtgaaattacttatttcaagaaactggagaagttggtgggagttcctgttatcaatgttcatatatggtttgacagaaaactgaacaacacatatgaccaccttcttttcagcaggagttcacttttaagtgtctatgcagacatgtcagtaacctgcaaggaatactatgacccaaaccgttcaatgctggagttggtctttgctcctgcagacgaatggattggtcgaagtgacactgaaatcatcgatgcaactatggaagagctagccaagttatttcctgatgaaattgctgctgatcagagtaaagcaaagattcttaagtatcatattgtgaagacaccgagatcggtttacaaaactgtcccaaactgtgagccttgccggcctctccaaaggtcacctatcgaaggtttctatctagctggtgattacacaaagcagaaatacctggcttccatggaaggtgcagtcctatccgggaagctttgcgcccagtccattgtgcaggattatagcaggctcacactcaggagccagaaaagcctacaatcaggagaagttcccgtcccatcttagttgtagttggctttagctatcgtcatccccactgggtgctatcttatctcctatttcaatgggaacccacccaatggtcatgttggagacaacacctgttatggtcctttgaccatctcgtggtgactgtagttgatgtcatattcggatatatatgtaaaaggatctgcatagcaattgttagacctttgggaaagcaaaagcgataaagagatctcagatagatattgtgttctttcagacggtggttcctattcctatcaatcggttaatccatcccacatgggaggatttgtggtaagcttagtcagcaaacctctggtggtccctgctccctgaactttatcgggagagctgctgtagcaatccccgaagccgtgtgccgtttatcttgtcgggcatactttatttgccgagttgcagttattaagcacagggaggtgcggaatgcacttcgggcgtcgaagatatttttgctcagattccttgcgtctcaataattgtccttttgaatcccag

SEQ ID NO: 679 - DNA, 2442 bp, Zea Mays
cggctccaaacaaatgcggaggtctccactcttctctcttcctccatcttatcatcgcccacgtacacacccaattcctcgcaactgggctcccccgcctccacgacactgccccccgcctcaagtccgccgcctccattcttcagctctcctatcctccgtagtctgcctgtacctattggctgaagcagagctgacccccactttatcaagagttgctcaacaatggacactggctgcctgtcatctatgaatattactggagctagccagacaagatcttttgcggggcaacttcctcctcagagatgttttgcgagtagtcactatacaagctttgccgtgaaaaaacttgtctcaaggaataaaggaaggagatcacaccgtagacatcctgccttgcaggttgtctgcaaggattttccaagacctccactagaaagcacaataaactatttggaagctggacagctctcttcattttttagaaacagcgaacgccccagtaagccgttgcaggtcgtggttgctggtgcaggattggctggtctatcaacagcgaagtatctggcagatgctggacataaacccatattgcttgaggcaagagatgttttgggtggaaaggtagctgcttggaaggatgaagatggagattggtacgagactgggcttcatatcttttaatctgtttggcgagcttaggattgaggatcgtttacagtggaaagaacactctatgatattcgccatgccaaacaagccaggagaattcagccggtttgatttcccagaaactttgccagcacctataaatgggatatgggccatattgagaaacaatgaaatgcttacctggcccgagaaggtgaagtttgcaatcggacttctgccagcaatggttggtggtcaaccttatgttgaagctcaagatggcttaaccgtttcagaatggatgaaaaagcagcacagggtgttcctgatcgggtgaacgatgaggtttttattgcaatgtccaaggcactcaatttcataaatcctgatgagctatctatgcagtgcattttgattgctttgaaccgatttcttcaggagaagcatggttctaaaatggcattcttggatggtaatccgcctgaaaggctatgcatgcctattgttgatcacattcggtctaggggtggagaggtccgcctgaattctcgtattaaaaagatagagctgaatcctgatggaactgtaaaacacttcgcacttagtgatggaactcagataactggagatgcttatgtttgtgcaacaccagtcgatatcttcaagcttcttgtacctcaagagtggagtgaaattacttatttcaagaaactggagaagttggtgggagttcctgttatcaatgttcatatatggtttgacagaaaactgaacaacacatatgaccaccttcttttcagcaggagttcacttttaagtgtctatgcagacatgtcagtaacctgcaaggaatactatgacccaaaccgttcaatgctggagttggtctttgctcctgcagacgaatggattggtcgaagtgacactgaaatcatcgatgcaactatggaagagctagccaagttatttcctgatgaaattgctgctgatcagagtaaagcaaagattcttaagtatcatattgtgaagacaccgagatcggtttacaaaactgtcccaaactgtgagccttgccggcctctccaaaggtcacctatcgaaggtttctatctagctggtgattacacaaagcagaaatacctggcttccatggaaggtgcagtcctatccgggaagctttgcgcccagtccattgtgcaggattatagcaggctcacactcaggagccagaaaagcctacaatcaggagaagttcccgtcccatcttagttgtagttggctttagctatcgtcatccccactgggtgctatcttatctcctatttcaatgggaacccacccaatggtcatgttggagacaacacctgttatggtcctttgaccatctcgtggtgactgtagttgatgtcatattcggatatatatgtaaaaggatctgcatagcaattgttagacctttgggaaagcaaaagcgataaagagatctcagatagatattgtgttctttcagacggtggttcctattcctatcaatcggttaatccatcccacatgggaggatttgtggtaagcttagtcagcaaacctctggtggtccctgctccctgaactttatcgggagagctgctgtagcaatccccgaagccgtgtgccgtttatcttgtcgggcatactttatttgccgagttgcagttattaagcacagggaggtgcggaatgcacttcgggcgtcgaagatatttttgctcagattccttgcgtctcaataattgtccttttgaatcccag

SEQ ID NO: 680 - DNA, 2427 bp, Zea Mays
ccaaacaaatgcggaggtctccactcttctctcttcctccatcttatcatcgcccacgtacacacccaattcctcgcaactgggctcccccgcctccacgacactgccccccgcctcaagtccgccgcctccattcttcagctctcctatcctccgtagtctgcctgtacctattggctgaagcagagctgacccccactttatcaagagttgctcaacaatggacactggctgcctgtcatctatgaatattactggagctagccagacaagatcttttgcggggcaacttcctcctcagagatgttttgcgagtagtcactatacaagctttgccgtgaaaaaacttgtctcaaggaataaaggaaggagatcacaccgtagacatcctgccttgcaggttgtctgcaaggattttccaagacctccactagaaagcacaataaactatttggaagctggacagctctcttcattttttagaaacagcgaacgccccagattggctggtctatcaacagcgaagtatctggcagatgctggacataaacccatattgcttgaggcaagagatgttttgggtggaaaggtagctgcttggaaggatgaagatggagattggtacgagactgggcttcatatcttttttggagcttatcccaacatacagaatctgtttggcgagcttaggattgaggatcgtttacagtggaaagaacactctatgatattcgccatgccaaacaagccaggagaattcagccggtttgatttcccagaaactttgccagcacctataaatgggatatgggccatattgagaaacaatgaaatgcttacctggcccgagaaggtgaagtttgcaatcggacttctgccagcaatggttggtggtcaaccttatgttgaagctcaagatggcttaaccgtttcagaatggatgaaaaagcagcacagggtgttcctgatcgggtgaacgatgaggtttttattgcaatgtccaaggcactcaatttcataaatcctgatgagctatctatgcagtgcattttgattgctttgaaccgatttcttcaggagaagcatggttctaaaatggcattcttggatggtaatccgcctgaaaggctatgcatgcctattgttgatcacattcggtctaggggtggagaggtccgcctgaattctcgtattaaaaagatagagctgaatcctgatggaactgtaaaacacttcgcacttagtgatggaactcagataactggagatgcttatgtttgtgcaacaccagtcgatatcttcaagcttcttgtacctcaagagtggagtgaaattacttatttcaagaaactggagaagttggtgggagttcctgttatcaatgttcatatatggtttgacagaaaactgaacaacacatatgaccaccttcttttcagcaggagttcacttttaagtgtctatgcagacatgtcagtaacctgcaaggaatactatgacccaaaccgttcaatgctggagttggtctttgctcctgcagacgaatggattggtcgaagtgacactgaaatcatcgatgcaactatggaagagctagccaagttatttcctgatgaaattgctgctgatcagagtaaagcaaagattcttaagtatcatattgtgaagacaccgagatcggtttacaaaactgtcccaaactgtgagccttgccggcctctccaaaggtcacctatcgaaggtttctatctagctggtgattacacaaagcagaaatacctggcttccatggaaggtgcagtcctatccgggaagctttgcgcccagtccattgtgcaggattatagcaggctcacactcaggagccagaaaagcctacaatcaggagaagttcccgtcccatcttagttgtagttggctttagctatcgtcatccccactgggtgctatcttatctcctatttcaatgggaacccacccaatggtcatgttggagacaacacctgttatggtcctttgaccatctcgtggtgactgtagttgatgtcatattcggatatatatgtaaaaggatctgcatagcaattgttagacctttgggaaagcaaaagcgataaagagatctcagatagatattgtgttctttcagacggtggttcctattcctatcaatcggttaatccatcccacatgggaggatttgtggtaagcttagtcagcaaacctctggtggtccctgctccctgaactttatcgggagagctgctgtagcaatccccgaagccgtgtgccgtttatcttgtcgggcatactttatttgccgagttgcagttattaagcacagggaggtgcggaatgcacttcgggcgtcgaagatatttttgctcagattccttgcgtctcaataattgtccttttgaatcccag

SEQ ID NO: 681 - DNA, 2445 bp, Zea Mays
acaaatgcggaggtctccactcttctctcttcctccatcttatcatcgcccacgtacacacccaattcctcgcaactgggctcccccgcctccacgacactgccccccgcctcaagtccgccgcctccattcttcagctctcctatcctccgtagtctgcctgtacctattggctgaagcagagctgacccccactttatcaagagttgctcaacaatggacactggctgcctgtcatctatgaatattactggagctagccagacaagatcttttgcggggcaacttcctcctcagagatgttttgcgagtagtcactatacaagctttgccgtgaaaaaacttgtctcaaggaataaaggaaggagatcacaccgtagacatcctgccttgcaggttgtctgcaaggattttccaagacctccactagaaagcacaataaactatttggaagctggacagctctcttcattttttagaaacagcgaacgccccagtaagccgttgcaggtcgtggttgctggtgcaggattggctggtctatcaacagcgaagtatctggcagatgctggacataaacccatattgcttgaggcaagagatgttttgggtggaaaggtagctgcttggaaggatgaagatggagattggtacgagactgggcttcatatcttttttggagcttatcccaacatacagaatctgtttggcgagcttaggattgaggatcgtttacagtggaaagaacactctatgatattcgccatgccaaacaagccaggagaattcagccggtttgatttcccagaaactttgccagcacctataaatgggatatgggccatattgagaaacaatgaaatgcttacctggcccgagaaggtgaagtttgcaatcggacttctgccagcaatggttggtggtcaaccttatgttgaagctcaagatggcttaaccgtttcagaatggatgaaaaagcagggtgttcctgatcgggtgaacgatgaggtttttattgcaatgtccaaggcactcaatttcataaatcctgatgagctatctatgcagtgcattttgattgctttgaaccgatttcttcagcatggttctaaaatggcattcttggatggtaatccgcctgaaaggctatgcatgcctattgttgatcacattcggtctaggggtggagaggtccgcctgaattctcgtattaaaaagatagagctgaatcctgatggaactgtaaaacacttcgcacttagtgatggaactcagataactggagatgcttatgtttgtgcaacaccagtcgatatcttcaagcttcttgtacctcaagagtggagtgaaattacttatttcaagaaactggagaagttggtgggagttcctgttatcaatgttcatatatggtttgacagaaaactgaacaacacatatgaccaccttcttttcagcaggagttcacttttaagtgtctatgcagacatgtcagtaacctgcaaggaatactatgacccaaaccgttcaatgctggagttggtctttgctcctgcagacgaatggattggtcgaagtgacactgaaatcatcgatgcaactatggaagagctagccaagttatttcctgatgaaattgctgctgatcagagtaaagcaaagattcttaagtatcatattgtgaagacaccgagatcggtttacaaaactgtcccaaactgtgagccttgccggcctctccaaaggtcacctatcgaaggtttctatctagctggtgattacacaaagcagaaatacctggcttccatggaaggtgcagtcctatccgggaagctttgcgcccagtccattgtgcaggattatagcaggctcacactcaggagccagaaaagcctacaatcaggagaagttcccgtcccatcttagttgtagttggctttagctatcgtcatccccactgggtgctatcttatctcctatttcaatgggaacccacccaatggtcatgttggagacaacacctgttatggtcctttgaccatctcgtggtgactgtagttgatgtcatattcggatatatatgtaaaaggatctgcatagcaattgttagacctttgggaaagcaaaagcgataaagagatctcagatagatattgtgttctttcagacggtggttcctattcctatcaatcggttaatccatcccacatgggaggatttgtggtaagcttagtcagcaaacctctggtggtccctgctccctgaactttatcgggagagctgctgtagcaatccccgaagccgtgtgccgtttatcttgtcgggcatactttatttgccgagttgcagttattaagcacagggaggtgcggaatgcacttcgggcgtcgaagatatttttgctcagattccttgcgtctcaataattgtccttttgaatcccag

SEQ ID NO: 682 - DNA, 2399 bp, Zea Mays
acaaatgcggaggtctccactcttctctcttcctccatcttatcatcgcccacgtacacacccaattcctcgcaactgggctcccccgcctccacgacactgccccccgcctcaagtccgccgcctccattcttcagctctcctatcctccgtagtctgcctgtacctattggctgaagcagagctgacccccactttatcaagagttgctcaacaatggacactggctgcctgtcatctatgaatattactggagctagccagacaagatcttttgcggggcaacttcctcctcagagatgttttgcgagtagtcactatacaagctttgccgtgaaaaaacttgtctcaaggaataaaggaaggagatcacaccgtagacatcctgccttgcaggttgtctgcaaggattttccaagacctccactagaaagcacaataaactatttggaagctggacagctctcttcattttttagaaacagcgaacgccccagtaagccgttgcaggtcgtggttgctggtgcaggattggctggtctatcaacagcgaagtatctggcagatgctggacataaacccatattgcttgaggcaagagatgttttgggtggaaaggtagctgcttggaaggatgaagatggagattggtacgagactgggcttcatatcttttttggagcttatcccaacatacagaatctgtttggcgagcttaggattgaggatcgtttacagtggaaagaacactctatgatattcgccatgccaaacaagccaggagaattcagccggtttgatttcccagaaactttgccagcacctataaatgggatatgggccatattgagaaacaatgaaatgcttacctggcccgagaaggtgaagtttgcaatcggacttctgccagcaatggttggtggtcaaccttatgttgaagctcaagatggcttaaccgtttcagaatggatgaaaaagcagggtgttcctgatcgggtgaacgatgaggtttttattgcaatgtccaaggcactcaatttcataaatcctgatgagctatctatgcagtgcattttgattgctttgaaccgatttcttcaggagaagcatggttctaaaatggcattcttggatggtaatccgcctgaaaggctatgcatgcctattgttgatcacattcggtctaggggtggagaggtccgcctgaattctcgtattaaaaagatagagctgaatcctgatggaactgtaaaacacttcgcacttagtgatggaactcagataactggagatgcttatgtttgtgcaacaccagtcgatatcttcaagcttcttgtacctcaagagtggagtgaaattacttatttcaagaaactggagaagttggtgggagttcctgttatcaatgttcatatatggtttgacagaaaactgaacaacacatatgaccaccttcttttcagcaggagttcacttttaagtgtctatgcagacatgtcagtaacctgcaagacgaatggattggtcgaagtgacactgaaatcatcgatgcaactatggaagagctagccaagttatttcctgatgaaattgctgctgatcagagtaaagcaaagattcttaagtatcatattgtgaagacaccgagatcggtttacaaaactgtcccaaactgtgagccttgccggcctctccaaaggtcacctatcgaaggtttctatctagctggtgattacacaaagcagaaatacctggcttccatggaaggtgcagtcctatccgggaagctttgcgcccagtccattgtgcaggattatagcaggctcacactcaggagccagaaaagcctacaatcaggagaagttcccgtcccatcttagttgtagttggctttagctatcgtcatccccactgggtgctatcttatctcctatttcaatgggaacccacccaatggtcatgttggagacaacacctgttatggtcctttgaccatctcgtggtgactgtagttgatgtcatattcggatatatatgtaaaaggatctgcatagcaattgttagacctttgggaaagcaaaagcgataaagagatctcagatagatattgtgttctttcagacggtggttcctattcctatcaatcggttaatccatcccacatgggaggatttgtggtaagcttagtcagcaaacctctggtggtccctgctccctgaactttatcgggagagctgctgtagcaatccccgaagccgtgtgccgtttatcttgtcgggcatactttatttgccgagttgcagttattaagcacagggaggtgcggaatgcacttcgggcgtcgaagatatttttgctcagattccttgcgtctcaataattgtccttttgaatcccag

SEQ ID NO: 683 - DNA, 1632 bp, Zea Mays
cgtaaaactatgtccaagggtccgacgtttctccagagcctgaagccaaatctagggggcttgcttcatctgctgtccgagcgtggtttggtttctcggggctggcgcggtcaagagctcacctgagttccaccgaaatctgccacggtagttcttgcctaggtgtgtcgttgcgttgtgacccttgcggattttcttgtttcttttgagttgcgatctttgcaggttagtctcccccccaatccgtagtcatccggcgtctaggaaattgcagtccagtttgcttatttgttcgtctagtgccttctccccatcctggttagaaagaatatcggaaggggggatttttttttttttgcctgttcgtagaggaagcagtgaagacataattgttgcatctgataaagctcgggcgaaatacaagcaaatccttggaattttgcatccctttgctggctcttttctgattcagagaacccaatgggggatgtgtccttgaatggacccgttaaggccgagccaactgccggtggcattgccaagggaaaccgagttctggacacgatgtccgccgggtggacggacgagagacacatgctgtatataagctccatggaggcttctttcgtcgaccagctatacaaccatggaaaccatccgcaggacgcaaatggtgctggcttcaaggttctccgcaggggggtgtgggagtacatcgagtatgagaagaccagtgcccctgtgcgaagtggggctaaatgctgcgtccctgcaaatccttggatccggcatttcaggccacgtgactgcggtagtaacgcacagagtgacgcggtcgaggcctcagtgggcgaccatgagtcgggtactcaggcaagccgcaagagcccttcagtgtctcatggaagggaacggggagcttgtaagggagaaccccagattctacatgaaagtacagaggtctctgatcaaaattttgctgacgatgaggctgaagctgaaacagaatcaatgaaagcatgcaagaaaaggagactaagcagggctttgcactccggtgctgaatgatcaagtaaattcgcaggaacaattagcttagcctgttgcaagaatcgatatgatttatcctaaaagaaggtgttaagatgatgggacatggctttcaaaactttcagctgttgcctgctggtagccaagacacactgaatccgaaggaaggcgttgaagggtagctgttagtgattttgtgatataaagagtactggggcagttagcatcggcatttttagcggatttaagttcttgttatgtatatctgtcttctgtcttcatcagtagtgctgcttagtacctcactctctcgtcagcaggatatttctatatattgtctgtacttggtagatatatgtattggttgatcctatgagtgtaatgtttttttttgctgcagcttttgggggcagttggtattaaattcagtaagagcatctacaacagtgacctataaaaatgtcctataatttaaaaataagtaaattttattgaaattagagcaccaaaaatattatgctctaagagtaaagtcccaaatataaattataggacatctcattacggtatagtaaatttgag

SEQ ID NO: 684 - DNA, 3432 bp, Zea Mays
cggcaaccaagaaacaaacagaaacagcggttacgtttcaattcccgcctagggataagaccacgcttctctccgtctccatggcatggccatccaccgcagcaatctctctagacgcttcaagatctcaaggatctggcatcaatcggagcaatatcgcgccaaatccttcgcctcctcatctccaacgagcgagactacacccctcaaggtcctaaccgggctcctgcgcgacgcctattcgctgaaatgcctcagggagttgcacgcgcatctcgccgtcgcgggtgcgatccaggacacattcgtcgtcacaggtcttgtcgaaagttagtatcaaatttgttgagctgtggcttgagaagatgccagacaagaagatcgaaggggctgattcatctcacattgtctcttcaacaaaatctttggaaagttcagtagggcctaatctaattgaaagtactgatggagattattgtaataaccttcacaagacagcagttgccaattttgtggcatcaatgctgcaagaacatcctatgagccttatattggctgagaacaaaagcaatttgcaagaaatttcagttgaacagaagattcctatctttgtttctatcaacctttcaccaaaagtggatggcagtgaattgccatgccccattgaagttcatgatggtattacatcttcctctagcaaaactaacgaaccaatggaagcccaagattattcgaacacaatgaaatcaaacacagctagttgcatgttcgaggcatcaaagcggcaagaatgccctataagcctcatattggcagacaagaaaggcagtttgcaagaagtttcagttgaacaaaatgttccttgtggtgattatgttgccctttcacaaaaagcagacggtagtgaattgacatcaacccgtgaagctcctgaaggctttctaacttcctctagcaaagtttatgtattaaaggaagcccaagatggttctatcacaacggaagcttctaaagtaaatgtttgtgcagcttcacactccatgcttaggttaattgaaggagtccaggatgaggcttcttgtattgattctgataaggttacttgtgaaacaccacctgccatcctgaaaaagttgaaagaagataagccactggtcgtccatagatttcataagcaccaaatgagcctaggagacacacatcaaaaggtgcctgcacctgtgagcagatcaaacaccagcaaatacttaagaatggataaaaacattgttgatactacgactcccattgaatcagtaaaggctgttgcatcaaaatttggtggcagcatgaactggaaaactcgcaagacacagacagcacaggtgagtgaccgtatcgtacttgagcttgataagctgaagaacgaaatttcagaatgtaaacatcaagcagaagctgcagaggctgcaaagttatcagtattaaaagagctggagagaacaaagaagcttatcgacgaaatgaaacacgtcctggagagggaacaagctgaggaggtggatgccaaggatgacttggagttatttcaaattatattacaagcgatggagggagttgactgtaatgatagtgttgtggttagagagaagctgaataatattcaagaacgacacaaagcattggatgccaaagtgatttcagtgaaatatgtgttgggaaaagtgcaggaggattatgattctttgttgatcggaactgatatttccattaacaaagctcaggcagccttcacaatgtccaaaggtgcagagaaagaagtagaggagctcaccatagagctccaaagactaaaggaagtgtttgatttggctaacgccaaattccaggacgtggaagaacgcaagaacacgttgatggcacgtgatgaggatcgtcttgcatgggaagaggatctcaggcaatcagacaaagagctgaatcagatcagcatggacctttgttcttttcaagaattgcaatcaaagcatgatacgtcagccaccatgttgctcaatctgaagaatgaggtagccaattatttggaggcaaagcgaatcgaggaagcacgagaacaagaaagtggaactcataaacccgtgcaagaagtcatcattatgttaaagagcgagctcgtggagcagaggaagagcatagcgagggtgacggatgaattatgtgttctgaaagccacagctgaattgctaaaatcgcaattgaagaaagagaaagcagcacttgctgccgctcagcagatggaagtgatggcatccatgtccactcagtctctcaagatggacatcaaactgtcacagcaggaacttgaagcacttcatgccaaggcaaaggagtgccgagatagatcgggcaaggctctgcaagatgcgtcccatgaagctgacgaggcgaaggttattgctaccaaggctcagggggagctaaaaaagacagaggaagaagtggcgcaagcgaaggctgctctgagcactgtggaatccaagctcgaagcagttctgagggacatacaggcagcgaaagcgtccgagaggctggcgctcgatactctgacgacgacgacactggaggagcacagcaaggtcggcgctcgatactctgagacggtcacgcttgacctggatgagtacacgtctctggttcagaggtcacgtcaggcagaagaggctgcgcacgagaagacaacagctgcttccaccgcagaggttgaggcggcaaaggagtccgcggcgcgcaccatatccagactgaacgagatcttgcaggccttggaagagcagaagcaggcactggcagccgccaccgagcgggcgggcagggcgagcgaaggcaagctggccatggagcaggagctgaggcaacggagagaggaggagaacgggaagcgccgccgcatggccagtgaagctccaaagcctgtaaccgggcctcggagcgctgcagagatcgcgggtagagtcgacatgacgttgacgtgcacgggcaaaggagatagtagctgtcccgccgcgtcggtccatccggtgtcggacgcgtccgggaccgggaccgggaggagcagccccagcgatgcggccctgccagtgccagtgccagcgaagacgaagaaggcaaagaagctgccgttcttcactcgcgtcgtcatgttcctggggggcaggaggaggaggaggctcagagctgccaggtgattttccgtttccttgtgttccttatctgtgtgcccgtgtcgcgtgtggtgtttgtcagtgctgggagcgtgtaaacttcactggtttttactcgattgcacgttgttcgtgctggatgtgttcgaagattgtgtgagattgcatggggtgttcggtttgctggacaagacaagatggttctgtaacacggttggcttgggtttttttt

SEQ ID NO: 685 - DNA, 3494 bp, Zea Mays
aaacagcggttacgtttcaattcccgcctagggataagaccacgcttctctccgtctccatggcatggccatccaccgcagcaatctctctagacgcttcaagatctcaaggatctggcatcaatcggagcaatatcgcgccaaatccttcgcctcctcatctccaacgagcgagactacacccctcaaggtcctaaccgggctcctgcgcgacgcctattcgctgaaatgcctcagggagttgcacgcgcatctcgccgtcgcgggtgcgatccaggacacattcgtcgtcacaggtcttgtcgaaagtatcaaatttgttgagctgtggcttgagaagatgccagacaagaagatcgaaggggctgattcatctcacattgtctcttcaacaaaatctttggaaagttcagtagggcctaatctaattgaaagtactgatggagattattgtaataaccttcacaagacagcagttgccaattttgtggcatcaatgctgcaagaacatcctatgagccttatattggctgagaacaaaagcaatttgcaagaaatttcagttgaacagaagattcctatctttgtttctatcaacctttcaccaaaagtggatggcagtgaattgccatgccccattgaagttcatgatggtattacatcttcctctagcaaaactaacgaaccaatggaagcccaagattattcgaacacaatgaaatcaaacacagctagttgcatgttcgaggcatcaaagcggcaagaatgccctataagcctcatattggcagacaagaaaggcagtttgcaagaagtttcagttgaacaaaatgttccttgtggtgattatgttgccctttcacaaaaagcagacggtagtgaattgacatcaacccgtgaagctcctgaaggctttctaacttcctctagcaaagtttatgtattaaaggaagcccaagatggttctatcacaacggaagcttctaaagtaaatgtttgtgcagcttcacactccatgcttaggttaattgaaggagtccaggatgaggcttcttgtattgattctgataaggttacttgtgaaacaccacctgccatcctgaaaaagttgaaagaagataagccactggtcgtccatagatttcataagcaccaaatgagcctaggagacacacatcaaaaggtgcctgcacctgtgagcagatcaaacaccagcaaatacttaagaatggataaaaacattgttgatactacgactcccattgaatcagtaaaggctgttgcatcaaaatttggtggcagcatgaactggaaaactcgcaagacacagacagcacaggtaactgagaagtgctttcccttcattctttttgtgtattgtaactgttattactgtgtgacatactctctttgtttctataagcaggtgagtgaccgtatcgtacttgagcttgataagctgaagaacgaaatttcagaatgtaaacatcaagcagaagctgcagaggctgcaaagttatcagtattaaaagagctggagagaacaaagaagcttatcgacgaaatgaaacacgtcctggagagggaacaagctgaggaggtggatgccaaggatgacttggagttatttcaaattatattacaagcgatggagggagttgactgtaatgatagtgttgtggttagagagaagctgaataatattcaagaacgacacaaagcattggatgccaaagtgatttcagtgaaatatgtgttgggaaaagtgcaggaggattatgattctttgttgatcggaactgatatttccattaacaaagctcaggcagccttcacaatgtccaaaggtgcagagaaagaagtagaggagctcaccatagagctccaaagactaaaggaagtgtttgatttggctaacgccaaattccaggacgtggaagaacgcaagaacacgttgatggcacgtgatgaggatcgtcttgcatgggaagaggatctcaggcaatcagacaaagagctgaatcagatcagcatggacctttgttcttttcaagaattgcaatcaaagcatgatacgtcagccaccatgttgctcaatctgaagaatgaggtagccaattatttggaggcaaagcgaatcgaggaagcacgagaacaagaaagtggaactcataaacccgtgcaagaagtcatcattatgttaaagagcgagctcgtggagcagaggaagagcatagcgagggtgacggatgaattatgtgttctgaaagccacagctgaattgctaaaatcgcaattgaagaaagagaaagcagcacttgctgccgctcagcagatggaagtgatggcatccatgtccactcagtctctcaagatggacatcaaactgtcacagcaggaacttgaagcacttcatgccaaggcaaaggagtgccgagatagatcgggcaaggctctgcaagatgcgtcccatgaagctgacgaggcgaaggttattgctaccaaggctcagggggagctaaaaaagacagaggaagaagtggcgcaagcgaaggctgctctgagcactgtggaatccaagctcgaagcagttctgagggacatacaggcagcgaaagcgtccgagaggctggcgctcgatactctgacgacgacgacactggaggagcacagcaaggtcggcgctcgatactctgagacggtcacgcttgacctggatgagtacacgtctctggttcagaggtcacgtcaggcagaagaggctgcgcacgagaagacaacagctgcttccaccgcagaggttgaggcggcaaaggagtccgcggcgcgcaccatatccagactgaacgagatcttgcaggccttggaagagcagaagcaggcactggcagccgccaccgagcgggcgggcagggcgagcgaaggcaagctggccatggagcaggagctgaggcaacggagagaggaggagaacgggaagcgccgccgcatggccagtgaagctccaaagcctgtaaccgggcctcggagcgctgcagagatcgcgggtagagtcgacatgacgttgacgtgcacgggcaaaggagatagtagctgtcccgccgcgtcggtccatccggtgtcggacgcgtccgggaccgggaccgggaggagcagccccagcgatgcggccctgccagtgccagtgccagcgaagacgaagaaggcaaagaagctgccgttcttcactcgcgtcgtcatgttcctggggggcaggaggaggaggaggctcagagctgccaggtgattttccgtttccttgtgttccttatctgtgtgcccgtgtcgcgtgtggtgtttgtcagtgctgggagcgtgtaaacttcactggtttttactcgattgcacgttgttcgtgctggatgtgttcgaagattgtgtgagattgcatggggtgttcggtttgctggacaagacaagatggttctgtaacacggttggcttgggtttttttt

SEQ ID NO: 686 - DNA, 6282 bp, Zea Mays
gtttcaattcccgcctagggataagaccacgcttctctccgtctccatggcatggccatccaccgcagcaatctctctagacgcttcaagatctcaaggatctggcatcaatcggagcaatatcgcgccaaatccttcgcctcctcatctccaacgagcgagactacacccctcaaggtcctaaccgggctcctgcgcgacgcctattcgctgaaatgcctcagggagttgcacgcgcatctcgccgtcgcgggtgcgatccaggacacattcgtcgtcacaggtcttgtcgaaaggtatgtttattttgggaaggccgcgtctgcggcgttgctatttgccgaaacctaccgcagccgccccgctgtgtactcactgaatctcgcggtccggtgcttctcggaccatggcttccaccgggagcttcttcatctttaccgggagctatgttgctttggctcggacaacttcaccttccctccggtcatcagggcgtgcacagctgtctcttgccttcggctggggagggagatgcactgcagggttcttcgtacaggtcatggtggcaatgttggcgtgcagactgcgctccttgacctgtatgctaaggctggccagattgatgtgtcaaggagagtctttgactgcatggtgctgagggacttgatttcttggaatgctatggtctcagggtactcactcaatgaatgcttccgagaagctgttgagatgttgcaggagatgcagcagggtggcatgaggccgaatgcaagcacttttgttggcatagttggcatgtgcggaagtgtcggagacagggatgttggtgattcgctgcatgcatttgcactgaaaggtggagtgattaatgacgaatctcttacatccgcattaatcacaatgtatgctgcatttgatgatctttcctcatctcgaatggtattcgatctgcatcctgtgaaagatttggtatctttcaattccatgatatcagcatacatgcagcaccacatttggaaggaagcttttgagatctttcgattgatgcattgtgtagctgtacggcctaacctggtcacagtggtgtctgtccttccttcttgcagtgatttctttggtataaaccatggggagtctgtgcacggcatgattatcaaacttggccttgcagagcacgtttctgttgctagcgctcttgtgtccatgtattcgaagcttgggaaattggactcatcgttgctccttttctgctgttgtgttgctccagatgctacaactatcatgaatgtaatatctggatgtagatacacaaaagatttacacatggcaaagtcaatacatgcatatgctgttagaaataaatttgaatcatatcatagcgttatgaatgcactcctagccatgtacgcagactgcagagatatatcaacatcccatacattattccagaaaatggaagtgcggatgttgatatcttggaacactatgatatctggttttgctgaaattggagattcagatacttgtctaatattattctgccagatgttccacgaagaagtgcaatttgatctagttactctgattggtcttatcagtagcttttcagtacccggggatgccatagttggagaatcagttcattctttagcaatcaaaagtggatgtaattcagatgtttctcttactaatgccctcattaccatgtacgccaactgtggtattgttgaagcaggtcagcaactttttgacagttgctgttctaggaatacaattacttacaatgctttgatgagtggatatcgcaaaaacaacatatctgcgaagatattgccattgttttaccaaatggtcgagaatgacgagaaaccgaaccttgtaaccttactgaatttattgcctgtttgtcagagccagttgcaggggaagtgtatacacagctatgcagtacgtaatttcaccaggttggaaacacccctcttcacatcagccatgggtatgtatagtaggttcaataatatagaatactgcagcaaaattttcagtttgatcggtgcaagaaaccttatagtatggaatgccttcttatctgcatgtgttcaatgcaagcaagctgatatggtagttgattgctttaagcatatgctcttccttaatgtcagacctgatgcagtaactatgctggcactcatctcagcatgttcacaacttggaaatgcatattttgctgcatgtattatggctgtcatacttcagaagggctttagcacgaatattttggttcttaatgctcttattgacacacattcgaggtgcggaagcatatcacttgcaagggagctctttgatagctcagtggagaaagattcagtcacttggggtgcaatgatcaacgcatacagtatgcatgggaatggtgaggctgcccttgatcttttctcaatgatgatagattcaggagtggatccagatgatataacttttgttagtatattatcggcctgcgctcataatggactcgtagagcaaggaagaacattgttcaaatcgctacaggcagactatggcattacaccgcgaatggagcattatgcatgtatggtggatctattgggccgaactggccacttggatgaagcatatgatgttgttaggtcaatgccattcaggccatcagataacttgcttgaatcattgcttggagcatgcagattccatggtaattataaaattggcgagtctataggaaaattactcatcaaatctgagtatggcaagtcaaggtcttatgttatgctctcgaacatatatgcttcagctggcaaatggagtgattgcgagcagctaagattagacatggaagcaaaaggattgcggaaaaatgtgggggttagctctattgggatgacatagccctgatgcaacaatgttatagagtttttcagaagttttttcccccacacattacagtttcgggaaatgccttcagagaaaacattccattactgttcaaccccataatatgttggagtcgttaactgcactaaagtgaactatttctatctatgcgcaacaaggagtgttgcatctaatatctactacaatttccaaggaagaggcagttgaatgtttctagcagacacctgcaattctgaaatgtcattactgtctagttgtcagttagtatcaaatttgttgagctgtggcttgagaagatgccagacaagaagatcgaaggggctgattcatctcacattgtctcttcaacaaaatctttggaaagttcagtagggcctaatctaattgaaagtactgatggagattattgtaataaccttcacaagacagcagttgccaattttgtggcatcaatgctgcaagaacatcctatgagccttatattggctgagaacaaaagcaatttgcaagaaatttcagttgaacagaagattcctatctttgtttctatcaacctttcaccaaaagtggatggcagtgaattgccatgccccattgaagttcatgatggtattacatcttcctctagcaaaactaacgaaccaatggaagcccaagattattcgaacacaatgaaatcaaacacagctagttgcatgttcgaggcatcaaagcggcaagaatgccctataagcctcatattggcagacaagaaaggcagtttgcaagaagtttcagttgaacaaaatgttccttgtggtgattatgttgccctttcacaaaaagcagacggtagtgaattgacatcaacccgtgaagctcctgaaggctttctaacttcctctagcaaagtttatgtattaaaggaagcccaagatggttctatcacaacggaagcttctaaagtaaatgtttgtgcagcttcacactccatgcttaggttaattgaaggagtccaggatgaggcttcttgtattgattctgataaggttacttgtgaaacaccacctgccatcctgaaaaagttgaaagaagataagccactggtcgtccatagatttcataagcaccaaatgagcctaggagacacacatcaaaaggtgcctgcacctgtgagcagatcaaacaccagcaaatacttaagaatggataaaaacattgttgatactacgactcccattgaatcagtaaaggctgttgcatcaaaatttggtggcagcatgaactggaaaactcgcaagacacagacagcacaggtgagtgaccgtatcgtacttgagcttgataagctgaagaacgaaatttcagaatgtaaacatcaagcagaagctgcagaggctgcaaagttatcagtattaaaagagctggagagaacaaagaagcttatcgacgaaatgaaacacgtcctggagagggaacaagctgaggaggtggatgccaaggatgacttggagttatttcaaattatattacaagcgatggagggagttgactgtaatgatagtgttgtggttagagagaagctgaataatattcaagaacgacacaaagcattggatgccaaagtgatttcagtgaaatatgtgttgggaaaagtgcaggaggattatgattctttgttgatcggaactgatatttccattaacaaagctcaggcagccttcacaatgtccaaaggtgcagagaaagaagtagaggagctcaccatagagctccaaagactaaaggaagtgtttgatttggctaacgccaaattccaggacgtggaagaacgcaagaacacgttgatggcacgtgatgaggatcgtcttgcatgggaagaggatctcaggcaatcagacaaagagctgaatcagatcagcatggacctttgttcttttcaagaattgcaatcaaagcatgatacgtcagccaccatgttgctcaatctgaagaatgaggtagccaattatttggaggcaaagcgaatcgaggaagcacgagaacaagaaagtggaactcataaacccgtgcaagaagtcatcattatgttaaagagcgagctcgtggagcagaggaagagcatagcgagggtgacggatgaattatgtgttctgaaagccacagctgaattgctaaaatcgcaattgaagaaagagaaagcagcacttgctgccgctcagcagatggaagtgatggcatccatgtccactcagtctctcaagatggacatcaaactgtcacagcaggaacttgaagcacttcatgccaaggcaaaggagtgccgagatagatcgggcaaggctctgcaagatgcgtcccatgaagctgacgaggcgaaggttattgctaccaaggctcagggggagctaaaaaagacagaggaagaagtggcgcaagcgaaggctgctctgagcactgtggaatccaagctcgaagcagttctgagggacatacaggcagcgaaagcgtccgagaggctggcgctcgatactctgacgacgacgacactggaggagcacagcaaggtcggcgctcgatactctgagacggtcacgcttgacctggatgagtacacgtctctggttcagaggtcacgtcaggcagaagaggctgcgcacgagaagacaacagctgcttccaccgcagaggttgaggcggcaaaggagtccgcggcgcgcaccatatccagactgaacgagatcttgcaggccttggaagagcagaagcaggcactggcagccgccaccgagcgggcgggcagggcgagcgaaggcaagctggccatggagcaggagctgaggcaacggagagaggaggagaacgggaagcgccgccgcatggccagtgaagctccaaagcctgtaaccgggcctcggagcgctgcagagatcgcgggtagagtcgacatgacgttgacgtgcacgggcaaaggagatagtagctgtcccgccgcgtcggtccatccggtgtcggacgcgtccgggaccgggaccgggaggagcagccccagcgatgcggccctgccagtgccagtgccagcgaagacgaagaaggcaaagaagctgccgttcttcactcgcgtcgtcatgttcctggggggcaggaggaggaggaggctcagagctgccaggtgattttccgtttccttgtgttccttatctgtgtgcccgtgtcgcgtgtggtgtttgtcagtgctgggagcgtgtaaacttcactggtttttactcgattgcacgttgttcgtgctggatgtgttcgaagattgtgtgagattgcatggggtgttcggtttgctggacaagacaagatggttctgtaacacggttggcttgggtttttttt

SEQ ID NO: 687 - DNA, 6314 bp, Zea Mays
gtttcaattcccgcctagggataagaccacgcttctctccgtctccatggcatggccatccaccgcagcaatctctctagacgcttcaagatctcaaggatctggcatcaatcggagcaatatcgcgccaaatccttcgcctcctcatctccaacgagcgagactacacccctcaaggtcctaaccgggctcctgcgcgacgcctattcgctgaaatgcctcagggagttgcacgcgcatctcgccgtcgcgggtgcgatccaggacacattcgtcgtcacaggtcttgtcgaaaggtatgtttattttgggaaggccgcgtctgcggcgttgctatttgccgaaacctaccgcagccgccccgctgtgtactcactgaatctcgcggtccggtgcttctcggaccatggcttccaccgggagcttcttcatctttaccgggagctatgttgctttggctcggacaacttcaccttccctccggtcatcagggcgtgcacagctgtctcttgccttcggctggggagggagatgcactgcagggttcttcgtacaggtcatggtggcaatgttggcgtgcagactgcgctccttgacctgtatgctaaggctggccagattgatgtgtcaaggagagtctttgactgcatggtgctgagggacttgatttcttggaatgctatggtctcagggtactcactcaatgaatgcttccgagaagctgttgagatgttgcaggagatgcagcagggtggcatgaggccgaatgcaagcacttttgttggcatagttggcatgtgcggaagtgtcggagacagggatgttggtgattcgctgcatgcatttgcactgaaaggtggagtgattaatgacgaatctcttacatccgcattaatcacaatgtatgctgcatttgatgatctttcctcatctcgaatggtattcgatctgcatcctgtgaaagatttggtatctttcaattccatgatatcagcatacatgcagcaccacatttggaaggaagcttttgagatctttcgattgatgcattgtgtagctgtacggcctaacctggtcacagtggtgtctgtccttccttcttgcagtgatttctttggtataaaccatggggagtctgtgcacggcatgattatcaaacttggccttgcagagcacgtttctgttgctagcgctcttgtgtccatgtattcgaagcttgggaaattggactcatcgttgctccttttctgctgttgtgttgctccagatgctacaactatcatgaatgtaatatctggatgtagatacacaaaagatttacacatggcaaagtcaatacatgcatatgctgttagaaataaatttgaatcatatcatagcgttatgaatgcactcctagccatgtacgcagactgcagagatatatcaacatcccatacattattccagaaaatggaagtgcggatgttgatatcttggaacactatgatatctggttttgctgaaattggagattcagatacttgtctaatattattctgccagatgttccacgaagaagtgcaatttgatctagttactctgattggtcttatcagtagcttttcagtacccggggatgccatagttggagaatcagttcattctttagcaatcaaaagtggatgtaattcagatgtttctcttactaatgccctcattaccatgtacgccaactgtggtattgttgaagcaggtcagcaactttttgacagttgctgttctaggaatacaattacttacaatgctttgatgagtggatatcgcaaaaacaacatatctgcgaagatattgccattgttttaccaaatggtcgagaatgacgagaaaccgaaccttgtaaccttactgaatttattgcctgtttgtcagagccagttgcaggggaagtgtatacacagctatgcagtacgtaatttcaccaggttggaaacacccctcttcacatcagccatgggtatgtatagtaggttcaataatatagaatactgcagcaaaattttcagtttgatcggtgcaagaaaccttatagtatggaatgccttcttatctgcatgtgttcaatgcaagcaagctgatatggtagttgattgctttaagcatatgctcttccttaatgtcagacctgatgcagtaactatgctggcactcatctcagcatgttcacaacttggaaatgcatattttgctgcatgtattatggctgtcatacttcagaagggctttagcacgaatattttggttcttaatgctcttattgacacacattcgaggtgcggaagcatatcacttgcaagggagctctttgatagctcagtggagaaagattcagtcacttggggtgcaatgatcaacgcatacagtatgcatgggaatggtgaggctgcccttgatcttttctcaatgatgatagattcaggagtggatccagatgatataacttttgttagtatattatcggcctgcgctcataatggactcgtagagcaaggaagaacattgttcaaatcgctacaggcagactatggcattacaccgcgaatggagcattatgcatgtatggtggatctattgggccgaactggccacttggatgaagcatatgatgttgttaggtcaatgccattcaggccatcagataacttgcttgaatcattgcttggagcatgcagattccatggtaattataaaattggcgagtctataggaaaattactcatcaaatctgagtatggcaagtcaaggtcttatgttatgctctcgaacatatatgcttcagctggcaaatggagtgattgcgagcagctaagattagacatggaagcaaaaggattgcggaaaaatgtgggggttagctctattgggatgacatagccctgatgcaacaatgttatagagtttttcagaagttttttcccccacacattacagtttcgggaaatgccttcagagtaatttgaacttcaaaaggcattttttgtgcacaggaaaacattccattactgttcaaccccataatatgttggagtcgttaactgcactaaagtgaactatttctatctatgcgcaacaaggagtgttgcatctaatatctactacaatttccaaggaagaggcagttgaatgtttctagcagacacctgcaattctgaaatgtcattactgtctagttgtcagtatcaaatttgttgagctgtggcttgagaagatgccagacaagaagatcgaaggggctgattcatctcacattgtctcttcaacaaaatctttggaaagttcagtagggcctaatctaattgaaagtactgatggagattattgtaataaccttcacaagacagcagttgccaattttgtggcatcaatgctgcaagaacatcctatgagccttatattggctgagaacaaaagcaatttgcaagaaatttcagttgaacagaagattcctatctttgtttctatcaacctttcaccaaaagtggatggcagtgaattgccatgccccattgaagttcatgatggtattacatcttcctctagcaaaactaacgaaccaatggaagcccaagattattcgaacacaatgaaatcaaacacagctagttgcatgttcgaggcatcaaagcggcaagaatgccctataagcctcatattggcagacaagaaaggcagtttgcaagaagtttcagttgaacaaaatgttccttgtggtgattatgttgccctttcacaaaaagcagacggtagtgaattgacatcaacccgtgaagctcctgaaggctttctaacttcctctagcaaagtttatgtattaaaggaagcccaagatggttctatcacaacggaagcttctaaagtaaatgtttgtgcagcttcacactccatgcttaggttaattgaaggagtccaggatgaggcttcttgtattgattctgataaggttacttgtgaaacaccacctgccatcctgaaaaagttgaaagaagataagccactggtcgtccatagatttcataagcaccaaatgagcctaggagacacacatcaaaaggtgcctgcacctgtgagcagatcaaacaccagcaaatacttaagaatggataaaaacattgttgatactacgactcccattgaatcagtaaaggctgttgcatcaaaatttggtggcagcatgaactggaaaactcgcaagacacagacagcacaggtgagtgaccgtatcgtacttgagcttgataagctgaagaacgaaatttcagaatgtaaacatcaagcagaagctgcagaggctgcaaagttatcagtattaaaagagctggagagaacaaagaagcttatcgacgaaatgaaacacgtcctggagagggaacaagctgaggaggtggatgccaaggatgacttggagttatttcaaattatattacaagcgatggagggagttgactgtaatgatagtgttgtggttagagagaagctgaataatattcaagaacgacacaaagcattggatgccaaagtgatttcagtgaaatatgtgttgggaaaagtgcaggaggattatgattctttgttgatcggaactgatatttccattaacaaagctcaggcagccttcacaatgtccaaaggtgcagagaaagaagtagaggagctcaccatagagctccaaagactaaaggaagtgtttgatttggctaacgccaaattccaggacgtggaagaacgcaagaacacgttgatggcacgtgatgaggatcgtcttgcatgggaagaggatctcaggcaatcagacaaagagctgaatcagatcagcatggacctttgttcttttcaagaattgcaatcaaagcatgatacgtcagccaccatgttgctcaatctgaagaatgaggtagccaattatttggaggcaaagcgaatcgaggaagcacgagaacaagaaagtggaactcataaacccgtgcaagaagtcatcattatgttaaagagcgagctcgtggagcagaggaagagcatagcgagggtgacggatgaattatgtgttctgaaagccacagctgaattgctaaaatcgcaattgaagaaagagaaagcagcacttgctgccgctcagcagatggaagtgatggcatccatgtccactcagtctctcaagatggacatcaaactgtcacagcaggaacttgaagcacttcatgccaaggcaaaggagtgccgagatagatcgggcaaggctctgcaagatgcgtcccatgaagctgacgaggcgaaggttattgctaccaaggctcagggggagctaaaaaagacagaggaagaagtggcgcaagcgaaggctgctctgagcactgtggaatccaagctcgaagcagttctgagggacatacaggcagcgaaagcgtccgagaggctggcgctcgatactctgacgacgacgacactggaggagcacagcaaggtcggcgctcgatactctgagacggtcacgcttgacctggatgagtacacgtctctggttcagaggtcacgtcaggcagaagaggctgcgcacgagaagacaacagctgcttccaccgcagaggttgaggcggcaaaggagtccgcggcgcgcaccatatccagactgaacgagatcttgcaggccttggaagagcagaagcaggcactggcagccgccaccgagcgggcgggcagggcgagcgaaggcaagctggccatggagcaggagctgaggcaacggagagaggaggagaacgggaagcgccgccgcatggccagtgaagctccaaagcctgtaaccgggcctcggagcgctgcagagatcgcgggtagagtcgacatgacgttgacgtgcacgggcaaaggagatagtagctgtcccgccgcgtcggtccatccggtgtcggacgcgtccgggaccgggaccgggaggagcagccccagcgatgcggccctgccagtgccagtgccagcgaagacgaagaaggcaaagaagctgccgttcttcactcgcgtcgtcatgttcctggggggcaggaggaggaggaggctcagagctgccaggtgattttccgtttccttgtgttccttatctgtgtgcccgtgtcgcgtgtggtgtttgtcagtgctgggagcgtgtaaacttcactggtttttactcgattgcacgttgttcgtgctggatgtgttcgaagattgtgtgagattgcatggggtgttcggtttgctggacaagacaagatggttctgtaacacggttggcttgggtttttttt

SEQ ID NO: 688 - DNA, 6110 bp, Zea Mays
gtttcaattcccgcctagggataagaccacgcttctctccgtctccatggcatggccatccaccgcagcaatctctctagacgcttcaagatctcaaggatctggcatcaatcggagcaatatcgcgccaaatccttcgcctcctcatctccaacgagcgagactacacccctcaaggtcctaaccgggctcctgcgcgacgcctattcgctgaaatgcctcagggagttgcacgcgcatctcgccgtcgcgggtgcgatccaggacacattcgtcgtcacaggtcttgtcgaaaggtatgtttattttgggaaggccgcgtctgcggcgttgctatttgccgaaacctaccgcagccgccccgctgtgtactcactgaatctcgcggtccggtgcttctcggaccatggcttccaccgggagcttcttcatctttaccgggagctatgttgctttggctcggacaacttcaccttccctccggtcatcagggcgtgcacagctgtctcttgccttcggctggggagggagatgcactgcagggttcttcgtacaggtcatggtggcaatgttggcgtgcagactgcgctccttgacctgtatgctaaggctggccagattgatgtgtcaaggagagtctttgactgcatggtgctgagggacttgatttcttggaatgctatggtctcagggtactcactcaatgaatgcttccgagaagctgttgagatgttgcaggagatgcagcagggtggcatgaggccgaatgcaagcacttttgttggcatagttggcatgtgcggaagtgtcggagacagggatgttggtgattcgctgcatgcatttgcactgaaaggtggagtgattaatgacgaatctcttacatccgcattaatcacaatgtatgctgcatttgatgatctttcctcatctcgaatggtattcgatctgcatcctgtgaaagatttggtatctttcaattccatgatatcagcatacatgcagcaccacatttggaaggaagcttttgagatctttcgattgatgcattgtgtagctgtacggcctaacctggtcacagtggtgtctgtccttccttcttgcagtgatttctttggtataaaccatggggagtctgtgcacggcatgattatcaaacttggccttgcagagcacgtttctgttgctagcgctcttgtgtccatgtattcgaagcttgggaaattggactcatcgttgctccttttctgctgttgtgttgctccagatgctacaactatcatgaatgtaatatctggatgtagatacacaaaagatttacacatggcaaagtcaatacatgcatatgctgttagaaataaatttgaatcatatcatagcgttatgaatgcactcctagccatgtacgcagactgcagagatatatcaacatcccatacattattccagaaaatggaagtgcggatgttgatatcttggaacactatgatatctggttttgctgaaattggagattcagatacttgtctaatattattctgccagatgttccacgaagaagtgcaatttgatctagttactctgattggtcttatcagtagcttttcagtacccggggatgccatagttggagaatcagttcattctttagcaatcaaaagtggatgtaattcagatgtttctcttactaatgccctcattaccatgtacgccaactgtggtattgttgaagcaggtcagcaactttttgacagttgctgttctaggaatacaattacttacaatgctttgatgagtggatatcgcaaaaacaacatatctgcgaagatattgccattgttttaccaaatggtcgagaatgacgagaaaccgaaccttgtaaccttactgaatttattgcctgtttgtcagagccagttgcaggggaagtgtatacacagctatgcagtacgtaatttcaccaggttggaaacacccctcttcacatcagccatgggtatgtatagtaggttcaataatatagaatactgcagcaaaattttcagtttgatcggtgcaagaaaccttatagtatggaatgccttcttatctgcatgtgttcaatgcaagcaagctgatatggtagttgattgctttaagcatatgctcttccttaatgtcagacctgatgcagtaactatgctggcactcatctcagcatgttcacaacttggaaatgcatattttgctgcatgtattatggctgtcatacttcagaagggctttagcacgaatattttggttcttaatgctcttattgacacacattcgaggtgcggaagcatatcacttgcaagggagctctttgatagctcagtggagaaagattcagtcacttggggtgcaatgatcaacgcatacagtatgcatgggaatggtgaggctgcccttgatcttttctcaatgatgatagattcaggagtggatccagatgatataacttttgttagtatattatcggcctgcgctcataatggactcgtagagcaaggaagaacattgttcaaatcgctacaggcagactatggcattacaccgcgaatggagcattatgcatgtatggtggatctattgggccgaactggccacttggatgaagcatatgatgttgttaggtcaatgccattcaggccatcagataacttgcttgaatcattgcttggagcatgcagattccatggtaattataaaattggcgagtctataggaaaattactcatcaaatctgagtatggcaagtcaaggtcttatgttatgctctcgaacatatatgcttcagctggcaaatggagtgattgcgagcagctaagattagacatggaagcaaaaggattgcggaaaaatgtgggggttagctctattgggatgacatagccctgatgcaacaatgttatagagtttttcagaagttttttcccccacacattacagtttcgggaaatgccttcagagtaatttgaacttcaaaattagtatcaaatttgttgagctgtggcttgagaagatgccagacaagaagatcgaaggggctgattcatctcacattgtctcttcaacaaaatctttggaaagttcagtagggcctaatctaattgaaagtactgatggagattattgtaataaccttcacaagacagcagttgccaattttgtggcatcaatgctgcaagaacatcctatgagccttatattggctgagaacaaaagcaatttgcaagaaatttcagttgaacagaagattcctatctttgtttctatcaacctttcaccaaaagtggatggcagtgaattgccatgccccattgaagttcatgatggtattacatcttcctctagcaaaactaacgaaccaatggaagcccaagattattcgaacacaatgaaatcaaacacagctagttgcatgttcgaggcatcaaagcggcaagaatgccctataagcctcatattggcagacaagaaaggcagtttgcaagaagtttcagttgaacaaaatgttccttgtggtgattatgttgccctttcacaaaaagcagacggtagtgaattgacatcaacccgtgaagctcctgaaggctttctaacttcctctagcaaagtttatgtattaaaggaagcccaagatggttctatcacaacggaagcttctaaagtaaatgtttgtgcagcttcacactccatgcttaggttaattgaaggagtccaggatgaggcttcttgtattgattctgataaggttacttgtgaaacaccacctgccatcctgaaaaagttgaaagaagataagccactggtcgtccatagatttcataagcaccaaatgagcctaggagacacacatcaaaaggtgcctgcacctgtgagcagatcaaacaccagcaaatacttaagaatggataaaaacattgttgatactacgactcccattgaatcagtaaaggctgttgcatcaaaatttggtggcagcatgaactggaaaactcgcaagacacagacagcacaggtgagtgaccgtatcgtacttgagcttgataagctgaagaacgaaatttcagaatgtaaacatcaagcagaagctgcagaggctgcaaagttatcagtattaaaagagctggagagaacaaagaagcttatcgacgaaatgaaacacgtcctggagagggaacaagctgaggaggtggatgccaaggatgacttggagttatttcaaattatattacaagcgatggagggagttgactgtaatgatagtgttgtggttagagagaagctgaataatattcaagaacgacacaaagcattggatgccaaagtgatttcagtgaaatatgtgttgggaaaagtgcaggaggattatgattctttgttgatcggaactgatatttccattaacaaagctcaggcagccttcacaatgtccaaaggtgcagagaaagaagtagaggagctcaccatagagctccaaagactaaaggaagtgtttgatttggctaacgccaaattccaggacgtggaagaacgcaagaacacgttgatggcacgtgatgaggatcgtcttgcatgggaagaggatctcaggcaatcagacaaagagctgaatcagatcagcatggacctttgttcttttcaagaattgcaatcaaagcatgatacgtcagccaccatgttgctcaatctgaagaatgaggtagccaattatttggaggcaaagcgaatcgaggaagcacgagaacaagaaagtggaactcataaacccgtgcaagaagtcatcattatgttaaagagcgagctcgtggagcagaggaagagcatagcgagggtgacggatgaattatgtgttctgaaagccacagctgaattgctaaaatcgcaattgaagaaagagaaagcagcacttgctgccgctcagcagatggaagtgatggcatccatgtccactcagtctctcaagatggacatcaaactgtcacagcaggaacttgaagcacttcatgccaaggcaaaggagtgccgagatagatcgggcaaggctctgcaagatgcgtcccatgaagctgacgaggcgaaggttattgctaccaaggctcagggggagctaaaaaagacagaggaagaagtggcgcaagcgaaggctgctctgagcactgtggaatccaagctcgaagcagttctgagggacatacaggcagcgaaagcgtccgagaggctggcgctcgatactctgacgacgacgacactggaggagcacagcaaggtcggcgctcgatactctgagacggtcacgcttgacctggatgagtacacgtctctggttcagaggtcacgtcaggcagaagaggctgcgcacgagaagacaacagctgcttccaccgcagaggttgaggcggcaaaggagtccgcggcgcgcaccatatccagactgaacgagatcttgcaggccttggaagagcagaagcaggcactggcagccgccaccgagcgggcgggcagggcgagcgaaggcaagctggccatggagcaggagctgaggcaacggagagaggaggagaacgggaagcgccgccgcatggccagtgaagctccaaagcctgtaaccgggcctcggagcgctgcagagatcgcgggtagagtcgacatgacgttgacgtgcacgggcaaaggagatagtagctgtcccgccgcgtcggtccatccggtgtcggacgcgtccgggaccgggaccgggaggagcagccccagcgatgcggccctgccagtgccagtgccagcgaagacgaagaaggcaaagaagctgccgttcttcactcgcgtcgtcatgttcctggggggcaggaggaggaggaggctcagagctgccaggtgattttccgtttccttgtgttccttatctgtgtgcccgtgtcgcgtgtggtgtttgtcagtgctgggagcgtgtaaacttcactggtttttactcgattgcacgttgttcgtgctggatgtgttcgaagattgtgtgagattgcatggggtgttcggtttgctggacaagacaagatggttctgtaacacggttggcttgggtttttttt

SEQ ID NO: 689 - DNA, 6106 bp, Zea Mays
gtttcaattcccgcctagggataagaccacgcttctctccgtctccatggcatggccatccaccgcagcaatctctctagacgcttcaagatctcaaggatctggcatcaatcggagcaatatcgcgccaaatccttcgcctcctcatctccaacgagcgagactacacccctcaaggtcctaaccgggctcctgcgcgacgcctattcgctgaaatgcctcagggagttgcacgcgcatctcgccgtcgcgggtgcgatccaggacacattcgtcgtcacaggtcttgtcgaaaggtatgtttattttgggaaggccgcgtctgcggcgttgctatttgccgaaacctaccgcagccgccccgctgtgtactcactgaatctcgcggtccggtgcttctcggaccatggcttccaccgggagcttcttcatctttaccgggagctatgttgctttggctcggacaacttcaccttccctccggtcatcagggcgtgcacagctgtctcttgccttcggctggggagggagatgcactgcagggttcttcgtacaggtcatggtggcaatgttggcgtgcagactgcgctccttgacctgtatgctaaggctggccagattgatgtgtcaaggagagtctttgactgcatggtgctgagggacttgatttcttggaatgctatggtctcagggtactcactcaatgaatgcttccgagaagctgttgagatgttgcaggagatgcagcagggtggcatgaggccgaatgcaagcacttttgttggcatagttggcatgtgcggaagtgtcggagacagggatgttggtgattcgctgcatgcatttgcactgaaaggtggagtgattaatgacgaatctcttacatccgcattaatcacaatgtatgctgcatttgatgatctttcctcatctcgaatggtattcgatctgcatcctgtgaaagatttggtatctttcaattccatgatatcagcatacatgcagcaccacatttggaaggaagcttttgagatctttcgattgatgcattgtgtagctgtacggcctaacctggtcacagtggtgtctgtccttccttcttgcagtgatttctttggtataaaccatggggagtctgtgcacggcatgattatcaaacttggccttgcagagcacgtttctgttgctagcgctcttgtgtccatgtattcgaagcttgggaaattggactcatcgttgctccttttctgctgttgtgttgctccagatgctacaactatcatgaatgtaatatctggatgtagatacacaaaagatttacacatggcaaagtcaatacatgcatatgctgttagaaataaatttgaatcatatcatagcgttatgaatgcactcctagccatgtacgcagactgcagagatatatcaacatcccatacattattccagaaaatggaagtgcggatgttgatatcttggaacactatgatatctggttttgctgaaattggagattcagatacttgtctaatattattctgccagatgttccacgaagaagtgcaatttgatctagttactctgattggtcttatcagtagcttttcagtacccggggatgccatagttggagaatcagttcattctttagcaatcaaaagtggatgtaattcagatgtttctcttactaatgccctcattaccatgtacgccaactgtggtattgttgaagcaggtcagcaactttttgacagttgctgttctaggaatacaattacttacaatgctttgatgagtggatatcgcaaaaacaacatatctgcgaagatattgccattgttttaccaaatggtcgagaatgacgagaaaccgaaccttgtaaccttactgaatttattgcctgtttgtcagagccagttgcaggggaagtgtatacacagctatgcagtacgtaatttcaccaggttggaaacacccctcttcacatcagccatgggtatgtatagtaggttcaataatatagaatactgcagcaaaattttcagtttgatcggtgcaagaaaccttatagtatggaatgccttcttatctgcatgtgttcaatgcaagcaagctgatatggtagttgattgctttaagcatatgctcttccttaatgtcagacctgatgcagtaactatgctggcactcatctcagcatgttcacaacttggaaatgcatattttgctgcatgtattatggctgtcatacttcagaagggctttagcacgaatattttggttcttaatgctcttattgacacacattcgaggtgcggaagcatatcacttgcaagggagctctttgatagctcagtggagaaagattcagtcacttggggtgcaatgatcaacgcatacagtatgcatgggaatggtgaggctgcccttgatcttttctcaatgatgatagattcaggagtggatccagatgatataacttttgttagtatattatcggcctgcgctcataatggactcgtagagcaaggaagaacattgttcaaatcgctacaggcagactatggcattacaccgcgaatggagcattatgcatgtatggtggatctattgggccgaactggccacttggatgaagcatatgatgttgttaggtcaatgccattcaggccatcagataacttgcttgaatcattgcttggagcatgcagattccatggtaattataaaattggcgagtctataggaaaattactcatcaaatctgagtatggcaagtcaaggtcttatgttatgctctcgaacatatatgcttcagctggcaaatggagtgattgcgagcagctaagattagacatggaagcaaaaggattgcggaaaaatgtgggggttagctctattgggatgacatagccctgatgcaacaatgttatagagtttttcagaagttttttcccccacacattacagtttcgggaaatgccttcagagtaatttgaacttcaaaatatcaaatttgttgagctgtggcttgagaagatgccagacaagaagatcgaaggggctgattcatctcacattgtctcttcaacaaaatctttggaaagttcagtagggcctaatctaattgaaagtactgatggagattattgtaataaccttcacaagacagcagttgccaattttgtggcatcaatgctgcaagaacatcctatgagccttatattggctgagaacaaaagcaatttgcaagaaatttcagttgaacagaagattcctatctttgtttctatcaacctttcaccaaaagtggatggcagtgaattgccatgccccattgaagttcatgatggtattacatcttcctctagcaaaactaacgaaccaatggaagcccaagattattcgaacacaatgaaatcaaacacagctagttgcatgttcgaggcatcaaagcggcaagaatgccctataagcctcatattggcagacaagaaaggcagtttgcaagaagtttcagttgaacaaaatgttccttgtggtgattatgttgccctttcacaaaaagcagacggtagtgaattgacatcaacccgtgaagctcctgaaggctttctaacttcctctagcaaagtttatgtattaaaggaagcccaagatggttctatcacaacggaagcttctaaagtaaatgtttgtgcagcttcacactccatgcttaggttaattgaaggagtccaggatgaggcttcttgtattgattctgataaggttacttgtgaaacaccacctgccatcctgaaaaagttgaaagaagataagccactggtcgtccatagatttcataagcaccaaatgagcctaggagacacacatcaaaaggtgcctgcacctgtgagcagatcaaacaccagcaaatacttaagaatggataaaaacattgttgatactacgactcccattgaatcagtaaaggctgttgcatcaaaatttggtggcagcatgaactggaaaactcgcaagacacagacagcacaggtgagtgaccgtatcgtacttgagcttgataagctgaagaacgaaatttcagaatgtaaacatcaagcagaagctgcagaggctgcaaagttatcagtattaaaagagctggagagaacaaagaagcttatcgacgaaatgaaacacgtcctggagagggaacaagctgaggaggtggatgccaaggatgacttggagttatttcaaattatattacaagcgatggagggagttgactgtaatgatagtgttgtggttagagagaagctgaataatattcaagaacgacacaaagcattggatgccaaagtgatttcagtgaaatatgtgttgggaaaagtgcaggaggattatgattctttgttgatcggaactgatatttccattaacaaagctcaggcagccttcacaatgtccaaaggtgcagagaaagaagtagaggagctcaccatagagctccaaagactaaaggaagtgtttgatttggctaacgccaaattccaggacgtggaagaacgcaagaacacgttgatggcacgtgatgaggatcgtcttgcatgggaagaggatctcaggcaatcagacaaagagctgaatcagatcagcatggacctttgttcttttcaagaattgcaatcaaagcatgatacgtcagccaccatgttgctcaatctgaagaatgaggtagccaattatttggaggcaaagcgaatcgaggaagcacgagaacaagaaagtggaactcataaacccgtgcaagaagtcatcattatgttaaagagcgagctcgtggagcagaggaagagcatagcgagggtgacggatgaattatgtgttctgaaagccacagctgaattgctaaaatcgcaattgaagaaagagaaagcagcacttgctgccgctcagcagatggaagtgatggcatccatgtccactcagtctctcaagatggacatcaaactgtcacagcaggaacttgaagcacttcatgccaaggcaaaggagtgccgagatagatcgggcaaggctctgcaagatgcgtcccatgaagctgacgaggcgaaggttattgctaccaaggctcagggggagctaaaaaagacagaggaagaagtggcgcaagcgaaggctgctctgagcactgtggaatccaagctcgaagcagttctgagggacatacaggcagcgaaagcgtccgagaggctggcgctcgatactctgacgacgacgacactggaggagcacagcaaggtcggcgctcgatactctgagacggtcacgcttgacctggatgagtacacgtctctggttcagaggtcacgtcaggcagaagaggctgcgcacgagaagacaacagctgcttccaccgcagaggttgaggcggcaaaggagtccgcggcgcgcaccatatccagactgaacgagatcttgcaggccttggaagagcagaagcaggcactggcagccgccaccgagcgggcgggcagggcgagcgaaggcaagctggccatggagcaggagctgaggcaacggagagaggaggagaacgggaagcgccgccgcatggccagtgaagctccaaagcctgtaaccgggcctcggagcgctgcagagatcgcgggtagagtcgacatgacgttgacgtgcacgggcaaaggagatagtagctgtcccgccgcgtcggtccatccggtgtcggacgcgtccgggaccgggaccgggaggagcagccccagcgatgcggccctgccagtgccagtgccagcgaagacgaagaaggcaaagaagctgccgttcttcactcgcgtcgtcatgttcctggggggcaggaggaggaggaggctcagagctgccaggtgattttccgtttccttgtgttccttatctgtgtgcccgtgtcgcgtgtggtgtttgtcagtgctgggagcgtgtaaacttcactggtttttactcgattgcacgttgttcgtgctggatgtgttcgaagattgtgtgagattgcatggggtgttcggtttgctggacaagacaagatggttctgtaacacggttggcttgggtttttttt

SEQ ID NO: 690 - DNA, 3573 bp, Zea Mays
tagggataagaccacgcttctctccgtctccatggcatggccatccaccgcagcaatctctctagacgcttcaagatctcaaggatctggcatcaatcggagcaatatcgcgccaaatccttcgcctcctcatctccaacgagcgagactacacccctcaaggtcctaaccgggctcctgcgcgacgcctattcgctgaaatgcctcagggagttgcacgcgcatctcgccgtcgcgggtgcgatccaggacacattcgtcgtcacaggtcttgtcgaaaggaaaacattccattactgttcaaccccataatatgttggagtcgttaactgcactaaagtgaactatttctatctatgcgcaacaaggagtgttgcatctaatatctactacaatttccaaggaagaggcagttgaatgtttctagcagacacctgcaattctgaaatgtcattactgtctagttgtcagttagtatcaaatttgttgagctgtggcttgagaagatgccagacaagaagatcgaaggggctgattcatctcacattgtctcttcaacaaaatctttggaaagttcagtagggcctaatctaattgaaagtactgatggagattattgtaataaccttcacaagacagcagttgccaattttgtggcatcaatgctgcaagaacatcctatgagccttatattggctgagaacaaaagcaatttgcaagaaatttcagttgaacagaagattcctatctttgtttctatcaacctttcaccaaaagtggatggcagtgaattgccatgccccattgaagttcatgatggtattacatcttcctctagcaaaactaacgaaccaatggaagcccaagattattcgaacacaatgaaatcaaacacagctagttgcatgttcgaggcatcaaagcggcaagaatgccctataagcctcatattggcagacaagaaaggcagtttgcaagaagtttcagttgaacaaaatgttccttgtggtgattatgttgccctttcacaaaaagcagacggtagtgaattgacatcaacccgtgaagctcctgaaggctttctaacttcctctagcaaagtttatgtattaaaggaagcccaagatggttctatcacaacggaagcttctaaagtaaatgtttgtgcagcttcacactccatgcttaggttaattgaaggagtccaggatgaggcttcttgtattgattctgataaggttacttgtgaaacaccacctgccatcctgaaaaagttgaaagaagataagccactggtcgtccatagatttcataagcaccaaatgagcctaggagacacacatcaaaaggtgcctgcacctgtgagcagatcaaacaccagcaaatacttaagaatggataaaaacattgttgatactacgactcccattgaatcagtaaaggctgttgcatcaaaatttggtggcagcatgaactggaaaactcgcaagacacagacagcacaggtgagtgaccgtatcgtacttgagcttgataagctgaagaacgaaatttcagaatgtaaacatcaagcagaagctgcagaggctgcaaagttatcagtattaaaagagctggagagaacaaagaagcttatcgacgaaatgaaacacgtcctggagagggaacaagctgaggaggtggatgccaaggatgacttggagttatttcaaattatattacaagcgatggagggagttgactgtaatgatagtgttgtggttagagagaagctgaataatattcaagaacgacacaaagcattggatgccaaagtgatttcagtgaaatatgtgttgggaaaagtgcaggaggattatgattctttgttgatcggaactgatatttccattaacaaagctcaggcagccttcacaatgtccaaaggtgcagagaaagaagtagaggagctcaccatagagctccaaagactaaaggaagtgtttgatttggctaacgccaaattccaggacgtggaagaacgcaagaacacgttgatggcacgtgatgaggatcgtcttgcatgggaagaggatctcaggcaatcagacaaagagctgaatcagatcagcatggacctttgttcttttcaagaattgcaatcaaagcatgatacgtcagccaccatgttgctcaatctgaagaatgaggtagccaattatttggaggcaaagcgaatcgaggaagcacgagaacaagaaagtggaactcataaacccgtgcaagaagtcatcattatgttaaagagcgagctcgtggagcagaggaagagcatagcgagggtgacggatgaattatgtgttctgaaagccacagctgaattgctaaaatcgcaattgaagaaagagaaagcagcacttgctgccgctcagcagatggaagtgatggcatccatgtccactcagtctctcaagatggacatcaaactgtcacagcaggaacttgaagcacttcatgccaaggcaaaggagtgccgagatagatcgggcaaggctctgcaagatgcgtcccatgaagctgacgaggcgaaggttattgctaccaaggctcagggggagctaaaaaagacagaggaagaagtggcgcaagcgaaggctgctctgagcactgtggaatccaagctcgaagcagttctgagggacatacaggcagcgaaagcgtccgagaggctggcgctcgatactctgacgacgacgacactggaggagcacagcaaggtcggcgctcgatactctgagacggtcacgcttgacctggatgagtacacgtctctggttcagaggtcacgtcaggcagaagaggctgcgcacgagaagacaacagctgcttccaccgcagaggttgaggcggcaaaggagtccgcggcgcgcaccatatccagactgaacgagatcttgcaggccttggaagagcagaagcaggcactggcagccgccaccgagcgggcgggcagggcgagcgaaggcaagctggccatggagcaggagctgaggcaacggagagaggaggagaacgggaagcgccgccgcatggccagtgaagctccaaagcctgtaaccgggcctcggagcgctgcagagatcgcgggtagagtcgacatgacgttgacgtgcacgggcaaaggagatagtagctgtcccgccgcgtcggtccatccggtgtcggacgcgtccgggaccgggaccgggaggagcagccccagcgatgcggccctgccagtgccagtgccagcgaagacgaagaaggcaaagaagctgccgttcttcactcgcgtcgtcatgttcctggggggcaggaggaggaggaggctcagagctgccaggtgattttccgtttccttgtgttccttatctgtgtgcccgtgtcgcgtgtggtgtttgtcagtgctgggagcgtgtaaacttcactggtttttactcgattgcacgttgttcgtgctggatgtgttcgaagattgtgtgagattgcatggggtgttcggtttgctggacaagacaagatggttctgtaacacggttggcttgggtttttttt

SEQ ID NO: 691 - DNA, 947 bp, Zea Mays
gtcatactatgctgctagcaaatatccacataccttgtcattctatctgcacggtgtggtgctatctgttggcaaatacaacttatcagtaaaaaccaatggttcaaatcgatcaggagttcatggcacgttcttcattgtgatcagaagaaacatatcgcgagcacacaaacacgtctgcagataactgaaaccgcgaaatgtactatgtgcatttgtttgagcccaaaaggaaaaaggaggcaggcaaaaggaaacagataccacctctgcgtacttgacctcagggacattggcaagccggcgggacctcctgggaggcgagggaaccacgaccgcgtcctcgatgatcctgcgcctcttcggtttctgctccgccgcaaagcaaagcaaagcaatgcaaaacaaagggtcagtcacacagacaaacggtcgcgcgtcatagcaggtggagggagacaaacgatcgaaggaggcagcagcggacgtggcatcgcaccatgggggaaggggtcttgggggcctccttgatgacggcggagaggtggcgcaggttgagggcttccatctttcgcttgttctcctgcaggttccgctcccgcgccgcctcgtacggcgacatcccctgcgtctccgcgactgccgcctccatctctcccgcgacgccgcactcgaccgcttcaacggagtgggtgggggggtcaggtgtgccgtacgcgggaggcgagagaggtgggctagagggcggcgggcagggcagtcgcggcctcgcgggttggggagggagggtttaaggggcgggtgtggtgtgggtcttgaaggctggcagggcagtgcagttgggcttgggcagggcagagaagggaggaaatcgaccgttggagacgaaacatgggatgaaacggtacattctgacgcacaaaggcgtggccgcatgggggaaacac

SEQ ID NO: 692 - DNA, 342 bp, Zea Mays
ccccactctgctgagcgcccgcggccggcgccctcacgcccacgcggctgggcttggcgcccgtggccgtggccgtggccgccacttccaagctcatagcttggctcgagcaaagaggtgagtgatacgccctgcgcaagtgcgtggtaggcagcacgatggcgctgcactgctccctgcacgcgacctgttcgacgttgtggctgtgagcagtggcgcggcctgatccctgctttccgaggtcccgtgcgtgcctcgcaggcctagctctttccggcccgcaccaccggaggctcgtgcacaccgactgcacgcgggcgggaacgagcgactctaaggccg

SEQ ID NO: 693 - DNA, 4568 bp, Zea Mays
cgcaccggaaaaccgcctcgctatagtctttcttccccttcttccccggcgaatattccccgcgccgcttgccctcgctagccttcctctccacggcaacagccccctccccgcatcgccggaataactcaaataatcacatcctaccgaagaggagaagccacccgcgacgtttcccggcgccggcaatgctacgacgcgtcctcctcctccgccatttccagcaccaccgccatcggctccgcctgctctccacaacccccaccccacacgcctccccctccacctcggcctcctccctcccgatcgccgccacgcccgcggcgccgcaccacctcgcgccccatcgcgggggcgcgcgccgcctcgccccgctcctcgccttctcctctctctccctcgccgctgcgggcgcggtttacctcactaccgacaacctcgaggatacgctgcagcggtccagggactctgcgggccgcgtcgtggagcggatgcagcacacgtggacggcagcgcgggtgctctggaagtcgctcctgtccgtgctctcgtccgccaaccatgaggtgcggtccgggttcgagctgcgggtcgccgcgctgctcgccgacatcgcggccgccagcgccgctcgccgcacggccatcgtttctgcgggcggcggcgccgtcctcgactggctgctcgagagcgtcgtgcggggggccacgcaggccgaggctgccagggcgctcgcgcacctgctggccgacccctgggtcgcgcccgccgttctcggccgcccgcacgctgtgccatgccttctccacttcatcttctcattccagcccacgcgcggcaagaagaaatcttcatttgatggtttagatcattctaaagggaggagcatgcttgtggctgcacttatggatataatcacttctaactgcgataatgcagactattcgtcctttaagcctttgttgcctgctgatgctgatacaagagatattgcaacagcaattgaagttattgagcaaggggggatgcattttgatgaccatgaggataatagcagtaatgatggtgactctggattaaaggggatagggattaaggtgcttggtggaaccacggtattggggttctctagaggaaataactcattggagttggataactcagactatgatactatggatgtatcatatgatagtagtagatccgtggtggaacagagtactgccgagtctccactacttaggaaattaagctcctctgctgttccagggctttgggatgacttacagagggaacatgtagctgtaccttttgctacatgggctcttgcaaactgggctatagcatcagatctgaatcgcactcttgttcaagaacttgatagtgatggacatgcagttgcaactgcgttgaaagcagccgaaagaactgttaaatggcatggaactctggtggctcgagctcttttagaagaccagaatttggccttggctccatcagttcctgattggtgctctagtcttctttctacagcttctcaggctactgcaaatgatgacatgccattgggtcaactgtcattatcaacattcctattatctatgatgcgatgtaatgagtcaaaatttgtaataaggcagaagggccttcatcctcttcgtagtattgcaaaaaagatagaaaatcagaatggccagaacagtatgaaagaatcaatagcaagtgctctaagtttgctttatgctggtgaagttcctttatcacttgaggaatctcaaagatggtctggcattcttcttagatggctttttgataaatctgtatcaaataaaacacatcttacagccatgaaaatcctttcatgcatacttgaagattatggtccagcttctgtgccaatttctcagggatggttagctcttgtcctttctgagattcttggggacaacaaggcccaaggttcaaaaggaacgacacagcctgaaccagagaaagtgaagaatccggttgattaccataatgcttcaactgcaactcaggtcctgaatcaattaggtagtgctgttgttaaattagcaagcacccaatcgaactgtgagcctgggtctgatgacaaagataaaggaccactttctgattttctatctcttgagccatttgctacagttctaaagaatatgaacaaaaagaatctgcccaaatttgatgccgctgactcagcatcagcaacgctcaagggaataaaagctctagctgagctttgttctgaggatggtgcatgccaaaagagaatagctgatttaggagctcttcccttgttgaggcacatcctcttgggtgatgattatgagaaacttgctgcaattgaagcatatgatgcatctcgtactcgagaagtgcaagacaagaacgtggctcctaatgtttcgtctactgatgctaccactgatccctcaagtgtacgggttcctcctgcagcacatatccgaaggcatgctgggaggctgcttaccattctctctcttctacctaattcaaagaaggaaattatttctgatgctgtatggtgcaaatggctcgaggattgtgctagtgggcgaattccctgcaatgatataaaactaaaaagttactgcaggttaacattattgaatatattatgttctgagagtccaaatacaagaaaagcctctgatgaatatcctgactcagaaagtgagtataaaagaaactgtccccagtttggagatgcacttttcttgctaaatccagagttacctcttgaagttcatgtggacaacagtggttttgggattttaagagtttcaagagataattgtaaggaagatggaggtattggaggctctggctctgaaactgtgaactctgtagatgatgctgaagctgcatccaaaagtgtccctttgatggatgttgtgtttgttcatggccttcgtggcggcccattcaactcatggcgaattgctgatgacaaatcatcaactaccaaagctggtttagtggaaagcattgacgaggatgctgggaaagagggtacatgctggccaagagaatggcttgcggcagattttcctcaagcacgtttttttacagtaaaatacaagacaaatttgacccaatggactggagccagcttgcctcttcaggaggtgagctctatgctgctgaggaagttggtggctgctgggattggtagtcggcctgtcattttcgtgacacatagcatgggaggactggtggttaaacagcttttatatcaagcaaagctgaataactatgacaagttcctgaataatactattgggctagttttctatagttgtccgcattttggcagtaaacttgcagacatgccatggcgtatgggtttagtgtttcgtcctgctccttcggtatggtcttccattgttatggtcgctagatcggtgagggattggagagagatatcgatggacagaaacgccggtcgggggcctgtgcccacggccgagcaagaggagggtttctcccttctaattcttgcatgctttatttctcatccattgattacataaatatgccggttggccgtccctatctagctagagatccttatctcctaaaaactctcaacaaactactaactgataaccttcctagataatctcaactaatctcctaaataatctcaactaatcttctaatcttatctctaactatccttatctaatcccccttgagggcccatggctgctgctatcgcagcccctccgtgggcctccttacgccctaacatccattccccatctgataagtttccttacaaattgatagttttcatcttctctatatgttctgacatttaatttttgatagattggggagttaagaagtgggtctccaagactagttgaactgaacgattttgtgcgtcaacgacacaacaaaggatttcttgatgttcttagttttagtgagacccaggtcacaccgattgttgaaggatatggcggttgggcacttcgtatggagatagtgccaattgaatctgcatacccaggctttggggagcttgtcgttctaccgtccactgatcatataaattcatgtaagccagttaacaagaacgatccttcttatgcggaaaccttggcatttttggagaagaacttcaaattatgcctggaaagagcagagtcctaggtcttgtcaatggcgccgtggagttttcagcaatctgaaggcttcattttccatttaccgccagagacttttctcccgttaacgacgaatggtggttgatctgaccaaatgatctgggcgtgctgtggtttatgaagctcgcaccgaactttgtagtaacattgcacatagcggttaggctgtaaatagctgtcttttaccttttagttgacatgagttgcccccatgtaagatcaagctatataccccaatgcctgtatcatctcaacagttttcagcaacagattttttacaaaacaatctcataatatataagccattttcataaaattactttctatgtgctttctccgttcttgaataag

SEQ ID NO: 694 - DNA, 3926 bp, Zea Mays
aaccgcctcgctatagtctttcttccccttcttccccggcgaatattccccgcgccgcttgccctcgctagccttcctctccacggcaacagccccctccccgcatcgccggaataactcaaataatcacatcctaccgaagaggagaagccacccgcgacgtttcccggcgccggcaatgctacgacgcgtcctcctcctccgccatttccagcaccaccgccatcggctccgcctgctctccacaacccccaccccacacgcctccccctccacctcggcctcctccctcccgatcgccgccacgcccgcggcgccgcaccacctcgcgccccatcgcgggggcgcgcgccgcctcgccccgctcctcgccttctcctctctctccctcgccgctgcgggcgcggtttacctcactaccgacaacctcgaggatacgctgcagcggtccagggactctgcgggccgcgtcgtggagcggatgcagcacacgtggacggcagcgcgggtgctctggaagtcgctcctgtccgtgctctcgtccgccaaccatgaggtgcggtccgggttcgagctgcgggtcgccgcgctgctcgccgacatcgcggccgccagcgccgctcgccgcacggccatcgtttctgcgggcggcggcgccgtcctcgactggctgctcgagagcgtcgtgcggggggccacgcaggccgaggctgccagggcgctcgcgcacctgctggccgacccctgggtcgcgcccgccgttctcggccgcccgcacgctgtgccatgccttctccacttcatcttctcattccagcccacgcgcggcaagaagaaatcttcatttgatggtttagatcattctaaagggaggagcatgcttgtggctgcacttatggatataatcacttctaactgcgataatgcagactattcgtcctttaagcctttgttgcctgctgatgctgatacaagagatattgcaacagcaattgaagttattgagcaaggggggatgcattttgatgaccatgaggataatagcagtaatgatggtgactctggattaaaggggatagggattaaggtgcttggtggaaccacggtattggggttctctagaggaaataactcattggagttggataactcagactatgatactatggatgtatcatatgatagtagtagatccgtggtggaacagagtactgccgagtctccactacttaggaaattaagctcctctgctgttccagggctttgggatgacttacagagggaacatgtagctgtaccttttgctacatgggctcttgcaaactgggctatagcatcagatctgaatcgcactcttgttcaagaacttgatagtgatggacatgcagttgcaactgcgttgaaagcagccgaaagaactgttaaatggcatggaactctggtggctcgagctcttttagaagaccagaatttggccttggctccatcagttcctgattggtgctctagtcttctttctacagcttctcaggctactgcaaatgatgacatgccattgggtcaactgtcattatcaacattcctattatctatgatgcgatgtaatgagtcaaaatttgtaataaggcagaagggccttcatcctcttcgtagtattgcaaaaaagatagaaaatcagaatggccagaacagtatgaaagaatcaatagcaagtgctctaagtttgctttatgctggtgaagttcctttatcacttgaggaatctcaaagatggtctggcattcttcttagatggctttttgataaatctgtatcaaataaaacacatcttacagccatgaaaatcctttcatgcatacttgaagattatggtccagcttctgtgccaatttctcagggatggttagctcttgtcctttctgagattcttggggacaacaaggcccaaggttcaaaaggaacgacacagcctgaaccagagaaagtgaagaatccggttgattaccataatgcttcaactgcaactcaggtcctgaatcaattaggtagtgctgttgttaaattagcaagcacccaatcgaactgtgagcctgggtctgatgacaaagataaaggaccactttctgattttctatctcttgagccatttgctacagttctaaagaatatgaacaaaaagaatctgcccaaatttgatgccgctgactcagcatcagcaacgctcaagggaataaaagctctagctgagctttgttctgaggatggtgcatgccaaaagagaatagctgatttaggagctcttcccttgttgaggcacatcctcttgggtgatgattatgagaaacttgctgcaattgaagcatatgatgcatctcgtactcgagaagtgcaagacaagaacgtggctcctaatgtttcgtctactgatgctaccactgatccctcaagtgtacgggttcctcctgcagcacatatccgaaggcatgctgggaggctgcttaccattctctctcttctacctaattcaaagaaggaaattatttctgatgctgtatggtgcaaatggctcgaggattgtgctagtgggcgaattccctgcaatgatataaaactaaaaagttactgcaggttaacattattgaatatattatgttctgagagtccaaatacaagaaaagcctctgatgaatatcctgactcagaaagtgagtataaaagaaactgtccccagtttggagatgcacttttcttgctaaatccagagttacctcttgaagttcatgtggacaacagtggttttgggattttaagagtttcaagagataattgtaaggaagatggaggtattggaggctctggctctgaaactgtgaactctgtagatgatgctgaagctgcatccaaaagtgtccctttgatggatgttgtgtttgttcatggccttcgtggcggcccattcaactcatggcgaattgctgatgacaaatcatcaactaccaaagctggtttagtggaaagcattgacgaggatgctgggaaagagggtacatgctggccaagagaatggcttgcggcagattttcctcaagcacgtttttttacagtaaaatacaagacaaatttgacccaatggactggagccagcttgcctcttcaggaggtgagctctatgctgctgaggaagttggtggctgctgggattggtagtcggcctgtcattttcgtgacacatagattggggagttaagaagtgggtctccaagactagttgaactgaacgattttgtgcgtcaacgacacaacaaaggatttcttgatgttcttagttttagtgagacccaggtcacaccgattgttgaaggatatggcggttgggcacttcgtatggagatagtgccaattgaatctgcatacccaggctttggggagcttgtcgttctaccgtccactgatcatataaattcatgtaagccagttaacaagaacgatccttcttatgcggaaaccttggcatttttggagaagaacttcaaattatgcctggaaagagcagagtcctaggtcttgtcaatggcgccgtggagttttcagcaatctgaaggcttcattttccatttaccgccagagacttttctcccgttaacgacgaatggtggttgatctgaccaaatgatctgggcgtgctgtggtttatgaagctcgcaccgaactttgtagtaacattgcacatagcggttaggctgtaaatagctgtcttttaccttttagttgacatgagttgcccccatgtaagatcaagctatataccccaatgcctgtatcatctcaacagttttcagcaacagattttttacaaaacaatctcataatatataagccattttcataaaattactttctatgtgctttctccgttcttgaataag

SEQ ID NO: 695 - DNA, 4011 bp, Zea Mays
aaccgcctcgctatagtctttcttccccttcttccccggcgaatattccccgcgccgcttgccctcgctagccttcctctccacggcaacagccccctccccgcatcgccggaataactcaaataatcacatcctaccgaagaggagaagccacccgcgacgtttcccggcgccggcaatgctacgacgcgtcctcctcctccgccatttccagcaccaccgccatcggctccgcctgctctccacaacccccaccccacacgcctccccctccacctcggcctcctccctcccgatcgccgccacgcccgcggcgccgcaccacctcgcgccccatcgcgggggcgcgcgccgcctcgccccgctcctcgccttctcctctctctccctcgccgctgcgggcgcggtttacctcactaccgacaacctcgaggatacgctgcagcggtccagggactctgcgggccgcgtcgtggagcggatgcagcacacgtggacggcagcgcgggtgctctggaagtcgctcctgtccgtgctctcgtccgccaaccatgaggtgcggtccgggttcgagctgcgggtcgccgcgctgctcgccgacatcgcggccgccagcgccgctcgccgcacggccatcgtttctgcgggcggcggcgccgtcctcgactggctgctcgagagcgtcgtgcggggggccacgcaggccgaggctgccagggcgctcgcgcacctgctggccgacccctgggtcgcgcccgccgttctcggccgcccgcacgctgtgccatgccttctccacttcatcttctcattccagcccacgcgcggcaagaagaaatcttcatttgatggtttagatcattctaaagggaggagcatgcttgtggctgcacttatggatataatcacttctaactgcgataatgcagactattcgtcctttaagcctttgttgcctgctgatgctgatacaagagatattgcaacagcaattgaagttattgagcaaggggggatgcattttgatgaccatgaggataatagcagtaatgatggtgactctggattaaaggggatagggattaaggtgcttggtggaaccacggtattggggttctctagaggaaataactcattggagttggataactcagactatgatactatggatgtatcatatgatagtagtagatccgtggtggaacagagtactgccgagtctccactacttaggaaattaagctcctctgctgttccagggctttgggatgacttacagagggaacatgtagctgtaccttttgctacatgggctcttgcaaactgggctatagcatcagatctgaatcgcactcttgttcaagaacttgatagtgatggacatgcagttgcaactgcgttgaaagcagccgaaagaactgttaaatggcatggaactctggtggctcgagctcttttagaagaccagaatttggccttggctccatcagttcctgattggtgctctagtcttctttctacagcttctcaggctactgcaaatgatgacatgccattgggtcaactgtcattatcaacattcctattatctatgatgcgatgtaatgagtcaaaatttgtaataaggcagaagggccttcatcctcttcgtagtattgcaaaaaagatagaaaatcagaatggccagaacagtatgaaagaatcaatagcaagtgctctaagtttgctttatgctggtgaagttcctttatcacttgaggaatctcaaagatggtctggcattcttcttagatggctttttgataaatctgtatcaaataaaacacatcttacagccatgaaaatcctttcatgcatacttgaagattatggtccagcttctgtgccaatttctcagggatggttagctcttgtcctttctgagattcttggggacaacaaggcccaaggttcaaaaggaacgacacagcctgaaccagagaaagtgaagaatccggttgattaccataatgcttcaactgcaactcaggtcctgaatcaattaggtagtgctgttgttaaattagcaagcacccaatcgaactgtgagcctgggtctgatgacaaagataaaggaccactttctgattttctatctcttgagccatttgctacagttctaaagaatatgaacaaaaagaatctgcccaaatttgatgccgctgactcagcatcagcaacgctcaagggaataaaagctctagctgagctttgttctgaggatggtgcatgccaaaagagaatagctgatttaggagctcttcccttgttgaggcacatcctcttgggtgatgattatgagaaacttgctgcaattgaagcatatgatgcatctcgtactcgagaagtgcaagacaagaacgtggctcctaatgtttcgtctactgatgctaccactgatccctcaagtgtacgggttcctcctgcagcacatatccgaaggcatgctgggaggctgcttaccattctctctcttctacctaattcaaagaaggaaattatttctgatgctgtatggtgcaaatggctcgaggattgtgctagtgggcgaattccctgcaatgatataaaactaaaaagttactgcaggttaacattattgaatatattatgttctgagagtccaaatacaagaaaagcctctgatgaatatcctgactcagaaagtgagtataaaagaaactgtccccagtttggagatgcacttttcttgctaaatccagagttacctcttgaagttcatgtggacaacagtggttttgggattttaagagtttcaagagataattgtaaggaagatggaggtattggaggctctggctctgaaactgtgaactctgtagatgatgctgaagctgcatccaaaagtgtccctttgatggatgttgtgtttgttcatggccttcgtggcggcccattcaactcatggcgaattgctgatgacaaatcatcaactaccaaagctggtttagtggaaagcattgacgaggatgctgggaaagagggtacatgctggccaagagaatggcttgcggcagattttcctcaagcacgtttttttacagtaaaatacaagacaaatttgacccaatggactggagccagcttgcctcttcaggaggtgagctctatgctgctgaggaagttggtggctgctgggattggtagtcggcctgtcattttcgtgacacatagcatgggaggactggtggttaaacagcttttatatcaagcaaagctgaataactatgacaagttcctgaataatactattgggctaattggggagttaagaagtgggtctccaagactagttgaactgaacgattttgtgcgtcaacgacacaacaaaggatttcttgatgttcttagttttagtgagacccaggtcacaccgattgttgaaggatatggcggttgggcacttcgtatggagatagtgccaattgaatctgcatacccaggctttggggagcttgtcgttctaccgtccactgatcatataaattcatgtaagccagttaacaagaacgatccttcttatgcggaaaccttggcatttttggagaagaacttcaaattatgcctggaaagagcagagtcctaggtcttgtcaatggcgccgtggagttttcagcaatctgaaggcttcattttccatttaccgccagagacttttctcccgttaacgacgaatggtggttgatctgaccaaatgatctgggcgtgctgtggtttatgaagctcgcaccgaactttgtagtaacattgcacatagcggttaggctgtaaatagctgtcttttaccttttagttgacatgagttgcccccatgtaagatcaagctatataccccaatgcctgtatcatctcaacagttttcagcaacagattttttacaaaacaatctcataatatataagccattttcataaaattactttctatgtgctttctccgttcttgaataag

SEQ ID NO: 696 - DNA, 4473 bp, Zea Mays
aaccgcctcgctatagtctttcttccccttcttccccggcgaatattccccgcgccgcttgccctcgctagccttcctctccacggcaacagccccctccccgcatcgccggaataactcaaataatcacatcctaccgaagaggagaagccacccgcgacgtttcccggcgccggcaatgctacgacgcgtcctcctcctccgccatttccagcaccaccgccatcggctccgcctgctctccacaacccccaccccacacgcctccccctccacctcggcctcctccctcccgatcgccgccacgcccgcggcgccgcaccacctcgcgccccatcgcgggggcgcgcgccgcctcgccccgctcctcgccttctcctctctctccctcgccgctgcgggcgcggtttacctcactaccgacaacctcgaggatacgctgcagcggtccagggactctgcgggccgcgtcgtggagcggatgcagcacacgtggacggcagcgcgggtgctctggaagtcgctcctgtccgtgctctcgtccgccaaccatgaggtgcggtccgggttcgagctgcgggtcgccgcgctgctcgccgacatcgcggccgccagcgccgctcgccgcacggccatcgtttctgcgggcggcggcgccgtcctcgactggctgctcgagagcgtcgtgcggggggccacgcaggccgaggctgccagggcgctcgcgcacctgctggccgacccctgggtcgcgcccgccgttctcggccgcccgcacgctgtgccatgccttctccacttcatcttctcattccagcccacgcgcggcaagaagaaatcttcatttgatggtttagatcattctaaagggaggagcatgcttgtggctgcacttatggatataatcacttctaactgcgataatgcagactattcgtcctttaagcctttgttgcctgctgatgctgatacaagagatattgcaacagcaattgaagttattgagcaaggggggatgcattttgatgaccatgaggataatagcagtaatgatggtgactctggattaaaggggatagggattaaggtgcttggtggaaccacggtattggggttctctagaggaaataactcattggagttggataactcagactatgatactatggatgtatcatatgatagtagtagatccgtggtggaacagagtactgccgagtctccactacttaggaaattaagctcctctgctgttccagggctttgggatgacttacagagggaacatgtagctgtaccttttgctacatgggctcttgcaaactgggctatagcatcagatctgaatcgcactcttgttcaagaacttgatagtgatggacatgcagttgcaactgcgttgaaagcagccgaaagaactgttaaatggcatggaactctggtggctcgagctcttttagaagaccagaatttggccttggctccatcagttcctgattggtgctctagtcttctttctacagcttctcaggctactgcaaatgatgacatgccattgggtcaactgtcattatcaacattcctattatctatgatgcgatgtaatgagtcaaaatttgtaataaggcagaagggccttcatcctcttcgtagtattgcaaaaaagatagaaaatcagaatggccagaacagtatgaaagaatcaatagcaagtgctctaagtttgctttatgctggtgaagttcctttatcacttgaggaatctcaaagatggtctggcattcttcttagatggctttttgataaatctgtatcaaataaaacacatcttacagccatgaaaatcctttcatgcatacttgaagattatggtccagcttctgtgccaatttctcagggatggttagctcttgtcctttctgagattcttggggacaacaaggcccaaggttcaaaaggaacgacacagcctgaaccagagaaagtgaagaatccggttgattaccataatgcttcaactgcaactcaggtcctgaatcaattaggtagtgctgttgttaaattagcaagcacccaatcgaactgtgagcctgggtctgatgacaaagataaaggaccactttctgattttctatctcttgagccatttgctacagttctaaagaatatgaacaaaaagaatctgcccaaatttgatgccgctgactcagcatcagcaacgctcaagggaataaaagctctagctgagctttgttctgaggatggtgcatgccaaaagagaatagctgatttaggagctcttcccttgttgaggcacatcctcttgggtgatgattatgagaaacttgctgcaattgaagcatatgatgcatctcgtactcgagaagtgcaagacaagaacgtggctcctaatgtttcgtctactgatgctaccactgatccctcaagtgtacgggttcctcctgcagcacatatccgaaggcatgctgggaggctgcttaccattctctctcttctacctaattcaaagaaggaaattatttctgatgctgtatggtgcaaatggctcgaggattgtgctagtgggcgaattccctgcaatgatataaaactaaaaagttactgcaggttaacattattgaatatattatgttctgagagtccaaatacaagaaaagcctctgatgaatatcctgactcagaaagtgagtataaaagaaactgtccccagtttggagatgcacttttcttgctaaatccagagttacctcttgaagttcatgtggacaacagtggttttgggattttaagagtttcaagagataattgtaaggaagatggaggtattggaggctctggctctgaaactgtgaactctgtagatgatgctgaagctgcatccaaaagtgtccctttgatggatgttgtgtttgttcatggccttcgtggcggcccattcaactcatggcgaattgctgatgacaaatcatcaactaccaaagctggtttagtggaaagcattgacgaggatgctgggaaagagggtacatgctggccaagagaatggcttgcggcagattttcctcaagcacgtttttttacagtaaaatacaagacaaatttgacccaatggactggagccagcttgcctcttcaggaggtgagctctatgctgctgaggaagttggtggctgctgggattggtagtcggcctgtcattttcgtgacacataggttttctatagttgtccgcattttggcagtaaacttgcagacatgccatggcgtatgggtttagtgtttcgtcctgctccttcggtatggtcttccattgttatggtcgctagatcggtgagggattggagagagatatcgatggacagaaacgccggtcgggggcctgtgcccacggccgagcaagaggagggtttctcccttctaattcttgcatgctttatttctcatccattgattacataaatatgccggttggccgtccctatctagctagagatccttatctcctaaaaactctcaacaaactactaactgataaccttcctagataatctcaactaatctcctaaataatctcaactaatcttctaatcttatctctaactatccttatctaatcccccttgagggcccatggctgctgctatcgcagcccctccgtgggcctccttacgccctaacatccattccccatctgataagtttccttacaaattgatagttttcatcttctctatatgttctgacatttaatttttgatagattggggagttaagaagtgggtctccaagactagttgaactgaacgattttgtgcgtcaacgacacaacaaaggatttcttgatgttcttagttttagtgagacccaggtcacaccgattgttgaaggatatggcggttgggcacttcgtatggagatagtgccaattgaatctgcatacccaggctttggggagcttgtcgttctaccgtccactgatcatataaattcatgtaagccagttaacaagaacgatccttcttatgcggaaaccttggcatttttggagaagaacttcaaattatgcctggaaagagcagagtcctaggtcttgtcaatggcgccgtggagttttcagcaatctgaaggcttcattttccatttaccgccagagacttttctcccgttaacgacgaatggtggttgatctgaccaaatgatctgggcgtgctgtggtttatgaagctcgcaccgaactttgtagtaacattgcacatagcggttaggctgtaaatagctgtcttttaccttttagttgacatgagttgcccccatgtaagatcaagctatataccccaatgcctgtatcatctcaacagttttcagcaacagattttttacaaaacaatctcataatatataagccattttcataaaattactttctatgtgctttctccgttcttgaataag

SEQ ID NO: 697 - DNA, 4010 bp, Zea Mays
aaccgcctcgctatagtctttcttccccttcttccccggcgaatattccccgcgccgcttgccctcgctagccttcctctccacggcaacagccccctccccgcatcgccggaataactcaaataatcacatcctaccgaagaggagaagccacccgcgacgtttcccggcgccggcaatgctacgacgcgtcctcctcctccgccatttccagcaccaccgccatcggctccgcctgctctccacaacccccaccccacacgcctccccctccacctcggcctcctccctcccgatcgccgccacgcccgcggcgccgcaccacctcgcgccccatcgcgggggcgcgcgccgcctcgccccgctcctcgccttctcctctctctccctcgccgctgcgggcgcggtttacctcactaccgacaacctcgaggatacgctgcagcggtccagggactctgcgggccgcgtcgtggagcggatgcagcacacgtggacggcagcgcgggtgctctggaagtcgctcctgtccgtgctctcgtccgccaaccatgaggtgcggtccgggttcgagctgcgggtcgccgcgctgctcgccgacatcgcggccgccagcgccgctcgccgcacggccatcgtttctgcgggcggcggcgccgtcctcgactggctgctcgagagcgtcgtgcggggggccacgcaggccgaggctgccagggcgctcgcgcacctgctggccgacccctgggtcgcgcccgccgttctcggccgcccgcacgctgtgccatgccttctccacttcatcttctcattccagcccacgcgcggcaagaagaaatcttcatttgatggtttagatcattctaaagggaggagcatgcttgtggctgcacttatggatataatcacttctaactgcgataatgcagactattcgtcctttaagcctttgttgcctgctgatgctgatacaagagatattgcaacagcaattgaagttattgagcaaggggggatgcattttgatgaccatgaggataatagcagtaatgatggtgactctggattaaaggggatagggattaaggtgcttggtggaaccacggtattggggttctctagaggaaataactcattggagttggataactcagactatgatactatggatgtatcatatgatagtagtagatccgtggtggaacagagtactgccgagtctccactacttaggaaattaagctcctctgctgttccagggctttgggatgacttacagagggaacatgtagctgtaccttttgctacatgggctcttgcaaactgggctatagcatcagatctgaatcgcactcttgttcaagaacttgatagtgatggacatgcagttgcaactgcgttgaaagcagccgaaagaactgttaaatggcatggaactctggtggctcgagctcttttagaagaccagaatttggccttggctccatcagttcctgattggtgctctagtcttctttctacagcttctcaggctactgcaaatgatgacatgccattgggtcaactgtcattatcaacattcctattatctatgatgcgatgtaatgagtcaaaatttgtaataaggcagaagggccttcatcctcttcgtagtattgcaaaaaagatagaaaatcagaatggccagaacagtatgaaagaatcaatagcaagtgctctaagtttgctttatgctggtgaagttcctttatcacttgaggaatctcaaagatggtctggcattcttcttagatggctttttgataaatctgtatcaaataaaacacatcttacagccatgaaaatcctttcatgcatacttgaagattatggtccagcttctgtgccaatttctcagggatggttagctcttgtcctttctgagattcttggggacaacaaggcccaaggttcaaaaggaacgacacagcctgaaccagagaaagtgaagaatccggttgattaccataatgcttcaactgcaactcaggtcctgaatcaattaggtagtgctgttgttaaattagcaagcacccaatcgaactgtgagcctgggtctgatgacaaagataaaggaccactttctgattttctatctcttgagccatttgctacagttctaaagaatatgaacaaaaagaatctgcccaaatttgatgccgctgactcagcatcagcaacgctcaagggaataaaagctctagctgagctttgttctgaggatggtgcatgccaaaagagaatagctgatttaggagctcttcccttgttgaggcacatcctcttgggtgatgattatgagaaacttgctgcaattgaagcatatgatgcatctcgtactcgagaagtgcaagacaagaacgtggctcctaatgtttcgtctactgatgctaccactgatccctcaagtgtacgggttcctcctgcagcacatatccgaaggcatgctgggaggctgcttaccattctctctcttctacctaattcaaagaaggaaattatttctgatgctgtatggtgcaaatggctcgaggattgtgctagtgggcgaattccctgcaatgatataaaactaaaaagttactgcaggttaacattattgaatatattatgttctgagagtccaaatacaagaaaagcctctgatgaatatcctgactcagaaagtgagtataaaagaaactgtccccagtttggagatgcacttttcttgctaaatccagagttacctcttgaagttcatgtggacaacagtggttttgggattttaagagtttcaagagataattgtaaggaagatggaggtattggaggctctggctctgaaactgtgaactctgtagatgatgctgaagctgcatccaaaagtgtccctttgatggatgttgtgtttgttcatggccttcgtggcggcccattcaactcatggcgaattgctgatgacaaatcatcaactaccaaagctggtttagtggaaagcattgacgaggatgctgggaaagagggtacatgctggccaagagaatggcttgcggcagattttcctcaagcacgtttttttacagtaaaatacaagacaaatttgacccaatggactggagccagcttgcctcttcaggaggtgagctctatgctgctgaggaagttggtggctgctgggattggtagtcggcctgtcattttcgtgacacataggttttctatagttgtccgcattttggcagtaaacttgcagacatgccatggcgtatgggtttagtgtttcgtcctgctccttcgattggggagttaagaagtgggtctccaagactagttgaactgaacgattttgtgcgtcaacgacacaacaaaggatttcttgatgttcttagttttagtgagacccaggtcacaccgattgttgaaggatatggcggttgggcacttcgtatggagatagtgccaattgaatctgcatacccaggctttggggagcttgtcgttctaccgtccactgatcatataaattcatgtaagccagttaacaagaacgatccttcttatgcggaaaccttggcatttttggagaagaacttcaaattatgcctggaaagagcagagtcctaggtcttgtcaatggcgccgtggagttttcagcaatctgaaggcttcattttccatttaccgccagagacttttctcccgttaacgacgaatggtggttgatctgaccaaatgatctgggcgtgctgtggtttatgaagctcgcaccgaactttgtagtaacattgcacatagcggttaggctgtaaatagctgtcttttaccttttagttgacatgagttgcccccatgtaagatcaagctatataccccaatgcctgtatcatctcaacagttttcagcaacagattttttacaaaacaatctcataatatataagccattttcataaaattactttctatgtgctttctccgttcttgaataag

SEQ ID NO: 698 - DNA, 4089 bp, Zea Mays
aaccgcctcgctatagtctttcttccccttcttccccggcgaatattccccgcgccgcttgccctcgctagccttcctctccacggcaacagccccctccccgcatcgccggaataactcaaataatcacatcctaccgaagaggagaagccacccgcgacgtttcccggcgccggcaatgctacgacgcgtcctcctcctccgccatttccagcaccaccgccatcggctccgcctgctctccacaacccccaccccacacgcctccccctccacctcggcctcctccctcccgatcgccgccacgcccgcggcgccgcaccacctcgcgccccatcgcgggggcgcgcgccgcctcgccccgctcctcgccttctcctctctctccctcgccgctgcgggcgcggtttacctcactaccgacaacctcgaggatacgctgcagcggtccagggactctgcgggccgcgtcgtggagcggatgcagcacacgtggacggcagcgcgggtgctctggaagtcgctcctgtccgtgctctcgtccgccaaccatgaggtgcggtccgggttcgagctgcgggtcgccgcgctgctcgccgacatcgcggccgccagcgccgctcgccgcacggccatcgtttctgcgggcggcggcgccgtcctcgactggctgctcgagagcgtcgtgcggggggccacgcaggccgaggctgccagggcgctcgcgcacctgctggccgacccctgggtcgcgcccgccgttctcggccgcccgcacgctgtgccatgccttctccacttcatcttctcattccagcccacgcgcggcaagaagaaatcttcatttgatggtttagatcattctaaagggaggagcatgcttgtggctgcacttatggatataatcacttctaactgcgataatgcagactattcgtcctttaagcctttgttgcctgctgatgctgatacaagagatattgcaacagcaattgaagttattgagcaaggggggatgcattttgatgaccatgaggataatagcagtaatgatggtgactctggattaaaggggatagggattaaggtgcttggtggaaccacggtattggggttctctagaggaaataactcattggagttggataactcagactatgatactatggatgtatcatatgatagtagtagatccgtggtggaacagagtactgccgagtctccactacttaggaaattaagctcctctgctgttccagggctttgggatgacttacagagggaacatgtagctgtaccttttgctacatgggctcttgcaaactgggctatagcatcagatctgaatcgcactcttgttcaagaacttgatagtgatggacatgcagttgcaactgcgttgaaagcagccgaaagaactgttaaatggcatggaactctggtggctcgagctcttttagaagaccagaatttggccttggctccatcagttcctgattggtgctctagtcttctttctacagcttctcaggctactgcaaatgatgacatgccattgggtcaactgtcattatcaacattcctattatctatgatgcgatgtaatgagtcaaaatttgtaataaggcagaagggccttcatcctcttcgtagtattgcaaaaaagatagaaaatcagaatggccagaacagtatgaaagaatcaatagcaagtgctctaagtttgctttatgctggtgaagttcctttatcacttgaggaatctcaaagatggtctggcattcttcttagatggctttttgataaatctgtatcaaataaaacacatcttacagccatgaaaatcctttcatgcatacttgaagattatggtccagcttctgtgccaatttctcagggatggttagctcttgtcctttctgagattcttggggacaacaaggcccaaggttcaaaaggaacgacacagcctgaaccagagaaagtgaagaatccggttgattaccataatgcttcaactgcaactcaggtcctgaatcaattaggtagtgctgttgttaaattagcaagcacccaatcgaactgtgagcctgggtctgatgacaaagataaaggaccactttctgattttctatctcttgagccatttgctacagttctaaagaatatgaacaaaaagaatctgcccaaatttgatgccgctgactcagcatcagcaacgctcaagggaataaaagctctagctgagctttgttctgaggatggtgcatgccaaaagagaatagctgatttaggagctcttcccttgttgaggcacatcctcttgggtgatgattatgagaaacttgctgcaattgaagcatatgatgcatctcgtactcgagaagtgcaagacaagaacgtggctcctaatgtttcgtctactgatgctaccactgatccctcaagtgtacgggttcctcctgcagcacatatccgaaggcatgctgggaggctgcttaccattctctctcttctacctaattcaaagaaggaaattatttctgatgctgtatggtgcaaatggctcgaggattgtgctagtgggcgaattccctgcaatgatataaaactaaaaagttactgcaggttaacattattgaatatattatgttctgagagtccaaatacaagaaaagcctctgatgaatatcctgactcagaaagtgagtataaaagaaactgtccccagtttggagatgcacttttcttgctaaatccagagttacctcttgaagttcatgtggacaacagtggttttgggattttaagagtttcaagagataattgtaaggaagatggaggtattggaggctctggctctgaaactgtgaactctgtagatgatgctgaagctgcatccaaaagtgtccctttgatggatgttgtgtttgttcatggccttcgtggcggcccattcaactcatggcgaattgctgatgacaaatcatcaactaccaaagctggtttagtggaaagcattgacgaggatgctgggaaagagggtacatgctggccaagagaatggcttgcggcagattttcctcaagcacgtttttttacagtaaaatacaagacaaatttgacccaatggactggagccagcttgcctcttcaggaggtgagctctatgctgctgaggaagttggtggctgctgggattggtagtcggcctgtcattttcgtgacacatagcatgggaggactggtggttaaacagcttttatatcaagcaaagctgaataactatgacaagttcctgaataatactattgggctagttttctatagttgtccgcattttggcagtaaacttgcagacatgccatggcgtatgggtttagtgtttcgtcctgctccttcgattggggagttaagaagtgggtctccaagactagttgaactgaacgattttgtgcgtcaacgacacaacaaaggatttcttgatgttcttagttttagtgaggtcacaccgattgttgaaggatatggcggttgggcacttcgtatggagatagtgccaattgaatctgcatacccaggctttggggagcttgtcgttctaccgtccactgatcatataaattcatgtaagccagttaacaagaacgatccttcttatgcggaaaccttggcatttttggagaagaacttcaaattatgcctggaaagagcagagtcctaggtcttgtcaatggcgccgtggagttttcagcaatctgaaggcttcattttccatttaccgccagagacttttctcccgttaacgacgaatggtggttgatctgaccaaatgatctgggcgtgctgtggtttatgaagctcgcaccgaactttgtagtaacattgcacatagcggttaggctgtaaatagctgtcttttaccttttagttgacatgagttgcccccatgtaagatcaagctatataccccaatgcctgtatcatctcaacagttttcagcaacagattttttacaaaacaatctcataatatataagccattttcataaaattactttctatgtgctttctccgttcttgaataag

SEQ ID NO: 699 - DNA, 4518 bp, Zea Mays
aaccgcctcgctatagtctttcttccccttcttccccggcgaatattccccgcgccgcttgccctcgctagccttcctctccacggcaacagccccctccccgcatcgccggaataactcaaataatcacatcctaccgaagaggagaagccacccgcgacgtttcccggcgccggcaatgctacgacgcgtcctcctcctccgccatttccagcaccaccgccatcggctccgcctgctctccacaacccccaccccacacgcctccccctccacctcggcctcctccctcccgatcgccgccacgcccgcggcgccgcaccacctcgcgccccatcgcgggggcgcgcgccgcctcgccccgctcctcgccttctcctctctctccctcgccgctgcgggcgcggtttacctcactaccgacaacctcgaggatacgctgcagcggtccagggactctgcgggccgcgtcgtggagcggatgcagcacacgtggacggcagcgcgggtgctctggaagtcgctcctgtccgtgctctcgtccgccaaccatgaggtgcggtccgggttcgagctgcgggtcgccgcgctgctcgccgacatcgcggccgccagcgccgctcgccgcacggccatcgtttctgcgggcggcggcgccgtcctcgactggctgctcgagagcgtcgtgcggggggccacgcaggccgaggctgccagggcgctcgcgcacctgctggccgacccctgggtcgcgcccgccgttctcggccgcccgcacgctgtgccatgccttctccacttcatcttctcattccagcccacgcgcggcaagaagaaatcttcatttgatggtttagatcattctaaagggaggagcatgcttgtggctgcacttatggatataatcacttctaactgcgataatgcagactattcgtcctttaagcctttgttgcctgctgatgctgatacaagagatattgcaacagcaattgaagttattgagcaaggggggatgcattttgatgaccatgaggataatagcagtaatgatggtgactctggattaaaggggatagggattaaggtgcttggtggaaccacggtattggggttctctagaggaaataactcattggagttggataactcagactatgatactatggatgtatcatatgatagtagtagatccgtggtggaacagagtactgccgagtctccactacttaggaaattaagctcctctgctgttccagggctttgggatgacttacagagggaacatgtagctgtaccttttgctacatgggctcttgcaaactgggctatagcatcagatctgaatcgcactcttgttcaagaacttgatagtgatggacatgcagttgcaactgcgttgaaagcagccgaaagaactgttaaatggcatggaactctggtggctcgagctcttttagaagaccagaatttggccttggctccatcagttcctgattggtgctctagtcttctttctacagcttctcaggctactgcaaatgatgacatgccattgggtcaactgtcattatcaacattcctattatctatgatgcgatgtaatgagtcaaaatttgtaataaggcagaagggccttcatcctcttcgtagtattgcaaaaaagatagaaaatcagaatggccagaacagtatgaaagaatcaatagcaagtgctctaagtttgctttatgctggtgaagttcctttatcacttgaggaatctcaaagatggtctggcattcttcttagatggctttttgataaatctgtatcaaataaaacacatcttacagccatgaaaatcctttcatgcatacttgaagattatggtccagcttctgtgccaatttctcagggatggttagctcttgtcctttctgagattcttggggacaacaaggcccaaggttcaaaaggaacgacacagcctgaaccagagaaagtgaagaatccggttgattaccataatgcttcaactgcaactcaggtcctgaatcaattaggtagtgctgttgttaaattagcaagcacccaatcgaactgtgagcctgggtctgatgacaaagataaaggaccactttctgattttctatctcttgagccatttgctacagttctaaagaatatgaacaaaaagaatctgcccaaatttgatgccgctgactcagcatcagcaacgctcaagggaataaaagctctagctgagctttgttctgaggatggtgcatgccaaaagagaatagctgatttaggagctcttcccttgttgaggcacatcctcttgggtgatgattatgagaaacttgctgcaattgaagcatatgatgcatctcgtactcgagaagtgcaagacaagaacgtggctcctaatgtttcgtctactgatgctaccactgatccctcaagtgtacgggttcctcctgcagcacatatccgaaggcatgctgggaggctgcttaccattctctctcttctacctaattcaaagaaggaaattatttctgatgctgtatggtgcaaatggctcgaggattgtgctagtgggcgaattccctgcaatgatataaaactaaaaagttactgcaggttaacattattgaatatattatgttctgagagtccaaatacaagaaaagcctctgatgaatatcctgactcagaaagtgagtataaaagaaactgtccccagtttggagatgcacttttcttgctaaatccagagttacctcttgaagttcatgtggacaacagtggttttgggattttaagagtttcaagagataattgtaaggaagatggaggtattggaggctctggctctgaaactgtgaactctgtagatgatgctgaagctgcatccaaaagtgtccctttgatggatgttgtgtttgttcatggccttcgtggcggcccattcaactcatggcgaattgctgatgacaaatcatcaactaccaaagctggtttagtggaaagcattgacgaggatgctgggaaagagggtacatgctggccaagagaatggcttgcggcagattttcctcaagcacgtttttttacagtaaaatacaagacaaatttgacccaatggactggagccagcttgcctcttcaggaggtgagctctatgctgctgaggaagttggtggctgctgggattggtagtcggcctgtcattttcgtgacacatagcatgggaggactggtggttaaacagcttttatatcaagcaaagctgaataactatgacaagttcctgaataatactattgggctagttttctatagttgtccgcattttggcagtaaacttgcagacatgccatggcgtatgggtttagtgtttcgtcctgctccttcggtatggtcttccattgttatggtcgctagatcggtgagggattggagagagatatcgatggacagaaacgccggtcgggggcctgtgcccacggccgagcaagaggagggtttctcccttctaattcttgcatgctttatttctcatccattgattacataaatatgccggttggccgtccctatctagctagagatccttatctcctaaaaactctcaacaaactactaactgataaccttcctagataatctcaactaatctcctaaataatctcaactaatcttctaatcttatctctaactatccttatctaatcccccttgagggcccatggctgctgctatcgcagcccctccgtgggcctccttacgccctaacatccattccccatctgataagtttccttacaaattgatagttttcatcttctctatatgttctgacatttaatttttgatagattggggagttaagaagtgggtctccaagactagttgaactgaacgattttgtgcgtcaacgacacaacaaaggatttcttgatgttcttagttttagtgagacccaggtcacaccgattgttgaaggatatggcggttgggcacttcgtatggagatagtgccaattgaatctgcatacccaggctttggggagcttgtcttaacaagaacgatccttcttatgcggaaaccttggcatttttggagaagaacttcaaattatgcctggaaagagcagagtcctaggtcttgtcaatggcgccgtggagttttcagcaatctgaaggcttcattttccatttaccgccagagacttttctcccgttaacgacgaatggtggttgatctgaccaaatgatctgggcgtgctgtggtttatgaagctcgcaccgaactttgtagtaacattgcacatagcggttaggctgtaaatagctgtcttttaccttttagttgacatgagttgcccccatgtaagatcaagctatataccccaatgcctgtatcatctcaacagttttcagcaacagattttttacaaaacaatctcataatatataagccattttcataaaattactttctatgtgctttctccgttcttgaataag

SEQ ID NO: 700 - DNA, 4100 bp, Zea Mays
aaccgcctcgctatagtctttcttccccttcttccccggcgaatattccccgcgccgcttgccctcgctagccttcctctccacggcaacagccccctccccgcatcgccggaataactcaaataatcacatcctaccgaagaggagaagccacccgcgacgtttcccggcgccggcaatgctacgacgcgtcctcctcctccgccatttccagcaccaccgccatcggctccgcctgctctccacaacccccaccccacacgcctccccctccacctcggcctcctccctcccgatcgccgccacgcccgcggcgccgcaccacctcgcgccccatcgcgggggcgcgcgccgcctcgccccgctcctcgccttctcctctctctccctcgccgctgcgggcgcggtttacctcactaccgacaacctcgaggatacgctgcagcggtccagggactctgcgggccgcgtcgtggagcggatgcagcacacgtggacggcagcgcgggtgctctggaagtcgctcctgtccgtgctctcgtccgccaaccatgaggtgcggtccgggttcgagctgcgggtcgccgcgctgctcgccgacatcgcggccgccagcgccgctcgccgcacggccatcgtttctgcgggcggcggcgccgtcctcgactggctgctcgagagcgtcgtgcggggggccacgcaggccgaggctgccagggcgctcgcgcacctgctggccgacccctgggtcgcgcccgccgttctcggccgcccgcacgctgtgccatgccttctccacttcatcttctcattccagcccacgcgcggcaagaagaaatcttcatttgatggtttagatcattctaaagggaggagcatgcttgtggctgcacttatggatataatcacttctaactgcgataatgcagactattcgtcctttaagcctttgttgcctgctgatgctgatacaagagatattgcaacagcaattgaagttattgagcaaggggggatgcattttgatgaccatgaggataatagcagtaatgatggtgactctggattaaaggggatagggattaaggtgcttggtggaaccacggtattggggttctctagaggaaataactcattggagttggataactcagactatgatactatggatgtatcatatgatagtagtagatccgtggtggaacagagtactgccgagtctccactacttaggaaattaagctcctctgctgttccagggctttgggatgacttacagagggaacatgtagctgtaccttttgctacatgggctcttgcaaactgggctatagcatcagatctgaatcgcactcttgttcaagaacttgatagtgatggacatgcagttgcaactgcgttgaaagcagccgaaagaactgttaaatggcatggaactctggtggctcgagctcttttagaagaccagaatttggccttggctccatcagttcctgattggtgctctagtcttctttctacagcttctcaggctactgcaaatgatgacatgccattgggtcaactgtcattatcaacattcctattatctatgatgcgatgtaatgagtcaaaatttgtaataaggcagaagggccttcatcctcttcgtagtattgcaaaaaagatagaaaatcagaatggccagaacagtatgaaagaatcaatagcaagtgctctaagtttgctttatgctggtgaagttcctttatcacttgaggaatctcaaagatggtctggcattcttcttagatggctttttgataaatctgtatcaaataaaacacatcttacagccatgaaaatcctttcatgcatacttgaagattatggtccagcttctgtgccaatttctcagggatggttagctcttgtcctttctgagattcttggggacaacaaggcccaaggttcaaaaggaacgacacagcctgaaccagagaaagtgaagaatccggttgattaccataatgcttcaactgcaactcaggtcctgaatcaattaggtagtgctgttgttaaattagcaagcacccaatcgaactgtgagcctgggtctgatgacaaagataaaggaccactttctgattttctatctcttgagccatttgctacagttctaaagaatatgaacaaaaagaatctgcccaaatttgatgccgctgactcagcatcagcaacgctcaagggaataaaagctctagctgagctttgttctgaggatggtgcatgccaaaagagaatagctgatttaggagctcttcccttgttgaggcacatcctcttgggtgatgattatgagaaacttgctgcaattgaagcatatgatgcatctcgtactcgagaagtgcaagacaagaacgtggctcctaatgtttcgtctactgatgctaccactgatccctcaagtgtacgggttcctcctgcagcacatatccgaaggcatgctgggaggctgcttaccattctctctcttctacctaattcaaagaaggaaattatttctgatgctgtatggtgcaaatggctcgaggattgtgctagtgggcgaattccctgcaatgatataaaactaaaaagttactgcaggttaacattattgaatatattatgttctgagagtccaaatacaagaaaagcctctgatgaatatcctgactcagaaagtgagtataaaagaaactgtccccagtttggagatgcacttttcttgctaaatccagagttacctcttgaagttcatgtggacaacagtggttttgggattttaagagtttcaagagataattgtaaggaagatggaggtattggaggctctggctctgaaactgtgaactctgtagatgatgctgaagctgcatccaaaagtgtccctttgatggatgttgtgtttgttcatggccttcgtggcggcccattcaactcatggcgaattgctgatgacaaatcatcaactaccaaagctggtttagtggaaagcattgacgaggatgctgggaaagagggtacatgctggccaagagaatggcttgcggcagattttcctcaagcacgtttttttacagtaaaatacaagacaaatttgacccaatggactggagccagcttgcctcttcaggaggtgagctctatgctgctgaggaagttggtggctgctgggattggtagtcggcctgtcattttcgtgacacatagcatgggaggactggtggttaaacagcttttatatcaagcaaagctgaataactatgacaagttcctgaataatactattgggctacacaggttttctatagttgtccgcattttggcagtaaacttgcagacatgccatggcgtatgggtttagtgtttcgtcctgctccttcgattggggagttaagaagtgggtctccaagactagttgaactgaacgattttgtgcgtcaacgacacaacaaaggatttcttgatgttcttagttttagtgagacccaggtcacaccgattgttgaaggatatggcggttgggcacttcgtatggagatagtgccaattgaatctgcatacccaggctttggggagcttgtcgttctaccgtccactgatcatataaattcatgtaagccagttaacaagaacgatccttcttatgcggaaaccttggcatttttggagaagaacttcaaattatgcctggaaagagcagagtcctaggtcttgtcaatggcgccgtggagttttcagcaatctgaaggcttcattttccatttaccgccagagacttttctcccgttaacgacgaatggtggttgatctgaccaaatgatctgggcgtgctgtggtttatgaagctcgcaccgaactttgtagtaacattgcacatagcggttaggctgtaaatagctgtcttttaccttttagttgacatgagttgcccccatgtaagatcaagctatataccccaatgcctgtatcatctcaacagttttcagcaacagattttttacaaaacaatctcataatatataagccattttcataaaattactttctatgtgctttctccgttcttgaataag

SEQ ID NO: 701 - DNA, 4536 bp, Zea Mays
aaccgcctcgctatagtctttcttccccttcttccccggcgaatattccccgcgccgcttgccctcgctagccttcctctccacggcaacagccccctccccgcatcgccggaataactcaaataatcacatcctaccgaagaggagaagccacccgcgacgtttcccggcgccggcaatgctacgacgcgtcctcctcctccgccatttccagcaccaccgccatcggctccgcctgctctccacaacccccaccccacacgcctccccctccacctcggcctcctccctcccgatcgccgccacgcccgcggcgccgcaccacctcgcgccccatcgcgggggcgcgcgccgcctcgccccgctcctcgccttctcctctctctccctcgccgctgcgggcgcggtttacctcactaccgacaacctcgaggatacgctgcagcggtccagggactctgcgggccgcgtcgtggagcggatgcagcacacgtggacggcagcgcgggtgctctggaagtcgctcctgtccgtgctctcgtccgccaaccatgaggtgcggtccgggttcgagctgcgggtcgccgcgctgctcgccgacatcgcggccgccagcgccgctcgccgcacggccatcgtttctgcgggcggcggcgccgtcctcgactggctgctcgagagcgtcgtgcggggggccacgcaggccgaggctgccagggcgctcgcgcacctgctggccgacccctgggtcgcgcccgccgttctcggccgcccgcacgctgtgccatgccttctccacttcatcttctcattccagcccacgcgcggcaagaagatcattctaaagggaggagcatgcttgtggctgcacttatggatataatcacttctaactgcgataatgcagactattcgtcctttaagcctttgttgcctgctgatgctgatacaagagatattgcaacagcaattgaagttattgagcaaggggggatgcattttgatgaccatgaggataatagcagtaatgatggtgactctggattaaaggggatagggattaaggtgcttggtggaaccacggtattggggttctctagaggaaataactcattggagttggataactcagactatgatactatggatgtatcatatgatagtagtagatccgtggtggaacagagtactgccgagtctccactacttaggaaattaagctcctctgctgttccagggctttgggatgacttacagagggaacatgtagctgtaccttttgctacatgggctcttgcaaactgggctatagcatcagatctgaatcgcactcttgttcaagaacttgatagtgatggacatgcagttgcaactgcgttgaaagcagccgaaagaactgttaaatggcatggaactctggtggctcgagctcttttagaagaccagaatttggccttggctccatcagttcctgattggtgctctagtcttctttctacagcttctcaggctactgcaaatgatgacatgccattgggtcaactgtcattatcaacattcctattatctatgatgcgatgtaatgagtcaaaatttgtaataaggcagaagggccttcatcctcttcgtagtattgcaaaaaagatagaaaatcagaatggccagaacagtatgaaagaatcaatagcaagtgctctaagtttgctttatgctggtgaagttcctttatcacttgaggaatctcaaagatggtctggcattcttcttagatggctttttgataaatctgtatcaaataaaacacatcttacagccatgaaaatcctttcatgcatacttgaagattatggtccagcttctgtgccaatttctcagggatggttagctcttgtcctttctgagattcttggggacaacaaggcccaaggttcaaaaggaacgacacagcctgaaccagagaaagtgaagaatccggttgattaccataatgcttcaactgcaactcaggtcctgaatcaattaggtagtgctgttgttaaattagcaagcacccaatcgaactgtgagcctgggtctgatgacaaagataaaggaccactttctgattttctatctcttgagccatttgctacagttctaaagaatatgaacaaaaagaatctgcccaaatttgatgccgctgactcagcatcagcaacgctcaagggaataaaagctctagctgagctttgttctgaggatggtgcatgccaaaagagaatagctgatttaggagctcttcccttgttgaggcacatcctcttgggtgatgattatgagaaacttgctgcaattgaagcatatgatgcatctcgtactcgagaagtgcaagacaagaacgtggctcctaatgtttcgtctactgatgctaccactgatccctcaagtgtacgggttcctcctgcagcacatatccgaaggcatgctgggaggctgcttaccattctctctcttctacctaattcaaagaaggaaattatttctgatgctgtatggtgcaaatggctcgaggattgtgctagtgggcgaattccctgcaatgatataaaactaaaaagttactgcaggttaacattattgaatatattatgttctgagagtccaaatacaagaaaagcctctgatgaatatcctgactcagaaagtgagtataaaagaaactgtccccagtttggagatgcacttttcttgctaaatccagagttacctcttgaagttcatgtggacaacagtggttttgggattttaagagtttcaagagataattgtaaggaagatggaggtattggaggctctggctctgaaactgtgaactctgtagatgatgctgaagctgcatccaaaagtgtccctttgatggatgttgtgtttgttcatggccttcgtggcggcccattcaactcatggcgaattgctgatgacaaatcatcaactaccaaagctggtttagtggaaagcattgacgaggatgctgggaaagagggtacatgctggccaagagaatggcttgcggcagattttcctcaagcacgtttttttacagtaaaatacaagacaaatttgacccaatggactggagccagcttgcctcttcaggaggtgagctctatgctgctgaggaagttggtggctgctgggattggtagtcggcctgtcattttcgtgacacatagcatgggaggactggtggttaaacagcttttatatcaagcaaagctgaataactatgacaagttcctgaataatactattgggctagttttctatagttgtccgcattttggcagtaaacttgcagacatgccatggcgtatgggtttagtgtttcgtcctgctccttcggtatggtcttccattgttatggtcgctagatcggtgagggattggagagagatatcgatggacagaaacgccggtcgggggcctgtgcccacggccgagcaagaggagggtttctcccttctaattcttgcatgctttatttctcatccattgattacataaatatgccggttggccgtccctatctagctagagatccttatctcctaaaaactctcaacaaactactaactgataaccttcctagataatctcaactaatctcctaaataatctcaactaatcttctaatcttatctctaactatccttatctaatcccccttgagggcccatggctgctgctatcgcagcccctccgtgggcctccttacgccctaacatccattccccatctgataagtttccttacaaattgatagttttcatcttctctatatgttctgacatttaatttttgatagattggggagttaagaagtgggtctccaagactagttgaactgaacgattttgtgcgtcaacgacacaacaaaggatttcttgatgttcttagttttagtgagacccaggtcacaccgattgttgaaggatatggcggttgggcacttcgtatggagatagtgccaattgaatctgcatacccaggctttggggagcttgtcgttctaccgtccactgatcatataaattcatgtaagccagttaacaagaacgatccttcttatgcggaaaccttggcatttttggagaagaacttcaaattatgcctggaaagagcagagtcctaggtcttgtcaatggcgccgtggagttttcagcaatctgaaggcttcattttccatttaccgccagagacttttctcccgttaacgacgaatggtggttgatctgaccaaatgatctgggcgtgctgtggtttatgaagctcgcaccgaactttgtagtaacattgcacatagcggttaggctgtaaatagctgtcttttaccttttagttgacatgagttgcccccatgtaagatcaagctatataccccaatgcctgtatcatctcaacagttttcagcaacagattttttacaaaacaatctcataatatataagccattttcataaaattactttctatgtgctttctccgttcttgaataag

SEQ ID NO: 702 - DNA, 1642 bp, Zea Mays
tatataataagatataaatgatgttttttagaaaaagatagaatcttttagataattttaaagttacggggggagggatgcaacctcagggatgcgaactgaatgtcgaaacgaactttcagcccatttacagcccgacaccgtctccaggactccagccgacaccgtcttcagccaccatcatctccttcgccgcagaagagattggagctgaagagaggaagcagcgcgtcctcgcctaaagccctcgccgccctctttcggctcctcgcctctcgtccacgcgcgacgacgtgtcggcaaacactcagtccatcactccatcccaagactcgcgaggcgatggtggacgcgtggtggcctctgctgggcgcggcgatcccggcgctggtggcgggtcagtttgtccgcatcaagcgccgccgcgacgaggagcagcgcctcaaggcggcgcgcgggcgggagaagagctccgacgaggtattcgtctgcgagcgcgtgtgcacctccaagcgtatgctcaagaaggtaggggccttctccaaggaccccataccggagacctgcgtcaccgtctgcggcgtctctgaactcgacgcctgcgccgacgcttgcgcgcgcaccgtctgcgtcaaccagcaccaggtgcccaattggaacgacgtctgcctcaagaggtgccagagcgagtgtctcaaactctcctcaaacctcatgtaatgaccatctcgctattgtgctgcgctccttatataccaccccgtcaggttcttctctgcttctatccatatcatggttgaggaacttcagacgtcgataaccgaaatttatatatctcaaggaattggagtgagtgaatgtagctggtcaaggcggttatgtctttcattacattggctcttgcacatttctcttcggcagaatttgtttccctaccgaagatttgtttctctttggcagaatttgtttccaactaattgtgagtactaggtaccatatcctgttttttgagtcacaacaggacctctgagttctcccggatgaatgctgatttcgacattgatttttagttggttgcttatgtcttctaataattgaattatttttatggattgaatattataaatttctagggtggtggtttgatggatgttgcataatgacatgtatttcccttcacagtctaagcaaagaggaggtcagatggctgtttgggttaacctttctatctcagtaccattatggtttctgaatttttggagttatattggtagcgtaacagacagacaagtgaccgatgaactcgaagcaccacaggttgaagattttgggcaagagctcgcataatgcaagttgtgtccttgatcacattctttgacctaacaatgtttttattttgatagtcaccatgacatgcttaggtaacttgatgtgacctaatatgttacctagttttgtttatcctacaccttgcatacaaataaattattaaatagtcttgctattgctttacttggttttgagatttatattatatctgaatcatgatcatgtctcattattattgttggcttaattgttatacatgataaggttatttttgttaaatggaacatggtgcgatcactcgagacaacagtgc

SEQ ID NO: 703 - DNA, 515 bp, Zea Mays
cacgtttcctcttcttcgttctctcccccatcccaatcgtgcgtgttcctcactcctcagctccgaccttcacggggcccacggggcccgacgcccggcggctttactcagggcaccatggccttctcttcgtcactggcgccgttcttcccaccttctggaaccttccgagcccatcccgctaggaggctgcgggccgatgcacccgggagattcgtggcgtcctgcttgccccctcccgacgtcgtggtgacgcgcgagcagggaaagaacgccaggctcatctccgcgctgatgacaagttcgactggattattgtaacctctcctgaggcagctgcagtgttccttcagggatggaaggctgctggaagtcctaaggtgcgagtagctgttgttggagaaggaactgcaagggtttttcatgaagtgtcagaatctgatgatcaatctctagagcttgcattttcaccttccaaagctttgggtaaagtctggacgaatctctagattcga

SEQ ID NO: 704 - DNA, 336 bp, Zea Mays
aacggcttgggcgctattggtgctgtggaaaagcataatgtacaccctctggaacttcctcttattaagcatgttgaaggccctgatacagataggcttttagatgtcctacgtaatgacaagttcgactggattattgtaacctctcctgaggcagctgcagtgttccttcagggatggaaggctgctggaagtcctaaggtgcgagtagctgttgttggagaaggaactgcaagggtttttcatgaagtgtcagaatctgatgatcaatctctagagcttgcattttcaccttccaaagctttgggtaaagtctggacgaatctctagattcga

SEQ ID NO: 705 - DNA, 827 bp, Zea Mays
agaagatgtcgacccgctgacattaaaccttgctatatcagctccagttgttgcgttagcttctccttctgcactgagctgtggtgtgatagatctggagataccagcatgtaagcaccaaatacgttttgatggagcgtagtttcagactactacaaaatagacgcaacgggcattccttaatcaaatcatcagtctccttggatcgtgttccattttgccagtgccagtttctatgtgtggttccatggttcagcgaagaaactgggcctgaagagcatatattacccaacgacccctggacttgaggggtgggtcgagagcattctcgaggcgctcagagtccacaggacagcatcaaaagaggccccaaaacgttgaaaacgggcggatggcggagcttcttcttggcgttggtagccgtccgcagtgtcgaagaaattctttgcttctttgacgacaattgccccccgttgagggaggtggtggtgtcaagccatggctttccactggcccagtttgtaatggattcttgggccgaaaggcccatctctatatgtcttgactcgcaaggcgattgcatcagtccatccatccatttcatggagggttttagcagtgccgtctctgtttcgctaatcggtgatggcagccagccttgttgtactttgtgggtttgttgacgcagccggtcggattcttcttattgccggattggttgcgtaacgctaggtggttctgaatatcggcgacggcgaggctgtggaatctccgccctccaccgaagattccctgtcgtcgtttctgaatttaattaacaacatggc

SEQ ID NO: 706 - DNA, 633 bp, Zea Mays
tagtttcagactactacaaaatagacgcaacgggcattccttaatcaaatcatcagtctccttggatcgtgttccattttgccagtgccagtttctatgtgtggttccatggttcaggtgggtcgagagcattctcgaggcgctcagagtccacaggacagcatcaaaagaggccccaaaacgttgaaaacgggcggatggcggagcttcttcttggcgttggtagccgtccgcagtgtcgaagaaattctttgcttctttgacgacaattgccccccgttgagggaggtggtggtgtcaagccatggctttccactggcccagtttgtaatggattcttgggccgaaaggcccatctctatatgtcttgactcgcaaggcgattgcatcagtccatccatccatttcatggagggttttagcagtgccgtctctgtttcgctaatcggtgatggcagccagccttgttgtactttgtgggtttgttgacgcagccggtcggattcttcttattgccggattggttgcgtaacgctaggtggttctgaatatcggcgacggcgaggctgtggaatctccgccctccaccgaagattccctgtcgtcgtttctgaatttaattaacaacatggc

SEQ ID NO: 707 - DNA, 662 bp, Zea Mays
aatcaaatcatcagtctccttggatcgtgttccattttgccagtgccagtttctatgtgtggttccatggttcagaccactgcgtctgcagcgaagaaactgggcctgaagagcatatattacccaacgacccctggacttgaggggtgggtcgagagcattctcgaggcgctcagagtccacaggacagcatcaaaagaggccccaaaacgttgaaaacgggcggatggcggagcttcttcttggcgttggtagccgtccgcagtgtcgaagaaattctttgcttctttgacgacaattgccccccgttgagggaggtggtggtgtcaagccatggctttccactggcccagtttgtaatggattcttgggccgaaaggcccatctctatatgtcttgactcgcaaggcgattgcatcagtccatccatccatttcatggagggttttagcagtgccgtctctgtttcgctaatcggtgatggcagccagccttgttgtactttgtgggtttgttgacgcagccggtcggattcttcttattgccggattggttgcgtaacgctaggtggttctgaatatcggcgacggcgaggctgtggaatctccgccctccaccgaagattccctgtcgtcgtttctgaatttaattaacaacatggc

SEQ ID NO: 708 - DNA, 3831 bp, Zea Mays
tgcggcgctgcctgcctctgcccctccccacctcgccttttttttccatttcttttttcgttttcccattttccgccgtggattcccatggtcaccaccacagtgaagtcccgaccgccgcatgcttccttcgccatgagcggcggccgccgccgctcttcgccggtggcgccttcctgctcctccgtccccgggcgttcgttggttccgctatgctgcttgatcttggtgctcctttctttctccatgtcgtcgtccgcggtggcggcggaggattgcgttgaggatagtgacggcgctgatggcgacggttgctgtctcagcttccgggatgtgtgtgccgaccggagctccttctgcttctcgtcctcggtggctcagatgttgcttgcaagcgaggacgccgccgaggcgccggatttggagctgccaaggggctgggaaccgtcgtctctgccattgtccttcccgatgtccggcggcggaggcatggtaacttgctcttctgttgactcgtcgctcacacgggcgcgcgatggattgggacgaggtgacgacgctagagcgaggtatgacgtcgcgtcatgccaggcgccgcttgtgcctgacaattggatgcgggcatctgctggggtgcccatggaggtggagggccctgccacagatgccgacccgagtggtcttcaaagccccttgtcgatgaatgtggaaattaaccccccggtgctggattggggcaggagcgacttgtatgctgcaaccaaggccaacttgaccgtggtgaatttgaacaagaacagtgccctgcgtctgtatgaacccttcagcactgacccccagttttatgtgtatggttatgaggatctggagctgcagcctggggagaacgccacagtcaccttcgttttcttgccaaagttgttaggctcttcatcagctcatctagttgtgcagacaaattttggcggatttattatacatgcaaagggcatggctgtcagttcaccctatcagatactgccattgacagggatagatgttcttataggtggacagctagagaggaacttatcgatatacaacccatatgacgatactctctatgttgaggaagtgtctgtttggatgtcttcattggagagcacaaggtattcttctcaccttgtctgccagctgggcccctttgatggagcattggagctatcctcttcacgtagcaactggtatacagcaagcagtgaagaatttagatggccagtggtcaatatcaggcctagtgaacaatgggaggtgcttccttcaaagaggaacactgtgattgagttaaagctgcaagctgtttctgaaggcaaggtgtttggtgctatctgcttgaaactgcgcaattgcactcttagtacgactcatgcttttgtgatacctattgagctagaggtgcatacacgaacttactatgattccagtggcttaattgctgtcacatttgagcatgtatggacttgtgatgaaactgggccgatcttttcgctttccttacggaatgatggaccaaagttactgaggattatagatattactgagcatgccataaagggcccaatgatttttcaggttaaatacctgaatggattaatactctaccctgatactgtaacagatatagctttagtaagatatacttcttcagttacagaggacatttcatctgacagctgcaatatagttgtagaaacaaatagtacccttggtagttcaatcataataccatgcaaagatttagtgcgcgcatctgaatccgttggaccgtttgccagacaagtatatgaggaagatatctctgctaatgcaagaacaagaacattgggcagcatgctgcaagtaaaacactcgcatcatgtgaagccaatggtcaggaaagcagtcaaagctgatgatagaatgcttaaacaatggaaatctcatggaacaagtgatgggatttctgttcttatggatcatgaaatgatgtttcccgttgtgcaaattggttcacagttttctaaatggataaaagtccataacccaagcctggagcgtgcagccatgcagctgatagtgaactccgaggagatcattgaccaatgcaaaactgtaactgatgtatgtgaactcacattctcaagcaaatctccagaggttaactcaactgagactagatttggtttctcgttaggtgatgcagcaatcaccgaggcctatgtcgatccttcagagactgctttgcttggtcctattgtcttccgtccctcgaatcactgtatgtggtcaagcatggttttgatcagaaacaacctgtcgggtgtggagatgctgcctctccgggcatatggtgggcgacaatctattgtccttctagaggaatctgagcctgcttggaagctagagttcagccttgggtccaatgttcataataaatcaacgatgaccaaacaagagatcccaagctctttgtgcagtcaacagctaaccaaagagatacatgttaaaaacagcggtgaccttcctctacaagtgacaaaggttaaagtttcaggagctgattgtggtgtggatggatttaccgtggacaactgcaaaggatttagcttagcaccgagtgaatcaataagaatgctcatttcttttcaagctgacttctcttcagctatggttcagagagatcttgagttggtcatgactactggcatctttccgatccctatgactgcaacaattccgattctttgacagtgggctctcaagactatatcaagattgatgacaaaaaaagtgccattttcgaggagaacaagaaaagtaccattaacaagacccttttccttaaccaaagcagcaaaaagtccaggacaaataaggaacacaaaagaactgaagaagctgttgctgagaagtaccctgccagtgttgttgatagctcaaagagagcagatgacaagaataaacctgatgaacaactgcacacaacttcgacggtatccgtgtcccgaggtaatccagtggaagataaggcctcaagagaagctccgcagaccagtgaaaacctcacgatcaggattgctcgagacaaagggaaacgaaggaagcggaaagttggtgcaggactggcagggaagtttgaggtttctagcagccacagcgggaactcaacaccgtcttcgccattgtcgcagagctcaaccccgaaacatggctggtctttttctggggcgccatcagagccgaagcatgaaaacaaagtcgagagcagattcgatgtcgaggcaacggcatcaccaactcgcgctaatcatgagaagaagaaaacttggtcgcaagtcgctaaggagcagcctcgctctcgttcagcctcaccaggaatcacatcaccacctccaagccctgcagtgaccgcccccgtcgcatggcgctctccgtcattggcccccacgtcttcaccgacagctccacagtctcgtgctcctggctccaatctggtgaaagacaaggctgtgaagagagacgtgggtgctgctgcggctgcggctgcgccttccccgaagaaagagttcacctacgacatatggggagaccatttcccaggaaacctgctggtggtcgcaagggaggccgcgccacgcaagatgcctgacgcttctgaaggcgcctcctatagcttgtttgctagagagccccagaccctcatgatgaagccatcatcatctgcaccgccgcccatgtctcgcggccgcggttcgccgccgtctcatgtagcatctggttacggaataaaatgaccctgaaagcttaaaataa

SEQ ID NO: 709 - DNA, 1256 bp, Zea Mays
cctaattgcaatccgcgtaaacgtagctttctctcagttcagacgcttcaccatcggaaaggccacagctagggttcgatacttcgatccccactccatctccaccgaagaccgtcgcgtcgctccgccaccgaagcagctcaaatttctctataagatgagctggagatttcctctcttcggcagctctcagcagcagcaagcagatccaagtttccaggacatccctacgcagtcttggtaccctccctcggtggtaggttcctcttcacgtccatccacccctacctcttctagtgctagtctacaccaaagagcttcagatagtccgcagtcttcatcccgtgggcaaccatctcctgctgaggctgcagggataattgcccgtttgaaggataagagtattgaggagttacaaaggctattgaaagacagagaggcatataatgcattctttaactcacttgatcaagtgaaaacccagaacaatgtgcgtgatgagcttaaaaaagagacattgcaacttgcaagggaaaatttagaaaaggagcagcggattttggaacttaggaatcagtgcacaataattagaaccacggaactggctgctgctcaagaccgcctaactgatttggagaggcaaaaggatgatattatgaggtcctattcccctgccgcactgctcaacaagctccaaaaatcggatacaatgtacattacatgtcaatgttcaggcataatgatcatgctagcctttcgaactttttcaataccggttcaaaacaacaacaacaaaaacatcaatggcaaagttggatgaggagtccgaggagctgcaccagaagttcctggagaaggacatcgaccttccaacctttgtgcagaagtacaagaagctccgcacggcttaccacaagcaggcgttgctccatctcgccggccagacatcactccgctgacatccggccaggcgtcatggcaactttgttgtatttctgctcgcctgttcttgttctacactatgcttggccctgttttacgagtgcagcctcttgtagggatttgccgaacatcagcggatattgcatgtatagttttatgtcttgcaaaaacgtcttatgtactctgtcctggtgtagtggtgtttacgtatctagtgtccaagttgggattcatttgtggtaactaaacactttgcctattttgttcaattcgatgataataaagcttttgtacgtttgtgtacacatccgttc

SEQ ID NO: 710 - DNA, 1118 bp, Zea Mays
cctaattgcaatccgcgtaaacgtagctttctctcagttcagacgcttcaccatcggaaaggccacagctagggttcgatacttcgatccccactccatctccaccgaagaccgtcgcgtcgctccgccaccgaagcagctcaaatttctctataagatgagctggagatttcctctcttcggcagctctcagcagcagcaagcagatccaagtttccaggacatccctacgcagtcttggtaccctccctcggtggtaggttcctcttcacgtccatccacccctacctcttctagtgctagtctacaccaaagagcttcagatagtccgcagtcttcatcccgtgggcaaccatctcctgctgaggctgcagggataattgcccgtttgaaggataagagtattgaggagttacaaaggctattgaaagacagagaggcatataatgcattctttaactcacttgatcaagtgaaaacccagaacaatgtgcgtgatgagcttaaaaaagagacattgcaacttgcaagggaaaatttagaaaaggagcagcggattttggaacttaggaatcagtgcacaataattagaaccacggaactggctgctgctcaagaccgcctaactgatttggagaggcaaaaggatgatattatgagcatcaatggcaaagttggatgaggagtccgaggagctgcaccagaagttcctggagaaggacatcgaccttccaacctttgtgcagaagtacaagaagctccgcacggcttaccacaagcaggcgttgctccatctcgccggccagacatcactccgctgacatccggccaggcgtcatggcaactttgttgtatttctgctcgcctgttcttgttctacactatgcttggccctgttttacgagtgcagcctcttgtagggatttgccgaacatcagcggatattgcatgtatagttttatgtcttgcaaaaacgtcttatgtactctgtcctggtgtagtggtgtttacgtatctagtgtccaagttgggattcatttgtggtaactaaacactttgcctattttgttcaattcgatgataataaagcttttgtacgtttgtgtacacatccgttc

SEQ ID NO: 711 - DNA, 1035 bp, Zea Mays
tttgattttcacgaataagaaggatttctctataagatgagctggagatttcctctcttcggcagctctcagcagcagcaagcagatccaagtttccaggacatccctacgcagtcttggtaccctccctcggtggtaggttcctcttcacgtccatccacccctacctcttctagtgctagtctacaccaaagagcttcagatagtccgcagtcttcatcccgtgggcaaccatctcctgctgaggctgcagggataattgcccgtttgaaggataagagtattgaggagttacaaaggctattgaaagacagagaggcatataatgcattctttaactcacttgatcaagtgaaaacccagaacaatgtgcgtgatgagcttaaaaaagagacattgcaacttgcaagggaaaatttagaaaaggagcagcggattttggaacttaggaatcagtgcacaataattagaaccacggaactggctgctgctcaagaccgcctaactgatttggagaggcaaaaggatgatattatgaggtcctattcccctgccgcactgctcaacaagctccaaacatcaatggcaaagttggatgaggagtccgaggagctgcaccagaagttcctggagaaggacatcgaccttccaacctttgtgcagaagtacaagaagctccgcacggcttaccacaagcaggcgttgctccatctcgccggccagacatcactccgctgacatccggccaggcgtcatggcaactttgttgtatttctgctcgcctgttcttgttctacactatgcttggccctgttttacgagtgcagcctcttgtagggatttgccgaacatcagcggatattgcatgtatagttttatgtcttgcaaaaacgtcttatgtactctgtcctggtgtagtggtgtttacgtatctagtgtccaagttgggattcatttgtggtaactaaacactttgcctattttgttcaattcgatgataataaagcttttgtacgtttgtgtacacatccgttc

SEQ ID NO: 712 - DNA, 996 bp, Zea Mays
ccaaaatcctagctaaagcatcaccatcgcagtacgcactccgagaacccagctatataaacccacctcgcacactcatcactctcacactctgcccagctaagctccctccgtccatcggcatggcgactaccactactaccatcctcctcctcctcctcgtccccgcggggtcgttcgcgttcgacccggccaccggcgccggcacggtgatcgactcgggcacggtgatcacgcggtggacagcgcccgtgtacgcggcgctgcgcgaggagttccggcggcaggtggcggcgccgagcgggtacacgtcgctgggagcgttcgacacgtgcttcaacacggacgaggtggcggcgggcggcgcgccgcccgtgacgctgcacatggacggcggcgtggacctgacgctgccgatggagaacacgctgatccacagcagcgccacgccgctggcgtgcctggccatggccgaggcgccgcagaacgtgaacgccgtcgtgaacgtggtggccaaccttcagcagcagaacgtgcgggtcgtcgtcgacgtcgccggctcgcgcgtcgggttcgcgagggagccctgcaactgagcccctgaatccgtccgtgccctatgcacgggaggaaggaggagacgcgctgcggctgccgcatcggtcggtgtgcagttagttgtcctgttagtctatgctacgttgtctgcactctgcaataacggacgtgacccggggaaaaaaactgtttcgtcacgggtagctagagaatcacgtaatggctcttgttttcgtttgtgtcctataatgtatggctattggcctgtttcgagaggttaaaatttggaggtgctgcatcaaattcgtacgtcgacagtgtcagactcacgagcgtgtacagcacagtacaaaagctgccttgtcatggatacgcgagaggatggcgatgcgattcacaagctgtcacttgaccgtatctctgaacgtgtaccatttc

SEQ ID NO: 713 - DNA, 1340 bp, Zea Mays
atggctgaacccgagatggaggtggccgtagcgacagcagcaccagccggtcagaagagagagagggaggaaggaggcgatcctgctgctgaatgcggcggcgaggagacggaggtggaaggggcggcggcgaagaagccgaagttggaggaggccaaggaggcggagaaggggagggtagaggagacggcggaggggaagacacaggaggcaaatgaggagaaggcagtggaggcggaggacaagcctgtgacagaggaggcaaatgagaagaaggcagttgaagcggagggaaagcctgtgacacaggaggcaaatgaggagaaggcagcggaggcggagggcaagcctgtgaagctggggcctaaagaattcgcctcggccatcgatatgttcaactacttctacgctctgctccactcctggacgccgcagcttgagttcaataagtatgaacaaatggtgctggaggatttgctgaggaaaggtcatgctgaacctgctaagaagattggggcaggagtcgaagcatttgagataggcaaccacccggtgtggaaaagtcactgcttctttgtgcgcaggactgatggatctgtggatgacttcagcttccgcaaatgtgtggacaacatactgcccctccctgaggactttaagatcggcaatggcaagaagtctggtggccaccaaaaggatggcggtggagggcgggcaggaggacgccgtggaggaggccgaggcggctggcgtggtggacggggccggggcaggaggggagggtaggttcttacttcttaactggccctgcaattttgcccagttaactataccggggttgccgtggaaacgaaggtaggttcttactattatgttggtttattatgtggtgcctgtcctaaagaccgataccaacttttttaccttgcaaccggtatatgatccacgccgagtgcttgccgcatgctgttcttagtttctgtcatttcacccgcccgtattttgtttcctgggcaatttttctgtcattggctaaacctgtaccacatatccgatacctaaaaaaactcaaatccagtcaatgacactaaacaaattttaatctcattcacgccattattaatcgtatactgatagttttggctaatttataccacactataatcctccagttttaactttgcaaaaaatcacaattcaatcaccccaatttcataacccaaattaaattcaccagataaattgcatctagacttaacatcattaaaatcaatgattcacatagccggataatcctctttcccatacatacataaattcaatggataacatttgtttat

SEQ ID NO: 714 - DNA, 4504 bp, Zea Mays
caaaaaaagaaaaaagggggccaaatttcatacgatttctgccctgttcttcggcgttttcgctactcacccccagcgagcccctgtacgaccagccctcccgccggcgccgccgctcgccgcgggccatgtacaagctcagtggccgtggtggtgggcgcggcggcagcggcgcggcaaagcgcccgctgcccccccacggccgcggccggggcggcgcctcctctatcggcgggatggccgggccgccccgcggtcgcgccggcgccggcgctgcaacgcagccggcggggcgcgacgaggcgttccgcctcgagtccagcgggccgccagcctttgcggctataatacggctgacgcccgacctcgtcgacgagatccggcgggcggaggaggccggtggaggcgcccgcatcaagttcaaccctaacatgtacaactcgtcggagaacgttatagatgttagtggaaaagaattcaaattcacctgggcatctgaacgtggcgaattgtgtgatatttatgaagaacgtcagagtggagaggatggaaatgggttgcttctggagtgtggctctgcttggcgcaaggtgaatgtgcaacgcattttggatgaatcaacaaagaaccttgtgaaaatgcgctcagaggaggctgaacgtctctcaaaatctcgaaaatcaatcgtgctggaccctgccaatccatctgtcaagagtcaggccaagtcaatggctgcagcagctgtagaaggcaatccacggaggatgcactggaagcagaagaatgaattttttaagaagaataaagctgctgttatcaccccaaccaaatcagtttcgaaggtcaagttatctaacaatattcccaaagggaatatctcgagttcacctgcaccttctcctgaacaacctggagcaagcaatccttcatttcctgttggatcagatgcaaataatgaagtcacaacaccttttgatttgaacaaaggggaaaacagtaaacatgagaaatcgactgcaagtaagatgtctaacaaaggtataaatcgccgtgcaagttctcatgctgcaaatgtggataataatacaaaagaagtgcgaagctacttgatatctgtgctctcaaaaaatccaaaaggaatgggcctaaaggccttggagaaagttgctgcagatgcatttccaaatgcatcaaagaaaatagagagcatcgtcaagaatattgcaaattaccaagggcctgagaggtatgttctcaaaccagggttggaggtagaaagctctaaaaggcatgcatctgaaggagtaagatccatcagcgagaatattgaggaatctgctccaagcctaaagattgatgatcctgatatatgtgagaggattgacattgtgggctccccacttgctgtaacagatggaaaactcagtaatgatagtgaaggtaaggctggaacttccagtgacagtggaagtgacagcgatagtgatagtgacagcagtgacagtggaagtgatagtgagagccaaagcagaagtgctgcggaaactggtagtgggagtagcagtgatagtgacagtgatgcctcatcaagcagcaaggaaggatctgatgcaattgttgatattacaagtgatgatgacaaagcaaatacagcacacacaaaagtagtagatgaccttaatttgtcttcatcaccaagagatttgacaagacttaatgttgacgatgaacaaattgacattggaacaaatctggactacaggagtgcatcaccccatattgatctgaacaattttaatactggcaatgatgatgcagcagcagagggctttagttctggcaacctgaacaagccatctgaaatgccgggaagcaagaacatgacaaacaccagaatggattctatcggagttgataacaagcacaatgaaatgtctttcgtggacaaccttttcgatgattccatgagagcagccagtgagaactcacccaagggggaagctggtcaattgacagtgcagcatggcaataagagaaaatcaacatctaaggatgaatcaaaactcgtcccagtgaatattgccaaacccaaattaaaaaggtcttctggtagtgagaactccacagcaaagcctgagagtgccaaaaaggccaaacctgacgtaacatcaccaataggttctttatcagaacacaaaagaagtttaccccctgaaaagcataccaatgataggttgaacaaggagacggggaatgttagccgtgatgcttcacgagatagcagtcctgccatgaaaggaagaccttcagctcctggaaatttacagaggatagatcagagcccaaatttacctatcccaacaatgcattctgagggaacaaaaggaaatgctgttaaatcaagttcaaagaaaaaatcagataagatgcagaaaccatggcatggtattgatggtgactttggctcatgttattcacatggtgtagatcaccatgccaattttgatggctctgatgattcttccacaagaaaaaggagtagacatgagaatcctcttattgatgataaaatgcttaagcattcgaaggacactaatgctaatataaattccatgaatttaaccaaaagttccagagaaattgttgtgcctgatgaggtaactgcttttcctgaatctaatgaaagtaatggtgagccatcaaattcacaaagagataatgttgagaaatcaccttatggtaaaaaaaagctccagagagagctttctgatcttgagttgggtgaacttcgcgagacttctttggaaaatgatgatggaaggataaggaagcaatttgagagaaatagttcctccaagtcgcttgatgctaaactaactggtgtaaataacttctaccccagtataaatgacaggaagactcctgtaaccgtctttcatgataagaggaaaccttcacctcaagaatatggaaatagaggccatgtaaaccaggaagggtttcagaggaaggcagcagtgtacgcgtttgatgataataggcctcaacaaagagagaattttccagagagcctgcatttgccaaagattgataattcagattctgagaacataatgtatccagataggtcaggagaaaaaacaagcaaaagggaaactaggatggcacatagtggaatgctagagtatgctgatatgcagaagaagaaagcaacctcaaggcttccacagaacggtactaataatgtcatagtgtctcgaatgcagaaatcaatatccacatcagataatgaggaaagaagtagaaacaactctttgattgagacaaagacaggtagaaagagaagagacagttcttcagatgatgataatttatttttctccaagtatgataaagatgcaccagaactcaaaggtccaataaaagatttctcacaattcgaagattatgtgcaggagtacaatgagaagtatggagtctattcttacttgagcagtcagatagacaaaactaagtcagattttttaagggttcaggatgatctcaatgttgcgaaagaaagagacaaggaacagtattataacacggtggaaagactcagagacatgtatcatgaatcaggagcaaggcataaattgatgaagaaggtcttccttttgcttcatgaggaactgcagattattaagcaaagaattaaagatttttcagaggcctattgaaatgagtcactcataacatgtcacttgcaattgtgtttcggagactgtcgctcatcgtaaggctgataatgtctgggcatgagcattatgctttgcctttgtagaagtttgcttgtcttggaaagattcagtcaatggcgcatatcacaggaaacctgagagactccgtgatttctggaatcacatcgtgctgaatttgatagtaatcacggtgaagtggaggcaaggacagttcaaatatcaatgacgttgttggacacctccgcagccccgcacgggggagatagcagaagaaatgattcatcactcagggaagaggtaatgtcgggaagcgaggaggccttacctcagcagttttgcagctagtttggcactgaactgtaaccgggcggttctctttgtagatgttctgtatcttttacccccacccccagtgaagggcgcgatctctccttccctggcattgtacatcactttgtattagtgtgattcatgtcaaactgaagtaagttgctagctgtgtacatatatatagagccggtagagaagttttgaagcgaggagagacaaatctgggacaatttctttttaacgcgtacatcaattcttcgatgttgcagttcagtttctgaaatatgcatatgctctactgtatattggaccaagcctgaagaacaattccagagcatatgaaaatttggatctttaaactggctctcaaactatttagattctcaaaataggtaggtattcctcaacagatcctgtaaaccatgttctct

SEQ ID NO: 715 - DNA, 4321 bp, Zea Mays
gccctcccgccggcgccgccgctcgccgcgggccatgtacaagctcagtggccgtggtggtgggcgcggcggcagcggcgcggcaaagcgcccgctgcccccccacggccgcggccggggcggcgcctcctctatcggcgggatggccgggccgccccgcggtcgcgccggcgccggcgctgcaacgcagccggcggggcgcgacgaggcgttccgcctcgagtccagcgggccgccagcctttgcggctataatacggctgacgcccgacctcgtcgacgagatccggcgggcggaggaggccggtggaggcgcccgcatcaagttcaaccctaacatgtacaactcgtcggagaacgttatagatgttagtggaaaagaattcaaattcacctgggcatctgaacgtggcgaattgtgtgatatttatgaagaacgtcagagtggagaggatggaaatgggttgcttctggagtgtggctctgcttggcgcaagatcaatcgtgctggaccctgccaatccatctgtcaagagtcaggccaagtcaatggctgcagcagctgtagaaggcaatccacggaggatgcactggaagcagaagaatgaattttttaagaagaataaagctgctgttatcaccccaaccaaatcagtttcgaaggtcaagttatctaacaatattcccaaagggaatatctcgagttcacctgcaccttctcctgaacaacctggagcaagcaatccttcatttcctgttggatcagatgcaaataatgaagtcacaacaccttttgatttgaacaaaggggaaaacagtaaacatgagaaatcgactgcaagtaagatgtctaacaaaggtataaatcgccgtgcaagttctcatgctgcaaatgtggataataatacaaaagaagtgcgaagctacttgatatctgtgctctcaaaaaatccaaaaggaatgggcctaaaggccttggagaaagttgctgcagatgcatttccaaatgcatcaaagaaaatagagagcatcgtcaagaatattgcaaattaccaagggcctgagaggtatgttctcaaaccagggttggaggtagaaagctctaaaaggcatgcatctgaaggagtaagatccatcagcgagaatattgaggaatctgctccaagcctaaagattgatgatcctgatatatgtgagaggattgacattgtgggctccccacttgctgtaacagatggaaaactcagtaatgatagtgaaggtaaggctggaacttccagtgacagtggaagtgacagcgatagtgatagtgacagcagtgacagtggaagtgatagtgagagccaaagcagaagtgctgcggaaactggtagtgggagtagcagtgatagtgacagtgatgcctcatcaagcagcaaggaaggatctgatgcaattgttgatattacaagtgatgatgacaaagcaaatacagcacacacaaaagtagtagatgaccttaatttgtcttcatcaccaagagatttgacaagacttaatgttgacgatgaacaaattgacattggaacaaatctggactacaggagtgcatcaccccatattgatctgaacaattttaatactggcaatgatgatgcagcagcagagggctttagttctggcaacctgaacaagccatctgaaatgccgggaagcaagaacatgacaaacaccagaatggattctatcggagttgataacaagcacaatgaaatgtctttcgtggacaaccttttcgatgattccatgagagcagccagtgagaactcacccaagggggaagctggtcaattgacagtgcagcatggcaataagagaaaatcaacatctaaggatgaatcaaaactcgtcccagtgaatattgccaaacccaaattaaaaaggtcttctggtagtgagaactccacagcaaagcctgagagtgccaaaaaggccaaacctgacgtaacatcaccaataggttctttatcagaacacaaaagaagtttaccccctgaaaagcataccaatgataggttgaacaaggagacggggaatgttagccgtgatgcttcacgagatagcagtcctgccatgaaaggaagaccttcagctcctggaaatttacagaggatagatcagagcccaaatttacctatcccaacaatgcattctgagggaacaaaaggaaatgctgttaaatcaagttcaaagaaaaaatcagataagatgcagaaaccatggcatggtattgatggtgactttggctcatgttattcacatggtgtagatcaccatgccaattttgatggctctgatgattcttccacaagaaaaaggagtagacatgagaatcctcttattgatgataaaatgcttaagcattcgaaggacactaatgctaatataaattccatgaatttaaccaaaagttccagagaaattgttgtgcctgatgaggtaactgcttttcctgaatctaatgaaagtaatggtgagccatcaaattcacaaagagataatgttgagaaatcaccttatggtaaaaaaaagctccagagagagctttctgatcttgagttgggtgaacttcgcgagacttctttggaaaatgatgatggaaggataaggaagcaatttgagagaaatagttcctccaagtcgcttgatgctaaactaactggtgtaaataacttctaccccagtataaatgacaggaagactcctgtaaccgtctttcatgataagaggaaaccttcacctcaagaatatggaaatagaggccatgtaaaccaggaagggtttcagaggaaggcagcagtgtacgcgtttgatgataataggcctcaacaaagagagaattttccagagagcctgcatttgccaaagattgataattcagattctgagaacataatgtatccagataggtcaggagaaaaaacaagcaaaagggaaactaggatggcacatagtggaatgctagagtatgctgatatgcagaagaagaaagcaacctcaaggcttccacagaacggtactaataatgtcatagtgtctcgaatgcagaaatcaatatccacatcagataatgaggaaagaagtagaaacaactctttgattgagacaaagacaggtagaaagagaagagacagttcttcagatgatgataatttatttttctccaagtatgataaagatgcaccagaactcaaaggtccaataaaagatttctcacaattcgaagattatgtgcaggagtacaatgagaagtatggagtctattcttacttgagcagtcagatagacaaaactaagtcagattttttaagggttcaggatgatctcaatgttgcgaaagaaagagacaaggaacagtattataacacggtggaaagactcagagacatgtatcatgaatcaggagcaaggcataaattgatgaagaaggtcttccttttgcttcatgaggaactgcagattattaagcaaagaattaaagatttttcagaggcctattgaaatgagtcactcataacatgtcacttgcaattgtgtttcggagactgtcgctcatcgtaaggctgataatgtctgggcatgagcattatgctttgcctttgtagaagtttgcttgtcttggaaagattcagtcaatggcgcatatcacaggaaacctgagagactccgtgatttctggaatcacatcgtgctgaatttgatagtaatcacggtgaagtggaggcaaggacagttcaaatatcaatgacgttgttggacacctccgcagccccgcacgggggagatagcagaagaaatgattcatcactcagggaagaggtaatgtcgggaagcgaggaggccttacctcagcagttttgcagctagtttggcactgaactgtaaccgggcggttctctttgtagatgttctgtatcttttacccccacccccagtgaagggcgcgatctctccttccctggcattgtacatcactttgtattagtgtgattcatgtcaaactgaagtaagttgctagctgtgtacatatatatagagccggtagagaagttttgaagcgaggagagacaaatctgggacaatttctttttaacgcgtacatcaattcttcgatgttgcagttcagtttctgaaatatgcatatgctctactgtatattggaccaagcctgaagaacaattccagagcatatgaaaatttggatctttaaactggctctcaaactatttagattctcaaaataggtaggtattcctcaacagatcctgtaaaccatgttctct

SEQ ID NO: 716 - DNA, 4357 bp, Zea Mays
atgtacaagctcagtggccgtggtggtgggcgcggcggcagcggcgcggcaaagcgcccgctgcccccccacggccgcggccggggcggcgcctcctctatcggcgggatggccgggccgccccgcggtcgcgccggcgccggcgctgcaacgcagccggcggggcgcgacgaggcgttccgcctcgagtccagcgggccgccagcctttgcggctataatacggctgacgcccgacctcgtcgacgagatccggcgggcggaggaggccggtggaggcgcccgcatcaagttcaaccctaacatgtacaactcgtcggagaacgttatagatgttagtggaaaagaattcaaattcacctgggcatctgaacgtggcgaattgtgtgatatttatgaagaacgtcagagtggagaggatggaaatgggttgcttctggagtgtggctctgcttggcgcaaggtgaatgtgcaacgcattttggatgaatcaacaaagaaccttgtgaaaatgcgctcagaggaggctgaacgtctctcaaaatctcgaaaatcaatcgtgctggaccctgccaatccatctgtcaagagtcaggccaagtcaatggctgcagcagctgtagaaggcaatccacggaggatgcactggaagcagaagaatgaattttttaagaagaataaagctgctgttatcaccccaaccaaatcagtttcgaaggtcaagttatctaacaatattcccaaagggaatatctcgagttcacctgcaccttctcctgaacaacctggagcaagcaatccttcatttcctgttggatcagatgcaaataatgaagtcacaacaccttttgatttgaacaaaggggaaaacagtaaacatgagaaatcgactgcaagtaagatgtctaacaaaggtataaatcgccgtgcaagttctcatgctgcaaatgtggataataatacaaaagaagtgcgaagctacttgatatctgtgctctcaaaaaatccaaaaggaatgggcctaaaggccttggagaaagttgctgcagatgcatttccaaatgcatcaaagaaaatagagagcatcgtcaagaatattgcaaattaccaagggcctgagaggtatgttctcaaaccagggttggaggtagaaagctctaaaaggcatgcatctgaaggagtaagatccatcagcgagaatattgaggaatctgctccaagcctaaagattgatgatcctgatatatgtgagaggattgacattgtgggctccccacttgctgtaacagatggaaaactcagtaatgatagtgaaggtaaggctggaacttccagtgacagtggaagtgacagcgatagtgatagtgacagcagtgacagtggaagtgatagtgagagccaaagcagaagtgctgcggaaactggtagtgggagtagcagtgatagtgacagtgatgcctcatcaagcagcaaggaaggatctgatgcaattgttgatattacaagtgatgatgacaaagcaaatacagcacacacaaaagtagtagatgaccttaatttgtcttcatcaccaagagatttgacaagacttaatgttgacgatgaacaaattgacattggaacaaatctggactacaggagtgcatcaccccatattgatctgaacaattttaatactggcaatgatgatgcagcagcagagggctttagttctggcaacctgaacaagccatctgaaatgccgggaagcaagaacatgacaaacaccagaatggattctatcggagttgataacaagcacaatgaaatgtctttcgtggacaaccttttcgatgattccatgagagcagccagtgagaactcacccaagggggaagctggtcaattgacagtgcagcatggcaataagagaaaatcaacatctaaggatgaatcaaaactcgtcccagtgaatattgccaaacccaaattaaaaaggtcttctggtagtgagaactccacagcaaagcctgagagtgccaaaaaggccaaacctgacgtaacatcaccaataggttctttatcagaacacaaaagaagtttaccccctgaaaagcataccaatgataggttgaacaaggagacggggaatgttagccgtgatgcttcacgagatagcagtcctgccatgaaaggaagaccttcagctcctggaaatttacagaggatagatcagagcccaaatttacctatcccaacaatgcattctgagggaacaaaaggaaatgctgttaaatcaagttcaaagaaaaaatcagataagatgcagaaaccatggcatggtattgatggtgactttggctcatgttattcacatggtgtagatcaccatgccaattttgatggctctgatgattcttccacaagaaaaaggagtagacatgagaatcctcttattgatgataaaatgcttaagcattcgaaggacactaatgctaatataaattccatgaatttaaccaaaagttccagagaaattgttgtgcctgatgaggtaactgcttttcctgaatctaatgaaagtaatggtgagccatcaaattcacaaagagataatgttgagaaatcaccttatggtaaaaaaaagctccagagagagctttctgatcttgagttgggtgaacttcgcgagacttctttggaaaatgatgatggaaggataaggaagcaatttgagagaaatagttcctccaagtcgcttgatgctaaactaactggtgtaaataacttctaccccagtataaatgacaggaagactcctgtaaccgtctttcatgataagaggaaaccttcacctcaagaatatggaaatagaggccatgtaaaccaggaagggtttcagaggaaggcagcagtgtacgcgtttgatgataataggcctcaacaaagagagaattttccagagagcctgcatttgccaaagattgataattcagattctgagaacataatgtatccagataggtcaggagaaaaaacaagcaaaagggaaactaggatggcacatagtggaatgctagagtatgctgatatgcagaagaagaaagcaacctcaaggcttccacagaacggtactaataatgtcatagtgtctcgaatgcagaaatcaatatccacatcagataatgaggaaagaagtagaaacaactctttgattgagacaaagacaggtagaaagagaagagacagttcttcagatgatgataatttatttttctccaagtatgataaagatgcaccagaactcaaaggtccaataaaagatttctcacagagtacaatgagaagtatggagtctattcttacttgagcagtcagatagacaaaactaagtcagattttttaagggttcaggatgatctcaatgttgcgaaagaaagagacaaggaacagtattataacacggtggaaagactcagagacatgtatcatgaatcaggagcaaggcataaattgatgaagaaggtcttccttttgcttcatgaggaactgcagattattaagcaaagaattaaagatttttcagaggcctattgaaatgagtcactcataacatgtcacttgcaattgtgtttcggagactgtcgctcatcgtaaggctgataatgtctgggcatgagcattatgctttgcctttgtagaagtttgcttgtcttggaaagattcagtcaatggcgcatatcacaggaaacctgagagactccgtgatttctggaatcacatcgtgctgaatttgatagtaatcacggtgaagtggaggcaaggacagttcaaatatcaatgacgttgttggacacctccgcagccccgcacgggggagatagcagaagaaatgattcatcactcagggaagaggtaatgtcgggaagcgaggaggccttacctcagcagttttgcagctagtttggcactgaactgtaaccgggcggttctctttgtagatgttctgtatcttttacccccacccccagtgaagggcgcgatctctccttccctggcattgtacatcactttgtattagtgtgattcatgtcaaactgaagtaagttgctagctgtgtacatatatatagagccggtagagaagttttgaagcgaggagagacaaatctgggacaatttctttttaacgcgtacatcaattcttcgatgttgcagttcagtttctgaaatatgcatatgctctactgtatattggaccaagcctgaagaacaattccagagcatatgaaaatttggatctttaaactggctctcaaactatttagattctcaaaataggtaggtattcctcaacagatcctgtaaaccatgttctct

SEQ ID NO: 717 - DNA, 4067 bp, Zea Mays
attacttctgaaacaacaaaggatacacatccattttgtcttgaacgtccagcctgaactgaaatcgtggaggctgagtgaaggatgctttaaagaatttcaaggttatagatgttagtggaaaagaattcaaattcacctgggcatctgaacgtggcgaattgtgtgatatttatgaagaacgtcagagtggagaggatggaaatgggttgcttctggagtgtggctctgcttggcgcaagatcaatcgtgctggaccctgccaatccatctgtcaagagtcaggccaagtcaatggctgcagcagctgtagaaggcaatccacggaggatgcactggaagcagaagaatgaattttttaagaagaataaagctgctgttatcaccccaaccaaatcagtttcgaaggtcaagttatctaacaatattcccaaagggaatatctcgagttcacctgcaccttctcctgaacaacctggagcaagcaatccttcatttcctgttggatcagatgcaaataatgaagtcacaacaccttttgatttgaacaaaggggaaaacagtaaacatgagaaatcgactgcaagtaagatgtctaacaaaggtataaatcgccgtgcaagttctcatgctgcaaatgtggataataatacaaaagaagtgcgaagctacttgatatctgtgctctcaaaaaatccaaaaggaatgggcctaaaggccttggagaaagttgctgcagatgcatttccaaatgcatcaaagaaaatagagagcatcgtcaagaatattgcaaattaccaagggcctgagaggtatgttctcaaaccagggttggaggtagaaagctctaaaaggcatgcatctgaaggagtaagatccatcagcgagaatattgaggaatctgctccaagcctaaagattgatgatcctgatatatgtgagaggattgacattgtgggctccccacttgctgtaacagatggaaaactcagtaatgatagtgaaggtaaggctggaacttccagtgacagtggaagtgacagcgatagtgatagtgacagcagtgacagtggaagtgatagtgagagccaaagcagaagtgctgcggaaactggtagtgggagtagcagtgatagtgacagtgatgcctcatcaagcagcaaggaaggatctgatgcaattgttgatattacaagtgatgatgacaaagcaaatacagcacacacaaaagtagtagatgaccttaatttgtcttcatcaccaagagatttgacaagacttaatgttgacgatgaacaaattgacattggaacaaatctggactacaggagtgcatcaccccatattgatctgaacaattttaatactggcaatgatgatgcagcagcagagggctttagttctggcaacctgaacaagccatctgaaatgccgggaagcaagaacatgacaaacaccagaatggattctatcggagttgataacaagcacaatgaaatgtctttcgtggacaaccttttcgatgattccatgagagcagccagtgagaactcacccaagggggaagctggtcaattgacagtgcagcatggcaataagagaaaatcaacatctaaggatgaatcaaaactcgtcccagtgaatattgccaaacccaaattaaaaaggtcttctggtagtgagaactccacagcaaagcctgagagtgccaaaaaggccaaacctgacgtaacatcaccaataggttctttatcagaacacaaaagaagtttaccccctgaaaagcataccaatgataggttgaacaaggagacggggaatgttagccgtgatgcttcacgagatagcagtcctgccatgaaaggaagaccttcagctcctggaaatttacagaggatagatcagagcccaaatttacctatcccaacaatgcattctgagggaacaaaaggaaatgctgttaaatcaagttcaaagaaaaaatcagataagatgcagaaaccatggcatggtattgatggtgactttggctcatgttattcacatggtgtagatcaccatgccaattttgatggctctgatgattcttccacaagaaaaaggagtagacatgagaatcctcttattgatgataaaatgcttaagcattcgaaggacactaatgctaatataaattccatgaatttaaccaaaagttccagagaaattgttgtgcctgatgaggtaactgcttttcctgaatctaatgaaagtaatggtgagccatcaaattcacaaagagataatgttgagaaatcaccttatggtaaaaaaaagctccagagagagctttctgatcttgagttgggtgaacttcgcgagacttctttggaaaatgatgatggaaggataaggaagcaatttgagagaaatagttcctccaagtcgcttgatgctaaactaactggtgtaaataacttctaccccagtataaatgacaggaagactcctgtaaccgtctttcatgataagaggaaaccttcacctcaagaatatggaaatagaggccatgtaaaccaggaagggtttcagaggaaggcagcagtgtacgcgtttgatgataataggcctcaacaaagagagaattttccagagagcctgcatttgccaaagattgataattcagattctgagaacataatgtatccagataggtcaggagaaaaaacaagcaaaagggaaactaggatggcacatagtggaatgctagagtatgctgatatgcagaagaagaaagcaacctcaaggcttccacagaacggtactaataatgtcatagtgtctcgaatgcagaaatcaatatccacatcagataatgaggaaagaagtagaaacaactctttgattgagacaaagacaggtagaaagagaagagacagttcttcagatgatgataatttatttttctccaagtatgataaagatgcaccagaactcaaaggtccaataaaagatttctcacaattcgaagattatgtgcaggagtacaatgagaagtatggagtctattcttacttgagcagtcagatagacaaaactaagtcagattttttaagggttcaggatgatctcaatgttgcgaaagaaagagacaaggaacagtattataacacggtggaaagactcagagacatgtatcatgaatcaggagcaaggcataaattgatgaagaaggtcttccttttgcttcatgaggaactgcagattattaagcaaagaattaaagatttttcagaggcctattgaaatgagtcactcataacatgtcacttgcaattgtgtttcggagactgtcgctcatcgtaaggctgataatgtctgggcatgagcattatgctttgcctttgtagaagtttgcttgtcttggaaagattcagtcaatggcgcatatcacaggaaacctgagagactccgtgatttctggaatcacatcgtgctgaatttgatagtaatcacggtgaagtggaggcaaggacagttcaaatatcaatgacgttgttggacacctccgcagccccgcacgggggagatagcagaagaaatgattcatcactcagggaagaggtaatgtcgggaagcgaggaggccttacctcagcagttttgcagctagtttggcactgaactgtaaccgggcggttctctttgtagatgttctgtatcttttacccccacccccagtgaagggcgcgatctctccttccctggcattgtacatcactttgtattagtgtgattcatgtcaaactgaagtaagttgctagctgtgtacatatatatagagccggtagagaagttttgaagcgaggagagacaaatctgggacaatttctttttaacgcgtacatcaattcttcgatgttgcagttcagtttctgaaatatgcatatgctctactgtatattggaccaagcctgaagaacaattccagagcatatgaaaatttggatctttaaactggctctcaaactatttagattctcaaaataggtaggtattcctcaacagatcctgtaaaccatgttctct

SEQ ID NO: 718 - DNA, 4098 bp, Zea Mays
ctgaaatcgtggaggctgagtgaaggatgctttaaagaatttcaaggttatagatgttagtggaaaagaattcaaattcacctgggcatctgaacgtggcgaattgtgtgatatttatgaagaacgtcagagtggagaggatggaaatgggttgcttctggagtgtggctctgcttggcgcaaggtgaatgtgcaacgcattttggatgaatcaacaaagaaccttgtgaaaatgcgctcagaggaggctgaacgtctctcaaaatctcgaaaatcaatcgtgctggaccctgccaatccatctgtcaagagtcaggccaagtcaatggctgcagcagctgtagaaggcaatccacggaggatgcactggaagcagaagaatgaattttttaagaagaataaagctgctgttatcaccccaaccaaatcagtttcgaaggtcaagttatctaacaatattcccaaagggaatatctcgagttcacctgcaccttctcctgaacaacctggagcaagcaatccttcatttcctgttggatcagatgcaaataatgaagtcacaacaccttttgatttgaacaaaggggaaaacagtaaacatgagaaatcgactgcaagtaagatgtctaacaaaggtataaatcgccgtgcaagttctcatgctgcaaatgtggataataatacaaaagaagtgcgaagctacttgatatctgtgctctcaaaaaatccaaaaggaatgggcctaaaggccttggagaaagttgctgcagatgcatttccaaatgcatcaaagaaaatagagagcatcgtcaagaatattgcaaattaccaagggcctgagaggtatgttctcaaaccagggttggaggtagaaagctctaaaaggcatgcatctgaaggagtaagatccatcagcgagaatattgaggaatctgctccaagcctaaagattgatgatcctgatatatgtgagaggattgacattgtgggctccccacttgctgtaacagatggaaaactcagtaatgatagtgaaggtaaggctggaacttccagtgacagtggaagtgacagcgatagtgatagtgacagcagtgacagtggaagtgatagtgagagccaaagcagaagtgctgcggaaactggtagtgggagtagcagtgatagtgacagtgatgcctcatcaagcagcaaggaaggatctgatgcaattgttgatattacaagtgatgatgacaaagcaaatacagcacacacaaaagtagtagatgaccttaatttgtcttcatcaccaagagatttgacaagacttaatgttgacgatgaacaaattgacattggaacaaatctggactacaggagtgcatcaccccatattgatctgaacaattttaatactggcaatgatgatgcagcagcagagggctttagttctggcaacctgaacaagccatctgaaatgccgggaagcaagaacatgacaaacaccagaatggattctatcggagttgataacaagcacaatgaaatgtctttcgtggacaaccttttcgatgattccatgagagcagccagtgagaactcacccaagggggaagctggtcaattgacagtgcagcatggcaataagagaaaatcaacatctaaggatgaatcaaaactcgtcccagtgaatattgccaaacccaaattaaaaaggtcttctggtagtgagaactccacagcaaagcctgagagtgccaaaaaggccaaacctgacgtaacatcaccaataggttctttatcagaacacaaaagaagtttaccccctgaaaagcataccaatgataggttgaacaaggagacggggaatgttagccgtgatgcttcacgagatagcagtcctgccatgaaaggaagaccttcagctcctggaaatttacagaggatagatcagagcccaaatttacctatcccaacaatgcattctgagggaacaaaaggaaatgctgttaaatcaagttcaaagaaaaaatcagataagatgcagaaaccatggcatggtattgatggtgactttggctcatgttattcacatggtgtagatcaccatgccaattttgatggctctgatgattcttccacaagaaaaaggagtagacatgagaatcctcttattgatgataaaatgcttaagcattcgaaggacactaatgctaatataaattccatgaatttaaccaaaagttccagagaaattgttgtgcctgatgaggtaactgcttttcctgaatctaatgaaagtaatggtgagccatcaaattcacaaagagataatgttgagaaatcaccttatggtaaaaaaaagctccagagagagctttctgatcttgagttgggtgaacttcgcgagacttctttggaaaatgatgatggaaggataaggaagcaatttgagagaaatagttcctccaagtcgcttgatgctaaactaactggtgtaaataacttctaccccagtataaatgacaggaagactcctgtaaccgtctttcatgataagaggaaaccttcacctcaagaatatggaaatagaggccatgtaaaccaggaagggtttcagaggaaggcagcagtgtacgcgtttgatgataataggcctcaacaaagagagaattttccagagagcctgcatttgccaaagattgataattcagattctgagaacataatgtatccagataggtcaggagaaaaaacaagcaaaagggaaactaggatggcacatagtggaatgctagagtatgctgatatgcagaagaagaaagcaacctcaaggcttccacagaacggtactaataatgtcatagtgtctcgaatgcagaaatcaatatccacatcagataatgaggaaagaagtagaaacaactctttgattgagacaaagacaggtagaaagagaagagacagttcttcagatgatgataatttatttttctccaagtatgataaagatgcaccagaactcaaaggtccaataaaagatttctcacaattcgaagattatgtgcaggagtacaatgagaagtatggagtctattcttacttgagcagtcagatagacaaaactaagtcagattttttaagggttcaggatgatctcaatgttgcgaaagaaagagacaaggaacagtattataacacggtggaaagactcagagacatgtatcatgaatcaggagcaaggcataaattgatgaagaaggtcttccttttgcttcatgaggaactgcagattattaagcaaagaattaaagatttttcagaggcctattgaaatgagtcactcataacatgtcacttgcaattgtgtttcggagactgtcgctcatcgtaaggctgataatgtctgggcatgagcattatgctttgcctttgtagaagtttgcttgtcttggaaagattcagtcaatggcgcatatcacaggaaacctgagagactccgtgatttctggaatcacatcgtgctgaatttgatagtaatcacggtgaagtggaggcaaggacagttcaaatatcaatgacgttgttggacacctccgcagccccgcacgggggagatagcagaagaaatgattcatcactcagggaagaggtaatgtcgggaagcgaggaggccttacctcagcagttttgcagctagtttggcactgaactgtaaccgggcggttctctttgtagatgttctgtatcttttacccccacccccagtgaagggcgcgatctctccttccctggcattgtacatcactttgtattagtgtgattcatgtcaaactgaagtaagttgctagctgtgtacatatatatagagccggtagagaagttttgaagcgaggagagacaaatctgggacaatttctttttaacgcgtacatcaattcttcgatgttgcagttcagtttctgaaatatgcatatgctctactgtatattggaccaagcctgaagaacaattccagagcatatgaaaatttggatctttaaactggctctcaaactatttagattctcaaaataggtaggtattcctcaacagatcctgtaaaccatgttctct

SEQ ID NO: 719 - DNA, 811 bp, Zea Mays
ccaaacatgtcacttgcaattgtgtttcggagactgtcgctcatcgtaaggctgataatgtctgggcatgagcattatgctttgcctttgtagaagtttgcttgtcttggaaagattcagtcaatggcgcatatcacaggaaacctgagagactccgtgatttctggaatcacatcgtgctgaatttgatagtaatcacggtgaagtggaggcaaggacagttcaaatatcaatggcgttgttggacacaggcaaggacagttcaaatatcaatgacgttgttggacacctccgcagccccgcacgggggagatagcagaagaaatgattcatcactcagggaagaggtaatgtcgggaagcgaggaggccttacctcagcagttttgcagctagtttggcactgaactgtaaccgggcggttctctttgtagatgttctgtatcttttacccccacccccagtgaagggcgcgatctctccttccctggcattgtacatcactttgtattagtgtgattcatgtcaaactgaagtaagttgctagctgtgtacatatatatagagccggtagagaagttttgaagcgaggagagacaaatctgggacaatttctttttaacgcgtacatcaattcttcgatgttgcagttcagtttctgaaatatgcatatgctctactgtatattggaccaagcctgaagaacaattccagagcatatgaaaatttggatctttaaactggctctcaaactatttagattctcaaaataggtaggtattcctcaacagatcctgtaaaccatgttctct

SEQ ID NO: 720 - DNA, 1699 bp, Zea Mays
cactcccccacttcgacccgggggcgccctctctctgtctccggaacccttccagccttctcgctcctggaacccagacctcaacccttccgtccccgaccatcgacccccgaaggacctggcggtgtccagatttccagaagcatcccccatccagcccccggcgatcgtgcggaacctggcggctggggacgcgggagaagcggcgagggctagctggagatggacacggcggagaagatgcggtggcccttttcggacggcagcgtcaccgatctcctggacgcccgcagcctccacggctcccccgacattaagaaaaaagcacagtttcattcttctctagtgcaaaagcttgctttggaaaaggagatggagggtcatgttggttgcgtgaatgctatcgcgtggaactcaagtggttcgcttcttgtatcaggatcagatgacactagaattaacctctggaattataataatcgagagctggtgcatgatattgacactggccattctgcaaatatcttttgcaccaagtttgtccctgaaacatgtgatgaagtagtagtttctggagcaggagatgcagaggttcgtgttttcaatatgtctcgattaagtggcagaaggcctagagaaatttctatggaaccaacaatggtttaccagtgtcactcaaaaagggtcaagaaactagctgttgaacttggcaatcctaacgtagtgtggagtgcaagcgaggatggtactctgagacaacatgattttcgggagtgtagttcctgtcctcgtgcaggatccgctaatcaggaatgtcacaatgtgcttcttgatctacggtgcggagcaaagaagtctttagccgatttacccaaacatccattggcactgaagtcttgtgacattagctctgtttgtccccatcaaatcattgtcggtgggagtgatgcatttgctaggctgtatgataggagaatgcttccaccattgagctcgtgccaaaccaaaacgaagccgccaccgtgcgttaaaatgttctgcccattgcatcttgctaacagtaagaagacatatttgcaccttacacatgttgcattcagcccaaatgggaaggaggttcttttaagttacagtggtgaacatgtttatctgtttgatgttgacccagataatctgagttcagttagatacacagcagactatgtacgggaacaattatttgtacccccttttcacaaagtaccagcaaaagaacatgcaaaagaaaagaagacttcagtaaatacagctccaagaaatttgtctaggatatgtgcaagaaatttatgcaagttgcaacaagatctctggagataggcaagaacttaatgcacgggattgaagcatgcagtgaagttcttgaatcaacggaaccagatattgatgatgacatgaggcatgggtttttgtgtactcgagcagcattgtacctaaagaggaagtggaaaaatgatgtttacatggcgattcgggattgtaatagagcgcggaagattgatgccacatcatatcaagcgcacctacatatggctgaggcactattgcaggaagactgaaggaggcatctgagtatgcagaggcagcaaataggcttcttccccctcattgtcaattgagccagcaggtggatgatttcaagcaacgcgttgcttcaggtgag

SEQ ID NO: 721 - DNA, 1703 bp, Zea Mays
cactcccccacttcgacccgggggcgccctctctctgtctccggaacccttccagccttctcgctcctggaacccagacctcaacccttccgtccccgaccatcgacccccgaaggacctggcggtgtccagatttccagaagcatcccccatccagcccccggcgatcgtgcggaacctggcggctggggacgcgggagaagcggcgagggctagctggagatggacacggcggagaagatgcggtggcccttttcggacggcagcgtcaccgatctcctggacgcccgcagcctccacggctcccccgacattaagaaaaaagcacagtttcattcttctctagtgcaaaagcttgctttggaaaaggagatggagggtcatgttggttgcgtgaatgctatcgcgtggaactcaagtggttcgcttcttgtatcaggatcagatgacactagaattaacctctggaattataataatcgagagctggtgcatgatattgacactggccattctgcaaatatcttttgcaccaagtttgtccctgaaacatgtgatgaagtagtagtttctggagcaggagatgcagaggttcgtgttttcaatatgtctcgattaagtggcagaaggcctagagaaatttctatggaaccaacaatggtttaccagtgtcactcaaaaagggtcaagaaactagctgttgaacttggcaatcctaacgtagtgtggagtgcaagcgaggatggtactctgagacaacatgattttcgggagtgtagttcctgtcctcgtgcaggatccgctaatcaggaatgtcacaatgtgcttcttgatctacggtgcggagcaaagaagtctttagccgatttacccaaacatccattggcactgaagtcttgtgacattagctctgtttgtccccatcaaatcattgtcggtgggagtgatgcatttgctaggctgtatgataggagaatgcttccaccattgagctcgtgccaaaccaaaacgaagccgccaccgtgcgttaaaatgttctgcccattgcatcttgctaacagtaagaagacatatttgcaccttacacatgttgcattcagcccaaatgggaaggaggttcttttaagttacagtggtgaacatgtttatctgtttgatgttgacccagataatctgagttcagttagatacacagcagactatgtacgggaacaattatttgtacccccttttcacaaagtaccagcaaaagaacatgcaaaagaaaagaagacttcagtaaatacagctccaagaaatttgtctagggtagatatgtgcaagaaatttatgcaagttgcaacaagatctctggagataggcaagaacttaatgcacgggattgaagcatgcagtgaagttcttgaatcaacggaaccagatattgatgatgacatgaggcatgggtttttgtgtactcgagcagcattgtacctaaagaggaagtggaaaaatgatgtttacatggcgattcgggattgtaatagagcgcggaagattgatgccacatcatatcaagcgcacctacatatggctgaggcactattgcaggaagactgaaggaggcatctgagtatgcagaggcagcaaataggcttcttccccctcattgtcaattgagccagcaggtggatgatttcaagcaacgcgttgcttcaggtgag

SEQ ID NO: 722 - DNA, 1652 bp, Zea Mays
cactcccccacttcgacccgggggcgccctctctctgtctccggaacccttccagccttctcgctcctggaacccagacctcaacccttccgtccccgaccatcgacccccgaaggacctggcggtgtccagatttccagaagcatcccccatccagcccccggcgatcgtgcggaacctggcggctggggacgcgggagaagcggcgagggctagctggagatggacacggcggagaagatgcggtggcccttttcggacggcagcgtcaccgatctcctggacgcccgcagcctccacggctcccccgacattaagaaaaaagcacagtttcattcttctctagtgcaaaagcttgctttggaaaaggagatggagggtcatgttggttgcgtgaatgctatcgcgtggaactcaagtggttcgcttcttgtatcaggatcagatgacactagaattaacctctggaattataataatcgagagctggtgcatgatattgacactggccattctgcaaatatcttttgcaccaagtttgtccctgaaacatgtgatgaagtagtagtttctggagcaggagatgcagaggttcgtgttttcaatatgtctcgattaagtggcagaaggcctagagaaatttctatggaaccaacaatggtttaccagtgtcactcaaaaagggtcaagaaactagctgttgaacttggcaatcctaacgtagtgtggagtgcaagcgaggatggtactctgagacaacatgattttcgggagtgtagttcctgtcctcgtgcaggatccgctaatcaggaatgtcacaatgtgcttcttgatctacggtgcggagcaaagaagtctttagccgatttacccaaacatccattggcactgaagtcttgtgacattagctctgtttgtccccatcaaatcattgtcggtgggagtgatgcatttgctaggctgtatgataggagaatgcttccaccattgagctcgtgccaaaccaaaacgaagccgccaccgtgcgttaaaatgttctgcccattgcatcttgctaacagtaagaagacatatttgcaccttacacatgttgcattcagcccaaatgggaaggaggttcttttaagttacagtggtgaacatgtttatctgtttgatgttgacccagataatctgagttcagttagatacacagcagactatgtacgggaacaattatttgtacccccttttcacaaagtaccagcaaaagaacatgcaaaagaaaagaagacttcagtaaatacagctccaagaaatttgtctaggatatgtgcaagaaatttatgcaagttgcaacaagatctctggagataggcaagaacttaatgcacgggattgaagcatgcagtgaagttcttgaatcaacggaaccagatattgatgatgacatgaggcatgggtttttgtgtactcgagcagcattgtacctaaagagcgcggaagattgatgccacatcatatcaagcgcacctacatatggctgaggcactattgcaggaagactgaaggaggcatctgagtatgcagaggcagcaaataggcttcttccccctcattgtcaattgagccagcaggtggatgatttcaagcaacgcgttgcttcaggtgag

SEQ ID NO: 723 - DNA, 1701 bp, Zea Mays
cactcccccacttcgacccgggggcgccctctctctgtctccggaacccttccagccttctcgctcctggaacccagacctcaacccttccgtccccgaccatcgacccccgaaggacctggcggtgtccagatttccagaagcatcccccatccagcccccggcgatcgtgcggaacctggcggctggggacgcgggagaagcggcgagggctagctggagatggacacggcggagaagatgcggtggcccttttcggacggcagcgtcaccgatctcctggacgcccgcagcctccacggctcccccgacattaagaaaaaagcacagtttcattcttctctagtgcaaaagcttgctttggaaaaggagatggagggtcatgttggttgcgtgaatgctatcgcgtggaactcaagtggttcgcttcttgtatcaggatcagatgacactagaattaacctctggaattataataatcgagagctggtgcatgatattgacactggccattctgcaaatatcttttgcaccaagtttgtccctgaaacatgtgatgaagtagtagtttctggagcaggagatgcagaggttcgtgttttcaatatgtctcgattaagtggcagaaggcctagagaaatttctatggaaccaacaatggtttaccagtgtcactcaaaaagggtcaagaaactagctgttgaacttggcaatcctaacgtagtgtggagtgcaagcgaggatggtactctgagacaacatgattttcgggagtgtagttcctgtcctcgtgcaggatccgctaatcaggaatgtcacaatgtgcttcttgatctacggtgcggagcaaagaagtctttagccgatttacccaaacatccattggcactgaagtcttgtgacattagctctgtttgtccccatcaaatcattgtcggtgggagtgatgcatttgctaggctgtatgataggagaatgcttccaccattgagctcgtgccaaaccaaaacgaagccgccaccgtgcgttaaaatgttctgcccattgcatcttgctaacaaagaagacatatttgcaccttacacatgttgcattcagcccaaatgggaaggaggttcttttaagttacagtggtgaacatgtttatctgtttgatgttgacccagataatctgagttcagttagatacacagcagactatgtacgggaacaattatttgtacccccttttcacaaagtaccagcaaaagaacatgcaaaagaaaagaagacttcagtaaatacagctccaagaaatttgtctaggatatgtgcaagaaatttatgcaagttgcaacaagatctctggagataggcaagaacttaatgcacgggattgaagcatgcagtgaagttcttgaatcaacggaaccagatattgatgatgacatgaggcatgggtttttgtgtactcgagcagcattgtacctaaagaggaagtggaaaaatgatgtttacatggcgattcgggattgtaatagagcgcggaagattgatgccacatcatatcaagcgcacctacatatggctgaggcactattgcagttaggaagactgaaggaggcatctgagtatgcagaggcagcaaataggcttcttccccctcattgtcaattgagccagcaggtggatgatttcaagcaacgcgttgcttcaggtgag

SEQ ID NO: 724 - DNA, 404 bp, Zea Mays
agttacagtggtgaacatgtttatctgtttgatgttgacccagataatctgagttcagttagatacacagcagactatgtacgggaacaattatttgtacccccttttcacaaagtaccagcaaaagaacatgcaaaagaaaagaagacttcagtaaatacagctccaagaaatttgtctagggtagatatgtgcaagaaatttatgcaagttgcaacaagatctctggagataggcaagaacttaatgcacgggattgaagcatgcagtgaagttcttgaatcaacggaaccagatattgatgatgacatgaggcatgggtttttgtgtactcgagcagcattgtacctaaagagcgcggaagattgatgccacatcatatcaagcgcacctacatatggctg

SEQ ID NO: 725 - DNA, 1239 bp, Zea Mays
aatacacatggaaaattacgctcattgagtgagatattatttagacctgatgttggtggttcatcagaggaggggcgagaagattcagattatgatgatgaaatggagttggactatgagacatcagtatctggtgatgaaagccgagagaatgatcaagatatcttacggggcagattaagttaccgatttcatcaaagagaggatcaaaccaatgaacacactggtgagaatgggtcaatcgagttcgctcaaaacgatgattttgcttttcagtcagatgttgccatcgatatgaaacaaagatatgttgcacactgcaacgttggaacagatatcaaacaagccagctttcttggtgagcaaggggagttcattgccagtggaagtgatgatggtagatggtttatatgggagaaaagaacaggaaggcttattaaaatgcttgcaggggatggagctgttgtgaactgcatacagtctcatcccttcgattgtgctgttgcaacaagcggaattgataacacaataaagctttggacacccgatgcaaatgctacatctatggttgctggaccagaacttgatgtattaagtgccatagagaataaccagcggacgttatgtcggaagcgtcaaattgtactgccttttgaatttttggaacgagttcggatgcgagagttttcagaaagtttcgagtgtaaccagagctgatttactatcgctggagttgctgaggaaaagggtaatagttggaagaatgatatcatccaagctacaagcagcctatgtttgaagtagtgaaatcgcaaggccttgctacgaatagagtgtagacacacctggatagataagcaggtgtgctggtgctgaaactattacttgagatgtcaataaacattggaattatgttgtggtttggggtggtataatgattcatacgtgtgtaatgcagtgtggattcattccctttacagattgtagatataggtgaaattctgcagtaagtgaaaatcacaaatgtaaatgtgcggtattgtctctgcgtgccgcaggcaggtcatgctagtttgtggttgacgattggggcatatcttcccgtatggcttgttcaattatttctaatacatacggattcctaatacatggggattggaagattgggagggattttgatttactagggatttaaatccacccaattctcttaaacctttagtctttgtttgtttattt

SEQ ID NO: 726 - DNA, 1227 bp, Zea Mays
acacatggaaaattacgctcattgagtgagatattatttagacctgatgttggtggttcatcagaggaggggcgagaagattcagattatgatgatgaaatggagttggactatgagacatcagtatctggtgatgaaagccgagagaatgatcaagatatcttacggggcagattaagttaccgatttcatcaaagagaggatcaaaccaatgaacacactggtgagaatgggtcaatcgagttcgctcaaaacgatgattttgcttttcagtcagatgttgccatcgatatgaaacaaagatatgttgcacactgcaacgttggaacagatatcaaacaagccagctttcttggggagttcattgccagtggaagtgatgatggtagatggtttatatgggagaaaagaacaggaaggcttattaaaatgcttgcaggggatggagctgttgtgaactgcatacagtctcatcccttcgattgtgctgttgcaacaagcggaattgataacacaataaagctttggacacccgatgcaaatgctacatctatggttgctggaccagaacttgatgtattaagtgccatagagaataaccagcggacgttatgtcggaagcgtcaaattgtactgccttttgaatttttggaacgagttcggatgcgagagttttcagaaagtttcgagtgtaaccagagctgatttactatcgctggagttgctgaggaaaagggtaatagttggaagaatgatatcatccaagctacaagcagcctatgtttgaagtagtgaaatcgcaaggccttgctacgaatagagtgtagacacacctggatagataagcaggtgtgctggtgctgaaactattacttgagatgtcaataaacattggaattatgttgtggtttggggtggtataatgattcatacgtgtgtaatgcagtgtggattcattccctttacagattgtagatataggtgaaattctgcagtaagtgaaaatcacaaatgtaaatgtgcggtattgtctctgcgtgccgcaggcaggtcatgctagtttgtggttgacgattggggcatatcttcccgtatggcttgttcaattatttctaatacatacggattcctaatacatggggattggaagattgggagggattttgatttactagggatttaaatccacccaattctcttaaacctttagtctttgtttgtttattt

SEQ ID NO: 727 - DNA, 391 bp, Zea Mays
cacatggaaaattacgctcattgagtgagatattatttagacctgatgttggtggttcatcagaggaggggcgagaagattcagattatgatgatgaaatggagttggactatgagacatcagtatctggtgatgaaagccgagagaatgatcaagatatcttacggggcagattaagttaccgatttcatcaaagagaggatcaaaccaatgaacacactggtgagaatgggtcaatcgagttcgctcaaaacgatgattttgcttttcagatgttgccatcgatatgaaacaaagatatgttgcacactgcaacgttggaacagatatcaaacaagccagctttcttggggagttcattgccagtggaagtgatgatggtagatggttt

SEQ ID NO: 728 - DNA, 1231 bp, Zea Mays
cacatggaaaattacgctcattgagtgagatattatttagacctgatgttggtggttcatcagaggaggggcgagaagattcagattatgatgatgaaatggagttggactatgagacatcagtatctggtgatgaaagccgagagaatgatcaagatatcttacggggcagattaagttaccgatttcatcaaagagaggatcaaaccaatgaacacactggtgagaatgggtcaatcgagttcgctcaaaacgatgattttgcttttcagatgttgccatcgatatgaaacaaagatatgttgcacactgcaacgttggaacagatatcaaacaagccagctttcttggtgagcaaggggagttcattgccagtggaagtgatgatggtagatggtttatatgggagaaaagaacaggaaggcttattaaaatgcttgcaggggatggagctgttgtgaactgcatacagtctcatcccttcgattgtgctgttgcaacaagcggaattgataacacaataaagctttggacacccgatgcaaatgctacatctatggttgctggaccagaacttgatgtattaagtgccatagagaataaccagcggacgttatgtcggaagcgtcaaattgtactgccttttgaatttttggaacgagttcggatgcgagagttttcagaaagtttcgagtgtaaccagagctgatttactatcgctggagttgctgaggaaaagggtaatagttggaagaatgatatcatccaagctacaagcagcctatgtttgaagtagtgaaatcgcaaggccttgctacgaatagagtgtagacacacctggatagataagcaggtgtgctggtgctgaaactattacttgagatgtcaataaacattggaattatgttgtggtttggggtggtataatgattcatacgtgtgtaatgcagtgtggattcattccctttacagattgtagatataggtgaaattctgcagtaagtgaaaatcacaaatgtaaatgtgcggtattgtctctgcgtgccgcaggcaggtcatgctagtttgtggttgacgattggggcatatcttcccgtatggcttgttcaattatttctaatacatacggattcctaatacatggggattggaagattgggagggattttgatttactagggatttaaatccacccaattctcttaaacctttagtctttgtttgtttattt

SEQ ID NO: 729 - DNA, 1235 bp, Zea Mays
cacatggaaaattacgctcattgagtgagatattatttagacctgatgttggtggttcatcagaggaggggcgagaagattcagattatgatgatgaaatggagttggactatgagacatcagtatctggtgatgaaagccgagagaatgatcaagatatcttacggggcagattaagttaccgatttcatcaaagagaggatcaaaccaatgaacacactggtgagaatgggtcaatcgagttcgctcaaaacgatgattttgcttttcagtcagatgttgccatcgatatgaaacaaagatatgttgcacactgcaacgttggaacagatatcaaacaagccagctttcttggggagttcattgccagtggaagtgatgatggtagatggtttatatgggagaaaagaacaggaaggcttattaaaatgcttgcaggggatggagctgttgtgaactgcatacagtctcatcccttcgattgtgctgttgcaacaagcggaattgataacacaataaagctttggacacccgatgcaaatgctacatctatggttgctggaccagaacttgatgtattaagtgccatagagaataaccagcggacgttatgtcggaagcgtcaaattgtactgccttttgaatttttggaacgagttcggatgcgagagttttcagaaagtttcgagtgtaaccagagctgatttactatcgctggagttgctgagcttcttcaggaaaagggtaatagttggaagaatgatatcatccaagctacaagcagcctatgtttgaagtagtgaaatcgcaaggccttgctacgaatagagtgtagacacacctggatagataagcaggtgtgctggtgctgaaactattacttgagatgtcaataaacattggaattatgttgtggtttggggtggtataatgattcatacgtgtgtaatgcagtgtggattcattccctttacagattgtagatataggtgaaattctgcagtaagtgaaaatcacaaatgtaaatgtgcggtattgtctctgcgtgccgcaggcaggtcatgctagtttgtggttgacgattggggcatatcttcccgtatggcttgttcaattatttctaatacatacggattcctaatacatggggattggaagattgggagggattttgatttactagggatttaaatccacccaattctcttaaacctttagtctttgtttgtttattt

SEQ ID NO: 730 - DNA, 1208 bp, Zea Mays
cacatggaaaattacgctcattgagtgagatattatttagacctgatgttggtggttcatcagaggaggggcgagaagattcagattatgatgatgaaatggagttggactatgagacatcagtatctggtgatgaaagccgagagaatgatcaagatatcttacggggcagattaagttaccgatttcatcaaagagaggatcaaaccaatgaacacactggtgagaatgggtcaatcgagttcgctcaaaacgatgattttgcttttcagtcagatgttgccatcgatatgaaacaaagatatgttgcacactgcaacgttggaacagatatcaaacaagccagctttcttggggagttcattgccagtggaagtgatgatggtagatggtttatatgggagaaaagaacaggaaggcttattaaaatgcttgcaggggatggagctgttgtgaactgcatacagtctcatcccttcgattgtgctgttgcaacaagcggaattgataacacaataaagctttggacacccgatgcaaatgctacatctatggttgctggaccagaacttgatgtattaagtgccatagagaataaccagcggacgttatgtcggaagcgtcaaattgtactggcatccaaaggatgaaaggaatcggtttgctatggtgagctaaacacaattacaccttttgtttagcttcttcaggaaaagggtaatagttggaagaatgatatcatccaagctacaagcagcctatgtttgaagtagtgaaatcgcaaggccttgctacgaatagagtgtagacacacctggatagataagcaggtgtgctggtgctgaaactattacttgagatgtcaataaacattggaattatgttgtggtttggggtggtataatgattcatacgtgtgtaatgcagtgtggattcattccctttacagattgtagatataggtgaaattctgcagtaagtgaaaatcacaaatgtaaatgtgcggtattgtctctgcgtgccgcaggcaggtcatgctagtttgtggttgacgattggggcatatcttcccgtatggcttgttcaattatttctaatacatacggattcctaatacatggggattggaagattgggagggattttgatttactagggatttaaatccacccaattctcttaaacctttagtctttgtttgtttattt

SEQ ID NO: 731 - DNA, 2299 bp, Zea Mays
aaataaatttccacaaccgaaacctgcagtcgggtcatctcgtccacgaaacgtacggacttcgggcatcggccccaacgccagcggcaccgcacccgcaccaccaagctcgtcggcgacatgaatccgcccgcagcagccgcgtccaccggcgcaggaggccacgccgcggcgcctgcggcagccccggagtacgcgcactacccgaggctctcgccagaggaggtggccccgcccccgcccccgccttatcacgccgccaccgccgcgccgtccgcctacggaggcaacccctacatctactcccccgccggcggcgccgccacctccccgaagaatacgatggactccgtgaaggacgtgctcggcaagatgggaaagaggtttggcgaggcggcccgcaagaccgagaccatcaccggcaatttctggcagcactgtgagcttttcgatttcgttgccgtattttcacgaaatcgggttccgaagttgtttctgtgtgtttttcatcaatttgctaatcgtgttgtgcattttcatgtacattttgttattgtaatatgaaattaggttgtcgtcaagctgttacttagccacaaccacaatgaaattgaactagaatcccatcttcatgggctcagacaaaaagaggggcaactaatttaatcgacacagaattcagcttatttcattggcgtgcactaaattcggcatttctggtgggcattgacagggattaggattcattatgctgcttcttttataactataaaagttttattccatatatttcactatattgatgatgtttgatgtggcttttctaggtaccatgtatctagacacagtgtatatctaagcacatagaaaaatctatgtgtagccttgtttctttaagtcaaatgggaatgggagcactagattatagccttgtttcgttaagtccatacaatgtggagaaactgatcaggtcttcctgattctttaaacagtgaaaactggaccaagcattactgatgcagcaatgagcaggatctcacaggtcaccaaagtcattgcagaaggtggatatgacaaaattttccatcaaacttttgaggtcgcccctggtgaaaagctcaagaagccatatgcatgttatctgtcaacctcggctggtcctgttatgggtgtgctttacctgtccaatgtaaaactggcattttgtagtgataacccacttgcataccaggttggagacaaaactgagtggagttactacaaggtggtcatcccccttgctcaactgcgatcaattaattcatcaacaagcagaacaaatgcagcagagaaatacattcaggtggtttctgttgataaccatgagttttggtttatgggcttcgtttactatgacagtgcggtgaagaatctgcaggaagcacttcaggaggctcagaatttacgtgcttagtgatgttcatggattggaactagcatgtcttatacattacagttgtgatatactgttttcccgtcagtttcgactgtttgtccagatttagtttgcgtaggtatcagctgtttctgtgttttgtactgacttaaaccgatgttcaatatgtgacgtgcatcctttcatggttgttctctgctatgatgagcccatttgcttcgagcagtaacaatgggtgtgcttcttctgagttttaaatccgaccacagtaagattggcgaagtggaacgcacttcacaaatcaattcggatttgggattgtgatatggattcaaattattgatttatccatgctcagtgatttctataggtcttgagcagcgcgtgtttgtatacttcgtgctttgacaaatcccagtttagttggccccgctttaaggtttacactgacttgggggctggtcaggcaaccatttacaactttaggttatttgtgtctgacaattcctctgactgacctgtgcagattttcgaactgtgacagtgcatcttgatcccgtcgtgtctgccctgtgcagcctggtgcccaggatgtgttatttgggcatattttgcttcatgtagtaacagttaactcacaaacatcagtggaaatatctgaacgagtagcttatccataactccttgtttttcagctacatcctgtatccatgcatgatccctttacctaccagcgtttgctttgacaaagataaacttgtggctgtggtcaacattcactattttaaaactaaggctagtttggcagcccaaaaagccacagattttccggcctttttcctggaaagaaagcccacacggata

SEQ ID NO: 732 - DNA, 1741 bp, Zea Mays
aaataaatttccacaaccgaaacctgcagtcgggtcatctcgtccacgaaacgtacggacttcgggcatcggccccaacgccagcggcaccgcacccgcaccaccaagctcgtcggcgacatgaatccgcccgcagcagccgcgtccaccggcgcaggaggccacgccgcggcgcctgcggcagccccggagtacgcgcactacccgaggctctcgccagaggaggtggccccgcccccgcccccgccttatcacgccgccaccgccgcgccgtccgcctacggaggcaacccctacatctactcccccgccggcggcgccgccacctccccgaagaatacgatggactccgtgaaggacgtgctcggcaagatgggaaagaggtttggcgaggcggcccgcaagaccgagaccatcaccggcaatttctggcatgaaaactggaccaagcattactgatgcagcaatgagcaggatctcacaggtcaccaaagtcattgcagaaggtggatatgacaaaattttccatcaaacttttgaggtcgcccctggtgaaaagctcaagaagccatatgcatgttatctgtcaacctcggctggtcctgttatgggtgtgctttacctgtccaatgtaaaactggcattttgtagtgataacccacttgcataccaggttggagacaaaactgagtggagttactacaaggtggtcatcccccttgctcaactgcgatcaattaattcatcaacaagcagaacaaatgcagcagagaaatacattcaggtggtttctgttgataaccatgagttttggtttatgggcttcgtttactatgacagtgcggtgaagaatctgcaggaagcacttcaggaggctcagaatttacgtgcttagtgatgttcatggattggaactagcatgtcttatacattacagttgtgatatactgttttcccgtcagtttcgactgtttgtccagatttagtttgcgtaggtatcagctgtttctgtgttttgtactgacttaaaccgatgttcaatatgtgacgtgcatcctttcatggttgttctctgctatgatgagcccatttgcttcgagcagtaacaatgggtgtgcttcttctgagttttaaatccgaccacagtaagattggcgaagtggaacgcacttcacaaatcaattcggatttgggattgtgatatggattcaaattattgatttatccatgctcagtgatttctataggtcttgagcagcgcgtgtttgtatacttcgtgctttgacaaatcccagtttagttggccccgctttaaggtttacactgacttgggggctggtcaggcaaccatttacaactttaggttatttgtgtctgacaattcctctgactgacctgtgcagattttcgaactgtgacagtgcatcttgatcccgtcgtgtctgccctgtgcagcctggtgcccaggatgtgttatttgggcatattttgcttcatgtagtaacagttaactcacaaacatcagtggaaatatctgaacgagtagcttatccataactccttgtttttcagctacatcctgtatccatgcatgatccctttacctaccagcgtttgctttgacaaagataaacttgtggctgtggtcaacattcactattttaaaactaaggctagtttggcagcccaaaaagccacagattttccggcctttttcctggaaagaaagcccacacggata

SEQ ID NO: 733 - DNA, 2261 bp, Zea Mays
tatagtttaagggcatgtattcggtttcaaaatacaagagacaactagagattgcacaacataacccctgaaactagagcttaacttgtaacgactccgaccctacaatatatcatactgatgtggtattcttctcaacttaaactgggcctaaaaggtttcagttgacgtgggtgtcggtgaacccaagtccgtcctatgccgaacgatcatgatggggctacgacctttcgctgagtcgccttctgcaaattaaaggcgaggtcgtctcgtggaacatgcggctgctggaaccttgatgcatcgggcgcggcatgcatggtggtcgggccggcgctcggctcatcgatctgtcgtcccccgcggcaacgaacgcgagcaactctcgatcgccaccaacaaacacgtgccgatcgaaacgcaacgtatgtgttcccgtcgcccttccgtcgtcgatgacgctagctgcggctgctgcctgggactcgccaacccagccacgctactccgaacgccttagcttgcatctgcctattaaaaggcgtcctcgctggcttttgtatacgggagagaaagccagacaggactcctcctcctcccccttccctccccctaaaagctaaaaacatttggagagagagagagggagatcgaggggaaaccgagagcaaccaagacgcacacgacgatggagcgagcggacgaggacgcgtgccgggtggcgctgctggacgctgacggcggcggcggcggcgagggcggcaagaagcagcagcagcagctcgcggcgcgggtgtgggaggagtcgaggaagctgtgggacatcgtggcgccggccatcttcagccgcgtcgtgacctacagcatgaacgtcatcacgcaggccttcgccggccacctcggcgacctcgagctcgccgccatctccatcgccaacaccgtcgtcgtcggctccgcttcggcctcgcgggcatcgccctcacgctcaacttctcatggtgggccaccggcgccatgctcttcgcctacgtcgcatgcggcggctgccccgacacctggcacggcttctcgctcgaggccttcgccggcatgtgggagttcgtcaagctatcctccgcgtccggtgtcatgctatgcttggagaactggtactaccggatcctcgtcttgttgacgggaaacctaaaagatgcagccattgccgtcgacgctctgtccatatgcatgtcaattaacgggtggcagatgatgattccgttggcgttcttcgccggcaccggagtgcgtgtggccaacgagctcggcgcgggcaacggggagggcgccaggttcgcgaccatcgtgtcgacggtgacgtcgctggtgatcgggctcttcttctgggtgctcatcatgggcctgcacgacaagtacgcgctcatcttcacctccagccccgtcgtcctcgacgccgtcgaccacctctcggttcttctcgccttcaccatcctcctcaacagcatccagcccatcctctcaggtgtggccgtcggctccggctggcaatccatggtggcctacgtcaacatcggctgctactacctcatcggaatccccatgggcatcctgctcggatggctcttcaaccttggcgtgctggggatctgggcggggatgatcggcgggaccgccgtccagacgctcgtcctggccatcatgacagtccgctgcgactgggaaaaggaggtgagccacagctgccaaaggccttgatcgcgagcacgcgcatgggcaaactgtcggaagttcggtgatggcaggatctggtgctgcacatctgaacgagcgcccgtgatttttaagctctggcgggatcgtgtgttcccgcatgttagtttcgccaaattttgcctcgtggaaaagcaacgcaaggtgctcaggaatcagggacacaggtcgccggggcagctcttgaagacgacggaggaggggcttggtgtggctatgatggttttggtgcttttgcttatgggctttatggtggtaacttcaaatcaaatagcttgactgtggaccgttgatctggatgtgttttatcatatattacttcatagaaggtaataataaaatttaattgttttaaattttggaaaaaacgaagttttcaaatatgttgtgtatttctttttggaaacctggtagatcatatctaatccttttgtccgacgtgacggataattagcagtgttattttaacgtgccatgtgtgtgtacacctgtat

SEQ ID NO: 734 - DNA, 1931 bp, Zea Mays
tatagtttaagggcatgtattcggtttcaaaatacaagagacaactagagattgcacaacataacccctgaaactagagcttaacttgtaacgactccgaccctacaatatatcatactgatgtggtattcttctcaacttaaactgggcctaaaaggtttcagttgacgtgggtgtcggtgaacccaagtccgtcctatgccgaacgatcatgatggggctacgacctttcgctgagtcgccttctgcaaattaaaggcgaggtcgtctcgtggaacatgcggctgctggaaccttgatgcatcgggcgcggcatgcatggtggtcgggccggcgctcggctcatcgatctgtcgtcccccgcggcaacgaacgcgagcaactctcgatcgccaccaacaaacacgtgccgatcgaaacgcaacgtatgtgttcccgtcgcccttccgtcgtcgatgacgctagctgcggctgctgcctgggactcgccaacccagccacgctactccgaacgccttagcttgcatctgcctattaaaaggcgtcctcgctggcttttgtatacgggagagaaagccagacaggactcctcctcctcccccttccctccccctaaaagctaaaaacatttggagagagagagagggagatcgaggggaaaccgagagcaaccaagacgcacacgacgatggagcgagcggacgaggacgcgtgccgggtggcgctgctggacgctgacggcggcggcggcggcgagggcggcaagaagcagcagcagcagctcgcggcgcgggtgtgggaggagtcgaggaagctgtgggacatcgtggcgccggccatcttcagccgcgtcgtgacctacagcatgaacgtcatcacgcaggccttcgccggccacctcggcgacctcgagctcgccgccatctccatcgccaacaccgtcgtcgtcggcttcaacttcggcctcatgagtgcgtgtggccaacgagctcggcgcgggcaacggggagggcgccaggttcgcgaccatcgtgtcgacggtgacgtcgctggtgatcgggctcttcttctgggtgctcatcatgggcctgcacgacaagtacgcgctcatcttcacctccagccccgtcgtcctcgacgccgtcgaccacctctcggttcttctcgccttcaccatcctcctcaacagcatccagcccatcctctcaggtgtggccgtcggctccggctggcaatccatggtggcctacgtcaacatcggctgctactacctcatcggaatccccatgggcatcctgctcggatggctcttcaaccttggcgtgctggggatctgggcggggatgatcggcgggaccgccgtccagacgctcgtcctggccatcatgacagtccgctgcgactgggaaaaggaggccttgatcgcgagcacgcgcatgggcaaactgtcggaagttcggtgatggcaggatctggtgctgcacatctgaacgagcgcccgtgatttttaagctctggcgggatcgtgtgttcccgcatgttagtttcgccaaattttgcctcgtggaaaagcaacgcaaggtgctcaggaatcagggacacaggtcgccggggcagctcttgaagacgacggaggaggggcttggtgtggctatgatggttttggtgcttttgcttatgggctttatggtggtaacttcaaatcaaatagcttgactgtggaccgttgatctggatgtgttttatcatatattacttcatagaaggtaataataaaatttaattgttttaaattttggaaaaaacgaagttttcaaatatgttgtgtatttctttttggaaacctggtagatcatatctaatccttttgtccgacgtgacggataattagcagtgttattttaacgtgccatgtgtgtgtacacctgtat

SEQ ID NO: 735 - DNA, 1941 bp, Zea Mays
agcccgtctgcatccaaccccatcaatggtcgacgacgtagagaacgtatcagagcgctacgaaagtgattggttcttcttccatcgaatcctcgctctccacgccttggcatctcatgctcagggccgccgtgctcgtatatgtgacacttgttgctgtcacgtccggatgaattccgattacacaatcttagcttgtcccctttaatttaatttacacacatctcatcttcaattgtctgggatgtatccgctgcatcattcatggacctgtggacacagtagtgatatatactgggcatggcgagcgcgctggagacgctgtgcgggcaggcgttcggcgcgaagaagttccacatgatgggcgtgtacatgcagcggtcgtggatcgtgctgttcatgtgcgcggtgctgctgctgcccatgtacttcttcgcggaggacgtgctgctgctgacggggcagccgccggagctggcggcgatggcggggaaggtgtgcgtgtggttcatcccgctgcacttctccttcgccttcctcttcccgctgcagcgcttcctgcagtgccagatgaggaactccgccaacgccgccgccgccgcagccgcgctctgcgtccacctcctcgcaagctggctcctcgtctccaggctccgcttcggcctcgcgggcatcgccctcacgctcaacttctcatggtgggccaccggcgccatgctcttcgcctacgtcgcatgcggcggctgccccgacacctggcacggcttctcgctcgaggccttcgccggcatgtgggagttcgtcaagctatcctccgcgtccggtgtcatgctatgcttggagaactggtactaccggatcctcgtcttgttgacgggaaacctaaaagatgcagccattgccgtcgacgctctgtccatatgcatgtcaattaacgggtggcagatgatgattccgttggcgttcttcgccggcaccggagtgcgtgtggccaacgagctcggcgcgggcaacggggagggcgccaggttcgcgaccatcgtgtcgacggtgacgtcgctggtgatcgggctcttcttctgggtgctcatcatgggcctgcacgacaagtacgcgctcatcttcacctccagccccgtcgtcctcgacgccgtcgaccacctctcggttcttctcgccttcaccatcctcctcaacagcatccagcccatcctctcaggtgtggccgtcggctccggctggcaatccatggtggcctacgtcaacatcggctgctactacctcatcggaatccccatgggcatcctgctcggatggctcttcaaccttggcgtgctggggatctgggcggggatgatcggcgggaccgccgtccagacgctcgtcctggccatcatgacagtccgctgcgactgggaaaaggaggccttgatcgcgagcacgcgcatgggcaaactgtcggaagttcggtgatggcaggatctggtgctgcacatctgaacgagcgcccgtgatttttaagctctggcgggatcgtgtgttcccgcatgttagtttcgccaaattttgcctcgtggaaaagcaacgcaaggtgctcaggaatcagggacacaggtcgccggggcagctcttgaagacgacggaggaggggcttggtgtggctatgatggttttggtgcttttgcttatgggctttatggtggtaacttcaaatcaaatagcttgactgtggaccgttgatctggatgtgttttatcatatattacttcatagaaggtaataataaaatttaattgttttaaattttggaaaaaacgaagttttcaaatatgttgtgtatttctttttggaaacctggtagatcatatctaatccttttgtccgacgtgacggataattagcagtgttattttaacgtgccatgtgtgtgtacacctgtat

SEQ ID NO: 736 - DNA, 999 bp, Zea Mays
ggccatggcgggagcgggaggatgtccgcaaacatacaagtgcgtgtggccaacgagctcggcgcgggcaacggggagggcgccaggttcgcgaccatcgtgtcgacggtgacgtcgctggtgatcgggctcttcttctgggtgctcatcatgggcctgcacgacaagtacgcgctcatcttcacctccagccccgtcgtcctcgacgccgtcgaccacctctcggttcttctcgccttcaccatcctcctcaacagcatccagcccatcctctcaggtgtggccgtcggctccggctggcaatccatggtggcctacgtcaacatcggctgctactacctcatcggaatccccatgggcatcctgctcggatggctcttcaaccttggcgtgctggggatctgggcggggatgatcggcgggaccgccgtccagacgctcgtcctggccatcatgacagtccgctgcgactgggaaaaggaggccttgatcgcgagcacgcgcatgggcaaactgtcggaagttcggtgatggcaggatctggtgctgcacatctgaacgagcgcccgtgatttttaagctctggcgggatcgtgtgttcccgcatgttagtttcgccaaattttgcctcgtggaaaagcaacgcaaggtgctcaggaatcagggacacaggtcgccggggcagctcttgaagacgacggaggaggggcttggtgtggctatgatggttttggtgcttttgcttatgggctttatggtggtaacttcaaatcaaatagcttgactgtggaccgttgatctggatgtgttttatcatatattacttcatagaaggtaataataaaatttaattgttttaaattttggaaaaaacgaagttttcaaatatgttgtgtatttctttttggaaacctggtagatcatatctaatccttttgtccgacgtgacggataattagcagtgttattttaacgtgccatgtgtgtgtacacctgtat

SEQ ID NO: 737 - DNA, 2323 bp, Zea Mays
accacacacacacagacacaccaccacacgccggtgagccggtctctctcgcccccgtgcccgtgcgcgccacctagccgttcgttcgcatccatccgtccatccgtcacacgcacaccaccaccaacccgcgcggccgtgtctatctgggtctgggatcgagtagcaagcaatggcgctggaggccgtggtgttctcccagccccaggcgggccacttcggctgcggccgcggggactcgccgtacgcggtgccgtggagcgacctgctgcagggaggaggaggaggagggtttggcgatgtctgcgccgcgggggagtgggtcgaccagcacgacctcgacacctgctgggccgcgcccaccgtgggggacgactgggactggggggaggcgctctcgcgggaccactcctcctcggacgccgcctccacggaccacggcagcaggaaggcggcgcccgagccggcggcggggaggaggaagcggaggcgcaccagggtcgtcaagaacaaggaggagatcgagagccagcggatcacccacattgccgtcgagcgcaaccgccggcgccagatgaacgagtacctcgccgtgctccgctccctcatgccgccgtcccacgcgcacaggggtgaccaagcatcgatcgtgggtggcgcgatcaactacgtgagggagctggagcagctgctccagtcgctggaggtccaaaagagcctgaagcagagccgggggcggcggccagcaggcggcggcgccagctgctcccccccgttcgccggcttcttcagcttcccgcagtactccaccgccccaagcaccacgagcagcagcggcggagagaaatgctgcggccacgacgccgcggccgcggacatcgaggtgacgatggtggaaggccacgccagcctcaaggtgctggcgcgccgccggcccaagcagctcctgaagctcgtcgccgggctgcaccagctgcgcgtcccgccgctccacctcaacgtcaccgccgccgtcgacgccatggtcctctacaccttcagcctcaaggtaatactgaattatacatattaaaaaaaatcaatactttactggctaaattaatacaacgacgcataaacacgaactttagtgctccggccggaactactccacactccagcaggttagtttaattaaagccggtagagacaaaacctggaaagtagattctcctccgtttccaatctatctatctatctatattagcgaagccggtggagggcgattataatggtggcttggctttcccgtttggacggcaggtggaggatgactccaagatgggctctgtcgaggacattgccaccgccgtgcacgagattctcggcagcatacagcggcagcagcaggaggaggaggaggaggagaccgccgccatgtgaaactctgcaccacctgcatgtccggcaggcacactgccatcctgccaatggaatccattgcctgtgcatgtgatgactgtgattgcgcccccttgctaggcacagacacctgagcctgccatgatgcagcaatactgtcccagtccggccgtggtcgcaaagaatatgctatgagaaatcttaggctagctgtaatctaagcaccacctcccttctggagtgagagcacttgtgtagattattgacagatacagctgatctgccctctcgagctacataccactgcgcgcttacatacgccgtcgttggcgttaacaggtctcgactctcgagcctgcctgccagacagaatgatggctcggcccgtgatctatatatgatgtgcttactgtgtatcagtagctgctagcccgctaccatatactactatatacacaccactacttcatccggacatgcgtgcgttaactacaccgcggcagtcgtctccttgttctgtctctcaccatgcaggatcaggaagaacgaatgtttcagtagcctgtagcacacacgtacgtcagtgaaaaatgcgtcggcgtacacggcggacagcatgaggtgagcctgtgctaggggcgaggccactggaggagattccattgacgaccatgaaacagcatgaccgaaggacccaaggacgacggcagtagtctcgtgtcgtcctcctcctcctcctcctcctcctcctactacagcctacacaggtggtgggatttcagaaacgtatgtgttcattttcacgcgcacggcctctcgggccatgcaagcaaaaaaaaatgtactgccactcggaaaaattgctgaaccgtacacgttttgcctgactgacacttggatggtcggagcaacagggtcagag

SEQ ID NO: 738 - DNA, 1068 bp, Zea Mays
gccgccgccgccgcccgcgccaggtcgccgtctggttccagaaccgccgcgcccgctggaagaccaagacgctcgagcgcgacttcgcggcgctgcgcgcgcgccacgacgccctccgcgccgactgcgacgcgctccgccgcgacaaggacgccctcgccgccgagataagggagctgaggcagaagctgctgcccaagccggaagccacggtgaagctggaggcgacgacgggcaatgacacggcggaggagcgccgccaggcgacggccggcgcgccgcccgcgggggcctgcaaggacggctcctcggacagcgactccagcgtggtcttcagcgacgtcgaggcgtcgccctactccggcggcgcggcgttcgagccgccggccttggccgggctcggcgcgccgttcctggacacgtcggtggcgccgacgggctgctcgtctccccccgttttcgtcgagaccaagtggcagcagcacgggccgacacagtacccgttcccattcgactcgtacaaggcctgcgccggctatggcttcacggaggaatggctcgccagctcggacctcatcggcagcgacggcggcgcggcggggttcttctccgaggatcacgcctccagcctcaacttcaactggtgcccgagtggcatccagggctgggagtgaagaggggtttttgatctgcacggctagtgtaaaaaaaccgatgttacggtggcatttgtacatgcatggaactggagtctagtgacctggcctggcgagtgtggtgtggccaaagctagaggacatccagcgcaaaaggcgggaacaggagcagtagtagcctgtaacaataacggaataacttgagccaggctagtaaaaaaagaggatgtaaatgtaaaaagaggctgtcgcaccactacggcactatcacttggatgcaacatgcaatgcagcaaatcggcgacgagagcgtctgaaggggaaactggtaagcaggctgcaatttacggtgccggatgagatacgtcaaacctctaatcaaaataaatgttctttgactcgtttacatttg

SEQ ID NO: 739 - DNA, 1997 bp, Zea Mays
actcgtattgttcaaaggaaaacgggagaccaggttcacttctaaaaacggaggaaccggcattggccccaaccggcaatgccagcacaacacatggatcctacaaaaatctcgggcacatggcatcgcggcgctgtccaaccggggggtgtgcccggcccggcgagccgcttgcttttattgtatttatatttatacgagccccatgggcgcttgcctcagtcgtttgcccctttggtccctctccctcccccgtccgccctgcactctccagctcaacaaggaagaagagggggccttcaccacaccactcgattcctctttagagcacgacttacgaagtgtgcccaggccgtcgccgccgaccagcaaaagggctggaaagcccccctcttttgtgctgtgcgtgcaactcggctcctgccctgccatcttgctttccaagacccctgcgcccccagtcccataattagttaggattaggatcaccaccatttccaaatccttgcagagctgccgaagcgcggatcacagatgaagaggcaatccaagaggcccaccgccagccgcgaatccccagaaacagcttgctgccacaaagctgcagaaagaacgggtctccccccttcattttggggaatcctccagtagctaaccgcacgcgcgaattgcaggggagaagcagaagctggcgttcgcggaggaagaggccccgccggcgcggaaggtggagcccgacgacgaggccgagatggacgaggacgaggacgagctgggcccgggcctgggcggcgggcgcgcggcgcggtcgccgtgcgggctcggggagaagaagcggcgcctggcgctggagcaggtgcgcgcgctggagcgctgcttcgagacggacaacaagctggacccggaccgcaaggcccgcatcgcgcgcgacctcgcgctgcagccgcgccaggtcgccgtctggttccagaaccgccgcgcccgctggaagaccaagacgctcgagcgcgacttcgcggcgctgcgcgcgcgccacgacgccctccgcgccgactgcgacgcgctccgccgcgacaaggacgccctcgccgccgagataagggagctgaggcagaagctgctgcccaagccggaagccacggtgaagctggaggcgacgacgggcaatgacacggcggaggagcgccgccaggcgacggccggcgcgccgcccgcgggggcctgcaaggacggctcctcggacagcgactccagcgtggtcttcagcgacgtcgaggcgtcgccctactccggcggcgcggcgttcgagccgccggccttggccgggctcggcgcgccgttcctggacacgtcggtggcgccgacgggctgctcgtctccccccgttttcgtcgagaccaagtggcagcagcacgggccgacacagtacccgttcccattcgactcgtacaaggcctgcgccggctatggcttcacggaggaatggctcgccagctcggacctcatcggcagcgacggcggcgcggcggggttcttctccgaggatcacgcctccagcctcaacttcaactggtgcccgagtggcatccagggctgggagtgaagaggggtttttgatctgcacggctagtgtaaaaaaaccgatgttacggtggcatttgtacatgcatggaactggagtctagtgacctggcctggcgagtgtggtgtggccaaagctagaggacatccagcgcaaaaggcgggaacaggagcagtagtagcctgtaacaataacggaataacttgagccaggctagtaaaaaaagaggatgtaaatgtaaaaagaggctgtcgcaccactacggcactatcacttggatgcaacatgcaatgcagcaaatcggcgacgagagcgtctgaaggggaaactggtaagcaggctgcaatttacggtgccggatgagatacgtcaaacctctaatcaaaataaatgttctttgactcgtttacatttg

SEQ ID NO: 740 - DNA, 1961 bp, Zea Mays
ctcctcagcctcctccctcgcgcccgccttcccattctcctcctcttcctcctccgccgctcgcctccgcgccgccgatgaggacccgcccatggaggtcgcgaggcaactatacggcagggtcaccggggaggcggtgtacgtggctgaaccggtgtcggcgcccgcgcggagggggtcgcctacgaagggatgcctcggtgcaatgcggctggtggcaggaccgcggcggaagggtgatcaagtggtctgccttggttttgacatgagaaacaccgtttgttccagcaatggctgctacccgaccatcgttctggtgcacgtctggggcattggccacttcgtaccaatgctcgaggaagcctccggcctcgccatccgcttccaccatctgccagcggtggaacccccaaccgaccactcgggcatcgaggagtacatatcccgctacgtgcagctgtactcgccccacgtcaaggcggtcgtcgccagcttgacgtgcccggtggccggcgtcgttgtcgacatcttctgcacggtgctatttgacgcggcataccagctcagcgtgccggcctacgtgtacctgatcaccagcgccgcgatgtgcgcgctcttgctgcgctccccggcgctcgacgaggaggtagtcatcgaggtcgagttcgagcaaatggaaggtgatgtggacgtgctagggctaccgccagtgccagcgtcctgcctgccgacagggctggataacaggaagatcccgacctaccgctggttcctgtacaacggcaggcgctacatggaagcaacaggcatcattgtcaacaccattgtcgaggtcgagccacgcgtcctcgcggccatcgccgacgggcggtgcacgcatggtgtcccggcacctccggtgtactcgatcgggccgcctctgggctccgtggtgttcttctgcttcggcggccaaggctgcttcacggcgccccaagcgcacgacctggaccacagcgggcatcgattcctgtgggtgctgcgcgggacgccggagcccggcacgaagatgccctcggacgggaacctcgcggagctgctttcgacggatttcttggcgaggacgaaggacagagggctcgtgtggcctaccaaggcgccgcagaaggagatactcgcccatgccgccgtgggaggcttcgtcacgcaatgtggctggaactcggtcctcgagagcctctggcattgcatgccgatggtgccatggccgcttgccgtcgagcagcactacatcgcgttcacgctggtggccgacatgggcatcgccgtggcgctgaacgtggaaaggaagaggaagaatttcgtggaggcaaccgagctggagcgagcggttaaagctctgatgtgcgacgatgagacagcgaggaaggttagggacaaggtcatggagatgaaactaggtcgtgaatcatgatggtcggcgtcgcatggcgtgcttcgctgctcgcttttcctccagaaatacaaatctcttttgtaattttttatttcgctttacgtgcatgcgatgcgattgccttttcgtgaggtttcttttacgatttcttaacttttctatctgaatcgcctacattacgagaagtttttaatttggtgtgatctgcatggcacgtcagaatgagatgtcacgagttccgttatattttagatttttctttgtttggatatgtctcattgcgtcaatggtaggacacaaacttgctatgttgtgtacgtgtctctggcacaatttttattttaaatgaaactagataagtgtgccattcatcacatcctactcaatgtttatggtgtacgtgttttgaaacaaacaaattagtgaaatttaaccgacttgcttttttgaaccactgggagtcgtctcgggcgggcgcggcatgctccaccgccttctaagaaaacctcgaacaaacactactggg

SEQ ID NO: 741 - DNA, 1861 bp, Zea Mays
caccatccaaatcctcaacacctgcaccagcacggttgacatcatcaagaaaaaggtgagcgtcggacttatgtgtcagagtggagataaggtatagagatggcatgatcctcaccgttggactggacgtgcccttatcctcttatcccagcagccggcgcccgccgcgcgctcgacaaactgccgcgaactctcccggcctcacactccttgcgcccgccgcggcagatgccgctcgccggcattgccctcacgcccctcctcgtctcacctctcgcgccttccccgcgccgtagccgtgtagccacttccgccgcgagaaggccaagggctctccagcgagctcggtgctcggctacagccgcttccggtgaagccggtgagctgtcgcacgcgacactgctatggagggcggcgaagctacccatctactccgtagcgctaataccactcacagtagggagcgcttctgcttattatcatgcaggcttattctttaccaagcgctattttgttctcctgacagcagcagtcctcgtgatcacttggctcaatctcaggggctgatagggacaagaaagaatctgttgtcagcattactggcagccgagcaatgacacaaaatgcggcgaacttttcccttttcctcggctttgcagggctactttgggcctttgcagaagccaaggatatcagattcattttattggtgatctctgcaatcttctgtggttatgtttaccagtgtcctccattccgattaagctaccaaggactaggcgagccgttgtgtttcgctgcatttggtcctttggcaaccacagccttttacttctcaaacagcagcttaaatacttcgagcggaggagcggctcttctccctctcactaaaacagttatagcttcatctgttctcgtcgggctgacaactactctgatactcttctgcagccatttccatcagatcgatggagatctcgccgttggaaagatgtctcctctggtaagaatcggcactaaagcaggatcgcggatagtgtcgattgggattgtcatgctttacattctcttggctacgtttgggacatgcggatctctcccgccatcttgcattgtcctctgtgcccttactctgcccatgggcaaaacggtcgtggactacgtgctgaaacatcacgaggacaacgcgaagatattcatggcgaagtactactgcgtgcgcctgcacgcgctgtttgggatggcactggcctctggtttggtcttggcccgaaatggtatattagcctgacagacaggctcataggcggcgctgaaatccaggagagggtccagagcaccctggagtttcagaatcagcgagcaccctgttcctcaatttatgttctgaatctgaactacttctgattcgactatcgaacaggccgatgagaatggggcgcagtactgagcagctgcagttttgccaagaaacggtggagggaatgggccctaggagaagtagaactactacagcgtcagaactcagatgcacaccggcccgtatcggacggcaagttcggtgctcgagttcatttggttcagcgtccttgtacgctttggtccgctctcgggggcttgcttgctcgtgcacggtcagactgccgttgcgccggggtccgggggatgccagtgtatgtatgcatatggattgaatcccaagcaaggacgagtcatgcactcatgtacaagcattacttctgtgcacagacgaccatacagattatatgagatctcactcacaccttttttttttgcatttggtttagccagcgaccggtaattgcttgtcactgcagcgtcctgtttcgacatgtctgtc

SEQ ID NO: 742 - DNA, 1967 bp, Zea Mays
caccatccaaatcctcaacacctgcaccagcacggttgacatcatcaagaaaaaggtgagcgtcggacttatgtgtcagagtggagataaggtatagagatggcatgatcctcaccgttggactggacgtgcccttatcctcttatcccagcagccggcgcccgccgcgcgctcgacaaactgccgcgaactctcccggcctcacactccttgcgcccgccgcggcagatgccgctcgccggcattgccctcacgcccctcctcgtctcacctctcgcgccttccccgcgccgtagccgtgtagccacttccgccgcgagaaggccaagggctctccagcgagctcggtgctcggctacagccgcttccggtgaagccggtgagctgtcgcacgcgacactgctatggagggcggcgaagctacccatctactccgtagcgctaataccactcacagtagggagcgcttctgcttattatcatgcaggcttattctttaccaagcgctattttgttctcctgacagcagcagtcctcgtgatcacttggctcaatctcagaggcttatggtgtggattattagttgaaaacctagaacagagattgtagaagtcaaatcctttgtttgacttgactgcagcaatgatgtttatgactcggatacaggggctgatagggacaagaaagaatctgttgtcagcattactggcagccgagcaatgacacaaaatgcggcgaacttttcccttttcctcggctttgcagggctactttgggcctttgcagaagccaaggatatcagattcattttattggtgatctctgcaatcttctgtggttatgtttaccagtgtcctccattccgattaagctaccaaggactaggcgagccgttgtgtttcgctgcatttggtcctttggcaaccacagccttttacttctcaaacagcagcttaaatacttcgagcggaggagcggctcttctccctctcactaaaacagttatagcttcatctgttctcgtcgggctgacaactactctgatactcttctgcagccatttccatcagatcgatggagatctcgccgttggaaagatgtctcctctggtaagaatcggcactaaagcaggatcgcggatagtgtcgattgggattgtcatgctttacattctcttggctacgtttgggacatgcggatctctcccgccatcttgcattgtcctctgtgcccttactctgcccatgggcaaaacggtcgtggactacgtgctgaaacatcacgaggacaacgcgaagatattcatggcgaagtactactgcgtgcgcctgcacgcgctgtttgggatggcactggcctctggtttggtcttggcccgaaatggtatattagcctgacagacaggctcataggcggcgctgaaatccaggagagggtccagagcaccctggagtttcagaatcagcgagcaccctgttcctcaatttatgttctgaatctgaactacttctgattcgactatcgaacaggccgatgagaatggggcgcagtactgagcagctgcagttttgccaagaaacggtggagggaatgggccctaggagaagtagaactactacagcgtcagaactcagatgcacaccggcccgtatcggacggcaagttcggtgctcgagttcatttggttcagcgtccttgtacgctttggtccgctctcgggggcttgcttgctcgtgcacggtcagactgccgttgcgccggggtccgggggatgccagtgtatgtatgcatatggattgaatcccaagcaaggacgagtcatgcactcatgtacaagcattacttctgtgcacagacgaccatacagattatatgagatctcactcacaccttttttttttgcatttggtttagccagcgaccggtaattgcttgtcactgcagcgtcctgtttcgacatgtctgtc

SEQ ID NO: 743 - DNA, 1726 bp, Zea Mays
tcctcaccgttggactggacgtgcccttatcctcttatcccagcagccggcgcccgccgcgcgctcgacaaactgccgcgaactctcccggcctcacactccttgcgcccgccgcggcagatgccgctcgccggcattgccctcacgcccctcctcgtctcacctctcgcgccttccccgcgccgtagccgtgtagccacttccgccgcgagaaggccaagggctctccagcgagctcggtgctcggctacagccgcttccggtgaagccggtgagctgtcgcacgcgacactgctatggagggcggcgaagctacccatctactccgtagcgctaataccactcacagtagggagcgcttctgcttattatcatgcaggcttattctttaccaagcgctattttgttctcctgacagcagcagtcctcgtgatcacttggctcaatctcagcaatgatgtttatgactcggatacaggggctgatagggacaagaaagaatctgttgtcagcattactggcagggctactttgggcctttgcagaagccaaggatatcagattcattttattggtgatctctgcaatcttctgtggttatgtttaccagtgtcctccattccgattaagctaccaaggactaggcgagccgttgtgtttcgctgcatttggtcctttggcaaccacagccttttacttctcaaacagcagcttaaatacttcgagcggaggagcggctcttctccctctcactaaaacagttatagcttcatctgttctcgtcgggctgacaactactctgatactcttctgcagccatttccatcagatcgatggagatctcgccgttggaaagatgtctcctctggtaagaatcggcactaaagcaggatcgcggatagtgtcgattgggattgtcatgctttacattctcttggctacgtttgggacatgcggatctctcccgccatcttgcattgtcctctgtgcccttactctgcccatgggcaaaacggtcgtggactacgtgctgaaacatcacgaggacaacgcgaagatattcatggcgaagtactactgcgtgcgcctgcacgcgctgtttgggatggcactggcctctggtttggtcttggcccgaaatggtatattagcctgacagacaggctcataggcggcgctgaaatccaggagagggtccagagcaccctggagtttcagaatcagcgagcaccctgttcctcaatttatgttctgaatctgaactacttctgattcgactatcgaacaggccgatgagaatggggcgcagtactgagcagctgcagttttgccaagaaacggtggagggaatgggccctaggagaagtagaactactacagcgtcagaactcagatgcacaccggcccgtatcggacggcaagttcggtgctcgagttcatttggttcagcgtccttgtacgctttggtccgctctcgggggcttgcttgctcgtgcacggtcagactgccgttgcgccggggtccgggggatgccagtgtatgtatgcatatggattgaatcccaagcaaggacgagtcatgcactcatgtacaagcattacttctgtgcacagacgaccatacagattatatgagatctcactcacaccttttttttttgcatttggtttagccagcgaccggtaattgcttgtcactgcagcgtcctgtttcgacatgtctgtc

SEQ ID NO: 744 - DNA, 1654 bp, Zea Mays
tcctcaccgttggactggacgtgcccttatcctcttatcccagcagccggcgcccgccgcgcgctcgacaaactgccgcgaactctcccggcctcacactccttgcgcccgccgcggcagatgccgctcgccggcattgccctcacgcccctcctcgtctcacctctcgcgccttccccgcgccgtagccgtgtagccacttccgccgcgagaaggccaagggctctccagcgagctcggtgctcggctacagccgcttccggtgaagccggtgagctgtcgcacgcgacactgctatggagggcggcgaagctacccatctactccgtagcgctaataccactcacagtagggagcgcttctgcttattatcatgcaggcttattctttaccaagcgctattttgttctcctgacagcagcagtcctcgtgatcacttggctcaatctcagggctactttgggcctttgcagaagccaaggatatcagattcattttattggtgatctctgcaatcttctgtggttatgtttaccagtgtcctccattccgattaagctaccaaggactaggcgagccgttgtgtttcgctgcatttggtcctttggcaaccacagccttttacttctcaaacagcagcttaaatacttcgagcggaggagcggctcttctccctctcactaaaacagttatagcttcatctgttctcgtcgggctgacaactactctgatactcttctgcagccatttccatcagatcgatggagatctcgccgttggaaagatgtctcctctggtaagaatcggcactaaagcaggatcgcggatagtgtcgattgggattgtcatgctttacattctcttggctacgtttgggacatgcggatctctcccgccatcttgcattgtcctctgtgcccttactctgcccatgggcaaaacggtcgtggactacgtgctgaaacatcacgaggacaacgcgaagatattcatggcgaagtactactgcgtgcgcctgcacgcgctgtttgggatggcactggcctctggtttggtcttggcccgaaatggtatattagcctgacagacaggctcataggcggcgctgaaatccaggagagggtccagagcaccctggagtttcagaatcagcgagcaccctgttcctcaatttatgttctgaatctgaactacttctgattcgactatcgaacaggccgatgagaatggggcgcagtactgagcagctgcagttttgccaagaaacggtggagggaatgggccctaggagaagtagaactactacagcgtcagaactcagatgcacaccggcccgtatcggacggcaagttcggtgctcgagttcatttggttcagcgtccttgtacgctttggtccgctctcgggggcttgcttgctcgtgcacggtcagactgccgttgcgccggggtccgggggatgccagtgtatgtatgcatatggattgaatcccaagcaaggacgagtcatgcactcatgtacaagcattacttctgtgcacagacgaccatacagattatatgagatctcactcacaccttttttttttgcatttggtttagccagcgaccggtaattgcttgtcactgcagcgtcctgtttcgacatgtctgtc

SEQ ID NO: 745 - DNA, 1782 bp, Zea Mays
tcctcaccgttggactggacgtgcccttatcctcttatcccagcagccggcgcccgccgcgcgctcgacaaactgccgcgaactctcccggcctcacactccttgcgcccgccgcggcagatgccgctcgccggcattgccctcacgcccctcctcgtctcacctctcgcgccttccccgcgccgtagccgtgtagccacttccgccgcgagaaggccaagggctctccagcgagctcggtgctcggctacagccgcttccggtgaagccggtgagctgtcgcacgcgacactgctatggagggcggcgaagctacccatctactccgtagcgctaataccactcacaaactggatacctagaagttgtttcggaattgggattgctatgactatacacatttcgcgtttgtgtatggttgcagcagtcctcgtgatcacttggctcaatctcagcaatgatgtttatgactcggatacaggggctgatagggacaagaaagaatctgttgtcagcattactggcagccgagcaatgacacaaaatgcggcgaacttttcccttttcctcggctttgcagggctactttgggcctttgcagaagccaaggatatcagattcattttattggtgatctctgcaatcttctgtggttatgtttaccagtgtcctccattccgattaagctaccaaggactaggcgagccgttgtgtttcgctgcatttggtcctttggcaaccacagccttttacttctcaaacagcagcttaaatacttcgagcggaggagcggctcttctccctctcactaaaacagttatagcttcatctgttctcgtcgggctgacaactactctgatactcttctgcagccatttccatcagatcgatggagatctcgccgttggaaagatgtctcctctggtaagaatcggcactaaagcaggatcgcggatagtgtcgattgggattgtcatgctttacattctcttggctacgtttgggacatgcggatctctcccgccatcttgcattgtcctctgtgcccttactctgcccatgggcaaaacggtcgtggactacgtgctgaaacatcacgaggacaacgcgaagatattcatggcgaagtactactgcgtgcgcctgcacgcgctgtttgggatggcactggcctctggtttggtcttggcccgaaatggtatattagcctgacagacaggctcataggcggcgctgaaatccaggagagggtccagagcaccctggagtttcagaatcagcgagcaccctgttcctcaatttatgttctgaatctgaactacttctgattcgactatcgaacaggccgatgagaatggggcgcagtactgagcagctgcagttttgccaagaaacggtggagggaatgggccctaggagaagtagaactactacagcgtcagaactcagatgcacaccggcccgtatcggacggcaagttcggtgctcgagttcatttggttcagcgtccttgtacgctttggtccgctctcgggggcttgcttgctcgtgcacggtcagactgccgttgcgccggggtccgggggatgccagtgtatgtatgcatatggattgaatcccaagcaaggacgagtcatgcactcatgtacaagcattacttctgtgcacagacgaccatacagattatatgagatctcactcacaccttttttttttgcatttggtttagccagcgaccggtaattgcttgtcactgcagcgtcctgtttcgacatgtctgtc

SEQ ID NO: 746 - DNA, 1757 bp, Zea Mays
tcctcaccgttggactggacgtgcccttatcctcttatcccagcagccggcgcccgccgcgcgctcgacaaactgccgcgaactctcccggcctcacactccttgcgcccgccgcggcagatgccgctcgccggcattgccctcacgcccctcctcgtctcacctctcgcgccttccccgcgccgtagccgtgtagccacttccgccgcgagaaggccaagggctctccagcgagctcggtgctcggctacagccgcttccggtgaagccggtgagctgtcgcacgcgacactgctatggagggcggcgaagctacccatctactccgtagcgctaataccactcacagggctgatagggacaagaaagaatctgttgtcagcattactggcaggtgccgtactcttgtttcatagagctagtagcattgtaaatggctggcaactggcatggttggttttagaagtgaaacatgatgctatgttgtgatctggttatgcagccgagcaatgacacaaaatgcggcgaacttttcccttttcctcggctttgcagggctactttgggcctttgcagaagccaaggatatcagattcattttattggtgatctctgcaatcttctgtggttatgtttaccagtgtcctccattccgattaagctaccaaggactaggcgagccgttgtgtttcgctgcatttggtcctttggcaaccacagccttttacttctcaaacagcagcttaaatacttcgagcggaggagcggctcttctccctctcactaaaacagttatagcttcatctgttctcgtcgggctgacaactactctgatactcttctgcagccatttccatcagatcgatggagatctcgccgttggaaagatgtctcctctggtaagaatcggcactaaagcaggatcgcggatagtgtcgattgggattgtcatgctttacattctcttggctacgtttgggacatgcggatctctcccgccatcttgcattgtcctctgtgcccttactctgcccatgggcaaaacggtcgtggactacgtgctgaaacatcacgaggacaacgcgaagatattcatggcgaagtactactgcgtgcgcctgcacgcgctgtttgggatggcactggcctctggtttggtcttggcccgaaatggtatattagcctgacagacaggctcataggcggcgctgaaatccaggagagggtccagagcaccctggagtttcagaatcagcgagcaccctgttcctcaatttatgttctgaatctgaactacttctgattcgactatcgaacaggccgatgagaatggggcgcagtactgagcagctgcagttttgccaagaaacggtggagggaatgggccctaggagaagtagaactactacagcgtcagaactcagatgcacaccggcccgtatcggacggcaagttcggtgctcgagttcatttggttcagcgtccttgtacgctttggtccgctctcgggggcttgcttgctcgtgcacggtcagactgccgttgcgccggggtccgggggatgccagtgtatgtatgcatatggattgaatcccaagcaaggacgagtcatgcactcatgtacaagcattacttctgtgcacagacgaccatacagattatatgagatctcactcacaccttttttttttgcatttggtttagccagcgaccggtaattgcttgtcactgcagcgtcctgtttcgacatgtctgtc

SEQ ID NO: 747 - DNA, 50 bp, Zea Mays
cgaggtggggtgacgacgagtcaggagagggcgggctcagcgagggtgtg

SEQ ID NO: 748 - DNA, 1085 bp, Zea Mays
ccgaaagcgaccccatcttccccgttcaaagcaaccggtcctcctcccttttcctcattccaagcgtccaaaccccccatacaaccaactcgcaactcctcgcgcggttcctcgatcgaagtctccagacgcccagcgtcgatcgcgacgacgtacgccaagccgcagcaaagctccggcggtgtgcggtgagatggcggtggtgtcagcgctggccaagtacaagctcgtgttcctgggcaaccaggcggtgggcaagacggccatcatcacccgcttcatgtacgacaagttcgacgacacctaccaggcgacgatcgggatcgacttcctgtccaagacgatgtacctcgaggaccgcaccgttcgccttcagctctgggacacagctgggcaggagaggttccgcagcctgatcccgagctacatcagagactcctccgtagccgtcatcgtttacgatgtgaccgacaggcagtcattcttgaacacgtcaaagtggatcgaggaagtaaacacgcaaagaggtggagacgtgctcatcttcctcgttggaaataaaactgaccttgtcgacaagaggaaagtgtccaccgacgaaggagaagccaaagcacaggagcatggtgctatgttcatggagaccagtgcaaaagctgggttcaacgtcaagcccctgttccgcaagatcgctggatcccttccaggactggacgcactttcgtcaggaaagcaggaagacatggtcgacataaacctcagacctgccagcggttcgtcggcttcaggtgcagccgcgcagctggagcagaaatcaggcggttgctcctgttgagacttcgacagttttgtgttcagagaagctacagcagtactgcaacatcgagttaagtactttcagagagattatgacgaagagtgtgttttcgcccagacgtccagtagtgatatactgacatccatagcgagaagccaatttctgtgtacagatttgtttagcaagttatcatatactaggatataactttttgagacacaagggacaaaatctgtggagcatcgacattcaatttcacagcaggaac

SEQ ID NO: 749 - DNA, 979 bp, Zea Mays
attccaagcgtccaaaccccccatacaaccaactcgcaactcctcgcgcggttcctcgatcgaagtctccagacgcccagcgtcgatcgcgacgacgtacgccaagccgcagcaaagctccggcggtgtgcggtgagatggcggtggtgtcagcgctggccaagtacaagctcgtgttcctgggcaaccaggcggtgggcaagacggccatcatcacccgcttcatgtacgacaagttcgacgacacctaccaggcgacgatcgggatcgacttcctgtccaagacgatgtacctcgaggaccgcaccgttcgccttcagctctgggacacagctgggcaggagaggttccgcagcctgatcccgagctacatcagagactcctccgtagccgtcatcgtttacgatgtgaccgtatccagtctcatctcatgtcgttcttttgcagacaggcagtcattcttgaacacgtcaaagtggatcgaggaagtaaacacgcaaagaggtggagacgtgctcatcttcctcgttggaaataaaactgaccttgtcgacaagaggaaagtgtccaccgacgaaggagaagccaaagcacaggagcatggtgctatgttcatggagaccagtgcaaaagctgggttcaacgtcaagcccctgttccgcaagatcgctggatcccttccaggactggacgcactttcgtcaggaaagcaggaagacatggtcgacataaacctcagacctgccagcggttcgtcggcttcaggtgcagccgcgcagctggagcagaaatcaggcggttgctcctgttgagacttcgacagttttgtgttcagagaagctacagcagtactgcaacatcgagttaagtactttcagagagattatgacgaagagtgtgttttcgcccagacgtccagtagtgatatactgacatccatagcgagaagccaatttctgtgtacagatttgtttagcaa

SEQ ID NO: 750 - DNA, 704 bp, Zea Mays
aaaattcagcatgttgaataatctccagacgaaaggtccatgcagcaaggcacgccgatgatttccagcttttctgttttagaatactaacaggcagtcattcttgaacacgtcaaagtggatcgaggaagtaaacacgcaaagaggtggagacgtgctcatcttcctcgttggaaataaaactgaccttgtcgacaagaggaaagtgtccaccgacgaaggagaagccaaagcacaggagcatggtgctatgttcatggagaccagtgcaaaagctgggttcaacgtcaagcccctgttccgcaagatcgctggatcccttccaggactggacgcactttcgtcaggaaagcaggaagacatggtcgacataaacctcagacctgccagcggttcgtcggcttcaggtgcagccgcgcagctggagcagaaatcaggcggttgctcctgttgagacttcgacagttttgtgttcagagaagctacagcagtactgcaacatcgagttaagtactttcagagagattatgacgaagagtgtgttttcgcccagacgtccagtagtgatatactgacatccatagcgagaagccaatttctgtgtacagatttgtttagcaagttatcatatactaggatataactttttgagacacaagggacaaaatctgtggagcatcgacattcaatttcacagcaggaac

SEQ ID NO: 751 - DNA, 3054 bp, Zea Mays
gcctagactccttgagccttctcgtctccccccttcgtccgcaccctataacctttgcatcatcttccttgcccgcgccctaacccttgcaccctcctccttgctgccgccggggccgatctccgctgccgccagccatggaggacttctgcgtggtgtgcgcagatacgctggagtgggtggcctacggtccgtgcggtcaccgcgacgtgtgctccacctgcgtcgctcgcctccgtttcgtgatggacgataagaagtgctgcatctgcaagaccgtctgccccttcgtcttcgttactaaggccatgggtgaatacactagagtggttgctgatttctcagtgttccccattggggtaaatgagggcaaagctggtgatttctggtaccatgaggatactcaggcatactttgatgatgtggaccactacaggatgatacgggcaatgtgtcgactttcttgtagcgtttgtgacaatgcagaagatcaggttgcccttgctgctcaagcaaagcgcagaagcaagttcaggagcatcgatcaactaaagggacatttattccatgtgcataggttgcacatgtgcaatctttgcttggaggggaggaaggtgttcatttgtgaacaaaagctttattcaaggtctcagttagctcagcatatcaagactggtgactctgaagtggatggctctgaggtagagcgcaatggttttgctggtcatccattgtgtgagttttgcaaaagttcattttacggagataatgagatttacatgcatatgtccagggaacactattcttgccacatatgccagagcatcctgagcagtatgactattttcggaactatgatgaccttgagttgcattttcgaaaggaccattttctttgtgaagatgaagcatgcttggcaaagaagtttgttgtttttctgagtgaagcagagctgaagaggcataatgctatggagcacggtgggcgaatgtctcgttcccagaggaatgctgcacttcagatacctaccagttttatatatcgcagaaatgagcaagcacaacggcgtggcagaggtagggggcgtaatgctctccatgaccgatttgacagtcatatctcatcatctgcacaaaacggccaagcaactgccgatcgccgtcttgatagtgtttcagggtcatttcagtcattaagcattggatctagttctgggggagctgaagttggccaaggctcgaggactggacaagtgctcgaacagttgtccttcccacctcttttagacccagatattcctgacaacaacgttgattcttttcatgatgaaacctcatttccttcattatccgagcagcaatcaagtccaacagggactacaaagtctagccaagagcacacttgcagcaagacttcaacaacgtagcaagggccctgtgaaggtacttaatactgctcggccacgtccccctgaaaatgttgaagccctctctagttccacccagacatggcctacacctgatcagggcctagtcctgtctggatattctcagcttcgatctggaactcaaccaacaagggaaaatgccatgccaactatctccagtaacacagtgtggaatcctgttgctccaaacaagatgaagcactctgtttctacgcctaatcttgtgtctggtggatcctctgcccaagtatcattgagtacagcttatggtagcaacaaaagtcaggatcctcctcaaggtaaccaaactttgcctgttccagaggatttccgtgctgcaaacaaaactctggttgaaagaatgcgttctgctctgggaatggacgaggacaggtactctgcattcaaagagattgctggtgaataccgtcaaggtatcataggtactctggagtatctttcatatgtcgagcagtttggactgtcacaccttgttcctgaaatggctaggctattgcctgatcctcaaaaacagagggaacttgctgatgcatattatacaaatactcgatttaaaagcctacaagaaaacggaggtggaactagctcacaagagggcaaccgtaaaaagaaggggaaggggaaagctcctgtcacagaaagcagtgctgctaatgatgtgaatagtgcactagcagataacattctggagactgtaagaaggcttcaatcaaaccagcaggctcgggaaggaggagctgaggtgctgtcgaaggatgggtatcgaccttccaagggggtccaaccggcagctggatcttcatctaatctggacagtgatactagttccaacacaaaatcatctggtgcaaaagataacataggcaagggaggaggcaataagcaaccgaagaagacagcaaagtttctcagagctcgtttaggtgacaactcattagccacacttgatttaagtcgtccaagtgcaagccctgaacgtccagaaagggaattacaaggccctgagacagggttgccagcgcgaggtgcttggaagaatggcggggggcagaaactcttttcgagcaatggacggaaataagtcattccaactgcatagccgtggggacggggttgacagcgccaggtgcttggaagaaatggtggccagaaactcgtttttgagcaatggacaaagtgagtcactgcaactgcatttaggtgtgtccatatacctgatcaacaattaggcaatgccctgttcattgctaccggcagactgcgcaaatttcatagtcatccatttcaaattcgtaatgatgtggtgggcaacatttaatgtggtacaaatatactactagattttctgtgcattacaacggaacatgtttggtagtattgtccaaaaaaaacttgtcaagctaaaaccaagatacagagggtccgtgtcaacatgttactatgtgttttcagtgctttgtttttttaaaggaaatatcttgctgaagtatgcaaaccgtaatgtctaattaaacttatgattccataattttttcttagcccgttgtatcgtgaattggcgatagatgtatagtatatagcattag

SEQ ID NO: 752 - DNA, 3186 bp, Zea Mays
gcctagactccttgagccttctcgtctccccccttcgtccgcaccctataacctttgcatcatcttccttgcccgcgccctaacccttgcaccctcctccttgctgccgccggggccgatctccgctgccgccagccatggaggacttctgcgtggtgtgcgcagatacgctggagtgggtggcctacggtccgtgcggtcaccgcgacgtgtgctccacctgcgtcgctcgcctccgtttcgtgatggacgataagaagtgctgcatctgcaagaccgtctgccccttcgtcttcgttactaaggccatgggtgaatacactagagtggttgctgatttctcagtgttccccattggggtaaatgagggcaaagctggtgatttctggtaccatgaggatactcaggcatactttgatgatgtggaccactacaggatgatacgggcaatgtgtcgactttcttgtagcgtttgtgacaatgcagaagatcaggttgcccttgctgctcaagcaaagcgcagaagcaagttcaggagcatcgatcaactaaagggacatttattccatgtgcataggttgcacatgtgcaatctttgcttggaggggaggaaggtgttcatttgtgaacaaaagctttattcaaggtctcagttagctcagcatatcaagactggtgactctgaagtggatggctctgagggaacactattcttgccacatatgccagaggcagcatcctgagcagtatgactattttcggaactatgatgaccttgaggcaaattgtatctacagttttacttggcgcctagctgggctccgagacccttggggaagtggtcataactgcattctcatatgtgctcattcaattcaattcagttgcattttcgaaaggaccattttctttgtgaagatgaagcatgcttggcaaagaagtttgttgtttttctgagtgaagcagagctgaagaggcataatgctatggagcacggtgggcgaatgtctcgttcccagaggaatgctgcacttcagatacctaccagttttatatatcgcagaaatgagcaagcacaacggcgtggcagaggtagggggcgtaatgctctccatgaccgatttgacagtcatatctcatcatctgcacaaaacggccaagcaactgccgatcgccgtcttgatagtgtttcagggtcatttcagtcattaagcattggatctagttctgggggagctgaagttggccaaggctcgaggactggacaagtgctcgaacagttgtccttcccacctcttttagacccagatattcctgacaacaacgttgattcttttcatgatgaaacctcatttccttcattatccgagcagcaatcaaggtatgcactagctctcagtcagagtgcaaggggcactgcgaggcttggggatgagtcactattcccccctttgcctgggtctagtgggtctaataacaataggggtgctggttcagtccaacagggactacaaagtctagccaagagcacacttgcagcaagacttcaacaacgtagcaagggccctgtgaaggtacttaatactgctcggccacgtccccctgaaaatgttgaagccctctctagttccacccagacatggcctacacctgatcagggcctagtcctgtctggatattctcagcttcgatctggaactcaaccaacaagggaaaatgccatgccaactatctccagtaacacagtgtggaatcctgttgctccaaacaagatgaagcactctgtttctacgcctaatcttgtgtctggtggatcctctgcccaagtatcattgagtacagcttatggtagcaacaaaagtcaggatcctcctcaaggtaaccaaactttgcctgttccagaggatttccgtgctgcaaacaaaactctggttgaaagaatgcgttctgctctgggaatggacgaggacaggtactctgcattcaaagagattgctggtgaataccgtcaaggtatcataggtactctggagtatctttcatatgtcgagcagtttggactgtcacaccttgttcctgaaatggctaggctattgcctgatcctcaaaaacagagggaacttgctgatgcatattatacaaatactcgatttaaaagcctacaagaaaacggaggtggaactagctcacaagagggcaaccgtaaaaagaaggggaaggggaaagctcctgtcacagaaagcagtgctgctaatgatgtgaatagtgcactagcagataacattctggagactgtaagaaggcttcaatcaaaccagcaggctcgggaaggaggagctgaggtgctgtcgaaggatgggtatcgaccttccaagggggtccaaccggcagctggatcttcatctaatctggacagtgatactagttccaacacaaaatcatctggtgcaaaagataacataggcaagggaggaggcaataagcaaccgaagaagacagcaaagtttctcagagctcgtttaggtgacaactcattagccacacttgatttaagtcgtccaagtgcaagccctgaacgtccagaaagggaattacaaggccctgagacagggttgccagcgcgaggtgcttggaagaatggcggggggcagaaactcttttcgagcaatggacggaaataagtcattccaactgcatagccgtggggacggggttgacagcgccaggtgcttggaagaaatggtggccagaaactcgtttttgagcaatggacaaagtgagtcactgcaactgcatttaggtgtgtccatatacctgatcaacaattaggcaatgccctgttcattgctaccggcagactgcgcaaatttcatagtcatccatttcaaattcgtaatgatgtggtgggcaacatttaatgtggtacaaatatactactagattttctgtgcattacaacggaacatgtttggtagtattgtccaaaaaaaacttgtcaagctaaaaccaagatacagagggtccgtgtcaacatgttactatgtgttttcagtgctttgtttttttaaaggaaatatcttgctgaagtatgcaaaccgtaatgtctaattaaacttatgattccataattttttcttagcccgttgtatcgtgaattggcgatagatgtatagtatatagcattag

SEQ ID NO: 753 - DNA, 3261 bp, Zea Mays
gcctagactccttgagccttctcgtctccccccttcgtccgcaccctataacctttgcatcatcttccttgcccgcgccctaacccttgcaccctcctccttgctgccgccggggccgatctccgctgccgccagccatggaggacttctgcgtggtgtgcgcagatacgctggagtgggtggcctacggtccgtgcggtcaccgcgacgtgtgctccacctgcgtcgctcgcctccgtttcgtgatggacgataagaagtgctgcatctgcaagaccgtctgccccttcgtcttcgttactaaggccatgggtgaatacactagagtggttgctgatttctcagtgttccccattggggtaaatgagggcaaagctggtgatttctggtaccatgaggatactcaggcatactttgatgatgtggaccactacaggatgatacgggcaatgtgtcgactttcttgtagcgtttgtgacaatgcagaagatcaggttgcccttgctgctcaagcaaagcgcagaagcaagttcaggagcatcgatcaactaaagggacatttattccatgtgcataggttgcacatgtgcaatctttgcttggaggggaggaaggtgttcatttgtgaacaaaagctttattcaaggtctcagttagctcagcatatcaagactggtgactctgaagtggatggctctgaggtagagcgcaatggttttgctggtcatccattgtgtgagttttgcaaaagttcattttacggagataatgagatttacatgcatatgtccagggaacactattcttgccacatatgccagaggcagcatcctgagcagtatgactattttcggaactatgatgaccttgagttttacttggcgcctagctgggctccgagacccttggggaagtggtcataactgcattctcatatgtgctcattcaattcaattcagttgcattttcgaaaggaccattttctttgtgaagatgaagcatgcttggcaaagaagtttgttgtttttctgagtgaagcagagctgaagaggcataatgctatggagcacggtgggcgaatgtctcgttcccagaggaatgctgcacttcagatacctaccagttttatatatcgcagaaatgagcaagcacaacggcgtggcagaggtagggggcgtaatgctctccatgaccgatttgacagtcatatctcatcatctgcacaaaacggccaagcaactgccgatcgccgtcttgatagtgtttcagggtcatttcagtcattaagcattggatctagttctgggggagctgaagttggccaaggctcgaggactggacaagtgctcgaacagttgtccttcccacctcttttagacccagatattcctgacaacaacgttgattcttttcatgatgaaacctcatttccttcattatccgagcagcaatcaaggtatgcactagctctcagtcagagtgcaaggggcactgcgaggcttggggatgagtcactattcccccctttgcctgggtctagtgggtctaataacaataggggtgctggttcagtccaacagggactacaaagtctagccaagagcacacttgcagcaagacttcaacaacgtagcaagggccctgtgaaggtacttaatactgctcggccacgtccccctgaaaatgttgaagccctctctagttccacccagacatggcctacacctgatcagggcctagtcctgtctggatattctcagcttcgatctggaactcaaccaacaagggaaaatgccatgccaactatctccagtaacacagtgtggaatcctgttgctccaaacaagatgaagcactctgtttctacgcctaatcttgtgtctggtggatcctctgcccaagtatcattgagtacagcttatggtagcaacaaaagtcaggatcctcctcaaggtaaccaaactttgcctgttccagaggatttccgtgctgcaaacaaaactctggttgaaagaatgcgttctgctctgggaatggacgaggacaggtactctgcattcaaagagattgctggtgaataccgtcaaggtatcataggtactctggagtatctttcatatgtcgagcagtttggactgtcacaccttgttcctgaaatggctaggctattgcctgatcctcaaaaacagagggaacttgctgatgcatattatacaaatactcgatttaaaagcctacaagaaaacggaggtggaactagctcacaagagggcaaccgtaaaaagaaggggaaggggaaagctcctgtcacagaaagcagtgctgctaatgatgtgaatagtgcactagcagataacattctggagactgtaagaaggcttcaatcaaaccagcaggctcgggaaggaggagctgaggtgctgtcgaaggatgggtatcgaccttccaagggggtccaaccggcagctggatcttcatctaatctggacagtgatactagttccaacacaaaatcatctggtgcaaaagataacataggcaagggaggaggcaataagcaaccgaagaagacagcaaagtttctcagagctcgtttaggtgacaactcattagccacacttgatttaagtcgtccaagtgcaagccctgaacgtccagaaagggaattacaaggccctgagacagggttgccagcgcgaggtgcttggaagaatggcggggggcagaaactcttttcgagcaatggacggaaataagtcattccaactgcatagccgtggggacggggttgacagcgccaggtgcttggaagaaatggtggccagaaactcgtttttgagcaatggacaaagtgagtcactgcaactgcatttaggtgtgtccatatacctgatcaacaattaggcaatgccctgttcattgctaccggcagactgcgcaaatttcatagtcatccatttcaaattcgtaatgatgtggtgggcaacatttaatgtggtacaaatatactactagattttctgtgcattacaacggaacatgtttggtagtattgtccaaaaaaaacttgtcaagctaaaaccaagatacagagggtccgtgtcaacatgttactatgtgttttcagtgctttgtttttttaaaggaaatatcttgctgaagtatgcaaaccgtaatgtctaattaaacttatgattccataattttttcttagcccgttgtatcgtgaattggcgatagatgtatagtatatagcattag

SEQ ID NO: 754 - DNA, 2980 bp, Zea Mays
gcctagactccttgagccttctcgtctccccccttcgtccgcaccctataacctttgcatcatcttccttgcccgcgccctaacccttgcaccctcctccttgctgccgccggggccgatctccgctgccgccagccatggaggacttctgcgtggtgtgcgcagatacgctggagtgggtggcctacggtccgtgcggtcaccgcgacgtgtgctccacctgcgtcgctcgcctccgtttcgtgatggacgataagaagtgctgcatctgcaagaccgtctgccccttcgtcttcgttactaaggccatgggtgaatacactagagtggttgctgatttctcagtgttccccattggggtaaatgagggcaaagctggtgatttctggtaccatgaggatactcaggcatactttgatgatgtggaccactacaggatgatacgggcaatgtgtcgactttcttgtagcgtttgtgacaatgcagaagatcaggttgcccttgctgctcaagcaaagcgcagaagcaagttcaggagcatcgatcaactaaagggacatttattccatgtgcataggttgcacatgtgcaatctttgcttggaggggaggaaggtgttcatttgtgaacaaaagctttattcaaggtctcagttagctcagcatatcaagactggtgactctgaagtggatggctctgagggaacactattcttgccacatatgccagaggcagcatcctgagcagtatgactattttcggaactatgatgaccttgagttgcattttcgaaaggaccattttctttgtgaagatgaagcatgcttggcaaagaagtttgttgtttttctgagtgaagcagagctgaagaggcataatgctatggagcacggtgggcgaatgtctcgttcccagaggaatgctgcacttcagatacctaccagttttatatatcgcagaaatgagcaagcacaacggcgtggcagagggtcatttcagtcattaagcattggatctagttctgggggagctgaagttggccaaggctcgaggactggacaagtgctcgaacagttgtccttcccacctcttttagacccagatattcctgacaacaacgttgattcttttcatgatgaaacctcatttccttcattatccgagcagcaatcaaggtatgcactagctctcagtcagagtgcaaggggcactgcgaggcttggggatgagtcactattcccccctttgcctgggtctagtgggtctaataacaataggggtgctggttcagtccaacagggactacaaagtctagccaagagcacacttgcagcaagacttcaacaacgtagcaagggccctgtgaaggtacttaatactgctcggccacgtccccctgaaaatgttgaagccctctctagttccacccagacatggcctacacctgatcagggcctagtcctgtctggatattctcagcttcgatctggaactcaaccaacaagggaaaatgccatgccaactatctccagtaacacagtgtggaatcctgttgctccaaacaagatgaagcactctgtttctacgcctaatcttgtgtctggtggatcctctgcccaagtatcattgagtacagcttatggtagcaacaaaagtcaggatcctcctcaaggtaaccaaactttgcctgttccagaggatttccgtgctgcaaacaaaactctggttgaaagaatgcgttctgctctgggaatggacgaggacaggtactctgcattcaaagagattgctggtgaataccgtcaaggtatcataggtactctggagtatctttcatatgtcgagcagtttggactgtcacaccttgttcctgaaatggctaggctattgcctgatcctcaaaaacagagggaacttgctgatgcatattatacaaatactcgatttaaaagcctacaagaaaacggaggtggaactagctcacaagagggcaaccgtaaaaagaaggggaaggggaaagctcctgtcacagaaagcagtgctgctaatgatgtgaatagtgcactagcagataacattctggagactgtaagaaggcttcaatcaaaccagcaggctcgggaaggaggagctgaggtgctgtcgaaggatgggtatcgaccttccaagggggtccaaccggcagctggatcttcatctaatctggacagtgatactagttccaacacaaaatcatctggtgcaaaagataacataggcaagggaggaggcaataagcaaccgaagaagacagcaaagtttctcagagctcgtttaggtgacaactcattagccacacttgatttaagtcgtccaagtgcaagccctgaacgtccagaaagggaattacaaggccctgagacagggttgccagcgcgaggtgcttggaagaatggcggggggcagaaactcttttcgagcaatggacggaaataagtcattccaactgcatagccgtggggacggggttgacagcgccaggtgcttggaagaaatggtggccagaaactcgtttttgagcaatggacaaagtgagtcactgcaactgcatttaggtgtgtccatatacctgatcaacaattaggcaatgccctgttcattgctaccggcagactgcgcaaatttcatagtcatccatttcaaattcgtaatgatgtggtgggcaacatttaatgtggtacaaatatactactagattttctgtgcattacaacggaacatgtttggtagtattgtccaaaaaaaacttgtcaagctaaaaccaagatacagagggtccgtgtcaacatgttactatgtgttttcagtgctttgtttttttaaaggaaatatcttgctgaagtatgcaaaccgtaatgtctaattaaacttatgattccataattttttcttagcccgttgtatcgtgaattggcgatagatgtatagtatatagcattag

SEQ ID NO: 755 - DNA, 2980 bp, Zea Mays
gcctagactccttgagccttctcgtctccccccttcgtccgcaccctataacctttgcatcatcttccttgcccgcgccctaacccttgcaccctcctccttgctgccgccggggccgatctccgctgccgccagccatggaggacttctgcgtggtgtgcgcagatacgctggagtgggtggcctacggtccgtgcggtcaccgcgacgtgtgctccacctgcgtcgctcgcctccgtttcgtgatggacgataagaagtgctgcatctgcaagaccgtctgccccttcgtcttcgttactaaggccatgggtgaatacactagagtggttgctgatttctcagtgttccccattggggtaaatgagggcaaagctggtgatttctgcgtttgtgacaatgcagaagatcaggttgcccttgctgctcaagcaaagcgcagaagcaagttcaggagcatcgatcaactaaagggacatttattccatgtgcataggttgcacatgtgcaatctttgcttggaggggaggaaggtgttcatttgtgaacaaaagctttattcaaggtctcagttagctcagcatatcaagactggtgactctgaagtggatggctctgaggtagagcgcaatggttttgctggtcatccattgtgtgagttttgcaaaagttcattttacggagataatgagatttacatgcatatgtccagggaacactattcttgccacatatgccagaggcagcatcctgagcagtatgactattttcggaactatgatgaccttgagttgcattttcgaaaggaccattttctttgtgaagatgaagcatgcttggcaaagaagtttgttgtttttctgagtgaagcagagctgaagaggcataatgctatggagcacggtgggcgaatgtctcgttcccagaggaatgctgcacttcagatacctaccagttttatatatcgcagaaatgagcaagcacaacggcgtggcagagtcattaagcattggatctagttctgggggagctgaagttggccaaggctcgaggactggacaagtgctcgaacagttgtccttcccacctcttttagacccagatattcctgacaacaacgttgattcttttcatgatgaaacctcatttccttcattatccgagcagcaatcaaggtatgcactagctctcagtcagagtgcaaggggcactgcgaggcttggggatgagtcactattcccccctttgcctgggtctagtgggtctaataacaataggggtgctggttcagtccaacagggactacaaagtctagccaagagcacacttgcagcaagacttcaacaacgtagcaagggccctgtgaaggtacttaatactgctcggccacgtccccctgaaaatgttgaagccctctctagttccacccagacatggcctacacctgatcagggcctagtcctgtctggatattctcagcttcgatctggaactcaaccaacaagggaaaatgccatgccaactatctccagtaacacagtgtggaatcctgttgctccaaacaagatgaagcactctgtttctacgcctaatcttgtgtctggtggatcctctgcccaagtatcattgagtacagcttatggtagcaacaaaagtcaggatcctcctcaaggtaaccaaactttgcctgttccagaggatttccgtgctgcaaacaaaactctggttgaaagaatgcgttctgctctgggaatggacgaggacaggtactctgcattcaaagagattgctggtgaataccgtcaaggtatcataggtactctggagtatctttcatatgtcgagcagtttggactgtcacaccttgttcctgaaatggctaggctattgcctgatcctcaaaaacagagggaacttgctgatgcatattatacaaatactcgatttaaaagcctacaagaaaacggaggtggaactagctcacaagagggcaaccgtaaaaagaaggggaaggggaaagctcctgtcacagaaagcagtgctgctaatgatgtgaatagtgcactagcagataacattctggagactgtaagaaggcttcaatcaaaccagcaggctcgggaaggaggagctgaggtgctgtcgaaggatgggtatcgaccttccaagggggtccaaccggcagctggatcttcatctaatctggacagtgatactagttccaacacaaaatcatctggtgcaaaagataacataggcaagggaggaggcaataagcaaccgaagaagacagcaaagtttctcagagctcgtttaggtgacaactcattagccacacttgatttaagtcgtccaagtgcaagccctgaacgtccagaaagggaattacaaggccctgagacagggttgccagcgcgaggtgcttggaagaatggcggggggcagaaactcttttcgagcaatggacggaaataagtcattccaactgcatagccgtggggacggggttgacagcgccaggtgcttggaagaaatggtggccagaaactcgtttttgagcaatggacaaagtgagtcactgcaactgcatttaggtgtgtccatatacctgatcaacaattaggcaatgccctgttcattgctaccggcagactgcgcaaatttcatagtcatccatttcaaattcgtaatgatgtggtgggcaacatttaatgtggtacaaatatactactagattttctgtgcattacaacggaacatgtttggtagtattgtccaaaaaaaacttgtcaagctaaaaccaagatacagagggtccgtgtcaacatgttactatgtgttttcagtgctttgtttttttaaaggaaatatcttgctgaagtatgcaaaccgtaatgtctaattaaacttatgattccataattttttcttagcccgttgtatcgtgaattggcgatagatgtatagtatatagcattag

SEQ ID NO: 756 - DNA, 972 bp, Zea Mays
gacagccctcccaagttatcaggcccacgtgcaccaatccttgcctggatggcctcagatggttatgcacgtgtaccaggtaacttaacaaggctatcacgagttcaacaacttgaactcatcatcccaaagatctcccaccatacatgcatattacagtaatcacattcgatacacacacttcggagataagagcggaagactttacaaacattctttaccttttcaaaactcaagttttacatgtttcgaaagagtaatatttattacaagtcctgatatactcagagtgcataacttattacaaaagcaggaaggtagaaaccctccaaagcttatacataaacctagctagtccttctccagaactggaaacgccctccagccacaggaactcctagaatacttctcatcacctacaacaacatgggttcgaaaaccctgagtacggagtgtactttcgcaagtcttacccgactaaggaaaaagactctcaaggatatgctggatttaggaatcaaggagaggcttttagcaagaatcaacttagatacttttgcagaaaaagcttactaaagtgagtccttactttcaatattttaatgccagattaaatattaatagactctgtttgcatctagtctaatttcaccatctcatcaatacaacatcatttttattcataatgttcacatcctgacttaggttgcagggcagcgatcaagtctccactctccggggatataacggcgatccgaatcgatttactcagctgaggatctctaaccacatgacatatgtagcacttaacccttgcatatgtcaaccgttcccacagatcctccacaacgtgaaccggtccgcgctacccgggagcacagtactcctccgtccagcctccagccaggagggtacacgctactcccaccatctcccacgcccagtgcgcggttgtcttttcacgtatggaat

SEQ ID NO: 757 - DNA, 5658 bp, Zea Mays
attttatgcagcacctagcccatctctctttagtaatcttgttcatcttactatggtcttcaaacttgctacagaactttggcccaaaaccaaatagactaggcgcaacagagctccaaagttaggctcaacacactaaaacctagtttcagccttatgcactaagtctgggatccagaaacctgacagcctgtgtttgagcaaatttcacacctagttccagacaaccaatagtggtagagttcaagcagtaaatggtgtgagctccactgacctgagatgattacggaacaagcttcatacgggccagcaactccttaggacgtccaagccatggcgaggtgggagaactgctggcgcggccactagcacaggggaatggcgtgcgatgaactggagagggctacagagacctgcagactttaggatcaccacccaaagcagtgaaccatggctagactcgaggcaaggaggagagcttcactgaacctgcacctaaggcactgcagatgtaggaaagtgttcactgaaccactacacaactcagtggggaagtcttctggggatgccagcactgcatggctaacacacatggctcccatgcacaaaccttgctggcacagcacacaactcacaaatatcactaaaacactgaatctggtctatttgatatggataaggagcaagcagtcaaaactgcacctacaaacagacacattccagctcaccttgagacttattaatggggagcgagacttctagtcctcaatgatgcacttcatccatatcccatactcagctcaccagtatcccatatcgcagacaacaaacaaaaccaacaaatactctactgcccactgctcactgctaaaatatcccacctattcactggatatggacagaggtaaaggcagataaaaaaaccccacggtagacaggctcaaacacatccaaaggtttgatattttctgcagggggaaaagatattctttagatattttgggaatctctgaattgctttagctggtctgatcctccctgttcagccccacttttctccccattcctgttaaggatagatcagtcccctataatcaaacttgttcactatctgaggcacttcaagtttgtttcaagaatctaggatccaaactgcatgtactacaagttatagtgtccaagaatcagccaccttccactaaatctgttttcagttttctgaaacagacatctctcacagacatttaggcacgttttactctaaattttacttagcatcaaacccaccttcctgtcgaaaacttgttctcctaacacccatgtaaacttttgtcacagggtctttggcttatacccacacagatcaagagttctggcatcccaaagttgagccaaaacactaaaatacccagtttcaaaagtctgaaacagcacagtttaagtctgatagagggttttgccttccctttttctccaaactctacacagtaacaagtcaatcctttgcataaaagttgtttcccttcatatggaccttgactttactacagaactcttaaccaaaatctccatatattaattatcatagagctccaaaactgggtaaaaactcactgaacttctcagtaacagtcaactaaatcagtcccaactcaattctgacaggggaagtttgagggtattttactcccaactttatatagcaccaagtctatctcactttaggaaacttacttaccatattttggtctccaactttaccatatagttcttagtccaaaatcacatgaatcagccgcaaatgggctccaaactgagcaactttcactgaaattcagttttcaataactgaatataattcagtttcagccataaacagtccaactttgagctagttttactctacttttcgtgcaggatcatgctatacccacttactgaaaattattcaccatcatatggtcattatttcatctacaaacaccatagcctaaaaccttataagctagccacaaaccagcttccaaactgctatcaaaacactgaaattcagtttcagttactgcttccaatctgaaaattcagaatacagcagcaccacttagaaccactctttttcctgggttccaaatgtttttaggggcaagttgcttaataaagtttatactcctatagttcctctacaactttgacatagtgatccatatctaaaccctcacagactccaaactacagaggtccaaagtttgcccaaattactgaaattcagactctgaattctaccaagtctgaaatccagaaactctgttagctctactttggaccagtttttctctaagtttcaaatatctttagagctaggtgactccaccaaacttatactcctcatgtagctctataactttgttataaggaccatcttcaaaatgcttatagatcagaatttataagggttcaaagttggctagtttatattaatttcagaagttccaatttgaacccaaaactgaatttctgcaaattactccaaattcttccacacaacttgggaatatccaaatataaaagttgttcaccttttccaaactctacaactttggcactttgacttttgcccaattgtctctagattttgaattccacttttagggcaaatttagggtttcaaatatggttccttctcatctagtgatttaccaactcaattcatcctcctaaaagatgagtgactccttaatctcaaatcaaactctagtatatgaagctcatgtccaaattgtccctggtttaggagttgttttgttcatccacaattccaagcaaggtttttcaacctaagtcctatactcaacacaccacatcacactttgaatcgaaaattttaacctaataaatgcattctaagtgtaacaagcaagttaatgcaaatgcttatgatgacatgtcagagttttagttcacgtaataccaggggtgttacagccttcccccctaaaagaaatctcgtcccgagatttaaaaatctagacttagtaacggaaaaggaaacacgtcactgacttatttcctaatttctcttacaaggcaggggaggtgttctgtttcgcttaaccatgagttaaccacgatgtcgctcgacatttgcactcgtctccgatgctgcgaacttccaatgatgactcggcgataaatctctttttgtgtgttttactcaagatgttgcatctaatttgctttggataatgtttatccaattttccatttcttgttcaacagactcacatgggaaatcatgatggtaccatctcatcacgaaacacaaccagaaactatggtaccagcgtgtgccaagtcatttatccatacacgtgcattcacagggaatatccaaaggaatagccattttaactcttggaattcgacaaacggctatagatattaacagttgcctctgaaacaggcagttctttttttacatcatagccataggcaaactcacaagttacctgatccaggtgaaacaggaaaaactctttacaacaaagtttaacctgtttttactagctaacattgccatatgggtctaccttacatctagctttcaaaactaatttacataggtatattgcctaacgaggattaagttgcctgctatatcttctccggttatcacatctgccagatgtctgtttccatgctccataggtaccttttagtctgttggtgttggggcagaataaaaggcaacattgagcatatgcaccgtttgttgcagatggttgatcagtcgctgcactgtttgaaattccatcggataggtacgatgcaactcctcgagcacctgatcttgctgaccaaggaagcccatggtttccttaagttcttccctaacagtaacaacatacgagtgagtttcttcttgttgctgactcaaaacttttgattttgaatgagcattagtcagctgatgctcaagttccttgatgcgatcctgatccgctttgtgttgtgcctgcagttctgctaccttatgctctagtccaacaattcgctcaacttgaatctttgtttctttaagctgttcttgtgcctgagtacaagccctattcttggccatttccatcatcttaaatgctgcataactcccagtgtataactgctgccacatttgacgactgtgccctcgagtaagctacaactctagcacagccatcaaaacccgagcagatgccgattcaacagaatcctgcccaatgggaatgctttccattaatcgggcctagtgatgatacacaactgggtcacttaaggcaactgcagggaacaacctcatagacgtcgcttgtatttcttcccatttctggtaacaaatggttgtcaacacctctaagacagctacctcagcaccttcccaaggagtcattccttcggcatggaacatccattgtggccaagatggctttctagcacgttctggaatacgcactacgacctcataccatggttgtcctctaagaatagtgcgcgaccactggtacttgggtgcttcggtatatccaacttcttgaagtagtcgccataggaccataggaacaccgaaatctcgtagaaactctccaactcctgtaggcgcttcttgttgattcatctatagagaaaagcaatagatacactctattcactaaagatgtatgaacagggtatatgaaacacatactaaaatagctacacagggggtttaacttaaagttgtatgacatgatgcatgctcgtcctattcgtccttgcaactcttgccaacatatagtggctatcacgttttatggcggtggcatacctactcactccgtcatttatcactagtcgcactttcctagggtttagttagtgtacctgcagaaaattgcattatagttgtgggttagtggttagcatcctaaactaagccaccttatagtccttaacttaaccatatactatttgcactttgactatcagaatttgatcatagattcttaagtttttccaaaatagtttggactcgaaatccttttgaagtatatcaacagattactttaatatccatgctaatgggggatcgctccgataccaatctgtgacagccctcccaagttatcaggcccacgtgcaccaatccttgcctggatggcctcagatggttatgcacgtgtaccaggtaacttaacaaggctatcacgagttcaacaacttgaactcatcatcccaaagatctcccaccatacatgcatattacagtaatcacattcgatacacacacttcggagataagagcggaagactttacaaacattctttaccttttcaaaactcaagttttacatgtttcgaaagagtaatatttattacaagtcctgatatactcagagtgcataacttattacaaaagcaggaaggtagaaaccctccaaagcttatacataaacctagctagtccttctccagtgatgactcagaaattcgagatgtcaatgatgggcgagttgaactacttccttgggttccaagtgaagcaactcaaggatggcaccttcatctcacaaacgaagtatacacaagacttgttcaagaggtttgggatgaaggatgccaagcccgcaaagactccaatgggaaccg

SEQ ID NO: 758 - DNA, 2416 bp, Zea Mays
aacacacttacatcctccacaacgatcaccccaatccattctctcctcacacgggcgcgacccaaaaccccattcatcccctcctccggtctcgactgccatggccgccgggcgggccttccttggcgcgccgtgctcctccctcgccgccggcgcccgttgccttgccttcgcttcccctttgccccggaacctcacccccgcgctccgctgcggcgttcgcggtcgctgcatcgcctccgcctcctcgtcccctgactcgccccccttgccggagccctacgtgctcaccactcctctctactacgtcaacgctccgccgcatatgggaagcgcctacaccaccatcgcagcggacgccatcgcccgcttccagaggttgctagagaagaatgttatatttattaccggaacagatgaacacggtgagaaaatatctgcttccgcagaggccagtggtagaaacccaaaggagcattgtgatgcaatttcaagttcatataggacgctctgggctgacttagacatagaatatgacaagtttattcgcacaacggatcgtaagcatgaggctgttgtgaacgaattctattccagagtgttaaacaatggcgacatatatagagctgattatgaaggactttattgtgtgagctgtgaagagtacaaggatgaaaaagagctattggagaacaattgttgccctgtgcatctgaagccttgtgttgaaagaaaagaagataactatttctttgccttgtcaaagtaccaacataaattggaagagctactgacaagaaatcctgattttgtaaggccatcatatcgcttgaacgagcttgtaggtccaaggctggattaaaagcggattaagggacttttctatttctcgtgcatctgtagaatggggcattccggtgccaaacgataccaagcagacaatatatgtgtggtttgatgctctattagggtatatttcagcattactagatgatggtgagcaggcaagtttgcagcaagctgttgatcatggttggccagcctcactgcacttgattggaaaggacatattacggtttcatgcagtttattggccagccatgttaatgtcagcaggtttaagtgttcctgatacagtttttggtcatggattcttgactaaggatggcatgaagatgggaaagtcactaggcaacacacttgaaccaaaagatctggtagaaagatttggtgctgatgctgttaggtatttcttcttgcgggaagtagaatttggcaatgatggggactattcagaagaacgctttatcaatatagtgaatgctcatcttgctaatacaattggtatttctacttaaattacctttgtttctgaaacatgtatatacaattcatgtgtgctgaaattgttatgccattttccttctttcttcacttggtgctccttgtttctgcctatgcatctttatgtgttaataactatctcactgtcttgaacaggaaacctccttaatcgtacacttgggctactaaaaaagaactgtaaatccgtactagcttttgattcaattgctgccgcagatggaggtttgttcagaaataagatagaaaatctgcatgtgaaactgttttagagattggtgatcttggaaacttgtacatcgatgagcaagcaccatggtcctgttttaagcaagggggtgagagtgctgaaaaggctgcaaaggatctcgtacttattttagagacaatgaggataattgcaatcacactatctcctatcactccaagcctttctctgaggatttacacacagcttggtttcacagaagaccagtttagggtgttgagatgggaggatacgaaatggggaggccttaaagcaggccaggtaatgtcggagccaaagccagtatttgcaaggatagaaaccgaggtggaagaggaagcccaaacaagttcaaaagcagcaaaaggtgggaagaaagcacgcaggaaaggacttgtggaggcatagtttctgttggaacagtgtatcagcatcgttaaaaggagaatatttcatcttctcttttttttggaaaaaaatctttagcctatctgttcctgaaatttgttctttgctaacgtgtcacattgtatcatgtagatagccaaaaaaagaccactattgattctgatgctctgtcagagagagagctaggataattgcgagtagagctagcagcggatttggatcatccaaaatctaattggatatttgttgttttggataaggtggagagcaacttaaaaaaacccaatgtccattagatatctttggacttgacttgtttctaatgtttggagacatgctgatttttatgaactaataacacagtagctggttgttatatggagttgttgcaaataaatg

SEQ ID NO: 759 - DNA, 2674 bp, Zea Mays
aacacacttacatcctccacaacgatcaccccaatccattctctcctcacacgggcgcgacccaaaaccccattcatcccctcctccggtctcgactgccatggccgccgggcgggccttccttggcgcgccgtgctcctccctcgccgccggcgcccgttgccttgccttcgcttcccctttgccccggaacctcacccccgcgctccgctgcggcgttcgcggtcgctgcatcgcctccgcctcctcgtcccctgactcgccccccttgccggagccctacgtgctcaccactcctctctactacgtcaacgctccgccgcatatgggaagcgcctacaccaccatcgcagcggacgccatcgcccgcttccagaggttgctagagaagaatgttatatttattaccggaacagatgaacacggtgagaaaatatctgcttccgcagaggccagtggtagaaacccaaaggagcattgtgatgcaatttcaagttcatataggacgctctgggctgacttagacatagaatatgacaagtttattcgcacaacggatcgtaagcatgaggctgttgtgaacgaattctattccagagtgttaaacaatggcgacatatatagagctgattatgaaggactttattgtgtgagctgtgaagagtacaaggatgaaaaagagctattggagaacaattgttgccctgtgcatctgaagccttgtgttgaaagaaaagaagataactatttctttgccttgtcaaagtaccaacataaattggaagagctactgacaagaaatcctgattttgtaaggccatcatatcgcttgaacgaggtccaaggctggattaaaagcggattaagggacttttctatttctcgtgcatctgtagaatggggcattccggtgccaaacgataccaagcagacaatatatgtgtggtttgatgctctattagggtatatttcagcattactagatgatggtgagcaggcaagtttgcagcaagctgttgatcatggttggccagcctcactgcacttgattggaaaggacatattacggtttcatgcagtttattggccagccatgttaatgtcagcaggtttaagtgttcctgatacagtttttggtcatggattcttgactaaggatggcatgaagatgggaaagtcactaggcaacacacttgaaccaaaagatctggtagaaagatttggtgctgatgctgttaggtatttcttcttgcgggaagtagaatttggcaatgatggggactattcagaagaacgctttatcaatatagtgaatgctcatcttgctaatacaattggaaacctccttaatcgtacacttgggctactaaaaaagaactgtaaatccgtactagcttttgattcaattgctgccgcagatggaggtttgttcagaaataagatagaaaatctggtaagtagattttcatggtatcttcaactatggtaagaggagtggagggtaaaggatttaattataaaccatgggttttttattgaaccatgggttttttattgaactggcagtctactaggctagtatgtgtgtaaccaactgcataaggagttaaaagacatagaatatataaggtctacaacagtgaatttgtttttttactctgtcaacaagtgttgtcaatgatgtggtgggtccattgtgtttgaattcatgaaactatgatacatttggatgttttaggccaaggtctgcttagcctgcctaagtacccacaaattcacatgccttgttgtgtctctgttcgagtcaccatgaaaattgtttttacaggtggacaaggcaaaacaccaatatgaaaatcttttactgtcatcagcatgtgaaactgttttagagattggtgatcttggaaacttgtacatcgatgagcaagcaccatggtcctgttttaagcaagggggtgagagtgctgaaaaggctgcaaaggatctcgtacttattttagagacaatgaggataattgcaatcacactatctcctatcactccaagcctttctctgaggatttacacacagcttggtttcacagaagaccagtttagggtgttgagatgggaggatacgaaatggggaggccttaaagcaggccaggtaatgtcggagccaaagccagtatttgcaaggatagaaaccgaggtggaagaggaagcccaaacaagttcaaaagcagcaaaaggtgggaagaaagcacgcaggaaaggacttgtggaggcatagtttctgttggaacagtgtatcagcatcgttaaaaggagaatatttcatcttctcttttttttggaaaaaaatctttagcctatctgttcctgaaatttgttctttgctaacgtgtcacattgtatcatgtagatagccaaaaaaagaccactattgattctgatgctctgtcagagagagagctaggataattgcgagtagagctagcagcggatttggatcatccaaaatctaattggatatttgttgttttggataaggtggagagcaacttaaaaaaacccaatgtccattagatatctttggacttgacttgtttctaatgtttggagacatgctgatttttatgaactaataacacagtagctggttgttatatggagttgttgcaaataaatg

SEQ ID NO: 760 - DNA, 2130 bp, Zea Mays
aacacacttacatcctccacaacgatcaccccaatccattctctcctcacacgggcgcgacccaaaaccccattcatcccctcctccggtctcgactgccatggccgccgggcgggccttccttggcgcgccgtgctcctccctcgccgccggcgcccgttgccttgccttcgcttcccctttgccccggaacctcacccccgcgctccgctgcggcgttcgcggtcgctgcatcgcctccgcctcctcgtcccctgactcgccccccttgccggagccctacgtgctcaccactcctctctactacgtcaacgctccgccgcatatgggaagcgcctacaccaccatcgcagcggacgccatcgcccgcttccagaggttgctagagaagaatgttatatttattaccggaacagatgaacacggtgagaaaatatctgcttccgcagaggccagtggtagaaacccaaaggagcattgtgatgcaatttcaagttcatataggacgctctgggctgacttagacatagaatatgacaagtttattcgcacaacggatcgtaagcatgaggctgttgtgaacgaattctattccagagtgttaaacaatggcgacatatatagagctgattatgaaggactttattgtgtgagctgtgaagagtacaaggatgaaaaagagctattggagaacaattgttgccctgtgcatctgaagccttgtgttgaaagaaaagaagataactatttctttgccttgtcaaagtaccaacataaattggaagagctactgacaagaaatcctgattttgtaaggccatcatatcgcttgaacgaggtccaaggctggattaaaagcggattaagggacttttctatttctcgtgcatctgtagaatggggcattccggtgccaaacgataccaagcagacaatatatgtgtggtttgatgctctattagggtatatttcagcattactagatgatggtgagcaggcaagtttgcagcaagctgttgatcatggttggccagcctcactgcacttgattggaaaggacatattacggtttcatgcagtttattggccagccatgttaatgtcagcaggtttaagtgttcctgatacagtttttggtcatggattcttgactaaggaaacctccttaatcgtacacttgggctactaaaaaagaactgtaaatccgtactagcttttgattcaattgctgccgcagatggaggtttgttcagaaataagatagaaaatctggtggacaaggcaaaacaccaatatgaaaatcttttactgtcatcagcatgtgaaactgttttagagattggtgatcttggaaacttgtacatcgatgagcaagcaccatggtcctgttttaagcaagggggtgagagtgctgaaaaggctgcaaaggatctcgtacttattttagagacaatgaggataattgcaatcacactatctcctatcactccaagcctttctctgaggatttacacacagcttggtttcacagaagaccagtttagggtgttgagatggttatgtcattaggaggatacgaaatggggaggccttaaagcaggccaggtaatgtcggagccaaagccagtatttgcaaggatagaaaccgaggtggaagaggaagcccaaacaagttcaaaagcagcaaaaggtgggaagaaagcacgcaggaaaggacttgtggaggcatagtttctgttggaacagtgtatcagcatcgttaaaaggagaatatttcatcttctcttttttttggaaaaaaatctttagcctatctgttcctgaaatttgttctttgctaacgtgtcacattgtatcatgtagatagccaaaaaaagaccactattgattctgatgctctgtcagagagagagctaggataattgcgagtagagctagcagcggatttggatcatccaaaatctaattggatatttgttgttttggataaggtggagagcaacttaaaaaaacccaatgtccattagatatctttggacttgacttgtttctaatgtttggagacatgctgatttttatgaactaataacacagtagctggttgttatatggagttgttgcaaataaatg

SEQ ID NO: 761 - DNA, 2208 bp, Zea Mays
aacacacttacatcctccacaacgatcaccccaatccattctctcctcacacgggcgcgacccaaaaccccattcatcccctcctccggtctcgactgccatggccgccgggcgggccttccttggcgcgccgtgctcctccctcgccgccggcgcccgttgccttgccttcgcttcccctttgccccggaacctcacccccgcgctccgctgcggcgttcgcggtcgctgcatcgcctccgcctcctcgtcccctgactcgccccccttgccggagccctacgtgctcaccactcctctctactacgtcaacgctccgccgcatatgggaagcgcctacaccaccatcgcagcggacgccatcgcccgcttccagaggttgctagagaagaatgttatatttattaccggaacagatgaacacggtgagaaaatatctgcttccgcagaggccagtggtagaaacccaaaggagcattgtgatgcaatttcaagttcatataggacgctctgggctgacttagacatagaatatgacaagtttattcgcacaacggatcgtaagcatgaggctgttgtgaacgaattctattccagagtgttaaacaatggcgacatatatagagctgattatgaaggactttattgtgtgagctgtgaagagtacaaggatgaaaaagagctattggagaacaattgttgccctgtgcatctgaagccttgtgttgaaagaaaagaagataactatttctttgccttgtcaaagtaccaacataaattggaagagctactgacaagaaatcctgattttgtaaggccatcatatcgcttgaacgagcttgtaggtccaaggctggattaaaagcggattaagggacttttctatttctcgtgcatctgtagaatggggcattccggtgccaaacgataccaagcagacaatatatgtgtggtttgatgctctattagggtatatttcagcattactagatgatggtgagcaggcaagtttgcagcaagctgttgatcatggttggccagcctcactgcacttgattggaaaggacatattacggtttcatgcagtttattggccagccatgttaatgtcagcaggtttaagtgttcctgatacagtttttggtcatggattcttgactaaggatggcatgaagatgggaaagtcactaggcaacacacttgaaccaaaagatctggtagaaagatttggtgctgatgctgttaggaaacctccttaatcgtacacttgggctactaaaaaagaactgtaaatccgtactagcttttgattcaattgctgccgcagatggaggtttgttcagaaataagatagaaaatctggtggacaaggcaaaacaccaatatgaaaatcttttactgtcatcagcatgtgaaactgttttagagattggtgatcttggaaacttgtacatcgatgagcaagcaccatggtcctgttttaagcaagggggtgagagtgctgaaaaggctgcaaaggatctcgtacttattttagagacaatgaggataattgcaatcacactatctcctatcactccaagcctttctctgaggatttacacacagcttggtttcacagaagaccagtttagggtgttgagatgggaggatacgaaatggggaggccttaaagcaggccaggtaatgtcggagccaaagccagtatttgcaaggatagaaaccgaggtggaagaggaagcccaaacaagttcaaaagcagcaaaaggtgggaagaaagcacgcaggaaaggacttgtggaggcatagtttctgttggaacagtgtatcagcatcgttaaaaggagaatatttcatcttctcttttttttggaaaaaaatctttagcctatctgttcctgaaatttgttctttgctaacgtgtcacattgtatcatgtagatagccaaaaaaagaccactattgattctgatgctctgtcagagagagagctaggataattgcgagtagagctagcagcggatttggatcatccaaaatctaattggatatttgttgttttggataaggtggagagcaacttaaaaaaacccaatgtccattagatatctttggacttgacttgtttctaatgtttggagacatgctgatttttatgaactaataacacagtagctggttgttatatggagttgttgcaaataaatg

SEQ ID NO: 762 - DNA, 2201 bp, Zea Mays
aacacacttacatcctccacaacgatcaccccaatccattctctcctcacacgggcgcgacccaaaaccccattcatcccctcctccggtctcgactgccatggccgccgggcgggccttccttggcgcgccgtgctcctccctcgccgccggcgcccgttgccttgccttcgcttcccctttgccccggaacctcacccccgcgctccgctgcggcgttcgcggtcgctgcatcgcctccgcctcctcgtcccctgactcgccccccttgccggagccctacgtgctcaccactcctctctactacgtcaacgctccgccgcatatgggaagcgcctacaccaccatcgcagcggacgccatcgcccgcttccagaggttgctagagaagaatgttatatttattaccggaacagatgaacacggtgagaaaatatctgcttccgcagaggccagtggtagaaacccaaaggagcattgtgatgcaatttcaagttcatataggacgctctgggctgacttagacatagaatatgacaagtttattcgcacaacggatcgtaagcatgaggctgttgtgaacgaattctattccagagtgttaaacaatggcgacatatatagagctgattatgaaggactttattgtgtgagctgtgaagagtacaaggatgaaaaagagctattggagaacaattgttgccctgtgcatctgaagccttgtgttgaaagaaaagaagataactatttctttgccttgtcaaagtaccaacataaattggaagagctactgacaagaaatcctgattttgtaaggccatcatatcgcttgaacgaggtccaaggctggattaaaagcggattaagggacttttctatttctcgtgcatctgtagaatggggcattccggtgccaaacgataccaagcagacaatatatgtgtggtttgatgctctattagggtatatttcagcattactagatgatggtgagcaggcaagtttgcagcaagctgttgatcatggttggccagcctcactgcacttgattggaaaggacatattacggtttcatgcagtttattggccagccatgttaatgtcagcaggtttaagtgttcctgatacagtttttggtcatggattcttgactaaggatggcatgaagatgggaaagtcactaggcaacacacttgaaccaaaagatctggtagaaagatttggtgctgatgctgttaggaaacctccttaatcgtacacttgggctactaaaaaagaactgtaaatccgtactagcttttgattcaattgctgccgcagatggaggtttgttcagaaataagatagaaaatctggtggacaaggcaaaacaccaatatgaaaatcttttactgtcatcagcatgtgaaactgttttagagattggtgatcttggaaacttgtacatcgatgagcaagcaccatggtcctgttttaagcaagggggtgagagtgctgaaaaggctgcaaaggatctcgtacttattttagagacaatgaggataattgcaatcacactatctcctatcactccaagcctttctctgaggatttacacacagcttggtttcacagaagaccagtttagggtgttgagatgggaggatacgaaatggggaggccttaaagcaggccaggtaatgtcggagccaaagccagtatttgcaaggatagaaaccgaggtggaagaggaagcccaaacaagttcaaaagcagcaaaaggtgggaagaaagcacgcaggaaaggacttgtggaggcatagtttctgttggaacagtgtatcagcatcgttaaaaggagaatatttcatcttctcttttttttggaaaaaaatctttagcctatctgttcctgaaatttgttctttgctaacgtgtcacattgtatcatgtagatagccaaaaaaagaccactattgattctgatgctctgtcagagagagagctaggataattgcgagtagagctagcagcggatttggatcatccaaaatctaattggatatttgttgttttggataaggtggagagcaacttaaaaaaacccaatgtccattagatatctttggacttgacttgtttctaatgtttggagacatgctgatttttatgaactaataacacagtagctggttgttatatggagttgttgcaaataaatg

SEQ ID NO: 763 - DNA, 2306 bp, Zea Mays
aacacacttacatcctccacaacgatcaccccaatccattctctcctcacacgggcgcgacccaaaaccccattcatcccctcctccggtctcgactgccatggccgccgggcgggccttccttggcgcgccgtgctcctccctcgccgccggcgcccgttgccttgccttcgcttcccctttgccccggaacctcacccccgcgctccgctgcggcgttcgcggtcgctgcatcgcctccgcctcctcgtcccctgactcgccccccttgccggagccctacgtgctcaccactcctctctactacgtcaacgctccgccgcatatgggaagcgcctacaccaccatcgcagcggacgccatcgcccgcttccagaggttgctagagaagaatgttatatttattaccggaacagatgaacacggtgagaaaatatctgcttccgcagaggccagtggtagaaacccaaaggagcattgtgatgcaatttcaagttcatataggacgctctgggctgacttagacatagaatatgacaagtttattcgcacaacggatcgtaagcatgaggctgttgtgaacgaattctattccagagtgttaaacaatggcgacatatatagagctgattatgaaggactttattgtgtgagctgtgaagagtacaaggatgaaaaagagctattggagaacaattgttgccctgtgcatctgaagccttgtgttgaaagaaaagaagataactatttctttgccttgtcaaagtaccaacataaattggaagagctactgacaagaaatcctgattttgtaaggccatcatatcgcttgaacgagcttgtaggtccaaggctggattaaaagcggattaagggacttttctatttctcgtgcatctgtagaatggggcattccggtgccaaacgataccaagcagacaatatatgtgtggtttgatgctctattagggtatatttcagcattactagatgatggtgagcaggcaagtttgcagcaagctgttgatcatggttggccagcctcactgcacttgattggaaaggacatattacggtttcatgcagtttattggccagccatgttaatgtcagcaggtttaagtgttcctgatacagtttttggtcatggattcttgactaaggatggcatgaagatgggaaagtcactaggcaacacacttgaaccaaaagatctggtagaaagatttggtgctgatgctgttaggtatttcttcttgcgggaagtagaatttggcaatgatggggactattcagaagaacgctttatcaatatagtgaatgctcatcttgctaatacaattggaaacctccttaatcgtacacttgggctactaaaaaagaactgtaaatccgtactagcttttgattcaattgctgccgcagatggaggtttgttcagaaataagatagaaaatctggtggacaaggcaaaacaccaatatgaaaatcttttactgtcatcagcatgtgaaactgttttagagattggtgatcttggaaacttgtacatcgatgagcaagcaccatggtcctgttttaagcaagggggtgagagtgctgaaaaggctgcaaaggatctcgtacttattttagagacaatgaggataattgcaatcacactatctcctatcactccaagcctttctctgaggatttacacacagcttggtttcacagaagaccagtttagggtgttgagatgggaggatacgaaatggggaggccttaaagcaggccaggtaatgtcggagccaaagccagtatttgcaaggatagaaaccgaggtggaagaggaagcccaaacaagttcaaaagcagcaaaaggtgggaagaaagcacgcaggaaaggacttgtggaggcatagtttctgttggaacagtgtatcagcatcgttaaaaggagaatatttcatcttctcttttttttggaaaaaaatctttagcctatctgttcctgaaatttgttctttgctaacgtgtcacattgtatcatgtagatagccaaaaaaagaccactattgattctgatgctctgtcagagagagagctaggataattgcgagtagagctagcagcggatttggatcatccaaaatctaattggatatttgttgttttggataaggtggagagcaacttaaaaaaacccaatgtccattagatatctttggacttgacttgtttctaatgtttggagacatgctgatttttatgaactaataacacagtagctggttgttatatggagttgttgcaaataaatg

SEQ ID NO: 764 - DNA, 2681 bp, Zea Mays
aacacacttacatcctccacaacgatcaccccaatccattctctcctcacacgggcgcgacccaaaaccccattcatcccctcctccggtctcgactgccatggccgccgggcgggccttccttggcgcgccgtgctcctccctcgccgccggcgcccgttgccttgccttcgcttcccctttgccccggaacctcacccccgcgctccgctgcggcgttcgcggtcgctgcatcgcctccgcctcctcgtcccctgactcgccccccttgccggagccctacgtgctcaccactcctctctactacgtcaacgctccgccgcatatgggaagcgcctacaccaccatcgcagcggacgccatcgcccgcttccagaggttgctagagaagaatgttatatttattaccggaacagatgaacacggtgagaaaatatctgcttccgcagaggccagtggtagaaacccaaaggagcattgtgatgcaatttcaagttcatataggacgctctgggctgacttagacatagaatatgacaagtttattcgcacaacggatcgtaagcatgaggctgttgtgaacgaattctattccagagtgttaaacaatggcgacatatatagagctgattatgaaggactttattgtgtgagctgtgaagagtacaaggatgaaaaagagctattggagaacaattgttgccctgtgcatctgaagccttgtgttgaaagaaaagaagataactatttctttgccttgtcaaagtaccaacataaattggaagagctactgacaagaaatcctgattttgtaaggccatcatatcgcttgaacgagcttgtaggtccaaggctggattaaaagcggattaagggacttttctatttctcgtgcatctgtagaatggggcattccggtgccaaacgataccaagcagacaatatatgtgtggtttgatgctctattagggtatatttcagcattactagatgatggtgagcaggcaagtttgcagcaagctgttgatcatggttggccagcctcactgcacttgattggaaaggacatattacggtttcatgcagtttattggccagccatgttaatgtcagcaggtttaagtgttcctgatacagtttttggtcatggattcttgactaaggatggcatgaagatgggaaagtcactaggcaacacacttgaaccaaaagatctggtagaaagatttggtgctgatgctgttaggtatttcttcttgcgggaagtagaatttggcaatgatggggactattcagaagaacgctttatcaatatagtgaatgctcatcttgctaatacaattggaaacctccttaatcgtacacttgggctactaaaaaagaactgtaaatccgtactagcttttgattcaattgctgccgcagatggaggtttgttcagaaataagatagaaaatctggtaagtagattttcatggtatcttcaactatggtaagaggagtggagggtaaaggatttaattataaaccatgggttttttattgaaccatgggttttttattgaactggcagtctactaggctagtatgtgtgtaaccaactgcataaggagttaaaagacatagaatatataaggtctacaacagtgaatttgtttttttactctgtcaacaagtgttgtcaatgatgtggtgggtccattgtgtttgaattcatgaaactatgatacatttggatgttttaggccaaggtctgcttagcctgcctaagtacccacaaattcacatgccttgttgtgtctctgttcgagtcaccatgaaaattgtttttacaggtggacaaggcaaaacaccaatatgaaaatcttttactgtcatcagcatgtgaaactgttttagagattggtgatcttggaaacttgtacatcgatgagcaagcaccatggtcctgttttaagcaagggggtgagagtgctgaaaaggctgcaaaggatctcgtacttattttagagacaatgaggataattgcaatcacactatctcctatcactccaagcctttctctgaggatttacacacagcttggtttcacagaagaccagtttagggtgttgagatgggaggatacgaaatggggaggccttaaagcaggccaggtaatgtcggagccaaagccagtatttgcaaggatagaaaccgaggtggaagaggaagcccaaacaagttcaaaagcagcaaaaggtgggaagaaagcacgcaggaaaggacttgtggaggcatagtttctgttggaacagtgtatcagcatcgttaaaaggagaatatttcatcttctcttttttttggaaaaaaatctttagcctatctgttcctgaaatttgttctttgctaacgtgtcacattgtatcatgtagatagccaaaaaaagaccactattgattctgatgctctgtcagagagagagctaggataattgcgagtagagctagcagcggatttggatcatccaaaatctaattggatatttgttgttttggataaggtggagagcaacttaaaaaaacccaatgtccattagatatctttggacttgacttgtttctaatgtttggagacatgctgatttttatgaactaataacacagtagctggttgttatatggagttgttgcaaataaatg

SEQ ID NO: 765 - DNA, 2443 bp, Zea Mays
ccaccgcaggcacactgtcgtcatactcccgtcccgacttcccgagacgccgcattggatgctccctccgctcgaatctgccgctttccattatcgctgacccaagcaacattctctgcttcttggtccttgccttcttggttcgccctcccgcaatctctggttctggcctctgggcatcgcgggagtaaggcatttcttggttttcctttcctgagatgggtctgagaaagagaagcgccatggttggtgaggcagccgtgttcgccgcatcttggtagccctcactcagcattggcatcctctcgttcttggacttggagttaactcagccatgaggaagcatgggtggcagctgccgtaccaccctctccaggtggttgcgatagccgtgttctcggcactggggttcgccttctacgtcttcttcgtgccgttcgtggggacgaagccgttccagattgtggccatggctatctacactccattgattacatgtgttgttgtgttatacatatggtgtgcggcaacaaatcctggagacccaggcattttcgattcaacgaagaatttgaaattagataagaatgaaaagcactcctatgtgaattcggatcaggggattaatcatggaggaaggccattaagtgagacttttggtactgctgataacagtgagaagctgagcagcatgcttgagaggaacgattcgccttcttggcccagattttctggaattatttccctggtttgtctcccattctcttgcctttgcaaacggtgtctccattcagacagtctatcttcagaacacaaaatgtgtgaagaaggcatgtttttctgcagcttatgcgaagcagaggttttgaagaacagtaagcattgtagagtatgtgacaaatgtgttgatggctttgaccatcactgcagatggcttaacaattgcatagggaaaaggaactacaaaggtttctttgttctaatggcttctgcagttatcctgtggttgtcggggggacttgtgttgattctctgtattgtgaagcgaggagaattctccaggcaggttgtcacaaagttgggaagcagcttctcaacagtggcttttgtaattgttgtggcaacttgcaccattttagcaatggttgcaaccgtaccacttgcccagcttttatgttttcatgtccttcttgtaaaaaagggaattagcacatatgattacatcatagctttgagggagcacgaggaacaacaagaggttcctggacaccaaagcccgcagatgtctattgttagttctgttactggttttagcacagccagttcttttgggcctcttcatcgtggttcatggtgcactccaccaagattattcctggaagaccagttcgatgccattcctccagagattggcatttcacggaattcaggcagtaagaaaactaaggaagaggaaggagcaaggagaaaagctggagcagtgaaaatcagtccatggacattggcgcggcttaatgcagaggaagtctcaaaggcagccgcggaggcaaggaagaaatccaaaatcctgaaaccagttggaaaacatggcgccccagagaacagcagcaaaccagaccatttgcctagctacaagagacggctagacaggagaggtttccctgctgaactctctcttgacccacttgcaactctatctgcaagcggcaccgaaagcaactacagcgacgcagcaacagaaatctgtggcagtctagccccgttacagctcgaagcgagaagtgctttccaaccgagtactgcagcgtccacaagaaatgttgcttcatcgcctgaaagtagctttgactcaccaaatctccaccccttccgcacttcctcggccacagctgatgagatgcagggagccatgatgcatacagctcacaggggcatcgagtttaaaagatcgtcaagcgatggttatgaagcatcaggaggtgaagatagcgaccgcatcccttcaaggatcgtgcacaggtcgtcaaactgggccagtgtctttctgcattctggtcagggagaccctccagctgatctgctgacgacatcagctgaaggttttgtagctaacgactctggttcctagagcaggcattgctgggtatgacagagcgatgttgacaagacattgactagtatctggcattaggtttaggtttaggcgcttaatttgtctgattacatgcggggatttggattagttctaggggccgattacatgtctgtaaaactgccttcttgctggtgccacttttttggcattccattgtcgccttcggcaaaatgtgaatttgacgccattgtgcttgctgagcttgatccaaagtactgtcgctgagtagtcttttgtaatcacatccgagtgagattaataaggtgtttggctcggcaattaccgtct

SEQ ID NO: 766 - DNA, 2322 bp, Zea Mays
aggcacactgtcgtcatactcccgtcccgacttcccgagacgccgcattggatgctccctccgctcgaatctgccgctttccattatcgctgacccaagcaacattctctgcttcttggtccttgccttcttggttcgccctcccgcaatctctggttctggcctctgggcatcgcgggagtaaggcatttcttggttttcctttcctgagatgggtctgagaaagagaagcgccatggttggtgaggcagccgtgttcgccgcatcttggtagccctcactcagcattggcatcctctcgttcttggacttggagttaactcagccatgaggaagcatgggtggcagctgccgtaccaccctctccaggtggttgcgatagccgtgttctcggcactggggttcgccttctacgtcttcttcgtgccgttcgtggggacgaagccgttccagattgtggccatggctatctacactccattgattacatgtgttgttgtgttatacatatggtgtgcggcaacaaatcctggagacccaggcattttcgattcaacgaagaatttgaaattagataagaatgaaaagcactcctatgtgaattcggatcaggggattaatcatggaggaaggccattaagtgagacttttggtactgctgataacagtgagaagctgagcagcatgcttgagaggaacgattcgccttcttggcccagattttctggaattatttccctggttttgaagaacagtaagcattgtagagtatgtgacaaatgtgttgatggctttgaccatcactgcagatggcttaacaattgcatagggaaaaggaactacaaaggtttctttgttctaatggcttctgcagttatcctgtggttgtcggggggacttgtgttgattctctgtattgtgaagcgaggagaattctccaggcaggttgtcacaaagttgggaagcagcttctcaacagtggcttttgtaattgttgtggcaacttgcaccattttagcaatggttgcaaccgtaccacttgcccagcttttatgttttcatgtccttcttgtaaaaaagggaattagcacatatgattacatcatagctttgagggagcacgaggaacaacaagaggttcctggacaccaaagcccgcagatgtctattgttagttctgttactggttttagcacagccagttcttttgggcctcttcatcgtggttcatggtgcactccaccaagattattcctggaagaccagttcgatgccattcctccagagattggcatttcacggaattcaggcagtaagaaaactaaggaagaggaaggagcaaggagaaaagctggagcagtgaaaatcagtccatggacattggcgcggcttaatgcagaggaagtctcaaaggcagccgcggaggcaaggaagaaatccaaaatcctgaaaccagttggaaaacatggcgccccagagaacagcagcaaaccagaccatttgcctagctacaagagacggctagacaggagaggtttccctgctgaactctctcttgacccacttgcaactctatctgcaagcggcaccgaaagcaactacagcgacgcagcaacagaaatctgtggcagtctagccccgttacagctcgaagcgagaagtgctttccaaccgagtactgcagcgtccacaagaaatgttgcttcatcgcctgaaagtagctttgactcaccaaatctccaccccttccgcacttcctcggccacagctgatgagatgcagggagccatgatgcatacagctcacaggggcatcgagtttaaaagatcgtcaagcgatggttatgaagcatcaggaggtgaagatagcgaccgcatcccttcaaggatcgtgcacaggtcgtcaaactgggccagtgtctttctgcattctggtcagggagaccctccagctgatctgctgacgacatcagctgaaggttttgtagctaacgactctggttcctagagcaggcattgctgggtatgacagagcgatgttgacaagacattgactagtatctggcattaggtttaggtttaggcgcttaatttgtctgattacatgcggggatttggattagttctaggggccgattacatgtctgtaaaactgccttcttgctggtgccacttttttggcattccattgtcgccttcggcaaaatgtgaatttgacgccattgtgcttgctgagcttgatccaaagtactgtcgctgagtagtcttttgtaatcacatccgagtgagattaataaggtgtttggctcggcaattaccgtct

SEQ ID NO: 767 - DNA, 2477 bp, Zea Mays
aggcacactgtcgtcatactcccgtcccgacttcccgagacgccgcattggatgctccctccgctcgaatctgccgctttccattatcgctgacccaagcaacattctctgcttcttggtccttgccttcttggttcgccctcccgcaatctctggttctggcctctgggcatcgcgggagtaaggcatttcttggttttcctttcctgagatgggtctgagaaagagaagcgccatggttggtgaggcagccgtgttcgccgcatcttggtagccctcactcagcattggcatcctctcgttcttggacttggagttaactcagccatgaggaagcatgggtggcagctgccgtaccaccctctccaggtggttgcgatagccgtgttctcggcactggggttcgccttctacgtcttcttcgtgccgttcgtggggacgaagccgttccagattgtggccatggctatctacactccattgattacatgtgttgttgtgttatacatatggtgtgcggcaacaaatcctggagacccaggcattttcgattcaacgaagaatttgaaattagataagaatgaaaagcactcctatgtgaattcggatcaggggattaatcatggaggaaggccattaagtgagacttttggtactgctgataacagtgagaagctgagcagcatgcttgagaggaacgattcgccttcttggcccagattttctggaattatttccctggtttgtctcccattctcttgcctttgcaaacggtgtctccattcagacagtctatcttcagaacacaaaatgtgtgaagaaggcatgtttttctgcagcttatgcgaagcagaggttttgaagaacagtaagcattgtagagtatgtgacaaatgtgttgatggctttgaccatcactgcagatggcttaacaattgcatagggaaaaggaactacaaaggtttctttgttctaatggcttctgcagttatcctggtctccatggtttgtacaacttgatccagcttgtgatgcagtggttgtcggggggacttgtgttgattctctgtattgtgaagcgaggagaattctccaggcaggttgtcacaaagttgggaagcagcttctcaacagtggcttttgtaattgttgtggcaacttgcaccattttagcaatggttgcaaccgtaccacttgcccagcttttatgttttcatgtccttcttgtaaaaaagggaattagcacatatgattacatcatagctttgagggagcacgaggaacaacaagaggttcctggacaccaaagcccgcagatgtctattgttagttctgttactggttttagcacagccagttcttttgggcctcttcatcgtggttcatggtgcactccaccaagattattcctggaagaccagttcgatgccattcctccagagattggcatttcacggaattcaggcagtaagaaaactaaggaagaggaaggagcaaggagaaaagctggagcagtgaaaatcagtccatggacattggcgcggcttaatgcagaggaagtctcaaaggcagccgcggaggcaaggaagaaatccaaaatcctgaaaccagttggaaaacatggcgccccagagaacagcagcaaaccagaccatttgcctagctacaagagacggctagacaggagaggtttccctgctgaactctctcttgacccacttgcaactctatctgcaagcggcaccgaaagcaactacagcgacgcagcaacagaaatctgtggcagtctagccccgttacagctcgaagcgagaagtgctttccaaccgagtactgcagcgtccacaagaaatgttgcttcatcgcctgaaagtagctttgactcaccaaatctccaccccttccgcacttcctcggccacagctgatgagatgcagggagccatgatgcatacagctcacaggggcatcgagtttaaaagatcgtcaagcgatggttatgaagcatcaggaggtgaagatagcgaccgcatcccttcaaggatcgtgcacaggtcgtcaaactgggccagtgtctttctgcattctggtcagggagaccctccagctgatctgctgacgacatcagctgaaggttttgtagctaacgactctggttcctagagcaggcattgctgggtatgacagagcgatgttgacaagacattgactagtatctggcattaggtttaggtttaggcgcttaatttgtctgattacatgcggggatttggattagttctaggggccgattacatgtctgtaaaactgccttcttgctggtgccacttttttggcattccattgtcgccttcggcaaaatgtgaatttgacgccattgtgcttgctgagcttgatccaaagtactgtcgctgagtagtcttttgtaatcacatccgagtgagattaataaggtgtttggctcggcaattaccgtct

SEQ ID NO: 768 - DNA, 1356 bp, Zea Mays
gcggcatcgatggctccgccctcaccctccccccaacctgtccacgcccgcgcggcctccctcgcaccccacctcaatctcctacggatgtccccgcatctcgcggccgccgtgcccatgcgccatcgcccttccccgtcgtgccccccgtacccccatgctcgcaactgccaacacatggctacctccatggccgccgccttcactcgctatctctcctcacccttccctgtaccgcatccaccggatctaggagcacggcgtcgcgtggaagcccgtgccatacccgcaggcccgccacccacctcccctggcgtgcaacagctttcgcgctccccctgcccccgccatgcccgcactggatctgcaaaacatccgccgctggcacactcctcaggtgcggcggctgcactgcacagccggttcgtcaccaagctcctcaatgaccttttcggagtccagtccaggggtgactgcgcgtgcgcggtacggcccgcgctcctcggcgtcggcgaggacctcgcgctacgcatccgtgacgccatcgttaagggctaccacggcatgaagcctgggtggacgcggttcagactggatttcaggccgaagtgttaggtctgttgctgtggtgctagcgtagggattcgtcacgaagccagagtcgctgcccgacgggacaacggacctgatgatctgtttagccataggttccaaacacttgctcagataagactacagaaacaatcaaagcagttagcagagtggaacactgctgccttctcatctgaacttacagctactaaacacaaagagctgcagatgacccctaaggattctaaactggtgatgcttaaaaactggtgatacactacaatcaacaagattgattcgcagcaagtgtttggctgcatataagaaactttcatcgtatgaggtctcccggtgggttgttgaaaggatggtcaatcttcatgaccaatatgaagaagaccggatcatcagatgttttgtgatcttggcttgtaattctttgatgttcccaacaatccaagcaaggcatgttgcaacactgaagcgccccaatcctctaggactcaaatgtgatacaattactagtcccaggaggctagtaaccacattccttacttcaaatagtacagagttcaaataaaagttattacaataccagggtacaagctcaagagagcctaaaatacaatgcgcagtggaagatagactagcccaagccacaggcagaactgggtgcagacacagccccctctagtcgagcatagcagaaaagaagtcttcagctactgaaaaacataaataaatctgggtgacactaggtattcc

SEQ ID NO: 769 - DNA, 1609 bp, Zea Mays
atggctccgccctcaccctccccccaacctgtccacgcccgcgcggcctccctcgcaccccacctcaatctcctacggatgtccccgcatctcgcggccgccgtgcccatgcgccatcgcccttccccgtcgtgccccccgtacccccatgctcgcaactgccaacacatggctacctccatggccgccgccttcactcgctatctctcctcacccttccctgtaccgcatccaccggatctaggagcacggcgtcgcgtggaagcccgtgccatacccgcaggcccgccacccacctcccctggcgtgcaacagctttcgcgctccccctgcccccgccatgcccgcactggatctgcaaaacatccgccgctggcacactcctcaggtgcggcggctgcactgcacagccggttcgtcaccaagctcctcaatgaccttttcggagtccagtccaggggtgactgcgcgtgcgcggtacggcccgcgctcctcggcgtcggcgaggacctcgcgctacgcatccgtgacgccatcgttaagggctaccacggcatgaagcctgggtggacgcggttcagactggatttcaggccgaagtgttaggtctgttgctgtggtgctagcgtagggattcgtcacgaagccagagtcgctgcccgacgggacaacggacctgatgatctggtaatgcaccatcccgacactacttgtgcagaatctacccaaatatgattgcagatctagatgttcaacagagtttttcacttttaattgattccaaatagaagaaatatagtagtttgctttcttagagaataatttgcaattatataaaacatatatctgcaatggttcttatcatgtgactttgttaactgctctatagtgatttgatttcctttcaaatagactgaagcaaactactctatatatttatgttcactagtttagccataggttccaaacacttgctcagataagactacagaaacaatcaaagcagttagcagagtggaacactgctgccttctcatctgaacttacagctactaaacacaaagagctgcagatgacccctaaggattctaaactggtgatgcttaaaaactggtgatacactacaatcaacaagattgattcgcagcaagtgtttggctgcatataagaaactttcatcgtatgaggtctcccggtgggttgttgaaaggatggtcaatcttcatgaccaatatgaagaagaccggatcatcagatgttttgtgatcttggcttgtaattctttgatgttcccaacaatccaagcaaggcatgttgcaacactgaagcgccccaatcctctaggactcaaatgtgatacaattactagtcccaggaggctagtaaccacattccttacttcaaatagtacagagttcaaataaaagttattacaataccagggtacaagctcaagagagcctaaaatacaatgcgcagtggaagatagactagcccaagccacaggcagaactgggtgcagacacagccccctctagtcgagcatagcagaaaagaagtcttcagctactgaaaaacataaataaatctgggtgacactaggtattcc

SEQ ID NO: 770 - DNA, 1342 bp, Zea Mays
atggctccgccctcaccctccccccaacctgtccacgcccgcgcggcctccctcgcaccccacctcaatctcctacggatgtccccgcatctcgcggccgccgtgcccatgcgccatcgcccttccccgtcgtgccccccgtacccccatgctcgcaactgccaacacatggctacctccatggccgccgccttcactcgctatctctcctcacccttccctgtaccgcatccaccggatctaggagcacggcgtcgcgtggaagcccgtgccatacccgcaggcccgccacccacctcccctggcgtgcaacagctttcgcgctccccctgcccccgccatgcccgcactggatctgcaaaacatccgccgctggcacactcctcaggtgcggcggctgcactgcacagccggttcgtcaccaagctcctcaatgaccttttcggagtccagtccaggggtgactgcgcgtgcgcggtacggcccgcgctcctcggcgtcggcgaggacctcgcgctacgcatccgtgacgccatcgttaagggctaccacggcatgaagcctgggtggacgcggttcagactggatttcaggccgaagtgttaggtctgttgctgtggtgctagcgtagggattcgtcacgaagccagagtcgctgcccgacgggacaacggacctgatgatctgccataggttccaaacacttgctcagataagactacagaaacaatcaaagcagttagcagagtggaacactgctgccttctcatctgaacttacagctactaaacacaaagagctgcagatgacccctaaggattctaaactggtgatgcttaaaaactggtgatacactacaatcaacaagattgattcgcagcaagtgtttggctgcatataagaaactttcatcgtatgaggtctcccggtgggttgttgaaaggatggtcaatcttcatgaccaatatgaagaagaccggatcatcagatgttttgtgatcttggcttgtaattctttgatgttcccaacaatccaagcaaggcatgttgcaacactgaagcgccccaatcctctaggactcaaatgtgatacaattactagtcccaggaggctagtaaccacattccttacttcaaatagtacagagttcaaataaaagttattacaataccagggtacaagctcaagagagcctaaaatacaatgcgcagtggaagatagactagcccaagccacaggcagaactgggtgcagacacagccccctctagtcgagcatagcagaaaagaagtcttcagctactgaaaaacataaataaatctgggtgacactaggtattcc

SEQ ID NO: 771 - DNA, 1336 bp, Zea Mays
atggctccgccctcaccctccccccaacctgtccacgcccgcgcggcctccctcgcaccccacctcaatctcctacggatgtccccgcatctcgcggccgccgtgcccatgcgccatcgcccttccccgtcgtgccccccgtacccccatgctcgcaactgccaacacatggctacctccatggccgccgccttcactcgctatctctcctcacccttccctgtaccgcatccaccggatctaggagcacggcgtcgcgtggaagcccgtgccatacccgcaggcccgccacccacctcccctggcgtgcaacagctttcgcgctccccctgcccccgccatgcccgcactggatctgcaaaacatccgccgctggcacactcctcaggtgcggcggctgcactgcacagccggttcgtcaccaagctcctcaatgaccttttcggagtccagtccaggggtgactgcgcgtgcgcggtacggcccgcgctcctcggcgtcggcgaggacctcgcgctacgcatccgtgacgccatcgttaagggctaccacggcatgaagcctgggtggacgcggttcagactggatttcaggccgaagtgttaggtctgttgctgtggtgctagcgtagggattcgtcacgaagccagagtcgctgcccgacgggacaacggacctgatgatctggttccaaacacttgctcagataagactacagaaacaatcaaagcagttagcagagtggaacactgctgccttctcatctgaacttacagctactaaacacaaagagctgcagatgacccctaaggattctaaactggtgatgcttaaaaactggtgatacactacaatcaacaagattgattcgcagcaagtgtttggctgcatataagaaactttcatcgtatgaggtctcccggtgggttgttgaaaggatggtcaatcttcatgaccaatatgaagaagaccggatcatcagatgttttgtgatcttggcttgtaattctttgatgttcccaacaatccaagcaaggcatgttgcaacactgaagcgccccaatcctctaggactcaaatgtgatacaattactagtcccaggaggctagtaaccacattccttacttcaaatagtacagagttcaaataaaagttattacaataccagggtacaagctcaagagagcctaaaatacaatgcgcagtggaagatagactagcccaagccacaggcagaactgggtgcagacacagccccctctagtcgagcatagcagaaaagaagtcttcagctactgaaaaacataaataaatctgggtgacactaggtattcc

SEQ ID NO: 772 - DNA, 1046 bp, Zea Mays
gttttcgaaaaaaaatctcatttttgttagggcagacctagaaataagaccaaagtaaagcaatgaagctgcaattaattagataatgctacattcatgcttttatattttgacaatgaagttgttcttatcttgaaaatgcctccctccaccgcattcacggagagtatgcttatctttcctaggtgtgcggtaatattaggctatcaacttgtcaatacttcaactgtctgaacatcctttcaggtagctcacatttggatattatcgccaattgcagactggatttcaggccgaagtgttaggtctgttgctgtggtgctagcgtagggattcgtcacgaagccagagtcgctgcccgacgggacaacggacctgatgatctgtttagccataggttccaaacacttgctcagataagactacagaaacaatcaaagcagttagcagagtggaacactgctgccttctcatctgaacttacagctactaaacacaaagagctgcagatgacccctaaggattctaaactggtgatgcttaaaaactggtgatacactacaatcaacaagattgattcgcagcaagtgtttggctgcatataagaaactttcatcgtatgaggtctcccggtgggttgttgaaaggatggtcaatcttcatgaccaatatgaagaagaccggatcatcagatgttttgtgatcttggcttgtaattctttgatgttcccaacaatccaagcaaggcatgttgcaacactgaagcgccccaatcctctaggactcaaatgtgatacaattactagtcccaggaggctagtaaccacattccttacttcaaatagtacagagttcaaataaaagttattacaataccagggtacaagctcaagagagcctaaaatacaatgcgcagtggaagatagactagcccaagccacaggcagaactgggtgcagacacagccccctctagtcgagcatagcagaaaagaagtcttcagctactgaaaaacataaataaatctgggtgacactaggtattcc

SEQ ID NO: 773 - DNA, 1308 bp, Zea Mays
gttttcgaaaaaaaatctcatttttgttagggcagacctagaaataagaccaaagtaaagcaatgaagctgcaattaattagataatgctacattcatgcttttatattttgacaatgaagttgttcttatcttgaaaatgcctccctccaccgcattcacggagagtatgcttatctttcctaggtgtgcggtaatattaggctatcaacttgtcaatacttcaactgtctgaacatcctttcaggtagctcacatttggatattatcgccaattgcagactggatttcaggccgaagtgttaggtctgttgctgtggtgctagcgtagggattcgtcacgaagccagagtcgctgcccgacgggacaacggacctgatgatctggtaatgcaccatcccgacactacttgtgcagaatctacccaaatatgattgcagatctagatgttcaacagagtttttcacttttaattgattccaaatagaagaaatatagtagtttgctttcttagagaataatttgcaattatataaaacatatatctgcaatggttcttatcatgtgactttgttaactgctctatagtgatttgatttcctttcaaatagactgaagcaaactactctatatatttatgttcactagtttagccataggttccaaacacttgctcagataagactacagaaacaatcaaagcagttagcagagtggaacactgctgccttctcatctgaacttacagctactaaacacaaagagctgcagatgacccctaaggattctaaactggtgatgcttaaaaactggtgatacactacaatcaacaagattgattcgcagcaagtgtttggctgcatataagaaactttcatcgtatgaggtctcccggtgggttgttgaaaggatggtcaatcttcatgaccaatatgaagaagaccggatcatcagatgttttgtgatcttggcttgtaattctttgatgttcccaacaatccaagcaaggcatgttgcaacactgaagcgccccaatcctctaggactcaaatgtgatacaattactagtcccaggaggctagtaaccacattccttacttcaaatagtacagagttcaaataaaagttattacaataccagggtacaagctcaagagagcctaaaatacaatgcgcagtggaagatagactagcccaagccacaggcagaactgggtgcagacacagccccctctagtcgagcatagcagaaaagaagtcttcagctactgaaaaacataaataaatctgggtgacactaggtattcc

SEQ ID NO: 774 - DNA, 1966 bp, Zea Mays
gagaaatgaagcttcggctctgccctcggtggctcagccaccggtttcagcgccagttcaaccccgcacccgcaccccggtgcggcacggatcccaccgggcgcagcgcacgacccacaaagtcagaaagccgctgcccggaaatcgcccgcctccgctccgctacgctctcaccacctcctccgacgtctgatcggcatcgccttcgcctccgctaaaatactcgcggtccacgctctcctccaaatcccatcgccacgccttcgcccgcgcgcgtctctccctcccccacactccgccaccagcgccgaagcagagcagccatggccggttacgagcagcgcgtcgttgccgtcatcatggtcggcggccccaccaaagggacgcggttccggccgctgtcgctgaacgtgcccaagccgctcttccctatcgccggccagcccatggtgcaccaccccatctccgcctgcagccggatccccaacctggcacagatataccttatcgggttctacgacgagcgggaattcgcgctatatgtctcgtctatctccaacgagctcaggatccctgtcaggtacctgcgagaggataagcctcacgggtcagctggagggctctacatctttagagattacatcatggaagacagcccgtcacacatagttctgcttaactgcgacgtctgttctagcttcccccttccagacatgctggaggcccataaaaaatatggaggaatgggtactttactagtcaacaaggtatctgcagagtcagctaaccagtttggcgagttggtagctgatcctgaaacaaacgaactgctgcactatacggaaaagccagagacttttcaaatttgcggcgtgtatctagctttgaagctcttcattcagcaaccaagtatgtattgtgttatactgtttatgtttttttttttacaaatcttctttgtcctgcagttatcacctttctcttcgccattatgtggaggttcttccaaaaactagccaggcctaggctcttccaccagactttgttcggttagatcaagacattttatcccctcgagcaggaaagaaagagctgtacacataccagacacttgatttttgggaacagataaaaaccccagggatgtctttgagatgctctggattatatctttctcggttccgccgtacctctcctcatcttttagcctcaggagatggcaaaagaactgccactattgtaggcgatgtgtatatccatccatctgccaaggtgcatcctacttcaaagattggccccaatgtttctatatcagcaaatgcgcgcgttggagctggtgccaggcttatcaattgcataattctagatggtgttgaaattatggaaaatgcggttgttatacattcaattgtggggtggaagtcatccattggaaaatggtcacgtgtacagggcgaaggtgatcaaaatgccaaacttggcattactattcttggtgaagccgttgatgttgaagatgaagtagtgatagttaacagcatcgtgctcccaaataaaactctcaatgtcagtgtccaagaggagatcatcctataatagccgtcattttttgttttatccctaataaggtctgagtaccaatcacatagtttaagtttattcattctcaccatgtaagcttctattagattgagattattgttttgggtttataccttgcagcatgccactgcacaatcttgacttgctgtgctactttgattagcgagtgtggtgtaaaatgtacgaacaactaacacccgagctgctagcttcagattaaagcaagctgttcaaactgccgcagctgtaatccatagagacaaaacactattgaagacttctagcccacaagtgaaattggaagtataatcaaatcctaatataattgtcataatcatattgttaaactgtataagtgaattgc

SEQ ID NO: 775 - DNA, 1963 bp, Zea Mays
gagaaatgaagcttcggctctgccctcggtggctcagccaccggtttcagcgccagttcaaccccgcacccgcaccccggtgcggcacggatcccaccgggcgcagcgcacgacccacaaagtcagaaagccgctgcccggaaatcgcccgcctccgctccgctacgctctcaccacctcctccgacgtctgatcggcatcgccttcgcctccgctaaaatactcgcggtccacgctctcctccaaatcccatcgccacgccttcgcccgcgcgcgtctctccctcccccacactccgccaccagcgccgaagcagagcagccatggccggttacgagcagcgcgtcgttgccgtcatcatggtcggcggccccaccaaagggacgcggttccggccgctgtcgctgaacgtgcccaagccgctcttccctatcgccggccagcccatggtgcaccaccccatctccgcctgcagccggatccccaacctggcacagatataccttatcgggttctacgacgagcgggaattcgcgctatatgtctcgtctatctccaacgagctcaggatccctgtcaggtacctgcgagaggataagcctcacgggtcagctggagggctctacatctttagagattacatcatggaagacagcccgtcacacatagttctgcttaactgcgacgtctgttctagcttcccccttccagacatgctggaggcccataaaaaatatggaggaatgggtactttactagtcaacaaggtatctgcagagtcagctaaccagtttggcgagttggtagctgatcctgaaacaaacgaactgctgcactatacggaaaagccagagacttttgtgagtgatctcataaattgtggagtatatatatttacccccaatatctttagcgccattgaggatgtcttaaaacagaaaaaagacagagcaaatttgcggcgtgtatctagctttgaagctcttcattcagcaaccaagtatgtattgtgttatactgtttatgtttttttttttacaaatcttctttgtcctgcagttatcacctttctcttcgccattatgtggaggttcttccaaaaactagccaggcctaggctcttccaccagactttgttcggttagatcaagacattttatcccctcgagcaggaaagaaagagctgtacacataccagacacttgatttttgggaacagataaaaaccccagggatgtctttgagatgctctggattatatctttctcggttccgccgtacctctcctcatcttttagcctcaggagatggcaaaagaactgccactattgtaggcgatgtgtatatccatccatctgccaaggtgcatcctacttcaaagattggccccaatgtttctatatcagcaaatgcgcgcgttggagctggtgccaggcttatcaattgcataattctagatggtgttgaaattatggaaaatgcggttgttatacattcaattgtggggtggaagtcatccattggaaaatggtcacgtgtacagggcgaaggtgatcaaaatgccaaacttggcattactattcttggtgaagccgttgatgttgaagatgaagtagtgatagttaacagcatcgtgctcccaaataaaactctcaatgtcagtgtccaagaggagatcatcctataatagccgtcattttttgttttatccctaataagcatgccactgcacaatcttgacttgctgtgctactttgattagcgagtgtggtgtaaaatgtacgaacaactaacacccgagctgctagcttcagattaaagcaagctgttcaaactgccgcagctgtaatccatagagacaaaacactattgaagacttctagcccacaagtgaaattggaagtataatcaaatcctaatataattgtcataatcatattgttaaactgtataagtgaattgc

SEQ ID NO: 776 - DNA, 2058 bp, Zea Mays
ctcggtggctcagccaccggtttcagcgccagttcaaccccgcacccgcaccccggtgcggcacggatcccaccgggcgcagcgcacgacccacaaagtcagaaagccgctgcccggaaatcgcccgcctccgctccgctacgctctcaccacctcctccgacgtctgatcggcatcgccttcgcctccgctaaaatactcgcggtccacgctctcctccaaatcccatcgccacgccttcgcccgcgcgcgtctctccctcccccacactccgccaccagcgccgaagcagagcagccatggccggttacgagcagcgcgtcgttgccgtcatcatggtcggcggccccaccaaagggacgcggttccggccgctgtcgctgaacgtgcccaagccgctcttccctatcgccggccagcccatggtgcaccaccccatctccgcctgcagccggatccccaacctggcacagatataccttatcgggttctacgacgagcgggaattcgcgctatatgtctcgtctatctccaacgagctcaggatccctgtcagggtctctggccaatttaaattttaggtacctgcgagaggataagcctcacgggtcagctggagggctctacatctttagagattacatcatggaagacagcccgtcacacatagttctgcttaactgcgacgtctgttctagcttcccccttccagacatgctggaggcccataaaaaatatggaggaatgggtactttactagtcaacaaggtatctgcagagtcagctaaccagtttggcgagttggtagctgatcctgaaacaaacgaactgctgcactatacggaaaagccagagacttttgtgagtgatctcataaattgtggagtatatatatttacccccaatatctttagcgccattgaggatgtcttaaaacagaaaaaagacagagcaaatttgcggcgtgtatctagctttgaagctcttcattcagcaaccaagtatgtattgtgttatactgtttatgtttttttttttacaaatcttctttgtcctgcagttatcacctttctcttcgccattatgtggaggttcttccaaaaactagccaggcctaggctcttccaccagactttgttcggttagatcaagacattttatcccctcgagcaggaaagaaagagctgtacacataccagacacttgatttttgggaacagataaaaaccccagggatgtctttgagatgctctggattatatctttctcggttccgccgtacctctcctcatcttttagcctcaggagatggcaaaagaactgccactattgtaggcgatgtgtatatccatccatctgccaaggtgcatcctacttcaaagattggccccaatgtttctatatcagcaaatgcgcgcgttggagctggtgccaggcttatcaattgcataattctagatggtgttgaaattatggaaaatgcggttgttatacattcaattgtggggtggaagtcatccattggaaaatggtcacgtgtacagggcgaaggtgatcaaaatgccaaacttggcattactattcttggtgaagccgttgatgttgaagatgaagtagtgatagttaacagcatcgtgctcccaaataaaactctcaatgtcagtgtccaagaggagatcatcctataatagccgtcattttttgttttatccctaataaggtctgagtaccaatcacatagtttaagtttattcattctcaccatgtaagcttctattagattgagattattgttttgggtttataccttgcagcatgccactgcacaatcttgacttgctgtgctactttgattagcgagtgtggtgtaaaatgtacgaacaactaacacccgagctgctagcttcagattaaagcaagctgttcaaactgccgcagctgtaatccatagagacaaaacactattgaagacttctagcccacaagtgaaattggaagtataatcaaatcctaatataattgtcataatcatattgttaaactgtataagtgaattgc

SEQ ID NO: 777 - DNA, 1840 bp, Zea Mays
ctcagccaccggtttcagcgccagttcaaccccgcacccgcaccccggtgcggcacggatcccaccgggcgcagcgcacgacccacaaagtcagaaagccgctgcccggaaatcgcccgcctccgctccgctacgctctcaccacctcctccgacgtctgatcggcatcgccttcgcctccgctaaaatactcgcggtccacgctctcctccaaatcccatcgccacgccttcgcccgcgcgcgtctctccctcccccacactccgccaccagcgccgaagcagagcagccatggccggttacgagcagcgcgtcgttgccgtcatcatggtcggcggccccaccaaagggacgcggttccggccgctgtcgctgaacgtgcccaagccgctcttccctatcgccggccagcccatggtgcaccaccccatctccgcctgcagccggatccccaacctggcacagatataccttatcgggttctacgacgagcgggaattcgcgctatatgtctcgtctatctccaacgagctcaggatccctgtcagggtctctggccaatttaaattttaggtacctgcgagaggataagcctcacgggtcagctggagggctctacatctttagagattacatcatggaagacagcccgtcacacatagttctgcttaactgcgacgtctgttctagcttcccccttccagacatgctggaggcccataaaaaatatggaggaatgggtactttactagtcaacaaggtatctgcagagtcagctaaccagtttggcgagttggtagctgatcctgaaacaaacgaactgctgcactatacggaaaagccagagacttttgtgagtgatctcataaattgtggagtatatatatttacccccaatatctttagcgccattgaggatgtcttaaaacagaaaaaagacagagcaaatttgcggcgtgtatctagctttgaagctcttcattcagcaaccaaggctcttccaccagactttgttcggttagatcaagacattttatcccctcgagcaggaaagaaagagctgtacacataccagacacttgatttttgggaacagataaaaaccccagggatgtctttgagatgctctggattatatctttctcggttccgccgtacctctcctcatcttttagcctcaggagatggcaaaagaactgccactattgtaggcgatgtgtatatccatccatctgccaaggtgcatcctacttcaaagattggccccaatgtttctatatcagcaaatgcgcgcgttggagctggtgccaggcttatcaattgcataattctagatggtgttgaaattatggaaaatgcggttgttatacattcaattgtggggtggaagtcatccattggaaaatggtcacgtgtacagggcgaaggtgatcaaaatgccaaacttggcattactattcttggtgaagccgttgatgttgaagatgaagtagtgatagttaacagcatcgtgctcccaaataaaactctcaatgtcagtgtccaagaggagatcatcctataatagccgtcattttttgttttatccctaataagcatgccactgcacaatcttgacttgctgtgctactttgattagcgagtgtggtgtaaaatgtacgaacaactaacacccgagctgctagcttcagattaaagcaagctgttcaaactgccgcagctgtaatccatagagacaaaacactattgaagacttctagcccacaagtgaaattggaagtataatcaaatcctaatataattgtcataatcatattgttaaactgtataagtgaattgc

SEQ ID NO: 778 - DNA, 1491 bp, Zea Mays
gcggcattttgcgcgaccacgaagcgggcggccgttcgcggtccgggtatttggtgtcgagtgtcgagggactccccacctcccggtcgtcgcgcagatccaccgatccccctccccctcggatcctccccgcaaatcagatcccgccgggtgctcgccctgcccgcgtcccccgctgcttccctacctcgtcgcctcaagcggctcaagaaatcctccgctcaaaccaccgccaccgctagcaccaccgtcgctaccactactagcagcaggatcttcgaagtggtgccgtggcgctgccctgggtacacgttccaggagtcggggccggtgggcacgacgaacctgagccgcaccgaggtgcgcgcgctcatggcggagctcgccgctgacttcctgggaacgcctcgaccaggacgacgactcggttcgcggacgaagccagccgtagtactcccttctcagatatgcgcgctcgtggtgcaggagcgctcctggcgccccgccgcgacggtggccggggccccctcgctggcgtcccggtcgcgtcaaccacctcaatctcgctggcgtccgcctccgcgtgagttgctcatctggagacaatcgagcgtagattgttgaaggcacatctccaatattcctgcacaaaaaaacaatgcgcatcaactaacagaagtgcaacacactctcatctgagtgttcacatctttctttttttttggttgattcgtttaaacctcactatgtacatacaaggcagaatcacagtccctgcatcgttggcttgccaagttttgccctcttttgccacctcctaggtcaactattgctaatgctttcagtccagatggaaaaacacttgcgtccacaagatcattgtatacaaactgaactgaaagacatttattttgttagtggtgaggtgaccatactgtgaaattaattgactgtaatatagggaaatgtttgaaggttttgagtggacatcacagtatacaaactgaactgaaagacatctattttgttagttatcagcctcatcaaactgattgaaagacaccaaactgaactgaaagacaacaaacatgccaggtaactgtatcgcgaaagacaacaaacatcatacttttttcggctctggtatgtttttgtagctcccattttagattttaccaagtattaaatgtacactgcttactgtttgatgactaacatcatgcagaggtcttaattttaaaaaatatcgctgaaccttgaaatacatattcaaaccattccttttgcagtggtatgtttctgcagccttttttgctagttggatttagtccagcatctgacactattatagttttcaatccatggatcgatgggttaaatggttattttaagctaaagcttgttttcctttacaagagggatttttatctaaaagaatatctttggagtggctctttgacattctatgaaactatcctttttatttgatac

SEQ ID NO: 779 - DNA, 585 bp, Zea Mays
cttgagacgagtcctttctggaagtgctaaaatgaactggagtgtggaactatggattaattaacctgtcaaacctattctacaattgtagcctgcaaatagtaaatatgtacctctgtgtgttctgaagtcttaacttaatctcctaattcttggcaggcttcatgtgttgtatctttctataaatatggacaaagaataaggttgatggaatttagttgattattaaatgatttctccaacagctgtaataccgctgttgtatgttcatgtgagaatcgtgaattcgaagcacttcaagacactgacaaatttgatagaagagaaaaggagttgctatcactgatcgtggtgccatgggagtccatcctcatggatgaggcagaatggctgaactccatttttagattttgcatatgcaccaatttctgtggcacaccacattcaatatcaacttcttatgatatccaacttttgttcttcactattttgtaattattcagtaaattgtttgtttcatctttcaaagaacgtgtttattaacatccggatcccattttattaataaacaattggctcccatct

SEQ ID NO: 780 - DNA, 2194 bp, Zea Mays
ctaccgtttcctttcgattgatagtggaatgagttcttcctccaccctggctctctccgatggatgctccaacatgctatggtcacctcaagctgaccctaaactagatccatctggccttggattcgttcgaccataccaaatctgtgttgtttctcaaatccgattcagcctcagctgttgctgagatttgcatgcttggtggcagagtactcaatgtgctatttgatagcttgttgctctattttggattgggagttcaattccgcccagatctacatcataaagatccatatcagggggaatttcctgagacaatcgaagagtacttgcatcacggtactatgaaatgtatcgcgtttaaccgcaaaggaacacttcttgctgctggatgctcaaatggtagctgtattatatgggactttgaaacaagggggcttgcaaaagaatttcgtgataaagatagcaccgcacctataacaagtgtgtcctggtccaggtatggccaccgtttgcttgcctctgctactgacaagtcattgacactttgggatgtgccaactggggaaaaaattgcacgtattactcttcagcagactccattacgtgccagccttcaacctggttctccaactccatctatttgtttggcatgccctctatcttctgcacctcttcttgttgatttgaatactggaagtactacagttctccctgtttctgtatctgagaatggtaacccccctgcacctaacccccgcaataaatttgcggatggtaccccacctttcacgccaacagctgcaacatttgataagcatggggccctgatatatgtgggcaactccaagggagaaattttaatcatagattcaaaaagcatccaggtacatgcaatagttcccatccctggtggaagtgttgttaaggatattgttttaagccgggatggtcaatatctgctgacaaattctaatgatcgggtcattagagtctaccgaaacattctacctgttaaaggttctagagaggagatcagaaacataagcagcaacagtaatgaatatggaagtcactacgataaattaaaagcaaatggtacaagctgccttattctttcctgtgaacttttggatgccatcacaaagatacagtggaaggcaccatgtttcagtggtaatggtgagtggatagttggtgcttctgcaaacaaaggagagcacaggttgcagatatggaaccaagcagggcgccttgtaaagatgcttgaaggtccaaaagaagctctcattgatcttgcctggcatcctgttgagcctacaattgctacagtatctgtgacaggcttcgtatacatttgggccaaggagcatgtagagaattggagcgcttttgctcctgatttcgtagagttagaagaaaatgaagagtacgccgaacgagaggatgagtttgacttgaatccacgtgaagaacaggctgagaaagtagtgatagatgaggatgctgatgttgatatcgagacatctgagaagaatacagtgttcagtgatgtggaggattctgtggatgagatctcctacttaccagcaattccttacccagattctcctgatgagcagccagagaaatgccttggaagttcaaagttggaggatagcaaccattctggttccccatcctcaatggatgctgtacagaatggacaagccattcctccagcatcaagcccaatggaagttgacaactctactgctgaagacccagaagaagggccaaactcaaagcggaagcggcggctgtcagtgaaggggcttgagttgcagcagtccgagaaaggcaaaaagggatcaacaaagaacaagtccctcgggaagtccacaaaatccagcgccaagaagatggaatctgccaatggtaacagctctgccttcgatgatgaagccactgaggatgatgagattaacattgatagctagtgtgtttctgactgagggcaataggcgtgggggatagaaaatgccttttccccaccacccatccaccacctaattaaaattaactgttgtatgctgtgacaatataaacgcatgtatcagtgttcttgactgtaaattgatatgtgctgtttctcgtattccttagctctctgctttgcacccatgagtatttggttgatgcagtaattcgttct

SEQ ID NO: 781 - DNA, 1603 bp, Zea Mays
gagacgtcggcccattagcgtgcgcgaataagagctgtaaacaggcccggaagattattgctccccttcgttcacctcgcgtacgcgacaaactaggccgaccgccgccgccctacgctcagctgcccacctgccctggtcttcgactcttcgtcgtgcgctttgccggcggcgagcacccatcacaccaggatggcgctaaggggggtctggcagctgcagaagctcgtggtaaactactgcgactggggagggagcagcaggggcatcaggtatgatgatatagtttggttcctctcttcggtagtggtaccattagaccattgtttttcggtatgatttccttggttctgttgcgaaaagccgaaaattagttgagatcctgctggtacatgttcttcaatagtcggatggttggtcgactcttcccagccatggatttgtcgttgcagatgagtgcggtttggaagttggaactgaagacaactatcctattgcctctagcttctctagggcattcctgcatggaaatttcatttctactagacagaaatgtgttatgggactagcgggtactgatgtctgggaagcccatttagtcgttagttcaattacatgctatttattgcaacaatagaatcaggcactttatgcctatgcttgtattcctttatcagattttagctcgagctatggcgctttccttgtacagcagtacactatagtttagtggcagctgtatgggcttcagatcaaacatggtgctggttagtagtcttcattactggatatcgatgcctgaatcttctctttaacaactaccaccgtttttttttactgcagggccttcatggaggcacatcttccagcctttaaggaaaagaatccacacttagaggtggtgacagagcttgtccgcggtcaacatcctaacttgaagggaatttacaaaaaccataacgagcgagtggtatgcgtgagaaatttaccgccagaggaaatactcctgcaagccaccaggctaaggaactctctgggcaggaaagtggtgaagctgcggaccagacatgtaacgaaacgccccagtgttcaggggacgtggacgacggaactgaagatgtgaagcaacaagccaaggtgtttcattgttctttggtggtctgattgcagaaaatgtcagctgtgtcgataactttggtagagctgccgttaggcttgcctgtttgaatagctaaaccgtttactccatttgttccggagtacaatctggtaataacataggagtacacttgactttcttagaccaggccgtcacatttgatatttcagtctggtgatatctgtctcctatattagaccagtacaatgtttcaactcgcgagatactgcgaacacagaattttgctatgctatggccattaccaaggttttttttatcactggtataagtgaaaaaaaatggaagacggaaactgtcatcagatgcagccatacaatatgctgacagccagccagtcaatcttgtgtacgaaccattacggtgcggttggtttaaaactatttccaacatattatttatatggtcatataaaataccgttttg

SEQ ID NO: 782 - DNA, 1551 bp, Zea Mays
gtcggcccattagcgtgcgcgaataagagctgtaaacaggcccggaagattattgctccccttcgttcacctcgcgtacgcgacaaactaggccgaccgccgccgccctacgctcagctgcccacctgccctggtcttcgactcttcgtcgtgcgctttgccggcggcgagcacccatcacaccaggtgctttattgggtccgtccatacggcaggatggcgctaaggggggtctggcagctgcagaagctcgtggtaaactactgcgactggggagggagcagcaggggcatcaggtatgatgatatagtttggttcctctcttcggtagtggtaccattagaccattgtttttcggtatgatttccttggttctgttgcgaaaagccgaaaattagttgagatcctgctggtacatgttcttcaatagtcggatggttggtcgactcttcccagccatggatttgtcgttgcagatgagtgcggtttggaagttggaactgaagacaactatcctattgcctctagcttctctagggcattcctgcatggaaatttcatttctactagacagaaatgtgttatgggactagcgggtactgatgtctgggaagcccatttagtcgttagttcaattacatgctatttattgcaacaatagaatcaggcactttatgcctatgcttgtattcctttatcagattttagctcgagctatggcgctttccttgtacagcagtacactatagtttagtggcagctgtatgggcttcagatcaaacatggtgctgggccttcatggaggcacatcttccagcctttaaggaaaagaatccacacttagaggtggtgacagagcttgtccgcggtcaacatcctaacttgaagggaatttacaaaaaccataacgagcgagtggtatgcgtgagaaatttaccgccagaggaaatactcctgcaagccaccaggctaaggaactctctgggcaggaaagtggtgaagctgcggaccagacatgtaacgaaacgccccagtgttcaggggacgtggacgacggaactgaagatgtgaagcaacaagccaaggtgtttcattgttctttggtggtctgattgcagaaaatgtcagctgtgtcgataactttggtagagctgccgttaggcttgcctgtttgaatagctaaaccgtttactccatttgttccggagtacaatctggtaataacataggagtacacttgactttcttagaccaggccgtcacatttgatatttcagtctggtgatatctgtctcctatattagaccagtacaatgtttcaactcgcgagatactgcgaacacagaattttgctatgctatggccattaccaaggttttttttatcactggtataagtgaaaaaaaatggaagacggaaactgtcatcagatgcagccatacaatatgctgacagccagccagtcaatcttgtgtacgaaccattacggtgcggttggtttaaaactatttccaacatattatttatatggtcatataaaataccgttttg

SEQ ID NO: 783 - DNA, 1166 bp, Zea Mays
agctgtaaacaggcccggaagattattgctccccttcgttcacctcgcgtacgcgacaaactaggccgaccgccgccgccctacgctcagctgcccacctgccctggtcttcgactcttcgtcgtgcgctttgccggcggcgagcacccatcacaccaggatggcgctaaggggggtctggcagctgcagaagctcgtggtaaactactgcgactggggagggagcagcaggggcatcagattttagctcgagctatggcgctttccttgtacagcagtacactatagtttagtggcagctgtatgggcttcagatcaaacatggtgctggttagtagtcttcattactggatatcgatgcctgaatcttctctttaacaactaccaccgtttttttttactgcagggccttcatggaggcacatcttccagcctttaaggaaaagaatccacacttagaggtggtgacagagcttgtccgcggtcaacatcctaacttgaagggaatttacaaaaaccataacgagcgagtggtatgcgtgagaaatttaccgccagaggaaatactcctgcaagccaccaggctaaggaactctctgggcaggaaagtggtgaagctgcggaccagacatgtaacgaaacgccccagtgttcaggggacgtggacgacggaactgaagatgtgaagcaacaagccaaggtgtttcattgttctttggtggtctgattgcagaaaatgtcagctgtgtcgataactttggtagagctgccgttaggcttgcctgtttgaatagctaaaccgtttactccatttgttccggagtacaatctggtaataacataggagtacacttgactttcttagaccaggccgtcacatttgatatttcagtctggtgatatctgtctcctatattagaccagtacaatgtttcaactcgcgagatactgcgaacacagaattttgctatgctatggccattaccaaggttttttttatcactggtataagtgaaaaaaaatggaagacggaaactgtcatcagatgcagccatacaatatgctgacagccagccagtcaatcttgtgtacgaaccattacggtgcggttggtttaaaactatttccaacatattatttatatggtcatataaaataccgttttg

SEQ ID NO: 784 - DNA, 698 bp, Zea Mays
atgattggttccgagatcaacccaacagaaatatcacacgtcaagaaaaccataacgagcgagtggtatgcgtgagaaatttaccgccagaggaaatactcctgcaagccaccaggctaaggaactctctgggcaggaaagtggtgaagctgcggaccagacatgtaacgaaacgccccagtgttcaggggacgtggacgacggaactgaagatgtgaagcaacaagccaaggtgtttcattgttctttggtggtctgattgcagaaaatgtcagctgtgtcgataactttggtagagctgccgttaggcttgcctgtttgaatagctaaaccgtttactccatttgttccggagtacaatctggtaataacataggagtacacttgactttcttagaccaggccgtcacatttgatatttcagtctggtgatatctgtctcctatattagaccagtacaatgtttcaactcgcgagatactgcgaacacagaattttgctatgctatggccattaccaaggttttttttatcactggtataagtgaaaaaaaatggaagacggaaactgtcatcagatgcagccatacaatatgctgacagccagccagtcaatcttgtgtacgaaccattacggtgcggttggtttaaaactatttccaacatattatttatatggtcatataaaataccgttttg

SEQ ID NO: 785 - DNA, 682 bp, Zea Mays
ttgttgtctgatctttgtaatttccacagaaaaccataacgagcgagtggtatgcgtgagaaatttaccgccagaggaaatactcctgcaagccaccaggctaaggaactctctgggcaggaaagtggtgaagctgcggaccagacatgtaacgaaacgccccagtgttcaggggacgtggacgacggaactgaagatgtgaagcaacaagccaaggtgtttcattgttctttggtggtctgattgcagaaaatgtcagctgtgtcgataactttggtagagctgccgttaggcttgcctgtttgaatagctaaaccgtttactccatttgttccggagtacaatctggtaataacataggagtacacttgactttcttagaccaggccgtcacatttgatatttcagtctggtgatatctgtctcctatattagaccagtacaatgtttcaactcgcgagatactgcgaacacagaattttgctatgctatggccattaccaaggttttttttatcactggtataagtgaaaaaaaatggaagacggaaactgtcatcagatgcagccatacaatatgctgacagccagccagtcaatcttgtgtacgaaccattacggtgcggttggtttaaaactatttccaacatattatttatatggtcatataaaataccgttttg

SEQ ID NO: 786 - DNA, 2204 bp, Zea Mays
ccacctcgaacagcaccagcatatacggagaacgcgcattttctatagcaaccaaccaatctgatgctaccagtggcatcctacgcggcagaggaatagccacgccaccacgtcccccgcgcccgccgacccacccgcaaacgcaacgcaataataataggctaggcagccagcagccaccatccccaccagcccagcaccaggaaggaaatagcggcgagcaagagctggcggaaagaagaggaaagccaggcacgccgctcacccaccgcgccaccaaccgcagatcctaaatccgatctctctctccctccctccctccctcccgctcgaggttttcggtttcgatccggcaagcgggcgagatcttcatggcgacgtcgttcgaccgctgggagaaggaccccttcttcctcgccgccgaggaggtccaggaatccgccgatcggatggaatcggtttatcgggtatgggtgcaggagaggagcgggggcgattccgaggcggcaagcgtcactggaggccctacagctgcgcagcttcgccgcgagctgcacacggcgcttggtaccgccaagtggcagcttgatgaactggcgcgggcagtcagatcgaacgatctggttatgtcagcaggaaaagacacaagggctaggcatgatgattttgttacagcaatcggctatcgcatattagaggtcgagaactacttgaaagaatccaatcttgcggacgggagggggccattgagctgggttcacttggatgaggatgaaagggacgaccttgcagcttttctatctgccagtccttttcaacagaaagacaaagtggtcacaattccttcagcaggtgacattgaagtgggcagcaatgcagcaaggatgaaaaatgatatatcaactgacagctccaaggattcagctggttccacggatttgatttcaggcacagcaaagcaagatttgcatcgtgggcacagaagagcagctagtgccagtgctgatataggctcatggagcatgtcaatccctaatgaatgtgaaggaactacagaacagttatctgatggctcagacaaattgcctttgcataagatagtgaaaacatgtgctttgacaagtaccttgcaatctaagactagaacgaagtggaaaaatggagctgttaggtgggcaggcagtaaccaacaggatgttgaagaggctatccctctgaatacttctcagttgagtcagggcttagaggaatgctttgaaaggaacaagagttgcttaagtacatgtgatgagcatacatacaataagaaacttcatggttggctcggagcccttcgtagacaacttcaaaggtctcagtaccaaattcaatatgggcatcatattcaattgattgttttggcacttgctgcccttgtaatcattgtatgcatagtgaggacaatctggtgactatatttatttgctcatgattggatttctagcctcacaagatcagcagcttgtatggtaaattcactggcagctgcctcgtccttggaagaacatctacaggacaatccttgcagcacggttgcttcgccacacttggatatgctcccgaatggtgccttgaacaattgatgcacctcgagaactcaatcctccgtggtgagttggtgactgggtggcacctatgcaatggcccagtataaattagtggtgcagtgggctggcgatcatgctgctagcaaccgaaattgcaagacttgtatcatacatcaacgctattgcttttaccgcctgacacggaagggtggtgatcatgcatcaatgctattgcttttactgcctgacacagaagggtgtcattttttttttgtaggagttgccatctgaactgtagagctccataggggataggttctgatcggaatgtgaatggcactagaaaattacttttactgtatctgcttgtgttgtcaagaaccgaatgaggtgcctggcagccttgtctgtaccctgtacactaaaattggagaatgttgaagccctcggcagtaatcggctggacttgtaaggtgccagtgtgtgttgagcctgcatattacggctaaattcggtgaagattatagcactttactgtgcatcctaatgtcaaagcccccaaccaatctttggtattccaaaccccgaagtccgaaggaaaccatttttggtcgagtc

SEQ ID NO: 787 - DNA, 2157 bp, Zea Mays
attttctatagcaaccaaccaatctgatgctaccagtggcatcctacgcggcagaggaatagccacgccaccacgtcccccgcgcccgccgacccacccgcaaacgcaacgcaataataataggctaggcagccagcagccaccatccccaccagcccagcaccaggaaggaaatagcggcgagcaagagctggcggaaagaagaggaaagccaggcacgccgctcacccaccgcgccaccaaccgcagatcctaaatccgatctctctctccctccctccctccctcccgctcgaggttttcggtttcgatccggcaagcgggcgagatcttcatggcgacgtcgttcgaccgctgggagaaggaccccttcttcctcgccgccgaggaggtccaggaatccgccgatcggatggaatcggtttatcgggtatgggtgcaggagaggagcgggggcgattccgaggcggcaagcgtcactggaggccctacagctgcgcagcttcgccgcgagctgcacacggcgcttggtaccgccaagtggcagcttgatgaactggcgcgggcagtcagatcgaacgatctggttatgtcagcaggaaaagacacaagggctaggcatgatgattttgttacagcaatcggctatcgcatattagaggtcgagaactacttgaaagaatccaatcttgcggacgggagggggccattgagctgggttcacttggatgaggatgaaagggacgaccttgcagcttttctatctgccagtccttttcaacagaaagacaaagtggtcacaattccttcagcaggtgacattgaagtgggcagcaatgcagcaaggatgaaaaatgatatatcaactgacagctccaaggattcagctggttccacggatttgatttcaggcacagcaaagcaagatttgcatcgtgggcacagaagagcagctagtgccagtgctgatataggctcatggagcatgtcaatccctaatgaatgtgaaggaactacagaacagttatctgatggctcagacaaattgcctttgcataagatagtgaaaacatgtgctttgacaagtaccttgcaatctaagactagaacgaagtggaaaaatggagctgttaggtgggcaggcagtaaccaacaggatgttgaagaggctatccctctgaatacttctcagttgagtcagggcttagaggaatgctttgaaaggaacaagagttgcttaagtacatgtgatgagcatacatacaataagaaacttcatggttggctcggagcccttcgtagacaacttcaaaggtctcagtaccaaattcaatatgggcatcatattcaattgattgttttggcacttgctgcccttgtaatcattgtatgcatagtgaggacaatctggtgactatatttatttgctcatgattggatttctagcctcacaagatcagcagcttgtatgggcaggctgcctcgtccttggaagaacatctacaggacaatccttgcagcacggttgcttcgccacacttggatatgctcccgaatggtgccttgaacaattgatgcacctcgagaactcaatcctccgtggtgagttggtgactgggtggcacctatgcaatggcccagtataaattagtggtgcagtgggctggcgatcatgctgctagcaaccgaaattgcaagacttgtatcatacatcaacgctattgcttttaccgcctgacacggaagggtggtgatcatgcatcaatgctattgcttttactgcctgacacagaagggtgtcattttttttttgtaggagttgccatctgaactgtagagctccataggggataggttctgatcggaatgtgaatggcactagaaaattacttttactgtatctgcttgtgttgtcaagaaccgaatgaggtgcctggcagccttgtctgtaccctgtacactaaaattggagaatgttgaagccctcggcagtaatcggctggacttgtaaggtgccagtgtgtgttgagcctgcatattacggctaaattcggtgaagattatagcactttactgtgcatcctaatgtcaaagcccccaaccaatctttggtattccaaaccccgaagtccgaaggaaaccatttttggtcgagtc

SEQ ID NO: 788 - DNA, 2205 bp, Zea Mays
gctaccagtggcatcctacgcggcagaggaatagccacgccaccacgtcccccgcgcccgccgacccacccgcaaacgcaacgcaataataataggctaggcagccagcagccaccatccccaccagcccagcaccaggaaggaaatagcggcgagcaagagctggcggaaagaagaggaaagccaggcacgccgctcacccaccgcgccaccaaccgcagatcctaaatccgatctctctctccctccctccctccctcccgctcgaggttttcggtttcgatccggcaagcgggcgagatcttcatggcgacgtcgttcgaccgctgggagaaggaccccttcttcctcgccgccgaggaggtccaggaatccgccgatcggatggaatcggtttatcgggtatgggtgcaggagaggagcgggggcgattccgaggcggcaagcgtcactggaggccctacagctgcgcagcttcgccgcgagctgcacacggcgcttggtaccgccaagtggcagcttgatgaactggcgcgggcagtcagatcgaacgatctggttatgtcagcaggaaaagacacaagggctaggcatgatgattttgttacagcaatcggctatcgcatattagaggtcgagaactacttgaaagaatccaatcttgcggacgggagggggccattgagctgggttcacttggatgaggatgaaagggacgaccttgcagcttttctatctgccagtccttttcaacagaaagacaaagtggtcacaattccttcagcaggtgacattgaagtgggcagcaatgcagcaaggatgaaaaatgatatatcaactgacagctccaaggattcagctggttccacggatttgatttcaggcacagcaaagcaagatttgcatcgtgggcacagaagagcagctagtgccagtgctgatataggctcatggagcatgtcaatccctaatgaatgtgaaggaactacagaacagttatctgatggctcagacaaattgcctttgcataagatagtgaaaacatgtgctttgacaagtaccttgcaatctaagactagaacgaagtggaaaaatggagctgttaggtgggcaggcagtaaccaacaggatgttgaagaggctatccctctgaatacttctcagttgagtcagggcttagaggaatgctttgaaaggaacaagagttgcttaagtacatgtgatgagcatacatacaataagaaacttcatggttggctcggagcccttcgtagacaacttcaaagttgtatgcatagtgaggacaatctggtgactatatttatttgctcatgattggatttctagcctcacaagatcagcagcttgtatggtaaattcactggcagttaagttactcttggtcaacttgatcctgaagcatgcatatgaggcaactatggtagaccattttggtagtcaaggttcaaaatcacgtataatgatctggttggggccacttatcttgccacatgttcagggcaggctgcctcgtccttggaagaacatctacaggacaatccttgcagcacggttgcttcgccacacttggatatgctcccgaatggtgccttgaacaattgatgcacctcgagaactcaatcctccgtggtgagttggtgactgggtggcacctatgcaatggcccagtataaattagtggtgcagtgggctggcgatcatgctgctagcaaccgaaattgcaagacttgtatcatacatcaacgctattgcttttaccgcctgacacggaagggtggtgatcatgcatcaatgctattgcttttactgcctgacacagaagggtgtcattttttttttgtaggagttgccatctgaactgtagagctccataggggataggttctgatcggaatgtgaatggcactagaaaattacttttactgtatctgcttgtgttgtcaagaaccgaatgaggtgcctggcagccttgtctgtaccctgtacactaaaattggagaatgttgaagccctcggcagtaatcggctggacttgtaaggtgccagtgtgtgttgagcctgcatattacggctaaattcggtgaagattatagcactttactgtgcatcctaatgtcaaagcccccaaccaatctttggtattccaaaccccgaagtccgaaggaaaccatttttggtcgagtc

SEQ ID NO: 789 - DNA, 2591 bp, Zea Mays
caggcgtgcgatggcgccattgtgtggcctggcttccgttccgcccgccgaggccagtgtggcaggcagctcccgcgcgagcgcgagcgcgatccagaggctggcgcacctgcgtcactcgctccgcgctgccgcgatctcctctgacgtcgaagtcgcccgggggatgacacagggggaaggggtggtgtgggaggggtgaacaggagctcggtgacttttgtgagggccgccagatggaggagcgccggctcgacacgccggcgatgaggagaatcagcgagtggtatatacgttcctagcttctcctaccatccctgctgcgtctccttgctctacttttcattaattggcatgttgctgctgctgtttcgcatttgattcgatgagttcgtgtccgtaaccggcgctgatagcttgttcagtccgattttgaactgaaaacaaacagctatcgtcattaagctagcaacacgtgacctgtgctttcagatcttcacgtcttttacccgctgaaccgctcgctctagccaaaccctgcaaatgaagttttgcggagtttgaggctggctcttttgcttcgcttgattgttgcaggattctttcactagagttcccaagcgatattaccatccaggttggggaggcgaccttcaacttgcacaagctcccgttggcatcgaggtgcggctacataagggagcaggtgtcggggatcaatggctccagggtcacccacatcgacatcacgggcttgccgggcggcgccgcggcgttcgagctcgtcaccaaattctgctacggcgagaacttcgagctcacggaggacaacgtcgccatgctgcggtgcgccgccgagcacctgcagatgaccgacgacgacagcaggggcgggaacctggccggcaggaccgaggcctacctggaggccgtggcgctgatgagcctcgcgggcgcggtcaccgtgctccggaggtcggaggacctcctcccggtgtccgaggaggtggacctcgtcggcaggtgcgtcgacgccatcgcctacttcacctgcaacgacagtcagttcagcatgtccaacgagagtcgtaattgccatgaaggcgagggggttcaagggcattgctctgggcacgctcatcatgctctatgcgcagaagtcgctgcgaacgctggtgagctcaaccgtgcaatgtgcatctgcatctgtctacaagacacacacggaagggagaagcaaaagatggagccgaggcaggaacacgagaagcgtgtggtgcttgagaccatcgtgactctgctgcccaaggagaggaactccatgtccgtgagcttcctctcgatgctgcttcgagcagcgctgtgcctggacacgaccctggcgtgccggctcgacctcgagaagcggatggccgcgcagctcgggcaggccgtgctcgacgacctcctgatcccgatcttcttgcccgacgccggcaacacgttcgacgtcgacgcggtccagaggatcctggtcgggtacctggagcacgaggccgaggcggaccggctggactacaacaccgacgacgacttcacctcgacggcgtcgccgcccaacgacgtcggaatggtcggcaagctcatggagtcctacctggctgagatcgcctcggacgtggacctgcccgttgacaagttcaccggcctcgccgagatgatcccggaacgcgctaggttcaacgacgacggcatgtaccgttccatcgacatctacttgaaggcgcatccgtatctgagcgaggccgagcggaagacggtgtgccgggtgatggactgccagaagctgtcgcgcgaggcgtgcgcgcacgcggcgcagaacaatcggctgccagtgcagacagtggtgcaggttctccaccacgagcagcggcgcctgcgcgaggcccctacgtcgtcgttctacggcggcgagtccccgaccccggcgccgagcctccagggccggcacggccggagcgtgccggacgagatgtcacagctgcagcgggagaacgaggagctcaagatggagctgctgcggctgaagatgaacctgagggacccgtcggcgcccccgcagcacagcgacgctccaccatcggggcgccgcccgctgccgaagaaggcggcaggcggcagcggggggttcattaacaacgtgtccaagaagctcgggcggctgaacccgttcctgcggcctgacgccgtgggtggcgccaaagtgcgcaccaagccgtccaggaccaaggatcggaggcactccatcggctagtgattggaattggctcatgctcattgccggcttctttcatcttgaatcttcttgacggctatttcactcgatgaacgtaaaaaaacactcgttgattgattgattgaatggccgagtcgtgagtaaagatgtgtagctatcgcacttgaacataaataagatgctatgttatactttcttcattctttttttatatgccgtgttttagtttaaaaataaactagcgaataacacatatttgaaagtggaataatagtaactctagcggaccatccaaattaggtcctctacttctact

SEQ ID NO: 790 - DNA, 2592 bp, Zea Mays
caggcgtgcgatggcgccattgtgtggcctggcttccgttccgcccgccgaggccagtgtggcaggcagctcccgcgcgagcgcgagcgcgatccagaggctggcgcacctgcgtcactcgctccgcgctgccgcgatctcctctgacgtcgaagtcgcccgggggatgacacagggggaaggggtggtgtgggaggggtgaacaggagctcggtgacttttgtgagggccgccagatggaggagcgccggctcgacacgccggcgatgaggagaatcagcgagtggtatatacgttcctagcttctcctaccatccctgctgcgtctccttgctctacttttcattaattggcatgttgctgctgctgtttcgcatttgattcgatgagttcgtgtccgtaaccggcgctgatagcttgttcagtccgattttgaactgaaaacaaacagctatcgtcattaagctagcaacacgtgacctgtgctttcagatcttcacgtcttttacccgctgaaccgctcgctctagccaaaccctgcaaatgaagttttgcggagtttgaggctggctcttttgcttcgcttgattgttgcaggattctttcactagagttcccaagcgatattaccatccaggttggggaggcgaccttcaacttgcacaagctcccgttggcatcgaggtgcggctacataagggagcaggtgtcggggatcaatggctccagggtcacccacatcgacatcacgggcttgccgggcggcgccgcggcgttcgagctcgtcaccaaattctgctacggcgagaacttcgagctcacggaggacaacgtcgccatgctgcggtgcgccgccgagcacctgcagatgaccgacgacgacagcaggggcgggaacctggccggcaggaccgaggcctacctggaggccgtggcgctgatgagcctcgcgggcgcggtcaccgtgctccggaggtcggaggacctcctcccggtgtccgaggaggtggacctcgtcggcaggtcatcatcgatgattggttggctgacgagctcacgtcgctgcggattgacacgttccagagagtcgtaattgccatgaaggcgagggggttcaagggcattgctctgggcacgctcatcatgctctatgcgcagaagtcgctgcgaacgctggtgagctcaaccgtgcaatgtgcatctgcatctgtctacaagacacacacggaagggagaagcaaaagatggagccgaggcaggaacacgagaagcgtgtggtgcttgagaccatcgtgactctgctgcccaaggagaggaactccatgtccgtgagcttcctctcgatgctgcttcgagcagcgctgtgcctggacacgaccctggcgtgccggctcgacctcgagaagcggatggccgcgcagctcgggcaggccgtgctcgacgacctcctgatcccgatcttcttgcccgacgccggcaacacgttcgacgtcgacgcggtccagaggatcctggtcgggtacctggagcacgaggccgaggcggaccggctggactacaacaccgacgacgacttcacctcgacggcgtcgccgcccaacgacgtcggaatggtcggcaagctcatggagtcctacctggctgagatcgcctcggacgtggacctgcccgttgacaagttcaccggcctcgccgagatgatcccggaacgcgctaggttcaacgacgacggcatgtaccgttccatcgacatctacttgaaggcgcatccgtatctgagcgaggccgagcggaagacggtgtgccgggtgatggactgccagaagctgtcgcgcgaggcgtgcgcgcacgcggcgcagaacaatcggctgccagtgcagacagtggtgcaggttctccaccacgagcagcggcgcctgcgcgaggcccctacgtcgtcgttctacggcggcgagtccccgaccccggcgccgagcctccagggccggcacggccggagcgtgccggacgagatgtcacagctgcagcgggagaacgaggagctcaagatggagctgctgcggctgaagatgaacctgagggacccgtcggcgcccccgcagcacagcgacgctccaccatcggggcgccgcccgctgccgaagaaggcggcaggcggcagcggggggttcattaacaacgtgtccaagaagctcgggcggctgaacccgttcctgcggcctgacgccgtgggtggcgccaaagtgcgcaccaagccgtccaggaccaaggatcggaggcactccatcggctagtgattggaattggctcatgctcattgccggcttctttcatcttgaatcttcttgacggctatttcactcgatgaacgtaaaaaaacactcgttgattgattgattgaatggccgagtcgtgagtaaagatgtgtagctatcgcacttgaacataaataagatgctatgttatactttcttcattctttttttatatgccgtgttttagtttaaaaataaactagcgaataacacatatttgaaagtggaataatagtaactctagcggaccatccaaattaggtcctctacttctact

SEQ ID NO: 791 - DNA, 2491 bp, Zea Mays
caggcgtgcgatggcgccattgtgtggcctggcttccgttccgcccgccgaggccagtgtggcaggcagctcccgcgcgagcgcgagcgcgatccagaggctggcgcacctgcgtcactcgctccgcgctgccgcgatctcctctgacgtcgaagtcgcccgggggatgacacagggggaaggggtggtgtgggaggggtgaacaggagctcggtgacttttgtgagggccgccagatggaggagcgccggctcgacacgccggcgatgaggagaatcagcgagtggtatatacgttcctagcttctcctaccatccctgctgcgtctccttgctctacttttcattaattggcatgttgctgctgctgtttcgcatttgattcgatgagttcgtgtccgtaaccggcgctgatagcttgttcagtccgattttgaactgaaaacaaacagctatcgtcattaagctagcaacacgtgacctgtgctttcagatcttcacgtcttttacccgctgaaccgctcgctctagccaaaccctgcaaatgaagttttgcggagtttgaggctggctcttttgcttcgcttgattgttgcaggattctttcactagagttcccaagcgatattaccatccaggttggggaggcgaccttcaacttgcacaagctcccgttggcatcgaggtgcggctacataagggagcaggtgtcggggatcaatggctccagggtcacccacatcgacatcacgggcttgccgggcggcgccgcggcgttcgagctcgtcaccaaattctgctacggcgagaacttcgagctcacggaggacaacgtcgccatgctgcggtgcgccgccgagcacctgcagatgaccgacgacgacagcaggggcgggaacctggccggcaggaccgaggcctacctggaggccgtggcgctgatgagcctcgcgggcgcggtcaccgtgctccggaggtcggaggacctcctcccggtgtccgaggaggtggacctcgtcggcagagagtcgtaattgccatgaaggcgagggggttcaagggcattgctctgggcacgctcatcatgctctatgcgcagaagtcgctgcgaacgctggacacacacggaagggagaagcaaaagatggagccgaggcaggaacacgagaagcgtgtggtgcttgagaccatcgtgactctgctgcccaaggagaggaactccatgtccgtgagcttcctctcgatgctgcttcgagcagcgctgtgcctggacacgaccctggcgtgccggctcgacctcgagaagcggatggccgcgcagctcgggcaggccgtgctcgacgacctcctgatcccgatcttcttgcccgacgccggcaacacgttcgacgtcgacgcggtccagaggatcctggtcgggtacctggagcacgaggccgaggcggaccggctggactacaacaccgacgacgacttcacctcgacggcgtcgccgcccaacgacgtcggaatggtcggcaagctcatggagtcctacctggctgagatcgcctcggacgtggacctgcccgttgacaagttcaccggcctcgccgagatgatcccggaacgcgctaggttcaacgacgacggcatgtaccgttccatcgacatctacttgaaggcgcatccgtatctgagcgaggccgagcggaagacggtgtgccgggtgatggactgccagaagctgtcgcgcgaggcgtgcgcgcacgcggcgcagaacaatcggctgccagtgcagacagtggtgcaggttctccaccacgagcagcggcgcctgcgcgaggcccctacgtcgtcgttctacggcggcgagtccccgaccccggcgccgagcctccagggccggcacggccggagcgtgccggacgagatgtcacagctgcagcgggagaacgaggagctcaagatggagctgctgcggctgaagatgaacctgagggacccgtcggcgcccccgcagcacagcgacgctccaccatcggggcgccgcccgctgccgaagaaggcggcaggcggcagcggggggttcattaacaacgtgtccaagaagctcgggcggctgaacccgttcctgcggcctgacgccgtgggtggcgccaaagtgcgcaccaagccgtccaggaccaaggatcggaggcactccatcggctagtgattggaattggctcatgctcattgccggcttctttcatcttgaatcttcttgacggctatttcactcgatgaacgtaaaaaaacactcgttgattgattgattgaatggccgagtcgtgagtaaagatgtgtagctatcgcacttgaacataaataagatgctatgttatactttcttcattctttttttatatgccgtgttttagtttaaaaataaactagcgaataacacatatttgaaagtggaataatagtaactctagcggaccatccaaattaggtcctctacttctact

SEQ ID NO: 792 - DNA, 1514 bp, Zea Mays
aaaagatgatattttatagttcacatcggtttctgacggtcagaatataaagggttttttaaattgatgcccttcgttttaaaacctgaaacaaacacggcccacgtggtcacgtccaccgatttggaaaaagaaacagtatggcacccactgaattttttcccaccgattttactgtgcttccttccttcgcaccccgcctcggccggcgtcgccacgcgcaccccgcctcatccatccaccaatccaccgcctttcgcaggattgcgcttgctaccccgggtccccaccacacgcacgcgagcccgcggccaccacctcgatgccactgacgggctggaatccgctggcgcccgtcctccagaccgtcgccgctttctcccgccacatcctcatcgcccccgacgccgggctcgacgaccaccgcctccgcccccttctagcgctctccctctccccgccttcgccggcaccaccgcaaccggaggtccggaaggagaagaaggatgccaaggaggcgccactgacgaaggaggaggtcggccgggccacgtggatgctgcttcacaccatcgcagcgcagttccctgacgaacctacgaggcaacaaagacgggatgcaaaggagttgatgcatataatctcgagactatatccttgcaaagaatgtgctgatcacttcaaggaagttttgaaagcaaatcctgtgcaggcaggatctcaggctgatttctcccagtggttatgttatgtccataacgtggttaatcgaagaatcataggaaaagtaaggtctcagggccaaaaagaggaaaactgaggcacacccttttactcctacaataagggccttgggaagccaatatttccctgccaaagagtaactgcacgttggggtaaactggattgtcctgagcgctcgtgtgatctagaaggcagcatcgacatcatgccaaaccgatgacatggccaagaaatcgcttgaactttctacccgtagatgatttcatttcaataccactcattgatgagcacttgagcaataccagggagataagaaagagaattcaggactccgtgctgacatagcagggcgtccatatgcttctgtatctttggcgttggaccgttgtagtaaaagatatgaatgtctcgtgatatttgtacttgtctatgcctagtctgatgtctgacgactcttccataacccataccagtccgtgcagattttcatttttgtgcaaccgtcttatgtctgagcagtttttttataatatcacaggagtcagaagtgtactcccctttcgagggtaggaagatgtgtcgtcctttctaatacttaaatttctgtatcacaggagtcagaagtgtactcctttctatatagaattctggaaaacaagatgctgatgacacttctactaggatggatccatatacttattaggatgttaaatatctgatcttttttcaattgcgaataaatatgatagctatataaatttatattcttg

SEQ ID NO: 793 - DNA, 1946 bp, Zea Mays
caccccgcctcggccggcgtcgccacgcgcaccccgcctcatccatccaccaatccaccgcctttcgcaggattgcgcttgctaccccgggtccccaccacacgcacgcgagcccgcggccaccacctcgatgccactgacgggctggaatccgctggcgcccgtcctccagaccgtcgccgctttctcccgccacatcctcatcgcccccgacgccgggctcgacgaccaccgcctccgcccccttctagcgctctccctctccccgccttcgccggcaccaccgcaaccggaggtccggaaggagaagaaggatgccaaggaggcgccactgacgaaggaggaggtcggccgggccacgtggatgctgcttcacaccatcgcagcgcagttccctgacgaacctacgaggcaacaaagacgggatgcaaaggagttgatgcatataatctcgagactatatccttgcaaagaatgtgctgatcacttcaaggaagttttgaagtaagcatttctcaccaacaacttggataaatacttgtaatatcaattttaattgcttgattccttgatgtttctttgtgttacaacttacaagtattctctctgtgaagtggtcacatggttcccttgacagtttgctgctttataatatgatgcaaaatagcacatattagctacgaactcttgctactttctgcagtttgagatctgtgcatgaatcttagtttctggtgctctgaagtcatgggtttggctggtagcctgatacagtatacacctatttattaagtgtttacacagttttttgtccatatgatgcacagggtgagtaagctctttttttttaataaggaatgtgtaagctctttacatgctcatctattgatgacttgaatataacaatgaatcacaatgattgtttgtgtttatatttgtgaaggttcatgttgttaatatctgatacggaaacatggctgagttgcgtgttattttatctaacttttggttatctgaaagtttatgtagaggacagccctctcattcatcaggctgaatatatcatagttcagtgatagcaataattcttgaaaactaaactgacttaactgtgttgtacttctgtagagcaaatcctgtgcaggcaggatctcaggctgatttctcccagtggttatgttatgtccataacgtggttaatcgaagaatcataggaaaagtaaggtctcagggccaaaaagaggaaaactgaggcacacccttttactcctacaataagggccttgggaagccaatatttccctgccaaagagtaactgcacgttggggtaaactggattgtcctgagcgctcgtgtgatctagaaggcagcatcgacatcatgccaaaccgatgacatggccaagaaatcgcttgaactttctacccgtagatgatttcatttcaataccactcattgatgagcacttgagcaataccagggagataagaaagagaattcaggactccgtgctgacatagcagggcgtccatatgcttctgtatctttggcgttggaccgttgtagtaaaagatatgaatgtctcgtgatatttgtacttgtctatgcctagtctgatgtctgacgactcttccataacccataccagtccgtgcagattttcatttttgtgcaaccgtcttatgtctgagcagtttttttataatatcacaggagtcagaagtgtactcccctttcgagggtaggaagatgtgtcgtcctttctaatacttaaatttctgtatcacaggagtcagaagtgtactcctttctatatagaattctggaaaacaagatgctgatgacacttctactaggatggatccatatacttattaggatgttaaatatctgatcttttttcaattgcgaataaatatgatagctatataaatttatattcttg

SEQ ID NO: 794 - DNA, 377 bp, Zea Mays
gcctcatccatccaccaatccaccgcctttcgcaggattgcgcttgctaccccgggtccccaccacacgcacgcgagcccgcggccaccacctcgatgccactgacgggctggaatccgctggcgcccgtcctccagaccgtcgccgctttctcccgccacatcctcatcgcccccgacgccgggctcgacgaccaccgcctccgcccccttctagcgctctccctctccccgccttcgccggcaccaccgcaaccggaggtccggaaggagaagaaggatgccaaggaggcgccactgacgaaggaggaggtcggccgggccacgtggatgctgcttcacaccatcgcagcgcagaatgatcaaaatgcaatggag

SEQ ID NO: 795 - DNA, 659 bp, Zea Mays
aatgctaatggaggcgcatcacgcagggacgtctccctatcttaagaagaggagctgcaggaagccaaaggaaacgaagcatagccgtagaagcatttcacaagtcttgaagggattgtgcttgctgcttgcatagtggtaggagatggagcgtccatctgtgctgattttgctgatatttgcatttgctggaggaaatctgctcgtgggcatcgcctctaacgcaagaagcatcaagaacacaggacatggaagcatagatctaaacgacaggaaactgaaggaacgatatacttttaccatccgaaagacaaggggcctggaaaatgtcaggacggacgactaccaacccgttgacccgagcccaagctccaaagccacgatcaggccaggtccaattgagcatggagctccgcttcttccttatgtaccgcggtacccgccgccgccgcctgcctcctgttgaatcccctggatcccctttcaggctttcacttggatacatctggtcgtcaaaatctgctgtcatacttttattaaggtcactagtgtgaccatatatgtatcaaatataagtgtgttactgttaccaataccatattgcttgagtgctgcatgttttactatgtttcgcgaagtggtgaatggttgtcaagggc

SEQ ID NO: 796 - DNA, 1889 bp, Zea Mays
agaaggccaagggctctctctctctctctctctctctctatacccgtaggcgtagctttccttctccaccttctccttcttcttcttcggctgcctatatataagtgctacatgcgtatgcagtgttcctcgcccggtttatttgccgatggactcttggtggtgagcagcgagcgagagatagagagggtgaaactacatatgcatatacaaatacatgtagctagcggcgtagtactggatactgtgccatacggagtatagtatatatactcgctgtattagcagtagaggcggccgtgcagcgatcggtcgacgatggttgttgccgccatgagagacgagggagaggagggacgacgacgggcggtggtggcgatacgggactacgatcccaagacggaccgcgacggcacggaggccgtcgagcgggagtgcgaggtcggcccggccgccgccgccggcgggatgtcgctgcacgccgacctgctcggcgaccccgtcgcgcgcatccgccactcgccgcactacctcatgctggtagctgagacgtccgggccggacggccggatcgtcgccctcgtccggggaaccgtcaagtctgtcgcctccggcaagagccgccctggcgcgcccgccttcgccagagtcggctacattcttggcctccgcgtcgcgccttcccacaggcggatgggcatcgcgcggcagctggtgcatcggctggagcagtggttcgagctgatgggcgccgagtacgcgtacatggccaccgacaggtccaacgaggcgtcgctgcggctcttcaccggccgctgcggctactccaagttccggacgccgtcgctgctggtgcacccggtgcactcgcaccgcctcaggccgcccccgcgcgccacggtggtccgcctgggcgcccgcgacgccgagcggctgtaccgcagccggctcgcgcacgtcgagttcttccccgccgacatcggcgccgtcctgggcaacgcgctctcccgcggcacgttcctggccaccgtgggcggctacgagtggggcggcgtcgaccgcttcctggcgtgcccgccggcgtcgtgggccgtggccagcgcgtgggactgcggcggcgtgttccggctccaggtgcgcggcgcgtcgcgcctgcgccgcgccgccgcggccgccacccgcgcgctggaccgcgccgccaagtggctgcgcgtgccgtccgtgcccgacttcttccgccccttcgcgggctggttcgtctacggcctcgccgggagcggcggccgcgacgccgcgatggccgccgaggcggtcttcgcgtccatcgtcaacatggcgcgcggcagggcggccgccgtggcggtggaggttgcggccatggaccccctccgcgggcgcatcccgcactggcgccgactgtcgtgcaccgaggacctgtggtgcatgaagcggctcggcgctggtggtggcggccacgcggacggatgggactgggccaggtcggcccctggtcgatccatcttcgtggaccctagggaggtgtgagggtgactcggcggccgcttcagagcagagctctagtgctctgtttttctttctttcttttttgccactgagcttcattctctctttttttttcccctaacacttccaaattttgcgacccttcagttttgttctggttctggtagacgagatactgtcttttttcttttgtagaatcaccagggagtacgacgatggaaaatctatgatgtagatacatttcccttgactcttgtcattgtccgccgtgttctatgcatcatgtacgcaccatgtcaagtgtgcggttgcaaggcgatcgttcttgtccagccacacgtacacggacggaatagtatcgttga

SEQ ID NO: 797 - DNA, 1183 bp, Zea Mays
agtatttattataatatctgagtggattcaacaagaacacattgaaaaaagcatcttggatagcatgaacactgagggaggctataaactctggaaatatataattttgtaggcactaaaagttcgatgaaagtatcatagctgtattggattcatggtgaatagtgcttaatacctccagaggataaacttaagcataaacctacagtgccaactacataaaacacaataactcagatcatttctaactgaaataaaagaaaatcagtcagattctaaagaacaacacgagggttcaaaggcagcattaaagaagcaagggaaaagaaagcaaaagaagcgatgggtcacctgacttcattcccatcgtcctgaaaggtatccggattcgatccaagcttcatgaacttcatcttgaacaagaaagaagagccgcgcagcttcacgctcttctagaccaaatgctcacacggagaccagaccaccaccaccactaccagttgtaagaagcaagaactgcacagcacagcagcactatcccatacttgtccgcagcatcaacggcaaacggcccagagcagcgaagtagcagtgcacaagaacaagttgctgctgcgccgagaagaccgaatattacaacgtgccggagcccggccaggagagagatcgctcgtacaacgaaaccaaacaaataatgggatcggttcagacgcagcaacagcgctctcgtgcttgaagcgcactccagccctcccccccaacctacttatgcggccggtgccgctgctgctatcgtaggcagtgaggccaggaggggagagcaggagcacaagtacctcaggagaagtaaacaatatggagtgagagagaggggggcagtgagccagaggagggacacccacaaagcacaaagctgacacacccccacctccccctgctgctgcttgtttaattgcgtgtccttgttgatctgggaaaaagattagtataataggtataatagttccttgcaccctccagtccagctctcttcactccctcttctcataagaaaaaaatactgccaagattcagaggggatcttgcgtccaatgcgttgtcatattattaagcaactagtagtagtccacattcctcgccacagcgtaccgttccccgagtatgatctctcaacggtctcctt

SEQ ID NO: 798 - DNA, 1182 bp, Zea Mays
agtatttattataatatctgagtggattcaacaagaacacattgaaaaaagcatcttggatagcatgaacactgagggaggctataaactctggaaatatataattttgtaggcactaaaagttcgatgaaagtatcatagctgtattggattcatggtgaatagtgcttaatacctccagaggataaacttaagcataaacctacagtgccaactacataaaacacaataactcagatcatttctaactgaaataaaagaaaatcagtcagattctaaagaacaacacgagggttcaaaggcagcattaaagaagcaagggaaaagaaagcaaaagaagcgatgggtcacctgacttcattcccatcgtcctgaaaggtatccggattcgatccaagcttcatgaacttcatcttgaacaagaaagaagagccgcgcagcttcacgctcttctagaccaaatgctcacacggagaccagaccaccaccaccactaccagttgtaagaagcaagaactgcacagcacagcagcactatcccatacttgtccgcagcatcaacggcaaacggcccagagcagcgaagtagcagtgcacaagaacaagttgctgctgcgccgagaagaccgaatattacaacgtgccggagcccggccaggagagagatcgctcgtacaacgaaaccaaacaaataatgggatcggttcagacgcagcaacagcgctctcgtgcttgaagcgcactccagccctcccccccaacctacttatgcggccggtgccgctgctgctatcgtaggcagtgaggccaggaggggagagcaggagcacaagtacctcaggagaagtaaacaatatggagtgagagagaggggggcagtgagccagaggagggacacccacaaagcacaaagctgacacacccccacctccccctgctgctgcttgtttaattgcgtgtccttgttgatctgggaaaaagattagtataataggtataatagttccttgcaccctccagtccagctctcttcactccctcttctcataagaaaaaaatactgccaagattcagaggggatcttgcgtccaatgcgttgtcatattattaagcaactagtagtagtccacattcctcgccacagcgtaccgttccccgagtatgatctctcaacggtctcct

SEQ ID NO: 799 - DNA, 1034 bp, Zea Mays
ctcccgccgagcgctgagcgtcgagcacatcggcccaggaacaccaacgctgcgtgcagcagccccgctaggatcgccaccgacgccgccgtgttgtacaggacgaaccccatcgggctgtccttgggcacaggttttaattctctctttacacatatcttggtctttaattctctcatcaccagcgtaaggattttttataccctctccacactctgcagcccgctcgcctccaccttatcacgacactgtgccccgtccgtcctgcccaactggtcaggcacctgtatcaagcaatgtctccctatggaacccctctctcttctctcatctccacgtcgatcgaatccaatctaatccaatccaatccacaacaaacaatggcttccaacggcagcgacatggtgatgatgtacgggacacggcgctgctggagccatccaagcagcccaagccagcgactctctccgtcaaggtatcataattcctggattccaaatctgagacggatgttgatgttgactataacagcttgtactcaaagcagggctttctacagggatgaaatcatgtctgcaatcgagaaacacataactgcttggacattttttctaggagctagatggatatcctctgcctgcaagtatagatatgaaagtatgtatatgaaattttctgttctggcattagaatgccatgcatatgttccctcggtcaaaggtcagttggaaaacatacctttgcatcaggtgctcggcacatcctttgccagtaaaggcatcgcactacctgggaggctgggagaaacggggtgcccgctctgccgctcattcataaaggcacagaccatagatgatgatgactcaggacagtgccaaaggtatattcacatcggatctgatgctaaccagaaggaacagagcggaacaaacataaataaacttggcaggcagtctcctatagaagttgaaaggcacggagggcatcctgctgcggaaccggggatgtcgcagcagttgttgattggggcatga

SEQ ID NO: 800 - DNA, 691 bp, Zea Mays
caaagatttggactaaacaaagaaaatctagcatctaaatgatttcgccgtccccttcctcctcctcagaggagccgttactggtgcgcgcggcgcggggcgaggatggcatcccacattggatgatgcgacaggcagggcggtacatggcggagtaccaggcgtcggctaaggggaaactcacattcggccatcaggttcggggagcttccagctgcgaggttttgaggtgggattttgacctcaaggtccaaggagatgcttatggcgtcgatgtcagatatcgagacaacaaaacggggcagcatgtggggactggatcagaaccttgatcagcccaaggacaaggatgtaagtcaactgaaggacatgtacagataaaggtacatcgccattgtatgttttctacaatatctttccacatggtattgatgaagacgaggatgtaattggagctctattgttgatcattttacactcactctcatccctctgatgaagtatgttttagttgtcttgcaagctaatgataatggtcaagatgattacacttagaggttcttctgaactggacttgttgattacatggacccattttcagaaggtgttgttttcagtgtgaggcctacaaagaaaagttggaaaaacatttccaatatatcttgtggtgagaagctgcagccgaagcagt

SEQ ID NO: 801 - DNA, 711 bp, Zea Mays
caaattatttcgcgccgcggtagtttcgcaccgttggccgtcgcaactcgcagcctcacccctcacaggcttgcggtgctgcgcgcttgcgccgccgacccctccgactacgagctcgtcccccgccgtcgctcgcgtgtcgcggattcgctgtgtcgggtgaccgggtcgacctcctcctcctcacatcttccattgaccgcctccgaactccgtcatccgcaaccgcaagcggagacatatcaagttgtttggtgataatggatccaaagcattcggctgaagtgtccaagcatttagacaagcaaaatcaagcactaatggaaacatatggagcaatgtcccatgagttgcataaactgcaggtagaagaagagacaatcatgcgcaagttgtatgaactgatgtccgcggaagggcttcttccaaagcgcaagaaagaaaagcaacatggggaaaatatagtggcttcaactgagagcaaagaacaggaaccataaattcttatgcgacgtgtaatgtgatatgacagcaatgccattttatctggagagttggtgcttgttaacttctgtatagcagttctctatcatcacaactctgcgaccactacatttaacttcacagttgaaaatttaacctgagtatgagttccgtgaggaattacttacagacaaacataatcattccttttgctcatatgcttcaact

SEQ ID NO: 802 - DNA, 746 bp, Zea Mays
atcactctagcagctagcccgcagggccttccatgtttctgagaccgagattaatgtctgacttgttgtggtgaaatgtctgagtagttgatgtcgttctgagctttgttatctgagcattttgtatttctgtggaaactatagaaaatgcaactgtctcactacactgctatgcatgaatttgatgttgttcgatccaaacagatgcctaatgtggtcagcacaatgtttaagtttgtaagatggatggctagttggctagcagctgggagacatatcaagttgtttggtgataatggatccaaagcattcggctgaagtgtccaagcatttagacaagcaaaatcaagcactaatggaaacatatggagcaatgtcccatgagttgcataaactgcaggtagaagaagagacaatcatgcgcaagttgtatgaactgatgtccgcggaagggcttcttccaaagcgcaagaaagaaaagcaacatggggaaaatatagtggcttcaactgagagcaaagaacaggaaccataaattcttatgcgacgtgtaatgtgatatgacagcaatgccattttatctggagagttggtgcttgttaacttctgtatagcagttctctatcatcacaactctgcgaccactacatttaacttcacagttgaaaatttaacctgagtatgagttccgtgaggaattacttacagacaaacataatcattccttttgctcatatgcttcaact

SEQ ID NO: 803 - DNA, 820 bp, Zea Mays
agggccttccatgtttctgagaccgagattaatgtctgacttgttgtggtgaaatgtctgagtagttgatgtcgttctgagctttgttatctgagcattttgtatttctgtggaaactatagaaaatgcaactgtctcactacactgctatgcatgaatttgatgttgttcgatccaaacagatgcctaatgtggtcagcacaatgtttaagtttgtaagatggatggctagttggctagcagctgggagacatatcaagttgtttggtgataatggatccaaagcattcggctgaagtgtccaagcatttagacaagcaaaatcaagcactaatggaaacatatggagcaatgtcccatgagttgcataaactgcaggtagaagaagagacaatcatgcgcaagttgtatgaactgatgtccgcggaagggcttcttccaaagagcgctcagcaaaatttcgaaatttcagttaggactggaacaggaacacatagtgcatatattatattatatggtagaagaattcaggacgtgaagcgcaagaaagaaaagcaacatggggaaaatatagtggcttcaactgagagcaaagaacaggaaccataaattcttatgcgacgtgtaatgtgatatgacagcaatgccattttatctggagagttggtgcttgttaacttctgtatagcagttctctatcatcacaactctgcgaccactacatttaacttcacagttgaaaatttaacctgagtatgagttccgtgaggaattacttacagacaaacataatcattccttttgctcatatgcttcaact

SEQ ID NO: 804 - DNA, 600 bp, Zea Mays
taatgtggtcagcacaatgtttaagtttgtaagatggatggctagttggctagcagctggtgtactgggttcgtcctgcacgcttaagatcgatcttggttgacgataggacttgttgtccaggagacatatcaagttgtttggtgataatggatccaaagcattcggctgaagtgtccaagcatttagacaagcaaaatcaagcactaatggaaacatatggagcaatgtcccatgagttgcataaactgcaggtagaagaagagacaatcatgcgcaagttgtatgaactgatgtccgcggaagggcttcttccaaagcgcaagaaagaaaagcaacatggggaaaatatagtggcttcaactgagagcaaagaacaggaaccataaattcttatgcgacgtgtaatgtgatatgacagcaatgccattttatctggagagttggtgcttgttaacttctgtatagcagttctctatcatcacaactctgcgaccactacatttaacttcacagttgaaaatttaacctgagtatgagttccgtgaggaattacttacagacaaacataatcattccttttgctcatatgcttcaact

SEQ ID NO: 805 - DNA, 587 bp, Zea Mays
gtcctttctcttccctttcttctgcacgcaagcacccaaaccctaattgtactgggttcgtcctgcacgcttaagatcgatcttggttgacgataggacttgttgtccaggagacatatcaagttgtttggtgataatggatccaaagcattcggctgaagtgtccaagcatttagacaagcaaaatcaagcactaatggaaacatatggagcaatgtcccatgagttgcataaactgcaggtagaagaagagacaatcatgcgcaagttgtatgaactgatgtccgcggaagggcttcttccaaagcgcaagaaagaaaagcaacatggggaaaatatagtggcttcaactgagagcaaagaacaggaaccataaattcttatgcgacgtgtaatgtgatatgacagcaatgccattttatctggagagttggtgcttgttaacttctgtatagcagttctctatcatcacaactctgcgaccactacatttaacttcacagttgaaaatttaacctgagtatgagttccgtgaggaattacttacagacaaacataatcattccttttgctcatatgcttcaact

SEQ ID NO: 806 - DNA, 637 bp, Zea Mays
ccctttcttctgcacgcaagcacccaaaccctaattgtactgggttcgtcctgcacgcttaagatcgatcttggttgacgataggacttgttgtccagtattagcttgtgaattgagtgtaaaagcaactccaagggactagcctgatccttttgtaaaggagacatatcaagttgtttggtgataatggatccaaagcattcggctgaagtgtccaagcatttagacaagcaaaatcaagcactaatggaaacatatggagcaatgtcccatgagttgcataaactgcaggtagaagaagagacaatcatgcgcaagttgtatgaactgatgtccgcggaagggcttcttccaaagcgcaagaaagaaaagcaacatggggaaaatatagtggcttcaactgagagcaaagaacaggaaccataaattcttatgcgacgtgtaatgtgatatgacagcaatgccattttatctggagagttggtgcttgttaacttctgtatagcagttctctatcatcacaactctgcgaccactacatttaacttcacagttgaaaatttaacctgagtatgagttccgtgaggaattacttacagacaaacataatcattccttttgctcatatgcttcaact

SEQ ID NO: 807 - DNA, 457 bp, Zea Mays
attcttaaaagtaacatggattgaaattatcatttttttgagtttacatcttctgctattcaagcaataatagttcccatgcctgtgagacctaactgatgttctgacagaagtaaacctgcatcttcttctactgtttgagcaatttatagcattcatatttaagaccaaaaggagcgcaagaaagaaaagcaacatggggaaaatatagtggcttcaactgagagcaaagaacaggaaccataaattcttatgcgacgtgtaatgtgatatgacagcaatgccattttatctggagagttggtgcttgttaacttctgtatagcagttctctatcatcacaactctgcgaccactacatttaacttcacagttgaaaatttaacctgagtatgagttccgtgaggaattacttacagacaaacataatcattccttttgctcatatgcttcaact

SEQ ID NO: 808 - DNA, 3296 bp, Zea Mays
agcggaccctaaaagagaggaagaaacctgctggcttccttctcgtccccaacaggcgtccccaagactccaacttcctcgatctagccatgtcgtccgcgccgcctgcccaccagtccaagccttccccccaccgccggcagcaccacaacctcggaccgaggtcgccgccgccgccgccgccgcagtcccagcgctacgtacccaaatccgccccccgctgcggcgccaaaaccctcccccccgtcccagccatcgctcactaccgcgctccgatcatcggccgcctcgccctcctcgtccggctctggcgggagctccagcggtagcgtaggtgtccggtcggttgatgcattcgtcgcgtatctgccgcatgacgaggcggtcgcggcgggtctcggcggcctcgatgcacacgagtcgcaggtcgtcgtcgaccacctcaacgacgcacttgccgcgctccttcgggccaagcctcgcgagttctggctccgggtggcacagaacacttctttgcatgaattccttgatagttatctacaattcaggcacaggtggtatgatttgccacaccgaggcccaaagggaactgtagcaggtttggttgttggggagcttgagctttgccgtcgtgtatttatggtcctctatcgcatatcctcgaataaggatcctggagcaggtcgcggcgagtcccttagcatgaaggagcatgcagcccttctgctggagaaaaaattgcttgatctaccaaaattgttggacatatgtgctatatatgagcatgacaacggcaagttaacaagttcactggttacgaatgttattaatgtgcagccgagtgtactggatgacattaatattgtcattccccagttcctcaacattttccacacgatgcatgataggtgcatgacatctttacaggtgctcacctcaaccggatcaattgataatggatatgttcagcttcagaaagatttcatggaggtgttagattttataaatgatgcgattgttactctggattcttttgttggtgcttatcaacctgccgctttattgttctgtactaattttgaaatgagctatggagttgaggaattgctgaatgctcttgcaaggctgtatagttcattgctaccatcattgctccatgggtttaaagttatgcccaagtctcagagcaatgcagaggcatcacttgacagcacacttagtgacattcctcttgctataaggatgttgtcaaagagaacagcgagatttggttggagattgttgcactactgttatttgaatgatcaagttagggagcatgatgctcaaacttctactaagatgtttccagctaaagtcgaagatcctatgatcaggggagacatcttggttcaaacacttaaagatataaatagagaatccacttactcttctcaagtgaatcatggaaatacttttctccaagaacttgaaagtgaatttcaattaatgagccagattggtgatattcggaacaaaggatggatatacatggatgatgagcagttccagttcttatcacgattgtgtggatctactcacacttcttggaatggcatatctgatttgccagtctcttctcatggtggtgaattacagcagaaggatgaggaaacagcgatggttgagtccaaaattagtcagataagggatcttttccctgattatgggaagggtttcctttctgcttgtctggaagcctacaacctgaaccctgaggaagttatccaaaggatattagaaggaacacttcatcaagatctgctagctttggatacttcattagaagagatgccacacgaaaaacctgcaccaactgctgtgaaagataaagggaagggtatattggtggaaactgtgcctcaaattacaaagaaaccccataaagttgctgagacacattactttgttcaagatggcctatcttcagcaacttcatcagcatcacaaggtccatcttctgcaatttcaccagcatcccttgggccatcttctgcaatttcctcagcattccagggaccatcttctgctatttcatcagcatctctgggcccatcctcatccatatcatctgtcccaaaaggtagatttacaaggaaggccaatgatgatttgccggacactgcaatcctggactcgaaaaatgctaaaaatgcagctagatctgttatccttgactcgcaatatgagtatgaagatgagtacgatgattcatttgatgatcttggcttcagtgtggtagagtcaagttatgaggaaactgatggtgtcaatgacgctgaggcttcatcacatggcccaagatggagttcacagaagaaaccacagttttatgtcaaggatgggaagaattatagctacaaggttgctggttcggttgctgtatccagtgctcgagaagcagctgtcatgaggcaaactcaaaaagagacaatctatggtctgggtcgtggtggaaatgttccttttggtgtcccgaacaggcaacatatagatgtggaggcagaggaggttggtgatgctgacaactcaggcagaggttcaaattcccgtggccggggaagaaaaggcggaagggaaggcaaccgtccggaggagaatgagagctccaatggacgaggctctggctttggtggtaaaagaggaggctggagtcagggcaatccggctgaggaaaactggaaccctaatggtcaacaaggttttggccgtggtggcagaagagggggctggaatcagggtggcccagcgaaggaagacggtaactctagtggcaggcaagaaagttttggccgtggagcaagacggggcagcatgaaccatgaccaatcagccgaggataatgaaggccataataatcccgcacaagactttactcgaggaccagctcctcgtggtggccatggaaggggaggtggccggaaccatcacaggagagatcgggcaatgaagaagcatatgcaaggattgacagggctttagctgctggtagccttatgcttttgatgtgccgtactgtaaatggcatttttggaggcactcctacttgaccatccaaatttttgtgcttgttctgtttttaaatcaaataacgccatgaagtaacccacatatgttctcgtaacatttgtgattgccctaaaaagggtaatagtgtatgtagttctaaacatgcttgtaactcgttaaatacataattaattctctagcgactgaaaagaaaaatcatgaaaccaaaccaattttgttagctt

SEQ ID NO: 809 - DNA, 3288 bp, Zea Mays
gcggaccctaaaagagaggaagaaacctgctggcttccttctcgtccccaacaggcgtccccaagactccaacttcctcgatctagccatgtcgtccgcgccgcctgcccaccagtccaagccttccccccaccgccggcagcaccacaacctcggaccgaggtcgccgccgccgccgccgccgcagtcccagcgctacgtacccaaatccgccccccgctgcggcgccaaaaccctcccccccgtcccagccatcgctcactaccgcgctccgatcatcggccgcctcgccctcctcgtccggctctggcgggagctccagcggtagcgtaggtgtccggtcggttgatgcattcgtcgcgtatctgccgcatgacgaggcggtcgcggcgggtctcggcggcctcgatgcacacgagtcgcaggtcgtcgtcgaccacctcaacgacgcacttgccgcgctccttcgggccaagcctcgcgagttctggctccgggtggcacagaacacttctttgcatgaattccttgatagttatctacaattcaggcacaggtggtatgatttgccacaccgaggcccaaagggaactgtagcaggtttggttgttggggagcttgagctttgccgtcgtgtatttatggtcctctatcgcatatcctcgaataaggatcctggagcaggtcgcggcgagtcccttagcatgaaggagcatgcagcccttctgctggagaaaaaattgcttgatctaccaaaattgttggacatatgtgctatatatgagcatgacaacggcaagttaacaagttcactggttacgaatgttattaatgtgcagccgagtgtactggatgacattaatattgtcattccccagttcctcaacattttccacacgatgcatgataggtgcatgacatctttacaggtgctcacctcaaccggatcaattgataatggatatgttcagcttcagaaagatttcatggagattttataaatgatgcgattgttactctggattcttttgttggtgcttatcaacctgccgctttattgttctgtactaattttgaaatgagctatggagttgaggaattgctgaatgctcttgcaaggctgtatagttcattgctaccatcattgctccatgggtttaaagttatgcccaagtctcagagcaatgcagaggcatcacttgacagcacacttagtgacattcctcttgctataaggatgttgtcaaagagaacagcgagatttggttggagattgttgcactactgttatttgaatgatcaagttagggagcatgatgctcaaacttctactaagatgtttccagctaaagtcgaagatcctatgatcaggggagacatcttggttcaaacacttaaagatataaatagagaatccacttactcttctcaagtgaatcatggaaatacttttctccaagaacttgaaagtgaatttcaattaatgagccagattggtgatattcggaacaaaggatggatatacatggatgatgagcagttccagttcttatcacgattgtgtggatctactcacacttcttggaatggcatatctgatttgccagtctcttctcatggtggtgaattacagcagaaggatgaggaaacagcgatggttgagtccaaaattagtcagataagggatcttttccctgattatgggaagggtttcctttctgcttgtctggaagcctacaacctgaaccctgaggaagttatccaaaggatattagaaggaacacttcatcaagatctgctagctttggatacttcattagaagagatgccacacgaaaaacctgcaccaactgctgtgaaagataaagggaagggtatattggtggaaactgtgcctcaaattacaaagaaaccccataaagttgctgagacacattactttgttcaagatggcctatcttcagcaacttcatcagcatcacaaggtccatcttctgcaatttcaccagcatcccttgggccatcttctgcaatttcctcagcattccagggaccatcttctgctatttcatcagcatctctgggcccatcctcatccatatcatctgtcccaaaaggtagatttacaaggaaggccaatgatgatttgccggacactgcaatcctggactcgaaaaatgctaaaaatgcagctagatctgttatccttgactcgcaatatgagtatgaagatgagtacgatgattcatttgatgatcttggcttcagtgtggtagagtcaagttatgaggaaactgatggtgtcaatgacgctgaggcttcatcacatggcccaagatggagttcacagaagaaaccacagttttatgtcaaggatgggaagaattatagctacaaggttgctggttcggttgctgtatccagtgctcgagaagcagctgtcatgaggcaaactcaaaaagagacaatctatggtctgggtcgtggtggaaatgttccttttggtgtcccgaacaggcaacatatagatgtggaggcagaggaggttggtgatgctgacaactcaggcagaggttcaaattcccgtggccggggaagaaaaggcggaagggaaggcaaccgtccggaggagaatgagagctccaatggacgaggctctggctttggtggtaaaagaggaggctggagtcagggcaatccggctgaggaaaactggaaccctaatggtcaacaaggttttggccgtggtggcagaagagggggctggaatcagggtggcccagcgaaggaagacggtaactctagtggcaggcaagaaagttttggccgtggagcaagacggggcagcatgaaccatgaccaatcagccgaggataatgaaggccataataatcccgcacaagactttactcgaggaccagctcctcgtggtggccatggaaggggaggtggccggaaccatcacaggagagatcgggcaatgaagaagcatatgcaaggattgacagggctttagctgctggtagccttatgcttttgatgtgccgtactgtaaatggcatttttggaggcactcctacttgaccatccaaatttttgtgcttgttctgtttttaaatcaaataacgccatgaagtaacccacatatgttctcgtaacatttgtgattgccctaaaaagggtaatagtgtatgtagttctaaacatgcttgtaactcgttaaatacataattaattctctagcgactgaaaagaaaaatcatgaaaccaaaccaattttgttagctt

SEQ ID NO: 810 - DNA, 3005 bp, Zea Mays
gggaatacaaatgttaagatgtaaccgcataaggatatgtcatgtgcccaagattctcgaacagaagttacctcaataatcgatagttcaataaatagattagtttgtatgattaatttactatgttgttcttacacaactggtacataaattcagctacatctaaacttagtcaatgacatatgctaacttttgttgtttttcacagtggcacagaacacttctttgcatgaattccttgatagttatctacaattcaggcacaggtggtatgatttgccacaccgaggcccaaagggaactgtagcaggtttggttgttggggagcttgagctttgccgtcgtgtatttatggtcctctatcgcatatcctcgaataaggatcctggagcaggtcgcggcgagtcccttagcatgaaggagcatgcagcccttctgctggagaaaaaattgcttgatctaccaaaattgttggacatatgtgctatatatgagcatgacaacggcaagttaacaagttcactggttacgaatgttattaatgtgcagccgagtgtactggatgacattaatattgtcattccccagttcctcaacattttccacacgatgcatgataggtgcatgacatctttacaggtgctcacctcaaccggatcaattgataatggatatgttcagcttcagaaagatttcatggaggtgttagattttataaatgatgcgattgttactctggattcttttgttggtgcttatcaacctgccgctttattgttctgtactaattttgaaatgagctatggagttgaggaattgctgaatgctcttgcaaggctgtatagttcattgctaccatcattgctccatgggtttaaagttatgcccaagtctcagagcaatgcagaggcatcacttgacagcacacttagtgacattcctcttgctataaggatgttgtcaaagagaacagcgagatttggttggagattgttgcactactgttatttgaatgatcaagttagggagcatgatgctcaaacttctactaagatgtttccagctaaagtcgaagatcctatgatcaggggagacatcttggttcaaacacttaaagatataaatagagaatccacttactcttctcaagtgaatcatggaaatacttttctccaagaacttgaaagtgaatttcaattaatgagccagattggtgatattcggaacaaaggatggatatacatggatgatgagcagttccagttcttatcacgattgtgtggatctactcacacttcttggaatggcatatctgatttgccagtctcttctcatggtggtgaattacagcagaaggatgaggaaacagcgatggttgagtccaaaattagtcagataagggatcttttccctgattatgggaagggtttcctttctgcttgtctggaagcctacaacctgaaccctgaggaagttatccaaaggatattagaaggaacacttcatcaagatctgctagctttggatacttcattagaagagatgccacacgaaaaacctgcaccaactgctgtgaaagataaagggaagggtatattggtggaaactgtgcctcaaattacaaagaaaccccataaagttgctgagacacattactttgttcaagatggcctatcttcagcaacttcatcagcatcacaaggtccatcttctgcaatttcaccagcatcccttgggccatcttctgcaatttcctcagcattccagggaccatcttctgctatttcatcagcatctctgggcccatcctcatccatatcatctgtcccaaaaggtagatttacaaggaaggccaatgatgatttgccggacactgcaatcctggactcgaaaaatgctaaaaatgcagctagatctgttatccttgactcgcaatatgagtatgaagatgagtacgatgattcatttgatgatcttggcttcagtgtggtagagtcaagttatgaggaaactgatggtgtcaatgacgctgaggcttcatcacatggcccaagatggagttcacagaagaaaccacagttttatgtcaaggatgggaagaattatagctacaaggttgctggttcggttgctgtatccagtgctcgagaagcagctgtcatgaggcaaactcaaaaagagacaatctatggtctgggtcgtggtggaaatgttccttttggtgtcccgaacaggcaacatatagatgtggaggcagaggaggttggtgatgctgacaactcaggcagaggttcaaattcccgtggccggggaagaaaaggcggaagggaaggcaaccgtccggaggagaatgagagctccaatggacgaggctctggctttggtggtaaaagaggaggctggagtcagggcaatccggctgaggaaaactggaaccctaatggtcaacaaggttttggccgtggtggcagaagagggggctggaatcagggtggcccagcgaaggaagacggtaactctagtggcaggcaagaaagttttggccgtggagcaagacggggcagcatgaaccatgaccaatcagccgaggataatgaaggccataataatcccgcacaagactttactcgaggaccagctcctcgtggtggccatggaaggggaggtggccggaaccatcacaggagagatcgggcaatgaagaagcatatgcaaggattgacagggctttagctgctggtagccttatgcttttgatgtgccgtactgtaaatggcatttttggaggcactcctacttgaccatccaaatttttgtgcttgttctgtttttaaatcaaataacgccatgaagtaacccacatatgttctcgtaacatttgtgattgccctaaaaagggtaatagtgtatgtagttctaaacatgcttgtaactcgttaaatacataattaattctctagcgactgaaaagaaaaatcatgaaaccaaaccaattttgttagctt

SEQ ID NO: 811 - DNA, 3369 bp, Zea Mays
aatgacaccagccgcaatagctgaatgctgcagcttgagttatttggcagtgtggttagaaattcgaccgctagctcaatctttctgcacaaataaacatgccgttgtgaagatgtagattacaagtgagaagattagaataaggttgatctaaacaggattccacaaaatactccagcttcagtgcttctgtatgaatcagaaaaattacataaggtactaatcatgaacataatatgtcaaatttgtccatcttactgcttctatcatcctagaaagtaaaaagagaaagtactatttggcatacatcaatgcgattattgtgcaaaatcaacaaatataaagccaagctaaaaatgctaacaacaaaattgtatctcttataaaatcctattcacactgaattaacaaaatcatctcgtgcattgtttatggcagtaaacaagtaatacgcaatcctccattaaaagaggcgactaaaacgatggaagcataatcacataaacggaattcctagccacagggttacatgagctaacgttcaccgaaacagaagcagaagggtgacctttcgagcgacagctccttgctctggagggagaggacgaggtcgaggtgttcccacgcgcccttggcgccgccgtcgccgtcgaagcgaagtctagcgaacttgagatcgctcggaccctccccttggcaaggctgcgattggttccaccgccgcttcctcgctgcgccgggcctcgcggtcgcggcagccgtctccatggcaatggcgtctgtcatgagcggaagtggaggctagggttctgggtttggaggcacgtgctgcctcgcccgtttgatttctccgtgcccgaagacgcgccgtgaaaccttcttccgcgtccgaccaatattaataaagcacgaatcttaaagatgtgctaaccagactgaccgaccgagtcaccgtcacggtcaccgcggccccagcccaacccagagcattcttggtcccgatttcctcagctcaggtgccgggttccccaggcacaagctacaaaccctaacccatccgggagcaccggaaattttggaggctgaaacggaaaggggagaaggcgatgacgacgagggagccgcgcgaggcgtcccggcgcgatgggcgcgactcgcacgggaggcgcccccactcctcgttcaggtcgcggagggacgatcccagcccaaggagaagagatgacaggaggcgtgaatcggacagggcgcaccacagaagtcgagatggagaatttttggaggtggtggaccatgatcagaagcggaatagagatgctgcgcagagcgctgaccctccgaatgctgagtcgaagtcagcgagtgatatgaagaatggcccctccaccaggcatgagagatcacctaggggaaccaaacgattttctgagtcgagtgaggcatggcggcctcggtctttctttcaggttcttatcttttctcagtgtattatatcaaaagggaataccaccaatagcttctgctctctattacaaattgtttcatcatagctacaaatagtgtgctttgactatcacggttacatacatatgtgctcacgatgttacagagctcactattttggatagctaatagtaatatagtattttatggagttgctattttagatagccgaacagcaagtattccacattcggtaacttcaccggtactggaaaatgtacctaacagattagtgttattaggtggatccataggtcattatttgcttgtggtctggattgcaaacatcctggttatgacagctctggtaactaatgcaattgtgccgagtgttgtctaataacaaatattgtgttgatagtagagacatttaatgtgcccaaaacattataagtattccatgtttgtgttattctgaataaatgctatatatttattttaagactcacggttaaaggacttctgagtcgtatgttaagaggctctggagtgcatatgatttttttaggatttgtgttatcctatgtagaatgtagaaaccgatatttgagataatcagctcaaattagtacctataggttcgttttcacccatgtttagctcaaatattcattagctatcctctgtttgtgattatgtgtgaaccactgaacctgtcgttgcatttctgttatttaagttcatgaaatgtagttttagtgtacagattagttagattcatggatatggtttgccagctttggttaacatgaatatacttgtcttaattaatggttgcaagtaacaactctaacattcatatgcatcttttgtagaatcatctgaagtgtggaggttggtctctgcataaagaatgttaggtcattgttaaatcatacaaaaattcttccacttgtcgtacatacataacacattcctcctgatgtagtgggacttcttttatgacacattgattcaaatgcccactgtttgtaacaatgttagactacctgtgcttctatgtacagcacaatgagcgtggaagtgctgggcaaggtggtcggcattatgaccgccaggctagtgactatggaaggcaaagggagcatctctctgatagagataaacagaagacagagagacacagtttgcagggaaagattgagctggaccagcaaaagaaggatggtgattcaacatggaagcatgatggatttttccagttggaggaagcagcaccccttgccaagaagaggccaccatttcaggagatgaagatacaagaatctgctgacactgtaacagaaccagattctagatcaaggaattatcaggcacggggatatggaaatcatcgacccttcctaaggccagatgatcgaggctttagaagggggtttcctgaccacaggagtgatggccagaggaatgggcatgatataaggggaagattttctgttaggggaggaatggacagagacaggtttaacaattcatatggtgggagaagcaacgcagagcaggcttctggtgatcaagaagaaaaatggaagcatgacctctatgatcagacaaacaggagcccgcctccaaagactgaggaagagcagattgccaaagttgaagcgctgttggcactgtagctgtcttatttatgtctggagttgttttttgtgatagattatcatgtacttggtttcagatgtgttgaatactgtcttttttattctatatattctgcatatctatgtggaattgtggattaaaccaccttatgaagctattccatttggactgataatattgtactagataatcatgagtttcataatgtagaaccatcaagcgaagtacaagacaatcatgagtttggtaggtaaacaattt

SEQ ID NO: 812 - DNA, 1686 bp, Zea Mays
acaccagagccccactcccgtagtcctgtggctgtactccacacaagccgtaaacgcaatttcgcacacgaagttccaaaccccgccggccgccgcgtccgttccccttccccttccctttcctctctcggaccccaatggcgtcgtcgtcgaaggcgccgtcatcgcgccgttccgtcttcgacgccgtccacatccgctcggagttttccgcggccggcatctccgcccacttcatccctctcatctggaagtacgtacttcaaaaccctaggtgcagcgacctggatggcgttccgtcgctgccggcggccgcgtacgcgctcctccggcagaagttccggccgaccacttcgacgctaaccgctgccgcggactccaaggaccgcaccacgaccaagcttctcatctgcctgcagaatggggagtctgtagaagcagtggtcatgcgatatgacacacggctggggaagtatgatggaaagcctcggcctggtggagtgcggtcaaccctctgtgtgtcatcacaggtcaatatatatttctatgttggatgtcaggtgctcaggttgggtgcaagatgggctgcagattctgtgctactggaacaatgggcttcaaaagcaatctgtcttctggagaaattgtagagcagctggtccatgcatctcgctattctcagatccgaaatgttgttttcatgggaatgggggagccgatgaacaactataatgctttggttgaagcaatcggagtgtttactggatctccttttcagctttcacctaagagaattactgtatctactgtcggaatcattcatggaatcaacaaattcaatggtgaccttccaaaggtgaatttagcagtgtcattgcatgctcctgaccaagacattcgctgtcagataatgcctgctgcacgtgcctttcctttaggaaagctaatgaatgccctgcagtcctatcaaaatgagagtaagcagaccatcttcattgagtatattatgcttgatggagttaacgatcaggaggagcatgcacatcagcttggtaaactgcttgaaacgtttaaagcggttgtaaatctaataccattcaatccaattgggtcatcaagcaatttcaagacaagcagtgaccaaaatgtgaagaacttccaaaaggttttaaaaggcatctaccgcatcagaactactattcgccagcagatgggtcaggacatagctggcgcttgtggccagttggtggttagcctcccagatgaaagatcagctggtggagcaactcttttgtcagacatcgaagaccttcggatctgacctctcccccaattgttaattctaccattttctcaagatcagatcctcttactaattagcctcacatgatatgttctgctcttgtggataggtggccactgaaacggttggtaacttggtattgtaaatgggacaaccggacaatgttatctcaacaatgccatggtgatatgctatcgtcagtgtaagatgactttcctgtcagatctcaatgagtatctgatgctcccccctcctatctatcaccctctcttgtacttgcagcatttcattgccattagtcgttttatgctttgctttgtgctttagattctatgtcggtaggctgtatgtaatggtggtggtggaactggcatggggcttgg

SEQ ID NO: 813 - DNA, 1862 bp, Zea Mays
gagtgacctgaaaggaaacatcattcagatagatgaagataaaatataagcagcatgtttaataacgaaagcatcaatgacataccaaaccaatcacaacagaaattagaaagctgaaacaaagaacaacatcacaagttcacccaaaccacagggtcacttttgggtcaaacaattagcaaagaccgaagagagtgggagtcatatcatgaagcaaagaaaaatggtgaaatggtttggtgcaaaatataactaccataggactgaaacatactgcacaagctttaaatttctatcatgatatattatttggagtacacttgaacacaacaaattcaataatataatcgtggggctactgataactactgaaattaggaataatcacaatgggaggttatacgccaaacacacaaaaaaaatccattcaggagcacacagggttaagtgtgagacagagacacaaacctctcgaccaccgccaatatccattttcccaactttgctcccacatggcgtcacgcgcttgacagtaaaaaaacaggaagattgtaaacatcgagcaattcttaataataaatatataacattgaccctgaaaaataggaaacatcagtgacttttatatgtacacagaccacaacttttgcaagaaaccagcatctagttaaacagctgcagaatgtttctagcgagcacacatgattgtgattccattatcccagtcataaaagctgagatatccaatagacatgcataaaacatctaagcaatagtttagagaaacaacgacttaggggtaaaacattacgcttatgaacatctacaagtctgtgaagtgaggcaagctatcttcatgttctctaaaacaggtgtggcatggcataaggctatgaggtggttatttgcacaactgaacacaaaatctatgaacacgctaacaaagtaacaatagcatgcatccagaatatgagcttgaagaacctatgttgtatgattaaccacacatgcgagcactaaaaactactctatatacaacttagcatccagaaaagaagtctgaaaaatcaaaattctgttcattgaaaagaaatcacaagacaatttcaaatcctaaagagaacacacctggtgcgtaaaagctaagcattctgttggcatggtacctgcatgatcaaggtgcaatcaatatgagtatccttgagcatggtacattcttgactattaattgagaatttgggagataagcatcagccacatccttaatagaagtaaaacacttcttgtatataaagagagaagccaatgttaatgcttagcacaagtagtgtcaagtgtaaatgattgtgttctgtgttaattcattctttaacagtcccttgtcatcaaggacatatatctatagcattacatttcaagacaatagaagcagtgttgggtgaccaaagtaattatacatccagcacactcatgatagaagaaatgctatggtgtaatcagcataagtaaacaggacaaatggttcagcatggagaatgaggatctacatattaacaacagtttatctcggcgttatgaaatagaagaaagtagaaatcatgttataatttatttttctggctcaagagaccgatggctgcaccaagataaagagaatttgtgttgactcgggtcaaatgagtgagaacacttggaaaaaatcaaataaattaaaatagttatccagctaaaatgccttagtagattcagtcaaagaggaatccagagtttgttttataagaaatgttcatttctaaaaataccaaagcatcaagaaatctttagaaactaatagattgttcatcaggcacatgttgatttcc

SEQ ID NO: 814 - DNA, 1532 bp, Zea Mays
tgcggcgacctgggaggcgaatgcggccgcgatgtggagcatcgcacccgccgcgagcgggcagcacttgagtgatccctccacagccagtgccggcgcgtgctcgccgtcgagccgtccgtcccggaggcacctcacgaccgcctccgccatcctccccgccgccgccggccgccgcttagtgcctaaaccctagcccccacaagagcccgagacgggtcgccaaactcccggaaggcctggaggcaagagtaacgcggggcccagctgtcagagaaacacgggaccccttacccgtgtcggatataatcaagccgtcgtttgaccccgcctcgaaaccttttgccgtcttgcggcggccttctgctccgccgctcgttctcatatcttgcggcggcctggggaaaaagaggagagatcggagatgaaggcgtgtgcgaaggctgcgggggagaggctgtcgctggtctgtgctccgtcaactaggcagcctctagctcggagctttgttaaggcaagaagattaccctctcaacatgagacgaagtcacaagtatcctgctcggttagggtgtcagaaaacacagctcacagaatagatgccacagcagaaaatattttcccagcagtgaaagatcatgtcttgaaagcaactgatgcaatcaacagaggagaagtgattgcggtgcctactgataccatatacgggtttgcatgtgatgcatggagcagttaatcgtatttatgagatcaaaggacgcatacaaacaaggcctctggcaatttgtgttggtgatgtctcagacatatcacggtttgctttagtggaccacttgccacatggcttgcttgatagtctacttcctgggcctgtcactattgttctaaaacgaggtgaaaacagcatattagagagatcacttaatcctggcttggatagcattggagttcgtgtgccggatctggatttcatacgatccattgctcgtggtactggaagtgcacttgcactcaccagcgccaacttaagcggacagcctagtagtgtctgtgtcaaagatttcgagggtttatggccacattgttcatatgtctttgatggtggagtacttccttctgggcgtgctggttcaacaatcgttgatctaataacaccaggagtttacaagatattgagggatggaagctcaaggaaggaaacagcagcagtgctcggcaagttcggctttgttgaagcgttgtaactactcggcactttaagaaagtaagcacgatcaaagagtggctgtcttatccacattatatcttgtttaattagtgatacattagagcttttgttgctgtttgtgcttttcttttacatcttcaaacttattgtattattgcgaatgtgatgttgagtagaataacagagttcacattatttaagctgtgtagagtgtgtgacatgggcttgttttgtagcaaatgaagcagctcagttgtggattttggatgtgttgtgaacgaaaatatgatattttcttatgcct

SEQ ID NO: 815 - DNA, 1612 bp, Zea Mays
tgcggcgacctgggaggcgaatgcggccgcgatgtggagcatcgcacccgccgcgagcgggcagcacttgagtgatccctccacagccagtgccggcgcgtgctcgccgtcgagccgtccgtcccggaggcacctcacgaccgcctccgccatcctccccgccgccgccggccgccgcttagtgcctaaaccctagcccccacaagagcccgagacgggtcgccaaactcccggaaggcctggaggcaagagtaacgcggggcccagctgtcagagaaacacgggaccccttacccgtgtcggatataatcaagccgtcgtttgaccccgcctcgaaaccttttgccgtcttgcggcggccttctgctccgccgctcgttctcatatcttgcggcggcctggggaaaaagaggagagatcggagatgaaggcgtgtgcgaaggctgcgggggagaggctgtcgctggtctgtgctccgtcaactaggcagcctctagctcggaggtctccttgtcatctgggtcccaggccattggacgctcttcccctgctgttgctctgggacacctgggcctgctttgttaaggcaagaagattaccctctcaacatgagacgaagtcacaagtatcctgctcggttagggtgtcagaaaacacagctcacagaatagatgccacagcagaaaatattttcccagcagtgaaagatcatgtcttgaaagcaactgatgcaatcaacagaggagaagtgattgcggtgcctactgataccatatacgggtttgcatgtgatgcatgctctgcaggagcagttaatcgtatttatgagatcaaaggacgcatacaaacaaggcctctggcaatttgtgttggtgatgtctcagacatatcacggtttgctttagtggaccacttgccacatggcttgcttgatagtctacttcctgggcctgtcactattgttctaaaacgaggtgaaaacagcatattagagagatcacttaatcctggcttggatagcattggagttcgtgtgccggatctggatttcatacgatccattgctcgtggtactggaagtgcacttgcactcaccagcgccaacttaagcggacagcctagtagtgtctgtgtcaaagatttcgagggtttatggccacattgttcatatgtctttgatggtggagtacttccttctgggcgtgctggttcaacaatcgttgatctaataacaccaggagtttacaagatattgagggatggaagctcaaggaaggaaacagcagcagtgctcggcaagttcggctttgttgaagcgttgtaactactcggcactttaagaaagtaagcacgatcaaagagtggctgtcttatccacattatatcttgtttaattagtgatacattagagcttttgttgctgtttgtgcttttcttttacatcttcaaacttattgtattattgcgaatgtgatgttgagtagaataacagagttcacattatttaagctgtgtagagtgtgtgacatgggcttgttttgtagcaaatgaagcagctcagttgtggattttggatgtgttgtgaacgaaaatatgatattttcttatgcct

SEQ ID NO: 816 - DNA, 1499 bp, Zea Mays
tgcggcgacctgggaggcgaatgcggccgcgatgtggagcatcgcacccgccgcgagcgggcagcacttgagtgatccctccacagccagtgccggcgcgtgctcgccgtcgagccgtccgtcccggaggcacctcacgaccgcctccgccatcctccccgccgccgccggccgccgcttagtgcctaaaccctagcccccacaagagcccgagacgggtcgccaaactcccggaaggcctggaggcaagagtaacgcggggcccagctgtcagagaaacacgggaccccttacccgtgtcggatataatcaagccgtcgtttgaccccgcctcgaaaccttttgccgtcttgcggcggccttctgctccgccgctcgttctcatatcttgcggcggcctggggaaaaagaggagagatcggagatgaaggcgtgtgcgaaggctgcgggggagaggctgtcgctggtctgtgctccgtcaactaggcagcctctagctcggagctttgttaaggcaagaagattaccctctcaacatgagacgaagtcacaagtatcctgctcggttagggtgtcagaaaacacagctcacagaatagatgccacagcagaaaatattttcccagcagtgaaagatcatgtcttgaaagcaactgatgcaatcaacagaggagaagtgattgcgctctgcaggagcagttaatcgtatttatgagatcaaaggacgcatacaaacaaggcctctggcaatttgtgttggtgatgtctcagacatatcacggtttgctttagtggaccacttgccacatggcttgcttgatagtctacttcctgggcctgtcactattgttctaaaacgaggtgaaaacagcatattagagagatcacttaatcctggcttggatagcattggagttcgtgtgccggatctggatttcatacgatccattgctcgtggtactggaagtgcacttgcactcaccagcgccaacttaagcggacagcctagtagtgtctgtgtcaaagatttcgagggtttatggccacattgttcatatgtctttgatggtggagtacttccttctgggcgtgctggttcaacaatcgttgatctaataacaccaggagtttacaagatattgagggatggaagctcaaggaaggaaacagcagcagtgctcggcaagttcggctttgttgaagcgttgtaactactcggcactttaagaaagtaagcacgatcaaagagtggctgtcttatccacattatatcttgtttaattagtgatacattagagcttttgttgctgtttgtgcttttcttttacatcttcaaacttattgtattattgcgaatgtgatgttgagtagaataacagagttcacattatttaagctgtgtagagtgtgtgacatgggcttgttttgtagcaaatgaagcagctcagttgtggattttggatgtgttgtgaacgaaaatatgatattttcttatgcct

SEQ ID NO: 817 - DNA, 2118 bp, Zea Mays
ttcggaccaaactgtcgcggcgccgcggctcatatcgaattccaacacggcgccgagccgatgagaaagccgcatcttccccagcccacttgtgacctaccgatctagacccgcgcttgccgccgtcgagtcgccggccaggccagccttcaccttgtcaccggcgaaatccacggcggtgaggcaaccggcagttgagagtgcgcctacagttggggggcggagatggggaagaagcagcacagcaaggaccgcatgttcatcacacggacggagtgggcgactgaatggggcggcgccaagcagaaggacgtcggcacgccgttcaagcgcctccccttctactgttgctcgctcacgtttcttccattcgaggatccagtgtgcaccgtcgatggaagcgtctttgatttaatgagcataatcccataccttaaaaagtttgggaagcatccagtaaccggagcaccactcaagcacgaagatctgattcctctcacattccacaagaactcagatggagagtttcagtgtcctgttctgaacaaagtttttacagaattcacacacatagttgctgtaaaaactactggaaatgtcttctgctatgaggcaatccaagaacttaacatcaagccaaaaaattggaaagagttgctaactgacgagcccttcactcgcaatgacttgataacgattcagaacccaaacgtggttgatggcaaggtccttggggaattcgaccatgtcaaaaagggcctcaaacttgaggatgaagagttgcagcggatgaaagatgatccaacctataacataaatatttctggtgatcttaagcaaatgattaaggaacttgggacagaaaaaggaaatgaagcttttttgcagggaggtggagggctgaaagctcaaaaggaaagagctgcggctcttgctgcaattttagcaaggaaggagaaggatgactcaaaagcaggaaaagaacctaaacctaaccaaagtttcagtattgtagatgctgcttctgcttctgttcatggcaggagtgcagcagcagcaaaagcaacttctgctgaaaaaaccgctgctagaatcgctatgcatatggcaggggaacgagctcctgtaaatgctaaactggtcaaaagtcgttacactactggagcagcgtcgcgttctttcacatcgacttcttatgatcctgttaccaaaaatgaatatgagtatgttaaagttgaaaggaatccaaaaaagaaaggttacgttcagctgcatacaacgcatggtgatttgaatttagagcttcattgtgatataactcctcgaacttgtgaaaatttcctcacacattgtgaaaatggttactacaatggtcttatcttccatcggagcatcaaaaacttcatgatccaaggcggcgatccaactggcacaggaagtggaggagagtccatatggggtaaaccgttcaaggacgagccaaactcaaagctgctacattctggaagaggtgtagtcagcatggcaaattcaggccctcataccaatggatcccaattttttatcttatacaagtctgcaccacacttaaattacaagcacacggtatttggcatggtggtgggtggtttgaccacactttcaacgatggaaagggttcctgtcgatgatgatgaccggccaatggaggaaataaagattctaaaagtcagcatattcgtgaatccttacacagagccagatgaggaagaagaaaaggcaaaggaggaaaagaaaaaggatgaggattatgataaggtgggatcatggtatagcaacccaggaactggtgttgctggttcaacaagtactggtggtggggttggcaagtatttaaaagctcgggctgctggttctattgatgtgactggaagtgctggtgtagctgatgattcgagcaagaagagaaaagcgactgcatctagtgtagagttcaaagatttttctggatggaaaaaaatggcggttgcatactatggttgtatcggtgttctggacacgttcaaatcatgtggtgtgctaaagattgtgttccttctgatttctgagcatgaacactttgttccttctgatttctga

SEQ ID NO: 818 - DNA, 2196 bp, Zea Mays
gaaagccgcatcttccccagcccacttgtgacctaccgatctagacccgcgcttgccgccgtcgagtcgccggccaggccagccttcaccttgtcaccggcgaaatccacggcggtgaggcaaccggcagttgagagtgcgcctacagttggggggcggagatggggaagaagcagcacagcaaggaccgcatgttcatcacacggacggagtgggcgactgaatggggcggcgccaagcagaaggacgtcggcacgccgttcaagcgcctccccttctactgttgctcgagcataatcccataccttaaaaagtttgggaagcatccagtaaccggagcaccactcaagcacgaagatctgattcctctcacattccacaagaactcagatggagagtttcagtgtcctgttctgaacaaagtttttacagaattcacacacatagttgctgtaaaaactactggaaatgtcttctgctatgaggcaatccaagaacttaacatcaagccaaaaaattggaaagagttgctaactgacgagcccttcactcgcaatgacttgataacgattcagaacccaaacgtggttgatggcaaggtccttggggaattcgaccatgtcaaaaagggcctcaaacttgaggatgaagagttgcagcggatgaaagatgatccaacctataacataaatatttctggtgatcttaagcaaatgattaaggaacttgggacagaaaaaggaaatgaagcttttttgcagggaggtggagggctgaaagctcaaaaggaaagagctgcggctcttgctgcaattttagcaaggaaggagaaggatgactcaaaagcaggaaaagaacctaaacctaaccaaagtttcagtattgtagatgctgcttctgcttctgttcatggcaggagtgcagcagcagcaaaagcaacttctgctgaaaaaaccgctgctagaatcgctatgcatatggcaggggaacgagctcctgtaaatgctaaactggtcaaaagtcgttacactactggagcagcgtcgcgttctttcacatcgacttcttatgatcctgttaccaaaaatgaatatgagtatgttaaagttgaaaggaatccaaaaaagaaaggttacgttcagctgcatacaacgcatggtgatttgaatttagagcttcattgtgatataactcctcgaacttgtgaaaatttcctcacacattgtgaaaatggttactacaatggtcttatcttccatcggagcatcaaaaacttcatgatccaaggcggcgatccaactggcacaggaagtggaggagagtccatatggggtaaaccgttcaaggacgagccaaactcaaagctgctacattctggaagaggtgtagtcagcatggcaaattcaggccctcataccaatggatcccaattttttatcttatacaagtctgcaccacacttaaattacaagcacacggtatttggcatggtggtgggtggtttgaccacactttcaacgatggaaagggttcctgtcgatgatgatgaccggccaatggaggaaataaagattctaaaagtcagcatattcgtgaatccttacacagagccagatgaggaagaagaaaaggcaaaggaggaaaagaaaaaggatgaggattatgataaggtgggatcatggtatagcaacccaggaactggtgttgctggttcaacaagtactggtggtggggttggcaagtatttaaaagctcgggctgctggttctattgatgtgactggaagtgctggtgtagctgatgattcgagcaagaagagaaaagcgactgcatctagtgtagagttcaaagatttttctggatggtagatgttatgtgtgtgtacgtatgtcgatttctgcttctcaggaaaaaaatggcggttgcatactatggttgtatcggtgttctggacacgttcaaatcatgtggtgtggtatgttaagtgttaactgtgtaaaatcacatggcctacttggaagtgtgctctgtaagttttgattcgagcttgcttcatactgaagagtgaaaaatatgtatattgcatcatctggtcaactgattccagtgtaaactgtgacggttgtgcttacctagctaaagattgtgttccttctgatttctgagcatgaacactttgttccttctgatttctga

SEQ ID NO: 819 - DNA, 1620 bp, Zea Mays
caaatgctatcatactcagatggagagtttcagtgtcctgttctgaacaaagtttttacagaattcacacacatagttgctgtaaaaactactggaaatgtcttctgctatgaggcaatccaagaacttaacatcaagccaaaaaattggaaagagttgctaactgacgagcccttcactcgcaatgacttgataacgattcagaacccaaacgtggttgatggcaaggtccttggggaattcgaccatgtcaaaaagggcctcaaacttgaggatgaagagttgcagcggatgaaagatgatccaacctataacataaatatttctggtgatcttaagcaaatgattaaggaacttgggacagaaaaaggaaatgaagcttttttgcagggaggtggagggctgaaagctcaaaaggaaagagctgcggctcttgctgcaattttagcaaggaaggagaaggatgactcaaaagcaggaaaagaacctaaacctaaccaaagtttcagtattgtagatgctgcttctgcttctgttcatggcaggagtgcagcagcagcaaaagcaacttctgctgaaaaaaccgctgctagaatcgctatgcatatggcaggggaacgagctcctgtaaatgctaaactggtcaaaagtcgttacactactggagcagcgtcgcgttctttcacatcgacttcttatgatcctgttaccaaaaatgaatatgagtatgttaaagttgaaaggaatccaaaaaagaaaggttacgttcagctgcatacaacgcatggtgatttgaatttagagcttcattgtgatataactcctcgaacttgtgaaaatttcctcacacattgtgaaaatggttactacaatggtcttatcttccatcggagcatcaaaaacttcatgatccaaggcggcgatccaactggcacaggaagtggaggagagtccatatggggtaaaccgttcaaggacgagccaaactcaaagctgctacattctggaagaggtgtagtcagcatggcaaattcaggccctcataccaatggatcccaattttttatcttatacaagtctgcaccacacttaaattacaagcacacggtatttggcatggtggtgggtggtttgaccacactttcaacgatggaaagggttcctgtcgatgatgatgaccggccaatggaggaaataaagattctaaaagtcagcatattcgtgaatccttacacagagccagatgaggaagaagaaaaggcaaaggaggaaaagaaaaaggatgaggattatgataaggtgggatcatggtatagcaacccaggaactggtgttgctggttcaacaagtactggtggtggggttggcaagtatttaaaagctcgggctgctggttctattgatgtgactggaagtgctggtgtagctgatgattcgagcaagaagagaaaagcgactgcatctagtgtagagttcaaagatttttctggatggaaaaaaatggcggttgcatactatggttgtatcggtgttctggacacgttcaaatcatgtggtgtgctaaagattgtgttccttctgatttctgagcatgaacactttgttccttctgatttctga

SEQ ID NO: 820 - DNA, 837 bp, Zea Mays
gccggggtgtggtgcgggggttggcggcctcttcttcaagcaagagatggagctttcattggtagggctccaaaatgctgggaaaacatcacttgtgaactccattgctactggaggttttagtgaggatatgatccctactgtaggattcaatatgagaaaggttaccaaagggaatgtgacgataaaattgtgggatattggaggccaacctagattccggagcatgtgggagagatactgccgtgcggtttctgcaattgtgtatgttgttgacgcggcagatcgtgaaaacatggccattgcaaaaggggagctccatgatctcttgagcaagccatctttgaccggaataccattactagtaattggcaacaaaattgacaagcctgaagctttccctaaacaaaccttcacagaaataatgggcctaaagacgatcactgaccgagaagtggcatgcttcatgacatcatgcaagaactcgaccaacattgattctgtcattgactggctggtgaagaactcgaaaaagaagaattgaacttaaatctgtactagctattaaagcgcacgccaatctctctatttttgcatgtcgcatagcattggagctgtaaattatgcaagaggtattaatcagggatgttgtgttcataattttgttaacctggtttagcagtatgttggtggacagcgtctggtattgtgcacgcccgtgctctgaggctgcctcctgtgttccactcaattttagctgtgcgatttgttctcttgtgttccactcaattttatctgcttgatttgtttcacattctttacgttaaatcaaacaaa

SEQ ID NO: 821 - DNA, 1587 bp, Zea Mays
acattctcgaaactctgttccaacgaaaaaaattgcaaactttttctatctgcgctggtggctgctgccttctccgttctcccgtccagtccgagctctcgagtccaaagtccaaacgaccaacccctggccctcgctgacctccgagatggcggcatcgctctccaagcacctccgcctccgtctgcgcggcggcggcggcggcgagcactgcctcctcccctctcgcgcatccacttctcacacctcatcgccaccacctccccttctatcgcgtcctcccgcagcggccgcgccgccgcccccaggggcaggcaatgaggccagcgcgtggtccaaactcttcctcttcgctcccggcgccatcaccttcgggctcggcacatggcagctcttccggaggcaggaaaagatagagatgctggattacaggacgcggaggctggagatggagcccgtggcgtggaacgagtccgccttatcctcggtccttcgtgatccgtcagcactggagttccgaaaaattgtgtgcgagggtgatttcgacaaggagaagtcggtattcatcgggcctcgctcccggagcatctcaggtgtcacggagaatgggtattatgtgatcactccattgattcctaggtcgacgcctgacagtcacctatccttgtgaatagaggatgggttcctcgtggatggcatgataaaaacgttaaggatctccagatcctggatgaagcttcagagcccccaaaagctgttaagccagacgaaaaaggttcgtggtggaagttttggtctaacaagcctaaatcgtctcctgagtttgaaaaacctaggatgccacctgtaagggttattggagtaatccgtggaagtgagaagccaagcatatttgttccagctaatgagcccaatagtggccagtggttttatgtggatgttcccatgattgctcgtgcttgtggacttcctgagaatactgtttatattgaagatataaatgaagatgtatctccaacaaacccttatcctgttccaaaagatgtcaacaccttgattcgtcactcagtgatgccagatgaccatcttaaatacacgtttacatggtacactctttctgctgctgtgacttacatggcttccaagcggataaaagcaaagaaggtcaggttatagcaggaatttagtccaaacttccgcatgaacgtccatttgcgcgcatggtttatgcttctgcactggaagatgcccatgtaatattttggcggggaactttagctgcttgttcttccagcgtttttttttcacgttgactgctccaccggaaaagttgttctgtcgcgggctcgcgtcgaggacacaccagctcaagacagagtttgttcccagattattcatctcctaatggatgcttgcacaggcagctctgttctactagttgccataatatatgaaaactgacatctgaatgaattgtgtctgtattcagtttcactgcacgattggacatggccattgttttttctccatcaacggttagttgcaatgccttctgaaaagggtattttgaattattttcgagacaag

SEQ ID NO: 822 - DNA, 713 bp, Zea Mays
cctagatgcatgcaagagaagtgtggagaccgacttagcaccacttaaaagtacatggtacactctttctgctgctgtgacttacatggcttccaagcggataaaagcaaagaaggtcaggttatagcaggaatttagtccaaacttccgcatgaacgtccatttgcgcgcatggtttatgcttctgcactggaagatgcccatggtactggttctttcgtgtctggcaataagtataacattgcacttttttgttccaagttgttctacattgatactgggtatctcacagttgagctctggggttacagcaattttgttagtcagatttctgatgatcataacttggaaggcctgtaagacttgtggtttccttgtagtaatattttggcggggaactttagctgcttgttcttccagcgtttttttttcacgttgactgctccaccggaaaagttgttctgtcgcgggctcgcgtcgaggacacaccagctcaagacagagtttgttcccagattattcatctcctaatggatgcttgcacaggcagctctgttctactagttgccataatatatgaaaactgacatctgaatgaattgtgtctgtattcagtttcactgcacgattggacatggccattgttttttctccatcaacggttagttgcaatgccttctgaaaagggtattttgaattattttcgagacaag

SEQ ID NO: 823 - DNA, 2638 bp, Zea Mays
ctttcaggccttcaccgcttcaaacctcgtctgatcctctcacctgctcaccgagtcacctgctgtccaaggctccaagcacccgccaatcggccgctgccgaacccgcaaccggaacctgcctccaggctgcttccaccgggcgagggcgagggcgaggcacacgccgcaaaccgcagtaacgcacacgccggggcacgccgcacggcacacaacaaacaacgtgccctcgccctgcagtctacctggttctattgtgccccgacagaagatcctgagagctagagctgtttttttccctacatatagttaagttaaattatctgcacagccgaagatgtccgcgatcatgttatgtacctgcagcggggaccagtccaagtttgaagatcttcctagatcgccagaatctcttgcaacacgtgacttttcagcgaattgctcttcttcaaagatggcaagtcgagaaacaactcctgatgacagccaagtaaatgaagtagaatcagacctaaaagaaaccctttcactaaattatgaggaggctcgagcattgttaggtagactggaacatcagagagggaactttgatgcagcattgcaagttcttcaggggattgatataagaagcctgagaccacgaatgaccactgctattgctgaaagtgtcaagcctagaatgcccccacgctcttcaagacgaaaatcttcacaagtgaacggaatgcttatgcatatgtccatgcattctgtaagcttgcttctagaggccatactgcttaaagcaaaatctctggacacccttggtagagcagcagatgctgcagaagaatgcagaaccatcatagacattatagagtctgcatggccatatggtgttccggatggtacttctgaagagtgtaagctaatagacatattccattcggctctagaatatcttcctaaactgtggatgaggagtggttgttttgatgaagccatcatcgcataccgcagagctcttgcaaagccatggaatctaggttctcaaaggtccgccaaattgcaaaaagagttggcagtgagtctgttgtactgtggcgttgaagtgaagttccctcaagaattttctcaggaaaggaatctggtaacccctgggaacaacttagaggaagcaattttgttattactcatgctaacaagaaagctatttctccgagaaatacaatgggatcctgaccttgtgaatcatttggtgtatgcactctcattatctgggcactatgaagttttggccagccatcttgaaatgctgttgcctggaacctataccagatcagagagatggtatatccttgcactttgctacagtgcagctggcatggatgacagtgcgttaaacatcataaggaatggtttttctgtactggagagaaagggaaagcctcatgttccatctcttcttttaggagcaaaactatgttgtaagaacccaaagcatgcttccgaagggataaagtttgcaaataaagccatgaagtctttcagaagtcgtgatctgcatttcatcagcactacaaaacactttcttggtgtttgttatggacctttttctaggtcctccacctcatacttggacaaatcgagactgcaagataatgcactgaggctgttgcaggatgctgccacaacagcgaagtataatcctgaaataatgtatagcctagcttgggaaaatgcgatgcagcgcaaactcaatgcagctgttgaaagtgcaacagaatgtcttgagatggtgatgggtggttctgttagtgcctggaagttactaattcttgtattatctgcacagcagaatttgcaagaagctgaagcagtagcagattttgcaatggacgaggctgagaaaaatgatcagttggatattttgagactgaaagcacaaattcaagcttcccgtggacagttcaagtctgcagttgaaacttttcgggttttgcttgctgctatccaagtaaagaaggaagtctggaaattgaccacttgtaatgaggttaaatgcctacaaaagttggagatggacgcatggttagatttggcatcaatctattcaaagcttgaggcatggcatgactcaaacatctgccttgacaaagctatatccattgatttctattatcccaagtgttggcatgtcagaggtcttctattggaggctcaattcttgcacaaggaagccctgatggcattctctttcgcgctatcaattgacccagattacgtcccgggcatggtttgtatggcaggaattctccgaaatattggaggggattcattatcaattgcaagaacttacttgcgcaatgccctccgtttagagcctacaaaccaccgtgcctggttgagtcttgggcttgtcctgaaagctgaaggatcgctgcaggaggccgcggattgcttccaggcagcatatgagcttagagaattatcaccaattcaggatttctctgagcaactcccgatcatgctgcattaggaatctatagcaaaggagttcacattttttgtggattttccccatagttgtcttagttattaacttatcccttgcaaagggccttcaacctcttcgtcagcaactccgcatcgtccgatt

SEQ ID NO: 824 - DNA, 2536 bp, Zea Mays
ggagattgtacggcgcgcccgaatcctgctctgcactgctgtttcctgaagtgcaaagagccctgcagtctacctggttctattgtgccccgacagaagatcctgagagctagagctgtttttttccctacatatagttaagttaaattatctgcacagccgaagatgtccgcgatcatgttatgtacctgcagcggggaccagtccaagtttgaagatcttcctagatcgccagaatctcttgcaacacgtgacttttcagcgaattgctcttcttcaaagatggcaagtcgagaaacaactcctgatgacagccaagtaaatgaagtagaatcagacctaaaagaaaccctttcactaaattatgaggaggctcgagcattgttaggtagactggaacatcagagagggaactttgatgcagcattgcaagttcttcaggggattgatataagaagcctgagaccacgaatgaccactgctattgctgaaagtgtcaagcctagaatgcccccacgctcttcaagacgaaaatcttcacaagtgaacggaatgcttatgcatatgtccatgcattctgtaagcttgcttctagaggccatactgcttaaagcaaaatctctggacacccttggtagagcagcagatgctgcagaagaatgcagaaccatcatagacattatagagtctgcatggccatatggtgttccggatggtacttctgaagagtgtaagctaatagacatattccattcggctctagaatatcttcctaaactgtggatgaggagtggttgttttgatgaagccatcatcgcataccgcagagctcttgcaaagccatggaatctaggttctcaaaggtccgccaaattgcaaaaagagttggcagtgagtctgttgtactgtggcgttgaagtgaagttccctcaagaattttctcaggaaaggaatctggtaacccctgggaacaacttagaggaagcaattttgttattactcatgctaacaagaaagctatttctccgagaaatacaatgggatcctgaccttgtgaatcatttggtgtatgcactctcattatctgggcactatgaagttttggccagccatcttgaaatgctgttgcctggaacctataccagatcagagagatggtatatccttgcactttgctacagtgcagctggcatggatgacagtgcgttaaacatcataaggaatggtttttctgtactggagagaaagggaaagcctcatgttccatctcttcttttaggagcaaaactatgttgtaagaacccaaagcatgcttccgaagggataaagtttgcaaataaagccatgaagtctttcagaagtcgtgatctgcatttcatcagcactacaaaacactttcttggtgtttgttatggacctttttctaggtcctccacctcatacttggacaaatcgagactgcaagataatgcactgaggctgttgcaggatgctgccacaacagcgaagtataatcctgaaataatgtatagcctagcttgggaaaatgcgatgcagcgcaaactcaatgcagctgttgaaagtgcaacagaatgtcttgagatggtgatgggtggttctgttagtgcctggaagttactaattcttgtattatctgcacagcagaatttgcaagaagctgaagcagtagcagattttgcaatggacgaggctgagaaaaatgatcagttggatattttgagactgaaagcacaaattcaagcttcccgtggacagttcaagtctgcagttgaaacttttcgggttttgcttgctgctatccaagtaaagaaggaagtctggaaattgaccacttgtaatgaggttaaatgcctacaaaagttggagatggacgcatggttagatttggcatcaatctattcaaagcttgaggcatggcatgactcaaacatctgccttgacaaagctatatccattgatttctattatcccaagtgttggcatgtcagaggtcttctattggaggctcaattcttgcacaaggaagccctgatggcattctctttcgcgctatcaattgacccagattacgtcccgggcatggtttgtatggcaggaattctccgaaatattggaggggattcattatcaattgcaagaacttacttgcgcaatgccctccgtttagagcctacaaaccaccgtgcctggttgagtcttgggcttgtcctgaaagctgaaggatcgctgcaggaggccgcggattgcttccaggcagcatatgagcttagagaattatcaccaattcaggatttctctgagcaactcccgatcatgctgcattaggaatctatagcaaaggagttcacattttttgtggattttccccatagttgtcttagttattaacttatcccttgcaaaggtaggaaacatatgtttttgtgaatgtaaattagtccacttttgttcgtgaggaaatttactcgctcttgaaaacatcaaagttatataacttactagtacaattgatacg

SEQ ID NO: 825 - DNA, 2603 bp, Zea Mays
taatgacttgtttgttttcgggggtatggttgccatggttgattgcgatatatggaaatggagggtggaatttatctctctactatctgctgtgtagtgggccattgctgctgttgacactcgacggccctgcagtctacctggttctattgtgccccgacagaagatcctgagagctagagctgtttttttccctacatatagttaagttaaattatctgcacagccgaagatgtccgcgatcatgttatgtacctgcagcggggaccagtccaagtttgaagatcttcctagatcgccagaatctcttgcaacacgtgacttttcagcgaattgctcttcttcaaagatggcaagtcgagaaacaactcctgatgacagccaagtaaatgaagtagaatcagacctaaaagaaaccctttcactaaattatgaggaggctcgagcattgttaggtagactggaacatcagagagggaactttgatgcagcattgcaagttcttcaggggattgatataagaagcctgagaccacgaatgaccactgctattgctgaaagtgtcaagcctagaatgcccccacgctcttcaagacgaaaatcttcacaagtgaacggaatgcttatgcatatgtccatgcattctgtaagcttgcttctagaggccatactgcttaaagcaaaatctctggacacccttggtagagcagcagatgctgcagaagaatgcagaaccatcatagacattatagagtctgcatggccatatggtgttccggatggtacttctgaagagtgtaagctaatagacatattccattcggctctagaatatcttcctaaactgtggatgaggagtggttgttttgatgaagccatcatcgcataccgcagagctcttgcaaagccatggaatctaggttctcaaaggtccgccaaattgcaaaaagagttggcagtgagtctgttgtactgtggcgttgaagtgaagttccctcaagaattttctcaggaaaggaatctggtaacccctgggaacaacttagaggaagcaattttgttattactcatgctaacaagaaagctatttctccgagaaatacaatgggatcctgaccttgtgaatcatttggtgtatgcactctcattatctgggcactatgaagttttggccagccatcttgaaatgctgttgcctggaacctataccagatcagagagatggtatatccttgcactttgctacagtgcagctggcatggatgacagtgcgttaaacatcataaggaatggtttttctgtactggagagaaagggaaagcctcatgttccatctcttcttttaggagcaaaactatgttgtaagaacccaaagcatgcttccgaagggataaagtttgcaaataaagccatgaagtctttcagaagtcgtgatctgcatttcatcagcactacaaaacactttcttggtgtttgttatggacctttttctaggtcctccacctcatacttggacaaatcgagactgcaagataatgcactgaggctgttgcaggatgctgccacaacagcgaagtataatcctgaaataatgtatagcctagcttgggaaaatgcgatgcagcgcaaactcaatgcagctgttgaaagtgcaacagaatgtcttgagatggtgatgggtggttctgttagtgcctggaagttactaattcttgtattatctgcacagcagaatttgcaagaagctgaagcagtagcagattttgcaatggacgaggctgagaaaaatgatcagttggatattttgagactgaaagcacaaattcaagcttcccgtggacagttcaagtctgcagttgaaacttttcgggttttgcttgctgctatccaagtaaagaaggaagtctggaaattgaccacttgtaatgaggttaaatgcctacaaaagttggagatggacgcatggttagatttggcatcaatctattcaaagcttgaggcatggcatgactcaaacatctgccttgacaaagctatatccattgatttctattatcccaagtgttggcatgtcagaggtcttctattggaggctcaattcttgcacaaggaagccctgatggcattctctttcgcgctatcaattgacccagattacgtcccgggcatggtttgtatggcaggaattctccgaaatattggaggggattcattatcaattgcaagaacttacttgcgcaatgccctccgtttagagcctacaaaccaccgtgcctggttgagtcttgggcttgtcctgaaagctgaaggatcgctgcaggaggccgcggattgcttccaggcagcatatgagcttagagaattatcaccaattcaggatttctctgagcaactcccgatcatgctgcattaggaatctatagcaaaggagttcacattttttgtggattttccccatagttgtcttagttattaacttatcccttgcaaaggtaggaaacatatgtttttgtgaatgtaaattagtccacttttgttcgtgaggaaatttactcgctcttgaaaacatcaaagttatataacttactagtacaattgatacg

SEQ ID NO: 826 - DNA, 615 bp, Zea Mays
atgaggataagaacaagcgtgcacactgccgcgttctgccagccccgccccgcaacccgcagccgccccacgccgcaacccgcagccgccctggcaaccgcccgcatccgtggcttccatccggaaatctcggtcgcgatagcatcccgcaaccgccataatccccccaatctcgcgctcccctgtgctctgcggcctccacatttcacgcagccgatctctgctccctgcgccgtgttcgttcgcgaggttggggccgatgatggcggcggcggggcggactccgatttctgcggcggccaagtcggagacacaggcgacgcccggagaggcgctagcggaggcagccgggtcccacggctggctgcgcgagtacgtggaccgcctcgcgtcctcggcctcctccctctccgggcggtggagcgcgcggtggagccagggacaccacagccgcagccagagcaaccttgcgagattggggccagaacaatagctctatttgctatggaaccacctagacggcgtctatctccagcgagagcgataccgtcgaggcgcctatccgcgccggacacaacgtccgcagtgatgggcaacctccagggcctgaacggt

SEQ ID NO: 827 - DNA, 2345 bp, Zea Mays
atgaggataagaacaagcgtgcacactgccgcgttctgccagccccgccccgcaacccgcagccgccccacgccgcaacccgcagccgccctggcaaccgcccgcatccgtggcttccatccggaaatctcggtcgcgatagcatcccgcaaccgccataatccccccaatctcgcgctcccctgtgctctgcggcctccacatttcacgcagccgatctctgctccctgcgccgtgttcgttcgcgaggttggggccgatgatggcggcggcggggcggactccgatttctgcggcggccaagtcggagacacaggcgacgcccggagaggcgctagcggaggcagccgggtcccacggctggctgcgcgagtacgtggaccgcctcgcgtcctcggcctcctccctctccgggcggtggagcgcgcggtggagccagggacaccacagccgcagccagagcaaccttgcgagattggggccagaacaatagctctatttgctatggaaccacctgctttggttttggatgtccagaataatatgctgctttcacaagacagacatcttgctttctatggagttgaaccaggatcaagcgaccttactggcccatttaaccaaggaatcatgcagccagaattgatgtgcaccattgccaatcctgttgatgttttgcacggagctattcacgacgcgtcaacaatgaaccatgtaattttacagagtgacgtactgacatatgtatatgcagttccatatgtgcttccaaaactgtcatctgtcacccatgcccacatcgttgttggcggagagcacgcaagtcatcgtgagttcgacctccatagtacatactaaagagctgtcgacgacatgacgaaccgtctcaaggatgccacagtcaggatgatgaaaattgaggcctacgaaaccctgcaaactttgggctcatccagcacctatagtggaaaatgcctaagttagacgctgcacttggctgcatttcggaggcatgataaggtctgctaatgtgcaatgtaagtttgtgcataaaaacaggagcacaagtgcataaccttggtataagcaaaatgatatttgtttagccatgtgttattttgtgttaagcatatgctcttttgtcgatgcaagtctgcaattaggggatgtgagttacagtgttgacctttgcaattaggggatctcaactatgatgtcccaacctacagtgttgacctttgcaagcagattgcagatctgctctgcatcaaacaacaaaaatgttgttttactccatataactgcatcccaagttgtcaagctccataatgcatgcatttataaaaatctgatattttgtatgtacatgaactctcatgctgttctcccccctcttttcagaagtccactgctattacataattttttttaccgcgtgctattagtttatgcaccaaaaaattattgattttcaccaataggtctaaagtcctggttgcaccatcagcaattgtagcagacacggtaacttttgtacataaatatttccctactattatccctacttaccaaattcattattggttccaagcatcttgaaagagaagtccattgtctctcttactgtcatctcagcatggctaacagaagcacgcaggtactgtggtgttgaataattcatttattatccattatacatgacttttcctttgaactgttgtcaattgttggccattagaaaatatatactatagtcgatgataacatatgcgcaaagattttatcgaataatttttgtgttctcgcaatgtacgtgcattgtattatataaatataaagtaggagtttctccaccttcctttaatcatgctgcttcttgctgagggtggcgtgaaaaggtcagcaacaagttccgctatggtggcgacagagaagacgggggaggctctggcgacattgtggcgacgacgagaagcgagcaaggatataaatcgatctgtttctttggaaattagatgtagtagaatatttacgcgatacaaatctcgtttctctatatatctatatctattacgtttctcatgtctctatttttattataatggtttgggaaaatgtcactcatcatctgctctaatctttcgaaattaggtgtagtggaatattattgcccgatattgctacactacaatagtgaaataatagtttttttgttttacataagccccactcttttatctaaaagcccataaattattgtccaaaatggaagattaagactttgtttattacttctaaattatcctttctatatctgccatatgtaccatcagcgacaagatgac

SEQ ID NO: 828 - DNA, 1373 bp, Zea Mays
atgaggataagaacaagcgtgcacactgccgcgttctgccagccccgccccgcaacccgcagccgccccacgccgcaacccgcagccgccctggcaaccgcccgcatccgtggcttccatccggaaatctcggtcgcgatagcatcccgcaaccgccataatccccccaatctcgcgctcccctgtgctctgcggcctccacatttcacgcagccgatctctgctccctgcgccgtgttcgttcgcgaggttggggccgatgatggcggcggcggggcggactccgatttctgcggcggccaagtcggagacacaggcgacgcccggagaggcgctagcggaggcagccgggtcccacggctggctgcgcgagtacgtggaccgcctcgcgtcctcggcctcctccctctccgggcggtggagcgcgcggtggagccagggacaccacagccgcagccagagcaaccttgcgagattggggccagaacaatagctctatttgctatggaaccacctgctttggttttggatgtccagaataatatgctgctttcacaagacagacatcttgctttctatggagttgaaccaggatcaagcgaccttactggcccatttaaccaaggaatcatgcagccagaattgatgtgcaccattgccaatcctgttgatgttttgcacggagctattcacgacgcgtcaacaatgaaccatgtaattttacagagtgacgtactgacatatgtatatgcagttccatatgtgcttccaaaactgtcatctgtcacccatgcccacatcgttgttggcggagagcacgcaagtcatcgtgagttcgacctccatgctgcatttcggaggcatgataaggagtttctccaccttcctttaatcatgctgcttcttgctgagggtggcgtgaaaaggtcagcaacaagttccgctatggtggcgacagagaagacgggggaggctctggcgacattgtggcgacgacgagaagcgagcaaggatataaatcgatctgtttctttggaaattagatgtagtagaatatttacgcgatacaaatctcgtttctctatatatctatatctattacgtttctcatgtctctatttttattataatggtttgggaaaatgtcactcatcatctgctctaatctttcgaaattaggtgtagtggaatattattgcccgatattgctacactacaatagtgaaataatagtttttttgttttacataagccccactcttttatctaaaagcccataaattattgtccaaaatggaagattaagactttgtttattacttctaaattatcctttctatatctgccatatgtaccatcagcgacaagatgac

SEQ ID NO: 829 - DNA, 1297 bp, Zea Mays
atgaggataagaacaagcgtgcacactgccgcgttctgccagccccgccccgcaacccgcagccgccccacgccgcaacccgcagccgccctggcaaccgcccgcatccgtggcttccatccggaaatctcggtcgcgatagcatcccgcaaccgccataatccccccaatctcgcgctcccctgtgctctgcggcctccacatttcacgcagccgatctctgctccctgcgccgtgttcgttcgcgaggttggggccgatgatggcggcggcggggcggactccgatttctgcggcggccaagtcggagacacaggcgacgcccggagaggcgctagcggaggcagccgggtcccacggctggctgcgcgagtacgtggaccgcctcgcgtcctcggcctcctccctctccgggcggtggagcgcgcggtggagccagggacaccacagccgcagccagagcaaccttgcgagattggggccagaacaatagctctatttgctatggaaccacctgctttggttttggatgtccagaataatatgctgctttcacaagacagacatcttgctttctatggagttgaaccaggatcaagcgaccttactggcccatttaaccaaggaatcatgcagccagaattgatgtgcaccattgccaatcctgttgatgttttgcacggagctattcacgacgcgtcaacaatgaaccatgtaattttacagagtgacgtactgacatatgtatatgcagttccatatgtgcttccaaaactgtcatctgtcacccatgcccacatcgttgttggcggagagcacgcaagtcatcgtgagttcgacctccatagtacatactaaagagctgtcgacgacatgacgaaccgtctcaaggatgccacagtcaggatgatgaaaattgaggcctacgaaaccctgcaaactttgggctcatccagcacctatagtggaaaatgcctaagttagacgctgcacttggctgcatttcggaggcatgataaggagtttctccaccttcctttaatcatgctgcttcttgctgagggtggcgtgaaaagagaggctactcaagatgaggaatttgaagttatgtatagtgaggacgatgatgaagacaaagatgacgaggatgatgaggaatatcacttcaccctttccagcttctaagttttaagtatgttttgacattttctttcttctttggaacaaaagaccaagggggctgctggagggggaaaggcagcagcgaacgacctgttgagtgcaagcaggagtgaat

SEQ ID NO: 830 - DNA, 2740 bp, Zea Mays
ctaagctggggttgtgcacggtcgagaagatggaggcgagagcctagacttttcaacgaaggttatggatttggcagcaggggaactcctggagattgtgcctcttggaaaaggcttctttcttgccaactatcctatttcaattttggattgaccattatcgtttgtgttcctttgtcctccctcttttacctcttgtagttacacaagaacaacttgattgtgctaaagaggcaatcgaatctacagttctgatgaacttggaatcaagggctaaagtaacctgtctctgtttggtcattatgctctaggatccttcaacttgacatcacaacaatcgttgaggaggtaaccaacttttctagactgcattgagattgtttttgtaccaaactgcaatgtgtgcttatctttgtgcttcaataaatggtgtatatattaggctcttgttcagttagtacgtctcggttttcttaaaatggtgatgttagtgtcttgtgagtaggtggagatgttctggggtcaggggtggtgatctgtgcttttcttttaaattatctgaagcataaccacacaaaagatgttccagagtttgccacaagaaagtatacatgctttttctgttaagtgatgattaatgacatgcttttctatgatgagcatagaaactatggattattctaggccaaattcaatagaggttctagagtctgacataggctatcattttggaatgcttttggacactcggtgtagatgttattttagtgtagcagtatattgtgtattgatgcccttcaatattggattatgagtcatttacttagtcattgttgtggtcaaagcaatatgatgaagaccaatatcatgctttgaatgactaaatcctgcatttctatgcaacgccatgctcagttttagatgagatccacttctccgtgttttcggctctgtttagcctgatactgacgaattcaggacagacaacaatagcagtctcgctctttgcgtccacaattatatttccagatctttatatttggtatatattattcttatgacagtcattgattatggtggatagtactttcattagttatgttcttgtatcttttttcctcatgttacatgcctgggatgtctaaagctgccatattggtctgattgatcttttagtgatatatagaaactgcaagatgttatccgtggacatctagaggtggcccatgcctcacggccaaagcagatcagatgagatttttttggtcttgtgtggttctttttaatctgctcacatgatacttcttattcattgccatccaatttaattaattgccctcgactgaattggttcctttgccattttacttaggaggataaaagaagacactaccttggcacatgcctgttgccacaatggacaaaagaagattagtgttgtgtgatattttttcattcctttgatctattgcatgctatttgtaccccaatcgacaaaatagatgagactcaattcaggagcaaatcaccagtcctgttcacaacccaattcactatggctaaaatatcaaacttatgctccttgaggtttgttttttcctgatcttcctttaatatctgatgactgatggactggtgagttcatgatctgcttcatgcttttcctttttatatatggtcactacctcactggttagttcatggtgctttttgtctacttctttgccccaaaaaatctcggggcgaatttcagcatgcttttcctctaggtgtaaagccacccactcgatcgatcaccatatctccctctaggtgttatttttaaatatgctttgttcagtgtaaatcgttgcttgcagatgctgctttcacaagacagacatcttgctttctatggagttgaaccaggatcaagcgaccttactggcccatttaaccaaggaatcatgcagccagaattgatgtgcaccattgccaatcctgttgatgttttgcacggagctattcacgacgcgtcaacaatgaaccatgtaattttacagagtgacgtactgacatatgtatatgcagttccatatgtgcttccaaaactgtcatctgtcacccatgcccacatcgttgttggcggagagcacgcaagtcatcgtgagttcgacctccatgtaaagtacatactaaagagctgtcgacgacatgacgaaccgtctcaaggatgccacagtcaggatgatgaaaattgaggcctacgaaaccctgcaaactttgggctcatccagcacctatagtggaaaatgcctaagttagacgctgcacttggtataaaaatatatgcaaaatattccttagtttttgcaaataggtgtaatgtaagtatatgttaattgtacatgttacagtaaatcgagaaataatgacccctacatgatctatgtgttacaggctgcatttcggaggcatgataaggagtttctccaccttcctttaatcatgctgcttcttgctgagggtggcgtgaaaagagaggctactcaagatgaggaatttgaagttatgtatagtgaggacgatgatgaagacaaagatgacgaggatgatgaggaatatcacttcaccctttccagcttctaagttttaagtatgttttgacattttctttcttctttggaacaaaagaccaagggggctgctggagggggaaaggcagcagcgaacgacctgttgagtgcaagcaggagtgaat

SEQ ID NO: 831 - DNA, 3900 bp, Zea Mays
gtcaatgttgctcgatgtcaatggcggctggtgcatgcatgtatctttcctacaggtctacaattgcatgcactgcaaactaggcgtctgtagagcattaggtatgcatgtagaaggaaagtcctaatgcgatggtggtactgtgatgcatggtcaaggagagtaaggtttagttgttcgtttcagagaataaaagtaccagtagaggttcatccctcctgggcaggcaacgagctaactagataggcacctaacttaggttagtaagttttaattattaccttaacacaacatgatagcgcacatgatgatattgtaaagtattttggcaacaatggtctatttaaactccacagatttattggaacttgagctagcacctgtatgagtcaaggtaagaccaatttaattaattggacaagccgacaagctagcactctcctggagcataatctaaattgtgtacgcccttgttcaaacaattaatatagctgactgttttttaatattatcatttaacagagcctagacttttcaacgaaggttatggatttggcagcaggggaactcctggagattgtgcctcttggaaaaggcttctttcttgccaactatcctatttcaattttggattgaccattatcgtttgtgttcctttgtcctccctcttttacctcttgtagttacacaagaacaacttgattgtgctaaagaggcaatcgaatctacagttctgatgaacttggaatcaagggctaaagtaacctgtctctgtttggtcattatgctctaggatccttcaacttgacatcacaacaatcgttgaggaggtaaccaacttttctagactgcattgagattgtttttgtaccaaactgcaatgtgtgcttatctttgtgcttcaataaatggtgtatatattaggctcttgttcagttagtacgtctcggttttcttaaaatggtgatgttagtgtcttgtgagtaggtggagatgttctggggtcaggggtggtgatctgtgcttttcttttaaattatctgaagcataaccacacaaaagatgttccagagtttgccacaagaaagtatacatgctttttctgttaagtgatgattaatgacatgcttttctatgatgagcatagaaactatggattattctaggccaaattcaatagaggttctagagtctgacataggctatcattttggaatgcttttggacactcggtgtagatgttattttagtgtagcagtatattgtgtattgatgcccttcaatattggattatgagtcatttacttagtcattgttgtggtcaaagcaatatgatgaagaccaatatcatgctttgaatgactaaatcctgcatttctatgcaacgccatgctcagttttagatgagatccacttctccgtgttttcggctctgtttagcctgatactgacgaattcaggacagacaacaatagcagtctcgctctttgcgtccacaattatatttccagatctttatatttggtatatattattcttatgacagtcattgattatggtggatagtactttcattagttatgttcttgtatcttttttcctcatgttacatgcctgggatgtctaaagctgccatattggtctgattgatcttttagtgatatatagaaactgcaagatgttatccgtggacatctagaggtggcccatgcctcacggccaaagcagatcagatgagatttttttggtcttgtgtggttctttttaatctgctcacatgatacttcttattcattgccatccaatttaattaattgccctcgactgaattggttcctttgccattttacttaggaggataaaagaagacactaccttggcacatgcctgttgccacaatggacaaaagaagattagtgttgtgtgatattttttcattcctttgatctattgcatgctatttgtaccccaatcgacaaaatagatgagactcaattcaggagcaaatcaccagtcctgttcacaacccaattcactatggctaaaatatcaaacttatgctccttgaggtttgttttttcctgatcttcctttaatatctgatgactgatggactggtgagttcatgatctgcttcatgcttttcctttttatatatggtcactacctcactggttagttcatggtgctttttgtctacttctttgccccaaaaaatctcggggcgaatttcagcatgcttttcctctaggtgtaaagccacccactcgatcgatcaccatatctccctctaggtgttatttttaaatatgctttgttcagtgtaaatcgttgcttgcagatgctgctttcacaagacagacatcttgctttctatggagttgaaccaggatcaagcgaccttactggcccatttaaccaaggaatcatgcagccagaattgatgtgcaccattgccaatcctgttgatgttttgcacggagctattcacgacgcgtcaacaatgaaccatgtaattttacagagtgacgtactgacatatgtatatgcagttccatatgtgcttccaaaactgtcatctgtcacccatgcccacatcgttgttggcggagagcacgcaagtcatcgtgagttcgacctccatagtacatactaaagagctgtcgacgacatgacgaaccgtctcaaggatgccacagtcaggatgatgaaaattgaggcctacgaaaccctgcaaactttgggctcatccagcacctatagtggaaaatgcctaagctgcatttcggaggcatgataaggtctgctaatgtgcaatgtaagtttgtgcataaaaacaggagcacaagtgcataaccttggtataagcaaaatgatatttgtttagccatgtgttattttgtgttaagcatatgctcttttgtcgatgcaagtctgcaattaggggatgtgagttacagtgttgacctttgcaattaggggatctcaactatgatgtcccaacctacagtgttgacctttgcaagcagattgcagatctgctctgcatcaaacaacaaaaatgttgttttactccatataactgcatcccaagttgtcaagctccataatgcatgcatttataaaaatctgatattttgtatgtacatgaactctcatgctgttctcccccctcttttcagaagtccactgctattacataattttttttaccgcgtgctattagtttatgcaccaaaaaattattgattttcaccaataggtctaaagtcctggttgcaccatcagcaattgtagcagacacggtaacttttgtacataaatatttccctactattatccctacttaccaaattcattattggttccaagcatcttgaaagagaagtccattgtctctcttactgtcatctcagcatggctaacagaagcacgcaggtactgtggtgttgaataattcatttattatccattatacatgacttttcctttgaactgttgtcaattgttggccattagaaaatatatactatagtcgatgataacatatgcgcaaagattttatcgaataatttttgtgttctcgcaatgtacgtgcattgtattatataaatataaagtaggagtttctccaccttcctttaatcatgctgcttcttgctgagggtggcgtgaaaagagaggctactcaagatgaggaatttgaagttatgtatagtgaggacgatgatgaagacaaagatgacgaggatgatgaggaatatcacttcaccctttccagcttctaagttttaagtatgttttgacattttctttcttctttggaacaaaagaccaagggggctgctggagggggaaaggcagcagcgaacgacctgttgagtgcaagcaggagtgaat

SEQ ID NO: 832 - DNA, 3369 bp, Zea Mays
aaagtaacctgtctctgtttggtcattatgctctaggatccttcaacttgacatcacaacaatcgttgaggaggtaaccaacttttctagactgcattgagattgtttttgtaccaaactgcaatgtgtgcttatctttgtgcttcaataaatggtgtatatattaggctcttgttcagttagtacgtctcggttttcttaaaatggtgatgttagtgtcttgtgagtaggtggagatgttctggggtcaggggtggtgatctgtgcttttcttttaaattatctgaagcataaccacacaaaagatgttccagagtttgccacaagaaagtatacatgctttttctgttaagtgatgattaatgacatgcttttctatgatgagcatagaaactatggattattctaggccaaattcaatagaggttctagagtctgacataggctatcattttggaatgcttttggacactcggtgtagatgttattttagtgtagcagtatattgtgtattgatgcccttcaatattggattatgagtcatttacttagtcattgttgtggtcaaagcaatatgatgaagaccaatatcatgctttgaatgactaaatcctgcatttctatgcaacgccatgctcagttttagatgagatccacttctccgtgttttcggctctgtttagcctgatactgacgaattcaggacagacaacaatagcagtctcgctctttgcgtccacaattatatttccagatctttatatttggtatatattattcttatgacagtcattgattatggtggatagtactttcattagttatgttcttgtatcttttttcctcatgttacatgcctgggatgtctaaagctgccatattggtctgattgatcttttagtgatatatagaaactgcaagatgttatccgtggacatctagaggtggcccatgcctcacggccaaagcagatcagatgagatttttttggtcttgtgtggttctttttaatctgctcacatgatacttcttattcattgccatccaatttaattaattgccctcgactgaattggttcctttgccattttacttaggaggataaaagaagacactaccttggcacatgcctgttgccacaatggacaaaagaagattagtgttgtgtgatattttttcattcctttgatctattgcatgctatttgtaccccaatcgacaaaatagatgagactcaattcaggagcaaatcaccagtcctgttcacaacccaattcactatggctaaaatatcaaacttatgctccttgaggtttgttttttcctgatcttcctttaatatctgatgactgatggactggtgagttcatgatctgcttcatgcttttcctttttatatatggtcactacctcactggttagttcatggtgctttttgtctacttctttgccccaaaaaatctcggggcgaatttcagcatgcttttcctctaggtgtaaagccacccactcgatcgatcaccatatctccctctaggtgttatttttaaatatgctttgttcagtgtaaatcgttgcttgcagatgctgctttcacaagacagacatcttgctttctatggagttgaaccaggatcaagcgaccttactggcccatttaaccaaggaatcatgcagccagaattgatgtgcaccattgccaatcctgttgatgttttgcacggagctattcacgacgcgtcaacaatgaaccatgtaattttacagagtgacgtactgacatatgtatatgcagttccatatgtgcttccaaaactgtcatctgtcacccatgcccacatcgttgttggcggagagcacgcaagtcatcgtgagttcgacctccatagtacatactaaagagctgtcgacgacatgacgaaccgtctcaaggatgccacagtcaggatgatgaaaattgaggcctacgaaaccctgcaaactttgggctcatccagcacctatagtggaaaatgcctaagctgcatttcggaggcatgataaggtctgctaatgtgcaatgtaagtttgtgcataaaaacaggagcacaagtgcataaccttggtataagcaaaatgatatttgtttagccatgtgttattttgtgttaagcatatgctcttttgtcgatgcaagtctgcaattaggggatgtgagttacagtgttgacctttgcaattaggggatctcaactatgatgtcccaacctacagtgttgacctttgcaagcagattgcagatctgctctgcatcaaacaacaaaaatgttgttttactccatataactgcatcccaagttgtcaagctccataatgcatgcatttataaaaatctgatattttgtatgtacatgaactctcatgctgttctcccccctcttttcagaagtccactgctattacataattttttttaccgcgtgctattagtttatgcaccaaaaaattattgattttcaccaataggtctaaagtcctggttgcaccatcagcaattgtagcagacacggtaacttttgtacataaatatttccctactattatccctacttaccaaattcattattggttccaagcatcttgaaagagaagtccattgtctctcttactgtcatctcagcatggctaacagaagcacgcaggtactgtggtgttgaataattcatttattatccattatacatgacttttcctttgaactgttgtcaattgttggccattagaaaatatatactatagtcgatgataacatatgcgcaaagattttatcgaataatttttgtgttctcgcaatgtacgtgcattgtattatataaatataaagtaggagtttctccaccttcctttaatcatgctgcttcttgctgagggtggcgtgaaaaggtcagcaacaagttccgctatggtggcgacagagaagacgggggaggctctggcgacattgtggcgacgacgagaagcgagcaaggatataaatcgatctgtttctttggaaattagatgtagtagaatatttacgcgatacaaatctcgtttctctatatatctatatctattacgtttctcatgtctctatttttattataatggtttgggaaaatgtcactcatcatctgctctaatctttcgaaattaggtgtagtggaatattattgcccgatattgctacactacaatagtgaaataatagtttttttgttttacataagccccactcttttatctaaaagcccataaattattgtccaaaatggaagattaagactttgtttattacttctaaattatcctttctatatctgccatatgtaccatcagcgacaagatgac

SEQ ID NO: 833 - DNA, 2339 bp, Zea Mays
aaagtaacctgtctctgtttggtcattatgctctaggatccttcaacttgacatcacaacaatcgttgaggaggtaaccaacttttctagactgcattgagattgtttttgtaccaaactgcaatgtgtgcttatctttgtgcttcaataaatggtgtatatattaggctcttgttcagttagtacgtctcggttttcttaaaatggtgatgttagtgtcttgtgagtaggtggagatgttctggggtcaggggtggtgatctgtgcttttcttttaaattatctgaagcataaccacacaaaagatgttccagagtttgccacaagaaagtatacatgctttttctgttaagtgatgattaatgacatgcttttctatgatgagcatagaaactatggattattctaggccaaattcaatagaggttctagagtctgacataggctatcattttggaatgcttttggacactcggtgtagatgttattttagtgtagcagtatattgtgtattgatgcccttcaatattggattatgagtcatttacttagtcattgttgtggtcaaagcaatatgatgaagaccaatatcatgctttgaatgactaaatcctgcatttctatgcaacgccatgctcagttttagatgagatccacttctccgtgttttcggctctgtttagcctgatactgacgaattcaggacagacaacaatagcagtctcgctctttgcgtccacaattatatttccagatctttatatttggtatatattattcttatgacagtcattgattatggtggatagtactttcattagttatgttcttgtatcttttttcctcatgttacatgcctgggatgtctaaagctgccatattggtctgattgatcttttagtgatatatagaaactgcaagatgttatccgtggacatctagaggtggcccatgcctcacggccaaagcagatcagatgagatttttttggtcttgtgtggttctttttaatctgctcacatgatacttcttattcattgccatccaatttaattaattgccctcgactgaattggttcctttgccattttacttaggaggataaaagaagacactaccttggcacatgcctgttgccacaatggacaaaagaagattagtgttgtgtgatattttttcattcctttgatctattgcatgctatttgtaccccaatcgacaaaatagatgagactcaattcaggagcaaatcaccagtcctgttcacaacccaattcactatggctaaaatatcaaacttatgctccttgaggtttgttttttcctgatcttcctttaatatctgatgactgatggactggtgagttcatgatctgcttcatgcttttcctttttatatatggtcactacctcactggttagttcatggtgctttttgtctacttctttgccccaaaaaatctcggggcgaatttcagcatgcttttcctctaggtgtaaagccacccactcgatcgatcaccatatctccctctaggtgttatttttaaatatgctttgttcagtgtaaatcgttgcttgcagatgctgctttcacaagacagacatcttgctttctatggagttgaaccaggatcaagcgaccttactggcccatttaaccaaggaatcatgcagccagaattgatgtgcaccattgccaatcctgttgatgttttgcacggagctattcacgacgcgtcaacaatgaaccatgtaattttacagagtgacgtactgacatatgtatatgcagttccatatgtgcttccaaaactgtcatctgtcacccatgcccacatcgttgttggcggagagcacgcaagtcatcgtgagttcgacctccatagtacatactaaagagctgtcgacgacatgacgaaccgtctcaaggatgccacagtcaggatgatgaaaattgaggcctacgaaaccctgcaaactttgggctcatccagcacctatagtggaaaatgcctaagttagacgctgcacttgggctgcatttcggaggcatgataaggagtttctccaccttcctttaatcatgctgcttcttgctgagggtggcgtgaaaagagaggctactcaagatgaggaatttgaagttatgtatagtgaggacgatgatgaagacaaagatgacgaggatgatgaggaatatcacttcaccctttccagcttctaagttttaagtatgttttgacattttctttcttctttggaacaaaagaccaagggggctgctggagggggaaaggcagcagcgaacgacctgttgagtgcaagcaggagtgaat

SEQ ID NO: 834 - DNA, 2284 bp, Zea Mays
gtcattatgctctaggatccttcaacttgacatcacaacaatcgttgaggagaaactgcaagatgttatccgtggacatctagaggtggcccatgcctcacggccaaagcagatcagatgagatttttttggtcttgtgtggttctttttaatctgctcacatgatacttcttattcattgccatccaatttaattaattgccctcgactgaattggttcctttgccattttacttaggaggataaaagaagacactaccttggcacatgcctgttgccacaatggacaaaagaagattagtgttgtgtgatattttttcattcctttgatctattgcatgctatttgtaccccaatcgacaaaatagatgagactcaattcaggagcaaatcaccagtcctgttcacaacccaattcactatggctaaaatatcaaacttatgctccttgaggtttgttttttcctgatcttcctttaatatctgatgactgatggactggtgagttcatgatctgcttcatgcttttcctttttatatatggtcactacctcactggttagttcatggtgctttttgtctacttctttgccccaaaaaatctcggggcgaatttcagcatgcttttcctctaggtgtaaagccacccactcgatcgatcaccatatctccctctaggtgttatttttaaatatgctttgttcagtgtaaatcgttgcttgcagatgctgctttcacaagacagacatcttgctttctatggagttgaaccaggatcaagcgaccttactggcccatttaaccaaggaatcatgcagccagaattgatgtgcaccattgccaatcctgttgatgttttgcacggagctattcacgacgcgtcaacaatgaaccatgtaattttacagagtgacgtactgacatatgtatatgcagttccatatgtgcttccaaaactgtcatctgtcacccatgcccacatcgttgttggcggagagcacgcaagtcatcagtacatactaaagagctgtcgacgacatgacgaaccgtctcaaggatgccacagtcaggatgatgaaaattgaggcctacgaaaccctgcaaactttgggctcatccagcacctatagtggaaaatgcctaagttagacgctgcacttggctgcatttcggaggcatgataaggtctgctaatgtgcaatgtaagtttgtgcataaaaacaggagcacaagtgcataaccttggtataagcaaaatgatatttgtttagccatgtgttattttgtgttaagcatatgctcttttgtcgatgcaagtctgcaattaggggatgtgagttacagtgttgacctttgcaattaggggatctcaactatgatgtcccaacctacagtgttgacctttgcaagcagattgcagatctgctctgcatcaaacaacaaaaatgttgttttactccatataactgcatcccaagttgtcaagctccataatgcatgcatttataaaaatctgatattttgtatgtacatgaactctcatgctgttctcccccctcttttcagaagtccactgctattacataattttttttaccgcgtgctattagtttatgcaccaaaaaattattgattttcaccaataggtctaaagtcctggttgcaccatcagcaattgtagcagacacggtaacttttgtacataaatatttccctactattatccctacttaccaaattcattattggttccaagcatcttgaaagagaagtccattgtctctcttactgtcatctcagcatggctaacagaagcacgcaggtactgtggtgttgaataattcatttattatccattatacatgacttttcctttgaactgttgtcaattgttggccattagaaaatatatactatagtcgatgataacatatgcgcaaagattttatcgaataatttttgtgttctcgcaatgtacgtgcattgtattatataaatataaagtaggagtttctccaccttcctttaatcatgctgcttcttgctgagggtggcgtgaaaagagaggctactcaagatgaggaatttgaagttatgtatagtgaggacgatgatgaagacaaagatgacgaggatgatgaggaatatcacttcaccctttccagcttctaagttttaagtatgttttgacattttctttcttctttggaacaaaagaccaagggggctgctggagggggaaaggcagcagcgaacgacctgttgagtgcaagcaggagtgaat

SEQ ID NO: 835 - DNA, 2014 bp, Zea Mays
atgctctaggatccttcaacttgacatcacaacaatcgttgaggaggaggataaaagaagacactaccttggcacatgcctgttgccacaatggacaaaagaagattagtgttgtgtgatattttttcattcctttgatctattgcatgctatttgtaccccaatcgacaaaatagatgagactcaattcaggagcaaatcaccagtcctgttcacaacccaattcactatggctaaaatatcaaacttatgctccttgaggtttgttttttcctgatcttcctttaatatctgatgactgatggactggtgagttcatgatctgcttcatgcttttcctttttatatatggtcactacctcactggttagttcatggtgctttttgtctacttctttgccccaaaaaatctcggggcgaatttcagcatgcttttcctctaggtgtaaagccacccactcgatcgatcaccatatctccctctaggtgttatttttaaatatgctttgttcagtgtaaatcgttgcttgcagatgctgctttcacaagacagacatcttgctttctatggagttgaaccaggatcaagcgaccttactggcccatttaaccaaggaatcatgcagccagaattgatgtgcaccattgccaatcctgttgatgttttgcacggagctattcacgacgcgtcaacaatgaaccatgtaattttacagagtgacgtactgacatatgtatatgcagttccatatgtgcttccaaaactgtcatctgtcacccatgcccacatcgttgttggcggagagcacgcaagtcatcgtgagttcgacctccatagtacatactaaagagctgtcgacgacatgacgaaccgtctcaaggatgccacagtcaggatgatgaaaattgaggcctacgaaaccctgcaaactttgggctcatccagcacctatagtggaaaatgcctaagttagacgctgcacttggtataaaaatatatgcaaaatattccttagtttttgcaaataggtgtaatgtaagtatatgttaattgtacatgttacagtaaatcgagaaataatgacccctacatgatctatgtgttacaggctgcatttcggaggcatgataaggtctgctaatgtgcaatgtctaaagtcctggttgcaccatcagcaattgtagcagacacggtaacttttgtacataaatatttccctactattatccctacttaccaaattcattattggttccaagcatcttgaaagagaagtccattgtctctcttactgtcatctcagcatggctaacagaagcacgcaggtactgtggtgttgaataattcatttattatccattatacatgacttttcctttgaactgttgtcaattgttggccattagaaaatatatactatagtcgatgataacatatgcgcaaagattttatcgaataatttttgtgttctcgcaatgtacgtgcattgtattatataaatataaagtaggagtttctccaccttcctttaatcatgctgcttcttgctgagggtggcgtgaaaaggtcagcaacaagttccgctatggtggcgacagagaagacgggggaggctctggcgacattgtggcgacgacgagaagcgagcaaggatataaatcgatctgtttctttggaaattagatgtagtagaatatttacgcgatacaaatctcgtttctctatatatctatatctattacgtttctcatgtctctatttttattataatggtttgggaaaatgtcactcatcatctgctctaatctttcgaaattaggtgtagtggaatattattgcccgatattgctacactacaatagtgaaataatagtttttttgttttacataagccccactcttttatctaaaagcccataaattattgtccaaaatggaagattaagactttgtttattacttctaaattatcctttctatatctgccatatgtaccatcagcgacaagatgac

SEQ ID NO: 836 - DNA, 929 bp, Zea Mays
agaatgaaaaccctaaccctaacaggggttgggtgatatattaataggctgagtaaactggaccagacacattacagaggggtgagatggtcattacacggggaagacctcaaaccctaaacgggtattctaacagagacataccgggatataagtaaacacctttactccttaaaagccttgttcggttatatggattgaatgatattgaaaaaaattatgaaagattctgatttggttgagaattaaactcactccatctcacccaatctaagtaacccatataaagaatggaatggtaaccagaaaataacaactcttccagtgaccttaaccataaacagtagagacttggacagtggacaactagaaaaattcttcttcacataagaccacgaccattatttgttgcttttgggcaatggtggtgtttgcttgctcgtctcagccacagactctttcttgcgcatcgctatcactggatccctgcaaaaaaccacggaaacatgatgagctcaaatatagctaacaaaggcgatgcaaactttttgaatttatccaataccctgtaacaattttggatgatgctcagccatatcaaaaaagaaaaagaaaaaagaaacgtgtatgaattattagctggaaggaacagccatatgtggagctaagcaaacatgatggtgagctcattgggctgtcaaaataagagaaaaaaaaagatccattgttcatcccctccataacacaagtactccagattaattcgccactgtatatagtcatgattgtgagcagtaaaacacaatgaacaattaagaccatgtttgaatacactagagctaataattaactgctaaaattagctaaaaacatccaaagtattagctacttttagccgcagaaattcaaacactctagctaatagttag

SEQ ID NO: 837 - DNA, 1744 bp, Zea Mays
ccagcttcttcttgatctcctccaccccaaatttcaccgcctcctcatcccgctccgcaaactctacacagtctaccattgagctgatctccacctccacccggttgatgaggactctgatactgtccaaatccttgatggcaatgaacgtgccaacctgcattgcgctcaccacctccttctgtccacggagcgcgtcctgataccctttcagcaaagaatctatccacttccccatagatcccagcgggactgcagcggccgcggccaatgccgcagcgacaggcggggcagcgatggccgcggcaaccaccgagcagatgagcacggccgcgaacgtggtcgcgaagatgatgcttgacacccggcgccacgccttgatggtcttgaccttcttgtcgagccggtgcttgcgctgctgcagcttctccagcatggccagctgctgccggtaaacggcctggaaggcggcgaagaactcgtccgtgaagggatccccggccgccttgaactggcgcagctcgtgcagcgtgcgcgcgtaccgggcggagggagcggcggcggcggcgtcgctgccttcctcgtcgtcgaagcgctggagcgcgacgtggaggagaagctgggagtcgcgggctcgcttgaggcacttgtcgagtgcggtgcagaaatcgagggtctggaggctgctctcgaagtaatcctcgacgaggtcgaacagctcggggctcttccagatgtccttcttgcagtcgaggatgacgcgcaccacctcctggttcatgtcgaggaggcagccggtgacctctcggagcgagtccagcgacatcgaccgcacctcgacgcccaccgccagcgtcgagatggcgcggctggtgcgccgctgcagcgtcgtgtcgaacgtgcgcagctccgggtccgaccggcacgctgcctcataagagctcagctcttccgccggcgacgcctcgggcggcagcgccgactccgagtgctccggacgcctgttgccgccgccgctgctgctgttgttccccattgccggaagcaaaggtgacacactcaaatcaggatccaaaaaaagaagagccttttccccccttttgaacttggaaggacgaacgatgtattttagaaccaaatcaacaggcgcttcggcaactaggacggatcaaaccagcgagcaatggcggaacccacaaatgccagggggtctccgaagaatcgaaccagaagaaaaacttcgacagctcaggaaattcaagggactgaatttggcggaacaagcgaatgccgcgagctttatctcagggatcgaggacgcgttgcgtcaggtcagaccaagcgcgaggtttcggggaagcaagaagaatggatgcaatgcaggggccgggaggggaggggggatggatttgtggtgcagtgccggtgcggggatgacgtcaggcgaggaggaggtggaggagcggcgatgtggggatgtcttgtacgcatgacgaaggagatggggcggggttggcaatggccaccgccggaagcaacccgatgcctgtcagttgtcactccaccgccaggcgcgtgtgtggatgtggtgtgcactgctgcggtgtgtgccgtaactcagcaactgcgcgtgttctgccgccacttcgtcgaggtcggcggaggctcagctgactgggggtgggggaagcaagcaaagcagcgagagagagagagagtgcgcgcgtgtttgtttggcatggtg

SEQ ID NO: 838 - DNA, 2398 bp, Zea Mays
gacgctcgaaggaaggggacccagcggttcagacttcagattctcctaattcccaaacccttgccgctgccgccgcagatggaagtctgcgacgagctgcggtcatttgaggccacaggcgtctaccgcctcaatggcacctgcaccagcgccggagccacttacctcgacccggtccgcctcctcaacgcgtcctaccagcgcttccgcatcgtcccttctgcgtactactcccgaagcttcggcccccagcatcaggaaggcgagccagagatcgagcggcccgagaaaaggaggaaacgcaagcgtaatcagaagccgaagcccagggagctcaatccaatggaacggatcgctgaagcccggcaccaggaagcgaagcctttactattgaacgcacatgaatcactcgttaaggctaaacatctactggagtacatttccaagacaatcaaaggcaatgagcacacacttgatgcgggtagtggttctgagaataatttcgttgagcttgggacctcatggcgagcacctttctatgagatcactatttgcttccggaacccccatgttctgggcaatgaggaagtgttgaagggactgacgaagctgaaggagaattccgtaataggcgttatattttaccaagaggaagttgcttcttgatggctgatttcaaacgagttagagatctcattccttgtagtccaaatcaagggtataatcttatagttgttgacccaccatgggagaatggatgtgttcggcagaaagaagtgtatcctacacttcccaacaaaaatttcttatatcttccagtgcaacaacttgcccatccaaccggagcgcttcttgttttgtggattacaaatagggagaaactgcgggcatttgttgagaaaaaactgcttccttcttggggagtggaagattccaccgtgttttattggcttaaggtgaaacctgatggctctctaattggtgatttagacttgttccatcacaggccctatgagtgcctcctccttggctacataaatgttaatgcaaatgctaagaaagggtcaaatttcaagttgttagaaagaagccaagtaatcatgagtgtccctggtgctcactcaaggaaacctccccttgagaaattactttcagaatatattccaggtcctaaaccttcaagatgcatcgagcttttcgccagagagttgtttcccagatggacctcttggggaaatgagccgcttcatttccaggataccatgtacttctcggagaaatagttcgatagccaagagcaggatataagtatgtggattctgatgcaactgccacgtgccacctaaggcaagtggttttgcaatagcattgtaccttgtgtttttcggcctttcttcaggtgatgaaaacgccccatctccagacgagtttgccgtctgctattgctgagtgctgacctactgtgtgacttctcgcttcccagcacttgattggtatcaagtcctttttttggccaaaagctggaggtttggcgaatcctatttatagggtgacctgtggggcagacatctcatattatttcttgcactacgcagttccctgcattgcagtgttcagtgtgcttctgggaatctcaatcaagttgtaacgggcagtcagagagatggaaagaatttgtacacagctagattcgttgggctcatctgcatcctggttactttccctagaacaattcggaaagttcctgtaaagttaggacagaggtttccatttccctgagcggctgagcagaactggttcgaagacaatggatgcaggccgtatccagtgccgattcttttggtgataccacattcttccgttatgtgtccattcgtcttatcgtgttccttgcattgttacgttacaatctggaaaggtggttctccaaggacgacttacaagtacctgccgaatgttcaggggaagatcagcttgctctccgcctctgccggctgccgcaagcaagctaacggaagcctgggctgcaaattggacgacgcgcgcgacggagactgactatacgtgttgatagttgagacctggggcggcgtcagagtccccctcgccggaggtaagccgcgtccggatggccctacccactgcttccgccaagatagccagtgccagggcgaaggtcggtgagagagccaagacgccggccaactcgaaggcgaagggacgatcggatgctcaagagaagcggggcaggaatggaaggctcgtcccgtcacttgggtgcatgagctcgcctcctctggtgccaattggcccggactcggagaagaggaggtgttcctggatcactgcaaactcgggttgacaaaacctccgaatccatgtcccacccatacacaac

SEQ ID NO: 839 - DNA, 2670 bp, Zea Mays
tatatcagttgattgcgtacagttatttttcccccctcccaaattatcacccccaagtcccaaccaacccaagtaggggtacagcaacagcaacgcccgctcgctctcccactctccggccggcctataaatcccggggccggactccgagctcacagactaggacacagctaacactcctgtatccgagctactactcctagtcctagtacaggctacagaggcagagcgagcaaaactgcctgtacatagcaaccatcaacgacgaccgatccaagtagtgagcattagtggatctactacgtacatatatagaaggaaacagctgcagctctctctctcgctgtttcctgcgtgatctgcttgtgtagctactagctagctagcggagcggaaccacccatgggctgcgaggaggaagagaggctgctgttcccgtccttcgtctttcccgagagcttcgcggaggccgccgacctcgcctacatgaccgagtacgcctacaacagctacatgaacatgatggacctcgcgcccgcctacttcggtggagtcgtctacgactacgaccacttcaactgatccacgagcatgcaggaggaggaggagggaagctacaagacgaaggaaggattgactggcctatcagctaggtactattttcgtgttaatggatggatggaccgatttgcagggcgcgcgtagcagtagtagcaatcaaggtcactagtatagtctgtcagtacgacgacgtcgatcagtcaatgtctcctgacgataattattaagtcgatctattcagtagtaacttgttaagccatgtagattagtagcagctggtaatctttgtaaatgtgtgtggattatcatgcaagtgcgcgcttatcatgatcgaaccagtggtctctgcgatgtaatattggggggaacgggggttaatcggaatcagaaaatgcatgcttgtagatgctttatttggtgaatgttctcttagtacttggcccatttgagtgggcttcatttgagttctgggctgtttcacaagttaaattctcttagaacaacaagttgatcttttatatatataatacctggacgaccacgatccgttctcctctctcctggttcctccaatttaaattacagccaaagcctttttttaactgtaatgaagttcatagaaaaatacaccaacgtttacaatataaaattagcctcgtccagtacatttatttgaacttatagtttatagcgtttttttttctctctctttttgctttttccaacagctgaaagaataatggattaatatacaaatccctgagtagagtacataggcggcgggtagaaccgagtggcaattcaccctcccaacagatcttgcgaggcagatcagcagcacacgtcgctaggggttttttacatgatacaacatcaggcatctgatttttaccgaccaaaaaacaagtacctgacagaaagctacagcgcagcacagcacagcactcgccgtgcggatccagatgttgacaccgcaggaattagcacgacgactcggaagttacgcaggggcgcgccccagggcaggctacctatttttcggagacgccgtgctgcttttcctcgacgagcaacgggggaggccccctttcacaggagatggtgggaaaggagatgacgacggcagctgccggtggctcgagatcgaagagaagcagctgaatgggttcctcagacgcctcttctccgagtcttcggattgactgtttgggtcatggccaaccggagagatcttaagcgactccgggagaaggcagttgcaaatggcgcctgcaaaggagaagatgcacttgatcatcgtaataggaaccaggaagttcacataaaaaggctacaacaagaactccatgttcatacacaacagtcctactaagtgaagtacaaacgcagcatggcagaaactatatgggccttatttgtttcagcttttttttagcttctggccaccaaaagataccgtggactatcaaacactcaactttttaacccgcttttacaagaatcaatttagtaaaaaaacatccaaaatcagcacaaacacataattggccgagttcttgcaatagtaagaattcgtcactttctagatcatgaaccctatgtacaccttcatcttcttccgctcacaatccctatgatacttagatttctctcatagccagattattagaaaagctggtcagaaaaaagctgaaccaaacagtcacgtagtcagagcagccccgattcccttagttgggcatgctgtcgaagtcaacagcccgctgaaaacatatggcagaattttatactgctcttcgtggatgaaactagtcactagtaatatcttgactctttgcaggttaatgccagccacacatcaagtgcacagttactgagttacactgtgatatggtcatagttttcaaggtgtcgcctagacggtaagacgagccagagaggtaaggcatcctcctcgccttgctctggaacctaaggcgagtgggagctccggcacggcagagggggagagggaggcggctggtgcagctgggagagagggagagggctgagagagatggcgtgagtgggtttaacctaattttaatatgccagctgggctgatttggg

SEQ ID NO: 840 - DNA, 3041 bp, Zea Mays
gctaacactcctgtatccgagctactactcctagtcctagtacaggctacagaggcagagcgagcaaaactgcctgtacatagcaaccatcaacgacgaccgatccaagtagtgagcattagtggatctactacgtacatatatagaaggaaacagctgcagctctctctctcgctgtttcctgcgtgatctgcttgtgtagctactagctagctagcggagcggaaccacccatgggctgcgaggaggaagagaggctgctgttcccgtccttcgtctttcccgagagcttcgcggaggccgccacccccggctccggtggtgagcagaagaaggctcggcagcgtcggaggcgcaagccgcggccggcggagggcggcgagggcgcggacgagcaggccaggaagcggcggctgagcgacgaccaggcgcggttcctggagctcagcttcaggaaggagcgcaagctggagacgccccgcaaggtgcagctggccgccgagctgggcctcgacgccaagcaggtggccgtctggttccagaaccgccgcgcccgccacaagagcaagctcatggaggaggagttctccaagctccgcgccgcgcacgacgccgtcgtcctccacaactgccacctcgagaccgagctgctgaagatgaaggacaggctggcggaggtggaggaggagaagacgaagctcgtcgcggcggcggcggcggcggccggcggcgcagcgggcgcagggagcagcagcccgagctcgtcgtcgttctcgacggtgacgcaccacccggccgcggcgctgcaggtggggcagttcggggtggagccggaggaggccgccgacctcgcctacatgaccgagtacgcctacaacagctacatgaacatgatggacctcgcgcccgcctacttcggtggagtcgtctacgactacgaccacttcaactgatccacgagcatgcaggaggaggaggagggaagctacaagacgaaggaaggattgactggcctatcagctaggtactattttcgtgttaatggatggatggaccgatttgcagggcgcgcgtagcagtagtagcaatcaaggtcactagtatagtctgtcagtacgacgacgtcgatcagtcaatgtctcctgacgataattattaagtcgatctattcagtagtaacttgttaagccatgtagattagtagcagctggtaatctttgtaaatgtgtgtggattatcatgcaagtgcgcgcttatcatgatcgaaccagtggtctctgcgatgtaatattggggggaacgggggttaatcggaatcagaaaatgcatgcttgtagatgctttatttggtgaatgttctcttagtacttggcccatttgagtgggcttcatttgagttctgggctgtttcacaagttaaattctcttagaacaacaagttgatcttttatatatataatacctggacgaccacgatccgttctcctctctcctggttcctccaatttaaattacagccaaagcctttttttaactgtaatgaagttcatagaaaaatacaccaacgtttacaatataaaattagcctcgtccagtacatttatttgaacttatagtttatagcgtttttttttctctctctttttgctttttccaacagctgaaagaataatggattaatatacaaatccctgagtagagtacataggcggcgggtagaaccgagtggcaattcaccctcccaacagatcttgcgaggcagatcagcagcacacgtcgctaggggttttttacatgatacaacatcaggcatctgatttttaccgaccaaaaaacaagtacctgacagaaagctacagcgcagcacagcacagcactcgccgtgcggatccagatgttgacaccgcaggaattagcacgacgactcggaagttacgcaggggcgcgccccagggcaggctacctatttttcggagacgccgtgctgcttttcctcgacgagcaacgggggaggccccctttcacaggagatggtgggaaaggagatgacgacggcagctgccggtggctcgagatcgaagagaagcagctgaatgggttcctcagacgcctcttctccgagtcttcggattgactgtttgggtcatggccaaccggagagatcttaagcgactccgggagaaggcagttgcaaatggcgcctgcaaaggagaagatgcacttgatcatcgtaataggaaccaggaagttcacataaaaaggctacaacaagaactccatgttcatacacaacagtcctactaagtgaagtacaaacgcagcatggcagaaactatatgggccttatttgtttcagcttttttttagcttctggccaccaaaagataccgtggactatcaaacactcaactttttaacccgcttttacaagaatcaatttagtaaaaaaacatccaaaatcagcacaaacacataattggccgagttcttgcaatagtaagaattcgtcactttctagatcatgaaccctatgtacaccttcatcttcttccgctcacaatccctatgatacttagatttctctcatagccagattattagaaaagctggtcagaaaaaagctgaaccaaacagtcacgtagtcagagcagccccgattcccttagttgggcatgctgtcgaagtcaacagcccgctgaaaacatatggcagaattttatactgctcttcgtggatgaaactagtcactagtaatatcttgactctttgcaggttaatgccagccacacatcaagtgcacagttactgagttacactgtgatatggtcatagttttcaaggtgtcgcctagacggtaagacgagccagagaggtaaggcatcctcctcgccttgctctggaacctaaggcgagtgggagctccggcacggcagagggggagagggaggcggctggtgcagctgggagagagggagagggctgagagagatggcgtgagtgggtttaacctaattttaatatgccagctgggctgatttggg

SEQ ID NO: 841 - DNA, 1666 bp, Zea Mays
ttttttttagaatgtttcaaaagagccagagtactttaaatatacaatttatttagtgcggcttgtttcgactttaatccaactcgttttttatagtattttgcctatatgtacagcgattgcgaggcagccgaacaataaaccccgccgagacccaaccccctatttacacctcgtcacttgccaagttgacatcgcctccgggcaaggcccatcaagcttcgtcgctcctccgttacttccgcccatggccaagcgactcttccactcctgccgctcgccgtctgccgcagccgcggtcagccccacgacgacactcctcccgacagctcacccgcccgttgttccggctccatcgggcggtgcgtgctgcccgcgccgcgtgcctcggcgggggcgggcccagacacctgcagcctgtggcgccgggggctgcaccgtcgactacggcgccgacgacctccctccggcgcgtggaacgccagcgtaccgctggctgaagagctcccgatggcacgtcatcgaggccgccaacgcgtacgcctccgacggcgacggcgacgacacgccccgcctgaagatcgacgcgcggcgccgggtgcggcactcgcgccgccgccgccgccgcagggtgctccaccggaggctggcaggcccggcgagctggtcgtcgggcgacagcgggtggttcagcagcgacgacgacgagccgttcggcgcggggtcggcgctgcacgtggcggcgtcgtcgagcaccacaacggagtcctcgtcgacgggcgcgagacagaacagcgccggcgccgcgaggggggagggggaggctgcggccgcgtcgctggccgggggcttcgcggtggtgaagcgctccgacgacccgcgcgccgacttccggcggtccatggcggagatggtcgtgggccgcggcatctacgacgccgacggcctcgagcgcctgctccgctgcttcctggcgctcaacgaccgacgccaccgtcccgacatcgtggcggcgttcggcgacgtgtgggaggccgtcttatccgacctgccgtcgcagtcccactcccacggcaccgctgccgctgccacctccgccatgtctcacccctagaggcctagactagcgtgctcatcgacatcatcgtcattgcgctcgcgcgcacgtaggtctattccattaggtgaagcaactactctattatatgtaaaaaaatgcgattataatgttcacgtaatgcggctgtaaattaagctttcttgtgcgggtttgcggcaccggctcctttcggccttctcctgctgcatgtttcagttcacctgtggaaaatctgtgtcaacacgacacgaccctggtgtctgagactgacctgatgtgatgtgacctggagctgaccgcggcgcagacacagaaatctatctactcgacctcagctgctggtgtacttcactactttgttggacaaacgcaaacccctaccccaggcacagtcagaaggcagccatggcccaaaccacccccaacatggacatggatgtgacgcgcactcgcgcgcaagcttccatttggtgcgtggagttggcttggcgcttggctccatattttggcggtggggggacagagtaatttgttcactctttggtgatttgctgtattgtattcctg

SEQ ID NO: 842 - DNA, 2629 bp, Zea Mays
cctactgtaggcgtccacacccgcggcgcggtgcacgttctgcctccggcaacccgccccgcccgcggccgcatccctcccgcatcccgcggccgcaccatcaacggcgcaacagccgcatccagtccctcccgcatcaacagcgtcgcagccagtccctcccgattcgcgcttaatccccgcatccagtccctcccgcatccagtccctcccgcggtgcaatccagacgcaaacaactccattgaccccgattcgcgtacatgctctctcacagcaatccctgctctctcctcgccaacgcctctcgataaactccatggaaggtactgatcagagggccaggtgctatccacgaatgatagtgtaatgtctaggaacgatagctgatttggaaaacctgcaaagtctattcacaacaggtacactgccttcccaattaaggaaaaactgacactcatatcccattgaatttgctggctatgcatacctgttcagttcacaatgatataaccacttactttatgtaatgtgaatacgtttattaaaatagttatgatcagcatatccttccttaatcgacatatttttttcttctatgtaccttctattcaggttacgaatactgtaaagataatttagaatttctcatacaaatccttaaccactgtaaatatatggggaatttctaaaatgtgtttagattcatacatgtacaagtttgtattatgtttttatgcatatttatgaatctaccttataatcgattttatattgttgtctcacttattcctctttaaaacacacacttgctgttttcaaatttcaagtcactaattgttactgttcttcctcaaaaaaataccactgtaattaagttgccgatgcagtgatatataatggtcacctattatgaagaaatagtgaatgggagaagggttgagttttggagccggtgcatgcaaatcatataccaggtttatgctataatgttttccttatgaagaattaaatatttgtgtgtttgcacagcgaggtcatattttcatattgattttctgtacctgggactttggagaggggaacacgttccaaaaccggagcgtttcatcaccagccccagtaactatggtctgttggtatgacctcgctgaggttgttgccctcaccgagagcatcggcaagccgctcgccgaggtgctcaaggagctcgggaagagggttccagactcccttgtgaagacccgcatcgaggatgatggcttcactatcaactcgagaagagggttccagactcccttgtgaagacccacaactagagaaataggatggagagggaaatttactaagagaggacgtgtaacaaataaggccaggaattattagaatgaatggaaaatgtcctcatacacctttggagattttatttcgcttgtgggcaagtggtgatcagagtttgtctctatcggcaactgtttggatcactgtttaactaaatcctacaatacataccttgccagtaccaatcttgtgaatgacagaaacacaaagcatatttattttctgatggactgcctgtagagctgtattctcttgatgttcagaaatcatatgagagggcaataatctccgtggagcaactgaatgctattcttagacaggcttctaaaaccaaggaaaaggaagatctcaggaagatagataactggcaatatattagttgtgtcaccctatgggttcggtttctgtgttgtcactataaggattacaatctccatcccttattttctcaagttcttcaattgctctttgactgcctagaattaagagaagtttctcagaaagaacaaacacaaagaacaaagatcaacttttcgtctttgttgaaggtgccaaagaacctgctgaaaccaagggattttcaagaggagtgtattctttcagcgattcagattctatcagcacattttgcccagtggagttaccatgtttccttcctagaagtagccaccattcctcttgtcctcttgaagaggctacatgagcagacaacagttgaatcacttcgccatcctattaagtgtttgatagaccaggtgacggagaacaaggattttatagaaaggaaaagagaggttgtatccttttcaccaaatgataaggcgtcagttgatagcttccttcagtcaattgcttcacatttactattcaacatctggcctgctgagtttgctgaaaaacatattactgttgaatgcaggaggagaagtccacacagaatgtcggacagggacgccgtggcccccgcgggcggcggtgaccggaaggcggccaagctcgggagctggagcagcatgagcagcaactacggcaacaagaagcggaagagcagcagcagcagcttcgggaggagatccacatccacctgcgaggaaaggcagggggtcttccgcatgctcatgagctggaaccaggagagccggttcagcaacaagatcaagacgacgacgagcaaagaaagatgaacgaaacgaagtgttcttagcttggtgtgattattcggggggttgcttgctggagggtttttgttcgtttagtgtctagccttagcttacttattacttttgttag

SEQ ID NO: 843 - DNA, 807 bp, Zea Mays
ggcgcggtgcacgttctgcctccggcaacccgccccgcccgcggccgcatccctcccgcatcccgcggccgcaccatcaacggcgcaacagccgcatccagtccctcccgcatcaacagcgtcgcagccagtccctcccgattcgcgcttaatccccgcatccagtccctcccgcatccagtccctcccgcggtgcaatccagacgcaaacaactccattgaccccgattcgcgtacatgctctctcacagcaatccctgctctctcctcgccaacgcctctcgataaactccatggaagcttgtaggtactgatcagagggccaggtgctatccacgaatgatagtgtaatgtctaggaacgatagctgatttggaaaacctgcaaagtctattcacaacagtgatatataatggtcacctattatgaagaaatagtgaatgggagaagggttgagttttggagccggtgcatgcaaatcatataccaggtttatgctataatgttttccttatgaagaattaaatatttgtgtgtttgcacagcgaggtcatattttcatattgattttctgtacctgggactttggagaggggaacacgttccaaaaccggagcgtttcatcaccagccccagtaactatggtctgttggtatgacctcgctgaggttgttgccctcaccgagagcatcggcaagccgctcgccgaggtgctcaaggagctcgggaagagggttccagactcccttgtgaagacccgcatcgaggatgatggcttcactatcaactcgagaagagggttccaga

SEQ ID NO: 844 - DNA, 1986 bp, Zea Mays
cgcggtgcacgttctgcctccggcaacccgccccgcccgcggccgcatccctcccgcatcccgcggccgcaccatcaacggcgcaacagccgcatccagtccctcccgcatcaacagcgtcgcagccagtccctcccgattcgcgcttaatccccgcatccagtccctcccgcatccagtccctcccgcggtgcaatccagacgcaaacaactccattgaccccgattcgcgtacatgctctctcacagcaatccctgctctctcctcgccaacgcctctcgataaactccatggaagcttgtaggtactgatcagagggccaggtgctatccacgaatgatagtgtaatgtctaggaacgatagctgatttggaaaacctgcaaagtctattcacaacagcgaggtcatattttcatattgattttctgtacctgggactttggagaggggaacacgttccaaaaccggagcgtttcatcaccagccccagtaactatggtctgttggtatgacctcgctgaggttgttgccctcaccgagagcatcggcaagccgctcgccgaggtgctcaaggagctcgggaagagggttccagactcccttgtgaagacccgcatcgaggatgatggcttcactatcaaattttatttcgcttgtgggcaagtgaaatcatatgagagggcaataatctccgtggagcaactgaatgctattcttagacaggcttctaaaaccaaggaaaaggaagatctcaggaagatagataactggcaatatattagttgtgtcaccctatgggttcggtttctgtgttgtcactataaggattacaatctccatcccttattttctcaagttcttcaattgctctttgactgcctagaattaagagaagtttctcagaaagaacaaacacaaagaacaaagatcaacttttcgtctttgttgaaggtgccaaagaacctgctgaaaccaagggattttcaagaggagtgtattctttcagcgattcagattctatcagcacattttgcccagtggagttaccatgtttccttcctagaagtagccaccattcctcttgtcctcttgaagaggctacatgagcagacaacagttgaatcacttcgccatcctattaagtgtttgatagaccaggtgacggagaacaaggattttatagaaaggaaaagagaggttgtatccttttcaccaaatgataaggcgtcagttgatagcttccttcagtcaattgcttcacatttactattcaacatctggcctgctgagtttgctgaaaaacatattactgttgaatgcaggaggagaaggtcagcagaaccgcttcattcactcggttctatgcatccgtagctgaaaaccgtcaaccaaaatgtatgtcataaatctctactactccttatgtctttagtgtaggcgtccacatctctttgttctgccatcgcgcgctccgcccgcgattcccctccccgcgcccgcagtccccgccgccatcctcgcggccgcagccgagcacagccgccgcgcccgcagtccccgcgccagcaacgctcgtagtccctgccgccgtcctcgcggccgcaaattcgccgcgcccgcagtccacacagaatgtcggacagggacgccgtggcccccgcgggcggcggtgaccggaaggcggccaagctcgggagctggagcagcatgagcagcaactacggcaacaagaagcggaagagcagcagcagcagcttcgggaggagatccacatccacctgcgaggaaaggcagggggtcttccgcatgctcatgagctggaaccaggagagccggttcagcaacaagatcaagacgacgacgagcaaagaaagatgaacgaaacgaagtgttcttagcttggtgtgattattcggggggttgcttgctggagggtttttgttcgtttagtgtctagccttagcttacttattacttttgttag

SEQ ID NO: 845 - DNA, 3798 bp, Zea Mays
gcacgttctgcctccggcaacccgccccgcccgcggccgcatccctcccgcatcccgcggccgcaccatcaacggcgcaacagccgcatccagtccctcccgcatcaacagcgtcgcagccagtccctcccgattcgcgcttaatccccgcatccagtccctcccgcatccagtccctcccgcggtgcaatccagacgcaaacaactccattgaccccgattcgcgtacatgctctctcacagcaatccctgctctctcctcgccaacgcctctcgataaactccatggaaggttcacactgatgcgctctgattccttgctccacgctctctcctgctctcgcgctctacatggaaggtgaggccgacgcccaaatcgacggaatccctgctctgcgctctcccctgctcccgcgctctacatggaaggcgaggccggcgcccaaatcgacgggatcactgctcggacaggattgcggcctcgatccgcgctctccagattcgcctagattgacagcgtccgcgccgcgcttgcccagatcgatggaatctaggtctccagatgcaagtccggggctcgctacccgtggaaggcgaggagagacgacgcatcggctctcgatccgtgctctacatggaaggtgaggcagatcggggggagtgtgtagagaaatccaagcgaaaccccgcgagagcgaggcgacggcggacggaggcgagtgggtgagccgcgggcgagagacgaggtagcgggctagcgcgatgccgtcgccggttgtagtggccgcgacgctgctggtggtagcactggcggcattctgcggcacggacccgctccggacggacagcatggtggacttcccggggtttgagtcccacctcgtcgacctccccaatcccgccgagatgccgacgcacgcggatgaatgggagcggctctgtggagccgatgtgcggttctgcggcgaggtgcaggggcccgagagcatcaccttcgaccagcagggccatacacgggcgtcgccgacggccgggtcgtcttctgggacggcgagcggagctccacggagggccgaaggcctcgccgctggagtatctcccagcgagcatatctgcaaccgcccgctcgggctctgtttcgataagactggggacctgtacatcgccgacgcctacttcggcttgctcaaagtccgccgcgaggccgggctggccacgctgctcgcaacggaggccgagggcgtgcgcttcaacttcaccaacgacctcgacctcgacctcgacgacgagggcaacatctacttcactgactctagcattcactaccaaagacgtctgtgatgccatgccctcgctctcttccctctgctttgcgcgcttggttggatgctcacttgattcctactgaccacggggatggtgatcgactgattgttaacatcacttgattcctctgctttatattgattcctactgaagatggacaatataaaaacctaaaatggaccaattctttctttgagggatacaaccctactctggtgtaacttatacttgttctagcacttggccctctgatctggtgaataagttatgcagaagaaaaattatgttttattttatatttaactgtactttgttgtagcttgtaggtactgatcagagggccaggtgctatccacgaatgatagtgtaatgtctaggaacgatagctgatttggaaaacctgcaaagtctattcacaacaggtacactgccttcccaattaaggaaaaactgacactcatatcccattgaatttgctggctatgcatacctgttcagttcacaatgatataaccacttactttatgtaatgtgaatacgtttattaaaatagttatgatcagcatatccttccttaatcgacatatttttttcttctatgtaccttctattcaggttacgaatactgtaaagataatttagaatttctcatacaaatccttaaccactgtaaatatatggggaatttctaaaatgtgtttagattcatacatgtacaagtttgtattatgtttttatgcatatttatgaatctaccttataatcgattttatattgttgtctcacttattcctctttaaaacacacacttgctgttttcaaatttcaagtcactaattgttactgttcttcctcaaaaaaataccactgtaattaagttgccgatgcagtgatatataatggtcacctattatgaagaaatagtgaatgggagaagggttgagttttggagccggtgcatgcaaatcatataccaggtttatgctataatgttttccttatgaagaattaaatatttgtgtgtttgcacagcgaggtcatattttcatattgattttctgtacctgggactttggagaggggaacacgttccaaaaccggagcgtttcatcaccagccccagtaactatggtctgttggtatgacctcgctgaggttgttgccctcaccgagagcatcggcaagccgctcgccgaggtgctcaaggagctcgggaagagggttccagactcccttgtgaagacccgcatcgaggatgatggcttcactatcaactcgagaagagggttccagactcccttgtgaagacccacaactagagaaataggatggagagggaaatttactaagagaggacgtgtaacaaataaggccaggaattattagaatgaatggaaaatgtcctcatacacctttggagattttatttcgcttgtgggcaagtgaaatcatatgagagggcaataatctccgtggagcaactgaatgctattcttagacaggcttctaaaaccaaggaaaaggaagatctcaggaagatagataactggcaatatattagttgtgtcaccctatgggttcggtttctgtgttgtcactataaggattacaatctccatcccttattttctcaagttcttcaattgctctttgactgcctagaattaagagaagtttctcagaaagaacaaacacaaagaacaaagatcaacttttcgtctttgttgaaggtgccaaagaacctgctgaaaccaagggattttcaagaggagtgtattctttcagcgattcagattctatcagcacattttgcccagtggagttaccatgtttccttcctagaagtagccaccattcctcttgtcctcttgaagaggctacatgagcagacaacagttgaatcacttcgccatcctattaagtgtttgatagaccaggtgacggagaacaaggattttatagaaaggaaaagagaggttgtatccttttcaccaaatgataaggcgtcagttgatagcttccttcagtcaattgcttcacatttactattcaacatctggcctgctgagtttgctgaaaaacatattactgttgaatgcaggaggagaagtccacacagaatgtcggacagggacgccgtggcccccgcgggcggcggtgaccggaaggcggccaagctcgggagctggagcagcatgagcagcaactacggcaacaagaagcggaagagcagcagcagcagcttcgggaggagatccacatccacctgcgaggaaaggcagggggtcttccgcatgctcatgagctggaaccaggagagccggttcagcaacaagatcaagacgacgacgagcaaagaaagatgaacgaaacgaagtgttcttagcttggtgtgattattcggggggttgcttgctggagggtttttgttcgtttagtgtctagccttagcttacttattacttttgttag

SEQ ID NO: 846 - DNA, 3551 bp, Zea Mays
gcacgttctgcctccggcaacccgccccgcccgcggccgcatccctcccgcatcccgcggccgcaccatcaacggcgcaacagccgcatccagtccctcccgcatcaacagcgtcgcagccagtccctcccgattcgcgcttaatccccgcatccagtccctcccgcatccagtccctcccgcggtgcaatccagacgcaaacaactccattgaccccgattcgcgtacatgctctctcacagcaatccctgctctctcctcgccaacgcctctcgataaactccatggaaggttcacactgatgcgctctgattccttgctccacgctctctcctgctctcgcgctctacatggaaggtgaggccgacgcccaaatcgacggaatccctgctctgcgctctcccctgctcccgcgctctacatggaaggcgaggccggcgcccaaatcgacgggatcactgctcggacaggattgcggcctcgatccgcgctctccagattcgcctagattgacagcgtccgcgccgcgcttgcccagatcgatggaatctaggtctccagatgcaagtccggggctcgctacccgtggaaggcgaggagagacgacgcatcggctctcgatccgtgctctacatggaaggtgaggcagatcggggggagtgtgtagagaaatccaagcgaaaccccgcgagagcgaggcgacggcggacggaggcgagtgggtgagccgcgggcgagagacgaggtagcgggctagcgcgatgccgtcgccggttgtagtggccgcgacgctgctggtggtagcactggcggcattctgcggcacggacccgctccggacggacagcatggtggacttcccggggtttgagtcccacctcgtcgacctccccaatcccgccgagatgccgacgcacgcggatgaatgggagcggctctgtggagccgatgtgcggttctgcggcgaggtgcaggggcccgagagcatcaccttcgaccagcagggccatacacgggcgtcgccgacggccgggtcgtcttctgggacggcgagcggagctccacggagggccgaaggcctcgccgctggagtatctcccagcgagcatatctgcaaccgcccgctcgggctctgtttcgataagactggggacctgtacatcgccgacgcctacttcggcttgctcaaagtccgccgcgaggccgggctggccacgctgctcgcaacggaggccgagggcgtgcgcttcaacttcaccaacgacctcgacctcgacctcgacgacgagggcaacatctacttcactgactctagcattcactaccaaagacgtctgtgatgccatgccctcgctctcttccctctgctttgcgcgcttggttggatgctcacttgattcctactgaccacggggatggtgatcgactgattgttaacatcacttgattcctctgctttatattgattcctactgaagatggacaatataaaaacctaaaatggaccaattctttctttgagggatacaaccctactctggtgtaacttatacttgttctagcacttggccctctgatctggtgaataagttatgcagaagaaaaattatgttttattttatatttaactgtactttgttgtagcttgtaggtactgatcagagggccaggtgctatccacgaatgatagtgtaatgtctaggaacgatagctgatttggaaaacctgcaaagtctattcacaacaggtacactgccttcccaattaaggaaaaactgacactcatatcccattgaatttgctggctatgcatacctgttcagttcacaatgatataaccacttactttatgtaatgtgaatacgtttattaaaatagttatgatcagcatatccttccttaatcgacatatttttttcttctatgtaccttctattcaggttacgaatactgtaaagataatttagaatttctcatacaaatccttaaccactgtaaatatatggggaatttctaaaatgtgtttagattcatacatgtacaagtttgtattatgtttttatgcatatttatgaatctaccttataatcgattttatattgttgtctcacttattcctctttaaaacacacacttgctgttttcaaatttcaagtcactaattgttactgttcttcctcaaaaaaataccactgtaattaagttgccgatgcagtgatatataatggtcacctattatgaagaaatagtgaatgggagaagggttgagttttggagccggtgcatgcaaatcatataccagaggggaacacgttccaaaaccggagcgtttcatcaccagccccagtaactatggtctgttggtatgacctcgctgaggttgttgccctcaccgagagcatcggcaagccgctcgccgaggtgctcaaggagctcgggaagagggttccagactcccttgtgaagacccgcatcgaggatgatggcttcactatcaaattttatttcgcttgtgggcaagtgaaatcatatgagagggcaataatctccgtggagcaactgaatgctattcttagacaggcttctaaaaccaaggaaaaggaagatctcaggaagatagataactggcaatatattagttgtgtcaccctatgggttcggtttctgtgttgtcactataaggattacaatctccatcccttattttctcaagttcttcaattgctctttgactgcctagaattaagagaagtttctcagaaagaacaaacacaaagaacaaagatcaacttttcgtctttgttgaaggtgccaaagaacctgctgaaaccaagggattttcaagaggagtgtattctttcagcgattcagattctatcagcacattttgcccagtggagttaccatgtttccttcctagaagtagccaccattcctcttgtcctcttgaagaggctacatgagcagacaacagttgaatcacttcgccatcctattaagtgtttgatagaccaggtgacggagaacaaggattttatagaaaggaaaagagaggttgtatccttttcaccaaatgataaggcgtcagttgatagcttccttcagtcaattgcttcacatttactattcaacatctggcctgctgagtttgctgaaaaacatattactgttgaatgcaggaggagaagtccacacagaatgtcggacagggacgccgtggcccccgcgggcggcggtgaccggaaggcggccaagctcgggagctggagcagcatgagcagcaactacggcaacaagaagcggaagagcagcagcagcagcttcgggaggagatccacatccacctgcgaggaaaggcagggggtcttccgcatgctcatgagctggaaccaggagagccggttcagcaacaagatcaagacgacgacgagcaaagaaagatgaacgaaacgaagtgttcttagcttggtgtgattattcggggggttgcttgctggagggtttttgttcgtttagtgtctagccttagcttacttattacttttgttag

SEQ ID NO: 847 - DNA, 2604 bp, Zea Mays
gcacgttctgcctccggcaacccgccccgcccgcggccgcatccctcccgcatcccgcggccgcaccatcaacggcgcaacagccgcatccagtccctcccgcatcaacagcgtcgcagccagtccctcccgattcgcgcttaatccccgcatccagtccctcccgcatccagtccctcccgcggtgcaatccagacgcaaacaactccattgaccccgattcgcgtacatgctctctcacagcaatccctgctctctcctcgccaacgcctctcgataaactccatggaagcttgtaggtactgatcagagggccaggtgctatccacgaatgatagtgtaatgtctaggaacgatagctgatttggaaaacctgcaaagtctattcacaacaggtacactgccttcccaattaaggaaaaactgacactcatatcccattgaatttgctggctatgcatacctgttcagttcacaatgatataaccacttactttatgtaatgtgaatacgtttattaaaatagttatgatcagcatatccttccttaatcgacatatttttttcttctatgtaccttctattcaggttacgaatactgtaaagataatttagaatttctcatacaaatccttaaccactgtaaatatatggggaatttctaaaatgtgtttagattcatacatgtacaagtttgtattatgtttttatgcatatttatgaatctaccttataatcgattttatattgttgtctcacttattcctctttaaaacacacacttgctgttttcaaatttcaagtcactaattgttactgttcttcctcaaaaaaataccactgtaattaagttgccgatgcagtgatatataatggtcacctattatgaagaaatagtgaatgggagaagggttgagttttggagccggtgcatgcaaatcatataccaggtttatgctataatgttttccttatgaagaattaaatatttgtgtgtttgcacagcgaggtcatattttcatattgattttctgtacctgggactttggagaggggaacacgttccaaaaccggagcgtttcatcaccagccccagtaactatggtctgttggtatgacctcgctgaggttgttgccctcaccgagagcatcggcaagccgctcgccgaggtgctcaaggagctcgggaagagggttccagactcccttgtgaagacccgcatcgaggatgatggcttcactatcaactcgagaagagggttccagactcccttgtgaagacccacaactagagaaataggatggagagggaaatttactaagagaggacgtgtaacaaataaggccaggaattattagaatgaatggaaaatgtcctcatacacctttggagattttatttcgcttgtgggcaagtggtgatcagagtttgtctctatcggcaactgtttggatcactgtttaactaaatcctacaatacataccttgccagtaccaatcttgtgaatgacagaaacacaaagcatatttattttctgatggactgcctgtagagctgtattctcttgatgttcagaaatcatatgagagggcaataatctccgtggagcaactgaatgctattcttagacaggcttctaaaaccaaggaaaaggaagatctcaggaagatagataactggcaatatattagttgtgtcaccctatgggttcggtttctgtgttgtcactataaggattacaatctccatcccttattttctcaagttcttcaattgctctttgactgcctagaattaagagaagtttctcagaaagaacaaacacaaagaacaaagatcaacttttcgtctttgttgaaggtgccaaagaacctgctgaaaccaagggattttcaagaggagtgtattctttcagcgattcagattctatcagcacattttgcccagtggagttaccatgtttccttcctagaagtagccaccattcctcttgtcctcttgaagaggctacatgagcagacaacagttgaatcacttcgccatcctattaagtgtttgatagaccaggtgacggagaacaaggattttatagaaaggaaaagagaggttgtatccttttcaccaaatgataaggcgtcagttgatagcttccttcagtcaattgcttcacatttactattcaacatctggcctgctgagtttgctgaaaaacatattactgttgaatgcaggaggagaagtccacacagaatgtcggacagggacgccgtggcccccgcgggcggcggtgaccggaaggcggccaagctcgggagctggagcagcatgagcagcaactacggcaacaagaagcggaagagcagcagcagcagcttcgggaggagatccacatccacctgcgaggaaaggcagggggtcttccgcatgctcatgagctggaaccaggagagccggttcagcaacaagatcaagacgacgacgagcaaagaaagatgaacgaaacgaagtgttcttagcttggtgtgattattcggggggttgcttgctggagggtttttgttcgtttagtgtctagccttagcttacttattacttttgttag

SEQ ID NO: 848 - DNA, 2129 bp, Zea Mays
gcacgttctgcctccggcaacccgccccgcccgcggccgcatccctcccgcatcccgcggccgcaccatcaacggcgcaacagccgcatccagtccctcccgcatcaacagcgtcgcagccagtccctcccgattcgcgcttaatccccgcatccagtccctcccgcatccagtccctcccgcggtgcaatccagacgcaaacaactccattgaccccgattcgcgtacatgctctctcacagcaatccctgctctctcctcgccaacgcctctcgataaactccatggaaggtactgatcagagggccaggtgctatccacgaatgatagtgtaatgtctaggaacgatagctgatttggaaaacctgcaaagtctattcacaacagtgatatataatggtcacctattatgaagaaatagtgaatgggagaagggttgagttttggagccggtgcatgcaaatcatataccaggtttatgctataatgttttccttatgaagaattaaatatttgtgtgtttgcacagcgaggtcatattttcatattgattttctgtacctgggactttggagaggggaacacgttccaaaaccggagcgtttcatcaccagccccagtaactatggtctgttggtatgacctcgctgaggttgttgccctcaccgagagcatcggcaagccgctcgccgaggtgctcaaggagctcgggaagagggttccagactcccttgtgaagacccgcatcgaggatgatggcttcactatcaactcgagaagagggttccagactcccttgtgaagacccacaactagagaaataggatggagagggaaatttactaagagaggacgtgtaacaaataaggccaggaattattagaatgaatggaaaatgtcctcatacacctttggagattttatttcgcttgtgggcaagtggtgatcagagtttgtctctatcggcaactgtttggatcactgtttaactaaatcctacaatacataccttgccagtaccaatcttgtgaatgacagaaacacaaagcatatttattttctgatggactgcctgtagagctgtattctcttgatgttcagaaatcatatgagagggcaataatctccgtggagcaactgaatgctattcttagacaggcttctaaaaccaaggaaaaggaagatctcaggaagatagataactggcaatatattagttgtgtcaccctatgggttcggtttctgtgttgtcactataaggattacaatctccatcccttattttctcaagttcttcaattgctctttgactgcctagaattaagagaagtttctcagaaagaacaaacacaaagaacaaagatcaacttttcgtctttgttgaaggtgccaaagaacctgctgaaaccaagggattttcaagaggagtgtattctttcagcgattcagattctatcagcacattttgcccagtggagttaccatgtttccttcctagaagtagccaccattcctcttgtcctcttgaagaggctacatgagcagacaacagttgaatcacttcgccatcctattaagtgtttgatagaccaggtgacggagaacaaggattttatagaaaggaaaagagaggttgtatccttttcaccaaatgataaggcgtcagttgatagcttccttcagtcaattgcttcacatttactattcaacatctggcctgctgagtttgctgaaaaacatattactgttgaatgcaggaggagaagtccacacagaatgtcggacagggacgccgtggcccccgcgggcggcggtgaccggaaggcggccaagctcgggagctggagcagcatgagcagcaactacggcaacaagaagcggaagagcagcagcagcagcttcgggaggagatccacatccacctgcgaggaaaggcagggggtcttccgcatgctcatgagctggaaccaggagagccggttcagcaacaagatcaagacgacgacgagcaaagaaagatgaacgaaacgaagtgttcttagcttggtgtgattattcggggggttgcttgctggagggtttttgttcgtttagtgtctagccttagcttacttattacttttgttag

SEQ ID NO: 849 - DNA, 3378 bp, Zea Mays
gttctgcctccggcaacccgccccgcccgcggccgcatccctcccgcatcccgcggccgcaccatcaacggcgcaacagccgcatccagtccctcccgcatcaacagcgtcgcagccagtccctcccgattcgcgcttaatccccgcatccagtccctcccgcatccagtccctcccgcggtgcaatccagacgcaaacaactccattgaccccgattcgcgtacatgctctctcacagcaatccctgctctctcctcgccaacgcctctcgataaactccatggaaggttcacactgatgcgctctgattccttgctccacgctctctcctgctctcgcgctctacatggaaggtgaggccgacgcccaaatcgacggaatccctgctctgcgctctcccctgctcccgcgctctacatggaaggcgaggccggcgcccaaatcgacgggatcactgctcggacaggattgcggcctcgatccgcgctctccagattcgcctagattgacagcgtccgcgccgcgcttgcccagatcgatggaatctaggtctccagatgcaagtccggggctcgctacccgtggaaggcgaggagagacgacgcatcggctctcgatccgtgctctacatggaaggtgaggcagatcggggggagtgtgtagagaaatccaagcgaaaccccgcgagagcgaggcgacggcggacggaggcgagtgggtgagccgcgggcgagagacgaggtagcgggctagcgcgatgccgtcgccggttgtagtggccgcgacgctgctggtggtagcactggcggcattctgcggcacggacccgctccggacggacagcatggtggacttcccggggtttgagtcccacctcgtcgacctccccaatcccgccgagatgccgacgcacgcggatgaatgggagcggctctgtggagccgatgtgcggttctgcggcgaggtgcaggggcccgagagcatcaccttcgaccagcagggccatacacgggcgtcgccgacggccgggtcgtcttctgggacggcgagcggtgggtcccattcgcgatggccttcccgtgctggacgcaggagctccacggagggccgaaggcctcgccgctggagtatctcccagcgagcatatctgcaaccgcccgctcgggctctgtttcgataagactggggacctgtacatcgccgacgcctacttcggcttgctcaaagtccgccgcgaggccgggctggccacgctgctcgcaacggaggccgagggcgtgcgcttcaacttcaccaacgacctcgacctcgacctcgacgacgagggcaacatctacttcactgactctagcattcactaccaaagacgtctgtgatgccatgccctcgctctcttccctctgctttgcgcgcttggttggatgctcacttgattcctactgaccacggggatggtgatcgactgattgttaacatcacttgattcctctgctttatattgattcctactgaagatggacaatataaaaacctaaaatggaccaattctttctttgagggatacaaccctactctggtgtaacttatacttgttctagcacttggccctctgatctggtgaataagttatgcagaagaaaaattatgttttattttatatttaactgtactttgttgtagcttgtaggtactgatcagagggccaggtgctatccacgaatgatagtgtaatgtctaggaacgatagctgatttggaaaacctgcaaagtctattcacaacagttgccgatgcagtgatatataatggtcacctattatgaagaaatagtgaatgggagaagggttgagttttggagccggtgcatgcaaatcatataccaggtttatgctataatgttttccttatgaagaattaaatatttgtgtgtttgcacagcgaggtcatattttcatattgattttctgtacctgggactttggagaggggaacacgttccaaaaccggagcgtttcatcaccagccccagtaactatggtctgttggtatgacctcgctgaggttgttgccctcaccgagagcatcggcaagccgctcgccgaggtgctcaaggagctcgggaagagggttccagactcccttgtgaagacccgcatcgaggatgatggcttcactatcaactcgagaagagggttccagactcccttgtgaagacccacaactagagaaataggatggagagggaaatttactaagagaggacgtgtaacaaataaggccaggaattattagaatgaatggaaaatgtcctcatacacctttggagattttatttcgcttgtgggcaagtgaaatcatatgagagggcaataatctccgtggagcaactgaatgctattcttagacaggcttctaaaaccaaggaaaaggaagatctcaggaagatagataactggcaatatattagttgtgtcaccctatgggttcggtttctgtgttgtcactataaggattacaatctccatcccttattttctcaagttcttcaattgctctttgactgcctagaattaagagaagtttctcagaaagaacaaacacaaagaacaaagatcaacttttcgtctttgttgaaggtgccaaagaacctgctgaaaccaagggattttcaagaggagtgtattctttcagcgattcagattctatcagcacattttgcccagtggagttaccatgtttccttcctagaagtagccaccattcctcttgtcctcttgaagaggctacatgagcagacaacagttgaatcacttcgccatcctattaagtgtttgatagaccaggtgacggagaacaaggattttatagaaaggaaaagagaggttgtatccttttcaccaaatgataaggcgtcagttgatagcttccttcagtcaattgcttcacatttactattcaacatctggcctgctgagtttgctgaaaaacatattactgttgaatgcaggaggagaagtccacacagaatgtcggacagggacgccgtggcccccgcgggcggcggtgaccggaaggcggccaagctcgggagctggagcagcatgagcagcaactacggcaacaagaagcggaagagcagcagcagcagcttcgggaggagatccacatccacctgcgaggaaaggcagggggtcttccgcatgctcatgagctggaaccaggagagccggttcagcaacaagatcaagacgacgacgagcaaagaaagatgaacgaaacgaagtgttcttagcttggtgtgattattcggggggttgcttgctggagggtttttgttcgtttagtgtctagccttagcttacttattacttttgttag

SEQ ID NO: 850 - DNA, 3384 bp, Zea Mays
gttctgcctccggcaacccgccccgcccgcggccgcatccctcccgcatcccgcggccgcaccatcaacggcgcaacagccgcatccagtccctcccgcatcaacagcgtcgcagccagtccctcccgattcgcgcttaatccccgcatccagtccctcccgcatccagtccctcccgcggtgcaatccagacgcaaacaactccattgaccccgattcgcgtacatgctctctcacagcaatccctgctctctcctcgccaacgcctctcgataaactccatggaaggttcacactgatgcgctctgattccttgctccacgctctctcctgctctcgcgctctacatggaaggtgaggccgacgcccaaatcgacggaatccctgctctgcgctctcccctgctcccgcgctctacatggaaggcgaggccggcgcccaaatcgacgggatcactgctcggacaggattgcggcctcgatccgcgctctccagattcgcctagattgacagcgtccgcgccgcgcttgcccagatcgatggaatctaggtctccagatgcaagtccggggctcgctacccgtggaaggcgaggagagacgacgcatcggctctcgatccgtgctctacatggaaggtgaggcagatcggggggagtgtgtagagaaatccaagcgaaaccccgcgagagcgaggcgacggcggacggaggcgagtgggtgagccgcgggcgagagacgaggtagcgggctagcgcgatgccgtcgccggttgtagtggccgcgacgctgctggtggtagcactggcggcattctgcggcacggacccgctccggacggacagcatggtggacttcccggggtttgagtcccacctcgtcgacctccccaatcccgccgagatgccgacgcacgcggatgaatgggagcggctctgtggagccgatgtgcggttctgcggcgaggtgcaggggcccgagagcatcaccttcgaccagcagggccatacacgggcgtcgccgacggccgggtcgtcttctgggacggcgagcggagctccacggagggccgaaggcctcgccgctggagtatctcccagcgagcatatctgcaaccgcccgctcgggctctgtttcgataagactggggacctgtacatcgccgacgcctacttcggcttgctcaaagtccgccgcgaggccgggctggccacgctgctcgcaacggaggccgagggcgtgcgcttcaacttcaccaacgacctcgacctcgacctcgacgacgagggcaacatctacttcactgactctagcattcactaccaaagacgtctgtgatgccatgccctcgctctcttccctctgctttgcgcgcttggttggatgctcacttgattcctactgaccacggggatggtgatcgactgattgttaacatcacttgattcctctgctttatattgattcctactgaagatggacaatataaaaacctaaaatggaccaattctttctttgagggatacaaccctactctggtgtaacttatacttgttctagcacttggccctctgatctggtgaataagttatgcagaagaaaaattatgttttattttatatttaactgtactttgttgtagcttgtaggtactgatcagagggccaggtgctatccacgaatgatagtgtaatgtctaggaacgatagctgatttggaaaacctgcaaagtctattcacaacagtgatatataatggtcacctattatgaagaaatagtgaatgggagaagggttgagttttggagccggtgcatgcaaatcatataccagaggggaacacgttccaaaaccggagcgtttcatcaccagccccagtaactatggtctgttggtatgacctcgctgaggttgttgccctcaccgagagcatcggcaagccgctcgccgaggtgctcaaggagctcgggaagagggttccagactcccttgtgaagacccgcatcgaggatgatggcttcactatcaactcgagaagagggttccagactcccttgtgaagacccacaactagagaaataggatggagagggaaatttactaagagaggacgtgtaacaaataaggccaggaattattagaatgaatggaaaatgtcctcatacacctttggagattttatttcgcttgtgggcaagtggtgatcagagtttgtctctatcggcaactgtttggatcactgtttaactaaatcctacaatacataccttgccagtaccaatcttgtgaatgacagaaacacaaagcatatttattttctgatggactgcctgtagagctgtattctcttgatgttcagaaatcatatgagagggcaataatctccgtggagcaactgaatgctattcttagacaggcttctaaaaccaaggaaaaggaagatctcaggaagatagataactggcaatatattagttgtgtcaccctatgggttcggtttctgtgttgtcactataaggattacaatctccatcccttattttctcaagttcttcaattgctctttgactgcctagaattaagagaagtttctcagaaagaacaaacacaaagaacaaagatcaacttttcgtctttgttgaaggtgccaaagaacctgctgaaaccaagggattttcaagaggagtgtattctttcagcgattcagattctatcagcacattttgcccagtggagttaccatgtttccttcctagaagtagccaccattcctcttgtcctcttgaagaggctacatgagcagacaacagttgaatcacttcgccatcctattaagtgtttgatagaccaggtgacggagaacaaggattttatagaaaggaaaagagaggttgtatccttttcaccaaatgataaggcgtcagttgatagcttccttcagtcaattgcttcacatttactattcaacatctggcctgctgagtttgctgaaaaacatattactgttgaatgcaggaggagaagtccacacagaatgtcggacagggacgccgtggcccccgcgggcggcggtgaccggaaggcggccaagctcgggagctggagcagcatgagcagcaactacggcaacaagaagcggaagagcagcagcagcagcttcgggaggagatccacatccacctgcgaggaaaggcagggggtcttccgcatgctcatgagctggaaccaggagagccggttcagcaacaagatcaagacgacgacgagcaaagaaagatgaacgaaacgaagtgttcttagcttggtgtgattattcggggggttgcttgctggagggtttttgttcgtttagtgtctagccttagcttacttattacttttgttag

SEQ ID NO: 851 - DNA, 3184 bp, Zea Mays
gttctgcctccggcaacccgccccgcccgcggccgcatccctcccgcatcccgcggccgcaccatcaacggcgcaacagccgcatccagtccctcccgcatcaacagcgtcgcagccagtccctcccgattcgcgcttaatccccgcatccagtccctcccgcatccagtccctcccgcggtgcaatccagacgcaaacaactccattgaccccgattcgcgtacatgctctctcacagcaatccctgctctctcctcgccaacgcctctcgataaactccatggaaggttcacactgatgcgctctgattccttgctccacgctctctcctgctctcgcgctctacatggaaggtgaggccgacgcccaaatcgacggaatccctgctctgcgctctcccctgctcccgcgctctacatggaaggcgaggccggcgcccaaatcgacgggatcactgctcggacaggattgcggcctcgatccgcgctctccagattcgcctagattgacagcgtccgcgccgcgcttgcccagatcgatggaatctaggtctccagatgcaagtccggggctcgctacccgtggaaggcgaggagagacgacgcatcggctctcgatccgtgctctacatggaaggtgaggcagatcggggggagtgtgtagagaaatccaagcgaaaccccgcgagagcgaggcgacggcggacggaggcgagtgggtgagccgcgggcgagagacgaggtagcgggctagcgcgatgccgtcgccggttgtagtggccgcgacgctgctggtggtagcactggcggcattctgcggcacggacccgctccggacggacagcatggtggacttcccggggtttgagtcccacctcgtcgacctccccaatcccgccgagatgccgacgcacgcggatgaatgggagcggctctgtggagccgatgtgcggttctgcggcgaggtgcaggggcccgagagcatcaccttcgaccagcagggccatacacgggcgtcgccgacggccgggtcgtcttctgggacggcgagcggagctccacggagggccgaaggcctcgccgctggagtatctcccagcgagcatatctgcaaccgcccgctcgggctctgtttcgataagactggggacctgtacatcgccgacgcctacttcggcttgctcaaagtccgccgcgaggccgggctggccacgctgctcgcaacggaggccgagggcgtgcgcttcaacttcaccaacgacctcgacctcgacctcgacgacgagggcaacatctacttcactgactctagcattcactaccaaagacgtctgtgatgccatgccctcgctctcttccctctgctttgcgcgcttggttggatgctcacttgattcctactgaccacggggatggtgatcgactgattgttaacatcacttgattcctctgctttatattgattcctactgaagatggacaatataaaaacctaaaatggaccaattctttctttgagggatacaaccctactctggtgtaacttatacttgttctagcacttggccctctgatctggtgaataagttatgcagaagaaaaattatgttttattttatatttaactgtactttgttgtagcttgtaggtactgatcagagggccaggtgctatccacgaatgatagtgtaatgtctaggaacgatagctgatttggaaaacctgcaaagtctattcacaacagcgaggtcatattttcatattgattttctgtacctgggactttggagaggggaacacgttccaaaaccggagcgtttcatcaccagccccagtaactatggtctgttggtatgacctcgctgaggttgttgccctcaccgagagcatcggcaagccgctcgccgaggtgctcaaggagctcgggaagagggttccagactcccttgtgaagacccgcatcgaggatgatggcttcactatcaactcgagaagagggttccagactcccttgtgaagacccacaactagagaaataggatggagagggaaatttactaagagaggacgtgtaacaaataaggccaggaattattagaatgaatggaaaatgtcctcatacacctttggagattttatttcgcttgtgggcaagtgaaatcatatgagagggcaataatctccgtggagcaactgaatgctattcttagacaggcttctaaaaccaaggaaaaggaagatctcaggaagatagataactggcaatatattagttgtgtcaccctatgggttcggtttctgtgttgtcactataaggattacaatctccatcccttattttctcaagttcttcaattgctctttgactgcctagaattaagagaagtttctcagaaagaacaaacacaaagaacaaagatcaacttttcgtctttgttgaaggtgccaaagaacctgctgaaaccaagggattttcaagaggagtgtattctttcagcgattcagattctatcagcacattttgcccagtggagttaccatgtttccttcctagaagtagccaccattcctcttgtcctcttgaagaggctacatgagcagacaacagttgaatcacttcgccatcctattaagtgtttgatagaccaggtgacggagaacaaggattttatagaaaggaaaagagaggttgtatccttttcaccaaatgataaggcgtcagttgatagcttccttcagtcaattgcttcacatttactattcaacatctggcctgctgagtttgctgaaaaacatattactgttgaatgcaggaggagaagtccacacagaatgtcggacagggacgccgtggcccccgcgggcggcggtgaccggaaggcggccaagctcgggagctggagcagcatgagcagcaactacggcaacaagaagcggaagagcagcagcagcagcttcgggaggagatccacatccacctgcgaggaaaggcagggggtcttccgcatgctcatgagctggaaccaggagagccggttcagcaacaagatcaagacgacgacgagcaaagaaagatgaacgaaacgaagtgttcttagcttggtgtgattattcggggggttgcttgctggagggtttttgttcgtttagtgtctagccttagcttacttattacttttgttag

SEQ ID NO: 852 - DNA, 2481 bp, Zea Mays
gttctgcctccggcaacccgccccgcccgcggccgcatccctcccgcatcccgcggccgcaccatcaacggcgcaacagccgcatccagtccctcccgcatcaacagcgtcgcagccagtccctcccgattcgcgcttaatccccgcatccagtccctcccgcatccagtccctcccgcggtgcaatccagacgcaaacaactccattgaccccgattcgcgtacatgctctctcacagcaatccctgctctctcctcgccaacgcctctcgataaactccatggaaggttcacactgatgcgctctgattccttgctccacgctctctcctgctctcgcgctctacatggaaggtgaggccgacgcccaaatcgacggaatccctgctctgcgctctcccctgctcccgcgctctacatggaaggcgaggccggcgcccaaatcgacgggatcactgctcggacaggattgcggcctcgatccgcgctctccagattcgcctagattgacagcgtccgcgccgcgcttgcccagatcgatggaatctaggtctccagatgcaagtccggggctcgctacccgtggaaggcgaggagagacgacgcatcggctctcgatccgtgctctacatggaagcttgtaggtactgatcagagggccaggtgctatccacgaatgatagtgtaatgtctaggaacgatagctgatttggaaaacctgcaaagtctattcacaacagtgatatataatggtcacctattatgaagaaatagtgaatgggagaagggttgagttttggagccggtgcatgcaaatcatataccaggtttatgctataatgttttccttatgaagaattaaatatttgtgtgtttgcacagcgaggtcatattttcatattgattttctgtacctgggactttggagaggggaacacgttccaaaaccggagcgtttcatcaccagccccagtaactatggtctgttggtatgacctcgctgaggttgttgccctcaccgagagcatcggcaagccgctcgccgaggtgctcaaggagctcgggaagagggttccagactcccttgtgaagacccgcatcgaggatgatggcttcactatcaactcgagaagagggttccagactcccttgtgaagacccacaactagagaaataggatggagagggaaatttactaagagaggacgtgtaacaaataaggccaggaattattagaatgaatggaaaatgtcctcatacacctttggagattttatttcgcttgtgggcaagtggtgatcagagtttgtctctatcggcaactgtttggatcactgtttaactaaatcctacaatacataccttgccagtaccaatcttgtgaatgacagaaacacaaagcatatttattttctgatggactgcctgtagagctgtattctcttgatgttcagaaatcatatgagagggcaataatctccgtggagcaactgaatgctattcttagacaggcttctaaaaccaaggaaaaggaagatctcaggaagatagataactggcaatatattagttgtgtcaccctatgggttcggtttctgtgttgtcactataaggattacaatctccatcccttattttctcaagttcttcaattgctctttgactgcctagaattaagagaagtttctcagaaagaacaaacacaaagaacaaagatcaacttttcgtctttgttgaaggtgccaaagaacctgctgaaaccaagggattttcaagaggagtgtattctttcagcgattcagattctatcagcacattttgcccagtggagttaccatgtttccttcctagaagtagccaccattcctcttgtcctcttgaagaggctacatgagcagacaacagttgaatcacttcgccatcctattaagtgtttgatagaccaggtgacggagaacaaggattttatagaaaggaaaagagaggttgtatccttttcaccaaatgataaggcgtcagttgatagcttccttcagtcaattgcttcacatttactattcaacatctggcctgctgagtttgctgaaaaacatattactgttgaatgcaggaggagaagtccacacagaatgtcggacagggacgccgtggcccccgcgggcggcggtgaccggaaggcggccaagctcgggagctggagcagcatgagcagcaactacggcaacaagaagcggaagagcagcagcagcagcttcgggaggagatccacatccacctgcgaggaaaggcagggggtcttccgcatgctcatgagctggaaccaggagagccggttcagcaacaagatcaagacgacgacgagcaaagaaagatgaacgaaacgaagtgttcttagcttggtgtgattattcggggggttgcttgctggagggtttttgttcgtttagtgtctagccttagcttacttattacttttgttag

SEQ ID NO: 853 - DNA, 3038 bp, Zea Mays
gttctgcctccggcaacccgccccgcccgcggccgcatccctcccgcatcccgcggccgcaccatcaacggcgcaacagccgcatccagtccctcccgcatcaacagcgtcgcagccagtccctcccgattcgcgcttaatccccgcatccagtccctcccgcatccagtccctcccgcggtgcaatccagacgcaaacaactccattgaccccgattcgcgtacatgctctctcacagcaatccctgctctctcctcgccaacgcctctcgataaactccatggaaggttcacactgatgcgctctgattccttgctccacgctctctcctgctctcgcgctctacatggaaggtgaggccgacgcccaaatcgacggaatccctgctctgcgctctcccctgctcccgcgctctacatggaaggcgaggccggcgcccaaatcgacgggatcactgctcggacaggattgcggcctcgatccgcgctctccagattcgcctagattgacagcgtccgcgccgcgcttgcccagatcgatggaatctaggtctccagatgcaagtccggggctcgctacccgtggaaggcgaggagagacgacgcatcggctctcgatccgtgctctacatggaaggtgaggcagatcggggggagtgtgtagagaaatccaagcgaaaccccgcgagagcgaggcgacggcggacggaggcgagtgggtgagccgcgggcgagagacgaggtagcgggctagcgcgatgccgtcgccggttgtagtggccgcgacgctgctggtggtagcactggcggcattctgcggcacggacccgctccggacggacagcatggtggacttcccggggtttgagtcccacctcgtcgacctccccaatcccgccgagatgccgacgcacgcggatgaatgggagcggctctgtggagccgatgtgcggttctgcggcgaggtgcaggggcccgagagcatcaccttcgaccagcagggccatacacgggcgtcgccgacggccgggtcgtcttctgggacggcgagcggagctccacggagggccgaaggcctcgccgctggagtatctcccagcgagcatatctgcaaccgcccgctcgggctctgtttcgataagactggggacctgtacatcgccgacgcctacttcggcttgctcaaagtccgccgcgaggccgggctggccacgctgctcgcaacggaggccgagggcgtgcgcttcaacttcaccaacgacctcgacctcgacctcgacgacgagggcaacatctacttcactgactctagcattcactaccaaagacgtctgtgatgccatgccctcgctctcttccctctgctttgcgcgcttggttggatgctcacttgattcctactgaccacggggatggtgatcgactgattgttaacatcacttgattcctctgctttatattgattcctactgaagatggacaatataaaaacctaaaatggaccaattctttctttgagggatacaaccctactctggtgtaacttatacttgttctagcacttggccctctgatctggtgaataagttatgcagaagaaaaattatgttttattttatatttaactgtactttgttgtagcttgtaggtactgatcagagggccaggtgctatccacgaatgatagtgtaatgtctaggaacgatagctgatttggaaaacctgcaaagtctattcacaacagcgaggtcatattttcatattgattttctgtacctgggactttggagaggggaacacgttccaaaaccggagcgtttcatcaccagccccagtaactatggtctgttggtatgacctcgctgaggttgttgccctcaccgagagcatcggcaagccgctcgccgaggtgctcaaggagctcgggaagagggttccagactcccttgtgaagacccgcatcgaggatgatggcttcactatcaaattttatttcgcttgtgggcaagtgaaatcatatgagagggcaataatctccgtggagcaactgaatgctattcttagacaggcttctaaaaccaaggaaaaggaagatctcaggaagatagataactggcaatatattagttgtgtcaccctatgggttcggtttctgtgttgtcactataaggattacaatctccatcccttattttctcaagttcttcaattgctctttgactgcctagaattaagagaagtttctcagaaagaacaaacacaaagaacaaagatcaacttttcgtctttgttgaaggtgccaaagaacctgctgaaaccaagggattttcaagaggagtgtattctttcagcgattcagattctatcagcacattttgcccagtggagttaccatgtttccttcctagaagtagccaccattcctcttgtcctcttgaagaggctacatgagcagacaacagttgaatcacttcgccatcctattaagtgtttgatagaccaggtgacggagaacaaggattttatagaaaggaaaagagaggttgtatccttttcaccaaatgataaggcgtcagttgatagcttccttcagtcaattgcttcacatttactattcaacatctggcctgctgagtttgctgaaaaacatattactgttgaatgcaggaggagaagtccacacagaatgtcggacagggacgccgtggcccccgcgggcggcggtgaccggaaggcggccaagctcgggagctggagcagcatgagcagcaactacggcaacaagaagcggaagagcagcagcagcagcttcgggaggagatccacatccacctgcgaggaaaggcagggggtcttccgcatgctcatgagctggaaccaggagagccggttcagcaacaagatcaagacgacgacgagcaaagaaagatgaacgaaacgaagtgttcttagcttggtgtgattattcggggggttgcttgctggagggtttttgttcgtttagtgtctagccttagcttacttattacttttgttag

SEQ ID NO: 854 - DNA, 2865 bp, Zea Mays
gttctgcctccggcaacccgccccgcccgcggccgcatccctcccgcatcccgcggccgcaccatcaacggcgcaacagccgcatccagtccctcccgcatcaacagcgtcgcagccagtccctcccgattcgcgcttaatccccgcatccagtccctcccgcatccagtccctcccgcggtgcaatccagacgcaaacaactccattgaccccgattcgcgtacatgctctctcacagcaatccctgctctctcctcgccaacgcctctcgataaactccatggaaggttcacactgatgcgctctgattccttgctccacgctctctcctgctctcgcgctctacatggaaggtgaggccgacgcccaaatcgacggaatccctgctctgcgctctcccctgctcccgcgctctacatggaaggcgaggccggcgcccaaatcgacgggatcactgctcggacaggattgcggcctcgatccgcgctctccagattcgcctagattgacagcgtccgcgccgcgcttgcccagatcgatggaatctaggtctccagatgcaagtccggggctcgctacccgtggaaggcgaggagagacgacgcatcggctctcgatccgtgctctacatggaaggtgaggcagatcggggggagtgtgtagagaaatccaagcgaaaccccgcgagagcgaggcgacggcggacggaggcgagtgggtgagccgcgggcgagagacgaggtagcgggctagcgcgatgccgtcgccggttgtagtggccgcgacgctgctggtggtagcactggcggcattctgcggcacggacccgctccggacggacagcatggtggacttcccggggtttgagtcccacctcgtcgacctccccaatcccgccgagatgccgacgcacgcggatgaatgggagcggctctgtggagccgatgtgcggttctgcggcgaggtgcaggggcccgagagcatcaccttcgaccagcagggccatacacgggcgtcgccgacggccgggtcgtcttctgggacggcgagcggagctccacggagggccgaaggcctcgccgctggagtatctcccagcgagcatatctgcaaccgcccgctcgggctctgtttcgataagactggggacctgtacatcgccgacgcctacttcggcttgctcaaagtccgccgcgaggccgggctggccacgctgctcgcaacggaggccgagggcgtgcgcttcaacttcaccaacgacctcgacctcgacctcgacgacgagggcaacatctacttcactgactctagcattcactaccaaagacgtactgatcagagggccaggtgctatccacgaatgatagtgtaatgtctaggaacgatagctgatttggaaaacctgcaaagtctattcacaacagcgaggtcatattttcatattgattttctgtacctgggactttggagaggggaacacgttccaaaaccggagcgtttcatcaccagccccagtaactatggtctgttggtatgacctcgctgaggttgttgccctcaccgagagcatcggcaagccgctcgccgaggtgctcaaggagctcgggaagagggttccagactcccttgtgaagacccgcatcgaggatgatggcttcactatcaactcgagaagagggttccagactcccttgtgaagacccacaactagagaaataggatggagagggaaatttactaagagaggacgtgtaacaaataaggccaggaattattagaatgaatggaaaatgtcctcatacacctttggagattttatttcgcttgtgggcaagtgaaatcatatgagagggcaataatctccgtggagcaactgaatgctattcttagacaggcttctaaaaccaaggaaaaggaagatctcaggaagatagataactggcaatatattagttgtgtcaccctatgggttcggtttctgtgttgtcactataaggattacaatctccatcccttattttctcaagttcttcaattgctctttgactgcctagaattaagagaagtttctcagaaagaacaaacacaaagaacaaagatcaacttttcgtctttgttgaaggtgccaaagaacctgctgaaaccaagggattttcaagaggagtgtattctttcagcgattcagattctatcagcacattttgcccagtggagttaccatgtttccttcctagaagtagccaccattcctcttgtcctcttgaagaggctacatgagcagacaacagttgaatcacttcgccatcctattaagtgtttgatagaccaggtgacggagaacaaggattttatagaaaggaaaagagaggttgtatccttttcaccaaatgataaggcgtcagttgatagcttccttcagtcaattgcttcacatttactattcaacatctggcctgctgagtttgctgaaaaacatattactgttgaatgcaggaggagaagtccacacagaatgtcggacagggacgccgtggcccccgcgggcggcggtgaccggaaggcggccaagctcgggagctggagcagcatgagcagcaactacggcaacaagaagcggaagagcagcagcagcagcttcgggaggagatccacatccacctgcgaggaaaggcagggggtcttccgcatgctcatgagctggaaccaggagagccggttcagcaacaagatcaagacgacgacgagcaaagaaagatgaacgaaacgaagtgttcttagcttggtgtgattattcggggggttgcttgctggagggtttttgttcgtttagtgtctagccttagcttacttattacttttgttag

SEQ ID NO: 855 - DNA, 3684 bp, Zea Mays
gttctgcctccggcaacccgccccgcccgcggccgcatccctcccgcatcccgcggccgcaccatcaacggcgcaacagccgcatccagtccctcccgcatcaacagcgtcgcagccagtccctcccgattcgcgcttaatccccgcatccagtccctcccgcatccagtccctcccgcggtgcaatccagacgcaaacaactccattgaccccgattcgcgtacatgctctctcacagcaatccctgctctctcctcgccaacgcctctcgataaactccatggaaggttcacactgatgcgctctgattccttgctccacgctctctcctgctctcgcgctctacatggaaggtgaggccgacgcccaaatcgacggaatccctgctctgcgctctcccctgctcccgcgctctacatggaaggcgaggccggcgcccaaatcgacgggatcactgctcggacaggattgcggcctcgatccgcgctctccagattcgcctagattgacagcgtccgcgccgcgcttgcccagatcgatggaatctaggtctccagatgcaagtccggggctcgctacccgtggaaggcgaggagagacgacgcatcggctctcgatccgtgctctacatggaaggtgaggcagatcggggggagtgtgtagagaaatccaagcgaaaccccgcgagagcgaggcgacggcggacggaggcgagtgggtgagccgcgggcgagagacgaggtagcgggctagcgcgatgccgtcgccggttgtagtggccgcgacgctgctggtggtagcactggcggcattctgcggcacggacccgctccggacggacagcatggtggacttcccggggtttgagtcccacctcgtcgacctccccaatcccgccgagatgccgacgcacgcggatgaatgggagcggctctgtggagccgatgtgcggttctgcggcgaggtgcaggggcccgagagcatcaccttcgaccagcagggccatacacgggcgtcgccgacggccgggtcgtcttctgggacggcgagcggtgggtcccattcgcgatggccttcccgtgctggacgcaggagctccacggagggccgaaggcctcgccgctggagtatctcccagcgagcatatctgcaaccgcccgctcgggctctgtttcgataagactggggacctgtacatcgccgacgcctacttcggcttgctcaaagtccgccgcgaggccgggctggccacgctgctcgcaacggaggccgagggcgtgcgcttcaacttcaccaacgacctcgacctcgacctcgacgacgagggcaacatctacttcactgactctagcattcactaccaaagacgtctgtgatgccatgccctcgctctcttccctctgctttgcgcgcttggttggatgctcacttgattcctactgaccacggggatggtgatcgactgattgttaacatcacttgattcctctgctttatattgattcctactgaagatggacaatataaaaacctaaaatggaccaattctttctttgagggatacaaccctactctggtgtaacttatacttgttctagcacttggccctctgatctggtgaataagttatgcagaagaaaaattatgttttattttatatttaactgtactttgttgtagcttgtaggtactgatcagagggccaggtgctatccacgaatgatagtgtaatgtctaggaacgatagctgatttggaaaacctgcaaagtctattcacaacaggtacactgccttcccaattaaggaaaaactgacactcatatcccattgaatttgctggctatgcatacctgttcagttcacaatgatataaccacttactttatgtaatgtgaatacgtttattaaaatagttatgatcagcatatccttccttaatcgacatatttttttcttctatgtaccttctattcaggttacgaatactgtaaagataatttagaatttctcatacaaatccttaaccactgtaaatatatggggaatttctaaaatgtgtttagattcatacatgtacaagtttgtattatgtttttatgcatatttatgaatctaccttataatcgattttatattgttgtctcacttattcctctttaaaacacacacttgctgttttcaaatttcaagtcactaattgttactgttcttcctcaaaaaaataccactgtaattaagttgccgatgcagtgatatataatggtcacctattatgaagaaatagtgaatgggagaagggttgagttttggagccggtgcatgcaaatcatataccaggtttatgctataatgttttccttatgaagaattaaatatttgtgtgtttgcacagcgaggtcatattttcatattgattttctgtacctgggactttggagaggggaacacgttccaaaaccggagcgtttcatcaccagccccagtaactatggtctgttggtatgacctcgctgaggttgttgccctcaccgagagcatcggcaagccgctcgccgaggtgctcaaggagctcgggaagagggttccagactcccttgtgaagacccgcatcgaggatgatggcttcactatcaaattttatttcgcttgtgggcaagtgaaatcatatgagagggcaataatctccgtggagcaactgaatgctattcttagacaggcttctaaaaccaaggaaaagatctcaggaagatagataactggcaatatattagttgtgtcaccctatgggttcggtttctgtgttgtcactataaggattacaatctccatcccttattttctcaagttcttcaattgctctttgactgcctagaattaagagaagtttctcagaaagaacaaacacaaagaacaaagatcaacttttcgtctttgttgaaggtgccaaagaacctgctgaaaccaagggattttcaagaggagtgtattctttcagcgattcagattctatcagcacattttgcccagtggagttaccatgtttccttcctagaagtagccaccattcctcttgtcctcttgaagaggctacatgagcagacaacagttgaatcacttcgccatcctattaagtgtttgatagaccaggtgacggagaacaaggattttatagaaaggaaaagagaggttgtatccttttcaccaaatgataaggcgtcagttgatagcttccttcagtcaattgcttcacatttactattcaacatctggcctgctgagtttgctgaaaaacatattactgttgaatgcaggaggagaagtccacacagaatgtcggacagggacgccgtggcccccgcgggcggcggtgaccggaaggcggccaagctcgggagctggagcagcatgagcagcaactacggcaacaagaagcggaagagcagcagcagcagcttcgggaggagatccacatccacctgcgaggaaaggcagggggtcttccgcatgctcatgagctggaaccaggagagccggttcagcaacaagatcaagacgacgacgagcaaagaaagatgaacgaaacgaagtgttcttagcttggtgtgattattcggggggttgcttgctggagggtttttgttcgtttagtgtctagccttagcttacttattacttttgttag

SEQ ID NO: 856 - DNA, 2949 bp, Zea Mays
gttctgcctccggcaacccgccccgcccgcggccgcatccctcccgcatcccgcggccgcaccatcaacggcgcaacagccgcatccagtccctcccgcatcaacagcgtcgcagccagtccctcccgattcgcgcttaatccccgcatccagtccctcccgcatccagtccctcccgcggtgcaatccagacgcaaacaactccattgaccccgattcgcgtacatgctctctcacagcaatccctgctctctcctcgccaacgcctctcgataaactccatggaaggttcacactgatgcgctctgattccttgctccacgctctctcctgctctcgcgctctacatggaaggtgaggccgacgcccaaatcgacggaatccctgctctgcgctctcccctgctcccgcgctctacatggaaggcgaggccggcgcccaaatcgacgggatcactgctcggacaggattgcggcctcgatccgcgctctccagattcgcctagattgacagcgtccgcgccgcgcttgcccagatcgatggaatctaggtctccagatgcaagtccggggctcgctacccgtggaaggcgaggagagacgacgcatcggctctcgatccgtgctctacatggaagcttgtaggtactgatcagagggccaggtgctatccacgaatgatagtgtaatgtctaggaacgatagctgatttggaaaacctgcaaagtctattcacaacaggtacactgccttcccaattaaggaaaaactgacactcatatcccattgaatttgctggctatgcatacctgttcagttcacaatgatataaccacttactttatgtaatgtgaatacgtttattaaaatagttatgatcagcatatccttccttaatcgacatatttttttcttctatgtaccttctattcaggttacgaatactgtaaagataatttagaatttctcatacaaatccttaaccactgtaaatatatggggaatttctaaaatgtgtttagattcatacatgtacaagtttgtattatgtttttatgcatatttatgaatctaccttataatcgattttatattgttgtctcacttattcctctttaaaacacacacttgctgttttcaaatttcaagtcactaattgttactgttcttcctcaaaaaaataccactgtaattaagttgccgatgcagtgatatataatggtcacctattatgaagaaatagtgaatgggagaagggttgagttttggagccggtgcatgcaaatcatataccaggtttatgctataatgttttccttatgaagaattaaatatttgtgtgtttgcacagcgaggtcatattttcatattgattttctgtacctgggactttggagaggggaacacgttccaaaaccggagcgtttcatcaccagccccagtaactatggtctgttggtatgacctcgctgaggttgttgccctcaccgagagcatcggcaagccgctcgccgaggtgctcaaggagctcgggaagagggttccagactcccttgtgaagacccgcatcgaggatgatggcttcactatcaactcgagaagagggttccagactcccttgtgaagacccacaactagagaaataggatggagagggaaatttactaagagaggacgtgtaacaaataaggccaggaattattagaatgaatggaaaatgtcctcatacacctttggagattttatttcgcttgtgggcaagtggtgatcagagtttgtctctatcggcaactgtttggatcactgtttaactaaatcctacaatacataccttgccagtaccaatcttgtgaatgacagaaacacaaagcatatttattttctgatggactgcctgtagagctgtattctcttgatgttcagaaatcatatgagagggcaataatctccgtggagcaactgaatgctattcttagacaggcttctaaaaccaaggaaaaggaagatctcaggaagatagataactggcaatatattagttgtgtcaccctatgggttcggtttctgtgttgtcactataaggattacaatctccatcccttattttctcaagttcttcaattgctctttgactgcctagaattaagagaagtttctcagaaagaacaaacacaaagaacaaagatcaacttttcgtctttgttgaaggtgccaaagaacctgctgaaaccaagggattttcaagaggagtgtattctttcagcgattcagattctatcagcacattttgcccagtggagttaccatgtttccttcctagaagtagccaccattcctcttgtcctcttgaagaggctacatgagcagacaacagttgaatcacttcgccatcctattaagtgtttgatagaccaggtgacggagaacaaggattttatagaaaggaaaagagaggttgtatccttttcaccaaatgataaggcgtcagttgatagcttccttcagtcaattgcttcacatttactattcaacatctggcctgctgagtttgctgaaaaacatattactgttgaatgcaggaggagaagtccacacagaatgtcggacagggacgccgtggcccccgcgggcggcggtgaccggaaggcggccaagctcgggagctggagcagcatgagcagcaactacggcaacaagaagcggaagagcagcagcagcagcttcgggaggagatccacatccacctgcgaggaaaggcagggggtcttccgcatgctcatgagctggaaccaggagagccggttcagcaacaagatcaagacgacgacgagcaaagaaagatgaacgaaacgaagtgttcttagcttggtgtgattattcggggggttgcttgctggagggtttttgttcgtttagtgtctagccttagcttacttattacttttgttag

SEQ ID NO: 857 - DNA, 1895 bp, Zea Mays
tctgcctccggcaacccgccccgcccgcggccgcatccctcccgcatcccgcggccgcaccatcaacggcgcaacagccgcatccagtccctcccgcatcaacagcgtcgcagccagtccctcccgattcgcgcttaatccccgcatccagtccctcccgcatccagtccctcccgcggtgcaatccagacgcaaacaactccattgaccccgattcgcgtacatgctctctcacagcaatccctgctctctcctcgccaacgcctctcgataaactccatggaaggttcacactgatgcgctctgattccttgctccacgctctctcctgctctcgcgctctacatggaagcttgtaggtactgatcagagggccaggtgctatccacgaatgatagtgtaatgtctaggaacgatagctgatttggaaaacctgcaaagtctattcacaacagcgaggtcatattttcatattgattttctgtacctgggactttggagaggggaacacgttccaaaaccggagcgtttcatcaccagccccagtaactatggtctgttggtatgacctcgctgaggttgttgccctcaccgagagcatcggcaagccgctcgccgaggtgctcaaggagctcgggaagagggttccagactcccttgtgaagacccgcatcgaggatgatggcttcactatcaactcgagaagagggttccagactcccttgtgaagacccacaactagagaaataggatggagagggaaatttactaagagaggacgtgtaacaaataaggccaggaattattagaatgaatggaaaatgtcctcatacacctttggagattttatttcgcttgtgggcaagtgaaatcatatgagagggcaataatctccgtggagcaactgaatgctattcttagacaggcttctaaaaccaaggaaaaggaagatctcaggaagatagataactggcaatatattagttgtgtcaccctatgggttcggtttctgtgttgtcactataaggattacaatctccatcccttattttctcaagttcttcaattgctctttgactgcctagaattaagagaagtttctcagaaagaacaaacacaaagaacaaagatcaacttttcgtctttgttgaaggtgccaaagaacctgctgaaaccaagggattttcaagaggagtgtattctttcagcgattcagattctatcagcacattttgcccagtggagttaccatgtttccttcctagaagtagccaccattcctcttgtcctcttgaagaggctacatgagcagacaacagttgaatcacttcgccatcctattaagtgtttgatagaccaggtgacggagaacaaggattttatagaaaggaaaagagaggttgtatccttttcaccaaatgataaggcgtcagttgatagcttccttcagtcaattgcttcacatttactattcaacatctggcctgctgagtttgctgaaaaacatattactgttgaatgcaggaggagaagtccacacagaatgtcggacagggacgccgtggcccccgcgggcggcggtgaccggaaggcggccaagctcgggagctggagcagcatgagcagcaactacggcaacaagaagcggaagagcagcagcagcagcttcgggaggagatccacatccacctgcgaggaaaggcagggggtcttccgcatgctcatgagctggaaccaggagagccggttcagcaacaagatcaagacgacgacgagcaaagaaagatgaacgaaacgaagtgttcttagcttggtgtgattattcggggggttgcttgctggagggtttttgttcgtttagtgtctagccttagcttacttattacttttgttag

SEQ ID NO: 858 - DNA, 2046 bp, Zea Mays
ctgcctccggcaacccgccccgcccgcggccgcatccctcccgcatcccgcggccgcaccatcaacggcgcaacagccgcatccagtccctcccgcatcaacagcgtcgcagccagtccctcccgattcgcgcttaatccccgcatccagtccctcccgcatccagtccctcccgcggtgcaatccagacgcaaacaactccattgaccccgattcgcgtacatgctctctcacagcaatccctgctctctcctcgccaacgcctctcgataaactccatggaaggttcacactgatgcgctctgattccttgctccacgctctctcctgctctcgcgctctacatggaaggtactgatcagagggccaggtgctatccacgaatgatagtgtaatgtctaggaacgatagctgatttggaaaacctgcaaagtctattcacaacagcgaggtcatattttcatattgattttctgtacctgggactttggagaggggaacacgttccaaaaccggagcgtttcatcaccagccccagtaactatggtctgttggtatgacctcgctgaggttgttgccctcaccgagagcatcggcaagccgctcgccgaggtgctcaaggagctcgggaagagggttccagactcccttgtgaagacccgcatcgaggatgatggcttcactatcaactcgagaagagggttccagactcccttgtgaagacccacaactagagaaataggatggagagggaaatttactaagagaggacgtgtaacaaataaggccaggaattattagaatgaatggaaaatgtcctcatacacctttggagattttatttcgcttgtgggcaagtggtgatcagagtttgtctctatcggcaactgtttggatcactgtttaactaaatcctacaatacataccttgccagtaccaatcttgtgaatgacagaaacacaaagcatatttattttctgatggactgcctgtagagctgtattctcttgatgttcagaaatcatatgagagggcaataatctccgtggagcaactgaatgctattcttagacaggcttctaaaaccaaggaaaaggaagatctcaggaagatagataactggcaatatattagttgtgtcaccctatgggttcggtttctgtgttgtcactataaggattacaatctccatcccttattttctcaagttcttcaattgctctttgactgcctagaattaagagaagtttctcagaaagaacaaacacaaagaacaaagatcaacttttcgtctttgttgaaggtgccaaagaacctgctgaaaccaagggattttcaagaggagtgtattctttcagcgattcagattctatcagcacattttgcccagtggagttaccatgtttccttcctagaagtagccaccattcctcttgtcctcttgaagaggctacatgagcagacaacagttgaatcacttcgccatcctattaagtgtttgatagaccaggtgacggagaacaaggattttatagaaaggaaaagagaggttgtatccttttcaccaaatgataaggcgtcagttgatagcttccttcagtcaattgcttcacatttactattcaacatctggcctgctgagtttgctgaaaaacatattactgttgaatgcaggaggagaagtccacacagaatgtcggacagggacgccgtggcccccgcgggcggcggtgaccggaaggcggccaagctcgggagctggagcagcatgagcagcaactacggcaacaagaagcggaagagcagcagcagcagcttcgggaggagatccacatccacctgcgaggaaaggcagggggtcttccgcatgctcatgagctggaaccaggagagccggttcagcaacaagatcaagacgacgacgagcaaagaaagatgaacgaaacgaagtgttcttagcttggtgtgattattcggggggttgcttgctggagggtttttgttcgtttagtgtctagccttagcttacttattacttttgttag

SEQ ID NO: 859 - DNA, 2664 bp, Zea Mays
ctgcctccggcaacccgccccgcccgcggccgcatccctcccgcatcccgcggccgcaccatcaacggcgcaacagccgcatccagtccctcccgcatcaacagcgtcgcagccagtccctcccgattcgcgcttaatccccgcatccagtccctcccgcatccagtccctcccgcggtgcaatccagacgcaaacaactccattgaccccgattcgcgtacatgctctctcacagcaatccctgctctctcctcgccaacgcctctcgataaactccatggaagagggccaggtgctatccacgaatgatagtgtaatgtctaggaacgatagctgatttggaaaacctgcaaagtctattcacaacaggtacactgccttcccaattaaggaaaaactgacactcatatcccattgaatttgctggctatgcatacctgttcagttcacaatgatataaccacttactttatgtaatgtgaatacgtttattaaaatagttatgatcagcatatccttccttaatcgacatatttttttcttctatgtaccttctattcaggttacgaatactgtaaagataatttagaatttctcatacaaatccttaaccactgtaaatatatggggaatttctaaaatgtgtttagattcatacatgtacaagtttgtattatgtttttatgcatatttatgaatctaccttataatcgattttatattgttgtctcacttattcctctttaaaacacacacttgctgttttcaaatttcaagtcactaattgttactgttcttcctcaaaaaaataccactgtaattaagttgccgatgcagtgatatataatggtcacctattatgaagaaatagtgaatgggagaagggttgagttttggagccggtgcatgcaaatcatataccaggtttatgctataatgttttccttatgaagaattaaatatttgtgtgtttgcacagcgaggtcatattttcatattgattttctgtacctgggactttggagaggggaacacgttccaaaaccggagcgtttcatcaccagccccagtaactatggtctgttggtatgacctcgctgaggttgttgccctcaccgagagcatcggcaagccgctcgccgaggtgctcaaggagctcgggaagagggttccagactcccttgtgaagacccgcatcgaggatgatggcttcactatcaagtacattcctaggattacccggactagatttagctcttgtgattttgcattctactacattttacttgttctgctgcattgacagctcgagaagagggttccagactcccttgtgaagacccacaactagagaaataggatggagagggaaatttactaagagaggacgtgtaacaaataaggccaggaattattagaatgaatggaaaatgtcctcatacacctttggagattttatttcgcttgtgggcaagtggtgatcagagtttgtctctatcggcaactgtttggatcactgtttaactaaatcctacaatacataccttgccagtaccaatcttgtgaatgacagaaacacaaagcatatttattttctgatggactgcctgtagagctgtattctcttgatgttcagaaatcatatgagagggcaataatctccgtggagcaactgaatgctattcttagacaggcttctaaaaccaaggaaaaggaagatctcaggaagatagataactggcaatatattagttgtgtcaccctatgggttcggtttctgtgttgtcactataaggattacaatctccatcccttattttctcaagttcttcaattgctctttgactgcctagaattaagagaagtttctcagaaagaacaaacacaaagaacaaagatcaacttttcgtctttgttgaaggtgccaaagaacctgctgaaaccaagggattttcaagaggagtgtattctttcagcgattcagattctatcagcacattttgcccagtggagttaccatgtttccttcctagaagtagccaccattcctcttgtcctcttgaagaggctacatgagcagacaacagttgaatcacttcgccatcctattaagtgtttgatagaccaggtgacggagaacaaggattttatagaaaggaaaagagaggttgtatccttttcaccaaatgataaggcgtcagttgatagcttccttcagtcaattgcttcacatttactattcaacatctggcctgctgagtttgctgaaaaacatattactgttgaatgcaggaggagaagtccacacagaatgtcggacagggacgccgtggcccccgcgggcggcggtgaccggaaggcggccaagctcgggagctggagcagcatgagcagcaactacggcaacaagaagcggaagagcagcagcagcagcttcgggaggagatccacatccacctgcgaggaaaggcagggggtcttccgcatgctcatgagctggaaccaggagagccggttcagcaacaagatcaagacgacgacgagcaaagaaagatgaacgaaacgaagtgttcttagcttggtgtgattattcggggggttgcttgctggagggtttttgttcgtttagtgtctagccttagcttacttattacttttgttag

SEQ ID NO: 860 - DNA, 1255 bp, Zea Mays
ctccggcaacccgccccgcccgcggccgcatccctcccgcatcccgcggccgcaccatcaacggcgcaacagccgcatccagtccctcccgcatcaacagcgtcgcagccagtccctcccgattcgcgcttaatccccgcatccagtccctcccgcatccagtccctcccgcggtgcaatccagacgcaaacaactccattgaccccgattcgcgtacatgctctctcacagcaatccctgctctctcctcgccaacgcctctcgataaactccatggaagcttgtaggtactgatcagagggccaggtgctatccacgaatgatagtgtaatgtctaggaacgatagctgatttggaaaacctgcaaagtctattcacaacaggtacactgccttcccaattaaggaaaaactgacactcatatcccattgaatttgctggctatgcatacctgttcagttcacaatgatataaccacttactttatgtaatgtgaatacgtttattaaaatagttatgatcagcatatccttccttaatcgacatatttttttcttctatgtaccttctattcaggttacgaatactgtaaagataatttagaatttctcatacaaatccttaaccactgtaaatatatggggaatttctaaaatgtgtttagattcatacatgtacaagtttgtattatgtttttatgcatatttatgaatctaccttataatcgattttatattgttgtctcacttattcctctttaaaacacacacttgctgttttcaaatttcaagtcactaattgttactgttcttcctcaaaaaaataccactgtaattaagttgccgatgcagtgatatataatggtcacctattatgaagaaatagtgaatgggagaagggttgagttttggagccggtgcatgcaaatcatataccaggtttatgctataatgttttccttatgaagaattaaatatttgtgtgtttgcacagcgaggtcatattttcatattgattttctgtacctgggactttggagaggggaacacgttccaaaaccggagcgtttcatcaccagccccagtaactatggtctgttggtatgacctcgctgaggttgttgccctcaccgagagcatcggcaagccgctcgccgaggtgctcaaggagctcgggaagagggttccagactcccttgtgaagacccgcatcgaggatgatggcttcactatcaactcgagaagagggttccag

SEQ ID NO: 861 - DNA, 2021 bp, Zea Mays
cggcaacccgccccgcccgcggccgcatccctcccgcatcccgcggccgcaccatcaacggcgcaacagccgcatccagtccctcccgcatcaacagcgtcgcagccagtccctcccgattcgcgcttaatccccgcatccagtccctcccgcatccagtccctcccgcggtgcaatccagacgcaaacaactccattgaccccgattcgcgtacatgctctctcacagcaatccctgctctctcctcgccaacgcctctcgataaactccatggaagcttgtaggtactgatcagagggccaggtgctatccacgaatgatagtgtaatgtctaggaacgatagctgatttggaaaacctgcaaagtctattcacaacagtgatatataatggtcacctattatgaagaaatagtgaatgggagaagggttgagttttggagccggtgcatgcaaatcatataccagaggggaacacgttccaaaaccggagcgtttcatcaccagccccagtaactatggtctgttggtatgacctcgctgaggttgttgccctcaccgagagcatcggcaagccgctcgccgaggtgctcaaggagctcgggaagagggttccagactcccttgtgaagacccgcatcgaggatgatggcttcactatcaactcgagaagagggttccagactcccttgtgaagacccacaactagagaaataggatggagagggaaatttactaagagaggacgtgtaacaaataaggccaggaattattagaatgaatggaaaatgtcctcatacacctttggagattttatttcgcttgtgggcaagtggtgatcagagtttgtctctatcggcaactgtttggatcactgtttaactaaatcctacaatacataccttgccagtaccaatcttgtgaatgacagaaacacaaagcatatttattttctgatggactgcctgtagagctgtattctcttgatgttcagaaatcatatgagagggcaataatctccgtggagcaactgaatgctattcttagacaggcttctaaaaccaaggaaaaggaagatctcaggaagatagataactggcaatatattagttgtgtcaccctatgggttcggtttctgtgttgtcactataaggattacaatctccatcccttattttctcaagttcttcaattgctctttgactgcctagaattaagagaagtttctcagaaagaacaaacacaaagaacaaagatcaacttttcgtctttgttgaaggtgccaaagaacctgctgaaaccaagggattttcaagaggagtgtattctttcagcgattcagattctatcagcacattttgcccagtggagttaccatgtttccttcctagaagtagccaccattcctcttgtcctcttgaagaggctacatgagcagacaacagttgaatcacttcgccatcctattaagtgtttgatagaccaggtgacggagaacaaggattttatagaaaggaaaagagaggttgtatccttttcaccaaatgataaggcgtcagttgatagcttccttcagtcaattgcttcacatttactattcaacatctggcctgctgagtttgctgaaaaacatattactgttgaatgcaggaggagaagtccacacagaatgtcggacagggacgccgtggcccccgcgggcggcggtgaccggaaggcggccaagctcgggagctggagcagcatgagcagcaactacggcaacaagaagcggaagagcagcagcagcagcttcgggaggagatccacatccacctgcgaggaaaggcagggggtcttccgcatgctcatgagctggaaccaggagagccggttcagcaacaagatcaagacgacgacgagcaaagaaagatgaacgaaacgaagtgttcttagcttggtgtgattattcggggggttgcttgctggagggtttttgttcgtttagtgtctagccttagcttacttattacttttgttag

SEQ ID NO: 862 - DNA, 1961 bp, Zea Mays
cggccgcatccctcccgcatcccgcggccgcaccatcaacggcgcaacagccgcatccagtccctcccgcatcaacagcgtcgcagccagtccctcccgattcgcgcttaatccccgcatccagtccctcccgcatccagtccctcccgcggtgcaatccagacgcaaacaactccattgaccccgattcgcgtacatgctctctcacagcaatccctgctctctcctcgccaacgcctctcgataaactccatggaagcttgtaggtactgatcagagggccaggtgctatccacgaatgatagtgtaatgtctaggaacgatagctgatttggaaaacctgcaaagtctattcacaacagcgaggtcatattttcatattgattttctgtacctgggactttggagaggggaacacgttccaaaaccggagcgtttcatcaccagccccagtaactatggtctgttggtatgacctcgctgaggttgttgccctcaccgagagcatcggcaagccgctcgccgaggtgctcaaggagctcgggaagagggttccagactcccttgtgaagacccgcatcgaggatgatggcttcactatcaactcgagaagagggttccagactcccttgtgaagacccacaactagagaaataggatggagagggaaatttactaagagaggacgtgtaacaaataaggccaggaattattagaatgaatggaaaatgtcctcatacacctttggagattttatttcgcttgtgggcaagtggtgatcagagtttgtctctatcggcaactgtttggatcactgtttaactaaatcctacaatacataccttgccagtaccaatcttgtgaatgacagaaacacaaagcatatttattttctgatggactgcctgtagagctgtattctcttgatgttcagaaatcatatgagagggcaataatctccgtggagcaactgaatgctattcttagacaggcttctaaaaccaaggaaaaggaagatctcaggaagatagataactggcaatatattagttgtgtcaccctatgggttcggtttctgtgttgtcactataaggattacaatctccatcccttattttctcaagttcttcaattgctctttgactgcctagaattaagagaagtttctcagaaagaacaaacacaaagaacaaagatcaacttttcgtctttgttgaaggtgccaaagaacctgctgaaaccaagggattttcaagaggagtgtattctttcagcgattcagattctatcagcacattttgcccagtggagttaccatgtttccttcctagaagtagccaccattcctcttgtcctcttgaagaggctacatgagcagacaacagttgaatcacttcgccatcctattaagtgtttgatagaccaggtgacggagaacaaggattttatagaaaggaaaagagaggttgtatccttttcaccaaatgataaggcgtcagttgatagcttccttcagtcaattgcttcacatttactattcaacatctggcctgctgagtttgctgaaaaacatattactgttgaatgcaggaggagaagtccacacagaatgtcggacagggacgccgtggcccccgcgggcggcggtgaccggaaggcggccaagctcgggagctggagcagcatgagcagcaactacggcaacaagaagcggaagagcagcagcagcagcttcgggaggagatccacatccacctgcgaggaaaggcagggggtcttccgcatgctcatgagctggaaccaggagagccggttcagcaacaagatcaagacgacgacgagcaaagaaagatgaacgaaacgaagtgttcttagcttggtgtgattattcggggggttgcttgctggagggtttttgttcgtttagtgtctagccttagcttacttattacttttgttag

SEQ ID NO: 863 - DNA, 2248 bp, Zea Mays
catccctcccgcatcccgcggccgcaccatcaacggcgcaacagccgcatccagtccctcccgcatcaacagcgtcgcagccagtccctcccgattcgcgcttaatccccgcatccagtccctcccgcatccagtccctcccgcggtgcaatccagacgcaaacaactccattgaccccgattcgcgtacatgctctctcacagcaatccctgctctctcctcgccaacgcctctcgataaactccatggaaggttcacactgatgcgctctgattccttgctccacgctctctcctgctctcgcgctctacatggaagcttgtaggtactgatcagagggccaggtgctatccacgaatgatagtgtaatgtctaggaacgatagctgatttggaaaacctgcaaagtctattcacaacagtgatatataatggtcacctattatgaagaaatagtgaatgggagaagggttgagttttggagccggtgcatgcaaatcatataccaggtttatgctataatgttttccttatgaagaattaaatatttgtgtgtttgcacagcgaggtcatattttcatattgattttctgtacctgggactttggagaggggaacacgttccaaaaccggagcgtttcatcaccagccccagtaactatggtctgttggtatgacctcgctgaggttgttgccctcaccgagagcatcggcaagccgctcgccgaggtgctcaaggagctcgggaagagggttccagactcccttgtgaagacccgcatcgaggatgatggcttcactatcaagtacattcctaggattacccggactagatttagctcttgtgattttgcattctactacattttacttgttctgctgcattgacagctcgagaagagggttccagactcccttgtgaagacccacaactagagaaataggatggagagggaaatttactaagagaggacgtgtaacaaataaggccaggaattattagaatgaatggaaaatgtcctcatacacctttggagattttatttcgcttgtgggcaagtggtgatcagagtttgtctctatcggcaactgtttggatcactgtttaactaaatcctacaatacataccttgccagtaccaatcttgtgaatgacagaaacacaaagcatatttattttctgatggactgcctgtagagctgtattctcttgatgttcagaaatcatatgagagggcaataatctccgtggagcaactgaatgctattcttagacaggcttctaaaaccaaggaaaaggaagatctcaggaagatagataactggcaatatattagttgtgtcaccctatgggttcggtttctgtgttgtcactataaggattacaatctccatcccttattttctcaagttcttcaattgctctttgactgcctagaattaagagaagtttctcagaaagaacaaacacaaagaacaaagatcaacttttcgtctttgttgaaggtgccaaagaacctgctgaaaccaagggattttcaagaggagtgtattctttcagcgattcagattctatcagcacattttgcccagtggagttaccatgtttccttcctagaagtagccaccattcctcttgtcctcttgaagaggctacatgagcagacaacagttgaatcacttcgccatcctattaagtgtttgatagaccaggtgacggagaacaaggattttatagaaaggaaaagagaggttgtatccttttcaccaaatgataaggcgtcagttgatagcttccttcagtcaattgcttcacatttactattcaacatctggcctgctgagtttgctgaaaaacatattactgttgaatgcaggaggagaagtccacacagaatgtcggacagggacgccgtggcccccgcgggcggcggtgaccggaaggcggccaagctcgggagctggagcagcatgagcagcaactacggcaacaagaagcggaagagcagcagcagcagcttcgggaggagatccacatccacctgcgaggaaaggcagggggtcttccgcatgctcatgagctggaaccaggagagccggttcagcaacaagatcaagacgacgacgagcaaagaaagatgaacgaaacgaagtgttcttagcttggtgtgattattcggggggttgcttgctggagggtttttgttcgtttagtgtctagccttagcttacttattacttttgttag

SEQ ID NO: 864 - DNA, 2460 bp, Zea Mays
atcccgcggccgcaccatcaacggcgcaacagccgcatccagtccctcccgcatcaacagcgtcgcagccagtccctcccgattcgcgcttaatccccgcatccagtccctcccgcatccagtccctcccgcggtgcaatccagacgcaaacaactccattgaccccgattcgcgtacatgctctctcacagcaatccctgctctctcctcgccaacgcctctcgataaactccatggaaggttcacactgatgcgctctgattccttgctccacgctctctcctgctctcgcgctctacatggaagcttgtaggtactgatcagagggccaggtgctatccacgaatgatagtgtaatgtctaggaacgatagctgatttggaaaacctgcaaagtctattcacaacaggtacactgccttcccaattaaggaaaaactgacactcatatcccattgaatttgctggctatgcatacctgttcagttcacaatgatataaccacttactttatgtaatgtgaatacgtttattaaaatagttatgatcagcatatccttccttaatcgacatatttttttcttctatgtaccttctattcaggttacgaatactgtaaagataatttagaatttctcatacaaatccttaaccactgtaaatatatggggaatttctaaaatgtgtttagattcatacatgtacaagtttgtattatgtttttatgcatatttatgaatctaccttataatcgattttatattgttgtctcacttattcctctttaaaacacacacttgctgttttcaaatttcaagtcactaattgttactgttcttcctcaaaaaaataccactgtaattaagttgccgatgcagtgatatataatggtcacctattatgaagaaatagtgaatgggagaagggttgagttttggagccggtgcatgcaaatcatataccaggtttatgctataatgttttccttatgaagaattaaatatttgtgtgtttgcacagcgaggtcatattttcatattgattttctgtacctgggactttggagaggggaacacgttccaaaaccggagcgtttcatcaccagccccagtaactatggtctgttggtatgacctcgctgaggttgttgccctcaccgagagcatcggcaagccgctcgccgaggtgctcaaggagctcgggaagagggttccagactcccttgtgaagacccgcatcgaggatgatggcttcactatcaactcgagaagagggttccagactcccttgtgaagacccacaactagagaaataggatggagagggaaatttactaagagaggacgtgtaacaaataaggccaggaattattagaatgaatggaaaatgtcctcatacacctttggagattttatttcgcttgtgggcaagtgaaatcatatgagagggcaataatctccgtggagcaactgaatgctattcttagacaggcttctaaaaccaaggaaaaggaagatctcaggaagatagataactggcaatatattagttgtgtcaccctatgggttcggtttctgtgttgtcactataaggattacaatctccatcccttattttctcaagttcttcaattgctctttgactgcctagaattaagagaagtttctcagaaagaacaaacacaaagaacaaagatcaacttttcgtctttgttgaaggtgccaaagaacctgctgaaaccaagggattttcaagaggagtgtattctttcagcgattcagattctatcagcacattttgcccagtggagttaccatgtttccttcctagaagtagccaccattcctcttgtcctcttgaagaggctacatgagcagacaacagttgaatcacttcgccatcctattaagtgtttgatagaccaggtgacggagaacaaggattttatagaaaggaaaagagaggttgtatccttttcaccaaatgataaggcgtcagttgatagcttccttcagtcaattgcttcacatttactattcaacatctggcctgctgagtttgctgaaaaacatattactgttgaatgcaggaggagaagtccacacagaatgtcggacagggacgccgtggcccccgcgggcggcggtgaccggaaggcggccaagctcgggagctggagcagcatgagcagcaactacggcaacaagaagcggaagagcagcagcagcagcttcgggaggagatccacatccacctgcgaggaaaggcagggggtcttccgcatgctcatgagctggaaccaggagagccggttcagcaacaagatcaagacgacgacgagcaaagaaagatgaacgaaacgaagtgttcttagcttggtgtgattattcggggggttgcttgctggagggtttttgttcgtttagtgtctagccttagcttacttattacttttgttag

SEQ ID NO: 865 - DNA, 832 bp, Zea Mays
ctcacttattcccaggcacaagaattaagagaagtttctcagaaagaacaaacacaaagaacaaagatcaacttttcgtctttgttgaaggtgccaaagaacctgctgaaaccaagggattttcaagaggagtgtattctttcagcgattcagattctatcagcacattttgcccagtggagttaccatgtttccttcctagaagtagccaccattcctcttgtcctcttgaagaggctacatgagcagacaacagttgaatcacttcgccatcctattaagtgtttgatagaccaggtgacggagaacaaggattttatagaaaggaaaagagaggttgtatccttttcaccaaatgataaggcgtcagttgatagcttccttcagtcaattgcttcacatttactattcaacatctggcctgctgagtttgctgaaaaacatattactgttgaatgcaggaggagaagtccacacagaatgtcggacagggacgccgtggcccccgcgggcggcggtgaccggaaggcggccaagctcgggagctggagcagcatgagcagcaactacggcaacaagaagcggaagagcagcagcagcagcttcgggaggagatccacatccacctgcgaggaaaggcagggggtcttccgcatgctcatgagctggaaccaggagagccggttcagcaacaagatcaagacgacgacgagcaaagaaagatgaacgaaacgaagtgttcttagcttggtgtgattattcggggggttgcttgctggagggtttttgttcgtttagtgtctagccttagcttacttattacttttgttag

SEQ ID NO: 866 - DNA, 2061 bp, Zea Mays
gtttccctttccctgctcactccaaactttagagtatgcgatagagtggttggctgcgggatttttttactgcaaacgttactcatagggaatcattgacagtccgccgctgcgtatagcgtgaccacgttatttgacgacgtaggataataatggtaatgttataaaagtggagatgtttagatctcgagtttaattagacagaaatataaaaccctttttaagggacgatggccgaaaccaaactggtgctttttaccgtttcctttgttgcaaacgctaaatttctcacgaattcttccgtcgtcggcggcgcagattgaatgccaaaaccctagctcgccctccccaattccccatttcggccacaccctccttgcctccacggctccacccctgcttcaggttacctgtgccagcgacgccggtagaagccatggacagctctctcgcgagcgcggcggcgatagccgatcagcgccagaagatcgagcagtaccgccacatcctcgcctccgtcctctcgtcttccccaccggacatctctcaggccaagcgcttcctcgaccacatggtttcggacgaagttccgctcgtggtgtcgcgtcaattgctccagacgttcgcgcaggacctagggaagctggagtcggacgcgcagaaggaggttgcccactacgcgctcacgcagatccagccgcgtgtggtctccttcgaggagcaggtggtagtgattagagagaagcttgcagagctatatgagtctgaacaacaatggtcaaaagcagcacaaatgcttagtgggattgacttggattcaggaatcaggatgcttgatgacaccaacaaattatccaagtgtgttcaaattgcacgactctatttagaggatgatgatgcagtgaatgctgaggcttttataaacaaggcttcatttttggtcaccaacagccatcaggaggttctaaacttacagtacaaggtctgttatgcaaggattttggatctgaaaagaagatttctggaagctgcacttcgatattatgacatttctcaaattgaacaacgcaagattggagacgaagagattgatgaaaatgcactagaacaagctcttagtgctgctgtgacatgcacaatattggctggtgctggtccacaacgctcccgtgttcttgctactctgtacaaggtggtgcaacaaataccaattaatctggatgtttatggcttttctggtaaatatgggttgacagaaattatagcttctggcttgagctgggtggtttcagatcttgtccagtgccaaccagatgaaagatgctcgaagttgaaaatatacccaatactgcagaaggtttaccttgaaagaattttgaggaaaccagaaattgatgcatttgcagaggagctgaggccgcatcaaaaagctttattaccagataagtcgactgtgcttgaccgagcaatgatcgagcataatctccttagtgccagtaaactttacacaaatatcagctttgatgagcttgggacattactggggattgatccaaggaaggctgagaagatagcatctcggatgatttatgaggatagaatgcggggctcaattgatcaggttgaggctgtgatacattttgatgatgacacggaagagctgcagcaatgggatcagcagattgctggactgtgccaagccctgaacgacatccttgacagcatgtcaagcaagggaataactattccggtgtgaataaatatctcatgctgtcggtcgatggtgcatggcagaactgcttccatgccccggaatccagaatcaacattttgtatagtttgcagctgcaaatgtgtatcttgtgattttggggggaggatgcttgtttaagtaacgctcactggataccttgtagcactactgtttcaagagcgctcgaatgattcagtaagggctttcggtttcatcagaatccatatgtggattggctgagtttcaatccatagcaagtcaaaattctttataatttttccaaactttttcaatccctgaggcatagg

SEQ ID NO: 867 - DNA, 2440 bp, Zea Mays
gggaatcattgacagtccgccgctgcgtatagcgtgaccacgttatttgacgacgtaggataataatggtaatgttataaaagtggagatgtttagatctcgagtttaattagacagaaatataaaaccctttttaagggacgatggccgaaaccaaactggtgctttttaccgtttcctttgttgcaaacgctaaatttctcacgaattcttccgtcgtcggcggcgcagattgaatgccaaaaccctagctcgccctccccaattccccatttcggccacaccctccttgcctccacggctccacccctgcttcaggttacctgtgccagcgacgccggtagaagccatggacagctctctcgcgagcgcggcggcgatagccgatcagcgccagaagatcgagcagtaccgccacatcctcgcctccgtcctctcgtcttccccaccggacatctctcaggccaagcgcttcctcgaccacatggtttcggacgaagttccgctcgtggtgtcgcgtcaattgctccagacgttcgcgcaggacctagggaagctggagtcggacgcgcagaaggaggttgcccactacgcgctcacgcagatccagccgcgtgtggtctccttcgaggagcaggtggtagtgattagagagaagcttgcagagctatatgagtctgaacaacaatggtcaaaagcagcacaaatgcttagtgggattgacttggattcaggaatcaggatgcttgatgacaccaacaaattatccaagtgtgttcaaattgcacgactctatttagaggatgatgatgcagtgaatgctgaggcttttataaacaaggcttcatttttggtcaccaacagccatcaggaggttctaaacttacagtacaaggtctgttatgcaaggattttggatctgaaaagaagatttctggaagctgcacttcgatattatgacatttctcaaattgaacaacgcaagattggagacgaagagattgatgaaaatgcactagaacaagctcttagtgctgctgtgacatgcacaatattggctggtgctggtccacaacgctcccgtgttcttgctactctgtacaaggtaagattgttgtagttttatctcaatgtccttggattacgtgctggtagtacccattctcagctgtgttgctactctgtacaaggtaagatttttgtagttttatctcaatgtccttggattacgtgctggtagtacccattctcagctgtgttttgcaattgtgagcatcggaatacaactatctagatgcattacgtgttaaatgccttggatttgttcatgtcatctatataaaaacatgtttcatgtttagcttatcatagtttatagttgagactgtaatactcatctctcacttgttttctgtcaaggtggtgcaacaaataccaattaatctggatgtttatggcttttctggtaaatatgggttgacagaaattatagcttctggcttgagctgggtggtttcagatcttgtccagtgccaaccagtgtgtatatatacatttttaaggtcttgtaacctagataattagtgtcaacttcgaggctgcgagtccacaccttatctaccgtgcttgtctctttttctttatttacacatgcatttattttgcctcttattgcattatgcccctttcaggatgaaagatgctcgaagttgaaaatatacccaatactgcagaaggtttaccttgaaagaattttgaggaaaccagaaattgatgcatttgcagaggagctgaggccgcatcaaaaagctttattaccagataagtcgactgtgcttgaccgagcaatgatcgagcataatctccttagtgccagtaaactttacacaaatatcagctttgatgagcttgggacattactggggattgatccaaggaaggctgagaagatagcatctcggatgatttatgaggatagaatgcggggctcaattgatcaggttgaggctgtgatacattttgatgatgacacggaagagctgcagcaatgggatcagcagattgctggactgtgccaagccctgaacgacatccttgacagcatgtcaagcaagggaataactattccggtgtgaataaatatctcatgctgtcggtcgatggtgcatggcagaactgcttccatgccccggaatccagaatcaacattttgtatagtttgcagctgcaaatgtgtatcttgtgattttggggggaggatgcttgtttaagtaacgctcactggataccttgtagcactactgtttcaagagcgctcgaatgattcagtaagggctttcggtttcatcagaatccatatgtggattggctgagtttcaatccatagcaagtcaaaattctttataatttttccaaactttttcaatccctgaggcatagg

SEQ ID NO: 868 - DNA, 1591 bp, Zea Mays
ataaaaccctttttaagggacgatggccgaaaccaaactggtgctttttaccgtttcctttgttgcaaacgctaaatttctcacgaattcttccgtcgtcggcggcgcagattgaatgccaaaaccctagctcgccctccccaattccccatttcggccacaccctccttgcctccacggctccacccctgcttcaggttacctgtgccagcgacgccggtagaagccatggacagctctctcgcgagcgcggcggcgatagccgatcagcgccagaagatcgagcagtaccgccacatcctcgcctccgtcctctcgtcttccccaccggacatctctcaggccaagcgcttcctcgaccacatggtttcggacgaagttccgctcgtggtgtcgcgtcaattgctccagacgttcgcgcaggacctagggaagctggagtcggacgcgcagaaggaggttgcccactacgcgctcacgcagatccagccgcgtgtggtctccttcgaggagcaggtggtagtgattagagagaagcttgcagagctatatgagtctgaacaacaatggtcaaaagcagcacaaatgcttagtgggattgacttggattcaggaatcaggatgcttgatgacaccaacaaattatccaagtgtgttcaaattgcacgactctatttagaggatgatgatgcagtgaatgctgaggcttttataaacaaggcttcatttttggtcaccaacagccatcaggaggttctaaacttacagtacaaggtctgttatgcaaggattttggatctgaaaagaagatttctggaagctgcacttcgatattatgacatttctcaaattgaacaacgcaagattggagacgaagagattgatgaaaatgcactagaacaagctcttagtgctgctgtgacatgcacaatattggctggtgctggtccacaacgctcccgtgttcttgctactctgtacaaggtggtgcaacaaataccaattaatctggatgtttatggcttttctggtaaatatgggttgacagaaattatagcttctggcttgagctgggtggtttcagatcttgtccagtgccaaccagtgtgtatatatacatttttaaggtcttgtaacctagataattagtgtcaacttcgaggctgcgagtccacaccttatctaccgtgcttgtctctttttctttatttacacatgcatttattttgcctcttattgcattatgcccctttcaggatgaaagatgctcgaagttgaaaatatacccaatactgcagaaggtttaccttgaaagaattttgaggaaaccagaaattgatgcatttgcagaggagctgaggccgcatcaaaaagctttattaccagataagtcgactgtgcttgaccgagcaatgatcgagcataatctccttagtgccagtaaactttacacaaatatcagctttgatgagcttgggacattactggggattgatccaaggaaggctgagaagatagcatctcggatgatttatgaggatagaatgcggggctcaattgatcagatttgcctttgtaagttgatagtgac

SEQ ID NO: 869 - DNA, 1251 bp, Zea Mays
aaaccctttttaagggacgatggccgaaaccaaactggtgctttttaccgtttcctttgttgcaaacgctaaatttctcacgaattcttccgtcgtcggcggcgcagattgaatgccaaaaccctagctcgccctccccaattccccatttcggccacaccctccttgcctccacggctccacccctgcttcaggttacctgtgccagcgacgccggtagaagccatggacagctctctcgcgagcgcggcggcgatagccgatcagcgccagaagatcgagcagtaccgccacatcctcgcctccgtcctctcgtcttccccaccggacatctctcaggccaagcgcttcctcgaccacatggtttcggacgaagttccgctcgtggtgtcgcgtcaattgctccagacgttcgcgcaggacctagggaagctggagtcggacgcgcagaaggaggttgcccactacgcgctcacgcagatccagccgcgtgtggtctccttcgaggagcaggtggtagtgattagagagaagcttgcagagctatatgagtctgaacaacaatggtcaaaagcagcacaaatgcttagtgggattgacttggattcaggaatcaggatgcttgatgacaccaacaaattatccaagtgtgttcaaattgcacgactctatttagaggatgatgatgcagtgaatgctgaggcttttataaacaaggcttcatttttggtcaccaacagccatcaggaggttctaaacttacagtacaaggtctgttatgcaaggattttggatctgaaaagaagatttctggaagctgcacttcgatattatgacatttctcaaattgaacaacgcaagattggagacgaagagattgatgaaaatgcactagaacaagctcttagtgctgctgtgacatgcacaatattggctggtgctggtccacaacgctcccgtgttcttgctactctgtacaaggatgaaagatgctcgaagttgaaaatatacccaatactgcagaaggtttaccttgaaagaattttgaggaaaccagaaattgatgcatttgcagaggagctgaggccgcatcaaaaagctttattaccagataagtcgactgtgcttgaccgagcaatgatcgagcataatctccttagtgccagtaaactttacacaaatatcagctttgatgagcttgggacattactggggattgatccaaggaagttccctatatttggatatttg

SEQ ID NO: 870 - DNA, 759 bp, Zea Mays
ggcttttctggatgaaagatgctcgaagttgaaaatatacccaatactgcagaaggtttaccttgaaagaattttgaggaaaccagaaattgatgcatttgcagaggagctgaggccgcatcaaaaagctttattaccagataagtcgactgtgcttgaccgagcaatgatcgagcataatctccttagtgccagtaaactttacacaaatatcagctttgatgagcttgggacattactggggattgatccaaggaaggctgagaagatagcatctcggatgatttatgaggatagaatgcggggctcaattgatcaggttgaggctgtgatacattttgatgatgacacggaagagctgcagcaatgggatcagcagattgctggactgtgccaagccctgaacgacatccttgacagcatgtcaagcaagggaataactattccggtgtgaataaatatctcatgctgtcggtcgatggtgcatggcagaactgcttccatgccccggaatccagaatcaacattttgtatagtttgcagctgcaaatgtgtatcttgtgattttggggggaggatgcttgtttaagtaacgctcactggataccttgtagcactactgtttcaagagcgctcgaatgattcagtaagggctttcggtttcatcagaatccatatgtggattggctgagtttcaatccatagcaagtcaaaattctttataatttttccaaactttttcaatccctgaggcatagg

SEQ ID NO: 871 - DNA, 2103 bp, Zea Mays
aatcctatgccctatatcgcgcttacagaagccaccacagactcggcttaaggctaggtgcttagtgcaatcatcgccgccatgaaaaacaggggaaaaccaagccgccgcacccggagttcatccacaccagctctcaacctcgggggttttgctaagggagcttcgttgggacgcacagaaggagattgtgccctcgctggggaagtctggagattcctcgttgacgttgagggaagccgcggagttactgcacaacgtgtctagcatcatccatgtctcaatcttcggtaagaatctgcaccattagtttgttgtatgcctagggtcatttagcatgtagccacacgatcgtttggacaccagaatttgtgggcgagtttcgtcgacgatggcgccgccgcgggagcagaatgcgtcatgatcagagctttgggtgagctgattcaggaaatgtgggcggctatcacattcacggtggtcgggcctccgtttacatcggtcggggggcatgattcgattattgattcgtcgatttgtgtgtgccaacgagttctctgggtggagccctgttctgccgccagggcacagtgacgagagctagaagatgactgtgggctgtcaaatcctgggtagatggcatggattagatcgcatctaattaaaattgggtcgttgatcacagatcctgcgaccaacatggcatactggtttgggcgaagggagcttctagtcctgtccgttgatcacagatctaacgacaagggttggcacacagttataacagcgagtaccttttactaaaaagaccctaggaaatatagaaaagaacatgcctttccatgtctatagagaagacttacactgaggtccctcattttatagattagtgaaagagaaatgtgcccttgggccatttctatattattttggtgattagatgcacaacacactatgtgaaaactaacataatattgagcaaaggtatatctagatggatcaaatatgaaggtaagttatagaaacttagtcatttgttttatgtgctaaacatgcttgtctaagtgccaggaactcaattaagtcaagtccaaagggagcaaaaggagttaagctgaaacagccagacatgcaccagctacaggtgcaccgtacactgtccggtgtgcactagacactggtgcccaggctggcgcatcgacgaactcgctactctcgggaatcgctggggatgctgcggctaaaatttactggactgtccggtgtgcaccggactgtacggtgagctaacaacgtccgcgccaacggtcggcagcatgatcagcgcgcaatcaacgggcgacgcgtggccagagccaatagtcaccaggccacaccgaactgtccggtgtgcaccggacactgttcggtgtgccaaggggaccatggctgcaacggtcggcttcgccaaacaaggaaagaaatcgtgcactgttcatgttcggtggtgcaccagactgtccgatgtacccacgaatagaaggcaagaattgcctaacaaatggagctccaacggctcctagctaccttggggctataaaaagaacccctaggtgcatggagcagtacaccaagcctccattgaacatcttaagacgcctagactccgcaaacacgcatctgattcattgtgtttgagatttgagcacttgtttgagatatgaactcactgcgatgtgtttttattcttgacttgtgtgcgtggtgttgctgcgactgtagcgcttgcgtgtgttcctattccctcccttactcttgtggttttattgtgatcaatattgtaagggtgagaggctccaacttgcggagattcctcacaaagggaaacatctgctataagaaagaaaattgtggtactcaaggttgatcattggatcacttgagagggattgagtgcaatccttgaccaaaggaggtcaccacaatgtggagtaggcactggctgaaccatgggataaaatcaccgtgtctcttgtgccacttttcattgtgactgatttctttcttagagttctcacttaatcacttgtcctattgttcctaagttcaatacacattctaaag

SEQ ID NO: 872 - DNA, 1311 bp, Zea Mays
cctatgccctatatcgcgcttacagaagccaccacagactcggcttaaggctaggtgcttagtgcaatcatcgccgccatgaaaaacaggggaaaaccaagccgccgcacccggagttcatccacaccagctctcaacctcgggggttttgctaagggagcttcgttgggacgcacagaaggagattgtgccctcgctggggaagtctggagattcctcgttgacgttgagggaagccgcggagttactgcacaacgtgtctagcatcatccatgtctcaatcttcggaactcaattaagtcaagtccaaagggagcaaaaggagttaagctgaaacagccagacatgcaccagctacaggtgcaccgtacactgtccggtgtgcactagacactggtgcccaggctggcgcatcgacgaactcgctactctcgggaatcgctggggatgctgcggctaaaatttactggactgtccggtgtgcaccggactgtacggtgagctaacaacgtccgcgccaacggtcggcagcatgatcagcgcgcaatcaacgggcgacgcgtggccagagccaatagtcaccaggccacaccgaactgtccggtgtgcaccggacactgttcggtgtgccaaggggaccatggctgcaacggtcggcttcgccaaacaaggaaagaaatcgtgcactgttcatgttcggtggtgcaccagactgtccgatgtacccacgaatagaaggcaagaattgcctaacaaatggagctccaacggctcctagctaccttggggctataaaaagaacccctaggtgcatggagcagtacaccaagcctccattgaacatcttaagacgcctagactccgcaaacacgcatctgattcattgtgtttgagatttgagcacttgtttgagatatgaactcactgcgatgtgtttttattcttgacttgtgtgcgtggtgttgctgcgactgtagcgcttgcgtgtgttcctattccctcccttactcttgtggttttattgtgatcaatattgtaagggtgagaggctccaacttgcggagattcctcacaaagggaaacatctgctataagaaagaaaattgtggtactcaaggttgatcattggatcacttgagagggattgagtgcaatccttgaccaaaggaggtcaccacaatgtggagtaggcactggctgaaccatgggataaaatcaccgtgtctcttgtgccacttttcattgtgactgatttctttcttagagttctcacttaatcacttgtcctattgttcctaagttcaatacaca

SEQ ID NO: 873 - DNA, 1268 bp, Zea Mays
attcagtccattccctagctatagttaatatgaaaaatcccgagtaggcacctggttttcttgctgcttccgctgtttcttcctcaacctctccagctcagctgccgcaggctgcgactgccatggattccaaatccatggaagcatttgtggcaagtgaggcctccgtcttcatgaatcagccccctccacatatgtctagaccaacaattattatcaagctcattttgtggttgctgtggaccatcacccacttagcaatcagcattttaaatttatggtctcatctgatttatagtctagactgctatcttatttcatctggattgttgcggaagtatcagaatcttcatctgggtagactgaagtacttggctattgtggtagatagcaaagaagctaaaagtactgtgaaggtcaagcgactgttatgctggctctcatctatgggtgtgaagtatgtatgtctctacgacattgagggagttctgaagaaatcttttgaacctgctgtgaatgtttcaagagataggactgcaggagaacattttggcattggagcaaacatcaaagatctacactgtagccaaagagagatgatgatagattgtctttctggctctgatggcaaggagggtattgctaaagcagccagtttactttgctcaacttacctcaatggtgatactcatggagatgacaaaaggaaaccagcatttacagaagctgacatggctggtgcactgaaggctgtaggttgtggtggaccagaacctgatctccttctcatgtatggtcctgctagatgccatttaggatttcctacatggagattacggtatactgaaattatgtatatggggccactgaaatcaatgaaatatggtgcaattgtgaaagccttatataacttctcaaagaaacaccaaaattatgggaaatgatagctgatactagtttaaagaagaccatttgatcatggagaatcgacaccttggaactactggacagttactctgcggcccgcatccatttgcttctgctgctgcttactggagcacaggagtatttaacgttagacataccattgacactcatttcatgtttgcttgtaataagataaaaagtgctgtcgatagaacatacatacgggacaacatcccactgaaagttccacccatagcaatgagcaatgaaagaaacacaagaaatcttaccatctcatctattatttcctatgctatgattcctaatgatttatctgtttt

SEQ ID NO: 874 - DNA, 1469 bp, Zea Mays
gaaaaatcccgagtaggtaattcaaacacgccccacccaataggtgaatctttcgaagtgtggaattatcccctttcttcagtcctagaatcgatgcctaagaaaaaggttatatctattaaaatgctcaacccattcatgcgattcaatcctctgctctcctcgtcggaagaggatccattcagccgcttcggggccgtttgggttccttggatctgcaactgtagcgtccgccttcacgcgcggcgctgatgctgccgtgcctccgcctccacgcccggttctgttgctgccgtgacgccgccgggctcgggggaagcgcgtggcaccactcgtcgcttgcctgcacctgcagggaagcatttgtggcaagtgaggcctccgtcttcatgaatcagccccctccacatatgtctagaccaacaattattatcaagctcattttgtggttgctgtggaccatcacccacttagcaatcagcattttaaatttatggtctcatctgatttatagtctagactgctatcttatttcatctggattgttgcggaagtatcagaatcttcatctgggtagactgaagtacttggctattgtggtagatagcaaagaagctaaaagtactgtgaaggtcaagcgactgttatgctggctctcatctatgggtgtgaagtatgtatgtctctacgacattgagggagttctgaagaaatcttttgaacctgctgtgaatgtttcaagagataggactgcaggagaacattttggcattggagcaaacatcaaagatctacactgtagccaaagagagatgatgatagattgtctttctggctctgatggcaaggagggtattgctaaagcagccagtttactttgctcaacttacctcaatggtgatactcatggagatgacaaaaggaaaccagcatttacagaagctgacatggctggtgcactgaaggctgtaggttgtggtggaccagaacctgatctccttctcatgtatggtcctgctagatgccatttaggatttcctacatggagattacggtatatggggccactgaaatcaatgaaatatggtgcaattgtgaaagccttatataacttctcaaagaaacaccaaaattatgggaaatgatagctgatactagtttaaagaagaccatttgatcatggagaatcgacaccttggaactactggacagttactctgcggcccgcatccatttgcttctgctgctgcttactggagcacaggagtatttaacgttagacataccattgacactcatttcatgtttgcttgtaataagataaaaagtgctgtcgatagaacatacatacgggacaacatcccactgaaagttccacccatagcaatgagcaatgaaagaaacacaagaaatcttaccatctcatctattatttcctatgctatgattcctaatgatttatctgtttt

SEQ ID NO: 875 - DNA, 1396 bp, Zea Mays
gaaaaatcccgagtaggtaattcaaacacgccccacccaataggtgaatctttcgaagtgtggaattatcccctttcttcagtcctagaatcgatgcctaagaaaaaggttatatctattaaaatgctcaacccattcatgcgattcaatcctctgctctcctcgtcggaagaggatccattcagccgcttcggggccgtttgggttccttggatctgcaactgtagcgtccgccttcacgcgcggcgctgatgctgccgtgcctccgcctccacgcccggttctgttgctgccgtgacgccgccgggctcgggggaagcgcgtggcaccactcgtcgcttgcctgcacctgcaggttcaactcgcttgcacctggttttcttgctgcttccgctgtttcttcctcaacctctccagctcagctgccgcaggctgcgactgccatggattccaaatccatggaagcatttgtggcaagtgaggcctccgtcttcatgaatcagccccctccacatatagcaaagaagctaaaagtactgtgaaggtcaagcgactgttatgctggctctcatctatgggtgtgaagtatgtatgtctctacgacattgagggagttctgaagaaatcttttgaacctgctgtgaatgtttcaagagataggactgcaggagaacattttggcattggagcaaacatcaaagatctacactgtagccaaagagagatgatgatagattgtctttctggctctgatggcaaggagggtattgctaaagcagccagtttactttgctcaacttacctcaatggtgatactcatggagatgacaaaaggaaaccagcatttacagaagctgacatggctggtgcactgaaggctgtaggttgtggtggaccagaacctgatctccttctcatgtatggtcctgctagatgccatttaggatttcctacatggagattacggtatactgaaattatgtatatggggccactgaaatcaatgaaatatggtgcaattgtgaaagccttatataacttctcaaagaaacaccaaaattatgggaaatgatagctgatactagtttaaagaagaccatttgatcatggagaatcgacaccttggaactactggacagttactctgcggcccgcatccatttgcttctgctgctgcttactggagcacaggagtatttaacgttagacataccattgacactcatttcatgtttgcttgtaataagataaaaagtgctgtcgatagaacatacatacgggacaacatcccactgaaagttccacccatagcaatgagcaatgaaagaaacacaagaaatcttaccatctcatctattatttcctatgctatgattcctaatgatttatctgtttt

SEQ ID NO: 876 - DNA, 1206 bp, Zea Mays
ggaaggtgaattatttatcaattatgtgaagcctctctctgaaaacaaacaagggatgtcaaaactcaacaggacaaccgggtcacgtcgatgcacctggttttcttgctgcttccgctgtttcttcctcaacctctccagctcagctgccgcaggctgcgactgccatggattccaaatccatggaagcatttgtggcaagtgaggcctccgtcttcatgaatcagccccctccacatatgtctagaccaacaattattatcaagctcattttgtggttgctgtggaccatcacccacttagcaatcagcattttaaatttatgatagcaaagaagctaaaagtactgtgaaggtcaagcgactgttatgctggctctcatctatgggtgtgaagtatgtatgtctctacgacattgagggagttctgaagaaatcttttgaacctgctgtgaatgtttcaagagataggactgcaggagaacattttggcattggagcaaacatcaaagatctacactgtagccaaagagagatgatgatagattgtctttctggctctgatggcaaggagggtattgctaaagcagccagtttactttgctcaacttacctcaatggtgatactcatggagatgacaaaaggaaaccagcatttacagaagctgacatggctggtgcactgaaggctgtaggttgtggtggaccagaacctgatctccttctcatgtatggtcctgctagatgccatttaggatttcctacatggagattacggtatactgaaattatgtatatggggccactgaaatcaatgaaatatggtgcaattgtgaaagccttatataacttctcaaagaaacaccaaaattatgggaaatgatagctgatactagtttaaagaagaccatttgatcatggagaatcgacaccttggaactactggacagttactctgcggcccgcatccatttgcttctgctgctgcttactggagcacaggagtatttaacgttagacataccattgacactcatttcatgtttgcttgtaataagataaaaagtgctgtcgatagaacatacatacgggacaacatcccactgaaagttccacccatagcaatgagcaatgaaagaaacacaagaaatcttaccatctcatctattatttcctatgctatgattcctaatgatttatctgtttt

SEQ ID NO: 877 - DNA, 1134 bp, Zea Mays
ggaaggtgaattatttatcaattatgtgaagcctctctctgaaaacaaacaagggatgtcaaaactcaacaggacaaccgggtcacgtcgatgtgatatgactatatgaggcacctggttttcttgctgcttccgctgtttcttcctcaacctctccagctcagctgccgcaggctgcgactgccatggattccaaatccatggaagcatttgtggcaagtgaggcctccgtcttcatgaatcagccccctccacatcaaagaagctaaaagtactgtgaaggtcaagcgactgttatgctggctctcatctatgggtgtgaagtatgtatgtctctacgacattgagggagttctgaagaaatcttttgaacctgctgtgaatgtttcaagagataggactgcaggagaacattttggcattggagcaaacatcaaagatctacactgtagccaaagagagatgatgatagattgtctttctggctctgatggcaaggagggtattgctaaagcagccagtttactttgctcaacttacctcaatggtgatactcatggagatgacaaaaggaaaccagcatttacagaagctgacatggctggtgcactgaaggctgtaggttgtggtggaccagaacctgatctccttctcatgtatggtcctgctagatgccatttaggatttcctacatggagattacggtatactgaaattatgtatatggggccactgaaatcaatgaaatatggtgcaattgtgaaagccttatataacttctcaaagaaacaccaaaattatgggaaatgatagctgatactagtttaaagaagaccatttgatcatggagaatcgacaccttggaactactggacagttactctgcggcccgcatccatttgcttctgctgctgcttactggagcacaggagtatttaacgttagacataccattgacactcatttcatgtttgcttgtaataagataaaaagtgctgtcgatagaacatacatacgggacaacatcccactgaaagttccacccatagcaatgagcaatgaaagaaacacaagaaatcttaccatctcatctattatttcctatgctatgattcctaatgatttatctgtttt

SEQ ID NO: 878 - DNA, 1239 bp, Zea Mays
ctccctttccgtttcgtttctctttgcagtttgctggcctcccttgtttgtttgtgttaatgttgattcgatctctggttgagaaaataagtagacaggtggaaggaaaaggaagcatttgtggcaagtgaggcctccgtcttcatgaatcagccccctccacatatgtctagaccaacaattattatcaagctcattttgtggttgctgtggaccatcacccacttagcaatcagcattttaaatttatggtctcatctgatttatagtctagactgctatcttatttcatctggattgttgcggaagtatcagaatcttcatctgggtagactgaagtacttggctattgtggtagatagcaaagaagctaaaagtactgtgaaggtcaagcgactgttatgctggctctcatctatgggtgtgaagtatgtatgtctctacgacattgagggagttctgaagaaatcttttgaacctgctgtgaatgtttcaagagataggactgcaggagaacattttggcattggagcaaacatcaaagatctacactgtagccaaagagagatgatgatagattgtctttctggctctgatggcaaggagggtattgctaaagcagccagtttactttgctcaacttacctcaatggtgatactcatggagatgacaaaaggaaaccagcatttacagaagctgacatggctggtgcactgaaggctgtaggttgtggtggaccagaacctgatctccttctcatgtatggtcctgctagatgccatttaggatttcctacatggagattacggtatactgaaattatgtatatggggccactgaaatcaatgaaatatggtgcaattgtgaaagccttatataacttctcaaagaaacaccaaaattatgggaaatgatagctgatactagtttaaagaagaccatttgatcatggagaatcgacaccttggaactactggacagttactctgcggcccgcatccatttgcttctgctgctgcttactggagcacaggagtatttaacgttagacataccattgacactcatttcatgtttgcttgtaataagataaaaagtgctgtcgatagaacatacatacgggacaacatcccactgaaagttccacccatagcaatgagcaatgaaagaaacacaagaaatcttaccatctcatctattatttcctatgctatgattcctaatgatttatctgtttt

SEQ ID NO: 879 - DNA, 359 bp, Zea Mays
cctggaaccggataacacaccgcgatagcgaagcagaggtcttccaaaacccaacgcggcaaacggcttcctcaccccccctcccctcgccatggccgtccccacctccacctcctccccgctccccctcctcttcctccatcgctgcaccgcaaactctagcccctcggttctctccttcccgtcctccctccgcggcgcgtccctccgctcccgggccgcggccgcaccgcccgcagagaccctctctgacgacggcatccccgacgcgccaccggaaggggcaggaacgggaattccgttgccatcgtcgattggggatgatggggagcagttgttgtatggaagtgctgaaaacg

SEQ ID NO: 880 - DNA, 1055 bp, Zea Mays
gatcatagatgtgcaactcatcagcttgaattagctgcaaccgtactgaaaatttattaaactggatgaggcttgcacccaagcagaagatcagaatcaagctgcggtcctactgggtgccgttgatagaggactcgtgcaagaagataatcgaagctgccaaaacaaccaacgcaaagaccatgggtcccgttcctctgcccactaagaggagagtctattgtgtgcttaactctcctcacgtgcacaaggactcacggttccatttcgagatccggacgcatcagcggctgattgatatcatgtatccaactgcccaaacaattgattcgttgatgcaactccagctccctgccggtgtggatgttgaggttaagctatgattctgttggagctgaactttccgaagtttgatgtaatgaggtattcattttctgcagcttttctctgggactgaaagaaatgtagtgcctgtactaggaaagaagatgttcagaattgaatgtacttgatttgaagtatatcagatgatatggttcatgctagctgtatacttgtattactgtattggtggcactaaaatttcttctagcaagtctgaagcagacgaaggattggccaaatttgtaagcttctgaaggatcgtttgagtcgtctggataagcaaaatactctttcttgctggttgcactgattctgctcaacagactgacggtgctttgtaacttgtaaaggggatttctttctatttttctttgatagtttggaaacttaaatccgctccgggaattcatgattctcggagaggatttaaatttccaaactattccttagggcttgtttagtagcaaagatactggagaggattagaggggctaaaatcctacgagaatggtagtttctttctttctcttttcaaaaaaaagtacactttcagttggctaggtgtgctgttctatttttaatagatcaagtgatattcgttttttctgaagaaaaggaaggcataaagttggtctttagcagccccccgactcctgcctcaatagtcctcg

SEQ ID NO: 881 - DNA, 1485 bp, Zea Mays
tgatatgttaatcatcaggcacccatatctgctgatccatgaagcatttgatctccatcactgagtgcttgccaacgcggaacagactccacaaccacaaggactgacatagacgcccaactaggccaccaactgttttctatccaaccacacctcgcaaacgtgatgcactccaactccggagcatcttctttatttaccattccgcgaaccatgttatttactcccgttctgttctgtttctgctctataaatccataattgccactgaactttgccacataatagatagacttcttgctcgtactgtacatgacccagaaactccatcagacattatcgaccatcttaggagcaaatttcttcacagcgtcgccgaccgtgaggaatatcttgtcttcaccaatcatgtccgtgaatttcgctgagcggagcttctggatcaccgccggcccgggattggtaagaaccagctccagccatgtaattaactgctgaccgcgagaaagaacctgcaatgaacgacttctgtcaaaaggatgatgcatctgtatggtgcaatgaattgttagtttttttctgaattaattggtacctgtggctacgtagcaagaagtcagtgaaccaacaatgttcatggtccctagagccatcatttctttgttcccatctatctggtaatccttgagggctgcaaatgttcttccaattgcaatcgcttcctgataaagtttgcatcagttgaataattagcacattttttgtcatagaaaacttttccacgttatcacaattctgaacatcaaagtttaagaagtctgtttccctagcaaagggtctgtctcaccgttaggcctatcattccagctactatcccaattttgaatcctgtcgccaagtatgggccggtgaagtatattagactagctgaaggtgggttgatgcctttccttatgttcttgacctgtatagttatgcagtgatgatgcttgttgttagcttcaactggtaagacgcacttgcatactttttacgatgggtaacatcaagaacagtcaagtatatatgacttacaattgcaacgccatgcttatctgcacgagtgatgtacacaaaaaatgtggatatgatcaccgaagtgagaggtgcgattgcggacacccagaagagctttttattccttttcccctgaattattaaaagaaacagtgtggtcacaaaaagtcaaatggaagacaaggtgagatcttggcatcttggagcatgtgatgtgttgtcttacaatgtacttggcaaccagaaggaatgccaggaaggtcgctcctatcagtattgtctgccaattccactgcaaatagcacacatatattgcgtcaaacgctcagtctcaaataccgtggttttcatcaggcaggtaaaaatgaaaggtcagtgtctagtgtctactcttaccccatggtgaacatttccccaaactgatttcat

SEQ ID NO: 882 - DNA, 2216 bp, Zea Mays
cgagcatttcctcccccggccgggacggggctcatccacgctcggggacgggatggatgtcttcttcctctaaccgtacccacggcctcttgccagagaatcatcccatatcttcgtcccgtccgtccatatgcatgatccatcgtctcctaggctagggccggtgatgtttacacgagaggagggggagaggaattctagccagctgcgcatgtgatcgttgtcatgccaaccgtaccgcaagattctccgtccagccgccagaaccaagaaacccttttaaagccaagggagctccagctcccgagtttccccaaacacttcatccaggctccagccatggaggcctcggcagcggtcgagtcgtcggccgccgtgtctgtcttcgaggtagtatccagcaagcagcggcggccgccggacacggcgaagctggtgctgaatagccccagcccgccgagcctgcgggaggagctcgtcggcgtggtcggcaaggcgttccggccgcgcgcccacgccggggccgctgctggcgccggtggccgcccgccgccgcgccgcgcgtgggtcctcacggcgctgcagtgcgtgttcccggtgctgcagtgggggaggagctacaccctcgagtccttcaggagtgacgtcatggccggcctcactcttgccagccttggcatccctcagtggcacccgggcaacttcctcatcggatgctccttcctcatattcatcctcaccacacggttcatcgggaggaggtacaagaagctgttctggctgtcagcgatctcgcctctgctgtcggtcatcctgtccaccgctgcggtctacgcgacaagggctgacaggcacggcgtcaagatcatccagaaggtgcacgcgggcctaaacccaagctccgtgaagcagatacacctcaacgggccgcacacaacggagtgcgccaagatcgccgtcatctgcgcagtcatcgccctcacggaagctatcgccgttggccgatctttcgcctccgtaagagggtacagactcgacggcaacaaggagatgctggccatggggttctccaacgttgctggttctctgtcctcgtgctatgtggcaacaggttcgttctcccgaacggcagtgaacttcagcgcgggggccaggtcgaccgtttcaaacatcgtcatgtccatcaccgtgttcgtcaccctggagctgttcatgaagctcctctactacacgcccatggcggtgctcgcctccatcatcctgtcggctcttccgggactgatcgacatcaaggaggcctgcagcatatggaagatcgacaagatggatttcctcacctgcctcggtgcgtttgttggcgtcctgtttgggtcggtggagattgggcttgcagttgcacttggcatttccttcgcaaagatcatcatacagtcgcttcggcctcaggtggagatccttggcaggctacaagggacagatatcttctgcagcgtcaggcagtaccctgtagcctgcctaactccgactgtactgcctatacgcgtcgacacatccttcctctgcttcatcaacgccacttccgtcaaagaaaggatcacagagtgggtttgggaaggagtggagacctcaaatggaaaagcgagggagaggatacaagcagttgtccttgatatgtcaagtgtggtaaacatcgacacttcaggactcactgcactggaagaaatacacaaggagttggtgtctcttggcttacagatggctatagccagtccgggatggaaggcagttcagaagatgaaagtgtcacaggtggtggacagggtaggacaggactggatcttcatgacagtaggtgaagcggtggaggcctgtctagctgctcataagggcacagctctcgcatgttgagtatgcgttaattactactattagtactcctaaggataatcccataagcgatgcggttatttgcatcctatgaaggtgttactggaaatgcttacgaaacagaaatgcatggtttgcacatgatggaggcaaaatacctatggtatgacttgactggagtggtcgtggcgagaaacaaacctgctctgggaaggacattccttgagctccacaaaaacatgtatggtgatatcttgatgatgtgtaactgtacttagtaagtaaacaagtctttttgttttaacaaaacagaaaataataaaaaaaaa

SEQ ID NO: 883 - DNA, 2629 bp, Zea Mays
gagcatttcctcccccggccgggacggggctcatccacgctcggggacgggatggatgtcttcttcctctaaccgtacccacggcctcttgccagagaatcatcccatatcttcgtcccgtccgtccatatgcatgatccatcgtctcctaggctagggccggtgatgtttacacgagaggagggggagaggaattctagccagctgcgcatgtgatcgttgtcatgccaaccgtaccgcaagattctccgtccagccgccagaaccaagaaacccttttaaagccaagggagctccagctcccgagtttccccaaacacttcatccaggctccagccatggaggcctcggcagcggtcgagtcgtcggccgccgtgtctgtcttcgaggtagtatccagcaagcagcggcggccgccggacacggcgaagctggtgctgaatagccccagcccgccgagcctgcgggaggagctcgtcggcgtggtcggcaaggcgttccggccgcgcgcccacgccggggccgctgctggcgccggtggccgcccgccgccgcgccgcgcgtgggtcctcacggcgctgcagtgcgtgttcccggtgctgcagtgggggaggagctacaccctcgagtccttcaggagtgacgtcatggccggcctcactcttgccagccttggcatccctcagagcattggatacgccaatctagccaagctggaccctcagtacggtctttacacgagcgtcgtgccaccgctgatctacgctgtgatggggacatcgagggagatcgccatcgggccagtcgccgtcgtctcgctgctgctgtcctcgatgatccagaaggtcgtcgacccggccgccgacccggcgacctacaggtcgctcgtcttcacggtgactttcctcgccggggtcttccaggtctccttcggcctcttcaggctggggtttctcgtggatttcctgtcgcacgctgccatcgtggggttcatgggcggggcggccatcgtgatcgggatgcagcagctcaaggggctgcttggcctcgcccatttcaccaacagcaccgatgttgtttctgtcctcaaggctgtctgctctgcgctacgacatgacccgtggcacccgggcaacttcctcatcggatgctccttcctcatattcatcctcaccacacggttcatcgggaggaggtacaagaagctgttctggctgtcagcgatctcgcctctgctgtcggtcatcctgtccaccgctgcggtctacgcgacaagggctgacaggcacggcgtcaagatcatccagaaggtgcacgcgggcctaaacccaagctccgtgaagcagatacacctcaacgggccgcacacaacggagtgcgccaagatcgccgtcatctgcgcagtcatcgccctcacggaagctatcgccgttggccgatctttcgcctccgtaagagggtacagactcgacggcaacaaggagatgctggccatggggttctccaacgttgctggttctctgtcctcgtgctatgtggcaacaggttcgttctcccgaacggcagtgaacttcagcgcgggggccaggtcgaccgtttcaaacatcgtcatgtccatcaccgtgttcgtcaccctggagctgttcatgaagctcctctactacacgcccatggcggtgctcgcctccatcatcctgtcggctcttccgggactgatcgacatcaaggaggcctgcagcatatggaagatcgacaagatggatttcctcacctgcctcggtgcgtttgttggcgtcctgtttgggtcggtggagattgggcttgcagttgcaatcatcatacagtcgcttcggcctcaggtggagatccttggcaggctacaagggacagatatcttctgcagcgtcaggcagtaccctgtagcctgcctaactccgactgtactgcctatacgcgtcgacacatccttcctctgcttcatcaacgccacttccgtcaaagaaaggatcacagagtgggtttgggaaggagtggagacctcaaatggaaaagcgagggagaggatacaagcagttgtccttgatatgtcaagtgtggtaaacatcgacacttcaggactcactgcactggaagaaatacacaaggagttggtgtctcttggcttacagatggctatagccagtccgggatggaaggcagttcagaagatgaaagtgtcacaggtggtggacagggtaggacaggactggatcttcatgacagtaggtgaagcggtggaggcctgtctagctgctcataagggcacagctctcgcatgttgagtatgcgttaattactactattagtactcctaaggataatcccataagcgatgcggttatttgcatcctatgaaggtgttactggaaatgcttacgaaacagaaatgcatggtttgcacatgatggaggcaaaatacctatggtatgacttgactggagtggtcgtggcgagaaacaaacctgctctgggaaggacattccttgagctccacaaaaacatgtatggtgatatcttgatgatgtgtaactgtacttagtaagtaaacaagtctttttgttttaacaaaacagaaaataataaaaaaaaa

SEQ ID NO: 884 - DNA, 2584 bp, Zea Mays
gagcatttcctcccccggccgggacggggctcatccacgctcggggacgggatggatgtcttcttcctctaaccgtacccacggcctcttgccagagaatcatcccatatcttcgtcccgtccgtccatatgcatgatccatcgtctcctaggctagggccggtgatgtttacacgagaggagggggagaggaattctagccagctgcgcatgtgatcgttgtcatgccaaccgtaccgcaagattctccgtccagccgccagaaccaagaaacccttttaaagccaagggagctccagctcccgagtttccccaaacacttcatccaggctccagccatggaggcctcggcagcggtcgagtcgtcggccgccgtgtctgtcttcgaggtagtatccagcaagcagcggcggccgccggacacggcgaagctggtgctgaatagccccagcccgccgagcctgcgggaggagctcgtcggcgtggtcggcaaggcgttccggccgcgcgcccacgccggggccgctgctggcgccggtggccgcccgccgccgcgccgcgcgtgggtcctcacggcgctgcagtgcgtgttcccggtgctgcagtgggggaggagctacaccctcgagtccttcaggagtgacgtcatggccggcctcactcttgccagccttggcatccctcagagcattggatacgccaatctagccaagctggaccctcagtacggtctttacacgagcgtcgtgccaccgctgatctacgctgtgatggggacatcgagggagatcgccatcgggccagtcgccgtcgtctcgctgctgctgtcctcgatgatccagaaggtcgtcgacccggccgccgacccggcgacctacaggtcgctcgtcttcacggtgactttcctcgccggggtcttccaggtctccttcggcctcttcaggctggggtttctcgtggatttcctgtcgcacgctgccatcgtggggttcatgggcggggcggccatcgtgatcgggatgcagcagctcaaggggctgcttggcctcgcccatttcaccaacagcaccgatgttgtttctgtcctcaaggctgtctgctctgcgctacgacatgacccggggaggaggtacaagaagctgttctggctgtcagcgatctcgcctctgctgtcggtcatcctgtccaccgctgcggtctacgcgacaagggctgacaggcacggcgtcaagatcatccagaaggtgcacgcgggcctaaacccaagctccgtgaagcagatacacctcaacgggccgcacacaacggagtgcgccaagatcgccgtcatctgcgcagtcatcgccctcacggaagctatcgccgttggccgatctttcgcctccgtaagagggtacagactcgacggcaacaaggagatgctggccatggggttctccaacgttgctggttctctgtcctcgtgctatgtggcaacaggttcgttctcccgaacggcagtgaacttcagcgcgggggccaggtcgaccgtttcaaacatcgtcatgtccatcaccgtgttcgtcaccctggagctgttcatgaagctcctctactacacgcccatggcggtgctcgcctccatcatcctgtcggctcttccgggactgatcgacatcaaggaggcctgcagcatatggaagatcgacaagatggatttcctcacctgcctcggtgcgtttgttggcgtcctgtttgggtcggtggagattgggcttgcagttgcacttggcatttccttcgcaaagatcatcatacagtcgcttcggcctcaggtggagatccttggcaggctacaagggacagatatcttctgcagcgtcaggcagtaccctgtagcctgcctaactccgactgtactgcctatacgcgtcgacacatccttcctctgcttcatcaacgccacttccgtcaaagaaaggatcacagagtgggtttgggaaggagtggagacctcaaatggaaaagcgagggagaggatacaagcagttgtccttgatatgtcaagtgtggtaaacatcgacacttcaggactcactgcactggaagaaatacacaaggagttggtgtctcttggcttacagatggctatagccagtccgggatggaaggcagttcagaagatgaaagtgtcacaggtggtggacagggtaggacaggactggatcttcatgacagtaggtgaagcggtggaggcctgtctagctgctcataagggcacagctctcgcatgttgagtatgcgttaattactactattagtactcctaaggataatcccataagcgatgcggttatttgcatcctatgaaggtgttactggaaatgcttacgaaacagaaatgcatggtttgcacatgatggaggcaaaatacctatggtatgacttgactggagtggtcgtggcgagaaacaaacctgctctgggaaggacattccttgagctccacaaaaacatgtatggtgatatcttgatgatgtgtaactgtacttagtaagtaaacaagtctttttgttttaacaaaacagaaaataataaaaaaaaa

SEQ ID NO: 885 - DNA, 2057 bp, Zea Mays
gaaactttactacacacgtcttcgcttgctgaatagtgatctcagcaagaaataacaaccaacaagctagaattgaattcaacacgtcttcagagcattggatacgccaatctagccaagctggaccctcagtacggtctttacacgagcgtcgtgccaccgctgatctacgctgtgatggggacatcgagggagatcgccatcgggccagtcgccgtcgtctcgctgctgctgtcctcgatgatccagaaggtcgtcgacccggccgccgacccggcgacctacaggtcgctcgtcttcacggtgactttcctcgccggggtcttccaggtctccttcggcctcttcaggctggggtttctcgtggatttcctgtcgcacgctgccatcgtggggttcatgggcggggcggccatcgtgatcgggatgcagcagctcaaggggctgcttggcctcgcccatttcaccaacagcaccgatgttgtttctgtcctcaaggctgtctgctctgcgctacgacatgacccgtggcacccgggcaacttcctcatcggatgctccttcctcatattcatcctcaccacacggttcatcgggaggaggtacaagaagctgttctggctgtcagcgatctcgcctctgctgtcggtcatcctgtccaccgctgcggtctacgcgacaagggctgacaggcacggcgtcaagatcatccagaaggtgcacgcgggcctaaacccaagctccgtgaagcagatacacctcaacgggccgcacacaacggagtgcgccaagatcgccgtcatctgcgcagtcatcgccctcacggaagctatcgccgttggccgatctttcgcctccgtaagagggtacagactcgacggcaacaaggagatgctggccatggggttctccaacgttgctggttctctgtcctcgtgctatgtggcaacaggttcgttctcccgaacggcagtgaacttcagcgcgggggccaggtcgaccgtttcaaacatcgtcatgtccatcaccgtgttcgtcaccctggagctgttcatgaagctcctctactacacgcccatggcggtgctcgcctccatcatcctgtcggctcttccgggactgatcgacatcaaggaggcctgcagcatatggaagatcgacaagatggatttcctcacctgcctcggtgcgtttgttggcgtcctgtttgggtcggtggagattgggcttgcagttgcacttggcatttccttcgcaaagatcatcatacagtcgcttcggcctcaggtggagatccttggcaggctacaagggacagatatcttctgcagcgtcaggcagtaccctgtagcctgcctaactccgactgtactgcctatacgcgtcgacacatccttcctctgcttcatcaacgccacttccgtcaaagaaaggatcacagagtgggtttgggaaggagtggagacctcaaatggaaaagcgagggagaggatacaagcagttgtccttgatatgtcaagtgtggtaaacatcgacacttcaggactcactgcactggaagaaatacacaaggagttggtgtctcttggcttacagatggctatagccagtccgggatggaaggcagttcagaagatgaaagtgtcacaggtggtggacagggtaggacaggactggatcttcatgacagtaggtgaagcggtggaggcctgtctagctgctcataagggcacagctctcgcatgttgagtatgcgttaattactactattagtactcctaaggataatcccataagcgatgcggttatttgcatcctatgaaggtgttactggaaatgcttacgaaacagaaatgcatggtttgcacatgatggaggcaaaatacctatggtatgacttgactggagtggtcgtggcgagaaacaaacctgctctgggaaggacattccttgagctccacaaaaacatgtatggtgatatcttgatgatgtgtaactgtacttagtaagtaaacaagtctttttgttttaacaaaacagaaaataataaaaaaaaa

SEQ ID NO: 886 - DNA, 1601 bp, Zea Mays
gtcggacacaacgatcagtcactgtcgttacttggaacaatagtgttcgatcgtcttcaacctcgcactacgtggcacccgggcaacttcctcatcggatgctccttcctcatattcatcctcaccacacggttcatcgggaggaggtacaagaagctgttctggctgtcagcgatctcgcctctgctgtcggtcatcctgtccaccgctgcggtctacgcgacaagggctgacaggcacggcgtcaagatcatccagaaggtgcacgcgggcctaaacccaagctccgtgaagcagatacacctcaacgggccgcacacaacggagtgcgccaagatcgccgtcatctgcgcagtcatcgccctcacggaagctatcgccgttggccgatctttcgcctccgtaagagggtacagactcgacggcaacaaggagatgctggccatggggttctccaacgttgctggttctctgtcctcgtgctatgtggcaacaggttcgttctcccgaacggcagtgaacttcagcgcgggggccaggtcgaccgtttcaaacatcgtcatgtccatcaccgtgttcgtcaccctggagctgttcatgaagctcctctactacacgcccatggcggtgctcgcctccatcatcctgtcggctcttccgggactgatcgacatcaaggaggcctgcagcatatggaagatcgacaagatggatttcctcacctgcctcggtgcgtttgttggcgtcctgtttgggtcggtggagattgggcttgcagttgcacttggcatttccttcgcaaagatcatcatacagtcgcttcggcctcaggtggagatccttggcaggctacaagggacagatatcttctgcagcgtcaggcagtaccctgtagcctgcctaactccgactgtactgcctatacgcgtcgacacatccttcctctgcttcatcaacgccacttccgtcaaagaaaggatcacagagtgggtttgggaaggagtggagacctcaaatggaaaagcgagggagaggatacaagcagttgtccttgatatgtcaagtgtggtaaacatcgacacttcaggactcactgcactggaagaaatacacaaggagttggtgtctcttggcttacagatggctatagccagtccgggatggaaggcagttcagaagatgaaagtgtcacaggtggtggacagggtaggacaggactggatcttcatgacagtaggtgaagcggtggaggcctgtctagctgctcataagggcacagctctcgcatgttgagtatgcgttaattactactattagtactcctaaggataatcccataagcgatgcggttatttgcatcctatgaaggtgttactggaaatgcttacgaaacagaaatgcatggtttgcacatgatggaggcaaaatacctatggtatgacttgactggagtggtcgtggcgagaaacaaacctgctctgggaaggacattccttgagctccacaaaaacatgtatggtgatatcttgatgatgtgtaactgtacttagtaagtaaacaagtctttttgttttaacaaaacagaaaataataaaaaaaaa

SEQ ID NO: 887 - DNA, 1518 bp, Zea Mays
gtgttggatcactggaatccacccacctgaattcatcctcattggcacccgggcaacttcctcatcggatgctccttcctcatattcatcctcaccacacggttcatcgggaggaggtacaagaagctgttctggctgtcagcgatctcgcctctgctgtcggtcatcctgtccaccgctgcggtctacgcgacaagggctgacaggcacggcgtcaagatcatccagaaggtgcacgcgggcctaaacccaagctccgtgaagcagatacacctcaacgggccgcacacaacggagtgcgccaagatcgccgtcatctgcgcagtcatcgccctcacggaagctatcgccgttggccgatctttcgcctccgtaagagggtacagactcgacggcaacaaggagatgctggccatggggttctccaacgttgctggttctctgtcctcgtgctatgtggcaacaggttcgttctcccgaacggcagtgaacttcagcgcgggggccaggtcgaccgtttcaaacatcgtcatgtccatcaccgtgttcgtcaccctggagctgttcatgaagctcctctactacacgcccatggcggtgctcgcctccatcatcctgtcggctcttccgggactgatcgacatcaaggaggcctgcagcatatggaagatcgacaagatggatttcctcacctgcctcgcttggcatttccttcgcaaagatcatcatacagtcgcttcggcctcaggtggagatccttggcaggctacaagggacagatatcttctgcagcgtcaggcagtaccctgtagcctgcctaactccgactgtactgcctatacgcgtcgacacatccttcctctgcttcatcaacgccacttccgtcaaagaaaggatcacagagtgggtttgggaaggagtggagacctcaaatggaaaagcgagggagaggatacaagcagttgtccttgatatgtcaagtgtggtaaacatcgacacttcaggactcactgcactggaagaaatacacaaggagttggtgtctcttggcttacagatggctatagccagtccgggatggaaggcagttcagaagatgaaagtgtcacaggtggtggacagggtaggacaggactggatcttcatgacagtaggtgaagcggtggaggcctgtctagctgctcataagggcacagctctcgcatgttgagtatgcgttaattactactattagtactcctaaggataatcccataagcgatgcggttatttgcatcctatgaaggtgttactggaaatgcttacgaaacagaaatgcatggtttgcacatgatggaggcaaaatacctatggtatgacttgactggagtggtcgtggcgagaaacaaacctgctctgggaaggacattccttgagctccacaaaaacatgtatggtgatatcttgatgatgtgtaactgtacttagtaagtaaacaagtctttttgttttaacaaaacagaaaataataaaaaaaaa

SEQ ID NO: 888 - DNA, 1569 bp, Zea Mays
gttggatcactggaatccacccacctgaattcatcctcattggcacccgggcaacttcctcatcggatgctccttcctcatattcatcctcaccacacggttcatcgggaggaggtacaagaagctgttctggctgtcagcgatctcgcctctgctgtcggtcatcctgtccaccgctgcggtctacgcgacaagggctgacaggcacggcgtcaagatcatccagaaggtgcacgcgggcctaaacccaagctccgtgaagcagatacacctcaacgggccgcacacaacggagtgcgccaagatcgccgtcatctgcgcagtcatcgccctcacggaagctatcgccgttggccgatctttcgcctccgtaagagggtacagactcgacggcaacaaggagatgctggccatggggttctccaacgttgctggttctctgtcctcgtgctatgtggcaacaggttcgttctcccgaacggcagtgaacttcagcgcgggggccaggtcgaccgtttcaaacatcgtcatgtccatcaccgtgttcgtcaccctggagctgttcatgaagctcctctactacacgcccatggcggtgctcgcctccatcatcctgtcggctcttccgggactgatcgacatcaaggaggcctgcagcatatggaagatcgacaagatggatttcctcacctgcctcggtgcgtttgttggcgtcctgtttgggtcggtggagattgggcttgcagttgcacttggcatttccttcgcaaagatcatcatacagtcgcttcggcctcaggtggagatccttggcaggctacaagggacagatatcttctgcagcgtcaggcagtaccctgtagcctgcctaactccgactgtactgcctatacgcgtcgacacatccttcctctgcttcatcaacgccacttccgtcaaagaaaggatcacagagtgggtttgggaaggagtggagacctcaaatggaaaagcgagggagaggatacaagcagttgtccttgatatgtcaagtgtggtaaacatcgacacttcaggactcactgcactggaagaaatacacaaggagttggtgtctcttggcttacagatggctatagccagtccgggatggaaggcagttcagaagatgaaagtgtcacaggtggtggacagggtaggacaggactggatcttcatgacagtaggtgaagcggtggaggcctgtctagctgctcataagggcacagctctcgcatgttgagtatgcgttaattactactattagtactcctaaggataatcccataagcgatgcggttatttgcatcctatgaaggtgttactggaaatgcttacgaaacagaaatgcatggtttgcacatgatggaggcaaaatacctatggtatgacttgactggagtggtcgtggcgagaaacaaacctgctctgggaaggacattccttgagctccacaaaaacatgtatggtgatatcttgatgatgtgtaactgtacttagtaagtaaacaagtctttttgttttaacaaaacagaaaataataaaaaaaaa

SEQ ID NO: 889 - DNA, 3197 bp, Zea Mays
ggtgggcggggaggcgcagcctatgcggcggtggtagccgcaagtgaccagcaacccatgctggaccgacttcttcttcagcatgcctccacattcgaggagccccgaggcctgccgccggcccgaccatacgaccatcgcatccatctgctcccgggaacagcaccggtcgccgtgcgaccataccgatacccccagctgcagaaggatgagctggagcaccagtgcgacgccatgctcacccaggggattatccgccctagcacttcgccattctcggcgccggtactccttgtccgcaaggcggataagtcctggcgtttctgcatcgactaccgcaccctcaacgccaagactgccaaggacaagtttcccatccccgtcgtggacgagcttctcgacgagctccatggggctcgcttcttcaccaagctcgatttgcgctcgggctatcatcaggtgcggatgtgcgtcgacgacatcgccaagatggcgttccgcactcatcatggccactatgagttcctagtgatgccgttcgggctttccaatgccccggcgacattccaggccttgatgaacgacgtcctacagccgtacctaaggaggtttgtgctcgtcttcttcgatgacattcttatctacaactcatcatgggcagagcatctgcagcaagtcgccatcgtcctgaatgagcttcgggcgcactagctccacctaaagcgcttgaagtgctcattcggggcgccttcggtggcctatttgggccacgtcatctccaaggacggtgtggccatggatgtcgccaaggtggcggcagtcacctcgtggccaacaccacgctccgcccggggtctccgtggtttcctaggcttggccggttactaccggaaattcatccgggacttcggcctcatcgcagcgcccctgacacgtcttctacgccgagacgccttcgcatgggatgaggaggccgcggaggccttccaagcgctcaagcgcgccctcaccacggggccggtcctccagatgcccgacttcgacaaggacttcatggtggactgcgacgcctccggcgtggggttcggcgccgtcctacactagggcgtcgagcctctcgctttcttcagcaagccgttcgccgctcgccacctcaagctggcggcatatgagcgcgagctaattgggctggtgcaggcagtacgccattggcgcccttacttgtgggggcgtcattttattattcgtactaaccattacagtttgaagttcttgctggaccagcgcttgtcgaccgtgcctcagcaccaatggatcagcaagctctttggctacgacttcgacgtcatgtaccgtccaggacgcctcaacgtcatagcggacgccttgtcccgccgcgacactgaggagggcagcaccagcttcgggtcggccttatgcgtgcgctcggggccgtcttttaccttcatcgacgacatccgccgcgcgacgtcgcacgcggacgatgctaaggatgtgcgccgccgcttcgaggcgggagagctgcagggcccatggcgcatcgatgacgggctactactccatggtaaccgcatctacgtgccgggccatgctaacttgcgccaccaggccctctccctggcccactccgccggccacgaaggcgtgtgggctgatatctccatcgacttcattgaaggattgcccaaggtgggtggcaagtcattgatcctgacggtcgtcgatcgcttctccaaatatgcacacttcatcgcgctcgggcacccctacactgcgacaacagtcgctcgagcgttcttcgaggacattgttcgtctacacagcttcccctcctccatcgtcagcgacagagaccctgtctttacggggcacgtctggcgcgacctcttcgggatggtaggcgtgaagctgcacatgagcaccgccttccatccacagacggacgaccagtccgaggtggtcaacaaggtgctcgctatgtacctgcgctgcgtcacaggcgatcgaccccgtgcgtggttcgactggctcgcgtgggcggaatactgctacaacacctccttccacaccgctctgcgagccaccccctttgaggtggtctacggtcgttccccgcgcccatcctgccctatacaccagggtcaacacggacagaggcgactgagactcttctacgcagtcgggacgagatacttgctgaagctcgtcaacgtcttcttcaagcccagcagatgtccaagaaatactacaatgccaaccaccacgacgtggagtatgctgtgggagactgggtttggctgcgtctgctgcaccgaacgacgcagtccttggacccccgtgccaagcgcaagcttgggccgcgctatgcggggccatttcaagtggtggaacacatcggcagcgtcgcctaccgtctacagcttccggacggggcgcgcatccatgacattttccacgtagggctgctgaagcctcaccatggcgaacctccagcaactccggcctccctttcgccggtcatggatggacgcatcctcccggggccggagcgcgcccttcaggcgcagcagcgccggggcgtttggcacgtgctgatcaagtggcgtggcctccctgaagacgacgcaacgtgggagacagtcgacgagttcaaggcgcactacccagacttccagctcgaggacgagctatttgcgcaggcggggagagatgttatgaccggccgccactataggcgtcgggcaacagcataaagcatgcagataaggattagaagataagattgcatgcagataaggaatagaagataagatttgttagagagaagatagggattagaagataagatttgttagagagaaaagaggagatctatctcattagataaggactagaagggagtataaataattgcaagcaccactttatagatcaagcagaaacaagattgttccggcttcccagctagagggagccgggagattactgtgacctagctgcccctttcctcgcgtctctctcctctcacgcgcggtgaacatggtgccccgccgctatgcatcgcgcctcaaaccccggccaccaatcacccaccactacaacctgcgatcaatccgggaatccgccccgattcctatcagagagggtagcgccatcatcgaggttggagtaaggga

SEQ ID NO: 890 - DNA, 4206 bp, Zea Mays
ctttcatctctccagcctacctgcccggcggcggttgctcggcggccaccgtacccgcgaaatgcgagcattcaacggccgccgcctccacgatccgaagcccccctcattcctccccctccccttagccccacgcaccacaacgccgccaccgccgcccccctcctcgccgccgcacgccatcccgccgctcaacttccgctacctcaccccctgtccgcgctggtctgcctgggtcgccaccgcactcagcgaccccgttttcgctcccatcctcgcctcgtccgccatctccggcgccgtcgccgcctccaccgccgtcgtctcccccgaccgtgcggccctctccgctctgctctcgctctgggacccggatacccacgcgttccgtctcccagcgggccccgccaccttcacactcgaggatgcgctcgtcctcgctggtctaccgcccgcaggcgcgccgctggaccggaccctcacgccagaggaggatgacctccgcgttcgcctcgttgtcgagagggagaagatcaaggagctccacccctgtgcccgcgccgcgcgccgcgtgtctgcggaggtgtggctcgagtggttcgacggcggtggcatacgccccggcgaggacgacgaactgcggtggcttgggttcctcgcttactggctcgctttttttgttacgccaaggctccggtcaaggggtggcgagctgccggagcgcgtcttcgcacatgctgcgaggcttagtcttggcgagcgcattgcccttggccaggggatggtggcaaatctatatgcggaaatggataagattgttacttgcactgtggccgatggtgtgtgtggccgtctagatgtctgcgtgccagtctggatgctgcaggtgtggatgtgggagcgctacaagaggctgtgcccgccggagctgaaggcaccgcagttccctgtctccaatgtcagggtattgtattggagccggaggaagaagaagagcacatctgaagaggctctaaagattttgctggacgaagtatgctttgagtggaggccctatcggcacaactccctcaactggatggaacccaagtggttcaacaaggacaccattttggtgacctgtcatggtaaagataagccagagtggttgttggattacattgctgttatcagtcaaacaatgttgaccgggtttcatagtgatgacaccgacaattcagtactgtacaatccacagcttgttgcgagacagtttggttatgatcaggctgctcctgtgtccattgtcagggaaatccactttgagggaatcgagttgtggataccaagtatcggtagatatgggatgcctggtgaagattatgttgcatggtgtagcagcagtgggcagttctacaagcatcaaaatgatgtccaatatggttgctcggtattacgaaatcatgaaaatggggctatttcgtcgcaactgaatgtaaatgagaaatgtgttgtagtgccaacacttgatcaatttatcacccaagtcactaggagagaccacatcaattacattgtagaagggcagccggagaaaatggataatggaagtcatgaggatgaaacagaggtgattgtctgtggccttgaagcttgtgtcaaggatagcagaactacttcagtgaaacagaatgtgcagaaacaaagagataaatttgctgaagatggaggtgatagtaagaagaaaagaaaagtagaaagtaacacgaaaaggagttcgttgcaattggaaggtcagaagtattcttcactccagaaagctctaaattctgattctaagaaatgtgaggagttggctcaagttgacagtgatgatgaatgcattgttctcgaacagcccaagaataaatgtgaagtaataaacctggatgatgatgaggaacagagtgtttctaatcgagaacatcataacatgcaacttgtcctagaactggaagagtttgtccgctctggtcttctctcgcaatgggaggaaagctcagatgaagatgatgtaagtggaagcaagcaagaaacccagaagaaaagcaacaatgacccctatgctgaagcagccatgagggagtaccctctgttctttgagttcattcctcagaaaccacattacagaggcttcgtgaactatgatgaaactttaggagatctaccttacagtggattatggtttttgctaattggcttggctaaggaggtgctcaagacgtcatgtgacacagatgcttctgaaattgcatatctgatgaaaaaagcccagcatttagagcaactgggtttcaacgtgacacatctcattgcccgcttaaaggagccacaaattaggcttaagaagcttcaagattctagagcaaggcttgatcatgcccgtgagaaagaggagggcaacgtagtcgagtctctttcaagccatctgaataaactgaagggcaacataaggatgatggatagtcatctggatggaacgaagcaagcttttatttcaaatatacaagataaattgaatgaaggaattaatcttgccagtttggaaaaggaagtagaaactgctgaaaaatgttgtcaggcaatgaaggatgaagtagctgcaatgagaatgaggctttctgtgtgctcctggataagcaattgcagtctggaaggataaggaagtgtcctaccgaaaaaggaaaaggcaaaggcaaggactactgtacataggacgagatcacaaaacttaataaacttctcagaatacttgttcaggcatgcagaacgtaattgcattcttctgtgtaaatatgaagcatgaatgtgcatctactgcaagcaatagctcatttgaacagcagactagagaacaaacgtgggccgaaaaatgatcagaaatagagacaacactgatttttaggaaggaggatcttgaacttgttgattcggttttgtagttggcaaggaatgagtcaaaaagcaaatgtatatcctctcctggtatagccattatcaggccctgtcccttctggtaaggcttgcaatatttcgtggattatgaacccaggtcgctttgatgatatttacttgcaattgttcataatctttatgtgggattattaatttctgattttaatactacctgaagtttcttcttggctaaagggcattgccataatgccatttcccttgtgaaacgatgggacctgttgtatggtggatttattgcttcccactatattctcacagtattgtataagaaaatttctttatataatctctttaaacatgcacaggagtaaatgtcgtattgtagctttataatcacatttgagcaaatttcatgtgttggagaatgtcatattgtagctttataaacatacttgaacaatccctttgttaagtttgtggatctcaatttgtgctaacttcccatcatggattagaaatcaaaactgaagtatgttgataaactgatcaatggattggcacctgttaaatgaactgagcaggaatgcatcgatacattcagaactgtcattttcaggtgcttggagtttacaacgaatgactatgtagaaaacaacaaatgtacatcctcctatcaaaataaaaatgtatacccgcctagtattgtgtcgactgccattctgccatctgctcccagtcattatgagacacctggtctgtcatgatcagcagtaatctgatcacactgagatgtgagatccgatgccagcctgtgggaacttgttaccgctgccccacgaacgtgaagcgtaaagcgttacaatcccgtcatcgtcttctccgtctccacatcctttcagccatggatagcagcatagctccacatactcctatggcgttctgtttgtcttggccgctgccatcgaccaaggtgccactggctgccaccatggtcgccattgtgctacgtctgacatcttgctgcagactgcagagcttgtgggctttgttactcagtttttgttacccatttacgttactgagtggaaaccatcccgttactttgttacaatgacgtttatgtcacattttctgaaccaaacagcacctaatacaagttaatttctcctcggctaaagtgagttgccgtatccttagtgaaatgatagaatcttgtatggtggaaccaatgtttctcattatattctttaatgtactgacgttgcgaactat

SEQ ID NO: 891 - DNA, 4241 bp, Zea Mays
ctttcatctctccagcctacctgcccggcggcggttgctcggcggccaccgtacccgcgaaatgcgagcattcaacggccgccgcctccacgatccgaagcccccctcattcctccccctccccttagccccacgcaccacaacgccgccaccgccgcccccctcctcgccgccgcacgccatcccgccgctcaacttccgctacctcaccccctgtccgcgctggtctgcctgggtcgccaccgcactcagcgaccccgttttcgctcccatcctcgcctcgtccgccatctccggcgccgtcgccgcctccaccgccgtcgtctcccccgaccgtgcggccctctccgctctgctctcgctctgggacccggatacccacgcgttccgtctcccagcgggccccgccaccttcacactcgaggatgcgctcgtcctcgctggtctaccgcccgcaggcgcgccgctggaccggaccctcacgccagaggaggatgacctccgcgttcgcctcgttgtcgagagggagaagatcaaggagctccacccctgtgcccgcgccgcgcgccgcgtgtctgcggaggtgtggctcgagtggttcgacggcggtggcatacgccccggcgaggacgacgaactgcggtggcttgggttcctcgcttactggctcgctttttttgttacgccaaggctccggtcaaggggtggcgagctgccggagcgcgtcttcgcacatgctgcgaggcttagtcttggcgagcgcattgcccttggccaggggatggtggcaaatctatatgcggaaatggataagattgttacttgcactgtggccgatggtgtgtgtggccgtctagatgtctgcgtgccagtctggatgctgcaggtgtggatgtgggagcgctacaagaggctgtgcccgccggagctgaaggcaccgcagttccctgtctccaatgtcagggtattgtattggagccggaggaagaagaagagcacatctgaagaggctctaaagattttgctggacgaagtatgctttgagtggaggccctatcggcacaactccctcaactggatggaacccaagtggttcaacaaggacaccattttggtgacctgtcatggtaaagataagccagagtggttgttggattacattgctgttatcagtcaaacaatgttgaccgggtttcatagtgatgacaccgacaattcagtactgtacaatccacagcttgttgcgagacagtttggttatgatcaggctgctcctgtgtccattgtcagggaaatccactttgagggaatcgagttgtggataccaagtatcggtagatatgggatgcctggtgaagattatgttgcatggtgtagcagcagtgggcagttctacaagcatcaaaatgatgtccaatatggttgctcggtattacgaaatcatgaaaatggggctatttcgtcgcaactgaatgtaaatgagaaatgtgttgtagtgccaacacttgatcaatttatcacccaagtcactaggagagaccacatcaattacattgtagaagggcagccggagaaaatggataatggaagtcatgaggatgaaacagaggtgattgtctgtggccttgaagcttgtgtcaaggatagcagaactacttcagtgaaacagaatgtgcagaaacaaagagataaatttgctgaagatggaggtgatagtaagaagaaaagaaaagtagaaagtaacacgaaaaggagttcgttgcaattggaaggtcagaagtattcttcactccagaaagctctaaattctgattctaagaaatgtgaggagttggctcaagttgacagtgatgatgaatgcattgttctcgaacagcccaagaataaatgtgaagtaataaacctggatgatgatgaggaacagagtgtttctaatcgagaacatcataacatgcaacttgtcctagaactggaagagtttgtccgctctggtcttctctcgcaatgggaggaaagctcagatgaagatgatgtaagtggaagcaagcaagaaacccagaagaaaagcaacaatgacccctatgctgaagcagccatgagggagtaccctctgttctttgagttcattcctcagaaaccacattacagaggcttcgtgaactatgatgaaactttaggagatctaccttacagtggattatggtttttgctaattggcttggctaaggaggtgctcaagacgtcatgtgacacagatgcttctgaaattgcatatctgatgaaaaaagcccagcatttagagcaactgggtttcaacgtgacacatctcattgcccgcttaaaggagccacaaattaggcttaagaagcttcaagattctagagcaaggcttgatcatgcccgtgagaaagaggagggcaacgtagtcgagtctctttcaagccatctgaataaactgaagggcaacataaggatgatggatagtcatctggatggaacgaagcaagcttttatttcaaatatacaagataaattgaatgaaggaattaatcttgccagtttggaaaaggaagtagaaactgctgaaaaatgttgtcaggcaatgaaggatgaagtagctgcaatgagaatgaggctttctgtgtgctcctggataagcaattgcagtctggaaggataaggaagtgtcctaccgaaaaaggaaaaggcaaaggcaaggactactgtacataggacgagatcacaaaacttaataaacttctcagaatacttgttcaggcatgcagaacgtaattgcattcttctgtgtaaatatgaagcatgaatgtgcatctactgcaagcaatagctcatttgaacagcagactagagaacaaacgtgggccgaaaaatgatcagaaatagagacaacactgatttttaggaaggaggatcttgaacttgttgattcggttttgtagttggcaaggaatgagtcaaaaagcaaatgtatatcctctcctggtatagccattatcaggccctgtcccttctggtaaggcttgcaatatttcgtggattatgaacccaggtcgctttgatgatatttacttgcaattgttcataatctttatgtgggattattaatttctgattttaatactacctgaagtttcttcttggctaaagggcattgccataatgccatttcccttgtgaaacgatgggacctgttgtatggtggatttattgcttcccactatattctcacagtattgtataagaaaatttctttatataatctctttaaacatgcacaggagtaaatgtcgtattgtagctttataatcacatttgagcaaatttcatgtgttggagaatgtcatattgtagctttataaacatacttgaacaatccctttgttaagtttgtggatctcaatttgtgctaacttcccatcatggattagaaatcaaaactgaagtatgttgataaactgatcaatggattggcacctgttaaatgaactgagcaggaatgcatcgatacattcagaactgtcattttcaggtgcttggagtttacaacgaatgactatgtagaaaacaacaaatgtacatcctcctatcaaaataaaaatgtatacccgcctagtattgtgtcgactgccattctgccatctgctcccagtcattatgagacacctggtctgtcatggggtaacagatattgctagattctgtttgtttcagatcagcagtaatctgatcacactgagatgtgagatccgatgccagcctgtgggaacttgttaccgctgccccacgaacgtgaagcgtaaagcgttacaatcccgtcatcgtcttctccgtctccacatcctttcagccatggatagcagcatagctccacatactcctatggcgttctgtttgtcttggccgctgccatcgaccaaggtgccactggctgccaccatggtcgccattgtgctacgtctgacatcttgctgcagactgcagagcttgtgggctttgttactcagtttttgttacccatttacgttactgagtggaaaccatcccgttactttgttacaatgacgtttatgtcacattttctgaaccaaacagcacctaatacaagttaatttctcctcggctaaagtgagttgccgtatccttagtgaaatgatagaatcttgtatggtggaaccaatgtttctcattatattctttaatgtactgacgttgcgaactat

SEQ ID NO: 892 - DNA, 3515 bp, Zea Mays
ctttcatctctccagcctacctgcccggcggcggttgctcggcggccaccgtacccgcgaaatgcgagcattcaacggccgccgcctccacgatccgaagcccccctcattcctccccctccccttagccccacgcaccacaacgccgccaccgccgcccccctcctcgccgccgcacgccatcccgccgctcaacttccgctacctcaccccctgtccgcgctggtctgcctgggtcgccaccgcactcagcgaccccgttttcgctcccatcctcgcctcgtccgccatctccggcgccgtcgccgcctccaccgccgtcgtctcccccgaccgtgcggccctctccgctctgctctcgctctgggacccggatacccacgcgttccgtctcccagcgggccccgccaccttcacactcgaggatgcgctcgtcctcgctggtctaccgcccgcaggcgcgccgctggaccggaccctcacgccagaggaggatgacctccgcgttcgcctcgttgtcgagagggagaagatcaaggagctccacccctgtgcccgcgccgcgcgccgcgtgtctgcggaggtgtggctcgagtggttcgacggcggtggcatacgccccggcgaggacgacgaactgcggtggcttgggttcctcgcttactggctcgctttttttgttacgccaaggctccggtcaaggggtggcgagctgccggagcgcgtcttcgcacatgctgcgaggcttagtcttggcgagcgcattgcccttggccaggggatggtggcaaatctatatgcggaaatggataagattgttacttgcactgtggccgatggtgtgtgtggccgtctagatgtctgcgtgccagtctggatgctgcaggtgtggatgtgggagcgctacaagaggctgtgcccgccggagctgaaggcaccgcagttccctgtctccaatgtcagggtattgtattggagccggaggaagaagaagagcacatctgaagaggctctaaagattttgctggacgaagtatgctttgagtggaggccctatcggcacaactccctcaactggatggaacccaagtggttcaacaaggacaccattttggtgacctgtcatggtaaagataagccagagtggttgttggattacattgctgttatcagtcaaacaatgttgaccgggtttcatagtgatgacaccgacaattcagtactgtacaatccacagcttgttgcgagacagtttggttatgatcaggctgctcctgtgtccattgtcagggaaatccactttgagggaatcgagttgtggataccaagtatcggtagatatgggatgcctggtgaagattatgttgcatggtgtagcagcagtgggcagttctacaagcatcaaaatgatgtccaatatggttgctcggtattacgaaatcatgaaaatggggctatttcgtcgcaactgaatgtaaatgagaaatgtgttgtagtgccaacacttgatcaatttatcacccaagtcactaggagagaccacatcaattacattgtagaagggcagccggagaaaatggataatggaagtcatgaggatgaaacagaggtgattgtctgtggccttgaagcttgtgtcaaggatagcagaactacttcagtgaaacagaatgtgcagaaacaaagagataaatttgctgaagatggaggtgatagtaagaagaaaagaaaagtagaaagtaacacgaaaaggagttcgttgcaattggaaggtcagaagtattcttcactccagaaagctctaaattctgattctaagaaatgtgaggagttggctcaagttgacagtgatgatgaatgcattgttctcgaacagcccaagaataaatgtgaagtaataaacctggatgatgatgaggaacagagtgtttctaatcgagaacatcataacatgcaacttgtcctagaactggaagagtttgtccgctctggtcttctctcgcaatgggaggaaagctcagatgaagatgatgtaagtggaagcaagcaagaaacccagaagaaaagcaacaatgacccctatgctgaagcagccatgagggagtaccctctgttctttgagttcattcctcagaaaccacattacagaggcttcgtgaactatgatgaaactttaggagatctaccttacagtggattatggtttttgctaattggcttggctaaggaggtgctcaagacgtcatgtgacacagatgcttctgaaattgcatatctgatgaaaaaagcccagcatttagagcaactgggtttcaacgtgacacatctcattgcccgcttaaaggagccacaaattaggcttaagaagcttcaagattctagagcaaggcttgatcatgcccgtgagaaagaggagggcaacgtagtcgagtctctttcaagccatctgaataaactgaagggcaacataaggatgatggatagtcatctggatggaacgaagcaagcttttatttcaaatatacaagataaattgaatgaaggaattaatcttgccagtttggaaaaggaagtagaaactgctgaaaaatgttgtcaggcaatgaaggatgaagtagctgcaatgagaatgaggctttctgtgtgctcctggataagcaattgcagtctggaaggataaggaagtgtcctaccgaaaaaggaaaaggcaaaggaaggaggatcttgaacttgttgattcggttttgtagttggcaaggaatgagtcaaaaagcaaatgtatatcctctcctggtatagccattatcaggccctgtcccttctggtgcttggagtttacaacgaatgactatgtagaaaacaacaaatgtacatcctcctatcaaaataaaaatgtatacccgcctagtattgtgtcgactgccattctgccatctgctcccagtcattatgagacacctggtctgtcatggggtaacagatattgctagattctgtttgtttcagatcagcagtaatctgatcacactgagatgtgagatccgatgccagcctgtgggaacttgttaccgctgccccacgaacgtgaagcgtaaagcgttacaatcccgtcatcgtcttctccgtctccacatcctttcagccatggatagcagcatagctccacatactcctatggcgttctgtttgtcttggccgctgccatcgaccaaggtgccactggctgccaccatggtcgccattgtgctacgtctgacatcttgctgcagactgcagagcttgtgggctttgttactcagtttttgttacccatttacgttactgagtggaaaccatcccgttactttgttacaatgacgtttatgtcacattttctgaaccaaacagcacctaatacaagttaatttctcctcggctaaagtgagttgccgtatccttagtgaaatgatagaatcttgtatggtggaaccaatgtttctcattatattctttaatgtactgacgttgcgaactat

SEQ ID NO: 893 - DNA, 3333 bp, Zea Mays
ctttcatctctccagcctacctgcccggcggcggttgctcggcggccaccgtacccgcgaaatgcgagcattcaacggccgccgcctccacgatccgaagcccccctcattcctccccctccccttagccccacgcaccacaacgccgccaccgccgcccccctcctcgccgccgcacgccatcccgccgctcaacttccgctacctcaccccctgtccgcgctggtctgcctgggtcgccaccgcactcagcgaccccgttttcgctcccatcctcgcctcgtccgccatctccggcgccgtcgccgcctccaccgccgtcgtctcccccgaccgtgcggccctctccgctctgctctcgctctgggacccggatacccacgcgttccgtctcccagcgggccccgccaccttcacactcgaggatgcgctcgtcctcgctggtctaccgcccgcaggcgcgccgctggaccggaccctcacgccagaggaggatgacctccgcgttcgcctcgttgtcgagagggagaagatcaaggagctccacccctgtgcccgcgccgcgcgccgcgtgtctgcggaggtgtggctcgagtggttcgacggcggtggcatacgccccggcgaggacgacgaactgcggtggcttgggttcctcgcttactggctcgctttttttgttacgccaaggctccggtcaaggggtggcgagctgccggagcgcgtcttcgcacatgctgcgaggcttagtcttggcgagcgcattgcccttggccaggggatggtggcaaatctatatgcggaaatggataagattgttacttgcactgtggccgatggtgtgtgtggccgtctagatgtctgcgtgccagtctggatgctgcaggtgtggatgtgggagcgctacaagaggctgtgcccgccggagctgaaggcaccgcagttccctgtctccaatgtcagggtattgtattggagccggaggaagaagaagagcacatctgaagaggctctaaagattttgctggacgaagtatgctttgagtggaggccctatcggcacaactccctcaactggatggaacccaagtggttcaacaaggacaccattttggtgacctgtcatggtaaagataagccagagtggttgttggattacattgctgttatcagtcaaacaatgttgaccgggtttcatagtgatgacaccgacaattcagtactgtacaatccacagcttgttgcgagacagtttggttatgatcaggctgctcctgtgtccattgtcagggaaatccactttgagggaatcgagttgtggataccaagtatcggtagatatgggatgcctggtgaagattatgttgcatggtgtagcagcagtgggcagttctacaagcatcaaaatgatgtccaatatggttgctcggtattacgaaatcatgaaaatggggctatttcgtcgcaactgaatgtaaatgagaaatgtgttgtagtgccaacacttgatcaatttatcacccaagtcactaggagagaccacatcaattacattgtagaagggcagccggagaaaatggataatggaagtcatgaggatgaaacagaggtgattgtctgtggccttgaagcttgtgtcaaggatagcagaactacttcagtgaaacagaatgtgcagaaacaaagagataaatttgctgaagatggaggtgatagtaagaagaaaagaaaagtagaaagtaacacgaaaaggagttcgttgcaattggaaggtcagaagtattcttcactccagaaagctctaaattctgattctaagaaatgtgaggagttggctcaagttgacagtgatgatgaatgcattgttctcgaacagcccaagaataaatgtgaagtaataaacctggatgatgatgaggaacagagtgtttctaatcgagaacatcataacatgcaacttgtcctagaactggaagagtttgtccgctctggtcttctctcgcaatgggaggaaagctcagatgaagatgatgtaagtggaagcaagcaagaaacccagaagaaaagcaacaatgacccctatgctgaagcagccatgagggagtaccctctgttctttgagttcattcctcagaaaccacattacagaggcttcgtgaactatgatgaaactttaggagatctaccttacagtggattatggtttttgctaattggcttggctaaggaggtgctcaagacgtcatgtgacacagatgcttctgaaattgcatatctgatgaaaaaagcccagcatttagagcaactgggtttcaacgtgacacatctcattgcccgcttaaaggagccacaaattaggcttaagaagcttcaagattctagagcaaggcttgatcatgcccgtgagaaagaggagggcaacgtagtcgagtctctttcaagccatctgaataaactgaagggcaacataaggatgatggatagtcatctggatggaacgaagcaagcttttatttcaaatatacaagataaattgaatgaaggaattaatcttgccagtttggaaaaggaagtagaaactgctgaaaaatgttgtcaggcaatgaaggatgaagtagctgcaatgagaatgaggctttctgtgtgctcctggataagcaattgcagtctggaaggataaggaagtgtcctaccgaaaaaggaaaaggcaaaggaaggaggatcttgaacttgttgattcggttttgtagttggcaaggaatgagtcaaaaagcaaatgtatatcctctcctggtatagccattatcaggccctgtcccttctgatcagcagtaatctgatcacactgagatgtgagatccgatgccagcctgtgggaacttgttaccgctgccccacgaacgtgaagcgtaaagcgttacaatcccgtcatcgtcttctccgtctccacatcctttcagccatggatagcagcatagctccacatactcctatggcgttctgtttgtcttggccgctgccatcgaccaaggtgccactggctgccaccatggtcgccattgtgctacgtctgacatcttgctgcagactgcagagcttgtgggctttgttactcagtttttgttacccatttacgttactgagtggaaaccatcccgttactttgttacaatgacgtttatgtcacattttctgaaccaaacagcacctaatacaagttaatttctcctcggctaaagtgagttgccgtatccttagtgaaatgatagaatcttgtatggtggaaccaatgtttctcattatattctttaatgtactgacgttgcgaactat

SEQ ID NO: 894 - DNA, 3856 bp, Zea Mays
atgcgagcattcaacggccgccgcctccacgatccgaagcccccctcattcctccccctccccttagccccacgcaccacaacgccgccaccgccgcccccctcctcgccgccgcacgccatcccgccgctcaacttccgctacctcaccccctgtccgcgctggtctgcctgggtcgccaccgcactcagcgaccccgttttcgctcccatcctcgcctcgtccgccatctccggcgccgtcgccgcctccaccgccgtcgtctcccccgaccgtgcggccctctccgctctgctctcgctctgggacccggatacccacgcgttccgtctcccagcgggccccgccaccttcacactcgaggatgcgctcgtcctcgctggtctaccgcccgcaggcgcgccgctggaccggaccctcacgccagaggaggatgacctccgcgttcgcctcgttgtcgagagggagaagatcaaggagctccacccctgtgcccgcgccgcgcgccgcgtgtctgcggaggtgtggctcgagtggttcgacggcggtggcatacgccccggcgaggacgacgaactgcggtggcttgggttcctcgcttactggctcgctttttttgttacgccaaggctccggtcaaggggtggcgagctgccggagcgcgtcttcgcacatgctgcgaggcttagtcttggcgagcgcattgcccttggccaggggatggtggcaaatctatatgcggaaatggataagattgttacttgcactgtggccgatggtgtgtgtggccgtctagatgtctgcgtgccagtctggatgctgcaggtgtggatgtgggagcgctacaagaggctgtgcccgccggagctgaaggcaccgcagttccctgtctccaatgtcagggtattgtattggagccggaggaagaagaagagcacatctgaagaggctctaaagattttgctggacgaagtatgctttgagtggaggccctatcggcacaactccctcaactggatggaacccaagtggttcaacaaggacaccattttggtgacctgtcatggtaaagataagccagagtggttgttggattacattgctgttatcagtcaaacaatgttgaccgggtttcatagtgatgacaccgacaattcagtactgtacaatccacagcttgttgcgagacagtttggttatgatcaggctgctcctgtgtccattgtcagggaaatccactttgagggaatcgagttgtggataccaagtatcggtagatatgggatgcctggtgaagattatgttgcatggtgtagcagcagtgggcagttctacaagcatcaaaatgatgtccaatatggttgctcggtattacgaaatcatgaaaatggggctatttcgtcgcaactgaatgtaaatgagaaatgtgttgtagtgccaacacttgatcaatttatcacccaagtcactaggagagaccacatcaattacattgtagaagggcagccggagaaaatggataatggaagtcatgaggatgaaacagaggtgattgtctgtggccttgaagcttgtgtcaaggatagcagaactacttcagtgaaacagaatgtgcagaaacaaagagataaatttgctgaagatggaggtgatagtaagaagaaaagaaaagtagaaagtaacacgaaaaggagttcgttgcaattggaaggtcagaagtattcttcactccagaaagctctaaattctgattctaagaaatgtgaggagttggctcaagttgacagtgatgatgaatgcattgttctcgaacagcccaagaataaatgtgaagtaataaacctggatgatgatgaggaacagagtgtttctaatcgagaacatcataacatgcaacttgtcctagaactggaagagtttgtccgctctggtcttctctcgcaatgggaggaaagctcagatgaagatgatgtaagtggaagcaagcaagaaacccagaagaaaagcaacaatgacccctatgctgaagcagccatgagggagtaccctctgttctttgagttcattcctcagaaaccacattacagaggcttcgtgaactatgatgaaactttaggagatctaccttacagtggattatggtttttgctaattggcttggctaaggaggtgctcaagacgtcatgtgacacagatgcttctgaaattgcatatctgatgaaaaaagcccagcatttagagcaactgggtttcaacgtgacacatctcattgcccgcttaaaggagccacaaattaggcttaagaagcttcaagattctagagcaaggcttgatcatgcccgtgagaaagaggagggcaacgtagtcgagtctctttcaagccatctgaataaactgaagggcaacataaggatgatggatagtcatctggatggaacgaagcaagcttttatttcaaatatacaagataaattgaatgaaggaattaatcttgccagtttggaaaaggaagtagaaactgctgaaaaatgttgtcaggcaatgaaggatgaagtagctgcaatgagaatgaggaaggaggatcttgaacttgttgattcggttttgtagttggcaaggaatgagtcaaaaagcaaatgtatatcctctcctggtatagccattatcaggccctgtcccttctggtaaggcttgcaatatttcgtggattatgaacccaggtcgctttgatgatatttacttgcaattgttcataatctttatgtgggattattaatttctgattttaatactacctgaagtttcttcttggctaaagggcattgccataatgccatttcccttgtgaaacgatgggacctgttgtatggtggatttattgcttcccactatattctcacagtattgtataagaaaatttctttatataatctctttaaacatgcacaggagtaaatgtcgtattgtagctttataatcacatttgagcaaatttcatgtgttggagaatgtcatattgtagctttataaacatacttgaacaatccctttgttaagtttgtggatctcaatttgtgctaacttcccatcatggattagaaatcaaaactgaagtatgttgataaactgatcaatggattggcacctgttaaatgaactgagcaggaatgcatcgatacattcagaactgtcattttcaggtgcttggagtttacaacgaatgactatgtagaaaacaacaaatgtacatcctcctatcaaaataaaaatgtatacccgcctagtattgtgtcgactgccattctgccatctgctcccagtcattatgagacacctggtctgtcatgatcagcagtaatctgatcacactgagatgtgagatccgatgccagcctgtgggaacttgttaccgctgccccacgaacgtgaagcgtaaagcgttacaatcccgtcatcgtcttctccgtctccacatcctttcagccatggatagcagcatagctccacatactcctatggcgttctgtttgtcttggccgctgccatcgaccaaggtgccactggctgccaccatggtcgccattgtgctacgtctgacatcttgctgcagactgcagagcttgtgggctttgttactcagtttttgttacccatttacgttactgagtggaaaccatcccgttactttgttacaatgacgtttatgtcacattttctgaaccaaacagcacctaatacaagttaatttctcctcggctaaagtgagttgccgtatccttagtgaaatgatagaatcttgtatggtggaaccaatgtttctcattatattctttaatgtactgacgttgcgaactat

SEQ ID NO: 895 - DNA, 3469 bp, Zea Mays
atgcgagcattcaacggccgccgcctccacgatccgaagcccccctcattcctccccctccccttagccccacgcaccacaacgccgccaccgccgcccccctcctcgccgccgcacgccatcccgccgctcaacttccgctacctcaccccctgtccgcgctggtctgcctgggtcgccaccgcactcagcgaccccgttttcgctcccatcctcgcctcgtccgccatctccggcgccgtcgccgcctccaccgccgtcgtctcccccgaccgtgcggccctctccgctctgctctcgctctgggacccggatacccacgcgttccgtctcccagcgggccccgccaccttcacactcgaggatgcgctcgtcctcgctggtctaccgcccgcaggcgcgccgctggaccggaccctcacgccagaggaggatgacctccgcgttcgcctcgttgtcgagagggagaagatcaaggagctccacccctgtgcccgcgccgcgcgccgcgtgtctgcggaggtgtggctcgagtggttcgacggcggtggcatacgccccggcgaggacgacgaactgcggtggcttgggttcctcgcttactggctcgctttttttgttacgccaaggctccggtcaaggggtggcgagctgccggagcgcgtcttcgcacatgctgcgaggcttagtcttggcgagcgcattgcccttggccaggggatggtggcaaatctatatgcggaaatggataagattgttacttgcactgtggccgatggtgtgtgtggccgtctagatgtctgcgtgccagtctggatgctgcaggtgtggatgtgggagcgctacaagaggctgtgcccgccggagctgaaggcaccgcagttccctgtctccaatgtcagggtattgtattggagccggaggaagaagaagagcacatctgaagaggctctaaagattttgctggacgaagtatgctttgagtggaggccctatcggcacaactccctcaactggatggaacccaagtggttcaacaaggacaccattttggtgacctgtcatggtaaagataagccagagtggttgttggattacattgctgttatcagtcaaacaatgttgaccgggtttcatagtgatgacaccgacaattcagtactgtacaatccacagcttgttgcgagacagtttggttatgatcaggctgctcctgtgtccattgtcagggaaatccactttgagggaatcgagttgtggataccaagtatcggtagatatgggatgcctggtgaagattatgttgcatggtgtagcagcagtgggcagttctacaagcatcaaaatgatgtccaatatggttgctcggtattacgaaatcatgaaaatggggctatttcgtcgcaactgaatgtaaatgagaaatgtgttgtagtgccaacacttgatcaatttatcacccaagtcactaggagagaccacatcaattacattgtagaagggcagccggagaaaatggataatggaagtcatgaggatgaaacagaggtgattgtctgtggccttgaagcttgtgtcaaggatagcagaactacttcagtgaaacagaatgtgcagaaacaaagagataaatttgctgaagatggaggtgatagtaagaagaaaagaaaagtagaaagtaacacgaaaaggagttcgttgcaattggaaggtcagaagtattcttcactccagaaagctctaaattctgattctaagaaatgtgaggagttggctcaagttgacagtgatgatgaatgcattgttctcgaacagcccaagaataaatgtgaagtaataaacctggatgatgatgaggaacagagtgtttctaatcgagaacatcataacatgcaacttgtcctagaactggaagagtttgtccgctctggtcttctctcgcaatgggaggaaagctcagatgaagatgatgtaagtggaagcaagcaagaaacccagaagaaaagcaacaatgacccctatgctgaagcagccatgagggagtaccctctgttctttgagttcattcctcagaaaccacattacagaggcttcgtgaactatgatgaaactttaggagatctaccttacagtggattatggtttttgctaattggcttggctaaggaggtgctcaagacgtcatgtgacacagatgcttctgaaattgcatatctgatgaaaaaagcccagcatttagagcaactgggtttcaacgtgacacatctcattgcccgcttaaaggagccacaaattaggcttaagaagcttcaagattctagagcaaggcttgatcatgcccgtgagaaagaggagggcaacgtagtcgagtctctttcaagccatctgaataaactgaagggcaacataaggatgatggatagtcatctggatggaacgaagcaagcttttatttcaaatatacaagataaattgaatgaaggaattaatcttgccagtttggaaaaggaagtagaaactgctgaaaaatgttgtcaggcaatgaaggatgaagtagctgcaatgagaatgaggctttctgtgtgctcctggataagcaattgcagtctggaaggataaggaagtgtcctaccgaaaaaggaaaaggcaaaggaaggaggatcttgaacttgttgattcggttttgtagttggcaaggaatgagtcaaaaagcaaatgtatatcctctcctggtatagccattatcaggccctgtcccttctgaactgtcattttcaggtgcttggagtttacaacgaatgactatgtagaaaacaacaaatgtacatcctcctatcaaaataaaaatgtatacccgcctagtattgtgtcgactgccattctgccatctgctcccagtcattatgagacacctggtctgtcatggggtaacagatattgctagattctgtttgtttcagatcagcagtaatctgatcacactgagatgtgagatccgatgccagcctgtgggaacttgttaccgctgccccacgaacgtgaagcgtaaagcgttacaatcccgtcatcgtcttctccgtctccacatcctttcagccatggatagcagcatagctccacatactcctatggcgttctgtttgtcttggccgctgccatcgaccaaggtgccactggctgccaccatggtcgccattgtgctacgtctgacatcttgctgcagactgcagagcttgtgggctttgttactcagtttttgttacccatttacgttactgagtggaaaccatcccgttactttgttacaatgacgtttatgtcacattttctgaaccaaacagcacctaatacaagttaatttctcctcggctaaagtgagttgccgtatccttagtgaaatgatagaatcttgtatggtggaaccaatgtttctcattatattctttaatgtactgacgttgcgaactat

SEQ ID NO: 896 - DNA, 3375 bp, Zea Mays
atgcgagcattcaacggccgccgcctccacgatccgaagcccccctcattcctccccctccccttagccccacgcaccacaacgccgccaccgccgcccccctcctcgccgccgcacgccatcccgccgctcaacttccgctacctcaccccctgtccgcgctggtctgcctgggtcgccaccgcactcagcgaccccgttttcgctcccatcctcgcctcgtccgccatctccggcgccgtcgccgcctccaccgccgtcgtctcccccgaccgtgcggccctctccgctctgctctcgctctgggacccggatacccacgcgttccgtctcccagcgggccccgccaccttcacactcgaggatgcgctcgtcctcgctggtctaccgcccgcaggcgcgccgctggaccggaccctcacgccagaggaggatgacctccgcgttcgcctcgttgtcgagagggagaagatcaaggagctccacccctgtgcccgcgccgcgcgccgcgtgtctgcggaggtgtggctcgagtggttcgacggcggtggcatacgccccggcgaggacgacgaactgcggtggcttgggttcctcgcttactggctcgctttttttgttacgccaaggctccggtcaaggggtggcgagctgccggagcgcgtcttcgcacatgctgcgaggcttagtcttggcgagcgcattgcccttggccaggggatggtggcaaatctatatgcggaaatggataagattgttacttgcactgtggccgatggtgtgtgtggccgtctagatgtctgcgtgccagtctggatgctgcaggtgtggatgtgggagcgctacaagaggctgtgcccgccggagctgaaggcaccgcagttccctgtctccaatgtcagggtattgtattggagccggaggaagaagaagagcacatctgaagaggctctaaagattttgctggacgaagtatgctttgagtggaggccctatcggcacaactccctcaactggatggaacccaagtggttcaacaaggacaccattttggtgacctgtcatggtaaagataagccagagtggttgttggattacattgctgttatcagtcaaacaatgttgaccgggtttcatagtgatgacaccgacaattcagtactgtacaatccacagcttgttgcgagacagtttggttatgatcaggctgctcctgtgtccattgtcagggaaatccactttgagggaatcgagttgtggataccaagtatcggtagatatgggatgcctggtgaagattatgttgcatggtgtagcagcagtgggcagttctacaagcatcaaaatgatgtccaatatggttgctcggtattacgaaatcatgaaaatggggctatttcgtcgcaactgaatgtaaatgagaaatgtgttgtagtgccaacacttgatcaatttatcacccaagtcactaggagagaccacatcaattacattgtagaagggcagccggagaaaatggataatggaagtcatgaggatgaaacagaggtgattgtctgtggccttgaagcttgtgtcaaggatagcagaactacttcagtgaaacagaatgtgcagaaacaaagagataaatttgctgaagatggaggtgatagtaagaagaaaagaaaagtagaaagtaacacgaaaaggagttcgttgcaattggaaggtcagaagtattcttcactccagaaagctctaaattctgattctaagaaatgtgaggagttggctcaagttgacagtgatgatgaatgcattgttctcgaacagcccaagaataaatgtgaagtaataaacctggatgatgatgaggaacagagtgtttctaatcgagaacatcataacatgcaacttgtcctagaactggaagagtttgtccgctctggtcttctctcgcaatgggaggaaagctcagatgaagatgatgtaagtggaagcaagcaagaaacccagaagaaaagcaacaatgacccctatgctgaagcagccatgagggagtaccctctgttctttgagttcattcctcagaaaccacattacagaggcttcgtgaactatgatgaaactttaggagatctaccttacagtggattatggtttttgctaattggcttggctaaggaggtgctcaagacgtcatgtgacacagatgcttctgaaattgcatatctgatgaaaaaagcccagcatttagagcaactgggtttcaacgtgacacatctcattgcccgcttaaaggagccacaaattaggcttaagaagcttcaagattctagagcaaggcttgatcatgcccgtgagaaagaggagggcaacgtagtcgagtctctttcaagccatctgaataaactgaagggcaacataaggatgatggatagtcatctggatggaacgaagcaagcttttatttcaaatatacaagataaattgaatgaaggaattaatcttgccagtttggaaaaggaagtagaaactgctgaaaaatgttgtcaggcaatgaaggatgaagtagctgcaatgagaatgaggaaggaggatcttgaacttgttgattcggttttgtagttggcaaggaatgagtcaaaaagcaaatgtatatcctctcctggtatagccattatcaggccctgtcccttctggtgcttggagtttacaacgaatgactatgtagaaaacaacaaatgtacatcctcctatcaaaataaaaatgtatacccgcctagtattgtgtcgactgccattctgccatctgctcccagtcattatgagacacctggtctgtcatggggtaacagatattgctagattctgtttgtttcagatcagcagtaatctgatcacactgagatgtgagatccgatgccagcctgtgggaacttgttaccgctgccccacgaacgtgaagcgtaaagcgttacaatcccgtcatcgtcttctccgtctccacatcctttcagccatggatagcagcatagctccacatactcctatggcgttctgtttgtcttggccgctgccatcgaccaaggtgccactggctgccaccatggtcgccattgtgctacgtctgacatcttgctgcagactgcagagcttgtgggctttgttactcagtttttgttacccatttacgttactgagtggaaaccatcccgttactttgttacaatgacgtttatgtcacattttctgaaccaaacagcacctaatacaagttaatttctcctcggctaaagtgagttgccgtatccttagtgaaatgatagaatcttgtatggtggaaccaatgtttctcattatattctttaatgtactgacgttgcgaactat

SEQ ID NO: 897 - DNA, 3340 bp, Zea Mays
atgcgagcattcaacggccgccgcctccacgatccgaagcccccctcattcctccccctccccttagccccacgcaccacaacgccgccaccgccgcccccctcctcgccgccgcacgccatcccgccgctcaacttccgctacctcaccccctgtccgcgctggtctgcctgggtcgccaccgcactcagcgaccccgttttcgctcccatcctcgcctcgtccgccatctccggcgccgtcgccgcctccaccgccgtcgtctcccccgaccgtgcggccctctccgctctgctctcgctctgggacccggatacccacgcgttccgtctcccagcgggccccgccaccttcacactcgaggatgcgctcgtcctcgctggtctaccgcccgcaggcgcgccgctggaccggaccctcacgccagaggaggatgacctccgcgttcgcctcgttgtcgagagggagaagatcaaggagctccacccctgtgcccgcgccgcgcgccgcgtgtctgcggaggtgtggctcgagtggttcgacggcggtggcatacgccccggcgaggacgacgaactgcggtggcttgggttcctcgcttactggctcgctttttttgttacgccaaggctccggtcaaggggtggcgagctgccggagcgcgtcttcgcacatgctgcgaggcttagtcttggcgagcgcattgcccttggccaggggatggtggcaaatctatatgcggaaatggataagattgttacttgcactgtggccgatggtgtgtgtggccgtctagatgtctgcgtgccagtctggatgctgcaggtgtggatgtgggagcgctacaagaggctgtgcccgccggagctgaaggcaccgcagttccctgtctccaatgtcagggtattgtattggagccggaggaagaagaagagcacatctgaagaggctctaaagattttgctggacgaagtatgctttgagtggaggccctatcggcacaactccctcaactggatggaacccaagtggttcaacaaggacaccattttggtgacctgtcatggtaaagataagccagagtggttgttggattacattgctgttatcagtcaaacaatgttgaccgggtttcatagtgatgacaccgacaattcagtactgtacaatccacagcttgttgcgagacagtttggttatgatcaggctgctcctgtgtccattgtcagggaaatccactttgagggaatcgagttgtggataccaagtatcggtagatatgggatgcctggtgaagattatgttgcatggtgtagcagcagtgggcagttctacaagcatcaaaatgatgtccaatatggttgctcggtattacgaaatcatgaaaatggggctatttcgtcgcaactgaatgtaaatgagaaatgtgttgtagtgccaacacttgatcaatttatcacccaagtcactaggagagaccacatcaattacattgtagaagggcagccggagaaaatggataatggaagtcatgaggatgaaacagaggtgattgtctgtggccttgaagcttgtgtcaaggatagcagaactacttcagtgaaacagaatgtgcagaaacaaagagataaatttgctgaagatggaggtgatagtaagaagaaaagaaaagtagaaagtaacacgaaaaggagttcgttgcaattggaaggtcagaagtattcttcactccagaaagctctaaattctgattctaagaaatgtgaggagttggctcaagttgacagtgatgatgaatgcattgttctcgaacagcccaagaataaatgtgaagtaataaacctggatgatgatgaggaacagagtgtttctaatcgagaacatcataacatgcaacttgtcctagaactggaagagtttgtccgctctggtcttctctcgcaatgggaggaaagctcagatgaagatgatgtaagtggaagcaagcaagaaacccagaagaaaagcaacaatgacccctatgctgaagcagccatgagggagtaccctctgttctttgagttcattcctcagaaaccacattacagaggcttcgtgaactatgatgaaactttaggagatctaccttacagtggattatggtttttgctaattggcttggctaaggaggtgctcaagacgtcatgtgacacagatgcttctgaaattgcatatctgatgaaaaaagcccagcatttagagcaactgggtttcaacgtgacacatctcattgcccgcttaaaggagccacaaattaggcttaagaagcttcaagattctagagcaaggcttgatcatgcccgtgagaaagaggagggcaacgtagtcgagtctctttcaagccatctgaataaactgaagggcaacataaggatgatggatagtcatctggatggaacgaagcaagcttttatttcaaatatacaagataaattgaatgaaggaattaatcttgccagtttggaaaaggaagtagaaactgctgaaaaatgttgtcaggcaatgaaggatgaagtagctgcaatgagaatgaggaaggaggatcttgaacttgttgattcggttttgtagttggcaaggaatgagtcaaaaagcaaatgtatatcctctcctggtatagccattatcaggccctgtcccttctggtgcttggagtttacaacgaatgactatgtagaaaacaacaaatgtacatcctcctatcaaaataaaaatgtatacccgcctagtattgtgtcgactgccattctgccatctgctcccagtcattatgagacacctggtctgtcatgatcagcagtaatctgatcacactgagatgtgagatccgatgccagcctgtgggaacttgttaccgctgccccacgaacgtgaagcgtaaagcgttacaatcccgtcatcgtcttctccgtctccacatcctttcagccatggatagcagcatagctccacatactcctatggcgttctgtttgtcttggccgctgccatcgaccaaggtgccactggctgccaccatggtcgccattgtgctacgtctgacatcttgctgcagactgcagagcttgtgggctttgttactcagtttttgttacccatttacgttactgagtggaaaccatcccgttactttgttacaatgacgtttatgtcacattttctgaaccaaacagcacctaatacaagttaatttctcctcggctaaagtgagttgccgtatccttagtgaaatgatagaatcttgtatggtggaaccaatgtttctcattatattctttaatgtactgacgttgcgaactat

SEQ ID NO: 898 - DNA, 1223 bp, Zea Mays
actagttaaaaaaacatagtggctccactctccatgatccatcgtctgttccactcagccctgcgccctccctcacctgttcctcctttccatcccaagatttgctcaattccaccagtgaatcccacctcctgctgtcctttcctctcctacatcagcatcaggccgcatcctttttctcttgatcgtttctttttcccttgcacagccacacacttgtaagttgtaacggtggcctcctctattcagacgccaccaagtatggccccctgatccccatcctctccttcacgccatcagtgttttcatgttcgtacactaactgcggtctcatcatgtaggctttctgtgtgctcctggataagcaattgcagtctggaaggataaggaagtgtcctaccgaaaaaggaaaaggcaaaggaaggaggatcttgaacttgttgattcggttttgtagttggcaaggaatgagtcaaaaagcaaatgtatatcctctcctggtatagccattatcaggccctgtcccttctggtgcttggagtttacaacgaatgactatgtagaaaacaacaaatgtacatcctcctatcaaaataaaaatgtatacccgcctagtattgtgtcgactgccattctgccatctgctcccagtcattatgagacacctggtctgtcatgggggtaacagatattgctagattctgtttgtttcagatcagcagtaatctgatcacactgagatgtgagatccgatgccagcctgtgggaacttgttaccgctgccccacgaacgtgaagcgtaaagcgttacaatcccgtcatcgtcttctccgtctccacatcctttcagccatggatagcagcatagctccacatactcctatggcgttctgtttgtcttggccgctgccatcgaccaaggtgccactggctgccaccatggtcgccattgtgctacgtctgacatcttgctgcagactgcagagcttgtgggctttgttactcagtttttgttacccatttacgttactgagtggaaaccatcccgttactttgttacaatgacgtttatgtcacattttctgaaccaaacagcacctaatacaagttaatttctcctcggctaaagtgagttgccgtatccttagtgaaatgatagaatcttgtatggtggaaccaatgtttctcattatattctttaatgtactgacgttgcgaactat

SEQ ID NO: 899 - DNA, 2548 bp, Zea Mays
ccacttttgcccttcctctatccatcactcacgagcgctccaacatcggccgtgatggcggcggctgcgccgtcatattcggcaacaacaactgagtttggagccacgagatctttgtcgccggcaacagtcccggagtcgcccaggttcggatccatggaggcacaaatcactgcatcggccacagatccgaagtcgcctcctcgtccttccttcgctagatgttctccttcgccggcggtcttgttgctagaggcgcccccgacctgtgcatccgtttcaacgccaactcctccaccagtcagttcaatttctacagcctatggctaactcattcggagtaggtttagaaattgattgggattcaattcagctagaccctagatgggaggaggaagactacaagaagttgttaacgtggaagtggtgtatgatacactgggcctgacaaatgaggtgatgggtggaaccaattgtgatggttggcaaaacgattatggtgatgcaggggcagctatagaatgcaaggacattgacgatgacattgtaatgtttgatatgaaaaatccagttatgaggcttggtaacatatatatatagtagcatgaaggagtttaggctcgcaatgatccaatatgcaattaacaaggaatttgagctaggcattgaagctactagtactcgaaggtatagaggttattgtaaaggggatgattgtccatggagtattcatgccagaaaagaagtagaagaatcgcctatcatcattgttactgccatgacagatatccacacttgtacatctagtggtaggtgaaggacaaagacacctactagtggttgggttgctgcccaagcaatacctctcttgaagaagaaacctggcatgggagccaaggagttgcaaaatgcactacatgacacttataatgttcagattgcatatctaactctttggagagggagagagaaggctttgtatgagttgtttggtagttaggaggatagtttccaactttgttctcttggaaggaagctgtgttggagaaaagtttaagaaagcttacgagggaagaatagagcaactaggagataagtctttttggccaaaagtggagatggcaaatgaggtgggggcaccactgggtaggagaggtgtgggcagacaaaggaaaaatagaatcaaaggttgcctagaaggcggtaggggcaagaaagcatgtgcaaacgaaactgtaaagcaatggaaggtaattcggggacaataaggatgtctttggtttgaagtcaaagtaggatgaggcgggggcgacaccgtcccctcaattttttgggatcacgccgtcaccaaaaaattactccggtatttatttcaccccacgtgattctcatccaaacactatagaaactgtagccatccccttccatccctccttatacatccaaccaaacacaccctaaatgtttatattgtggggagctaggccacaagaagaacagccctaaatgtcctttaaatggcacgaagaagaggcgtgtgttttatgtgttgatctttgttcctgtttcctgttctgttttttttttcaaaaacttacagctggtgtgtattcttataggccaaggaagcagcgacataactctactcaaaaatggccaaggaagcagcgacattactcaaaaatggtttcctcgcgacgacagatttacacaagaacctagaacaccgcatttcgacaaagttatacaagaccctggtacaccacatgaacagccatcgtcttcgcagccacttccaagggtattgataaaaaaaatcactccaagaaagaggaagtcggttccactaagcatggacgagatgtagtatctgttagttgtatcatccatgtgttgtcagcatgtgactgcagacatgtgccatgtatcagacttattgtatcagactacgttcagcctactttggaagtctcaatgccctgggaaaagaagaagagagccacgagaaaggaaggggcaaaactggaagtctcaatgtcgctccctggttaacgcccagcgttctcagttccaaatgtgaaagaacatcagctttcaaccattgatagtcatggatctcctcctcttggtggtggtactatcacaggcagcaaattgggtagataatggtatggtgaagaggataagggatgtttcgttctccaggagagtatctccatagttggaaagccacattatatatgatgcacgtgggtttgggatccacttgtggaattttgttttatcatactttcctgtgggttttggaatccactatgatactagcaacaggctagacacatgaatctagagaatgtttcccacagttcgtattgtgcctaggggaaaactataaatggaaaaggtgcaaaacagaaatttgaaccataagactaatttatataagcctagtagtaaaagactccaattctattatagtagcatcatcttggaaacaaactatgattcttgatctatacctataggatcgtatgacgctagaatagac

SEQ ID NO: 900 - DNA, 2553 bp, Zea Mays
ccacttttgcccttcctctatccatcactcacgagcgctccaacatcggccgtgatggcggcggctgcgccgtcatattcggcaacaacaactgagtttggagccacgagatctttgtcgccggcaacagtcccggagtcgcccaggttcggatccatggaggcacaaatcactgcatcggccacagatccgaagtcgcctcctcgtccttccttcgctagatgttctccttcgccggcggtcttgttgctagaggcgcccccgacctgtgcatccgtttcaacgccaactcctccaccagtcagttcaatttctacagcctatggtcatgctaactcattcggagtaggtttagaaattgattgggattcaattcagctagaccctagatgggaggaggaagactacaagaagttgttaacgtggaagtggtgtatgatacactgggcctgacaaatgaggtgatgggtggaaccaattgtgatggttggcaaaacgattatggtgatgcaggggcagctatagaatgcaaggacattgacgatgacattgtaatgtttgatatgaaaaatccagttatgaggcttggtaacatatatatatagtagcatgaaggagtttaggctcgcaatgatccaatatgcaattaacaaggaatttgagctaggcattgaagctactagtactcgaaggtatagaggttattgtaaaggggatgattgtccatggagtattcatgccagaaaagaagtagaagaatcgcctatcatcattgttactgccatgacagatatccacacttgtacatctagtggtaggtgaaggacaaagacacctactagtggttgggttgctgcccaagcaatacctctcttgaagaagaaacctggcatgggagccaaggagttgcaaaatgcactacatgacacttataatgttcagattgcatatctaactctttggagagggagagagaaggctttgtatgagttgtttggtagttaggaggatagtttccaactttgttctcttggaaggaagctgtgttggagaaaagtttaagaaagcttacgagggaagaatagagcaactaggagataagtctttttggccaaaagtggagatggcaaatgaggtgggggcaccactgggtaggagaggtgtgggcagacaaaggaaaaatagaatcaaaggttgcctagaaggcggtaggggcaagaaagcatgtgcaaacgaaactgtaaagcaatggaaggtaattcggggacaataaggatgtctttggtttgaagtcaaagtaggatgaggcgggggcgacaccgtcccctcaattttttgggatcacgccgtcaccaaaaaattactccggtatttatttcaccccacgtgattctcatccaaacactatagaaactgtagccatccccttccatccctccttatacatccaaccaaacacaccctaaatgtttatattgtggggagctaggccacaagaagaacagccctaaatgtcctttaaatggcacgaagaagaggcgtgtgttttatgtgttgatctttgttcctgtttcctgttctgttttttttttcaaaaacttacagctggtgtgtattcttataggccaaggaagcagcgacataactctactcaaaaatggccaaggaagcagcgacattactcaaaaatggtttcctcgcgacgacagatttacacaagaacctagaacaccgcatttcgacaaagttatacaagaccctggtacaccacatgaacagccatcgtcttcgcagccacttccaagggtattgataaaaaaaatcactccaagaaagaggaagtcggttccactaagcatggacgagatgtagtatctgttagttgtatcatccatgtgttgtcagcatgtgactgcagacatgtgccatgtatcagacttattgtatcagactacgttcagcctactttggaagtctcaatgccctgggaaaagaagaagagagccacgagaaaggaaggggcaaaactggaagtctcaatgtcgctccctggttaacgcccagcgttctcagttccaaatgtgaaagaacatcagctttcaaccattgatagtcatggatctcctcctcttggtggtggtactatcacaggcagcaaattgggtagataatggtatggtgaagaggataagggatgtttcgttctccaggagagtatctccatagttggaaagccacattatatatgatgcacgtgggtttgggatccacttgtggaattttgttttatcatactttcctgtgggttttggaatccactatgatactagcaacaggctagacacatgaatctagagaatgtttcccacagttcgtattgtgcctaggggaaaactataaatggaaaaggtgcaaaacagaaatttgaaccataagactaatttatataagcctagtagtaaaagactccaattctattatagtagcatcatcttggaaacaaactatgattcttgatctatacctataggatcgtatgacgctagaatagac

SEQ ID NO: 901 - DNA, 2250 bp, Zea Mays
cttcctctatccatcactcacgagcgctccaacatcggccgtgatggcggcggctgcgccgtcatattcggcaacaacaactgagtttggagccacgagatctttgtcgccggcaacagtcccggagtcgcccaggttcggatccatggaggcacaaatcactgcatcggccacagatccgaagtcgcctcctcgtccttccttcgctagatgttctccttcgccggcggtcttgttgctagaggcgcccccgacctgtgcatccgtttcaacgccaactcctccaccagtcagttcaatttctacagcctatggtcatgctaactcattcggagtaggtttagaaattgattgggattcaattcagctagaccctagatgggaggaggaagactacaagaagttgttaacgtggaagtggtgtatgatacactgggcctgacaaatgaggtgatgggtggaaccaattgtgatggttggcaaaacgattatggtgatgcaggggcagctatagaatgcaaggacattgacgatgacattgtaatgtttgatatgaaaaatccagttatgaggcttggtaacatatatatatagtagcatgaaggagtttaggctcgcaatgatccaatatgcaattaacaaggaatttgagctaggcattgaagctactagtactcgaaggtatagaggttattgtaaaggggatgattgtccatggagtattcatgccagaaaagaagtagaagaatcgcctatcatcattgttactgccatgacagatatccacacttgtacatctagtggtaggtgaaggacaaagacacctactagtggttgggttgctgcccaagcaatacctctcttgaagaagaaacctggcatgggagccaaggagttgcaaaatgcactacatgacacttataatgttcagattgcatatctaactctttggagagggagagagaaggctttgtatgagttgtttggtagttaggaggatagtttccaactttgttctcttggaaggaagctgtgttggagaaaagtttaagaaagcttacgagggaagaatagagcaactaggagataagtctttttggccaaaagtggagatggcaaatgaggtgggggcaccactgggtaggagaggtgtgggcagacaaaggaaaaatagaatcaaaggttgcctagaaggcggtaggggcaagaaagcatgtgcaaacgaaactgtaaagcaatggaaggccaaggaagcagcgacataactctactcaaaaatggttttatgtgttgatctttgttcctgtttcctgttctgtttttttcaaaaacttacagctggtctgtattcttataggccaaggaagcagcgacattactcaaaaatggtttcctcgcgacgacagatttacacaagaacctagaacaccgcatttcgacaaagttatacaagaccctggtacaccacatgaacagccatcgtcttcgcagccacttccaagggtattgataaaaaaaatcactccaagaaagaggaagtcggttccactaagcatggacgagatgtagtatctgttagttgtatcatccatgtgttgtcagcatgtgactgcagacatgtgccatgtatcagacttattgtatcagactacgttcagcctactttggaagtctcaatgccctgggaaaagaagaagagagccacgagaaaggaaggggcaaaactggaagtctcaatgtcgctccctggttaacgcccagcgttctcagttccaaatgtgaaagaacatcagctttcaaccattgatagtcatggatctcctcctcttggtggtggtactatcacaggcagcaaattgggtagataatggtatggtgaagaggataagggatgtttcgttctccaggagagtatctccatagttggaaagccacattatatatgatgcacgtgggtttgggatccacttgtggaattttgttttatcatactttcctgtgggttttggaatccactatgatactagcaacaggctagacacatgaatctagagaatgtttcccacagttcgtattgtgcctaggggaaaactataaatggaaaaggtgcaaaacagaaatttgaaccataagactaatttatataagcctagtagtaaaagactccaattctattatagtagcatcatcttggaaacaaactatgattcttgatctatacctataggatcgtatgacgctagaatagac

SEQ ID NO: 902 - DNA, 1875 bp, Zea Mays
gatccgaagtcgcctcctcgtccttccttcgctagatgttctccttcgccggcggtcttgttgctagaggcgcccccgacctgtgcatccgtttcaacgccaactcctccaccagtcagttcaatttctacagcctatggctaactcattcggagtaggtttagaaattgattgggattcaattcagctagaccctagatgggaggaggaagactacaagaagttgttaacgtggaagtggtgtatgatacactgggcctgacaaatgaggtgatgggtggaaccaattgtgatggttggcaaaacgattatggtgatgcaggggcagctatagaatgcaaggacattgacgatgacattgtaatgtttgatatgaaaaatccagttatgaggcttggtaacatatatatatagtagcatgaaggagtttaggctcgcaatgatccaatatgcaattaacaaggaatttgagctaggcattgaagctactagtactcgaaggtatagaggttattgtaaaggggatgattgtccatggagtattcatgccagaaaagaagtagaagaatcgcctatcatcattgttactgccatgacagatatccacacttgtacatctagtggtaggtgaaggacaaagacacctactagtggttgggttgctgcccaagcaatacctctcttgaagaagaaacctggcatgggagccaaggagttgcaaaatgcactacatgacacttataatgttcagattgcatatctaactctttggagagggagagagaaggctttgtatgagttgtttggtagttaggaggatagtttccaactttgttctcttggaaggaagctgtgttggagaaaagtttaagaaagcttacgagggaagaatagagcaactaggagataagtctttttggccaaaagtggagatggcaaatgaggtgggggcaccactgggtaggagaggtgtgggcagacaaaggaaaaatagaatcaaaggttgcctagaaggcggtaggggcaagaaagcatgtgcaaacgaaactgtaaagcaatggaaggtaattcggggacaataaggatgtctttggtttgaagtcaaagtaggatgaggcgggggcgacaccgtcccctcaattttttgggatcacgccgtcaccaaaaaattactccggtatttatttcaccccacgtgattctcatccaaacactatagaaactgtagccatccccttccatccctccttatacatccaaccaaacacaccctaaatgtttatattgtggggagctaggccacaagaagaacagccctaaatgtcctttaaatggcacgaagaagaggcgtgtgttttatgtgttgatctttgttcctgtttcctgttctgttttttttttcaaaaacttacagctggtgtgtattcttataggccaaggaagcagcgacataactctactcaaaaatggttttatgtgttgatctttgttcctgtttcctgttctgtttttttcaaaaacttacagctggtctgtattcttataggccaaggaagcagcgacattactcaaaaatggtttcctcgcgacgacagatttacacaagaacctagaacaccgcatttcgacaaagttatacaagaccctggtacaccacatgaacagccatcgtcttcgcagccacttccaaggtggaagtctcaatgccctgggaaaagaagaagagagccacgagaaaggaaggggcaaaactggaagtctcaatgtcgctccctggttaacgcccagcgttctcagttccaaatgtgaaagaacatcagctttcaaccattgatagtcatggatctcctcctcttggtggtggtaaggaatttc

SEQ ID NO: 903 - DNA, 2175 bp, Zea Mays
gatccgaagtcgcctcctcgtccttccttcgctagatgttctccttcgccggcggtcttgttgctagaggcgcccccgacctgtgcatccgtttcaacgccaactcctccaccagtcagttcaatttctacagcctatggctaactcattcggagtaggtttagaaattgattgggattcaattcagctagaccctagatgggaggaggaagactacaagaagttgttaacgtggaagtggtgtatgatacactgggcctgacaaatgaggtgatgggtggaaccaattgtgatggttggcaaaacgattatggtgatgcaggggcagctatagaatgcaaggacattgacgatgacattgtaatgtttgatatgaaaaatccagttatgaggcttggtaacatatatatatagtagcatgaaggagtttaggctcgcaatgatccaatatgcaattaacaaggaatttgagctaggcattgaagctactagtactcgaaggtatagaggttattgtaaaggggatgattgtccatggagtattcatgccagaaaagaagtagaagaatcgcctatcatcattgttactgccatgacagatatccacacttgtacatctagtggtaggtgaaggacaaagacacctactagtggttgggttgctgcccaagcaatacctctcttgaagaagaaacctggcatgggagccaaggagttgcaaaatgcactacatgacacttataatgttcagattgcatatctaactctttggagagggagagagaaggctttgtatgagttgtttggtagttaggaggatagtttccaactttgttctcttggaaggaagctgtgttggagaaaagtttaagaaagcttacgagggaagaatagagcaactaggagataagtctttttggccaaaagtggagatggcaaatgaggtgggggcaccactgggtaggagaggtgtgggcagacaaaggaaaaatagaatcaaaggttgcctagaaggcggtaggggcaagaaagcatgtgcaaacgaaactgtaaagcaatggaaggccaaggaagcagcgacataactctactcaaaaatggttttatgtgttgatctttgttcctgtttcctgttctgtttttttcaaaaacttacagctggtctgtattcttataggccaaggaagcagcgacattactcaaaaatggtttcctcgcgacgacagatttacacaagaacctagaacaccgcatttcgacaaagttatacaagaccctggtacaccacatgaacagccatcgtcttcgcagccacttccaagggtattgataaaaaaaatcactccaagaaagaggaagtcggttccactaagcatggacgagatgtagtatctgttagttgtatcatccatgtgttgtcagcatgtgactgcagacatgtgccatgtatcagacttattgtatcagactacgttcagcctacttgttagtagctgagttattgtgtttcctactacgttcagactacatctatcagacttattacatctcgttcagacttatgtgtttcctgtttgtgccatgtatcagtggaagtctcaatgccctgggaaaagaagaagagagccacgagaaaggaaggggcaaaactggaagtctcaatgtcgctccctggttaacgcccagcgttctcagttccaaatgtgaaagaacatcagctttcaaccattgatagtcatggatctcctcctcttggtggtggtactatcacaggcagcaaattgggtagataatggtatggtgaagaggataagggatgtttcgttctccaggagagtatctccatagttggaaagccacattatatatgatgcacgtgggtttgggatccacttgtggaattttgttttatcatactttcctgtgggttttggaatccactatgatactagcaacaggctagacacatgaatctagagaatgtttcccacagttcgtattgtgcctaggggaaaactataaatggaaaaggtgcaaaacagaaatttgaaccataagactaatttatataagcctagtagtaaaagactccaattctattatagtagcatcatcttggaaacaaactatgattcttgatctatacctataggatcgtatgacgctagaatagac

SEQ ID NO: 904 - DNA, 1877 bp, Zea Mays
gatccgaagtcgcctcctcgtccttccttcgctagatgttctccttcgccggcggtcttgttgctagaggcgcccccgacctgtgcatccgtttcaacgccaactcctccaccagtcagttcaatttctacagcctatggctaactcattcggagtaggtttagaaattgattgggattcaattcagctagaccctagatgggaggaggaagactacaagaagttgttaacgtggaagtggtgtatgatacactgggcctgacaaatgaggtgatgggtggaaccaattgtgatggttggcaaaacgattatggtgatgcaggggcagctatagaatgcaaggacattgacgatgacattgtaatgtttgatatgaaaaatccagttatgaggcttggtaacatatatatatagtagcatgaaggagtttaggctcgcaatgatccaatatgcaattaacaaggaatttgagctaggcattgaagctactagtactcgaaggtatagaggttattgtaaaggggatgattgtccatggagtattcatgccagaaaagaagtagaagaatcgcctatcatcattgtatgactaattatcttgacttgagttcaatttattgtttttgctttactttaaactaaccttttcacatccactattgtaggttactgccatgacagatatccacacttgtacatctagtggtaggtgaaggacaaagacacctactagtggttgggttgctgcccaagcaatacctctcttgaagaagaaacctggcatgggagccaaggagttgcaaaatgcactacatgacacttataatgttcagattgcatatctaactctttggagagggagagagaaggctttgtatgagttgtttggtagttaggaggatagtttccaactttgttctcttggaaggaagctgtgttggagaaaagtttaagaaagcttacgagggaagaatagagcaactaggagataagtctttttggccaaaagtggagatggcaaatgaggtgggggcaccactgggtaggagaggtgtgggcagacaaaggaaaaatagaatcaaaggttgcctagaaggcggtaggggcaagaaagcatgtgcaaacgaaactgtaaagcaatggaaggccaaggaagcagcgacattactcaaaaatggtttcctcgcgacgacagatttacacaagaacctagaacaccgcatttcgacaaagttatacaagaccctggtacaccacatgaacagccatcgtcttcgcagccacttccaaggtggaagtctcaatgccctgggaaaagaagaagagagccacgagaaaggaaggggcaaaactggaagtctcaatgtcgctccctggttaacgcccagcgttctcagttccaaatgtgaaagaacatcagctttcaaccattgatagtcatggatctcctcctcttggtggtggtactatcacaggcagcaaattgggtagataatggtatggtgaagaggataagggatgtttcgttctccaggagagtatctccatagttggaaagccacattatatatgatgcacgtgggtttgggatccacttgtggaattttgttttatcatactttcctgtgggttttggaatccactatgatactagcaacaggctagacacatgaatctagagaatgtttcccacagttcgtattgtgcctaggggaaaactataaatggaaaaggtgcaaaacagaaatttgaaccataagactaatttatataagcctagtagtaaaagactccaattctattatagtagcatcatcttggaaacaaactatgattcttgatctatacctataggatcgtatgacgctagaatagac

SEQ ID NO: 905 - DNA, 1931 bp, Zea Mays
atccgaagtcgcctcctcgtccttccttcgctagatgttctccttcgccggcggtcttgttgctagaggcgcccccgacctgtgcatccgtttcaacgccaactcctccaccagctaactcattcggagtaggtttagaaattgattgggattcaattcagctagaccctagatgggaggaggaagactacaagaagttgttaacgtggaagtggtgtatgatacactgggcctgacaaatgaggtgatgggtggaaccaattgtgatggttggcaaaacgattatggtgatgcaggggcagctatagaatgcaaggacattgacgatgacattgtaatgtttgatatgaaaaatccagttatgaggcttggtaacatatatatatagtagcatgaaggagtttaggctcgcaatgatccaatatgcaattaacaaggaatttgagctaggcattgaagctactagtactcgaaggtatagaggttattgtaaaggggatgattgtccatggagtattcatgccagaaaagaagtagaagaatcgcctatcatcattgttactgccatgacagatatccacacttgtacatctagtggtaggtgaaggacaaagacacctactagtggttgggttgctgcccaagcaatacctctcttgaagaagaaacctggcatgggagccaaggagttgcaaaatgcactacatgacacttataatgttcagattgcatatctaactctttggagagggagagagaaggctttgtatgagttgtttggtagttaggaggatagtttccaactttgttctcttggaaggaagctgtgttggagaaaagtttaagaaagcttacgagggaagaatagagcaactaggagataagtctttttggccaaaagtggagatggcaaatgaggtgggggcaccactgggtaggagaggtgtgggcagacaaaggaaaaatagaatcaaaggttgcctagaaggcggtaggggcaagaaagcatgtgcaaacgaaactgtaaagcaatggaaggccaaggaagcagcgacattactcaaaaatggtttcctcgcgacgacagatttacacaagaacctagaacaccgcatttcgacaaagttatacaagaccctggtacaccacatgaacagccatcgtcttcgcagccacttccaagggtattgataaaaaaaatcactccaagaaagaggaagtcggttccactaagcatggacgagatgtagtatctgttagttgtatcatccatgtgttgtcagcatgtgactgcagacatgtgccatgtatcagacttattgtatcagactacgttcagcctactttggaagtctcaatgccctgggaaaagaagaagagagccacgagaaaggaaggggcaaaactggaagtctcaatgtcgctccctggttaacgcccagcgttctcagttccaaatgtgaaagaacatcagctttcaaccattgatagtcatggatctcctcctcttggtggtggtactatcacaggcagcaaattgggtagataatggtatggtgaagaggataagggatgtttcgttctccaggagagtatctccatagttggaaagccacattatatatgatgcacgtgggtttgggatccacttgtggaattttgttttatcatactttcctgtgggttttggaatccactatgatactagcaacaggctagacacatgaatctagagaatgtttcccacagttcgtattgtgcctaggggaaaactataaatggaaaaggtgcaaaacagaaatttgaaccataagactaatttatataagcctagtagtaaaagactccaattctattatagtagcatcatcttggaaacaaactatgattcttgatctatacctataggatcgtatgacgctagaatagac

SEQ ID NO: 906 - DNA, 1842 bp, Zea Mays
gtcgcctcctcgtccttccttcgctagatgttctccttcgccggcggtcttgttgctagaggcgcccccgacctgtgcatccgtttcaacgccaactcctccaccagctaactcattcggagtaggtttagaaattgattgggattcaattcagctagaccctagatgggaggaggaagactacaagaagttgttaacgtggaagtggtgtatgatacactgggcctgacaaatgaggtgatgggtggaaccaattgtgatggttggcaaaacgattatggtgatgcaggggcagctatagaatgcaaggacattgacgatgacattgtaatgtttgatatgaaaaatccagttatgaggcttggtaacatatatatatagtagcatgaaggagtttaggctcgcaatgatccaatatgcaattaacaaggaatttgagctaggcattgaagctactagtactcgaaggtatagaggttattgtaaaggggatgattgtccatggagtattcatgccagaaaagaagtagaagaatcgcctatcatcattgttactgccatgacagatatccacacttgtacatctagtggtaggtgaaggacaaagacacctactagtggttgggttgctgcccaagcaatacctctcttgaagaagaaacctggcatgggagccaaggagttgcaaaatgcactacatgacacttataatgttcagattgcatatctaactctttggagagggagagagaaggctttgtatgagttgtttggtagttaggaggatagtttccaactttgttctcttggaaggaagctgtgttggagaaaagtttaagaaagcttacgagggaagaatagagcaactaggagataagtctttttggccaaaagtggagatggcaaatgaggtgggggcaccactgggtaggagaggtgtgggcagacaaaggaaaaatagaatcaaaggttgcctagaaggcggtaggggcaagaaagcatgtgcaaacgaaactgtaaagcaatggaaggtaattcggggacaataaggatgtctttggtttgaagtcaaagtaggatgaggcgggggcgacaccgtcccctcaattttttgggatcacgccgtcaccaaaaaattactccggtatttatttcaccccacgtgattctcatccaaacactatagaaactgtagccatccccttccatccctccttatacatccaaccaaacacaccctaaatgtttatattgtggggagctaggccacaagaagaacagccctaaatgtcctttaaatggcacgaagaagaggcgtgtgttttatgtgttgatctttgttcctgtttcctgttctgttttttttttcaaaaacttacagctggtgtgtattcttataggccaaggaagcagcgacataactctactcaaaaatggttttatgtgttgatctttgttcctgtttcctgttctgtttttttcaaaaacttacagctggtctgtattcttataggccaaggaagcagcgacattactcaaaaatggtttcctcgcgacgacagatttacacaagaacctagaacaccgcatttcgacaaagttatacaagaccctggtacaccacatgaacagccatcgtcttcgcagccacttccaaggtggaagtctcaatgccctgggaaaagaagaagagagccacgagaaaggaaggggcaaaactggaagtctcaatgtcgctccctggttaacgcccagcgttctcagttccaaatgtgaaagaacatcagctttcaaccattgatagtcatggatctcctcctcttggtggtggtaaggaatttc

SEQ ID NO: 907 - DNA, 1903 bp, Zea Mays
cgcctcctcgtccttccttcgctagatgttctccttcgccggcggtcttgttgctagaggcgcccccgacctgtgcatccgtttcaacgccaactcctccaccagtcagttcaatttctacagcctatggtcatgctaactcattcggagtaggtttagaaattgattgggattcaattcagctagaccctagatgggaggaggaagactacaagaagttgttaacgtggaagtggtgtatgatacactgggcctgacaaatgaggtgatgggtggaaccaattgtgatggttggcaaaacgattatggtgatgcaggggcagctatagaatgcaaggacattgacgatgacattgtaatgtttgatatgaaaaatccagttatgaggcttggtaacatatatatatagtagcatgaaggagtttaggctcgcaatgatccaatatgcaattaacaaggaatttgagctaggcattgaagctactagtactcgaaggtatagaggttattgtaaaggggatgattgtccatggagtattcatgccagaaaagaagtagaagaatcgcctatcatcattgttactgccatgacagatatccacacttgtacatctagtggtaggtgaaggacaaagacacctactagtggttgggttgctgcccaagcaatacctctcttgaagaagaaacctggcatgggagccaaggagttgcaaaatgcactacatgacacttataatgttcagattgcatatctaactctttggagagggagagagaaggctttgtatgagttgtttggtagttaggaggatagtttccaactttgttctcttggaaggaagctgtgttggagaaaagtttaagaaagcttacgagggaagaatagagcaactaggagataagtctttttggccaaaagtggagatggcaaatgaggtgggggcaccactgggtaggagaggtgtgggcagacaaaggaaaaatagaatcaaaggttgcctagaaggcggtaggggcaagaaagcatgtgcaaacgaaactgtaaagcaatggaaggccaaggaagcagcgacataactctactcaaaaatggttttatgtgttgatctttgttcctgtttcctgttctgtttttttcaaaaacttacagctggtctgtattcttataggccaaggaagcagcgacattactcaaaaatggtttcctcgcgacgacagatttacacaagaacctagaacaccgcatttcgacaaagttatacaagaccctggtacaccacatgaacagccatcgtcttcgcagccacttccaaggtggaagtctcaatgccctgggaaaagaagaagagagccacgagaaaggaaggggcaaaactggaagtctcaatgtcgctccctggttaacgcccagcgttctcagttccaaatgtgaaagaacatcagctttcaaccattgatagtcatggatctcctcctcttggtggtggtactatcacaggcagcaaattgggtagataatggtatggtgaagaggataagggatgtttcgttctccaggagagtatctccatagttggaaagccacattatatatgatgcacgtgggtttgggatccacttgtggaattttgttttatcatactttcctgtgggttttggaatccactatgatactagcaacaggctagacacatgaatctagagaatgtttcccacagttcgtattgtgcctaggggaaaactataaatggaaaaggtgcaaaacagaaatttgaaccataagactaatttatataagcctagtagtaaaagactccaattctattatagtagcatcatcttggaaacaaactatgattcttgatctatacctataggatcgtatgacgctagaatagac

SEQ ID NO: 908 - DNA, 1778 bp, Zea Mays
cttccttcgctagatgttctccttcgccggcggtcttgttgctagaggcgcccccgacctgtgcatccgtttcaacgccaactcctccaccagtcagttcaatttctacagcctatggtcatgctaactcattcggagtaggtttagaaattgattgggattcaattcagctagaccctagatgggaggaggaagactacaagaagttgttaacgtggaagtggtgtatgatacactgggcctgacaaatgaggtgatgggtggaaccaattgtgatggttggcaaaacgattatggtgatgcaggggcagctatagaatgcaaggacattgacgatgacattgtaatgtttgatatgaaaaatccagttatgaggcttggtaacatatatatatagtagcatgaaggagtttaggctcgcaatgatccaatatgcaattaacaaggaatttgagctaggcattgaagctactagtactcgaaggtatagaggttattgtaaaggggatgattgtccatggagtattcatgccagaaaagaagtagaagaatcgcctatcatcattgttactgccatgacagatatccacacttgtacatctagtggtaggtgaaggacaaagacacctactagtggttgggttgctgcccaagcaatacctctcttgaagaagaaacctggcatgggagccaaggagttgcaaaatgcactacatgacacttataatgttcagattgcatatctaactctttggagagggagagagaaggctttgtatgagttgtttggtagttaggaggatagtttccaactttgttctcttggaaggaagctgtgttggagaaaagtttaagaaagcttacgagggaagaatagagcaactaggagataagtctttttggccaaaagtggagatggcaaatgaggtgggggcaccactgggtaggagaggtgtgggcagacaaaggaaaaatagaatcaaaggttgcctagaaggcggtaggggcaagaaagcatgtgcaaacgaaactgtaaagcaatggaaggccaaggaagcagcgacattactcaaaaatggtttcctcgcgacgacagatttacacaagaacctagaacaccgcatttcgacaaagttatacaagaccctggtacaccacatgaacagccatcgtcttcgcagccacttccaaggtggaagtctcaatgccctgggaaaagaagaagagagccacgagaaaggaaggggcaaaactggaagtctcaatgtcgctccctggttaacgcccagcgttctcagttccaaatgtgaaagaacatcagctttcaaccattgatagtcatggatctcctcctcttggtggtggtactatcacaggcagcaaattgggtagataatggtatggtgaagaggataagggatgtttcgttctccaggagagtatctccatagttggaaagccacattatatatgatgcacgtgggtttgggatccacttgtggaattttgttttatcatactttcctgtgggttttggaatccactatgatactagcaacaggctagacacatgaatctagagaatgtttcccacagttcgtattgtgcctaggggaaaactataaatggaaaaggtgcaaaacagaaatttgaaccataagactaatttatataagcctagtagtaaaagactccaattctattatagtagcatcatcttggaaacaaactatgattcttgatctatacctataggatcgtatgacgctagaatagac

SEQ ID NO: 909 - DNA, 2143 bp, Zea Mays
gttctccttcgccggcggtcttgttgctagaggcgcccccgacctgtgcatccgtttcaacgccaactcctccaccagtcagttcaatttctacagcctatggtcatgctaactcattcggagtaggtttagaaattgattgggattcaattcagctagaccctagatgggaggaggaagactacaagaagttgttaacgtggaagtggtgtatgatacactgggcctgacaaatgaggtgatgggtggaaccaattgtgatggttggcaaaacgattatggtgatgcaggggcagctatagaatgcaaggacattgacgatgacattgtaatgtttgatatgaaaaatccagttatgaggcttggtaacatatatatatagtagcatgaaggagtttaggctcgcaatgatccaatatgcaattaacaaggaatttgagctaggcattgaagctactagtactcgaaggtatagaggttattgtaaaggggatgattgtccatggagtattcatgccagaaaagaagtagaagaatcgcctatcatcattgttactgccatgacagatatccacacttgtacatctagtggtaggtgaaggacaaagacacctactagtggttgggttgctgcccaagcaatacctctcttgaagaagaaacctggcatgggagccaaggagttgcaaaatgcactacatgacacttataatgttcagattgcatatctaactctttggagagggagagagaaggctttgtatgagttgtttggtagttaggaggatagtttccaactttgttctcttggaaggaagctgtgttggagaaaagtttaagaaagcttacgagggaagaatagagcaactaggagataagtctttttggccaaaagtggagatggcaaatgaggtgggggcaccactgggtaggagaggtgtgggcagacaaaggaaaaatagaatcaaaggttgcctagaaggcggtaggggcaagaaagcatgtgcaaacgaaactgtaaagcaatggaaggtaattcggggacaataaggatgtctttggtttgaagtcaaagtaggatgaggcgggggcgacaccgtcccctcaattttttgggatcacgccgtcaccaaaaaattactccggccaaggaagcagcgacattactcaaaaatggtttcctcgcgacgacagatttacacaagaacctagaacaccgcatttcgacaaagttatacaagaccctggtacaccacatgaacagccatcgtcttcgcagccacttccaagggtattgataaaaaaaatcactccaagaaagaggaagtcggttccactaagcatggacgagatgtagtatctgttagttgtatcatccatgtgttgtcagcatgtgactgcagacatgtgccatgtatcagacttattgtatcagactacgttcagcctacttgttagtagctgagttattgtgtttcctactacgttcagactacatctatcagacttattacatctcgttcagacttatgtgtttcctgtttgtgccatgtatcagtggaagtctcaatgccctgggaaaagaagaagagagccacgagaaaggaaggggcaaaactggaagtctcaatgtcgctccctggttaacgcccagcgttctcagttccaaatgtgaaagaacatcagctttcaaccattgatagtcatggatctcctcctcttggtggtggtactatcacaggcagcaaattgggtagataatggtatggtgaagaggataagggatgtttcgttctccaggagagtatctccatagttggaaagccacattatatatgatgcacgtgggtttgggatccacttgtggaattttgttttatcatactttcctgtgggttttggaatccactatgatactagcaacaggctagacacatgaatctagagaatgtttcccacagttcgtattgtgcctaggggaaaactataaatggaaaaggtgcaaaacagaaatttgaaccataagactaatttatataagcctagtagtaaaagactccaattctattatagtagcatcatcttggaaacaaactatgattcttgatctatacctataggatcgtatgacgctagaatagac

SEQ ID NO: 910 - DNA, 1893 bp, Zea Mays
gcgcccccgacctgtgcatccgtttcaacgccaactcctccaccagtcagttcaatttctacagcctatggtcatgctaactcattcggagtaggtttagaaattgattgggattcaattcagctagaccctagatgggaggaggaagactacaagaagttgttaacgtggaagtggtgtatgatacactgggcctgacaaatgaggtgatgggtggaaccaattgtgatggttggcaaaacgattatggtgatgcaggggcagctatagaatgcaaggacattgacgatgacattgtaatgtttgatatgaaaaatccagttatgaggcttggtaacatatatatatagtagcatgaaggagtttaggctcgcaatgatccaatatgcaattaacaaggaatttgagctaggcattgaagctactagtactcgaaggtatagaggttattgtaaaggggatgattgtccatggagtattcatgccagaaaagaagtagaagaatcgcctatcatcattgttactgccatgacagatatccacacttgtacatctagtggtaggtgaaggacaaagacacctactagtggttgggttgctgcccaagcaatacctctcttgaagaagaaacctggcatgggagccaaggagttgcaaaatgcactacatgacacttataatgttcagattgcatatctaactctttggagagggagagagaaggctttgtatgagttgtttggtagttaggaggatagtttccaactttgttctcttggaaggaagctgtgttggagaaaagtttaagaaagcttacgagggaagaatagagcaactaggagataagtctttttggccaaaagtggagatggcaaatgaggtgggggcaccactgggtaggagaggtgtgggcagacaaaggaaaaatagaatcaaaggttgcctagaaggcggtaggggcaagaaagcatgtgcaaacgaaactgtaaagcaatggaaggccaaggaagcagcgacattactcaaaaatggtttcctcgcgacgacagatttacacaagaacctagaacaccgcatttcgacaaagttatacaagaccctggtacaccacatgaacagccatcgtcttcgcagccacttccaagggtattgataaaaaaaatcactccaagaaagaggaagtcggttccactaagcatggacgagatgtagtatctgttagttgtatcatccatgtgttgtcagcatgtgactgcagacatgtgccatgtatcagacttattgtatcagactacgttcagcctactttggaagtctcaatgccctgggaaaagaagaagagagccacgagaaaggaaggggcaaaactggaagtctcaatgtcgctccctggttaacgcccagcgttctcagttccaaatgtgaaagaacatcagctttcaaccattgatagtcatggatctcctcctcttggtggtggtactatcacaggcagcaaattgggtagataatggtatggtgaagaggataagggatgtttcgttctccaggagagtatctccatagttggaaagccacattatatatgatgcacgtgggtttgggatccacttgtggaattttgttttatcatactttcctgtgggttttggaatccactatgatactagcaacaggctagacacatgaatctagagaatgtttcccacagttcgtattgtgcctaggggaaaactataaatggaaaaggtgcaaaacagaaatttgaaccataagactaatttatataagcctagtagtaaaagactccaattctattatagtagcatcatcttggaaacaaactatgattcttgatctatacctataggatcgtatgacgctagaatagac

SEQ ID NO: 911 - DNA, 3581 bp, Zea Mays
caccaatgcacagctctctctttctccaacacattcttcacaaacctatcataaaaaatcataggtagagctgaaaaggaaaaatagggaagtaacttctatagtctatactcattagaaacagcatttcagagcctggggggcattaaatttgtaaaagtctgaacattcaagaaacactacaggcagcatcagttttttgaagcagcaaagagctaaagacaaaaaattcatcagaagtgcttaatccgagtgcataaggctcacactttcttcgctcccaaagttcttgtaggttggggttcagcctcaaccacttggaagtgaggcctcaaatgtttgagctacgtgagttgtcaaagcagagtctaacagttttttttcctctaaagagacatgttgttatgccattgctagcttacacgatactagtaattcttttctgttacataaatgacctcacaaaattccttccattacataacttgtgaaagcaccacatggtttcacctgtaatgtcaattgctcacaatacaccagtatagcatgtttctattatatatccaatagaaaaatctattttcttgttgcttagttctaatcacaaatgtaagtcaatttgatggtggacgaagtctccaatataaagtctttgacttgtaatatctatagaaatataagagtaaattgcattatgggtaccaaaatctgtacagtagatgcaatctagtgacggaacttgaaaacggtgcaaatatgccacttgatctcattttcaaggtgtgattaggtcatcaactgagctccaggatgatccacagtgttttcaggtcgcctgatcgttctgactgggcgatcagtcgattagtcgcgattaggcgacgatcaggacgattagtcacccctgatcaaccctaatcgtccacctcgtcgccctgcatatttctaggacatatatatacatatataacactatatatagatatataccaatatagtatagagtatagactatacttagaataaactcaataaagagaatagactatatgaccaagatgctgcagcaagcctgaaatgatcaccaattcatcattcaccaacaaggcatcagtatgaaaagttgaaaacagcaccagcaagtctatatgaaactgtgaaactgcaagtctacaacttagactatctccagcagcttactcatactcatacccatattcaaactccactctgcgaacagtgcagtctacaatgcagaacagtgcttatgggtaaactttgggtgaacggctggagtcggccttacaagaccatgaccaacaaggcaacacctatatgagatcatcatccaacaagactatcctgagtaattatccctgttgatcgactgatagctcatcagcccgattaatcgctccatatcaccgactaatcggacgatatggacgatcaactcacctgatcgaatcgaacaccctaatcgagcctagagtatcgatcagcccgactaattgcgactaatcgcgattagtcagacgatctgaaaacaattatccactccatttggcattagactggactgccagcatggcaatagatgtcctacagctcatgtgcttaaccatgagcttgcacattttgcaaaaagaattgacaaaacttgcatcaaatgcaacactgaaatccttgagcttggtgttggatttaccaccatttacttgcccaatgaaactaatcttgaatggacatgaaaaggtgatcaacagtctcttgggcaagctctgcttttgcctcaaagggaggggggcaaaggtcatgcatcatgaaaacttcagattctagggttagtttcattttcaattcatataaactgaatgcacgtgtgtttgatgatcgggttgcaaaatctaagtccccagctgggtgacgaaaggtttgatgactggtgggaaagcgtttctgctgctgattcagcccaagcctgaaaagccctcaattccatatttattttgggggcatggactctttggaatcatagaaataggtgtgttttttatggaatggctccaaatatagctcatgctagtgaggagttgtacctgtggagatcggctggggctaagggcctagcagcaagaggtggtttcactctaggttgcggtcgtgaccgtgttgatttctcgtcaggcgtgtgtgtttgtagctcattaggctggcggttaagtgttcgtttgtaagggttcttacccccttttttcttcttaatataatgatacacagcgtgtttgagaaaaaaactgaatgcacccaccccgcaaactttggtgcctacagcacattttgcttgaaatatgatcaaatagaaataatggagcattaggaaactattttccatgactaatccagtagcatcaacttatattgtcaatcaataagggttttagatattcatggccaatttttgaaagctttgaccaacaacatactaaatgaacttatattgtgatcaaaagtattatatatggcactgccaattacattcttactttaactagcaatacatagaaggccatctaatgtttatatgatacaactattaggtctttctaacatattatcatttcttgagcagttactcaatacatggtaactagttagttgctcgtacgttgctacggtttctatatatcatataggtagaccttgcttaaatgggatatttattcaaacacgatccaaacccatagattcccagatcgtgccaaagggagaatcgtggaccagaacagggccagcacacgcaccgatagttggcgcgtcttaggatcgagccaaaccaatgccgagctaggcgtgcggcggtgtcgtccatgtcggtgcggcgaatccggcgatgcgcctcacacggatctgaacgtgcggcggctcgcccctagggtcaaatcacgtggattcagttgcaccttgaggtgcacctaggatttcgccctagcagcaccgaacggtgatgtagcgaggagagaggcggagatgacgggcggtgaggtatgtggtgtgggatgagacaagatgaagttttttcacttgttttttccacgctcacaagattagggaccgtgagggaggaggtactggactatagatggtcaaatgaggcgtgcctagtgggccggcccaaggcacggcccacttaatagtgttgcagcccaaagtgagcccatgcctaggccgccttcttggcacgcaatgccgacccgaaccggcacgattacatttttttcaaattattagtatatatatttacaatatcaatcctttatatagcacaaatgaacatgagtcgcaatagttagaagttgagagcttgttccctcctccctaaaggaccagggttcgagcgctgccctcagcgcactcatttttgcgccggatttcgctggatgcgcgagtgagatttatttcactaggcacgtgggagccagacaatgcacgacaaaattcactttaaatacatggtaatctgtgggaaccactaatgctagagttcagtgataccactagaacagtagcttacctcagga

SEQ ID NO: 912 - DNA, 345 bp, Zea Mays
ctcttgctgcgcaggtctgggttgcctaatctttcaccagataatgctctttgcagccttgatgactgatggagcagggcggtggagaagattccccgagatctccaatcaggcttcaattctctagttattcttggcgcttggagcctttggcgtcatcgcaacgactgtgtgttcaatgggaggtcgccgagcctagcgagtgctctcaccctcgctggtgatgagcttaggatgtggtgtcgtgtcggggctaaagggttgaacttgctttcaactcttgtgtttatgcttgacacagggatagccctgtgtcttgttcagagtggttgtgtgtggtggctg

SEQ ID NO: 913 - DNA, 2216 bp, Zea Mays
cggctcgctgtcttctttctatcgctcacaaccaacaaccatagcccacaggccgccggcggccgccagccgacgtcctcccatttcgctccccctcctccgctgcggtcgagcaaaagttccggccatccggcaatcccccggcacccggcggttcaaatcgtatctttctgacctgacgcggctacgacgtcgctcctccggtcccttcgatccggtggggtccgtttctttcaagcgcggcctcgctggccgcctcgtggcagtgaccgtcgaaccctctataaatcccgtgccccgagcacccttcctcgatcacacaacccaaagcagccacagcagcctccttcctcctctcactctcgctcgtgctgcgctcgctacctcgcttcgcattccattcgaggagagcggtgagaggggaggaaaggcaagatgttcatcgagagcttccgcgtcgagagcccccacgtgcggtacggcccgacggagatcgagtcggagtaccggtacgacacgacggagctggtacacgagggcaaggacggcgcctcacgctgggtcgtccgccccaagtccgtcaagtacaacttccggaccagaaccgccgtccccaagctcggggggatctcatgggcgaccaaggacaaggtgcagcaagccaactactacggctccctcacccaggcctccaccatcagagtcggcagctacaacggggaggagatctatgcgccgttcaagagcctccttcccatggtgaacccagacgacattgtgttcggaggctgggacattagcaacatgaacctggccgactccatgaccagggccaaggtgctggatattgacctgcagaagcagctcaggccctacatggagtccatggtgccacttcccggtatctatgatccggacttcatcgcggctaaccagggctctcgcgccaacagtgtcatcaagggcaccaagaaagaacaggtggagcagatcatcaaggatatcagggagtttaaggagaagaacaaagtggacaagatagttgtgttgtggactgcaaacactgaaaggtatagcaatgtgtgcgctggtctcaacgacacgatggagaatctactggcatctgtggacaagaacgaggcggaggtatcaccatcaacactatatgccattgcctgtgtcatggagggggtgccgttcatcaatgggagcccccagaacacctttgtgcctgggctgattgatcttgctataaaaaacaactgcttgattggtggtgacgacttcaagagtggacagaccaagatgaaatctgtcttggtcgatttccttgttggtgctggaataaagcccacctcaatcgtgagctacaaccacttgggaaacaacgatggcatgaacctgtctgcccctcaaacattcaggtccaaggagatctccaagagcaacgtggtggatgacatggtctcgagcaatgccatcctctatgagcccggcgagcatcccgatcatgtcgttgtcatcaagtatgtgccgtacgtgggagacagcaagagggctatggacgagtacacctcagagatcttcatgggcggcaagaacaccatcgtgctgcacaacacctgtgaggactcgctcctcgccgcacctatcatccttgatctggtgctcttggctgagctcagcaccaggatccagctgaaagctgagggagaggacaaattccactccttccacccggtggccaccatcctgagctacctcaccaaggcacccctggttccccctggcacaccggtggtgaacgctctggccaagcagagggcgatgctggagaacatcatgagggcctgcgttgggctggccccagagaacaacatgatcctggagtacaagtgagccaagtggcgtgccctgcagcgcgaggttagctgctggaagggaactagaaaggcgagattagctgtgggattgtgttgggcttgtcgtgttttcttttgcgttctttcctagtcattgctgttgcgcttttgtatttgtcggacccgtaactaccagggctctgctattagcggcacggagcctgtaattgtattgtatgataatgtgatcgagggtgctacttcccctcggcattcctagtgttggttaaaagtcgttcgacagcaacttatcgacccaccactgacttcaccctatccgccggcaacttgtcg

SEQ ID NO: 914 - DNA, 1732 bp, Zea Mays
caaattccagcagggacgatgagcagcagacagaactcattacactagcaaattgatactaggattactgggtgatgcttgtggggtggggaggcaacaacgggtccacgctgacggctggggtcattgccaacagggaggggatctcatgggcgaccaaggacaaggtgcagcaagccaactactacggctccctcacccaggcctccaccatcagagtcggcagctacaacggggaggagatctatgcgccgttcaagagcctccttcccatggtgaacccagacgacattgtgttcggaggctgggacattagcaacatgaacctggccgactccatgaccagggccaaggtgctggatattgacctgcagaagcagctcaggccctacatggagtccatggtgccacttcccggtatctatgatccggacttcatcgcggctaaccagggctctcgcgccaacagtgtcatcaagggcaccaagaaagaacaggtggagcagatcatcaaggatatcagggagtttaaggagaagaacaaagtggacaagatagttgtgttgtggactgcaaacactgaaaggtatagcaatgtgtgcgctggtctcaacgacacgatggagaatctactggcatctgtggacaagaacgaggcggaggtatcaccatcaacactatatgccattgcctgtgtcatggagggggtgccgttcatcaatgggagcccccagaacacctttgtgcctgggctgattgatcttgctataaaaaacaactgcttgattggtggtgacgacttcaagagtggacagaccaagatgaaatctgtcttggtcgatttccttgttggtgctggaataaagcccacctcaatcgtgagctacaaccacttgggaaacaacgatggcatgaacctgtctgcccctcaaacattcaggtccaaggagatctccaagagcaacgtggtggatgacatggtctcgagcaatgccatcctctatgagcccggcgagcatcccgatcatgtcgttgtcatcaagtatgtgccgtacgtgggagacagcaagagggctatggacgagtacacctcagagatcttcatgggcggcaagaacaccatcgtgctgcacaacacctgtgaggactcgctcctcgccgcacctatcatccttgatctggtgctcttggctgagctcagcaccaggatccagctgaaagctgagggagaggacaaattccactccttccacccggtggccaccatcctgagctacctcaccaaggcacccctggttccccctggcacaccggtggtgaacgctctggccaagcagagggcgatgctggagaacatcatgagggcctgcgttgggctggccccagagaacaacatgatcctggagtacaagtgagccaagtggcgtgccctgcagcgcgaggttagctgctggaagggaactagaaaggcgagattagctgtgggattgtgttgggcttgtcgtgttttcttttgcgttctttcctagtcattgctgttgcgcttttgtatttgtcggacccgtaactaccagggctctgctattagcggcacggagcctgtaattgtattgtatgataatgtgatcgagggtgctacttcccctcggcattcctagtgttggttaaaagtcgttcgacagcaacttatcgacccaccactgacttcaccctatccgccggcaacttgtcg

SEQ ID NO: 915 - DNA, 1525 bp, Zea Mays
caaaaggttctgtggttagctcaaaggttccagcatctttggattacactcgtgcagtattgacgatggtgaacccagacgacattgtgttcggaggctgggacattagcaacatgaacctggccgactccatgaccagggccaaggtgctggatattgacctgcagaagcagctcaggccctacatggagtccatggtgccacttcccggtatctatgatccggacttcatcgcggctaaccagggctctcgcgccaacagtgtcatcaagggcaccaagaaagaacaggtggagcagatcatcaaggatatcagggagtttaaggagaagaacaaagtggacaagatagttgtgttgtggactgcaaacactgaaaggtatagcaatgtgtgcgctggtctcaacgacacgatggagaatctactggcatctgtggacaagaacgaggcggaggtatcaccatcaacactatatgccattgcctgtgtcatggagggggtgccgttcatcaatgggagcccccagaacacctttgtgcctgggctgattgatcttgctataaaaaacaactgcttgattggtggtgacgacttcaagagtggacagaccaagatgaaatctgtcttggtcgatttccttgttggtgctggaataaagcccacctcaatcgtgagctacaaccacttgggaaacaacgatggcatgaacctgtctgcccctcaaacattcaggtccaaggagatctccaagagcaacgtggtggatgacatggtctcgagcaatgccatcctctatgagcccggcgagcatcccgatcatgtcgttgtcatcaagtatgtgccgtacgtgggagacagcaagagggctatggacgagtacacctcagagatcttcatgggcggcaagaacaccatcgtgctgcacaacacctgtgaggactcgctcctcgccgcacctatcatccttgatctggtgctcttggctgagctcagcaccaggatccagctgaaagctgagggagaggacaaattccactccttccacccggtggccaccatcctgagctacctcaccaaggcacccctggttccccctggcacaccggtggtgaacgctctggccaagcagagggcgatgctggagaacatcatgagggcctgcgttgggctggccccagagaacaacatgatcctggagtacaagtgagccaagtggcgtgccctgcagcgcgaggttagctgctggaagggaactagaaaggcgagattagctgtgggattgtgttgggcttgtcgtgttttcttttgcgttctttcctagtcattgctgttgcgcttttgtatttgtcggacccgtaactaccagggctctgctattagcggcacggagcctgtaattgtattgtatgataatgtgatcgagggtgctacttcccctcggcattcctagtgttggttaaaagtcgttcgacagcaacttatcgacccaccactgacttcaccctatccgccggcaacttgtcg

SEQ ID NO: 916 - DNA, 991 bp, Zea Mays
cgtggtttgggctgattgatcttgctataaaaaacaactgcttgattggtggtgacgacttcaagagtggacagaccaagatgaaatctgtcttggtcgatttccttgttggtgctggaataaagcccacctcaatcgtgagctacaaccacttgggaaacaacgatggcatgaacctgtctgcccctcaaacattcaggtccaaggagatctccaagagcaacgtggtggatgacatggtctcgagcaatgccatcctctatgagcccggcgagcatcccgatcatgtcgttgtcatcaagtatgtgccgtacgtgggagacagcaagagggctatggacgagtacacctcagagatcttcatgggcggcaagaacaccatcgtgctgcacaacacctgtgaggactcgctcctcgccgcacctatcatccttgatctggtgctcttggctgagctcagcaccaggatccagctgaaagctgagggagaggacaaattccactccttccacccggtggccaccatcctgagctacctcaccaaggcacccctggttccccctggcacaccggtggtgaacgctctggccaagcagagggcgatgctggagaacatcatgagggcctgcgttgggctggccccagagaacaacatgatcctggagtacaagtgagccaagtggcgtgccctgcagcgcgaggttagctgctggaagggaactagaaaggcgagattagctgtgggattgtgttgggcttgtcgtgttttcttttgcgttctttcctagtcattgctgttgcgcttttgtatttgtcggacccgtaactaccagggctctgctattagcggcacggagcctgtaattgtattgtatgataatgtgatcgagggtgctacttcccctcggcattcctagtgttggttaaaagtcgttcgacagcaacttatcgacccaccactgacttcaccctatccgccggcaacttgtcg

SEQ ID NO: 917 - DNA, 999 bp, Zea Mays
ctcatacactatctttttcattacttcaaacttcacactacaaacgatatcatctacagtgttacgtctcctatattcaaagcaaattccatattctttctattatcccatcatttattttaaactaaactccgcaaacaatgttaaatagtgtcatctagacctacgttgtctattgtacatattatgttggagacagtctatcgccccccaattcgcaacacaatcgtcctccgccaccctccattaaccctagcggcagcagcgctcgtttgatccccgcggcggtccggcgtccgggtaggggagcgaggatgacggagtccctggtgcggaacaagccggggatggccagcatcaaggagatgccggtgctgcaggacgggccgccgccgggcggtttcgcgcccgtgcgctacgcgcgccggattcccacctcgggccccagcgccactgccatcttcctcacggccttcggcgccttcgcgtatggcatgtaccagggcactcaaagaagagaaaattgctgctcgtagtgctatactaccgatgctccaagctgaagaggatgaaagatttgtcaaagagtggaagaagtatcttgaggaggaggcgaggattatgaaagatgttccagggtggaaggttggcgagagtgtgtacaattccgggaaatggatgcccccggccaccggtgagctccgccctgaggtgtggtaagggcctgttgtaggcattgagaatgcaatcatgtcatgagggcatgaataaggctatcagacatgggcatccttctttgttcactaaggatcagctgttcaaatacctgtatctattttactcttatgaaatctggctggttaataatatgaagccgacgctttgcctcatctatgctcgtgcattgatgtaacgtgtccttgtttgatattaagaaactactatggaatataagaaagaaaacagcctgcttcttgcatctccgtggcgtattttgtg

SEQ ID NO: 918 - DNA, 2144 bp, Zea Mays
actactctactcggctgacgactgacgttccattcccgctccattcgtcgtcgcccttcgctccccctcctcccgaaatcccagagcggcctccttcgcaggcccgtacagcctgcgggggggccggtagagtagcctccaaggtcgccgactcgtcgtagttcctgctgtttcgtgcgtgacaccggagcgagccggaggggggaggaggaggcatggaggcgggagggaggaggctggcggcgggcagggtggaggcgagccccgagcgcggcaggccggcggcgtacgcgtcggcggggaggccggcgccggcgaggcccatgcggagggtgcagatcatctactacctctgccgcaacgggcagctggagcacccgcacttcatggagctcgcgcagcacccgcaccagccccttcgcctcaaagatgtcatggacaggctgacgctgctgaggggcaagggcatgccggctctcttctcgtggtcctgcaagaggaactacaagaacgggtacgtgtggaacgacctgtcggagaacgacgtgatctacccgtcggacggcgtggagtacgtgctcaagggctccgagatcttccctggctgctcttcttccggtacgcatctcattcctcgtctcttttgcgtccatctcgttcgagttctatctaccatggtttccttccttctcaccggcgtcagccgggctgctgctgtgctgagattagtaaaagcgagcgcagcctttttggtctgcttcacacggttgcattgcagcgtagcgtctccctttctgcacaacctcgtaattcgcgaagactttttgaggtgtggaagcatcagcgtggcccatcatctggaattaataatcggccacctgcctcgccagatcattcaattccaaatgggggggcaggcagtacgtgtgcacttttttcctctcttctctgacaccaccacgccttctccgttctccccgggccgtgcagatcggttccagcacctacgcgtgaccgaccggtcgccgacgaagccgccgctggcgctccctcacatgagccacaacaagcagtaccccgtggacggctacggagactacgacgccgtggaggaccgggacgacgacgagctgggccactcgtaccaccaccgccggacggcgtcggggcggcccgagaaggccgccgccgccgccgtctcggcgcgcgcggccaccaaccgggcccgccccgtggagctccccgtcgaggagacctcgccgccgtcctccacgtcctcggacaagcccccgccgccagcggcgctgctgatgcagcagcagcagcagccggggaggagggccacgtcggaagtgcctgagccgagccgtcccgggtccatgctgctgcagctcatcgcgtgtgggtcgacgacggcgccgtccgcggcaggcggcggcggcggcccggggaagtgccgcgccgagccgaggcggagctgcggcctcgtgagccggctctcggcccgcggcggcgcggacgcggacgaggacgaggacggtgtgggcgcggggaccgacctgggccgccggttcggccgcctcgccgccgaggacaaggagtacttcagcggcagcatcgtggagggcggcggcggcaggggcacgccgctgccggcgtcgtcgctcaagcgctccaactcgtacaatgaggagaggcccggcggcgttgctggtggtgccgccatcggcgaggaggccatggatgaaggcgacggaggggtcaggggaagatgcatcccggggaggaaaaagccgccgccgcagcagcagcagcagaaatagcgcatttggctcatccttctttatgtgtaaacgcaaatcttgatctgaagacaagcgtagctttgtttagcattttcaattttcaaacatgccgttgtcgtggaggccatgcaggcagcaagtacttagctgtgtctaagtgttgaaaacttgaaatcacgttgagcactacacttgtcttcttttaacgagtgcgggacgctgtaggcccgaggggccggtggccccacgtgcgactggaagcgatgcatgatgctgtcattcactgttggatcctgtcgtgcactgtgctttcctgacggctagctgacgcaccggcca

SEQ ID NO: 919 - DNA, 1717 bp, Zea Mays
  misc_feature (895)..(994): n is a, c, g, or t
ctatggtccatcaagctaaggctccattctctcagcttccttatctatatactactatattaagttagtaacgtcagcgtccacactccatgccccccgcccacatcagcgtccacacctaggctccaccaccgccatgcccctgcgtccgcgtatctcgcccccacgcccgcgtatctcgcccaacgcacactgtgcccctgccccacgctcgagcaggtagccgcagctcccgccggatccttccccacgcccaagcaggcaaccacggatctcgaccactcctgagcagtcatcgcggatctcgcccctgctgtgcccccgatgcatggctcctcattctcctctcggaatcgctccctccctccgcgttcggcaccgtgcacccccctcgcctcgcatggccgccacgggggtcagccgaggctggcgggaatacacgggccgcgtctggcatgcggctgaggagctttgcctccgcatcctcacatcctctgccatcagcctcctcttcgcgttgctcctgcatccacctctgaatcgaaaggtgaggtaccctggctgatctcatccggaatagtctgattcttcacacgatctgggcgccgatctcacctccacgctgctcatttgatgtgatgccaagtaattggtccacgtgtaattcctgctattcaactttggttaagggaagggatactataaatcactagaatattatatgggcaaaaagttcatatttttgggtgactcctaaagtagcataagatggatgaccgacctgaaatctgtcgttggagctgtcttggtctctgattggcatggcaatacattatacaagggacatgacctgtacggaatatttgtgccctctttggtttgtgcgagagctatnnnnnnnnnnnnnnnnnnnnnnnnnnnnnnnnnnnnnnnnnnnnnnnnnnnnnnnnnnnnnnnnnnnnnnnnnnnnnnnnnnnnnnnnnnnnnnnnnnnngtttagactcgagatcagcttgattcgttttgctaagtcttctccacctaagtcctcaaaaatttgaacaaggccatattatcagataaaagcagatgtagctttcataggacttagttccagcaaagcaaaggttgacattgcaccaaacaatagcgtctatacttcattcttatggcttggagaagcctatgcaacatgacaagccagatgacatgtagatgagaaggttctgcatcaagagaaaccaaagcaaaatctttgcatcaagagagcaccgatgaaaagctgatgtagaggccagttgacaaacttatggaagaccagctgaccaaataattgaaaatctattgaactatgtatcaagttcattaatttgtgtaattctgaatgagaccttttatgctactgcaacgtctgtgaccacaaatgactgttgcagcaagaccatactccaggagtggagctgtctatatgaagagtgtaggtagagacaattggctaatattgtacaggttcagtttgcaggatcgtagcaacagggttcaaagacgtgtgtttgaaagggcagttgctgatgatcagcatgatggaaggtggggagttccattgctggtttaagctggagctagcttctgaagtccggtcaggtgtcttcagtggaaactggattctgccacttctatctggtacctgtagtgatcgtcgaagtgtgaattagtg

SEQ ID NO: 920 - DNA, 1857 bp, Zea Mays
ccaatccatctggaagcgcaattttcaccagttctgtcgatttgcccccctttttttggatttgttcctctcagtctttccaagatcagcgaagagagccccgcgtgttgatgaaatatttggatttcgttactattcgcgtcggccatggctacggtttggagcggctgcagcacgagctgcggctccttcggccaagaactgcccccgcgcggcaaacggggcggtggtgagggcacaagattccttccgcgaaggagaggccggatcagaggtgacgcccgccagacacaagctctaagcgccgccatggttacggtcggagcttgcgtttgtagagcggctccatgcttgcttgattcggtggtcgacgggacggaggacgtcagcgttgggtttgggggcatcgacggtgaaccgctcgccgatgggtatgatggtggcaagaggcgcggtccgcgtcggcgtccgacgaggccgaccgtttttcagaaggaggtgggcgcaagaactgctccaccggcgatggcgtcggagccggacagcaaatctgagcatggggtgtcgaggctgcacttcctggaggagagggacgaggagacgctgtcaagaaggttgataaagctcagccaaaacaacaaggtcagaagtgccactgagctgtttgattcaatgcgcgcatctgggctgcaaccgagcgcacatgcctgcaactccctgttggcttgctatgtgcgtagaagtccactggcggatgcaatgaggatgtttgagttcatgaaggcgaaaggaatggcgacagggcacacgtataccatgatactcaaggctgttgcgagcaatcagggttatgtttctgcactggaaatgttcgataagattgaggaggaggagggttcaaagaaaatcattgacgtaattgtttataatacgatgatatctgtttgtggaagagcgaaagaatggatgcttgtggagagactatggagaaggctagagcaacattctttgaatggaactttactgacatacgatttgttagtcagcatattcgtgcaatgtgggcagtctgagttagcaattgctgcatatcaggaaatgctccagaagggacttgatccgagcgaggatataatgaaggctatcattgcatcctgcactaaagaagggaaatgggagtttgcaatgtcaacatttagtagaatgctgagggctggcatgaaacccagtttaattttgttcaactcaatcatcaactcactggggaaggctggtcaagatgaactcgcctttaggatgtaccatctgctggaaaaatcaggccttaagcctgatcaatatacatggagcgcactgttgttggcattatacaggtccgggcgatgctgggattgcctaaagcttttccatggaatcaaaggcaagcatccgacactcttaaatgatcatctctacaacactgctttgatgtcctgcgaaaagcttggtcaatgggaacatggtttgcagctgctgtggttgatggaaaaaagaggactgaaattatcagtggtatcttacaatcatgtgataggtgcttgtgaggttgctagcaagccaaaagttgctcttaaagtgtaccagcgcatgattaatcagaggtgttcgccagacacattcacacatttgtctgttatacgagcttgcatctggggatctctttggactgaagtagaggatatattggagtggctgcctaaactactaagctttaagaaatctggaacaacattgtatgagtatgaagtactgagcattatgggtgttaaactaccgagcattaagaacgttacaaagtatcaacatgatgcattatga

SEQ ID NO: 921 - DNA, 1342 bp, Zea Mays
gaattctttcgcagcttctctagagaactttctcatctttttttttttggaattgagaaaagttatccttagcacctcatttggccatagtttctgaatatggatccaaatgacctcacctaccataaactgcatgtgctctttttatatatatattttgtatatatatgcttcttgtgagcagtgttaattgattttattttatgttgcagttgagattccccaggaaattggtacacttgcgaacatgcaaaggcttgttttggctggtaatttgattgaaatcatcccagctaacattggatacctgcagaatcttaaaatcctcacacttgaccgaaataggatatctatcttgcctgaagaattgggttcactgtcaaaccttcagcaactttctgttcctcaaaattttttactgtgcctgcctaagagcataggagatttgcgcaatatgtcagtactcaatgtatctgataacaaactaaaggaacttccagaatcaattggaggttgcagttccctggaagaatttcaagccaatggtattatgaaccggatatttgttgtccagttacaacaaaactgcaacagcctgtcacccaacctgaactctgcattttcagcttccacaaaacttactgaaagactgcacggctcttcagagtttatccctgcacgacaacccaatcacaatggaccagttccaacaaatggatggatttggagagtttgaggcgcgcagaaggaagaaattcgacaagcagattgattcaggggtcatgatgggctcgacggccctggatgaaggggttgatttccactgattttagaactcgagtgtctcccattctttctagttggtcaggagtcaggaccgattgtagatttgtagatatcagtctcaacctacaaaacagggttcaccaaaccggttgtaaggtgaaaaccggcgcccagtgaaaactggtaaaaactggccgaaatcaaaatcaccccacttttcaatttgaaacggtttgaaaccgataaatcggctcattaatcggctcctaggctgattaaccggcgtcatagaagcagaaaccgatccatatgtatttttgcaaataaagcacattgagatctcataatttgaataaaagatgaccacaaatattatcacaagtctaatgacaacatttagtagttcaaatacattatatgacattgtttcatgattcgcaaacaacatcaaaaatataaatacatgtttcattgttcacagttgttactgttcctatggcgaagatcttcccacgagggtgcatttcactgatattgtgcttgtgtcatattgtac

SEQ ID NO: 922 - DNA, 1238 bp, Zea Mays
gaattctttcgcagcttctctagagaactttctcatctttttttttttggaattgagaaaagttatccttagcacctcatttggccatagtttctgaatatggatccaaatgacctcacctaccataaactgcatgtgctctttttatatatatattttgtatatatatgcttcttgtgagcagtgttaattgattttattttatgttgcagttgagattccccaggaaattggtacacttgcgaacatgcaaaggctttgggttcactgtcaaaccttcagcaactttctgttcctcaaaattttttactgtgcctgcctaagagcataggagatttgcgcaatatgtcagtactcaatgtatctgataacaaactaaaggaacttccagaatcaattggaggttgcagttccctggaagaatttcaagccaatggaaatgctattgaagatgtgccagcgtcaatttgcaacctagtttgcctgaaatccttatcactgaacggcaacaaaattcgacagcttccacaaaacttactgaaagactgcacggctcttcagagtttatccctgcacgacaacccaatcacaatggaccagttccaacaaatggatggatttggagagtttgaggcgcgcagaaggaagaaattcgacaagcagattgattcaggggtcatgatgggctcgacggccctggatgaaggggttgatttccactgattttagaactcgagtgtctcccattctttctagttggtcaggagtcaggaccgattgtagatttgtagatatcagtctcaacctacaaaacagggttcaccaaaccggttgtaaggtgaaaaccggcgcccagtgaaaactggtaaaaactggccgaaatcaaaatcaccccacttttcaatttgaaacggtttgaaaccgataaatcggctcattaatcggctcctaggctgattaaccggcgtcatagaagcagaaaccgatccatatgtatttttgcaaataaagcacattgagatctcataatttgaataaaagatgaccacaaatattatcacaagtctaatgacaacatttagtagttcaaatacattatatgacattgtttcatgattcgcaaacaacatcaaaaatataaatacatgtttcattgttcacagttgttactgttcctatggcgaagatcttcccacgagggtgcatttcactgatattgtgcttgtgtcatattgtac

SEQ ID NO: 923 - DNA, 2602 bp, Zea Mays
tttcagcctatgggcctcagcctgttagtgtgtgaaccgaataacggcccagaatgccgccgagcggtcgacatggtcgcgaatcgcggtttcgctgcctcttttttcttttcccgtttttataaataaatcagcccgaaaataggacgcggtcggcggtcgtgaaccgaacaaacctttccccaaaatttcccctcccccgcaccgaacgaactctcgatccgatcccgatccctgcagggagccgcctcggctcaccgatccggccccggatccgctcgttgctcgacgggatctctcgatcgtctggacaagcatgctgcatcaggagaacagtgaggctttcgggaggcaccactctgagcagcttgcatgtgtcaacatgaggggagcagataatggtcatccgaatttccttcctgagaaatgccagattgcagttcaccaaaggggtgaaaaagttggactatttgatgaagagctggtacatggtattcatctaaccagtccttgtgttcagtcaccatttttgccaagtggtgtcaaagaaacacctatagtggatcataacaagagacctgcatccagtgacatactggacatagttgaatgcaaacggctgaagcaggaagatcaaatcgttactaaggaagacaaccatacatctgctgaggaggaatttcatgactaccccacatacacgacttgcgaaagaagctttgactcaccactatatgagagtgaggaaagtgaagatgagggcgtagattcacctctccattgttcacatgctcgcacctatgttgaagatggtctatggcctgccagctttcatcaatctgttggccctttttccttgaggaaacctgttcctatcgggtcaaatcatcaggctgaattacctgagtgcaggccatttggtggaagaactgaagaagacgaaagtgtcaagtggatcagaaacagtgttgtgccaatgcctggtactgatgcatcgtctttggtgttggagcctgttcactgcaaagcaggttgtgattgtcttgacgaaggttcaatcaattgtgtgaaaaagcatgtgatggaagcaagagaaaatttgaaggattctgttggtgcagacgccttcagggagttgggtttctatgacatgggggaagaggttgcctcaaggtggtcagaagaggaggaacgtttgttccagcaagtggtctcgtcaaaccgtgcttctctgcgcaggaacttttgggatgaacttcctcttgccttcccttccaagtccagcaaagagctagtgagctactacttcaatgtcttcatgttgaggaagagggctgagcagaacaggttcgacccagcgaacattgacagtgacgacgatgagtggcaggcaggtggtgattttgagtttccaataacaggaagaactgatgaatacatgccaatcgagtcccttactgatcaagatgatgttgcttgcaatccatttcccttggagggggatttatatggagattctgatgatgaggacgagcttgacaattccagtggagacaggcataatggtgtgcagagggctggtatgttgtcagagggtcatcccgaaatgtcatttatagatcatgatcaacagacgttgaagctagatgcagatgcacaagatgactcttgcacatcatttgaggctcatcaggttggttgcgatggtggggcacatactgatattggcaatcactacaggagtgacgacggcctttgtggtggtgcagaacatgggttctttggtgaccattgtgacacaaaagagtggggcttcggtttcagtactggttgggagaggcatgattttttgtcaacgaacaatgtcatagaagaggtgttcgggaagggctccagtgaagatggaagtgacactgctactggccaggaccttatctgagccagaggcggaggcttcttttcagctgcgaaacctttagcagcccccccttgttctctgaatctgtacagcagtagtagttggctattttgatttgatgcctcacttgttcgtataggaatctctcatccctgtccttgaacatcatctgcttgcgatattggtcgcatggctaatgtaaatccgacgatgatatcatctgtcgatgatctgttgttaggctgtagcatgtacgtatcatctttgtagtgacggtgtgttttgacctgagcatttttcccatgtgccaacgagggtcatgtaataaaaggctgctgttgttccttgcccaatatatctcaccagctcgtcatgtactcccaaacgtcatttttatatgaaatttgttgtcgttctcgcggctcgttttaaacccgccttgaatcgtaatgattgcaacggaaattccagcctagcagtgatgttgggttcgcgttctatttttcttgcatcgtagtcacgttacacacgccgaggccgaggcttgttttttttttatcacatttcactagtggcttcaaccttctgtcagagcaagtatttgctaaaaatactgaaaaacgaccaatctaaccatgaggtcgatcatggttccaaccttttgtgagagaaaatatctgctac

SEQ ID NO: 924 - DNA, 2490 bp, Zea Mays
aataaatcagcccgaaaataggacgcggtcggcggtcgtgaaccgaacaaacctttccccaaaatttcccctcccccgcaccgaacgaactctcgatccgatcccgatccctgcagggagccgcctcggctcaccgatccggccccggatccgctcgttgctcgacgggatctctcgatcgtctggacaagcatgctgcatcaggagaacagtgaggctttcgggaggcaccactctgagcagcttgcatgtgtcaacatgaggggagcagataatggtcatccgaatttccttcctgagaaatgccagattgcagtttgtcctgaagttcaccaaaggggtgaaaaagttggactatttgatgaagagctggtacatggtattcatctaaccagtccttgtgttcagtcaccatttttgccaagtggtgtcaaagaaacacctatagtggatcataacaagagacctgcatccagtgacatactggacatagttgaatgcaaacggctgaagcaggaagatcaaatcgttactaaggaagacaaccatacatctgctgaggaggaatttcatgactaccccacatacacgacttgcgaaagaagctttgactcaccactatatgagagtgaggaaagtgaagatgagggcgtagattcacctctccattgttcacatgctcgcacctatgttgaagatggtctatggcctgccagctttcatcaatctgttggccctttttccttgaggaaacctgttcctatcgggtcaaatcatcaggctgaattacctgagtgcaggccatttggtggaagaactgaagaagacgaaagtgtcaagtggatcagaaacagtgttgtgccaatgcctggtactgatgcatcgtctttggtgttggagcctgttcactgcaaagcaggttgtgattgtcttgacgaaggttcaatcaattgtgtgaaaaagcatgtgatggaagcaagagaaaatttgaaggattctgttggtgcagacgccttcagggagttgggtttctatgacatgggggaagaggttgcctcaaggtggtcagaagaggaggaacgtttgttccagcaagtggtctcgtcaaaccgtgcttctctgcgcaggaacttttgggatgaacttcctcttgccttcccttccaagtccagcaaagagctagtgagctactacttcaatgtcttcatgttgaggaagagggctgagcagaacaggttcgacccagcgaacattgacagtgacgacgatgagtggcaggcaggtggtgattttgagtttccaataacaggaagaactgatgaatacatgccaatcgagtcccttactgatcaagatgatgttgcttgcaatccatttcccttggagggggatttatatggagattctgatgatgaggacgagcttgacaattccagtggagacaggcataatggtgtgcagagggctggtatgttgtcagagggtcatcccgaaatgtcatttatagatcatgatcaacagacgttgaagctagatgcagatgcacaagatgactcttgcacatcatttgaggctcatcaggttggttgcgatggtggggcacatactgatattggcaatcactacaggagtgacgacggcctttgtggtggtgcagaacatgggttctttggtgaccattgtgacacaaaagagtggggcttcggtttcagtactggttgggagaggcatgattttttgtcaacgaacaatgtcatagaagaggtgttcgggaagggctccagtgaagatggaagtgacactgctactggccaggaccttatctgagccagaggcggaggcttcttttcagctgcgaaacctttagcagcccccccttgttctctgaatctgtacagcagtagtagttggctattttgatttgatgcctcacttgttcgtataggaatctctcatccctgtccttgaacatcatctgcttgcgatattggtcgcatggctaatgtaaatccgacgatgatatcatctgtcgatgatctgttgttaggctgtagcatgtacgtatcatctttgtagtgacggtgtgttttgacctgagcatttttcccatgtgccaacgagggtcatgtaataaaaggctgctgttgttccttgcccaatatatctcaccagctcgtcatgtactcccaaacgtcatttttatatgaaatttgttgtcgttctcgcggctcgttttaaacccgccttgaatcgtaatgattgcaacggaaattccagcctagcagtgatgttgggttcgcgttctatttttcttgcatcgtagtcacgttacacacgccgaggccgaggcttgttttttttttatcacatttcactagtggcttcaaccttctgtcagagcaagtatttgctaaaaatactgaaaaacgaccaatctaaccatgaggtcgatcatggttccaaccttttgtgagagaaaatatctgctac

SEQ ID NO: 925 - DNA, 2398 bp, Zea Mays
aataaatcagcccgaaaataggacgcggtcggcggtcgtgaaccgaacaaacctttccccaaaatttcccctcccccgcaccgaacgaactctcgatccgatcccgatccctgcagggagccgcctcggctcaccgatccggccccggatccgctcgttgctcgacgggatctctcgatcgtctggacaagcatgctgcatcaggagaacagtgaggctttcgggaggcaccactctgagcagcttgcatgtgtcaacatgaggggagcagataatggtcatccgaatttccttcctgagaaatgccagattgcagtcaccatttttgccaagtggtgtcaaagaaacacctatagtggatcataacaagagacctgcatccagtgacatactggacatagttgaatgcaaacggctgaagcaggaagatcaaatcgttactaaggaagacaaccatacatctgctgaggaggaatttcatgactaccccacatacacgacttgcgaaagaagctttgactcaccactatatgagagtgaggaaagtgaagatgagggcgtagattcacctctccattgttcacatgctcgcacctatgttgaagatggtctatggcctgccagctttcatcaatctgttggccctttttccttgaggaaacctgttcctatcgggtcaaatcatcaggctgaattacctgagtgcaggccatttggtggaagaactgaagaagacgaaagtgtcaagtggatcagaaacagtgttgtgccaatgcctggtactgatgcatcgtctttggtgttggagcctgttcactgcaaagcaggttgtgattgtcttgacgaaggttcaatcaattgtgtgaaaaagcatgtgatggaagcaagagaaaatttgaaggattctgttggtgcagacgccttcagggagttgggtttctatgacatgggggaagaggttgcctcaaggtggtcagaagaggaggaacgtttgttccagcaagtggtctcgtcaaaccgtgcttctctgcgcaggaacttttgggatgaacttcctcttgccttcccttccaagtccagcaaagagctagtgagctactacttcaatgtcttcatgttgaggaagagggctgagcagaacaggttcgacccagcgaacattgacagtgacgacgatgagtggcaggcaggtggtgattttgagtttccaataacaggaagaactgatgaatacatgccaatcgagtcccttactgatcaagatgatgttgcttgcaatccatttcccttggagggggatttatatggagattctgatgatgaggacgagcttgacaattccagtggagacaggcataatggtgtgcagagggctggtatgttgtcagagggtcatcccgaaatgtcatttatagatcatgatcaacagacgttgaagctagatgcagatgcacaagatgactcttgcacatcatttgaggctcatcaggttggttgcgatggtggggcacatactgatattggcaatcactacaggagtgacgacggcctttgtggtggtgcagaacatgggttctttggtgaccattgtgacacaaaagagtggggcttcggtttcagtactggttgggagaggcatgattttttgtcaacgaacaatgtcatagaagaggtgttcgggaagggctccagtgaagatggaagtgacactgctactggccaggaccttatctgagccagaggcggaggcttcttttcagctgcgaaacctttagcagcccccccttgttctctgaatctgtacagcagtagtagttggctattttgatttgatgcctcacttgttcgtataggaatctctcatccctgtccttgaacatcatctgcttgcgatattggtcgcatggctaatgtaaatccgacgatgatatcatctgtcgatgatctgttgttaggctgtagcatgtacgtatcatctttgtagtgacggtgtgttttgacctgagcatttttcccatgtgccaacgagggtcatgtaataaaaggctgctgttgttccttgcccaatatatctcaccagctcgtcatgtactcccaaacgtcatttttatatgaaatttgttgtcgttctcgcggctcgttttaaacccgccttgaatcgtaatgattgcaacggaaattccagcctagcagtgatgttgggttcgcgttctatttttcttgcatcgtagtcacgttacacacgccgaggccgaggcttgttttttttttatcacatttcactagtggcttcaaccttctgtcagagcaagtatttgctaaaaatactgaaaaacgaccaatctaaccatgaggtcgatcatggttccaaccttttgtgagagaaaatatctgctac

SEQ ID NO: 926 - DNA, 2396 bp, Zea Mays
atcagcccgaaaataggacgcggtcggcggtcgtgaaccgaacaaacctttccccaaaatttcccctcccccgcaccgaacgaactctcgatccgatcccgatccctgcagggagccgcctcggctcaccgatccggccccggatccgctcgttgctcgacgggatctctcgatcgcagtctggacaagcatgctgcatcaggagaacagtgaggctttcgggaggcaccactctgagcagcttgcatgtgtcaacatgaggggagcagataatggtcatccgaatttccttcctgagaaatgccagattgcagtcaccatttttgccaagtggtgtcaaagaaacacctatagtggatcataacaagagacctgcatccagtgacatactggacatagttgaatgcaaacggctgaagcaggaagatcaaatcgttactaaggaagacaaccatacatctgctgaggaggaatttcatgactaccccacatacacgacttgcgaaagaagctttgactcaccactatatgagagtgaggaaagtgaagatgagggcgtagattcacctctccattgttcacatgctcgcacctatgttgaagatggtctatggcctgccagctttcatcaatctgttggccctttttccttgaggaaacctgttcctatcgggtcaaatcatcaggctgaattacctgagtgcaggccatttggtggaagaactgaagaagacgaaagtgtcaagtggatcagaaacagtgttgtgccaatgcctggtactgatgcatcgtctttggtgttggagcctgttcactgcaaagcaggttgtgattgtcttgacgaaggttcaatcaattgtgtgaaaaagcatgtgatggaagcaagagaaaatttgaaggattctgttggtgcagacgccttcagggagttgggtttctatgacatgggggaagaggttgcctcaaggtggtcagaagaggaggaacgtttgttccagcaagtggtctcgtcaaaccgtgcttctctgcgcaggaacttttgggatgaacttcctcttgccttcccttccaagtccagcaaagagctagtgagctactacttcaatgtcttcatgttgaggaagagggctgagcagaacaggttcgacccagcgaacattgacagtgacgacgatgagtggcaggcaggtggtgattttgagtttccaataacaggaagaactgatgaatacatgccaatcgagtcccttactgatcaagatgatgttgcttgcaatccatttcccttggagggggatttatatggagattctgatgatgaggacgagcttgacaattccagtggagacaggcataatggtgtgcagagggctggtatgttgtcagagggtcatcccgaaatgtcatttatagatcatgatcaacagacgttgaagctagatgcagatgcacaagatgactcttgcacatcatttgaggctcatcaggttggttgcgatggtggggcacatactgatattggcaatcactacaggagtgacgacggcctttgtggtggtgcagaacatgggttctttggtgaccattgtgacacaaaagagtggggcttcggtttcagtactggttgggagaggcatgattttttgtcaacgaacaatgtcatagaagaggtgttcgggaagggctccagtgaagatggaagtgacactgctactggccaggaccttatctgagccagaggcggaggcttcttttcagctgcgaaacctttagcagcccccccttgttctctgaatctgtacagcagtagtagttggctattttgatttgatgcctcacttgttcgtataggaatctctcatccctgtccttgaacatcatctgcttgcgatattggtcgcatggctaatgtaaatccgacgatgatatcatctgtcgatgatctgttgttaggctgtagcatgtacgtatcatctttgtagtgacggtgtgttttgacctgagcatttttcccatgtgccaacgagggtcatgtaataaaaggctgctgttgttccttgcccaatatatctcaccagctcgtcatgtactcccaaacgtcatttttatatgaaatttgttgtcgttctcgcggctcgttttaaacccgccttgaatcgtaatgattgcaacggaaattccagcctagcagtgatgttgggttcgcgttctatttttcttgcatcgtagtcacgttacacacgccgaggccgaggcttgttttttttttatcacatttcactagtggcttcaaccttctgtcagagcaagtatttgctaaaaatactgaaaaacgaccaatctaaccatgaggtcgatcatggttccaaccttttgtgagagaaaatatctgctac

SEQ ID NO: 927 - DNA, 2445 bp, Zea Mays
cgtgaaccgaacaaacctttccccaaaatttcccctcccccgcaccgaacgaactctcgatccgatcccgatccctgcagggagccgcctcggctcaccgatccggccccggatccgctcgttgctcgacgggatctctcgatcgcagtctggacaagcatgctgcatcaggagaacagtgaggctttcgggaggcaccactctgagcagcttgcatgtgtcaacatgaggggagcagataatggtcatccgaatttccttcctgagaaatgccagattgcagttcaccaaaggggtgaaaaagttggactatttgatgaagagctggtacatggtattcatctaaccagtccttgtgttcagtcaccatttttgccaagtggtgtcaaagaaacacctatagtggatcataacaagagacctgcatccagtgacatactggacatagttgaatgcaaacggctgaagcaggaagatcaaatcgttactaaggaagacaaccatacatctgctgaggaggaatttcatgactaccccacatacacgacttgcgaaagaagctttgactcaccactatatgagagtgaggaaagtgaagatgagggcgtagattcacctctccattgttcacatgctcgcacctatgttgaagatggtctatggcctgccagctttcatcaatctgttggccctttttccttgaggaaacctgttcctatcgggtcaaatcatcaggctgaattacctgagtgcaggccatttggtggaagaactgaagaagacgaaagtgtcaagtggatcagaaacagtgttgtgccaatgcctggtactgatgcatcgtctttggtgttggagcctgttcactgcaaagcaggttgtgattgtcttgacgaaggttcaatcaattgtgtgaaaaagcatgtgatggaagcaagagaaaatttgaaggattctgttggtgcagacgccttcagggagttgggtttctatgacatgggggaagaggttgcctcaaggtggtcagaagaggaggaacgtttgttccagcaagtggtctcgtcaaaccgtgcttctctgcgcaggaacttttgggatgaacttcctcttgccttcccttccaagtccagcaaagagctagtgagctactacttcaatgtcttcatgttgaggaagagggctgagcagaacaggttcgacccagcgaacattgacagtgacgacgatgagtggcaggcaggtggtgattttgagtttccaataacaggaagaactgatgaatacatgccaatcgagtcccttactgatcaagatgatgttgcttgcaatccatttcccttggagggggatttatatggagattctgatgatgaggacgagcttgacaattccagtggagacaggcataatggtgtgcagagggctggtatgttgtcagagggtcatcccgaaatgtcatttatagatcatgatcaacagacgttgaagctagatgcagatgcacaagatgactcttgcacatcatttgaggctcatcaggttggttgcgatggtggggcacatactgatattggcaatcactacaggagtgacgacggcctttgtggtggtgcagaacatgggttctttggtgaccattgtgacacaaaagagtggggcttcggtttcagtactggttgggagaggcatgattttttgtcaacgaacaatgtcatagaagaggtgttcgggaagggctccagtgaagatggaagtgacactgctactggccaggaccttatctgagccagaggcggaggcttcttttcagctgcgaaacctttagcagcccccccttgttctctgaatctgtacagcagtagtagttggctattttgatttgatgcctcacttgttcgtataggaatctctcatccctgtccttgaacatcatctgcttgcgatattggtcgcatggctaatgtaaatccgacgatgatatcatctgtcgatgatctgttgttaggctgtagcatgtacgtatcatctttgtagtgacggtgtgttttgacctgagcatttttcccatgtgccaacgagggtcatgtaataaaaggctgctgttgttccttgcccaatatatctcaccagctcgtcatgtactcccaaacgtcatttttatatgaaatttgttgtcgttctcgcggctcgttttaaacccgccttgaatcgtaatgattgcaacggaaattccagcctagcagtgatgttgggttcgcgttctatttttcttgcatcgtagtcacgttacacacgccgaggccgaggcttgttttttttttatcacatttcactagtggcttcaaccttctgtcagagcaagtatttgctaaaaatactgaaaaacgaccaatctaaccatgaggtcgatcatggttccaaccttttgtgagagaaaatatctgctac

SEQ ID NO: 928 - DNA, 2454 bp, Zea Mays
gaaccgaacaaacctttccccaaaatttcccctcccccgcaccgaacgaactctcgatccgatcccgatccctgcagggagccgcctcggctcaccgatccggccccggatccgctcgttgctcgacgggatctctcgatcgcagtctggacaagcatgctgcatcaggagaacagtgaggctttcgggaggcaccactctgagcagcttgcatgtgtcaacatgaggggagcagataatggtcatccgaatttccttcctgagaaatgccagattgcagtttgtcctgaagttcaccaaaggggtgaaaaagttggactatttgatgaagagctggtacatggtattcatctaaccagtccttgtgttcagtcaccatttttgccaagtggtgtcaaagaaacacctatagtggatcataacaagagacctgcatccagtgacatactggacatagttgaatgcaaacggctgaagcaggaagatcaaatcgttactaaggaagacaaccatacatctgctgaggaggaatttcatgactaccccacatacacgacttgcgaaagaagctttgactcaccactatatgagagtgaggaaagtgaagatgagggcgtagattcacctctccattgttcacatgctcgcacctatgttgaagatggtctatggcctgccagctttcatcaatctgttggccctttttccttgaggaaacctgttcctatcgggtcaaatcatcaggctgaattacctgagtgcaggccatttggtggaagaactgaagaagacgaaagtgtcaagtggatcagaaacagtgttgtgccaatgcctggtactgatgcatcgtctttggtgttggagcctgttcactgcaaagcaggttgtgattgtcttgacgaaggttcaatcaattgtgtgaaaaagcatgtgatggaagcaagagaaaatttgaaggattctgttggtgcagacgccttcagggagttgggtttctatgacatgggggaagaggttgcctcaaggtggtcagaagaggaggaacgtttgttccagcaagtggtctcgtcaaaccgtgcttctctgcgcaggaacttttgggatgaacttcctcttgccttcccttccaagtccagcaaagagctagtgagctactacttcaatgtcttcatgttgaggaagagggctgagcagaacaggttcgacccagcgaacattgacagtgacgacgatgagtggcaggcaggtggtgattttgagtttccaataacaggaagaactgatgaatacatgccaatcgagtcccttactgatcaagatgatgttgcttgcaatccatttcccttggagggggatttatatggagattctgatgatgaggacgagcttgacaattccagtggagacaggcataatggtgtgcagagggctggtatgttgtcagagggtcatcccgaaatgtcatttatagatcatgatcaacagacgttgaagctagatgcagatgcacaagatgactcttgcacatcatttgaggctcatcaggttggttgcgatggtggggcacatactgatattggcaatcactacaggagtgacgacggcctttgtggtggtgcagaacatgggttctttggtgaccattgtgacacaaaagagtggggcttcggtttcagtactggttgggagaggcatgattttttgtcaacgaacaatgtcatagaagaggtgttcgggaagggctccagtgaagatggaagtgacactgctactggccaggaccttatctgagccagaggcggaggcttcttttcagctgcgaaacctttagcagcccccccttgttctctgaatctgtacagcagtagtagttggctattttgatttgatgcctcacttgttcgtataggaatctctcatccctgtccttgaacatcatctgcttgcgatattggtcgcatggctaatgtaaatccgacgatgatatcatctgtcgatgatctgttgttaggctgtagcatgtacgtatcatctttgtagtgacggtgtgttttgacctgagcatttttcccatgtgccaacgagggtcatgtaataaaaggctgctgttgttccttgcccaatatatctcaccagctcgtcatgtactcccaaacgtcatttttatatgaaatttgttgtcgttctcgcggctcgttttaaacccgccttgaatcgtaatgattgcaacggaaattccagcctagcagtgatgttgggttcgcgttctatttttcttgcatcgtagtcacgttacacacgccgaggccgaggcttgttttttttttatcacatttcactagtggcttcaaccttctgtcagagcaagtatttgctaaaaatactgaaaaacgaccaatctaaccatgaggtcgatcatggttccaaccttttgtgagagaaaatatctgctac

SEQ ID NO: 929 - DNA, 2357 bp, Zea Mays
ctccgatccgctcgattaacggcggattttgcacgggggcgtcggatctacacgtgtccttctggacaagcatgctgcatcaggagaacagtgaggctttcgggaggcaccactctgagcagcttgcatgtgtcaacatgaggggagcagataatggtcatccgaatttccttcctgagaaatgccagattgcagttcaccaaaggggtgaaaaagttggactatttgatgaagagctggtacatggtattcatctaaccagtccttgtgttcagtcaccatttttgccaagtggtgtcaaagaaacacctatagtggatcataacaagagacctgcatccagtgacatactggacatagttgaatgcaaacggctgaagcaggaagatcaaatcgttactaaggaagacaaccatacatctgctgaggaggaatttcatgactaccccacatacacgacttgcgaaagaagctttgactcaccactatatgagagtgaggaaagtgaagatgagggcgtagattcacctctccattgttcacatgctcgcacctatgttgaagatggtctatggcctgccagctttcatcaatctgttggccctttttccttgaggaaacctgttcctatcgggtcaaatcatcaggctgaattacctgagtgcaggccatttggtggaagaactgaagaagacgaaagtgtcaagtggatcagaaacagtgttgtgccaatgcctggtactgatgcatcgtctttggtgttggagcctgttcactgcaaagcaggttgtgattgtcttgacgaaggttcaatcaattgtgtgaaaaagcatgtgatggaagcaagagaaaatttgaaggattctgttggtgcagacgccttcagggagttgggtttctatgacatgggggaagaggttgcctcaaggtggtcagaagaggaggaacgtttgttccagcaagtggtctcgtcaaaccgtgcttctctgcgcaggaacttttgggatgaacttcctcttgccttcccttccaagtccagcaaagagctagtgagctactacttcaatgtcttcatgttgaggaagagggctgagcagaacaggttcgacccagcgaacattgacagtgacgacgatgagtggcaggcaggtggtgattttgagtttccaataacaggaagaactgatgaatacatgccaatcgagtcccttactgatcaagatgatgttgcttgcaatccatttcccttggagggggatttatatggagattctgatgatgaggacgagcttgacaattccagtggagacaggcataatggtgtgcagagggctggtatgttgtcagagggtcatcccgaaatgtcatttatagatcatgatcaacagacgttgaagctagatgcagatgcacaagatgactcttgcacatcatttgaggctcatcaggttggttgcgatggtggggcacatactgatattggcaatcactacaggagtgacgacggcctttgtggtggtgcagaacatgggttctttggtgaccattgtgacacaaaagagtggggcttcggtttcagtactggttgggagaggcatgattttttgtcaacgaacaatgtcatagaagaggtgttcgggaagggctccagtgaagatggaagtgacactgctactggccaggaccttatctgagccagaggcggaggcttcttttcagctgcgaaacctttagcagcccccccttgttctctgaatctgtacagcagtagtagttggctattttgatttgatgcctcacttgttcgtataggaatctctcatccctgtccttgaacatcatctgcttgcgatattggtcgcatggctaatgtaaatccgacgatgatatcatctgtcgatgatctgttgttaggctgtagcatgtacgtatcatctttgtagtgacggtgtgttttgacctgagcatttttcccatgtgccaacgagggtcatgtaataaaaggctgctgttgttccttgcccaatatatctcaccagctcgtcatgtactcccaaacgtcatttttatatgaaatttgttgtcgttctcgcggctcgttttaaacccgccttgaatcgtaatgattgcaacggaaattccagcctagcagtgatgttgggttcgcgttctatttttcttgcatcgtagtcacgttacacacgccgaggccgaggcttgttttttttttatcacatttcactagtggcttcaaccttctgtcagagcaagtatttgctaaaaatactgaaaaacgaccaatctaaccatgaggtcgatcatggttccaaccttttgtgagagaaaatatctgctac

SEQ ID NO: 930 - DNA, 2257 bp, Zea Mays
ggattttgcacgggggcgtcggatctacacgtgtcctcagtctggacaagcatgctgcatcaggagaacagtgaggctttcgggaggcaccactctgagcagcttgcatgtgtcaacatgaggggagcagataatggtcatccgaatttccttcctgagaaatgccagattgcagtcaccatttttgccaagtggtgtcaaagaaacacctatagtggatcataacaagagacctgcatccagtgacatactggacatagttgaatgcaaacggctgaagcaggaagatcaaatcgttactaaggaagacaaccatacatctgctgaggaggaatttcatgactaccccacatacacgacttgcgaaagaagctttgactcaccactatatgagagtgaggaaagtgaagatgagggcgtagattcacctctccattgttcacatgctcgcacctatgttgaagatggtctatggcctgccagctttcatcaatctgttggccctttttccttgaggaaacctgttcctatcgggtcaaatcatcaggctgaattacctgagtgcaggccatttggtggaagaactgaagaagacgaaagtgtcaagtggatcagaaacagtgttgtgccaatgcctggtactgatgcatcgtctttggtgttggagcctgttcactgcaaagcaggttgtgattgtcttgacgaaggttcaatcaattgtgtgaaaaagcatgtgatggaagcaagagaaaatttgaaggattctgttggtgcagacgccttcagggagttgggtttctatgacatgggggaagaggttgcctcaaggtggtcagaagaggaggaacgtttgttccagcaagtggtctcgtcaaaccgtgcttctctgcgcaggaacttttgggatgaacttcctcttgccttcccttccaagtccagcaaagagctagtgagctactacttcaatgtcttcatgttgaggaagagggctgagcagaacaggttcgacccagcgaacattgacagtgacgacgatgagtggcaggcaggtggtgattttgagtttccaataacaggaagaactgatgaatacatgccaatcgagtcccttactgatcaagatgatgttgcttgcaatccatttcccttggagggggatttatatggagattctgatgatgaggacgagcttgacaattccagtggagacaggcataatggtgtgcagagggctggtatgttgtcagagggtcatcccgaaatgtcatttatagatcatgatcaacagacgttgaagctagatgcagatgcacaagatgactcttgcacatcatttgaggctcatcaggttggttgcgatggtggggcacatactgatattggcaatcactacaggagtgacgacggcctttgtggtggtgcagaacatgggttctttggtgaccattgtgacacaaaagagtggggcttcggtttcagtactggttgggagaggcatgattttttgtcaacgaacaatgtcatagaagaggtgttcgggaagggctccagtgaagatggaagtgacactgctactggccaggaccttatctgagccagaggcggaggcttcttttcagctgcgaaacctttagcagcccccccttgttctctgaatctgtacagcagtagtagttggctattttgatttgatgcctcacttgttcgtataggaatctctcatccctgtccttgaacatcatctgcttgcgatattggtcgcatggctaatgtaaatccgacgatgatatcatctgtcgatgatctgttgttaggctgtagcatgtacgtatcatctttgtagtgacggtgtgttttgacctgagcatttttcccatgtgccaacgagggtcatgtaataaaaggctgctgttgttccttgcccaatatatctcaccagctcgtcatgtactcccaaacgtcatttttatatgaaatttgttgtcgttctcgcggctcgttttaaacccgccttgaatcgtaatgattgcaacggaaattccagcctagcagtgatgttgggttcgcgttctatttttcttgcatcgtagtcacgttacacacgccgaggccgaggcttgttttttttttatcacatttcactagtggcttcaaccttctgtcagagcaagtatttgctaaaaatactgaaaaacgaccaatctaaccatgaggtcgatcatggttccaaccttttgtgagagaaaatatctgctac

SEQ ID NO: 931 - DNA, 1766 bp, Zea Mays
ctcacagtcaggtgcgatgcaattgccccctattagtcaagtacccctcttcctattttgtttaggggttaaaatggcttgatgaacccttccgttcacacgcaccggccccattcacttgcaactcgtagaggctgtaagtaaagtaaacagtgccccactaaattcaaagtgacggtggggttgaaagacgagaatgcctacccccgagccgagagtgcccgccctttctgtcaagtaggctactttttccggaacgcagtccggaataagcgttcctgtgtatatagatatcttcgatgctgtcatttcgaaatgtccgctcctcttcacctcccaaaaagcaaagttggcttgacgagcgcagatgaggaagcgggagcaataaaccaagaatctctttcttttccaaatacttactttattaagattaagttaaggggcaaaagagaagcgctttcgctactgagaaagcgaatggtcagcgcgagggttcgacgacttagccgagcgttagcgaagcgtcattctcatagcgaggcgcttcgagttagcgaagcgctgtagtagcgtcggagactatgtgctataatgctgaactaaggacgttccgccttatctatagaagcagtcaactgagttctgaacgaatgggatccttagtgggtaatggctcaatcaatctatagatggaaagccttatgatgggaaactaccacgttaggtttggagagagatgggacctgttatagtttagggggagcagatgcaagctttttctttccatagccggccaaatgactaccggatcatcggtctactctacctcaattcaccatttcgaactttatacagaaggtttttccgtaccagctccttctacctataccgcagttgaagcacctaaaggtgaatttggtgtctttcttgtcagtaatgggagtaatcgtccctaccgttgtaaaataagagcacctggctttgcccattcacaaggactcgattctatgtccaaacatcacatgccagcagatgtagtcaccatcataggtactcaagatattgtgtttggagaggtagatagataggacgtagtcttgctcgatcaggacccttgctttattgcgagccaaaacagctgcgctattcagttctacatctttttttacatttaaagaaatgtgaaaatgcagccctttagttttagttacagatgtgaaaaaagtaaatatctctctgtctgtgtaggttcggtttgttcttatcgatccatttcttcgagtgtgggtgtcctacgctacttccgttcatgtttacgttctcaaaagaccttggaaaaaccaacaccgaccaaaatccaagtctccctttctcttttgggagcagagctgaaaaagatggaaatatgtgctatgtggaatcaccgtatctttcactttgggcttgaccaagcaagccaggcgtcttcaagaacttttagttcaacaacgcgaaaaggaaatccaatttcggtttctcataggaaaccgaggcccaccaaccgtatacttgttggtttggtggggaaagaagagtgggtaagtgggcttctttcaaggttcgtacatatcctcaacttcgacctgcagagccaaattatcttacttttaccagcttattgcgcgtattctgacaagtgattcgatctcatcatcaccataattgtcgttgtcatctagattgctttcttcacaatcctcgtcgtaactggcatatgtttaaagagg

SEQ ID NO: 932 - DNA, 1723 bp, Zea Mays
gccacggcgccatccaagtccgcctggccccacatgcagcgagcggctcacgccgtgtccccattcccagctccgcctaccataaaacccatccgctgtttgcgtcttcatttctctctctcctctcatctccacctctcctccggctagggtgttcacgcctgccgcggcgaagcttctgccctccccggcgtcgcgctctggtcgtcgtcggccgggaagatggctggcggcttcagggtacttcatctggtcaggccctttctggctttcttgccagaggtgcagagcgcggataggaagataccattcagagaaaaagttatctacactgttatttctctcttcatttttctggtgtgcagccagctcccactctatggcattcattcgacgactggagctgatcctttctactggatgcgtgttatccttgcatcaaaccgtggcactgtgatggagttgggtattactccaattgtgacctctggtatggtaatgcaacttcttgtcggatcgaagatcattgaagttgacaacagtgtgagagaggatcgtgctctgctgaatggtgcacaaaagttgcttggtatcttgatcgctattggggaagctgtggcatatgtcctgtctggaatgtatggtagtaaccttccaaatgtgaccaatttgcttgccactgtcttggtattcctcatagttatctatttccaaggcttccgtgttgtgcttccagtgagatcaaagaatgctcgtggccagcaaggctcatatccaattaagctgttctacacttcaaacatgcccatcatccttcactctgcgctgattaccaacctctattttatatcccagcttctctacaggaagtacagtggaaacttccttgttaaccttcttgggaagtggaaggagtctgaatactctggccattctattcctgttggtggtcttgcttactatgtaactgccccatcaagtttggctgatgtccttgcaaatccattccatgcactgttttatgtggtcttcatgctgtcagcctgtgctctgttctcaaagacatggattgaagtttccggttcatcagcaaaggatgttgctaagcagctcaaggaacaacaaatggtgatgccaggccatcgtgagtcgaacttgcagaaggaacttaaccgatacatccccactgctgctgcatttggtggtgtatgcattggcgcattgaccgtcctggctgatttcatgggtgcgattggttcaggaactggtatattgctcgctgtgacaatcatataccaatacttcgaaacctttgagaaggaaagggcgactgagcttggtttctttggtttttgattagtagctgtggaaccttaacttggctatagctgaattttcttgtaagtccctgtagtgcttagccagttgtaacttaaagagttctgtttaggttgccttcttgcggccacaatcatgtagcagaatgtgcgtgtgtttcaggttagcgtgggggtatgtgcatctgtccaaagagagtctgcaatttggcaaccggatattttgttatcaatttcagttacttcgaactgagcatgttctcattcccactttctgtttcggtctgttactaatttctcagaacattagatgctcacaggcgctttattctaatgtctctatttcatgacgagatatgaacatctctgaatctgattgcttcttt

SEQ ID NO: 933 - DNA, 1917 bp, Zea Mays
gccacggcgccatccaagtccgcctggccccacatgcagcgagcggctcacgccgtgtccccattcccagctccgcctaccataaaacccatccgctgtttgcgtcttcatttctctctctcctctcatctccacctctcctccggctagggtgttcacgcctgccgcggcgaagcttctgccctccccggcgtcgcgctctggtcgtcgtcggccgggaagatggctggcggcttcagggtacttcatctggtcaggccctttctggctttcttgccagaggtgcagagcgcggataggaagataccattcagagaaaaagttatctacactgttatttctctcttcatttttctggtgtgcagccagctcccactctatggcattcattcgacgactggagctgatcctttctactggatgcgtgttatccttgcatcaaaccgtggcactgtgatggagttgggtattactccaattgtgacctctggtatggtaatgcaacttcttgtcggatcgaagatcattgaagttgacaacagtgtgagagaggatcgtgctctgctgaatggtgcacaaaagttgcttggtatcttgatcgctattggggaagctgtggcatatgtcctgtctggaatgtatggtagtgtaagccaacttggaacagggaatgctattctcattatacttcagcttttctttgctggcatcattgtcatctgtttggatgaacttctccagaaaggttatggtttgggatctggtatttctctgttcattgctaccaatatctgtgagaatatcatctggaaggcatttagccccacaaccatcaacagtggtcgtggcgctgaattcgaaggggctgtcattgcactgttccatctgttgattacgagaaccgataaagtccgtgctcttcgtgaggctttctaccgccagaaccttccaaatgtgaccaatttgcttgccactgtcttggtattcctcatagttatctatttccaaggcttccgtgttgtgcttccagtgagatcaaagaatgctcgtggccagcaaggctcatatccaattaagctgttctacacttcaaacatgcccatcatccttcactctgcgctgattaccaacctctattttatatcccagcttctctacaggaagtacagtggaaacttccttgttaaccttcttgggaagtggaaggagtctgaatactctggccattctattcctgttggtggtcttgcttactatgtaactgccccatcaagtttggctgatgtccttgcaaatccattccatgcactgttttatgtggtcttcatgctgtcagcctgtgctctgttctcaaagacatggattgaagtttccggttcatcagcaaaggatgttgctaagcagctcaaggaacaacaaatggtgatgccaggccatcgtgagtcgaacttgcagaaggaacttaaccgatacatccccactgctgctgcatttggtggtgtatgcattggcgcattgaccgtcctggctgatttcatgggtgcgattggttcaggaactggtatattgctcgctgtgacaatcatataccaatacttcgaaacctttgagaaggaaagggcgactgagcttggtttctttggtttttgattagtagctgtggaaccttaacttggctatagctgaattttcttgttagcgtgggggtatgtgcatctgtccaaagagagtctgcaatttggcaaccggatattttgttatcaatttcagttacttcgaactgagcatgttctcattcccactttctgtttcggtctgttactaatttctcagaacattagatgctcacaggcgctttattctaatgtctctatttcatgacgagatatgaacatctctgaatctgattgcttcttt

SEQ ID NO: 934 - DNA, 1547 bp, Zea Mays
gccacggcgccatccaagtccgcctggccccacatgcagcgagcggctcacgccgtgtccccattcccagctccgcctaccataaaacccatccgctgtttgcgtcttcatttctctctctcctctcatctccacctctcctccggctagggtgttcacgcctgccgcggcgaagcttctgccctccccggcgtcgcgctctggtcgtcgtcggccgggaagatggctggcggcttcagggtacttcatctggtcaggccctttctggctttcttgccagaggtgcagagcgcggataggaagataccattcagagaaaaagttatctacactgttatttctctcttcatttttctgatcattgaagttgacaacagtgtgagagaggatcgtgctctgctgaatggtgcacaaaagttgcttggtatcttgatcgctattggggaagctgtggcatatgtcctgtctggaatgtatggtagtgtaagccaacttggaacagggaatgctattctcattatacttcagcttttctttgctggcatcattgtcatctgtttggatgaacttctccagaaaggttatggtttgggatctggtatttctctgttcattgctaccaatatctgtgagaatatcatctggaaggcatttagccccacaaccatcaacagtggtcgtggcgctgaattcgaaggggctgtcattgcactgttccatctgttgattacgagaaccgataaagtccgtgctcttcgtgaggctttctaccgccagaaccttccaaatgtgaccaatttgcttgccactgtcttggtattcctcatagttatctatttccaaggcttccgtgttgtgcttccagtgagatcaaagaatgctcgtggccagcaaggctcatatccaattaagctgttctacacttcaaacatgcccatcatccttcactctgcgctgattaccaacctctattttatatcccagcttctctacaggaagtacagtggaaacttccttgttaaccttcttgggaagtggaaggagtctgaatactctggccattctattcctgttggtggtcttgcttactatgtaactgccccatcaagtttggctgatgtccttgcaaatccattccatgcactgttttatgtggtcttcatgctgtcagcctgtgctctgttctcaaagacatggattgaagtttccggttcatcagcaaaggatgttgctaagcagctcaaggaacaacaaatggtgatgccaggccatcgtgagtcgaacttgcagaaggaacttaaccgatacatccccactgctgctgcatttggtggtgtatgcattggcgcattgaccgtcctggctgatttcatgggtgcgattggttcaggaactggtatattgctcgctgtgacaatcatataccaatacttcgaaacctttgagaaggaaagggcgactgagcttggtttctttggtttttgattaccacaactaaacttaggcaagtgtaggtggctacaaaaaacagaaaatttagagtaaca

SEQ ID NO: 935 - DNA, 5863 bp, Zea Mays
cttgcacccgctctccgcgagctacagcatacagctctgtagcgccttctctctctctcttggctcgctcgcgctgtggagctcaagaccctcgccattccgccgcgggaaaccctaaccctagccctcgcaccgctacgggaggcgcgggagagtccgggtcgcgccgcgccgccgatcccgatccagacgccgttgcgcggagccgcgctgatcgagtctctggtggaatagaggacggacactatttcagattgcttggtgctagtttatttttccaactcagggtggacttctgggtctatctttctcatcatagaagcaaacatttgtggaagctgcttatagctatatatgatatgaaagtttgggaaccatcaactgcaaattggccactctttaacgggcattagacccttagggacacttcaggaatgtcacattttcatcccacacagcatgcgggtgacaatgattttcagatgtggcagcagcagatgatgttcaagcagttgcaggagtttcagaggcagcaacaactacagcaatctgatcatggagccaggatgcagccatcttttggccagtttcatgctcctgcaaaacctttacctgctgatcaattgtcgacaatgtcaaatgaaatggccaacaatgaggccatgaattctgcatggccacataattttacaggtggtgatcccagtttgacaagcaactcccaaatgttgaataatggtagcacaaattgggatcagattgttggtgctcctggtgtaggcaatttcatgaacagttcaatgtttgcgaatgctcagaatcaatcgatgagaccaatgggaatagctacccaccaagtggatcaatctttttatccaatgcatcctaccagcagcagagggcatggaaaccagtattcccaatttttagggattcatgctgattctcagagtgcagtggcaagggttggtccagatcagtcagaaaagacatccagaccattcaactcttcaatgaatgaacatggtcttcatatgcaaggtcctgccagttcgatgcataattttcgtggaaaagggggtttcttgaataacagtctgatgcaaagtcaaggtgatagtatcagggcaggcagtccggttacagtgaatcaactacaacatggtattcaaacccaagattttcatggtaggtcaaaccaagttgaccttcaagtgggcatgcaagataaatcagcaatgcaggtagggcaagcaagtcgtggggctagccttgaccccaccgaggagaaaattttatttgggggcgatgaggatggcaactggggagctttgttgaggggcgacaatgataatggcaattctttggacaatgataattatggtggtggctactcatctctacagagtggtagctggagtgcccttatgcaggaagctctccagtctacaaccagtgaaaacagtcccaaagaagagtggagtggcttgagtttccataaaactgagcaggtgatggctaacaatgcaactttatcaggccatgatgataataagcttactaggttaagcggtgcaaacctagaaaatgcacgtccttcaccaacatccagctacgctgatggaacaatgaataacccaaatctcgccagttttcagcatgccataaggcctccattcgagcgaagggaccatatgactcatgaatctcctaatgctcctgttaacaatcatcaatcaacttctgaagtcaacaatgggtacattcaacatggcttaaaacaaattcaatctgatggaaggcaagaacaagtgcacctagcaaatggaatttggccacatcaaaagactgaactgctcagaaataattcacagtcaactggtatgcatgctacaccacctggtgcacatggattttggatttcacaacaaaatacagctgatcacaatatgaatagagagtccagtaataaccaaaatgactggaaagctaacaatgtgcttggacaagacatgcacaatagccaaaatgtcttcaatagcaatgagaactcttggaagtcaactggaggtaatgttaattcagtccagagacttcagcagaggaagtctgatgtaagcactactaatgaaagttcagatggtaaaagtattagcatgatgagctcaagcatgtcaatgatggcacaggatcattatcagatggtcactagtcggagtggcgagcaaattggcatgaaccgtaatatggcgcatagagctccagaaatctctgaatcaccaagaaaaagcacagaacaaagaccaggtgatttcaaccaggaatatctaaatgcaactcctaacgaaaggcaaacacacactttaaaccatggacaacacataagtgattctgcccccagaaggcattctatatttgctgggaaggaatccgaaaatttaggtcagtctagtcagcaagcaatgggatcttacatgttgcaaaatcgtgctatggggagctctggaatgaacattggcccatctccaggcaatccagtgtcaaataatctgtttccacctcagatgcgaaataatctgcagcatcattttggcacaaactcccttgtttccaataatatgccttcagtaagtgagaaaatgatgatggcacaggaacaacttcaatctcgacatggtctccctaatagctctagtgcattaccttttggaggagctgatactggtctgtctcagaacagagcagttcaaaacagtcaacatatgcttcagcttcttcataaggtggataactcaagaaatagcgatgtggctgctgacatacccaacaacccccttggcgttgtttctgcccagcaacaacctaaccattctttgcagggatttgggttgagactggcaccaccatcccaacgccaatcaaattcgggtaatttatggtctagtcagactaatgttgatggcaagcaatctgaccactcagcacaagatgatgaccgcacaccacaaccttccacgcctagccagtcattgactcctcagcatcaaaactctcaaccttcaccatttcacagttcagaaacagaaaataccgggcaaccaattgcacgctttccccagttaagtccaggtcaacattatcctgtcacagatgatagatctggtcctgcacccatgctgcagcagcagtctcagcaaagcaacttcgcaacagtattcaagaatgtatggacaaacatatcagcacagcgcctaggtggtatgcaagctaacaagattacacccaacatccttcagtctatgatgtttccaaataattcttcagcttccaacttatggagctctcagaaggcagatgatcaagggcagagggcatcaactccatcagatattgcaacaacttcagctaactcacagaatcaagatccaaaacgagctgctgataatgatgcagggttagcatcttcccagaaggcaaacctagagtcgaaaggaactaccgtaacaggaggaaatgaatccttgcagaagcctttttcagatgggaattccatgaatgctgtttcatcctttgcacaattgcatcagcaaggcatccttggtgctaaacatggggaaaacccaggagccaattttcaggctatgaattcttcccacaatagtgttaataatagtggtggcattgttttacatggaagcccagcaccttcaaacattcagcagcaaaattactctcttctacatcaaatgcatgccttgaggcatacggatattgatccaggcagtttagctggaaagacgacaagacctgatgttggttctgatgcttcacagattgactggaaatctggccagaggtttgctcatgtagacaataaccaaaccaaatcagctgcagataacgttggaagccctggtgtcccagggtcattcacttcagacatgaaaatactgagttttgcttcaaggagtgaggagagaaatgtcaatataccttctcatcttccatctggagagcgcccgtttcctggtatggttactgcacaaaatgataatcagaatcaagttcagcctatgggcacaagtgcaacatcaaattctgttgaaagcagtgagaggccgaggataaaccctcaaatggcaccttcgtggtttggacactacggaaactatagaaatggtcagagtgttgctgtgcttaatgctcagaagcccacggctttgccatataattttccgaaagttccttgtaacaatgaaaataataactctgctgaaaatagagttgaatctggccaatctgttacgcctgggcatcatctcccatcaacaagaatggaagctttggttccttccaatgtaaaagtatctccaatgatgagaaggcctaagaagcgtaaagctatggactctgcacttgtttcttggcataaaataattgaaagcccacaaaacttgaggagcatcagcacatctgagatggactgggcttgggcagctaatcggttaatcgagaaggatgaagcagaaacttcagacgatacttctttacattatttaccgcggaagaggctaattttgacaacccagttgattcagcaacttctcccttctataccagcaaccattctgagagctcaagctgtgtctgcttttgaaagtgcgacatacactctatcaatgctgacactaagggatgcatgcagcatggcatcatcatcattatataactcttgctcccctgtggaggatgaaaataacccatctgaacaaacaagaagtgctaagaaaatggaagacaaagtgtctaaggtcgtggaagtctttgttggaagaatccggaagatggaaaatgactttataagtttgaacaagagggcctcgatgttggatgtgcaactggagtgccaagatctggagagaatttctatcgtaaatcgtttgggaagatttcatggccggaaccatgcagcagcagtcgagagttcatctgcttcagaaatgactccccggagaatttttcctgaaagacatgtcatgtcttttgcagtccctggaaatcttcctgaaggagtacactgtttatcactctagtggaatgatcttcaattactctctagccactcagatgatctcaggttgcgccccgtgattcccagtgctccttatccatgcaaaacatggccaaacagaagagtcatattatcaagaggtaactagagaaccggaagcgtcacaataccacgatgagggcaggccaggggacgtgttccagccgatcaagtctgtgctggctgtggttgttgtcccttatatcaagtataggtccatgtatattgtggaaagtcaaggaaaaaactgtggatctcccatcatttttctctgatgaagagtaattaacttcagatttttttagagaagtcgatgcatactagcttagtacatctagcgagtttcttcgctatttgtcagtctctaagaaatccctgatgatggagtgttggcaggctagagtggagataataatgtgagcctttctctgggttctttggttcctttaggatgggatgcaaattggctagtgtgtccagtctaactgaccacccttgttaggcagcagttaattactagttttatgtagtgctgaaagcattcatggaacaagtggcgggtaaagtgcttggaaattcttgtaacttgtgtacccgtgatgtttaaagcgctaacgggctattgtaaatttaaagtgccaatattcctgaggttatattttgtttcatgcaaattggctagtgtctccagctgtgtcagtgtgttaaggtaactgaagctgagctggttgctcagcccatacaaaatgtaac

SEQ ID NO: 936 - DNA, 5814 bp, Zea Mays
cagctctgtagcgccttctctctctctcttggctcgctcgcgctgtggagctcaagaccctcgccattccgccgcgggaaaccctaaccctagccctcgcaccgctacgggaggcgcgggagagtccgggtcgcgccgcgccgccgatcccgatccagacgccgttgcgcggagccgcgctgatcgagtctctggtggaatagaggacggacactatttcagattgcttggtgctagtttatttttccaactcagggtggacttctgggtctatctttctcatcatagaagcaaacatttgtggaagctgcttatagctatatatgatatgaaagtttgggaaccatcaactgcaaattggccactctttaacgggcattagacccttagggacacttcaggaatgtcacattttcatcccacacagcatgcgggtgacaatgattttcagatgtggcagcagcagatgatgttcaagcagttgcaggagtttcagaggcagcaacaactacagcaatctgatcatggagccaggatgcagccatcttttggccagtttcatgctcctgcaaaacctttacctgctgatcaattgtcgacaatgtcaaatgaaatggccaacaatgaggccatgaattctgcatggccacataattttacaggtggtgatcccagtttgacaagcaactcccaaatgttgaataatggtagcacaaattgggatcagattgttggtgctcctggtgtaggcaatttcatgaacagttcaatgtttgcgaatgctcagaatcaatcgatgagaccaatgggaatagctacccaccaagtggatcaatctttttatccaatgcatcctaccagcagcagagggcatggaaaccagtattcccaatttttagggattcatgctgattctcagagtgcagtggcaagggttggtccagatcagtcagaaaagacatccagaccattcaactcttcaatgaatgaacatggtcttcatatgcaaggtcctgccagttcgatgcataattttcgtggaaaagggggtttcttgaataacagtctgatgcaaagtcaaggtgatagtatcagggcaggcagtccggttacagtgaatcaactacaacatggtattcaaacccaagattttcatggtaggtcaaaccaagttgaccttcaagtgggcatgcaagataaatcagcaatgcaggtagggcaagcaagtcgtggggctagccttgaccccaccgaggagaaaattttatttgggggcgatgaggatggcaactggggagctttgttgaggggcgacaatgataatggcaattctttggacaatgataattatggtggtggctactcatctctacagagtggtagctggagtgcccttatgcaggaagctctccagtctacaaccagtgaaaacagtcccaaagaagagtggagtggcttgagtttccataaaactgagcaggtgatggctaacaatgcaactttatcaggccatgatgataataagcttactaggttaagcggtgcaaacctagaaaatgcacgtccttcaccaacatccagctacgctgatggaacaatgaataacccaaatctcgccagttttcagcatgccataaggcctccattcgagcgaagggaccatatgactcatgaatctcctaatgctcctgttaacaatcatcaatcaacttctgaagtcaacaatgggtacattcaacatggcttaaaacaaattcaatctgatggaaggcaagaacaagtgcacctagcaaatggaatttggccacatcaaaagactgaactgctcagaaataattcacagtcaactggtatgcatgctacaccacctggtgcacatggattttggatttcacaacaaaatacagctgatcacaatatgaatagagagtccagtaataaccaaaatgactggaaagctaacaatgtgcttggacaagacatgcacaatagccaaaatgtcttcaatagcaatgagaactcttggaagtcaactggaggtaatgttaattcagtccagagacttcagcagaggaagtctgatgtaagcactactaatgaaagttcagatggtaaaagtattagcatgatgagctcaagcatgtcaatgatggcacaggatcattatcagatggtcactagtcggagtggcgagcaaattggcatgaaccgtaatatggcgcatagagctccagaaatctctgaatcaccaagaaaaagcacagaacaaagaccaggtgatttcaaccaggaatatctaaatgcaactcctaacgaaaggcaaacacacactttaaaccatggacaacacataagtgattctgcccccagaaggcattctatatttgctgggaaggaatccgaaaatttaggtcagtctagtcagcaagcaatgggatcttacatgttgcaaaatcgtgctatggggagctctggaatgaacattggcccatctccaggcaatccagtgtcaaataatctgtttccacctcagatgcgaaataatctgcagcatcattttggcacaaactcccttgtttccaataatatgccttcagtaagtgaggaacaacttcaatctcgacatggtctccctaatagctctagtgcattaccttttggaggagctgatactggtctgtctcagaacagagcagttcaaaacagtcaacatatgcttcagcttcttcataaggtggataactcaagaaatagcgatgtggctgctgacatacccaacaacccccttggcgttgtttctgcccagcaacaacctaaccattctttgcagggatttgggttgagactggcaccaccatcccaacgccaatcaaattcgggtaatttatggtctagtcagactaatgttgatggcaagcaatctgaccactcagcacaagatgatgaccgcacaccacaaccttccacgcctagccagtcattgactcctcagcatcaaaactctcaaccttcaccatttcacagttcagaaacagaaaataccgggcaaccaattgcacgctttccccagttaagtccaggtcaacattatcctgtcacagatgatagatctggtcctgcacccatgctgcagcagcagtctcagcaaagcaacttcgcaacagtattcaagaatgtatggacaaacatatcagcacagcgcctaggtggtatgcaagctaacaagattacacccaacatccttcagtctatgatgtttccaaataattcttcagcttccaacttatggagctctcagaaggcagatgatcaagggcagagggcatcaactccatcagatattgcaacaacttcagctaactcacagaatcaagatccaaaacgagctgctgataatgatgcagggttagcatcttcccagaaggcaaacctagagtcgaaaggaactaccgtaacaggaggaaatgaatccttgcagaagcctttttcagatgggaattccatgaatgctgtttcatcctttgcacaattgcatcagcaaggcatccttggtgctaaacatggggaaaacccaggagccaattttcaggctatgaattcttcccacaatagtgttaataatagtggtggcattgttttacatggaagcccagcaccttcaaacattcagcagcaaaattactctcttctacatcaaatgcatgccttgaggcatacggatattgatccaggcagtttagctggaaagacgacaagacctgatgttggttctgatgcttcacagattgactggaaatctggccagaggtttgctcatgtagacaataaccaaaccaaatcagctgcagataacgttggaagccctggtgtcccagggtcattcacttcagacatgaaaatactgagttttgcttcaaggagtgaggagagaaatgtcaatataccttctcatcttccatctggagagcgcccgtttcctggtatggttactgcacaaaatgataatcagaatcaagttcagcctatgggcacaagtgcaacatcaaattctgttgaaagcagtgagaggccgaggataaaccctcaaatggcaccttcgtggtttggacactacggaaactatagaaatggtcagagtgttgctgtgcttaatgctcagaagcccacggctttgccatataattttccgaaagttccttgtaacaatgaaaataataactctgctgaaaatagagttgaatctggccaatctgttacgcctgggcatcatctcccatcaacaagaatggaagctttggttccttccaatgtaaaagtatctccaatgatgagaaggcctaagaagcgtaaagctatggactctgcacttgtttcttggcataaaataattgaaagcccacaaaacttgaggagcatcagcacatctgagatggactgggcttgggcagctaatcggttaatcgagaaggatgaagcagaaacttcagacgatacttctttacattatttaccgcggaagaggctaattttgacaacccagttgattcagcaacttctcccttctataccagcaaccattctgagagctcaagctgtgtctgcttttgaaagtgcgacatacactctatcaatgctgacactaagggatgcatgcagcatggcatcatcatcattatataactcttgctcccctgtggaggatgaaaataacccatctgaacaaacaagaagtgctaagaaaatggaagacaaagtgtctaaggtcgtggaagtctttgttggaagaatccggaagatggaaaatgactttataagtttgaacaagagggcctcgatgttggatgtgcaactggagtgccaagatctggagagaatttctatcgtaaatcgtttgggaagatttcatggccggaaccatgcagcagcagtcgagagttcatctgcttcagaaatgactccccggagaatttttcctgaaagacatgtcatgtcttttgcagtccctggaaatcttcctgaaggagtacactgtttatcactctagtggaatgatcttcaattactctctagccactcagatgatctcaggttgcgccccgtgattcccagtgctccttatccatgcaaaacatggccaaacagaagagtcatattatcaagaggtaactagagaaccggaagcgtcacaataccacgatgagggcaggccaggggacgtgttccagccgatcaagtctgtgctggctgtggttgttgtcccttatatcaagtataggtccatgtatattgtggaaagtcaaggaaaaaactgtggatctcccatcatttttctctgatgaagagtaattaacttcagatttttttagagaagtcgatgcatactagcttagtacatctagcgagtttcttcgctatttgtcagtctctaagaaatccctgatgatggagtgttggcaggctagagtggagataataatgtgagcctttctctgggttctttggttcctttaggatgggatgcaaattggctagtgtgtccagtctaactgaccacccttgttaggcagcagttaattactagttttatgtagtgctgaaagcattcatggaacaagtggcgggtaaagtgcttggaaattcttgtaacttgtgtacccgtgatgtttaaagcgctaacgggctattgtaaatttaaagtgccaatattcctgaggttatattttgtttcatgcaaattggctagtgtctccagctgtgtcagtgtgttaaggtaactgaagctgagctggttgctcagcccatacaaaatgtaac

SEQ ID NO: 937 - DNA, 6856 bp, Zea Mays
cagctctgtagcgccttctctctctctcttggctcgctcgcgctgtggagctcaagaccctcgccattccgccgcgggaaaccctaaccctagccctcgcaccgctacgggaggcgcgggagagtccgggtcgcgccgcgccgccgatcccgatccagacgccgttgcgcggagccgcgctgatcgagtctctggtggaatagaggacggacactatttcagattgcttggtgctagtttatttttccaactcagggtggacttctgggtctatctttctcatcatagaagcaaacatttgtggaagctgcttatagctatatatgatatgaaagtttgggaaccatcaactgcaaattggccactctttaacgggcattagacccttagggacacttcaggaatgtcacattttcatcccacacagcatgcgggtgacaatgattttcagatgtggcagcagcagatgatgttcaagcagttgcaggagtttcagaggcagcaacaactacagcaatctgatcatggagccaggatgcagccatcttttggccagtttcatgctcctgcaaaacctttacctgctgatcaattgtcgacaatgtcaaatgaaatggccaacaatgaggccatgaattctgcatggccacataattttacaggtggtgatcccagtttgacaagcaactcccaaatgttgaataatggtagcacaaattgggatcagattgttggtgctcctggtgtaggcaatttcatgaacagttcaatgtttgcgaatgctcagaatcaatcgatgagaccaatgggaatagctacccaccaagtggatcaatctttttatccaatgcatcctaccagcagcagagggcatggaaaccagtattcccaatttttagggattcatgctgattctcagagtgcagtggcaagggttggtccagatcagtcagaaaagacatccagaccattcaactcttcaatgaatgaacatggtcttcatatgcaaggtcctgccagttcgatgcataattttcgtggaaaagggggtttcttgaataacagtctgatgcaaagtcaaggtgatagtatcagggcaggcagtccggttacagtgaatcaactacaacatggtattcaaacccaagattttcatggtaggtcaaaccaagttgaccttcaagtgggcatgcaagataaatcagcaatgcaggtagggcaagcaagtcgtggggctagccttgaccccaccgaggagaaaattttatttgggggcgatgaggatggcaactggggagctttgttgaggggcgacaatgataatggcaattctttggacaatgataattatggtggtggctactcatctctacagagtggtagctggagtgcccttatgcaggaagctctccagtctacaaccagtgaaaacagtcccaaagaagagtggagtggcttgagtttccataaaactgagcaggtgatggctaacaatgcaactttatcaggccatgatgataataagcttactaggttaagcggtgcaaacctagaaaatgcacgtccttcaccaacatccagctacgctgatggaacaatgaataacccaaatctcgccagttttcagcatgccataaggcctccattcgagcgaagggaccatatgactcatgaatctcctaatgctcctgttaacaatcatcaatcaacttctgaagtcaacaatgggtacattcaacatggcttaaaacaaattcaatctgatggaaggcaagaacaagtgcacctagcaaatggaatttggccacatcaaaagactgaactgctcagaaataattcacagtcaactggtatgcatgctacaccacctggtgcacatggattttggatttcacaacaaaatacagctgatcacaatatgaatagagagtccagtaataaccaaaatgactggaaagctaacaatgtgcttggacaagacatgcacaatagccaaaatgtcttcaatagcaatgagaactcttggaagtcaactggaggtaatgttaattcagtccagagacttcagcagaggaagtctgatgtaagcactactaatgaaagttcagatggtaaaagtattagcatgatgagctcaagcatgtcaatgatggcacaggatcattatcagatggtcactagtcggagtggcgagcaaattggcatgaaccgtaatatggcgcatagagctccagaaatctctgaatcaccaagaaaaagcacagaacaaagaccaggtgatttcaaccaggaatatctaaatgcaactcctaacgaaaggcaaacacacactttaaaccatggacaacacataagtgattctgcccccagaaggcattctatatttgctgggaaggaatccgaaaatttaggtcagtctagtcagcaagcaatgggatcttacatgttgcaaaatcgtgctatggggagctctggaatgaacattggcccatctccaggcaatccagtgtcaaataatctgtttccacctcagatgcgaaataatctgcagcatcattttggcacaaactcccttgtttccaataatatgccttcagtaagtgaggaacaacttcaatctcgacatggtctccctaatagctctagtgcattaccttttggaggagctgatactggtctgtctcagaacagagcagttcaaaacagtcaacatatgcttcagcttcttcataaggtggataactcaagaaatagcgatgtggctgctgacatacccaacaacccccttggcgttgtttctgcccagcaacaacctaaccattctttgcagggatttgggttgagactggcaccaccatcccaacgccaatcaaattcgggtaatttatggtctagtcagactaatgttgatggcaagcaatctgaccactcagcacaagatgatgaccgcacaccacaaccttccacgcctagccagtcattgactcctcagcatcaaaactctcaaccttcaccatttcacagttcagaaacagaaaataccgggcaaccaattgcacgctttccccagttaagtccaggtcaacattatcctgtcacagatgatagatctggtcctgcacccatgctgcagcagcagtctcagcaaagcaacttcgcaacagtattcaagaatgtatggacaaacatatcagcacagcgcctaggtggtatgcaagctaacaagattacacccaacatccttcagtctatgatgtttccaaataattcttcagcttccaacttatggagctctcagaaggcagatgatcaagggcagagggcatcaactccatcagatattgcaacaacttcagctaactcacagaatcaagatccaaaacgagctgctgataatgatgcagggttagcatcttcccagaaggcaaacctagagtcgaaaggaactaccgtaacaggaggaaatgaatccttgcagaagcctttttcagatgggaattccatgaatgctgtttcatcctttgcacaattgcatcagcaaggcatccttggtgctaaacatggggaaaacccaggagccaattttcaggctatgaattcttcccacaatagtgttaataatagtggtggcattgttttacatggaagcccagcaccttcaaacattcagcagcaaaattactctcttctacatcaaatgcatgccttgaggcatacggatattgatccaggcagtttagctggaaagacgacaagacctgatgttggttctgatgcttcacagattgactggaaatctggccagaggtttgctcatgtagacaataaccaaaccaaatcagctgcagataacgttggaagccctggtgtcccagggtcattcacttcagacatgaaaatactgagttttgcttcaaggagtgaggagagaaatgtcaatataccttctcatcttccatctggagagcgcccgtttcctggtatggttactgcacaaaatgataatcagaatcaagttcagcctatgggcacaagtgcaacatcaaattctgttgaaagcagtgagaggccgaggataaaccctcaaatggcaccttcgtggtttggacactacggaaactatagaaatggtcagagtgttgctgtgcttaatgctcagaagcccacggctttgccatataattttccgaaagttccttgtaacaatgaaaataataactctgctgaaaatagagttgaatctggccaatctgttacgcctgggcatcatctcccatcaacaagaatggaagctttggttccttccaatgtaaaagtatctccaatgatgagaaggcctaagaagcgtaaagctatggactctgcacttgtttcttggcataaaataattgaaagcccacaaaacttgaggagcatcagcacatctgagatggactgggcttgggcagctaatcggttaatcgagaaggatgaagcagaaacttcagacgatacttctttacattatttaccgcggaagaggctaattttgacaacccagttgattcagcaacttctcccttctataccagcaaccattctgagagctcaagctgtgtctgcttttgaaagtgcgacatacactctatcaatgctgacactaagggatgcatgcagcatggcatcatcatcattatataactcttgctcccctgtggaggatgaaaataacccatctgaacaaacaagaagtgctaagaaaatggaagacaaagtgtctaaggtcgtggaagtctttgttggaagaatccggaagatggaaaatgactttataaggtatgcaatggctaatgactgtaatggttttcattggtgtatggttctttatcctcctcaacattagatgcaattatgtttaagaatgccattataatacgtccctttgaccgcttggaatttctggcagcaccagcatatcttggactgagaccttgaaagttaaagcaccatttatttttgttacacataagagagactgaattggataatagtacatgagagatgcaagagggaaacccccgactaggagattacaccagtacccttgactattatacctgaacaattttataatggaatttggaagaaataagtacagttattattcaggctgctgttgtgctatcacttttggtgtttggcaccaaaccattacgaagtagatgcgcttctcgtctccctgtccatgtatagcattttaagtccaagtagaaaattctggaaaataataaatcaaaagtaaaagggaaatgagacaaatgatactactaaccacaattttttccttgaacttttttggctttgaactgaaatttccaaggatgctgcagcaactcatactttaaaagactattttcctccagaatgttcttgttagtttagcacccaatgctgaagcttaatgaaattgtttgcacctcaagagtttgcacttcatatatttgctagtgtactctggggatgactgaatgaataattttgaaattgtagctatgctttcttctttctaattttctccccacatttccacctgtagttggaagtgaattttaaagtgttggtacaagtgcaagccgcagtgttgactaatattttcatctatagctacgtttgtcatgatatttgttttcgcatgagccatcgaaaccatttccttcctgtatttggataactaataactatcccgccctgtatcctaggaggattcctaaattagttttgtgctgatacatctatattaagctcaaatgaaacacgattttttatcaacacaatttgcctccttttcggttgaaacacaatttgcctcttgttacagtttgaacaagagggcctcgatgttggatgtgcaactggagtgccaagatctggagagaatttctatcgtaaatcgtttgggaagatttcatggccggaaccatgcagcagcagtcgagagttcatctgcttcagaaatgactccccggagaatttttcctgaaagacatgtcatgtcttttgcagtccctggaaatcttcctgaaggagtacactgtttatcactctagtggaatgatcttcaattactctctagccactcagatgatctcaggttgcgccccgtgattcccagtgctccttatccatgcaaaacatggccaaacagaagagtcatattatcaagaggtaactagagaaccggaagcgtcacaataccacgatgagggcaggccaggggacgtgttccagccgatcaagtctgtgctggctgtggttgttgtcccttatatcaagtataggtccatgtatattgtggaaagtcaaggaaaaaactgtggatctcccatcatttttctctgatgaagagtaattaacttcagatttttttagagaagtcgatgcatactagcttagtacatctagcgagtttcttcgctatttgtcagtctctaagaaatccctgatgatggagtgttggcaggctagagtggagataataatgtgagcctttctctgggttctttggttcctttaggatgggatgcaaattggctagtgtgtccagtctaactgaccacccttgttaggcagcagttaattactagttttatgtagtgctgaaagcattcatggaacaagtggcgggtaaagtgcttggaaattcttgtaacttgtgtacccgtgatgtttaaagcgctaacgggctattgtaaatttaaagtgccaatattcctgaggttatattttgtttcatgcaaattggctagtgtctccagctgtgtcagtgtgttaaggtaactgaagctgagctggttgctcagcccatacaaaatgtaac

SEQ ID NO: 938 - DNA, 6862 bp, Zea Mays
gccttctctctctctcttggctcgctcgcgctgtggagctcaagaccctcgccattccgccgcgggaaaccctaaccctagccctcgcaccgctacgggaggcgcgggagagtccgggtcgcgccgcgccgccgatcccgatccagacgccgttgcgcggagccgcgctgatcgagtctctggtggaatagaggacggacactatttcagattgcttggtgctagtttatttttccaactcagggtggacttctgggtctatctttctcatcatagaagcaaacatttgtggaagctgcttatagctatatatgatatgaaagtttgggaaccatcaactgcaaattggccactctttaacgggcattagacccttagggacacttcaggaatgtcacattttcatcccacacagcatgcgggtgacaatgattttcagatgtggcagcagcagatgatgttcaagcagttgcaggagtttcagaggcagcaacaactacagcaatctgatcatggagccaggatgcagccatcttttggccagtttcatgctcctgcaaaacctttacctgctgatcaattgtcgacaatgtcaaatgaaatggccaacaatgaggccatgaattctgcatggccacataattttacaggtggtgatcccagtttgacaagcaactcccaaatgttgaataatggtagcacaaattgggatcagattgttggtgctcctggtgtaggcaatttcatgaacagttcaatgtttgcgaatgctcagaatcaatcgatgagaccaatgggaatagctacccaccaagtggatcaatctttttatccaatgcatcctaccagcagcagagggcatggaaaccagtattcccaatttttagggattcatgctgattctcagagtgcagtggcaagggttggtccagatcagtcagaaaagacatccagaccattcaactcttcaatgaatgaacatggtcttcatatgcaaggtcctgccagttcgatgcataattttcgtggaaaagggggtttcttgaataacagtctgatgcaaagtcaaggtgatagtatcagggcaggcagtccggttacagtgaatcaactacaacatggtattcaaacccaagattttcatggtaggtcaaaccaagttgaccttcaagtgggcatgcaagataaatcagcaatgcaggtagggcaagcaagtcgtggggctagccttgaccccaccgaggagaaaattttatttgggggcgatgaggatggcaactggggagctttgttgaggggcgacaatgataatggcaattctttggacaatgataattatggtggtggctactcatctctacagagtggtagctggagtgcccttatgcaggaagctctccagtctacaaccagtgaaaacagtcccaaagaagagtggagtggcttgagtttccataaaactgagcaggtgatggctaacaatgcaactttatcaggccatgatgataataagcttactaggttaagcggtgcaaacctagaaaatgcacgtccttcaccaacatccagctacgctgatggaacaatgaataacccaaatctcgccagttttcagcatgccataaggcctccattcgagcgaagggaccatatgactcatgaatctcctaatgctcctgttaacaatcatcaatcaacttctgaagtcaacaatgggtacattcaacatggcttaaaacaaattcaatctgatggaaggcaagaacaagtgcacctagcaaatggaatttggccacatcaaaagactgaactgctcagaaataattcacagtcaactggtatgcatgctacaccacctggtgcacatggattttggatttcacaacaaaatacagctgatcacaatatgaatagagagtccagtaataaccaaaatgactggaaagctaacaatgtgcttggacaagacatgcacaatagccaaaatgtcttcaatagcaatgagaactcttggaagtcaactggaggtaatgttaattcagtccagagacttcagcagaggaagtctgatgtaagcactactaatgaaagttcagatggtaaaagtattagcatgatgagctcaagcatgtcaatgatggcacaggatcattatcagatggtcactagtcggagtggcgagcaaattggcatgaaccgtaatatggcgcatagagctccagaaatctctgaatcaccaagaaaaagcacagaacaaagaccaggtgatttcaaccaggaatatctaaatgcaactcctaacgaaaggcaaacacacactttaaaccatggacaacacataagtgattctgcccccagaaggcattctatatttgctgggaaggaatccgaaaatttaggtcagtctagtcagcaagcaatgggatcttacatgttgcaaaatcgtgctatggggagctctggaatgaacattggcccatctccaggcaatccagtgtcaaataatctgtttccacctcagatgcgaaataatctgcagcatcattttggcacaaactcccttgtttccaataatatgccttcagtaagtgagaaaatgatgatggcacaggaacaacttcaatctcgacatggtctccctaatagctctagtgcattaccttttggaggagctgatactggtctgtctcagaacagagcagttcaaaacagtcaacatatgcttcagcttcttcataaggtggataactcaagaaatagcgatgtggctgctgacatacccaacaacccccttggcgttgtttctgcccagcaacaacctaaccattctttgcagggatttgggttgagactggcaccaccatcccaacgccaatcaaattcgggtaatttatggtctagtcagactaatgttgatggcaagcaatctgaccactcagcacaagatgatgaccgcacaccacaaccttccacgcctagccagtcattgactcctcagcatcaaaactctcaaccttcaccatttcacagttcagaaacagaaaataccgggcaaccaattgcacgctttccccagttaagtccaggtcaacattatcctgtcacagatgatagatctggtcctgcacccatgctgcagcagcagtctcagcaaagcaacttcgcaacagtattcaagaatgtatggacaaacatatcagcacagcgcctaggtggtatgcaagctaacaagattacacccaacatccttcagtctatgatgtttccaaataattcttcagcttccaacttatggagctctcagaaggcagatgatcaagggcagagggcatcaactccatcagatattgcaacaacttcagctaactcacagaatcaagatccaaaacgagctgctgataatgatgcagggttagcatcttcccagaaggcaaacctagagtcgaaaggaactaccgtaacaggaggaaatgaatccttgcagaagcctttttcagatgggaattccatgaatgctgtttcatcctttgcacaattgcatcagcaaggcatccttggtgctaaacatggggaaaacccaggagccaattttcaggctatgaattcttcccacaatagtgttaataatagtggtggcattgttttacatggaagcccagcaccttcaaacattcagcagcaaaattactctcttctacatcaaatgcatgccttgaggcatacggatattgatccaggcagtttagctggaaagacgacaagacctgatgttggttctgatgcttcacagattgactggaaatctggccagaggtttgctcatgtagacaataaccaaaccaaatcagctgcagataacgttggaagccctggtgtcccagggtcattcacttcagacatgaaaatactgagttttgcttcaaggagtgaggagagaaatgtcaatataccttctcatcttccatctggagagcgcccgtttcctggtatggttactgcacaaaatgataatcagaatcaagttcagcctatgggcacaagtgcaacatcaaattctgttgaaagcagtgagaggccgaggataaaccctcaaatggcaccttcgtggtttggacactacggaaactatagaaatggtcagagtgttgctgtgcttaatgctcagaagcccacggctttgccatataattttccgaaagttccttgtaacaatgaaaataataactctgctgaaaatagagttgaatctggccaatctgttacgcctgggcatcatctcccatcaacaagaatggaagctttggttccttccaatgtaaaagtatctccaatgatgagaaggcctaagaagcgtaaagctatggactctgcacttgtttcttggcataaaataattgaaagcccacaaaacttgaggagcatcagcacatctgagatggactgggcttgggcagctaatcggttaatcgagaaggatgaagcagaaacttcagacgatacttctttacattatttaccgcggaagaggctaattttgacaacccagttgattcagcaacttctcccttctataccagcaaccattctgagagctcaagctgtgtctgcttttgaaagtgcgacatacactctatcaatgctgacactaagggatgcatgcagcatggcatcatcatcattatataactcttgctcccctgtggaggatgaaaataacccatctgaacaaacaagaagtgctaagaaaatggaagacaaagtgtctaaggtcgtggaagtctttgttggaagaatccggaagatggaaaatgactttataaggtatgcaatggctaatgactgtaatggttttcattggtgtatggttctttatcctcctcaacattagatgcaattatgtttaagaatgccattataatacgtccctttgaccgcttggaatttctggcagcaccagcatatcttggactgagaccttgaaagttaaagcaccatttatttttgttacacataagagagactgaattggataatagtacatgagagatgcaagagggaaacccccgactaggagattacaccagtacccttgactattatacctgaacaattttataatggaatttggaagaaataagtacagttattattcaggctgctgttgtgctatcacttttggtgtttggcaccaaaccattacgaagtagatgcgcttctcgtctccctgtccatgtatagcattttaagtccaagtagaaaattctggaaaataataaatcaaaagtaaaagggaaatgagacaaatgatactactaaccacaattttttccttgaacttttttggctttgaactgaaatttccaaggatgctgcagcaactcatactttaaaagactattttcctccagaatgttcttgttagtttagcacccaatgctgaagcttaatgaaattgtttgcacctcaagagtttgcacttcatatatttgctagtgtactctggggatgactgaatgaataattttgaaattgtagctatgctttcttctttctaattttctccccacatttccacctgtagttggaagtgaattttaaagtgttggtacaagtgcaagccgcagtgttgactaatattttcatctatagctacgtttgtcatgatatttgttttcgcatgagccatcgaaaccatttccttcctgtatttggataactaataactatcccgccctgtatcctaggaggattcctaaattagttttgtgctgatacatctatattaagctcaaatgaaacacgattttttatcaacacaatttgcctccttttcggttgaaacacaatttgcctcttgttacagtttgaacaagagggcctcgatgttggatgtgcaactggagtgccaagatctggagagaatttctatcgtaaatcgtttgggaagatttcatggccggaaccatgcagcagcagtcgagagttcatctgcttcagaaatgactccccggagaatttttcctgaaagacatgtcatgtcttttgcagtccctggaaatcttcctgaaggagtacactgtttatcactctagtggaatgatcttcaattactctctagccactcagatgatctcaggttgcgccccgtgattcccagtgctccttatccatgcaaaacatggccaaacagaagagtcatattatcaagaggtaactagagaaccggaagcgtcacaataccacgatgagggcaggccaggggacgtgttccagccgatcaagtctgtgctggctgtggttgttgtcccttatatcaagtataggtccatgtatattgtggaaagtcaaggaaaaaactgtggatctcccatcatttttctctgatgaagagtaattaacttcagatttttttagagaagtcgatgcatactagcttagtacatctagcgagtttcttcgctatttgtcagtctctaagaaatccctgatgatggagtgttggcaggctagagtggagataataatgtgagcctttctctgggttctttggttcctttaggatgggatgcaaattggctagtgtgtccagtctaactgaccacccttgttaggcagcagttaattactagttttatgtagtgctgaaagcattcatggaacaagtggcgggtaaagtgcttggaaattcttgtaacttgtgtacccgtgatgtttaaagcgctaacgggctattgtaaatttaaagtgccaatattcctgaggttatattttgtttcatgcaaattggctagtgtctccagctgtgtcagtgtgttaaggtaactgaagctgagctggttgctcagcccatacaaaatgtaac

SEQ ID NO: 939 - DNA, 3150 bp, Zea Mays
gtctgcgcacacccaaaccaccccgccacacaaagagcaaaaccctctttctctgcccctcagtcaccgccgcgaacttgcgtcttgcgatcgagggaggaacccaccaaatggctcgcgtggagaggcagccgcggaaccctagtaggctcgcccccacctcccacccggcgccggcgcttccgacgacgccggctgctcgccgccccggcacgccacggaacgctgcccagggcacagtttgtgcaacatgtgtttgcggttcaggaaataatgcccgctgtcactgcaagcaagacgcaagacataaccaaacacaccacggtaatgatggaacagccacagccgggggaattgcaaaaccagactctcaagataagctcaagatggctagattttctggtggtacatattcaaaacctgatgcaagagtgaagctgattcctgcagaagatattacctatttacagcgtcggaaaccatgtggtagaactgttgggtcagttgggtcacagaaaagacattgcagaagaagtgtcacaccacctccaagttcacgaagagtgtctctcctaggatctagatcgcttgctgaaaatcctatcccatcagtgtcatcccatgactcgtgtttaccccataagaggcttgagacagctgaaaatagggacccatgtgctggggggcacataagtagctctgtgactccctgcacttctttgaaaaaccttgcatcaccgagttgcaaatcctcacaacctttgagtactaatttgaatactgatgctactccaagaaatttagacagaatggtaggcatacaaacacaagcactcgccaggagctccagttcgagtattttgcattctcaaggccagaacagtgaaaaagtgtctgctagtttgccaaaagaggcagtgacaaatcctgcgtctcctagtcccaagcaaattggtgctcaacatccaagtgacaatcctcttgttacgaaggcaggaccttctaagagtgtgtgcacacatgagagtgaaaagttgtgcagcagagacatcaatttaactgcaacaagtactacagttcctgtcttgcaagctcctgttgtggagcctgcattgctaagctcaacatctgtgttcactgaaaggccctttgaggtttatcctgacacaagaactgctgctcctggcatgcaggaacttagtgtgaagcatgtgttgctgaccccaatacctgtgcgtcatgaaccttctacggagtgcctaaaggttcctccaaaacacagcctgcattccattgcatctgcgcaacatggtgcattgtcgcaagaaagaaactcaggggcatcaattagccatggcagatcttcagcttcagcaggtgcactatcaatcttacatatgaagctggccaagaagcattatcaatcacaagcctgctggaagggcaactttcatgttactggaggactgatacatacttgtgatggacttgaagcccatttccctttagaaatttctgtaagagtttatgaagcttcaaaccaaatgcctgaaattttaaatctagaggctgtacctatttcccagctgtggccaaaaaaattcaagatggtacctcccgacattgaggatattggactatggtttctgagcagtcgccaaaggccacactggagttttgatcaccttcttgaaaaagtttgttcacatactggtctgttcacaaaaattggtgatattgagttggcagtgttttcatcgaagttgcttacaccacaagatcagaggaaagatggcaaattatatttctggggtgtttttgggaagcatatgaggaagaagtcatgccaaccaaacagtcatataaaaaatgtggagataagcaatcccagtcaaccaaatggcaaatctgaggaagtaggcatgaaattggatatgagaaaaggcaaagaaaaagagagtgctaaatctgacgaggtattggattcaacaggaggcaatgataccgatagggtcaatggctgcgtggcagtgcttgaggctcctgattcagaccctgcatccagttgctcggttccggctgcctcttctcttggcggatattgccatcatgactctgcaaaaaatagctcttctatcttagattcttcatgccagcctgctgacggatcttctgttagcccagacctcatgctggacataccccctggaatttctgcgcatatacctcctggcttcacaaaagcccactgtcagcttcagatgggaactgctgctctgtcttttgctgataggcatcgcagtctgatttcggacattcctccaggctttactgaagttcatcgtggactccctcctgcaattccacctgctggaccagcttgtgtgtcgacccctgggactgaaaagaagcccttcgttaggttctcgcttaatgtcccaaggcctgttggaatgggagctccacctggatttactccactgcatgcagtgaagaaagagcctgggctgcctgatgtccatgagaccgcagataagcacacactacattctttggcagctgcggcagctgcagtggttaagcctgggaaaggaggtgaaatgaaaatcgcagacaatgaggtaaagactgaacaagatgaaaactcagaggaacgagattttccaaagatcaggaggctttcagacctgtactgtaggccttcggaggacagcactgaattttcccagcgtatgcctgcacgcttgcccgacaagtttcaggagcagagacccgagaaacgtcttgtgcatccacgggaggaggtcgggcggcgatgatgcctgcaaaggggccgatggcagcatcgccaggtggtcgtctggatagcgagtgcgttgtatgtggtgaagagttccccgcagagtgatttctaggattacctcgacaaagggtactagactgctttgtgttagtgattatcctgttcagcggcaatgatgtacatgcctggacaattagcatgctgagcttgtgcgtacaggccagcacttatcgtgaagtccgtgctacatcatcgaaacggttaacgatattgggtagttttggtgaaacccatgcatcaaatgtgatggtcgagcagcattactgtttttatagtgggaccaacct

SEQ ID NO: 940 - DNA, 3153 bp, Zea Mays
gtctgcgcacacccaaaccaccccgccacacaaagagcaaaaccctctttctctgcccctcagtcaccgccgcgaacttgcgtcttgcgatcgagggaggaacccaccaaatggctcgcgtggagaggcagccgcggaaccctagtaggctcgcccccacctcccacccggcgccggcgcttccgacgacgccggctgctcgccgccccggcacgccacggaacgctgcccagggcacagtttgtgcaacatgtgtttgcggttcaggaaataatgcccgctgtcactgcaagcaagacgcaagatccagacataaccaaacacaccacggtaatgatggaacagccacagccgggggaattgcaaaaccagactctcaagataagctcaagatggctagattttctggtggtacatattcaaaacctgatgcaagagtgaagctgattcctgcagaagatattacctatttacagcgtcggaaaccatgtggtagaactgttgggtcagttgggtcacagaaaagacattgcagaagaagtgtcacaccacctccaagttcacgaagagtgtctctcctaggatctagatcgcttgctgaaaatcctatcccatcagtgtcatcccatgactcgtgtttaccccataagaggcttgagacagctgaaaatagggacccatgtgctggggggcacataagtagctctgtgactccctgcacttctttgaaaaaccttgcatcaccgagttgcaaatcctcacaacctttgagtactaatttgaatactgatgctactccaagaaatttagacagaatggtaggcatacaaacacaagcactcgccaggagctccagttcgagtattttgcattctcaaggccagaacagtgaaaaagtgtctgctagtttgccaaaagaggcagtgacaaatcctgcgtctcctagtcccaagcaaattggtgctcaacatccaagtgacaatcctcttgttacgaaggcaggaccttctaagagtgtgtgcacacatgagagtgaaaagttgtgcagcagagacatcaatttaactgcaacaagtactacagttcctgtcttgcaagctcctgttgtggagcctgcattgctaagctcaacatctgtgttcactgaaaggccctttgaggtttatcctgacacaagaactgctgctcctggcatgcaggaacttagtgtgaagcatgtgttgctgaccccaatacctgtgcgtcatgaaccttctacggagtgcctaaaggttcctccaaaacacagcctgcattccattgcatctgcgcaacatggtgcattgtcgcaagaaagaaactcaggggcatcaattagccatggcagatcttcagcttcaggtgcactatcaatcttacatatgaagctggccaagaagcattatcaatcacaagcctgctggaagggcaactttcatgttactggaggactgatacatacttgtgatggacttgaagcccatttccctttagaaatttctgtaagagtttatgaagcttcaaaccaaatgcctgaaattttaaatctagaggctgtacctatttcccagctgtggccaaaaaaattcaagatggtacctcccgacattgaggatattggactatggtttctgagcagtcgccaaaggccacactggagttttgatcaccttcttgaaaaagtttgttcacatactggtctgttcacaaaaattggtgatattgagttggcagtgttttcatcgaagttgcttacaccacaagatcagaggaaagatggcaaattatatttctggggtgtttttgggaagcatatgaggaagaagtcatgccaaccaaacagtcatataaaaaatgtggagataagcaatcccagtcaaccaaatggcaaatctgaggaagtaggcatgaaattggatatgagaaaaggcaaagaaaaagagagtgctaaatctgacgaggtattggattcaacaggaggcaatgataccgatagggtcaatggctgcgtggcagtgcttgaggctcctgattcagaccctgcatccagttgctcggttccggctgcctcttctcttggcggatattgccatcatgactctgcaaaaaatagctcttctatcttagattcttcatgccagcctgctgacggatcttctgttagcccagacctcatgctggacataccccctggaatttctgcgcatatacctcctggcttcacaaaagcccactgtcagcttcagatgggaactgctgctctgtcttttgctgataggcatcgcagtctgatttcggacattcctccaggctttactgaagttcatcgtggactccctcctgcaattccacctgctggaccagcttgtgtgtcgacccctgggactgaaaagaagcccttcgttaggttctcgcttaatgtcccaaggcctgttggaatgggagctccacctggatttactccactgcatgcagtgaagaaagagcctgggctgcctgatgtccatgagaccgcagataagcacacactacattctttggcagctgcggcagctgcagtggttaagcctgggaaaggaggtgaaatgaaaatcgcagacaatgaggtaaagactgaacaagatgaaaactcagaggaacgagattttccaaagatcaggaggctttcagacctgtactgtaggccttcggaggacagcactgaattttcccagcgtatgcctgcacgcttgcccgacaagtttcaggagcagagacccgagaaacgtcttgtgcatccacgggaggaggtcgggcggcgatgatgcctgcaaaggggccgatggcagcatcgccaggtggtcgtctggatagcgagtgcgttgtatgtggtgaagagttccccgcagagtgatttctaggattacctcgacaaagggtactagactgctttgtgttagtgattatcctgttcagcggcaatgatgtacatgcctggacaattagcatgctgagcttgtgcgtacaggccagcacttatcgtgaagtccgtgctacatcatcgaaacggttaacgatattgggtagttttggtgaaacccatgcatcaaatgtgatggtcgagcagcattactgtttttatagtgggaccaacct

SEQ ID NO: 941 - DNA, 715 bp, Zea Mays
atgtttgcaggatttgcaacccatttctctcctcgactcccacaacacggtccgtacgggaaagagagagaaggtgggagtggaatcgacaggggaaaaccaagcctgtgtttcagagacaactcaggcgacgcgatggcgatggcggcgctgcgacgcgaggggaggcgcctcctcctcgcccccaccgtccccaacccgtcttcggcggccgcttccgctgcggtgacgcgatcctccgccatgtcgcaaccggagatggctccaattggtgcacgttctatttcaactcaagttgtgaggaaccggatgaagagtatcaaaaacatccagaagatcacaaaggctatgaagatggttgcagcatcaaagcttcgggctgttcagacgaggactgaaaattcacgcggcttgtggcagccgttcaccgcccttcttggggacactcctagtgttgacgtcaagaagaatgtgattgtggccattacctctgataagggactctgtggtggtatcaattcaacctcggtgaaagttagcagggcccttcacaaactgacatctggtccagaaaaagaaagcaagtatgttatattaggagaaaaaggcaaagttcagctgttgcgtgactcgaagaacagcattgaaatgaccgcaagtgaactacagaagaaccctatcaactatacacaggcccaaatgaaattgtctgccg

SEQ ID NO: 942 - DNA, 3482 bp, Zea Mays
cttgtgttagctgaaaagaggaaaaagagagagagaaaacaccacacgcggatacgagggcaaaggggcaacgcgtccaaccggccggacctcaccggctcatccctcatcgccctagtccccaagggccaagtccccaaccccggctgacgactgtgcccgtctccttccctgattcatccgcaagcccacccgtcggcgatcgtccatgacggaggatcgagcgcacaaggtcgccgacgagcccgccgcctcaggcaggcaaagacctgaaaggaagaagaggaagtgggatcaacccgcggaggacttggtctccgcggcggtgacggctgctgccgtgtcggggatgcctgtgatgaatttcggtgctcttcctggcgttgtactgcctggcgtcaccgcatatggagctgctacattgccaagtgtagtccctgttccgtattcattgccgccccatattgcaccatcggtgctccagaatgctgctgcagcagcccagaaattgagtcaggcaaaaataccagatgaggtcattgcacgggaaattgttataaacgatgcagatccatctgtgcgatataagcttacaaaacgacaaacacaagaagagattcagaaatgcacaaacactgtcatcattaccaggggaaaatatcaccctccaaatttacttcctgatggtgagaagcccctctatctacatatctctgctggatctcagttgaaagatactgctgagcgcattaaggcagttgatcgtgcagcttcaatgattgaggaaatattgaaacaaggaacaacctcagagtccatatcggtccctttctcctctagcactggacaagctgttcgtccttttagtgcctcagtttttttgggttttgatgcagatccatcattgaatatcacagctcgaatccgtggtccaaatgtatgactatgtgatcctggttttatttgatcattttgttactagcacatctcagttaattttgttaattactcaatttatgtgctgttgtctttcaattttttgaaagatctaatcataaagctttctctggcatcccaatttggatgggagaaactgcttttctgctgttggtgcttgtgctcttttgttattatataggatcagtacataaatcatatcatgaaagaaacaggggttactgttgtactaagaggaaaagattcggagaatcttggcagttgtcatagtgaagcctcacaacaacctctacacctatacctcacaagtatgcatttaaagaacctagaagctgcaaaagttttggcagagaacctcctggatacagtagcagcagaattcggtgcttccagaatttcttcttcaaaagtatatggtgctgttccacctcctcagcagttgttagctggtgtcgacacctcaggaacgaaatcagatgttcactatattgtagggcccaatgtgttatcgggagctacacattcctttgcatctactggagttattgctcctgttgttgctcctgcagtgacagtgcaatcaggggctccaacatattctggggttccactacccagtaacatggcctatcctattccaccagcaaacggtggggcattttacagtggttatggggacatttatccccaagcaactccgttgcagcagctggcattcacactcaagcatgcctcatcgtcggcaactcaggctgttccagtgacgtccacaccaacaagcatggctacaaaggggaactcaatcttggatgcggagatggataaacgatcccgaaggaaattccaggaactaccggtttcgaagggcccagcaacagaaagtcaggtattttctctgaccttgtctgaagctcacaggtggcaatagatatacatgtgggtttttcacaggcttgtaacaaatcggagtttgcattggctgtggagtgtaactgacaagatgcagagctcttcaaatatcttgttacttttttcagcaaatagaaatttaacctttgtgttttatctgtttctgtttgcttacagagttcactgatgttgattaacattgctagcatgccttaagttttgaaattggttggttggtatagtcttgttattagttgttgttagtaggttttgatacattttatttctttccactctttagagaaagttttgcatttgcaaaatcttcacattcagtggaagctccaagcaatataaatatacaaattacacaaggtccttccatatgaaacttcacttagttaagcagactcgactcatctttgttatgttattatagactctcccaatatgaaaattatatttacagcgcatctgcttctatattaagataacattctgaacttgtcaagggtcatgctaactagtattgtgcttccatgtgagatatgcttatatttgttctgtgtgcaaaattgtttctgatttcattcttatgcatgccattgcgttacctactctataacacaagaatttgatggatgaatcttcttgttttctttcatctttccagaactcacaacaggggtccaaatttgttaagacaggtttagatagttcaggtaacattgggagctcatcaattgcacctccgaagaaagttcaccctggatcaaatggaatgcttccgcaagaagaagcggatatgccatcacatctctctatatccactaagatgctaccaccacccctgaagagcatgctgccactgccacccagaagcatgcccccaccaccacctaagagcatgcctccaccgccaccaaaatttccttcagatgagtttttgtcaagaaacgagaacaagttttttcctttaaaggagccaacagcacctccaaggtcctttgatgcaatatcagtcttgccatctgaacgacgaccaagggagcctaaggaggaaaaaacaaaaggcacacctgtgtctgatactttgctgaaacttattgattatggagatgacgacgatgacggcgatattgatgtgacagacaacacacctaagggcaatccaactcctggttcagagcagaaaccattttgggctgtttaaaactgggtctgctaacgtagtctagtgtgaattcttgttgataaggatgcttgctgccttggtgcatcttctgaattgaagaggcaatcgagctccttgttcgtgtactgtagtaattctaacaggcaatgagatttctttgaacttgtattcattctggcctagtcaaaatgaaccgtttgttgttttggttcagatacgatgatgtttcgtttttagattcgacgttggttgctgaactcgtagcattttaatgtcggtattatataattgttagagcctatgtcaattttgtatccactgtcgtgcaaatttaatttttgtaatcagcctaaggtcacgacattgcttggaaacactttttttaatgaaggaaaatggcaggacatatggtatggtaatt

SEQ ID NO: 943 - DNA, 3961 bp, Zea Mays
gaaaagaggaaaaagagagagagaaaacaccacacgcggatacgagggcaaaggggcaacgcgtccaaccggccggacctcaccggctcatccctcatcgccctagtccccaagggccaagtccccaaccccggctgacgactgtgcccgtctccttccctgattcatccgcaagcccacccgtcggcgatcgtccatgacggaggatcgagcgcacaaggtcgccgacgagcccgccgcctcaggcaggcaaagacctgaaaggaagaagaggaagtgggatcaacccgcggaggacttggtctccgcggcggtgacggctgctgccgtgtcggggatgcctgtgatgaatttcggtgctcttcctggcgttgtactgcctggcgtcaccgcatatggagctgctacattgccaagtgtagtccctgttccgtattcattgccgccccatattgcaccatcggtgctccagaatgctgctgcagcagcccagaaattgagtcaggcaaaaataccagatgaggtcattgcacgggaaattgttataaacgatgcagatccatctgtgcgatataagcttacaaaacgacaaacacaagaagagattcagaaatgcacaaacactgtcatcattaccaggggaaaatatcaccctccaaatttacttcctgatggtgagaagcccctctatctacatatctctgctggatctcagttgaaagatactgctgagcgcattaaggcagttgatcgtgcagcttcaatgattgaggaaatattgaaacaaggaacaacctcagagtccatatcggtccctttctcctctagcactggacaagctgttcgtccttttagtgcctcagtttttttgggttttgatgcagatccatcattgaatatcacagctcgaatccgtggtccaaatgatcagtacataaatcatatcatgaaagaaacaggggttactgttgtactaagaggaaaagattcggagaatcttggcagttgtcatagtgaagcctcacaacaacctctacacctatacctcacaagtatgcatttaaagaacctagaagctgcaaaagttttggcagagaacctcctggatacagtagcagcagaattcggtgcttccagaatttcttcttcaaaagtatatggtgctgttccacctcctcagcagttgttagctggtgtcgacacctcaggaacgaaatcagatgttcactatattgtagggcccaatgtgttatcgggagctacacattcctttgcatctactggagttattgctcctgttgttgctcctgcagtgacagtgcaatcaggggctccaacatattctggggttccactacccagtaacatggcctatcctattccaccagcaaacggtggggcattttacagtggttatggggacatttatccccaagcaactccgttgcagcagctggcattcacactcaagcatgcctcatcgtcggcaactcaggctgttccagtgacgtccacaccaacaagcatggctacaaaggggaactcaatcttggatgcggagatggataaacgatcccgaaggaaattccaggaactaccggtttcgaagggcccagcaacagaaagtcaggcgattaatctaaattccatggcaaccccttccttccctgtgctgttcactagatgcctatcctgatttgatgagatcttccatatactcacatccttgtttgttctctcctttcttagcttagcttgtgccatctttttataccccatcaattcttaccaacacaacttccaaggcgatttcaatatcaggatttggaatttctggcatatttgcttttgtttgtaaattagatgtacactgttgctgtcaactatactaaaaactttgtatgccattgtgagtttgtgacatctattaacattaaaatattctgcataaaaacatttgcccttttgtttatgatggcaccatcaaacatgggaagcacttctaattatccaggagttttgatacaacacagcacatattccacatgcaattcatgatcttatgttttatacgtgtacctgaaagaatataatcatcttattgtttagtccttgtttagcactttggaaattaataactactgtataaatctactttctttgaaggaactttgcttgctcttgtagttcttgcagttccctcaacggagactacaattcaaatttgacattactattaaaaacaatagttggattgtcagattggcatcatcatgtttgttgtattcttatacctgcttctaacatctcatttcattccaggtattttctctgaccttgtctgaagctcacaggtggcaatagatatacatgtgggtttttcacaggcttgtaacaaatcggagtttgcattggctgtggagtgtaactgacaagatgcagagctcttcaaatatcttgttacttttttcagcaaatagaaatttaacctttgtgttttatctgtttctgtttgcttacagagttcactgatgttgattaacattgctagcatgccttaagttttgaaattggttggttggtatagtcttgttattagttgttgttagtaggttttgatacattttatttctttccactctttagagaaagttttgcatttgcaaaatcttcacattcagtggaagctccaagcaatataaatatacaaattacacaaggtccttccatatgaaacttcacttagttaagcagactcgactcatctttgttatgttattatagactctcccaatatgaaaattatatttacagcgcatctgcttctatattaagataacattctgaacttgtcaagggtcatgctaactagtattgtgcttccatgtgagatatgcttatatttgttctgtgtgcaaaattgtttctgatttcattcttatgcatgccattgcgttacctactctataacacaagaatttgatggatgaatcttcttgttttctttcatctttccagaactcacaacaggggtccaaatttgttaagacaggtttagatagttcaggtaacattgggagctcatcaattgcacctccgaagaaagttcaccctggatcaaatggaatgcttccgcaagaagaagcggatatgccatcacatctctctatatccactaagatgctaccaccacccctgaagagcatgctgccactgccacccagaagcatgcccccaccaccacctaagagcatgcctccaccgccaccaaaatttccttcagatgagtttttgtcaagaaacgagaacaagttttttcctttaaaggagccaacagcacctccaaggtcctttgatgcaatatcagtcttgccatctgaacgacgaccaagggagcctaaggaggaaaaaacaaaaggcacacctgtgtctgatactttgctgaaacttattgattatggagatgacgacgatgacggcgatattgatgtgacagacaacacacctaagggcaatccaactcctggttcagagcagaaaccattttgggctgtttaaaactgggtctgctaacgtagtctagtgtgaattcttgttgataaggatgcttgctgccttggtgcatcttctgaattgaagaggcaatcgagctccttgttcgtgtactgtagtaattctaacaggcaatgagatttctttgaacttgtattcattctggcctagtcaaaatgaaccgtttgttgttttggttcagatacgatgatgtttcgtttttagattcgacgttggttgctgaactcgtagcattttaatgtcggtattatataattgttagagcctatgtcaattttgtatccactgtcgtgcaaatttaatttttgtaatcagcctaaggtcacgacattgcttggaaacactttttttaatgaaggaaaatggcaggacatatggtatggtaatt

SEQ ID NO: 944 - DNA, 4286 bp, Zea Mays
aaaagaggaaaaagagagagagaaaacaccacacgcggatacgagggcaaaggggcaacgcgtccaaccggccggacctcaccggctcatccctcatcgccctagtccccaagggccaagtccccaaccccggctgacgactgtgcccgtctccttccctgattcatccgcaagcccacccgtcggcgatcgtccatgacggaggatcgagcgcacaaggtcgccgacgagcccgccgcctcaggcaggcaaagacctgaaaggaagaagaggaagtgggatcaacccgcggaggacttggtctccgcggcggtgacggctgctgccgtgtcggggatgcctgtgatgaatttcggtgctcttcctggcgttgtactgcctggcgtcaccgcatatggagctgctacattgccaagtgtagtccctgttccgtattcattgccgccccatattgcaccatcggtgctccagaatgctgctgcagcagcccagaaattgagtcaggcaaaaataccagatgaggtcattgcacgggaaattgttataaacgatgcagatccatctgtgcgatataagcttacaaaacgacaaacacaagaagagattcagaaatgcacaaacactgtcatcattaccaggggaaaatatcaccctccaaatttacttcctgatggtgagaagcccctctatctacatatctctgctggatctcagttgaaagatactgctgagcgcattaaggcagttgatcgtgcagcttcaatgattgaggaaatattgaaacaaggaacaacctcagagtccatatcggtccctttctcctctagcactggacaagctgttcgtccttttagtgcctcagtttttttgggttttgatgcagatccatcattgaatatcacagctcgaatccgtggtccaaatgtatgactatgtgatcctggttttatttgatcattttgttactagcacatctcagttaattttgttaattactcaatttatgtgctgttgtctttcaattttttgaaagatctaatcataaagctttctctggcatcccaatttggatgggagaaactgcttttctgctgttggtgcttgtgctcttttgttattatataggatcagtacataaatcatatcatgaaagaaacaggggttactgttgtactaagaggaaaagattcggagaatcttggcagttgtcatagtgaagcctcacaacaacctctacacctatacctcacaagtatgcatttaaagaacctagaagctgcaaaagttttggcagagaacctcctggatacagtagcagcagaattcggtgcttccagaatttcttcttcaaaagtatatggtgctgttccacctcctcagcagttgttagctggtgtcgacacctcaggaacgaaatcagatgttcactatattgtagggcccaatgtgttatcgggagctacacattcctttgcatctactggagttattgctcctgttgttgctcctgcagtgacagtgcaatcaggggctccaacatattctggggttccactacccagtaacatggcctatcctattccaccagcaaacggtggggcattttacagtggttatggggacatttatccccaagcaactccgttgcagcagctggcattcacactcaagcatgcctcatcgtcggcaactcaggctgttccagtgacgtccacaccaacaagcatggctacaaaggggaactcaatcttggatgcggagatggataaacgatcccgaaggaaattccaggaactaccggtttcgaagggcccagcaacagaaagtcaggtacagtttttttttctggtatagcctcgactagttcttaactacaggagctacagcagcctcttcttttgtacttgttctgctgtctcctctattcacctagttttctctgtattacctctcaggcgattaatctaaattccatggcaaccccttccttccctgtgctgttcactagatgcctatcctgatttgatgagatcttccatatactcacatccttgtttgttctctcctttcttagcttagcttgtgccatctttttataccccatcaattcttaccaacacaacttccaaggcgatttcaatatcaggatttggaatttctggcatatttgcttttgtttgtaaattagatgtacactgttgctgtcaactatactaaaaactttgtatgccattgtgagtttgtgacatctattaacattaaaatattctgcataaaaacatttgcccttttgtttatgatggcaccatcaaacatgggaagcacttctaattatccaggagttttgatacaacacagcacatattccacatgcaattcatgatcttatgttttatacgtgtacctgaaagaatataatcatcttattgtttagtccttgtttagcactttggaaattaataactactgtataaatctactttctttgaaggaactttgcttgctcttgtagttcttgcagttccctcaacggagactacaattcaaatttgacattactattaaaaacaatagttggattgtcagattggcatcatcatgtttgttgtattcttatacctgcttctaacatctcatttcattccaggtattttctctgaccttgtctgaagctcacaggtggcaatagatatacatgtgggtttttcacaggcttgtaacaaatcggagtttgcattggctgtggagtgtaactgacaagatgcagagctcttcaaatatcttgttacttttttcagcaaatagaaatttaacctttgtgttttatctgtttctgtttgcttacagagttcactgatgttgattaacattgctagcatgccttaagttttgaaattggttggttggtatagtcttgttattagttgttgttagtaggttttgatacattttatttctttccactctttagagaaagttttgcatttgcaaaatcttcacattcagtggaagctccaagcaatataaatatacaaattacacaaggtccttccatatgaaacttcacttagttaagcagactcgactcatctttgttatgttattatagactctcccaatatgaaaattatatttacagcgcatctgcttctatattaagataacattctgaacttgtcaagggtcatgctaactagtattgtgcttccatgtgagatatgcttatatttgttctgtgtgcaaaattgtttctgatttcattcttatgcatgccattgcgttacctactctataacacaagaatttgatggatgaatcttcttgttttctttcatctttccagaactcacaacaggggtccaaatttgttaagacaggtttagatagttcaggtaacattgggagctcatcaattgcacctccgaagaaagttcaccctggatcaaatggaatgcttccgcaagaagaagcggatatgccatcacatctctctatatccactaagatgctaccaccacccctgaagagcatgctgccactgccacccagaagcatgcccccaccaccacctaagagcatgcctccaccgccaccaaaatttccttcagatgagtttttgtcaagaaacgagaacaagttttttcctttaaaggagccaacagcacctccaaggtcctttgatgcaatatcagtcttgccatctgaacgacgaccaagggagcctaaggaggaaaaaacaaaaggcacacctgtgtctgatactttgctgaaacttattgattatggagatgacgacgatgacggcgatattgatgtgacagacaacacacctaagggcaatccaactcctggttcagagcagaaaccattttgggctgtttaaaactgggtctgctaacgtagtctagtgtgaattcttgttgataaggatgcttgctgccttggtgcatcttctgaattgaagaggcaatcgagctccttgttcgtgtactgtagtaattctaacaggcaatgagatttctttgaacttgtattcattctggcctagtcaaaatgaaccgtttgttgttttggttcagatacgatgatgtttcgtttttagattcgacgttggttgctgaactcgtagcattttaatgtcggtattatataattgttagagcctatgtcaattttgtatccactgtcgtgcaaatttaatttttgtaatcagcctaaggtcacgacattgcttggaaacactttttttaatgaaggaaaatggcaggacatatggtatggtaatt

SEQ ID NO: 945 - DNA, 4232 bp, Zea Mays
aaaaagagagagagaaaacaccacacgcggatacgagggcaaaggggcaacgcgtccaaccggccggacctcaccggctcatccctcatcgccctagtccccaagggccaagtccccaaccccggctgacgactgtgcccgtctccttccctgattcatccgcaagcccacccgtcggcgatcgtccatgacggaggatcgagcgcacaaggtcgccgacgagcccgccgcctcaggcaggcaaagacctgaaaggaagaagaggaagtgggatcaacccgcggaggacttggtctccgcggcggtgacggctgctgccgtgtcggggatgcctgtgatgaatttcggtgctcttcctggcgttgtactgcctggcgtcaccgcatatggagctgctacattgccaagtgtagtccctgttccgtattcattgccgccccatattgcaccatcggtgctccagaatgctgctgcagcagcccagaaattgagtcaggcaaaaataccagatgaggtcattgcacgggaaattgttataaacgatgcagatccatctgtgcgatataagcttacaaaacgacaaacacaagaagagattcagaaatgcacaaacactgtcatcattaccaggggaaaatatcaccctccaaatttacttcctgatggtgagaagcccctctatctacatatctctgctggatctcagttgaaagatactgctgagcgcattaaggcagttgatcgtgcagcttcaatgattgaggaaatattgaaacaaggaacaacctcagagtccatatcggtccctttctcctctagcactggacaaatccatcattgaatatcacagctcgaatccgtggtccaaatgtatgactatgtgatcctggttttatttgatcattttgttactagcacatctcagttaattttgttaattactcaatttatgtgctgttgtctttcaattttttgaaagatctaatcataaagctttctctggcatcccaatttggatgggagaaactgcttttctgctgttggtgcttgtgctcttttgttattatataggatcagtacataaatcatatcatgaaagaaacaggggttactgttgtactaagaggaaaagattcggagaatcttggcagttgtcatagtgaagcctcacaacaacctctacacctatacctcacaagtatgcatttaaagaacctagaagctgcaaaagttttggcagagaacctcctggatacagtagcagcagaattcggtgcttccagaatttcttcttcaaaagtatatggtgctgttccacctcctcagcagttgttagctggtgtcgacacctcaggaacgaaatcagatgttcactatattgtagggcccaatgtgttatcgggagctacacattcctttgcatctactggagttattgctcctgttgttgctcctgcagtgacagtgcaatcaggggctccaacatattctggggttccactacccagtaacatggcctatcctattccaccagcaaacggtggggcattttacagtggttatggggacatttatccccaagcaactccgttgcagcagctggcattcacactcaagcatgcctcatcgtcggcaactcaggctgttccagtgacgtccacaccaacaagcatggctacaaaggggaactcaatcttggatgcggagatggataaacgatcccgaaggaaattccaggaactaccggtttcgaagggcccagcaacagaaagtcaggtacagtttttttttctggtatagcctcgactagttcttaactacaggagctacagcagcctcttcttttgtacttgttctgctgtctcctctattcacctagttttctctgtattacctctcaggcgattaatctaaattccatggcaaccccttccttccctgtgctgttcactagatgcctatcctgatttgatgagatcttccatatactcacatccttgtttgttctctcctttcttagcttagcttgtgccatctttttataccccatcaattcttaccaacacaacttccaaggcgatttcaatatcaggatttggaatttctggcatatttgcttttgtttgtaaattagatgtacactgttgctgtcaactatactaaaaactttgtatgccattgtgagtttgtgacatctattaacattaaaatattctgcataaaaacatttgcccttttgtttatgatggcaccatcaaacatgggaagcacttctaattatccaggagttttgatacaacacagcacatattccacatgcaattcatgatcttatgttttatacgtgtacctgaaagaatataatcatcttattgtttagtccttgtttagcactttggaaattaataactactgtataaatctactttctttgaaggaactttgcttgctcttgtagttcttgcagttccctcaacggagactacaattcaaatttgacattactattaaaaacaatagttggattgtcagattggcatcatcatgtttgttgtattcttatacctgcttctaacatctcatttcattccaggtattttctctgaccttgtctgaagctcacaggtggcaatagatatacatgtgggtttttcacaggcttgtaacaaatcggagtttgcattggctgtggagtgtaactgacaagatgcagagctcttcaaatatcttgttacttttttcagcaaatagaaatttaacctttgtgttttatctgtttctgtttgcttacagagttcactgatgttgattaacattgctagcatgccttaagttttgaaattggttggttggtatagtcttgttattagttgttgttagtaggttttgatacattttatttctttccactctttagagaaagttttgcatttgcaaaatcttcacattcagtggaagctccaagcaatataaatatacaaattacacaaggtccttccatatgaaacttcacttagttaagcagactcgactcatctttgttatgttattatagactctcccaatatgaaaattatatttacagcgcatctgcttctatattaagataacattctgaacttgtcaagggtcatgctaactagtattgtgcttccatgtgagatatgcttatatttgttctgtgtgcaaaattgtttctgatttcattcttatgcatgccattgcgttacctactctataacacaagaatttgatggatgaatcttcttgttttctttcatctttccagaactcacaacaggggtccaaatttgttaagacaggtttagatagttcaggtaacattgggagctcatcaattgcacctccgaagaaagttcaccctggatcaaatggaatgcttccgcaagaagaagcggatatgccatcacatctctctatatccactaagatgctaccaccacccctgaagagcatgctgccactgccacccagaagcatgcccccaccaccacctaagagcatgcctccaccgccaccaaaatttccttcagatgagtttttgtcaagaaacgagaacaagttttttcctttaaaggagccaacagcacctccaaggtcctttgatgcaatatcagtcttgccatctgaacgacgaccaagggagcctaaggaggaaaaaacaaaaggcacacctgtgtctgatactttgctgaaacttattgattatggagatgacgacgatgacggcgatattgatgtgacagacaacacacctaagggcaatccaactcctggttcagagcagaaaccattttgggctgtttaaaactgggtctgctaacgtagtctagtgtgaattcttgttgataaggatgcttgctgccttggtgcatcttctgaattgaagaggcaatcgagctccttgttcgtgtactgtagtaattctaacaggcaatgagatttctttgaacttgtattcattctggcctagtcaaaatgaaccgtttgttgttttggttcagatacgatgatgtttcgtttttagattcgacgttggttgctgaactcgtagcattttaatgtcggtattatataattgttagagcctatgtcaattttgtatccactgtcgtgcaaatttaatttttgtaatcagcctaaggtcacgacattgcttggaaacactttttttaatgaaggaaaatggcaggacatatggtatggtaatt

SEQ ID NO: 946 - DNA, 3401 bp, Zea Mays
aaaacaccacacgcggatacgagggcaaaggggcaacgcgtccaaccggccggacctcaccggctcatccctcatcgccctagtccccaagggccaagtccccaaccccggctgacgactgtgcccgtctccttccctgattcatccgcaagcccacccgtcggcgatcgtccatgacggaggatcgagcgcacaaggtcgccgacgagcccgccgcctcaggcaggcaaagacctgaaaggaagaagaggaagtgggatcaacccgcggaggacttggtctccgcggcggtgacggctgctgccgtgtcggggatgcctgtgatgaatttcggtgctcttcctggcgttgtactgcctggcgtcaccgcatatggagctgctacattgccaagtgtagtccctgttccgtattcattgccgccccatattgcaccatcggtgctccagaatgctgctgcagcagcccagaaattgagtcaggcaaaaataccagatgaggtcattgcacgggaaattgttataaacgatgcagatccatctgtgcgatataagcttacaaaacgacaaacacaagaagagattcagaaatgcacaaacactgtcatcattaccaggggaaaatatcaccctccaaatttacttcctgatggtgagaagcccctctatctacatatctctgctggatctcagttgaaagatactgctgagcgcattaaggcagttgatcgtgcagcttcaatgattgaggaaatattgaaacaaggaacaacctcagagtccatatcggtccctttctcctctagcactggacaaatccatcattgaatatcacagctcgaatccgtggtccaaatgtatgactatgtgatcctggttttatttgatcattttgttactagcacatctcagttaattttgttaattactcaatttatgtgctgttgtctttcaattttttgaaagatctaatcataaagctttctctggcatcccaatttggatgggagaaactgcttttctgctgttggtgcttgtgctcttttgttattatataggatcagtacataaatcatatcatgaaagaaacaggggttactgttgtactaagaggaaaagattcggagaatcttggcagttgtcatagtgaagcctcacaacaacctctacacctatacctcacaagtatgcatttaaagaacctagaagctgcaaaagttttggcagagaacctcctggatacagtagcagcagaattcggtgcttccagaatttcttcttcaaaagtatatggtgctgttccacctcctcagcagttgttagctggtgtcgacacctcaggaacgaaatcagatgttcactatattgtagggcccaatgtgttatcgggagctacacattcctttgcatctactggagttattgctcctgttgttgctcctgcagtgacagtgcaatcaggggctccaacatattctggggttccactacccagtaacatggcctatcctattccaccagcaaacggtggggcattttacagtggttatggggacatttatccccaagcaactccgttgcagcagctggcattcacactcaagcatgcctcatcgtcggcaactcaggctgttccagtgacgtccacaccaacaagcatggctacaaaggggaactcaatcttggatgcggagatggataaacgatcccgaaggaaattccaggaactaccggtttcgaagggcccagcaacagaaagtcaggtattttctctgaccttgtctgaagctcacaggtggcaatagatatacatgtgggtttttcacaggcttgtaacaaatcggagtttgcattggctgtggagtgtaactgacaagatgcagagctcttcaaatatcttgttacttttttcagcaaatagaaatttaacctttgtgttttatctgtttctgtttgcttacagagttcactgatgttgattaacattgctagcatgccttaagttttgaaattggttggttggtatagtcttgttattagttgttgttagtaggttttgatacattttatttctttccactctttagagaaagttttgcatttgcaaaatcttcacattcagtggaagctccaagcaatataaatatacaaattacacaaggtccttccatatgaaacttcacttagttaagcagactcgactcatctttgttatgttattatagactctcccaatatgaaaattatatttacagcgcatctgcttctatattaagataacattctgaacttgtcaagggtcatgctaactagtattgtgcttccatgtgagatatgcttatatttgttctgtgtgcaaaattgtttctgatttcattcttatgcatgccattgcgttacctactctataacacaagaatttgatggatgaatcttcttgttttctttcatctttccagaactcacaacaggggtccaaatttgttaagacaggtttagatagttcaggtaacattgggagctcatcaattgcacctccgaagaaagttcaccctggatcaaatggaatgcttccgcaagaagaagcggatatgccatcacatctctctatatccactaagatgctaccaccacccctgaagagcatgctgccactgccacccagaagcatgcccccaccaccacctaagagcatgcctccaccgccaccaaaatttccttcagatgagtttttgtcaagaaacgagaacaagttttttcctttaaaggagccaacagcacctccaaggtcctttgatgcaatatcagtcttgccatctgaacgacgaccaagggagcctaaggaggaaaaaacaaaaggcacacctgtgtctgatactttgctgaaacttattgattatggagatgacgacgatgacggcgatattgatgtgacagacaacacacctaagggcaatccaactcctggttcagagcagaaaccattttgggctgtttaaaactgggtctgctaacgtagtctagtgtgaattcttgttgataaggatgcttgctgccttggtgcatcttctgaattgaagaggcaatcgagctccttgttcgtgtactgtagtaattctaacaggcaatgagatttctttgaacttgtattcattctggcctagtcaaaatgaaccgtttgttgttttggttcagatacgatgatgtttcgtttttagattcgacgttggttgctgaactcgtagcattttaatgtcggtattatataattgttagagcctatgtcaattttgtatccactgtcgtgcaaatttaatttttgtaatcagcctaaggtcacgacattgcttggaaacactttttttaatgaaggaaaatggcaggacatatggtatggtaatt

SEQ ID NO: 947 - DNA, 2358 bp, Zea Mays
gcggatacgagggcaaaggggcaacgcgtccaaccggccggacctcaccggctcatccctcatcgccctagtccccaagggccaagtccccaaccccggctgacgactgtgcccgtctccttccctgattcatccgcaagcccacccgtcggcgatcgtccatgacggaggatcgagcgcacaaggtcgccgacgagcccgccgcctcaggcaggcaaagacctgaaaggaagaagaggaagtgggatcaacccgcggaggacttggtctccgcggcggtgacggctgctgccgtgtcggggatgcctgtgatgaatttcggtgctcttcctggcgttgtactgcctggcgtcaccgcatatggagctgctacattgccaagtgtagtccctgttccgtattcattgccgccccatattgcaccatcggtgctccagaatgctgctgcagcagcccagaaattgagtcaggcaaaaataccagatgaggtcattgcacgggaaattgttataaacgatgcagatccatctgtgcgatataagcttacaaaacgacaaacacaagaagagattcagaaatgcacaaacactgtcatcattaccaggggaaaatatcaccctccaaatttacttcctgatggtgagaagcccctctatctacatatctctgctggatctcagttgaaagatactgctgagcgcattaaggcagttgatcgtgcagcttcaatgattgaggaaatattgaaacaaggaacaacctcagagtccatatcggtccctttctcctctagcactggacaagctgttcgtccttttagtgcctcagtttttttgggttttgatgcagatccatcattgaatatcacagctcgaatccgtggtccaaatgatcagtacataaatcatatcatgaaagaaacaggggttactgttgtactaagaggaaaagattcggagaatcttggcagttgtcatagtgaagcctcacaacaacctctacacctatacctcacaagtatgcatttaaagaacctagaagctgcaaaagttttggcagagaacctcctggatacagtagcagcagaattcggtgcttccagaatttcttcttcaaaagtatatggtgctgttccacctcctcagcagttgttagctggtgtcgacacctcaggaacgaaatcagatgttcactatatttgacagtgcaatcaggggctccaacatattctggggttccactacccagtaacatggcctatcctattccaccagcaaacggctgttccagtgacgtccacaccaacaagcatggctacaaaggggaactcaatcttggatgcggagatggataaacgatcccgaaggaaattccaggaactaccggtttcgaagggcccagcaacagaaagtcagaactcacaacaggggtccaaatttgttaagacaggtttagatagttcaggtaacattgggagctcatcaattgcacctccgaagaaagttcaccctggatcaaatggaatgcttccgcaagaagaagcggatatgccatcacatctctctatatccactaagatgctaccaccacccctgaagagcatgctgccactgccacccagaagcatgcccccaccaccacctaagagcatgcctccaccgccaccaaaatttccttcagatgagtttttgtcaagaaacgagaacaagttttttcctttaaaggagccaacagcacctccaaggtcctttgatgcaatatcagtcttgccatctgaacgacgaccaagggagcctaaggaggaaaaaacaaaaggcacacctgtgtctgatactttgctgaaacttattgattatggagatgacgacgatgacggcgatattgatgtgacagacaacacacctaagggcaatccaactcctggttcagagcagaaaccattttgggctgtttaaaactgggtctgctaacgtagtctagtgtgaattcttgttgataaggatgcttgctgccttggtgcatcttctgaattgaagaggcaatcgagctccttgttcgtgtactgtagtaattctaacaggcaatgagatttctttgaacttgtattcattctggcctagtcaaaatgaaccgtttgttgttttggttcagatacgatgatgtttcgtttttagattcgacgttggttgctgaactcgtagcattttaatgtcggtattatataattgttagagcctatgtcaattttgtatccactgtcgtgcaaatttaatttttgtaatcagcctaaggtcacgacattgcttggaaacactttttttaatgaaggaaaatggcaggacatatggtatggtaatt

SEQ ID NO: 948 - DNA, 3229 bp, Zea Mays
gcggatacgagggcaaaggggcaacgcgtccaaccggccggacctcaccggctcatccctcatcgccctagtccccaagggccaagtccccaaccccggctgacgactgtgcccgtctccttccctgattcatccgcaagcccacccgtcggcgatcgtccatgacggaggatcgagcgcacaaggtcgccgacgagcccgccgcctcaggcaggcaaagacctgaaaggaagaagaggaagtgggatcaacccgcggaggacttggtctccgcggcggtgacggctgctgccgtgtcggggatgcctgtgatgaatttcggtgctcttcctggcgttgtactgcctggcgtcaccgcatatggagctgctacattgccaagtgtagtccctgttccgtattcattgccgccccatattgcaccatcggtgctccagaatgctgctgcagcagcccagaaattgagtcaggcaaaaataccagatgaggtcattgcacgggaaattgttataaacgatgcagatccatctgtgcgatataagcttacaaaacgacaaacacaagaagagattcagaaatgcacaaacactgtcatcattaccaggggaaaatatcaccctccaaatttacttcctgatggtgagaagcccctctatctacatatctctgctggatctcagttgaaagatactgctgagcgcattaaggcagttgatcgtgcagcttcaatgattgaggaaatattgaaacaaggaacaacctcagagtccatatcggtccctttctcctctagcactggacaagctgttcgtccttttagtgcctcagtttttttgggttttgatgcagatccatcattgaatatcacagctcgaatccgtggtccaaatgatcagtacataaatcatatcatgaaagaaacaggggttactgttgtactaagaggaaaagattcggagaatcttggcagttgtcatagtgaagcctcacaacaacctctacacctatacctcacaagtatgcatttaaagaacctagaagctgcaaaagttttggcagagaacctcctggatacagtagcagcagaattcggtgcttccagaatttcttcttcaaaagtatatggtgctgttccacctcctcagcagttgttagctggtgtcgacacctcaggaacgaaatcagatgttcactatattgtagggcccaatgtgttatcgggagctacacattcctttgcatctactggagttattgctcctgttgttgctcctgcagtgacagtgcaatcaggggctccaacatattctggggttccactacccagtaacatggcctatcctattccaccagcaaacggtggggcattttacagtggttatggggacatttatccccaagcaactccgttgcagcagctggcattcacactcaagcatgcctcatcgtcggcaactcaggctgttccagtgacgtccacaccaacaagcatggctacaaaggggaactcaatcttggatgcggagatggataaacgatcccgaaggaaattccaggaactaccggtttcgaagggcccagcaacagaaagtattttctctgaccttgtctgaagctcacaggtggcaatagatatacatgtgggtttttcacaggcttgtaacaaatcggagtttgcattggctgtggagtgtaactgacaagatgcagagctcttcaaatatcttgttacttttttcagcaaatagaaatttaacctttgtgttttatctgtttctgtttgcttacagagttcactgatgttgattaacattgctagcatgccttaagttttgaaattggttggttggtatagtcttgttattagttgttgttagtaggttttgatacattttatttctttccactctttagagaaagttttgcatttgcaaaatcttcacattcagtggaagctccaagcaatataaatatacaaattacacaaggtccttccatatgaaacttcacttagttaagcagactcgactcatctttgttatgttattatagactctcccaatatgaaaattatatttacagcgcatctgcttctatattaagataacattctgaacttgtcaagggtcatgctaactagtattgtgcttccatgtgagatatgcttatatttgttctgtgtgcaaaattgtttctgatttcattcttatgcatgccattgcgttacctactctataacacaagaatttgatggatgaatcttcttgttttctttcatctttccagaactcacaacaggggtccaaatttgttaagacaggtttagatagttcaggtaacattgggagctcatcaattgcacctccgaagaaagttcaccctggatcaaatggaatgcttccgcaagaagaagcggatatgccatcacatctctctatatccactaagatgctaccaccacccctgaagagcatgctgccactgccacccagaagcatgcccccaccaccacctaagagcatgcctccaccgccaccaaaatttccttcagatgagtttttgtcaagaaacgagaacaagttttttcctttaaaggagccaacagcacctccaaggtcctttgatgcaatatcagtcttgccatctgaacgacgaccaagggagcctaaggaggaaaaaacaaaaggcacacctgtgtctgatactttgctgaaacttattgattatggagatgacgacgatgacggcgatattgatgtgacagacaacacacctaagggcaatccaactcctggttcagagcagaaaccattttgggctgtttaaaactgggtctgctaacgtagtctagtgtgaattcttgttgataaggatgcttgctgccttggtgcatcttctgaattgaagaggcaatcgagctccttgttcgtgtactgtagtaattctaacaggcaatgagatttctttgaacttgtattcattctggcctagtcaaaatgaaccgtttgttgttttggttcagatacgatgatgtttcgtttttagattcgacgttggttgctgaactcgtagcattttaatgtcggtattatataattgttagagcctatgtcaattttgtatccactgtcgtgcaaatttaatttttgtaatcagcctaaggtcacgacattgcttggaaacactttttttaatgaaggaaaatggcaggacatatggtatggtaatt

SEQ ID NO: 949 - DNA, 3369 bp, Zea Mays
gcggatacgagggcaaaggggcaacgcgtccaaccggccggacctcaccggctcatccctcatcgccctagtccccaagggccaagtccccaaccccggctgacgactgtgcccgtctccttccctgattcatccgcaagcccacccgtcggcgatcgtccatgacggaggatcgagcgcacaaggtcgccgacgagcccgccgcctcaggcaggcaaagacctgaaaggaagaagaggaagtgggatcaacccgcggaggacttggtctccgcggcggtgacggctgctgccgtgtcggggatgcctgtgatgaatttcggtgctcttcctggcgttgtactgcctggcgtcaccgcatatggagctgctacattgccaagtgtagtccctgttccgtattcattgccgccccatattgcaccatcggtgctccagaatgctgctgcagcagcccagaaattgagtcaggcaaaaataccagatgaggtcattgcacgggaaattgttataaacgatgcagatccatctgtgcgatataagcttacaaaacgacaaacacaagaagagattcagaaatgcacaaacactgtcatcattaccaggggaaaatatcaccctccaaatttacttcctgatggtgagaagcccctctatctacatatctctgctggatctcagttgaaagatactgctgagcgcattaaggcagttgatcgtgcagcttcaatgattgaggaaatattgaaacaaggaacaacctcagagtccatatcggtccctttctcctctagcactggacaagctgttcgtccttttagtgcctcagtttttttgggttttgatgcagatccatcattgaatatcacagctcgaatccgtggtccaaatgatcagtacataaatcatatcatgaaagaaacaggggttactgttgtactaagaggaaaagattcggagaatcttggcagttgtcatagtgaagcctcacaacaacctctacacctatacctcacaagtatgcatttaaagaacctagaagctgcaaaagttttggcagagaacctcctggatacagtagcagcagaattcggtgcttccagaatttcttcttcaaaagtatatggtgctgttccacctcctcagcagttgttagctggtgtcgacacctcaggaacgaaatcagatgttcactatattgtagggcccaatgtgttatcgggagctacacattcctttgcatctactggagttattgctcctgttgttgctcctgcagtgacagtgcaatcaggggctccaacatattctggggttccactacccagtaacatggcctatcctattccaccagcaaacggtggggcattttacagtggttatggggacatttatccccaagcaactccgttgcagcagctggcattcacactcaagcatgcctcatcgtcggcaactcaggctgttccagtgacgtccacaccaacaagcatggctacaaaggggaactcaatcttggatgcggagatggataaacgatcccgaaggaaattccaggaactaccggtttcgaagggcccagcaacagaaagtcagttcttgcagttccctcaacggagactacaattcaaatttgacattactattaaaaacaatagttggattgtcagattggcatcatcatgtttgttgtattcttatacctgcttctaacatctcatttcattccaggtattttctctgaccttgtctgaagctcacaggtggcaatagatatacatgtgggtttttcacaggcttgtaacaaatcggagtttgcattggctgtggagtgtaactgacaagatgcagagctcttcaaatatcttgttacttttttcagcaaatagaaatttaacctttgtgttttatctgtttctgtttgcttacagagttcactgatgttgattaacattgctagcatgccttaagttttgaaattggttggttggtatagtcttgttattagttgttgttagtaggttttgatacattttatttctttccactctttagagaaagttttgcatttgcaaaatcttcacattcagtggaagctccaagcaatataaatatacaaattacacaaggtccttccatatgaaacttcacttagttaagcagactcgactcatctttgttatgttattatagactctcccaatatgaaaattatatttacagcgcatctgcttctatattaagataacattctgaacttgtcaagggtcatgctaactagtattgtgcttccatgtgagatatgcttatatttgttctgtgtgcaaaattgtttctgatttcattcttatgcatgccattgcgttacctactctataacacaagaatttgatggatgaatcttcttgttttctttcatctttccagaactcacaacaggggtccaaatttgttaagacaggtttagatagttcaggtaacattgggagctcatcaattgcacctccgaagaaagttcaccctggatcaaatggaatgcttccgcaagaagaagcggatatgccatcacatctctctatatccactaagatgctaccaccacccctgaagagcatgctgccactgccacccagaagcatgcccccaccaccacctaagagcatgcctccaccgccaccaaaatttccttcagatgagtttttgtcaagaaacgagaacaagttttttcctttaaaggagccaacagcacctccaaggtcctttgatgcaatatcagtcttgccatctgaacgacgaccaagggagcctaaggaggaaaaaacaaaaggcacacctgtgtctgatactttgctgaaacttattgattatggagatgacgacgatgacggcgatattgatgtgacagacaacacacctaagggcaatccaactcctggttcagagcagaaaccattttgggctgtttaaaactgggtctgctaacgtagtctagtgtgaattcttgttgataaggatgcttgctgccttggtgcatcttctgaattgaagaggcaatcgagctccttgttcgtgtactgtagtaattctaacaggcaatgagatttctttgaacttgtattcattctggcctagtcaaaatgaaccgtttgttgttttggttcagatacgatgatgtttcgtttttagattcgacgttggttgctgaactcgtagcattttaatgtcggtattatataattgttagagcctatgtcaattttgtatccactgtcgtgcaaatttaatttttgtaatcagcctaaggtcacgacattgcttggaaacactttttttaatgaaggaaaatggcaggacatatggtatggtaatt

SEQ ID NO: 950 - DNA, 4004 bp, Zea Mays
cggatacgagggcaaaggggcaacgcgtccaaccggccggacctcaccggctcatccctcatcgccctagtccccaagggccaagtccccaaccccggctgacgactgtgcccgtctccttccctgattcatccgcaagcccacccgtcggcgatcgtccatgacggaggatcgagcgcacaaggtcgccgacgagcccgccgcctcaggcaggcaaagacctgaaaggaagaagaggaagtgggatcaacccgcggaggacttggtctccgcggcggtgacggctgctgccgtgtcggggatgcctgtgatgaatttcggtgctcttcctggcgttgtactgcctggcgtcaccgcatatggagctgctacattgccaagtgtagtccctgttccgtattcattgccgccccatattgcaccatcggtgctccagaatgctgctgcagcagcccagaaattgagtcaggcaaaaataccagatgaggtcattgcacgggaaattgttataaacgatgcagatccatctgtgcgatataagcttacaaaacgacaaacacaagaagagattcagaaatgcacaaacactgtcatcattaccaggggaaaatatcaccctccaaatttacttcctgatggtgagaagcccctctatctacatatctctgctggatctcagttgaaagatactgctgagcgcattaaggcagttgatcgtgcagcttcaatgattgaggaaatattgaaacaaggaacaacctcagagtccatatcggtccctttctcctctagcactggacaaatccatcattgaatatcacagctcgaatccgtggtccaaatgatcagtacataaatcatatcatgaaagaaacaggggttactgttgtactaagaggaaaagattcggagaatcttggcagttgtcatagtgaagcctcacaacaacctctacacctatacctcacaagtatgcatttaaagaacctagaagctgcaaaagttttggcagagaacctcctggatacagtagcagcagaattcggtgcttccagaatttcttcttcaaaagtatatggtgctgttccacctcctcagcagttgttagctggtgtcgacacctcaggaacgaaatcagatgttcactatattgtagggcccaatgtgttatcgggagctacacattcctttgcatctactggagttattgctcctgttgttgctcctgcagtgacagtgcaatcaggggctccaacatattctggggttccactacccagtaacatggcctatcctattccaccagcaaacggtggggcattttacagtggttatggggacatttatccccaagcaactccgttgcagcagctggcattcacactcaagcatgcctcatcgtcggcaactcaggctgttccagtgacgtccacaccaacaagcatggctacaaaggggaactcaatcttggatgcggagatggataaacgatcccgaaggaaattccaggaactaccggtttcgaagggcccagcaacagaaagtcaggtacagtttttttttctggtatagcctcgactagttcttaactacaggagctacagcagcctcttcttttgtacttgttctgctgtctcctctattcacctagttttctctgtattacctctcaggcgattaatctaaattccatggcaaccccttccttccctgtgctgttcactagatgcctatcctgatttgatgagatcttccatatactcacatccttgtttgttctctcctttcttagcttagcttgtgccatctttttataccccatcaattcttaccaacacaacttccaaggcgatttcaatatcaggatttggaatttctggcatatttgcttttgtttgtaaattagatgtacactgttgctgtcaactatactaaaaactttgtatgccattgtgagtttgtgacatctattaacattaaaatattctgcataaaaacatttgcccttttgtttatgatggcaccatcaaacatgggaagcacttctaattatccaggagttttgatacaacacagcacatattccacatgcaattcatgatcttatgttttatacgtgtacctgaaagaatataatcatcttattgtttagtccttgtttagcactttggaaattaataactactgtataaatctactttctttgaaggaactttgcttgctcttgtagttcttgcagttccctcaacggagactacaattcaaatttgacattactattaaaaacaatagttggattgtcagattggcatcatcatgtttgttgtattcttatacctgcttctaacatctcatttcattccaggtattttctctgaccttgtctgaagctcacaggtggcaatagatatacatgtgggtttttcacaggcttgtaacaaatcggagtttgcattggctgtggagtgtaactgacaagatgcagagctcttcaaatatcttgttacttttttcagcaaatagaaatttaacctttgtgttttatctgtttctgtttgcttacagagttcactgatgttgattaacattgctagcatgccttaagttttgaaattggttggttggtatagtcttgttattagttgttgttagtaggttttgatacattttatttctttccactctttagagaaagttttgcatttgcaaaatcttcacattcagtggaagctccaagcaatataaatatacaaattacacaaggtccttccatatgaaacttcacttagttaagcagactcgactcatctttgttatgttattatagactctcccaatatgaaaattatatttacagcgcatctgcttctatattaagataacattctgaacttgtcaagggtcatgctaactagtattgtgcttccatgtgagatatgcttatatttgttctgtgtgcaaaattgtttctgatttcattcttatgcatgccattgcgttacctactctataacacaagaatttgatggatgaatcttcttgttttctttcatctttccagaactcacaacaggggtccaaatttgttaagacaggtttagatagttcaggtaacattgggagctcatcaattgcacctccgaagaaagttcaccctggatcaaatggaatgcttccgcaagaagaagcggatatgccatcacatctctctatatccactaagatgctaccaccacccctgaagagcatgctgccactgccacccagaagcatgcccccaccaccacctaagagcatgcctccaccgccaccaaaatttccttcagatgagtttttgtcaagaaacgagaacaagttttttcctttaaaggagccaacagcacctccaaggtcctttgatgcaatatcagtcttgccatctgaacgacgaccaagggagcctaaggaggaaaaaacaaaaggcacacctgtgtctgatactttgctgaaacttattgattatggagatgacgacgatgacggcgatattgatgtgacagacaacacacctaagggcaatccaactcctggttcagagcagaaaccattttgggctgtttaaaactgggtctgctaacgtagtctagtgtgaattcttgttgataaggatgcttgctgccttggtgcatcttctgaattgaagaggcaatcgagctccttgttcgtgtactgtagtaattctaacaggcaatgagatttctttgaacttgtattcattctggcctagtcaaaatgaaccgtttgttgttttggttcagatacgatgatgtttcgtttttagattcgacgttggttgctgaactcgtagcattttaatgtcggtattatataattgttagagcctatgtcaattttgtatccactgtcgtgcaaatttaatttttgtaatcagcctaaggtcacgacattgcttggaaacactttttttaatgaaggaaaatggcaggacatatggtatggtaatt

SEQ ID NO: 951 - DNA, 4071 bp, Zea Mays
cgagggcaaaggggcaacgcgtccaaccggccggacctcaccggctcatccctcatcgccctagtccccaagggccaagtccccaaccccggctgacgactgtgcccgtctccttccctgattcatccgcaagcccacccgtcggcgatcgtccatgacggaggatcgagcgcacaaggtcgccgacgagcccgccgcctcaggcaggcaaagacctgaaaggaagaagaggaagtgggatcaacccgcggaggacttggtctccgcggcggtgacggctgctgccgtgtcggggatgcctgtgatgaatttcggtgctcttcctggcgttgtactgcctggcgtcaccgcatatggagctgctacattgccaagtgtagtccctgttccgtattcattgccgccccatattgcaccatcggtgctccagaatgctgctgcagcagcccagaaattgagtcaggcaaaaataccagatgaggtcattgcacgggaaattgttataaacgatgcagatccatctgtgcgatataagcttacaaaacgacaaacacaagaagagattcagaaatgcacaaacactgtcatcattaccaggggaaaatatcaccctccaaatttacttcctgatggtgagaagcccctctatctacatatctctgctggatctcagttgaaagatactgctgagcgcattaaggcagttgatcgtgcagcttcaatgattgaggaaatattgaaacaaggaacaacctcagagtccatatcggtccctttctcctctagcactggacaagtaatcctctctatatctccgtagcatgagcaaatttacccgtttttgggagcgaattgaggctgttcgtccttttagtgcctcagtttttttgggttttgatgcagatccatcattgaatatcacagctcgaatccgtggtccaaatgatcagtacataaatcatatcatgaaagaaacaggggttactgttgtactaagaggaaaagattcggagaatcttggcagttgtcatagtgaagtatgcatttaaagaacctagaagctgcaaaagttttggcagagaacctcctggatacagtagcagcagaattcggtgcttccagaatttcttcttcaaaagtatatggtgctgttccacctcctcagcagttgttagctggtgtcgacacctcaggaacgaaatcagatgttcactatattgtagggcccaatgtgttatcgggagctacacattcctttgcatctactggagttattgctcctgttgttgctcctgcagtgacagtgcaatcaggggctccaacatattctggggttccactacccagtaacatggcctatcctattccaccagcaaacggtggggcattttacagtggttatggggacatttatccccaagcaactccgttgcagcagctggcattcacactcaagcatgcctcatcgtcggcaactcaggctgttccagtgacgtccacaccaacaagcatggctacaaaggggaactcaatcttggatgcggagatggataaacgatcccgaaggaaattccaggaactaccggtttcgaagggcccagcaacagaaagtcaggtacagtttttttttctggtatagcctcgactagttcttaactacaggagctacagcagcctcttcttttgtacttgttctgctgtctcctctattcacctagttttctctgtattacctctcaggcgattaatctaaattccatggcaaccccttccttccctgtgctgttcactagatgcctatcctgatttgatgagatcttccatatactcacatccttgtttgttctctcctttcttagcttagcttgtgccatctttttataccccatcaattcttaccaacacaacttccaaggcgatttcaatatcaggatttggaatttctggcatatttgcttttgtttgtaaattagatgtacactgttgctgtcaactatactaaaaactttgtatgccattgtgagtttgtgacatctattaacattaaaatattctgcataaaaacatttgcccttttgtttatgatggcaccatcaaacatgggaagcacttctaattatccaggagttttgatacaacacagcacatattccacatgcaattcatgatcttatgttttatacgtgtacctgaaagaatataatcatcttattgtttagtccttgtttagcactttggaaattaataactactgtataaatctactttctttgaaggaactttgcttgctcttgtagttcttgcagttccctcaacggagactacaattcaaatttgacattactattaaaaacaatagttggattgtcagattggcatcatcatgtttgttgtattcttatacctgcttctaacatctcatttcattccaggtattttctctgaccttgtctgaagctcacaggtggcaatagatatacatgtgggtttttcacaggcttgtaacaaatcggagtttgcattggctgtggagtgtaactgacaagatgcagagctcttcaaatatcttgttacttttttcagcaaatagaaatttaacctttgtgttttatctgtttctgtttgcttacagagttcactgatgttgattaacattgctagcatgccttaagttttgaaattggttggttggtatagtcttgttattagttgttgttagtaggttttgatacattttatttctttccactctttagagaaagttttgcatttgcaaaatcttcacattcagtggaagctccaagcaatataaatatacaaattacacaaggtccttccatatgaaacttcacttagttaagcagactcgactcatctttgttatgttattatagactctcccaatatgaaaattatatttacagcgcatctgcttctatattaagataacattctgaacttgtcaagggtcatgctaactagtattgtgcttccatgtgagatatgcttatatttgttctgtgtgcaaaattgtttctgatttcattcttatgcatgccattgcgttacctactctataacacaagaatttgatggatgaatcttcttgttttctttcatctttccagaactcacaacaggggtccaaatttgttaagacaggtttagatagttcaggtaacattgggagctcatcaattgcacctccgaagaaagttcaccctggatcaaatggaatgcttccgcaagaagaagcggatatgccatcacatctctctatatccactaagatgctaccaccacccctgaagagcatgctgccactgccacccagaagcatgcccccaccaccacctaagagcatgcctccaccgccaccaaaatttccttcagatgagtttttgtcaagaaacgagaacaagttttttcctttaaaggagccaacagcacctccaaggtcctttgatgcaatatcagtcttgccatctgaacgacgaccaagggagcctaaggaggaaaaaacaaaaggcacacctgtgtctgatactttgctgaaacttattgattatggagatgacgacgatgacggcgatattgatgtgacagacaacacacctaagggcaatccaactcctggttcagagcagaaaccattttgggctgtttaaaactgggtctgctaacgtagtctagtgtgaattcttgttgataaggatgcttgctgccttggtgcatcttctgaattgaagaggcaatcgagctccttgttcgtgtactgtagtaattctaacaggcaatgagatttctttgaacttgtattcattctggcctagtcaaaatgaaccgtttgttgttttggttcagatacgatgatgtttcgtttttagattcgacgttggttgctgaactcgtagcattttaatgtcggtattatataattgttagagcctatgtcaattttgtatccactgtcgtgcaaatttaatttttgtaatcagcctaaggtcacgacattgcttggaaacactttttttaatgaaggaaaatggcaggacatatggtatggtaatt

SEQ ID NO: 952 - DNA, 3599 bp, Zea Mays
cgagggcaaaggggcaacgcgtccaaccggccggacctcaccggctcatccctcatcgccctagtccccaagggccaagtccccaaccccggctgacgactgtgcccgtctccttccctgattcatccgcaagcccacccgtcggcgatcgtccatgacggaggatcgagcgcacaaggtcgccgacgagcccgccgcctcaggcaggcaaagacctgaaaggaagaagaggaagtgggatcaacccgcggaggacttggtctccgcggcggtgacggctgctgccgtgtcggggatgcctgtgatgaatttcggtgctcttcctggcgttgtactgcctggcgtcaccgcatatggagctgctacattgccaagtgtagtccctgttccgtattcattgccgccccatattgcaccatcggtgctccagaatgctgctgcagcagcccagaaattgagtcaggcaaaaataccagatgaggtcattgcacgggaaattgttataaacgatgcagatccatctgtgcgatataagcttacaaaacgacaaacacaagaagagattcagaaatgcacaaacactgtcatcattaccaggggaaaatatcaccctccaaatttacttcctgatggtgagaagcccctctatctacatatctctgctggatctcagttgaaagatactgctgagcgcattaaggcagttgatcgtgcagcttcaatgattgaggaaatattgaaacaaggaacaacctcagagtccatatcggtccctttctcctctagcactggacaagctgttcgtccttttagtgcctcagtttttttgggttttgatgcagatccatcattgaatatcacagctcgaatccgtggtccaaatgtatgactatgtgatcctggttttatttgatcattttgttactagcacatctcagttaattttgttaattactcaatttatgtgctgttgtctttcaattttttgaaagatctaatcataaagctttctctggcatcccaatttggatgggagaaactgcttttctgctgttggtgcttgtgctcttttgttattatataggatcagtacataaatcatatcatgaaagaaacaggggttactgttgtactaagaggaaaagattcggagaatcttggcagttgtcatagtgaagcctcacaacaacctctacacctatacctcacaagtatgcatttaaagaacctagaagctgcaaaagttttggcagagaacctcctggatacagtagcagcagaattcggtgcttccagaatttcttcttcaaaagtatatggtgctgttccacctcctcagcagttgttagctggtgtcgacacctcaggaacgaaatcagatgttcactatattgtagggcccaatgtgttatcgggagctacacattcctttgcatctactggagttattgctcctgttgttgctcctgcagtgacagtgcaatcaggggctccaacatattctggggttccactacccagtaacatggcctatcctattccaccagcaaacggtggggcattttacagtggttatggggacatttatccccaagcaactccgttgcagcagctggcattcacactcaagcatgcctcatcgtcggcaactcaggctgttccagtgacgtccacaccaacaagcatggctacaaaggggaactcaatcttggatgcggagatggataaacgatcccgaaggaaattccaggaactaccggtttcgaagggcccagcaacagaaagtcaggtacagtttttttttctggtatagcctcgactagttcttaactacaggagctacagcagcctcttcttttgtacttgttctgctgtctcctctattcacctagttttctctgtattacctctcaggcgattaatctaaattccatggcaaccccttccttccctgtgctgttcactagatgcctatcctgatttgatgagatcttccatatactcacatccttgtttgttctctcctttcttagcttagcttgtgccatctttttataccccatcaattcttaccaacacaacttccaaggcgatttcaatatcaggatttggaatttctggcatatttgcttttgtttgtaaattagatgtacactgttgctgtcaactatactaaaaactttgtatgccattgtgagtttgtgacatctattaacattaaaatattctgcataaaaacatttgcccttttgtttatgatggcaccatcaaacatgggaagcacttctaattatccaggagttttgatacaacacagcacatattccacatgcaattcatgatcttatgttttatacgtgtacctgaaagaatataatcatcttattgtttagtccttgtttagcactttggaaattaataactactgtataaatctactttctttgaaggaactttgcttgctcttgtagttcttgcagttccctcaacggagactacaattcaaatttgacattactattaaaaacaatagttggattgtcagattggcatcatcatgtttgttgtattcttatacctgcttctaacatctcatttcattccaggtattttctctgaccttgtctgaagctcacaggtggcaatagatatacataactcacaacaggggtccaaatttgttaagacaggtttagatagttcaggtaacattgggagctcatcaattgcacctccgaagaaagttcaccctggatcaaatggaatgcttccgcaagaagaagcggatatgccatcacatctctctatatccactaagatgctaccaccacccctgaagagcatgctgccactgccacccagaagcatgcccccaccaccacctaagagcatgcctccaccgccaccaaaatttccttcagatgagtttttgtcaagaaacgagaacaagttttttcctttaaaggagccaacagcacctccaaggtcctttgatgcaatatcagtcttgccatctgaacgacgaccaagggagcctaaggaggaaaaaacaaaaggcacacctgtgtctgatactttgctgaaacttattgattatggagatgacgacgatgacggcgatattgatgtgacagacaacacacctaagggcaatccaactcctggttcagagcagaaaccattttgggctgtttaaaactgggtctgctaacgtagtctagtgtgaattcttgttgataaggatgcttgctgccttggtgcatcttctgaattgaagaggcaatcgagctccttgttcgtgtactgtagtaattctaacaggcaatgagatttctttgaacttgtattcattctggcctagtcaaaatgaaccgtttgttgttttggttcagatacgatgatgtttcgtttttagattcgacgttggttgctgaactcgtagcattttaatgtcggtattatataattgttagagcctatgtcaattttgtatccactgtcgtgcaaatttaatttttgtaatcagcctaaggtcacgacattgcttggaaacactttttttaatgaaggaaaatggcaggacatatggtatggtaatt

SEQ ID NO: 953 - DNA, 4220 bp, Zea Mays
cgagggcaaaggggcaacgcgtccaaccggccggacctcaccggctcatccctcatcgccctagtccccaagggccaagtccccaaccccggctgacgactgtgcccgtctccttccctgattcatccgcaagcccacccgtcggcgatcgtccatgacggaggatcgagcgcacaaggtcgccgacgagcccgccgcctcaggcaggcaaagacctgaaaggaagaagaggaagtgggatcaacccgcggaggacttggtctccgcggcggtgacggctgctgccgtgtcggggatgcctgtgatgaatttcggtgctcttcctggcgttgtactgcctggcgtcaccgcatatggagctgctacattgccaagtgtagtccctgttccgtattcattgccgccccatattgcaccatcggtgctccagaatgctgctgcagcagcccagaaattgagtcaggcaaaaataccagatgaggtcattgcacgggaaattgttataaacgatgcagatccatctgtgcgatataagcttacaaaacgacaaacacaagaagagattcagaaatgcacaaacactgtcatcattaccaggggaaaatatcaccctccaaatttacttcctgatggtgagaagcccctctatctacatatctctgctggatctcagttgaaagatactgctgagcgcattaaggcagttgatcgtgcagcttcaatgattgaggaaatattgaaacaaggaacaacctcagagtccatatcggtccctttctcctctagcactggacaagctgttcgtccttttagtgcctcagtttttttgggttttgatgcagatccatcattgaatatcacagctcgaatccgtggtccaaatgtatgactatgtgatcctggttttatttgatcattttgttactagcacatctcagttaattttgttaattactcaatttatgtgctgttgtctttcaattttttgaaagatctaatcataaagctttctctggcatcccaatttggatgggagaaactgcttttctgctgttggtgcttgtgctcttttgttattatataggatcagtacataaatcatatcatgaaagaaacaggggttactgttgtactaagaggaaaagattcggagaatcttggcagttgtcatagtgaaggttggtgattattttgatagcttctaggaactcctgatttgtaggcttacattttattctataacatccattgtagcctcacaacaacctctacacctatacctcacaagtatgcatttaaagaacctagaagctgcaaaagttttggcagagaacctcctggatacagtagcagcagaattcggtgcttccagggcccaatgtgttatcgggagctacacattcctttgcatctactggagttattgctcctgttgttgctcctgcagtgacagtgcaatcaggggctccaacatattctggggttccactacccagtaacatggcctatcctattccaccagcaaacggtggggcattttacagtggttatggggacatttatccccaagcaactccgttgcagcagctggcattcacactcaagcatgcctcatcgtcggcaactcaggctgttccagtgacgtccacaccaacaagcatggctacaaaggggaactcaatcttggatgcggagatggataaacgatcccgaaggaaattccaggaactaccggtttcgaagggcccagcaacagaaagtcaggtacagtttttttttctggtatagcctcgactagttcttaactacaggagctacagcagcctcttcttttgtacttgttctgctgtctcctctattcacctagttttctctgtattacctctcaggcgattaatctaaattccatggcaaccccttccttccctgtgctgttcactagatgcctatcctgatttgatgagatcttccatatactcacatccttgtttgttctctcctttcttagcttagcttgtgccatctttttataccccatcaattcttaccaacacaacttccaaggcgatttcaatatcaggatttggaatttctggcatatttgcttttgtttgtaaattagatgtacactgttgctgtcaactatactaaaaactttgtatgccattgtgagtttgtgacatctattaacattaaaatattctgcataaaaacatttgcccttttgtttatgatggcaccatcaaacatgggaagcacttctaattatccaggagttttgatacaacacagcacatattccacatgcaattcatgatcttatgttttatacgtgtacctgaaagaatataatcatcttattgtttagtccttgtttagcactttggaaattaataactactgtataaatctactttctttgaaggaactttgcttgctcttgtagttcttgcagttccctcaacggagactacaattcaaatttgacattactattaaaaacaatagttggattgtcagattggcatcatcatgtttgttgtattcttatacctgcttctaacatctcatttcattccaggtattttctctgaccttgtctgaagctcacaggtggcaatagatatacatgtgggtttttcacaggcttgtaacaaatcggagtttgcattggctgtggagtgtaactgacaagatgcagagctcttcaaatatcttgttacttttttcagcaaatagaaatttaacctttgtgttttatctgtttctgtttgcttacagagttcactgatgttgattaacattgctagcatgccttaagttttgaaattggttggttggtatagtcttgttattagttgttgttagtaggttttgatacattttatttctttccactctttagagaaagttttgcatttgcaaaatcttcacattcagtggaagctccaagcaatataaatatacaaattacacaaggtccttccatatgaaacttcacttagttaagcagactcgactcatctttgttatgttattatagactctcccaatatgaaaattatatttacagcgcatctgcttctatattaagataacattctgaacttgtcaagggtcatgctaactagtattgtgcttccatgtgagatatgcttatatttgttctgtgtgcaaaattgtttctgatttcattcttatgcatgccattgcgttacctactctataacacaagaatttgatggatgaatcttcttgttttctttcatctttccagaactcacaacaggggtccaaatttgttaagacaggtttagatagttcaggtaacattgggagctcatcaattgcacctccgaagaaagttcaccctggatcaaatggaatgcttccgcaagaagaagcggatatgccatcacatctctctatatccactaagatgctaccaccacccctgaagagcatgctgccactgccacccagaagcatgcccccaccaccacctaagagcatgcctccaccgccaccaaaatttccttcagatgagtttttgtcaagaaacgagaacaagttttttcctttaaaggagccaacagcacctccaaggtcctttgatgcaatatcagtcttgccatctgaacgacgaccaagggagcctaaggaggaaaaaacaaaaggcacacctgtgtctgatactttgctgaaacttattgattatggagatgacgacgatgacggcgatattgatgtgacagacaacacacctaagggcaatccaactcctggttcagagcagaaaccattttgggctgtttaaaactgggtctgctaacgtagtctagtgtgaattcttgttgataaggatgcttgctgccttggtgcatcttctgaattgaagaggcaatcgagctccttgttcgtgtactgtagtaattctaacaggcaatgagatttctttgaacttgtattcattctggcctagtcaaaatgaaccgtttgttgttttggttcagatacgatgatgtttcgtttttagattcgacgttggttgctgaactcgtagcattttaatgtcggtattatataattgttagagcctatgtcaattttgtatccactgtcgtgcaaatttaatttttgtaatcagcctaaggtcacgacattgcttggaaacactttttttaatgaaggaaaatggcaggacatatggtatggtaatt

SEQ ID NO: 954 - DNA, 2589 bp, Zea Mays
atcctctctatatctccgtagcatgagcaaatttacccgtttttgggagcgaattgaggctgttcgtccttttagtgcctcagtttttttgggttttgatgcagatccatcattgaatatcacagctcgaatccgtggtccaaatgtatgactatgtgatcctggttttatttgatcattttgttactagcacatctcagttaattttgttaattactcaatttatgtgctgttgtctttcaattttttgaaagatctaatcataaagctttctctggcatcccaatttggatgggagaaactgcttttctgctgttggtgcttgtgctcttttgttattatataggatcagtacataaatcatatcatgaaagaaacaggggttactgttgtactaagaggaaaagattcggagaatcttggcagttgtcatagtgaagcctcacaacaacctctacacctatacctcacaagtatgcatttaaagaacctagaagctgcaaaagttttggcagagaacctcctggatacagtagcagcagaattcggtgcttccagaatttcttcttcaaaagtatatggtgctgttccacctcctcagcagttgttagctggtgtcgacacctcaggaacgaaatcagatgttcactatattgtagggcccaatgtgttatcgggagctacacattcctttgcatctactggagttattgctcctgttgttgctcctgcagtgacagtgcaatcaggggctccaacatattctggggttccactacccagtaacatggcctatcctattccaccagcaaacggctgttccagtgacgtccacaccaacaagcatggctacaaaggggaactcaatcttggatgcggagatggataaacgatcccgaaggaaattccaggaactaccggtttcgaagggcccagcaacagaaagtcaggtattttctctgaccttgtctgaagctcacaggtggcaatagatatacatgtgggtttttcacaggcttgtaacaaatcggagtttgcattggctgtggagtgtaactgacaagatgcagagctcttcaaatatcttgttacttttttcagcaaatagaaatttaacctttgtgttttatctgtttctgtttgcttacagagttcactgatgttgattaacattgctagcatgccttaagttttgaaattggttggttggtatagtcttgttattagttgttgttagtaggttttgatacattttatttctttccactctttagagaaagttttgcatttgcaaaatcttcacattcagtggaagctccaagcaatataaatatacaaattacacaaggtccttccatatgaaacttcacttagttaagcagactcgactcatctttgttatgttattatagactctcccaatatgaaaattatatttacagcgcatctgcttctatattaagataacattctgaacttgtcaagggtcatgctaactagtattgtgcttccatgtgagatatgcttatatttgttctgtgtgcaaaattgtttctgatttcattcttatgcatgccattgcgttacctactctataacacaagaatttgatggatgaatcttcttgttttctttcatctttccagaactcacaacaggggtccaaatttgttaagacaggtttagatagttcaggtaacattgggagctcatcaattgcacctccgaagaaagttcaccctggatcaaatggaatgcttccgcaagaagaagcggatatgccatcacatctctctatatccactaagatgctaccaccacccctgaagagcatgctgccactgccacccagaagcatgcccccaccaccacctaagagcatgcctccaccgccaccaaaatttccttcagatgagtttttgtcaagaaacgagaacaagttttttcctttaaaggagccaacagcacctccaaggtcctttgatgcaatatcagtcttgccatctgaacgacgaccaagggagcctaaggaggaaaaaacaaaaggcacacctgtgtctgatactttgctgaaacttattgattatggagatgacgacgatgacggcgatattgatgtgacagacaacacacctaagggcaatccaactcctggttcagagcagaaaccattttgggctgtttaaaactgggtctgctaacgtagtctagtgtgaattcttgttgataaggatgcttgctgccttggtgcatcttctgaattgaagaggcaatcgagctccttgttcgtgtactgtagtaattctaacaggcaatgagatttctttgaacttgtattcattctggcctagtcaaaatgaaccgtttgttgttttggttcagatacgatgatgtttcgtttttagattcgacgttggttgctgaactcgtagcattttaatgtcggtattatataattgttagagcctatgtcaattttgtatccactgtcgtgcaaatttaatttttgtaatcagcctaaggtcacgacattgcttggaaacactttttttaatgaaggaaaatggcaggacatatggtatggtaatt

SEQ ID NO: 955 - DNA, 1963 bp, Zea Mays
tttacccgtttttgggagcgaattgaggctgttcgtccttttagtgcctcagtttttttgggttttgatgcagatccatcattgaatatcacagctcgaatccgtggtccaaatgtatgactatgtgatcctggttttatttgatcattttgttactagcacatctcagttaattttgttaattactcaatttatgtgctgttgtctttcaattttttgaaagatctaatcataaagctttctctggcatcccaatttggatgggagaaactgcttttctgctgttggtgcttgtgctcttttgttattatataggatcagtacataaatcatatcatgaaagaaacaggggttactgttgtactaagaggaaaagattcggagaatcttggcagttgtcatagtgaagcctcacaacaacctctacacctatacctcacaagtatgcatttaaagaacctagaagctgcaaaagttttggcagagaacctcctggatacagtagcagcagaattcggtgcttccagaatttcttcttcaaaagtatatggtgctgttccacctcctcagcagttgttagctggtgtcgacacctcaggaacgaaatcagatgttcactatattgtagggcccaatgtgttatcgggagctacacattcctttgcatctactggagttattgctcctgttgttgctcctgcagtgacagtgcaatcaggggctccaacatattctggggttccactacccagtaacatggcctatcctattccaccagcaaacggtggggcattttacagtggttatggggacatttatccccaagcaactccgttgcagcagctggcattcacactcaagcatgcctcatcgtcggcaactcaggctgttccagtgacgtccacaccaacaagcatggctacaaaggggaactcaatcttggatgcggagatggataaacgatcccgaaggaaattccaggaactaccggtttcgaagggcccagcaacagaaagtcagaactcacaacaggggtccaaatttgttaagacaggtttagatagttcaggtaacattgggagctcatcaattgcacctccgaagaaagttcaccctggatcaaatggaatgcttccgcaagaagaagcggatatgccatcacatctctctatatccactaagatgctaccaccacccctgaagagcatgctgccactgccacccagaagcatgcccccaccaccacctaagagcatgcctccaccgccaccaaaatttccttcagatgagtttttgtcaagaaacgagaacaagttttttcctttaaaggagccaacagcacctccaaggtcctttgatgcaatatcagtcttgccatctgaacgacgaccaagggagcctaaggaggaaaaaacaaaaggcacacctgtgtctgatactttgctgaaacttattgattatggagatgacgacgatgacggcgatattgatgtgacagacaacacacctaagggcaatccaactcctggttcagagcagaaaccattttgggctgtttaaaactgggtctgctaacgtagtctagtgtgaattcttgttgataaggatgcttgctgccttggtgcatcttctgaattgaagaggcaatcgagctccttgttcgtgtactgtagtaattctaacaggcaatgagatttctttgaacttgtattcattctggcctagtcaaaatgaaccgtttgttgttttggttcagatacgatgatgtttcgtttttagattcgacgttggttgctgaactcgtagcattttaatgtcggtattatataattgttagagcctatgtcaattttgtatccactgtcgtgcaaatttaatttttgtaatcagcctaaggtcacgacattgcttggaaacactttttttaatgaaggaaaatggcaggacatatggtatggtaatt

SEQ ID NO: 956 - DNA, 697 bp, Zea Mays
gagatctatatccacgaccagatttgatggcctagtaaatgtgtcagggaccctgcaacgactgcaggaggaaccaaccgctgccgctggcttcgccgtcatcaactgagctaagcccgagaatgcccttcgtagtcaagcccccggagaagaaacaccgcctcccatctgcttataatcgcttcatgagggaggagattcagcgcatcaaagctgcgaagccagatatccctcacagggaggccttcagcatggctgccaagaattgggcaaagtgtgacccgcgctgctcgacggctgcctctaccgaaacttctaacagcgctcctgctgagcctagagttgtgcccactccccagttaactgagccacgctttgacctggagggccaaggggcaagtcattgagagcttcgacatcttcaagcatattgagcgcagcatctagaggtcgttcgatgccgctgttgtagcccagtatcgatcgagtaccatcagctatatgtataacctatcccgtatcgccgtcgtcgcctcgcaatcatgcatccccatcctgtacttttacccccgtacgtgttactgttgctgttattctcgttatggttggattgtacgcaccatttaattatgaacagctgctacctatatatataatatttgccttcttttttgttcctaatatatgcatgtttacg

SEQ ID NO: 957 - DNA, 1830 bp, Zea Mays
cgcgatcgtgccgccgccttctcttcaacagcactcatctatcgcgctagctccacttcacacggtcaattcccctcgcgtaagccaagcgttggggtgatcctgaagaaaccggccggcctgcaggcgccatataatcccaaccacaccgcatcgtttggatgtgcagttcttcgtatccacaccgcatctagctagcttgtggccaagtgttcgagatagcattgccggccggggggagcaagagatatgggtagcttgggagaggtcggtgatggcaaggagatattccatggccatggccattctgaccctgtcgtcgacgagctcaaccgtctgcagaatctcctcagagaaaaggaaagagagctaggacatgcatacagtgaaatcaaaggcttgaaggtgacggaagctctgaaggacaaggctattgctgagctgagcaaggaactaaagagacaggacgagaggatgagaagtatggagaaacaacttgagcagaagaatctagaagtgaaaagactaaataacgagcgtaaagaagcattgtctgcgcagttcgctgcagaggcgacacttagaaggatccactcttctcaaaaagatgaggaatcagttccattcgacgccatcatagcgcccttggagtcagacataagaaaatacagacatgagctagctcgagcaaaggtttatgtcaatcgtgttgcatccacagcagcaaatgaatggaaagatgactctgacaagctcatgccagtcaagagatggctagaagaacgaaggctcctgcagggagaaatacagcgattgcgtgacaggataacagtagcagagaaatctgcaaagattgaagcccaacttaatgataaactcaaaaggaggctcaagtcgcttgaagaggatatgagaaataaaacatccaattcgtctacaaaagaaattaataaacaagccactcctaaaagatcattgtctcaaccaaaacaacctaaaacaatgagagtgttacctcaactatattcacctgaagtcgttgacaagagaaggcctatatctcaaccaagggcatcaatggtagggaaagtattgaagcaacctaattcagaaatcgagcctacaaagaaaagtacagttgttaagcgatttgatagccctggaaggagaacaatttctagtaaagaagagtgtcccatgaaaaatcaactatgggcatcaaaaaccaaaacagatgttattgttgggaaagagaacaaagtacaaaagccaaattccaaggcacgtttaaatgcttcacattcacaaggccatgtggacacaaaagtatttgatggaaatgatgaatatggacttcaaaatagtgaacatcatgaagccatggcaaatgagagaaatgggaatagctcgagtgatgaaagtagcccttagaacaacaagacaagttggagtgttggggtttacttttgcatgaagacacaaaatggaagcacaaataacattattatgtacagatgtagcatgacttattttaaaggaagcgtgtgcccatctacatctattttattctgcccgggagattgcttgaacaacaaaactagttgtggtgtcatcattttgttttgtctctttgttctctcatgtacatacaaactatacctcaaactttacaaatgtaattttgtgcgactattgaaaaaatcaatatgtgcttttttgaggaattggttactttataaaataaaaaggtgtctaatgtaatagaagcaacagagaaaaaagtgaagggtgtgaatcaataaaaccatggatgttgaatgttgatgtttc

SEQ ID NO: 958 - DNA, 1047 bp, Zea Mays
  misc_feature (85)..(85): n is a, c, g, or t
atctggagatctcgtatatgtgggtactgtacagagggggagtgctggaagcacagcaattagcttggctactgttgctcctgcntatggttgtaggtgtcatgtgtaaatacccgatgatgctgccatgaaaaggtctcaaataattgaggcgcttggagctactgttgaacgagtgcgccctgtttcaataactcacagagaccattttgtcaacattgccagaagaagggctttagaagcaaacaagttagcagctgcacagagagaatcaagcgagaaacaaactaatggtttaacacatgtcgattctgagatgctggatgacaaattagcggttatgcagagggaatcaaacaagatgcaaaatggtggtccagcacatgtcaatactgaattttcacactgtgggaaatgcgatgtgaattctgattcaaagggaggtttttttgctgaccagtttgagaatttggcaaactatcgagcacattatgaatgtactggtcctgagatttggaaacagactaaaggtaacctgcatgccttcgttgcagcagctggtactggcggtacaattgccggagtctcacgatatcttaagaacaggagcatcaaatgttttttaatggaccctcctggatctggtctgttcaataaggttaccagaggggtgatgtacacaaaagaggaggccgaggggaagcggcttaagaacccttttgatactattactgaaggaataggaatcaatagggtcactaaaaatttcatgatggcggaactggatggagcctatcgaggatcagatagggaagctgttgagatgtcaaggtacatggttacgagtgaaatttttgttgttatttagaagttttgatctgtaataacaataagtgtgcataagttagccctgcaccacaatttttatttactacattctacagtatagtctgtggactgacatattagactaagaacatttttttccttcttttattgcatcccacttctcttcacttgttgcactgtacctttatcttgtcaaac

SEQ ID NO: 959 - DNA, 1424 bp, Zea Mays
  misc_feature (85)..(85): n is a, c, g, or t
atctggagatctcgtatatgtgggtactgtacagagggggagtgctggaagcacagcaattagcttggctactgttgctcctgcntatggttgtaggtgtcatgtgtaaatacccgatgatgctgccatgaaaaggtctcaaataattgaggcgcttggagctactgttgaacgagtgcgccctgtttcaataactcacagagaccattttgtcaacattgccagaagaagggctttagaagcaaacaagttagcagctgcacagagagaatcaagcgagaaacaaactaatggtttaacacatgtcgattctgagatgctggatgacaaattagcggttatgcagagggaatcaaacaagatgcaaaatggtggtccagcacatgtcaatactgaattttcacactgtgggaaatgcgatgtgaattctgattcaaagggaggtttttttgctgaccagtttgagaatttggcaaactatcgagcacattatgaatgtactggtcctgagatttggaaacagactaaaggtaacctgcatgccttcgttgcagcagctggtactggcggtacaattgccggagtctcacgatatcttaaggaaaagaacaggagcatcaaatgttttttaatggaccctcctggatctggtctgttcaataaggttaccagaggggtgatgtacacaaaagaggaggccgaggggaagcggcttaagaacccttttgatactattactgaaggaataggaatcaatagggtcactaaaaatttcatgatggcggaactggatggagcctatcgaggatcagatagggaagctgttgagatgtcaagttcttcagccatgaattgcgttggcgctgtaagagttgctcaagatttgggtccagggcatacaatcgtgacaattctttgtgacagtgggatgagacatttaagcaagttcttcaatgagcagtatttggctgatcatggattgacaccaacagctactggtctggaatttcttgataaatgagcatttcacagggacttttcaatttcaggaagttggcatcctccctgtgactgcgatgataccttgacacaagggtgaacgctgaataggtcaaagcatgaatatatgccatacaaatggtgaacctgatgtgttttaagtactaattgtagtctagtataggcattgccattggataggattgggatagccagtgttttgatccttgttttgatatatatctattgaggctcaggctgttaccagttagaatgctgcactgagcatctttgctgtaaacaactgcaacatatgcattttttttgttaaaaaatgtttcaagaacaattcacccgtattgatcttttgtgttgtacataggccatggcatcactctgcttagtttaagttggtctgttttttt

SEQ ID NO: 960 - DNA, 2192 bp, Zea Mays
cctaaaacccccctcagcaaaaaccctgccatttcccgtgctgcccccctcgccgcccgccgccgtcgccgcctcctatgcccttccgcccctccctaccttgccgctgtccctttgaccgcaagctcacgtccttcctgtcggcggtcgcctccctcgccgactcccgctcccgctcgcccttcccccctgccggcgctgtgcctgcaactctcactcccactgcctacaacgcccttatgtccgcctactcccgcgccggccgccacgacgaggttcttcgtctcttcttctcccttcctttcgcgcctactgcgccactcttcaccaccctgatttcctctctcgccgcctccggcagcaaaagcgccgcattggacgccttctccctccttgcttccggcatcggacccaccacctccgccttcaccgcgctgcttaagtccatcgacgctgcctcttccgagtcggtgtatcgtgccttcttcgcaaccatggccgctatggagtgcgcccctgacgctgccacgtacaactgcctcatttggatactctgcgattcccagcggctggacgaggcatggggcgtccttgacagcatgctagaggtaggcgtgtgccccaccgtccgctcctacaccgcgatcctgcacgggtactgtaagcagggcagggtcctcgaggcggagaggttacttgataccatgattcaagtcggatgcgcaccggatgtcatctcatacagcgtgctcatccaggggctttgtcgtgtaggggaatttggcaaggtggaaagaattttaggggagagtgaggcgaaggggtggacgccgaatgctgtcacctacaatatttacatgtctgccctgtgcagaatgggtttcttggatgaggcattccggcaagtagatgttatgcatagcagaggagtgtacatgaccattgagacagtgaatattctattcgattgcttgtgccgtggctcgatgttttcagaagcattgacattgctggaatgcagtgaagaactcaactgggatgttgatgtgttctgctataacactatgatgagtaggctctgcgacactggtgatattgctagagtcctgaagctgttagttgatcttgtaaagaagggaattgggccagatatgtttagttttactattgcaatccggagcctctgtagggctggaaaattcaaggtggcaaaatgcctactggataataagggaattgaatatgacgtcgtggcattcaatactttgattcatggtttgtgcatggctggagagctacatgaaatgttgcaaacctatatggatatgaccagtagaaatgtttttccaaacaactttaccattggtatggtaattgacagtttctgcaaaaatcgagaatttggtgcagcaatcaaagtttttcttgaatattcagaaggatgtttagttcctgatcatttttttcgcctgaatacttggttggtaaaagcaaaaggatgggaatatttactgaccctgctccgcacaatgcgttctaaaggtcttgtgctagatgtttgcttatttaattcattggttaggatgttttgctgtgaggggtactgtaatcgtgaaactttttgtgaagtttctcttatacttgacagtatgctggaatgtctctccagcacacagcacaagtcagccagtggtgtaactgtataatcatgcaaaaatccagtttgttgtcaacttccctaagctcttcaactagctgttcagtaatacattgaactacttaatggtcttcaccagagcttaggaggagctaagctatggctttatgtggcacaactattcaagcagtccaaacaagattatcgtgatgagcctaaaggttagtaggactaagctatggctttatgtggcacatattttcaagcagtccaaacaaggttatcgtggagcctaaaggtgtgatggacttgtatggccaagagggtttaaggaattttcactgtttgggttatcaatgcctttcttaactcgccagaagcattggcgtactatcctatgcaatccacacaagcgtacatctgtttggtttagcttttttttctggacagcttttttgagaatctagctgtggagagaatctgactttagggagaatctgagtattgtgtggattgcgtgcgaaggaagacgaag

SEQ ID NO: 961 - DNA, 2084 bp, Zea Mays
cctaaaacccccctcagcaaaaaccctgccatttcccgtgctgcccccctcgccgcccgccgccgtcgccgcctcctatgcccttccgcccctccctaccttgccgctgtccctttgaccgcaagctcacgtccttcctgtcggcggtcgcctccctcgccgactcccgctcccgctcgcccttcccccctgccggcgctgtgcctgcaactctcactcccactgcctacaacgcccttatgtccgcctactcccgcgccggccgccacgacgaggttcttcgtctcttcttctcccttcctttcgcgcctactgcgccactcttcaccaccctgatttcctctctcgccgcctccggcagcaaaagcgccgcattggacgccttctccctccttgcttccggcatcggacccaccacctccgccttcaccgcgctgcttaagtccatcgacgctgcctcttccgagtcggtgtatcgtgccttcttcgcaaccatggccgctatggagtgcgcccctgacgctgccacgtacaactgcctcatttggatactctgcgattcccagcggctggacgaggcatggggcgtccttgacagcatgctagaggtaggcgtgtgccccaccgtccgctcctacaccgcgatcctgcacgggtactgtaagcagggcagggtcctcgaggcggagaggttacttgataccatgattcaagtcggatgcgcaccggatgtcatctcatacagcgtgctcatccaggggctttgtcgtgtaggggaatttggcaaggtggaaagaattttaggggagagtgaggcgaaggggtggacgccgaatgctgtcacctacaatatttacatgtctgccctgtgcagaatgggtttcttggatgaggcattccggcaagtagatgttatgcatagcagaggagtgtacatgaccattgagacagtgaatattctattcgattgcttgtgccgtggctcgatgttttcagaagcattgacattgctggaatgcagtgaagaactcaactgggatgttgatgtgttctgctataacactatgatgagtaggctctgcgacactggtgatattgctagagtcctgaagctgttagttgatcttgtaaagaagggaattgggccagatatgtttagttttactattgcaatccggagcctctgtagggctggaaaattcaaggtggcaaaatgcctactggataataagggaattgaatatgacgtcgtggcattcaatactttgattcatggtttgtgcatggctggagagctacatgaaatgttgcaaacctatatggatatgaccagtagaaatgtttttccaaacaactttaccattggtatggtaattgacagtttctgcaaaaatcgagaatttggtgcagcaatcaaagtttttcttgaatattcagaaggatgtttagttcctgatcatttttttcgcctgaatacttggttggtaaaagcaaaaggatgggaatatttactgaccctgctccgcacaatgcgttctaaagtatgctggaatgtctctccagcacacagcacaagtcagccagtggtgtaactgtataatcatgcaaaaatccagtttgttgtcaacttccctaagctcttcaactagctgttcagtaatacattgaactacttaatggtcttcaccagcttaggaggagctaagctatggctttatgtggcacaactattcaagcagtccaaacaagattatcgtgatgagcctaaaggttagtaggactaagctatggctttatgtggcacatattttcaagcagtccaaacaaggttatcgtggagcctaaaggtgtgatggacttgtatggccaagagggtttaaggaattttcactgtttgggttatcaatgcctttcttaactcgccagaagcattggcgtactatcctatgcaatccacacaagcgtacatctgtttggtttagcttttttttctggacagcttttttgagaatctagctgtggagagaatctgactttagggagaatctgagtattgtgtggattgcgtgcgaaggaagacgaag

SEQ ID NO: 962 - DNA, 4976 bp, Zea Mays
gccagggaagtctgctactgcctccagtcccagatccacccgtctgttccgccccgccgcgcgcaccatggatcccccgcggcggcggctacccgccgcgctcgtcgtcttcctcctgctcctcgccgcggcctctcccgtcgcgcgcgcgtggaagaaggacgagtttcgcaactgcaaccagacgcccttctgcaagcgcgctcggacccgcgccccgcactcgctcgacgcgccgctctccctcgccgccagctccctggccatctcccccgacggctctatctccgctgagctctcccacccgtcccgcccgcggcccctcgtgctccgcctctctgcgctgcccccgcacgcgctgcggctccagatcgatgaggactactccaccgccacgccgccgcaccgccggtttcacgtccccgatgtcctcctcccggacctcgaggcccgcacgctccacctccccgagcccaagactgccgctggcgtatccaccgttgcgctctcctccgaccttgacgtcgtcgttagacacgatccgttcgagcttgccgtccgccgtgctgggtcgggcgatcccgtgctctccttcaactcccacggcctcttcgacttcgagccgatgcgggagtccaagccggaggacgacacgtgggaggagcacttccggagtcacaccgacaagcgcccccgcggcccgcagtccatcaccttcgacctctccttctatggcgcggacttcgtctacggtctcccggagcacgggtccacctcgctcgccctccgccccacccgcggcccgggggttgaggagtccgagccctaccgcctcttcaaccttgatgtcttcgagtacctccacgaatcgcccttcggtctgtatggctcgatccccttcatgattgggcatggcggccgggcgtcgtctggcttcttctggctcaacgcagcggagatgcagattgacgtgcttgcaccaggttgggatggggtcactgaccatgagaacgggcggatcgacacactgtggatggctgaggctggtgtcatcgatgcattcttctttgttggttctgagcctaaggatgtgatcaagcagtacataagtgtcacgggcacaccttcaatgccacaacagtttgctactgcgtatcaccaatgccggtggaactaccgggatgaggcagatgttgacggtgtagatgctggttttgatgagcatgatattccatatgatgtgctctggctcgacattgagcatacggatggcaagcggtactttacatgggatcattctgctttccccaatccagaggagatgcagcgaaagatagcagataaggggaggaagatggtcaccattgtggatccccacatcaagcgtgacagttcattccacctccacaaggaggcaacagacaaggggtactatgtgaaagatgcgaatgggaatgactttgatgggtggtgctggcctggatcatcatcctatcctgacatgttgaatcctgagatacgtgagtggtgggctgacaagttctcctatgaaaattacaagggatcaactccaacactgtacatttggaatgatatgaatgagccatctgtcttcaatggccccgaggtcaccatgcccagggatgcaatgcattatggagatgttgaacaccgagaattgcataatgcatatgggtactactttcatatggctaccgcagatggacttctcaagcgaggcgaggggaaagatagaccctttgttttgtcaagggccttctttgctggaagtcaacggtatggtgcagtttggacaggcgacaactccgcagactgggatcacttgaaatcttctatcccaatggtcttaactcttggtcttactggcttgcctttctctggcgcggatattggtggattctttggaaacccagaaccagacctattggtgcgttggtaccaagtaggagcattttatcctttctttaggggtcatgctcatcatgacaccaagagacgtgagccatggttatttggagagcgaagaactgccatcataagggaggcgatacatatgcggtattcattgttgccctacttctacacgctgttcagagaggctagtgtaaatggcattcctgtcatgcgtcctttatggttagaatttcctgacgataaagaaacttataacaatggcgaggcatttatggtggggcccagccttttagctcaaggaatatacgaagagggccagaaatcagtgtcggtctaccttcctgggaaggagtcatggtatgacttgagaaatggatctccatacaagggaagcgcgacacacaagctacaggttttagaagatagcattcccagcttccaaagggctggtacaattgtgccaagaaaggacagattcagacgcagttctactcagatggtgaatgatccatacactctggtgatagcactcaatagctcaggtgctggagaaggcgaactttatgtggatgacgggaaaagttatgagtaccagcaaggggcattcatccatcgccgatttgtctttgcagacaataagctaacttcattcaatattgggcctgacgatttgggcaagaaatttagaagtgattgcgtgattgaaagaattataatcctcggtttacgatccggagtgaagaaggctattattgagcctggaaatcaagaactagaaattgaatcagggccaattagtttaaggagtggttccagcccagtcgcgccaacaatccggaggcccaatgtttgcattgcagacagttggactataaggatagcataaaagatgtatcggctatatgctgtcaaagactagaaggatttcgtgttctttcagcattatgtgttcctgattattggttgaaagccgatagagagggagtgagggacaaataactgatgggagttttcgggtatacactactatatgcttagtggagtatggattgttatcaaattgtctggttaacgttatcaaagcatcctggactggcactcagagggactctggtactacacgtctcttttatcgctgttattttgctgcttccacgcagtaaaacagttcttgcaaggtctcatcaaacagctaaaaaaatagcttgcacaaagggggggaaaaggagaaaagaatggagttactagagagacactttaccgatgtatggtattaaactgacatcctggcatgatacaacataaatcaacggagcaacgtaaactctccacgcaaggccacaagtcagacgatcaggaggggatagtcccatagctacatctacctccgatatccgaagctttaaacaccagcagaacacgtactatacttcgctgatgctacatgagaggcgcatgcgcagcgcggcgcagccttatctgtcagcagtgtgccgcagatcatcagttccaagccaatccatcatcagttccggagaaacgtccatggtcccctcgctgcccccatcctccaggtgctagctatggtcctcagactcatgtagatcgtcaatgcgatccatataccgatgaatccgttatgcgcagaaaggtacagcaggcatggtatcgacacagacgcaacagcaacctgaagattctcattcaggtccattttcattgttgggaagagtttcagagttgaaacctgacttttttatcagaatgggagatgtgaaaagagtttaccatggagtaagcagagtatctgtagtctgacgctccaaagttgatgccatcaaacacgaaggccagggaattgatggtctgcgtcccggcgacaaactgaaccgagataaaagatgtctaattcagtgtctgaatcttgtgaaatgcttgcgtatggagcggcgttgtttcgatagccaggccagggcacgtccttaccgggatgcctctgtgaatgacttggatcacgggcacgtcgcttgtgaaaatgccagccccgaacctcatagcaagtcccagcacgacggtgagacccatgcccaggacaatgctcagctgcaaggcaaagaggaccattagcacggtatgacacctgggttgctgttgcaggaaaagggttgacaaggacctgatacacactgctgttctatattgtgactttacctgcaacacacgggatgtcgcggcagcgaccttcttactgtcgttcttggcgaacgcgcttgcaagcaccgcctgcagtcagtcaacaacagcaggattcaattcgtgagtcgtgacgcaccgtctggttatgaacgaagctcactacgccgactagtctaaaaaaaatggttgtaaacctgacctgtcctgccacggccaatccatcggcgagaagagacgtggccagccagagctggcagcagatctggaagcctgccatgacggtgggtccatggcgagcggccagggacgccgccagcgtgacgcagaacgtcaccgcgacaacccttgcgagcagcaggaatcctgaagcagaaacaaaaagttcaatctccttcctgagggtagatattattatccgggctctggattccaacggtatctcaccacatccaagaaacctcccaaatttcagagatttaatgctgggtgggataacgtgaactcgctggacgagccggcacagcagtatcaacgttatcatgtacctgcaataaggggagagagagagagaaaacagagagaggataagcttatcatagaaatagaaaagctgttatactttctctatcggggaaagcaagacgcgtgagcagtgtctgaaactcactgagaaacaacatgagcaatagccgcaccagtgacgcccatatggcaaacaaacatcaaaatcgggtccagtatgatgttcgccgcgtcgccaaccactgagaacagaaaagggttgttaggttagcaatgccggatgaggtctatcccaaagccttgctagtacttcggattttttt

SEQ ID NO: 963 - DNA, 3374 bp, Zea Mays
ctgttgtttttggaagttttatcttaaagttctgtgacttctgtccaacatgtctgatgttagaggggaagaaaaatcacatgatagagcgaagaactgccatcataagggaggcgatacatatgcggtattcattgttgccctacttctacacgctgttcagagaggctagtgtaaatggcattcctgtcatgcgtcctttatggttagaatttcctgacgataaagaaacttataacaatggcgaggcatttatggtggggcccagccttttagctcaaggaatatacgaagagggccagaaatcagtgtcggtctaccttcctgggaaggagtcatggtatgacttgagaaatggatctccatacaagggaagcgcgacacacaagctacaggttttagaagatagcattcccagcttccaaagggctggtacaattgtgccaagaaaggacagattcagacgcagttctactcagatggtgaatgatccatacactctggtgatagcactcaatagctcaggtgctggagaaggcgaactttatgtggatgacgggaaaagttatgagtaccagcaaggggcattcatccatcgccgatttgtctttgcagacaataagctaacttcattcaatattgggcctgacgatttgggcaagaaatttagaagtgattgcgtgattgaaagaattataatcctcggtttacgatccggagtgaagaaggctattattgagcctggaaatcaagaactagaaattgaatcagggccaattagtttaaggagtggttccagcccagtcgcgccaacaatccggaggcccaatgtttgcattgcagacagttggactataaggatagcataaaaggtaggccattcacatctggatcctgatgtctgatgtcttcttttgtctgctgtcaggttgcaaaattaggccagcctttagaagtttagttgtggccttgaaatatttgcatgtaactggtacttaagctgttccaactgccaattttgacataaatacttatatacattgctgatgtatattgtagctttgatacatgagcattttatcttgcaaaaatgatatacagttagtcagttacaaattctctgagaacatgacaatcgagttctttttttattttttatgtttctttatctgatgctataatgaggggtatagccttttatgtgtttatttatttttgcaagatgtatcggctatatgctgtcaaagactagaaggatttcgtgttctttcagcattatgtgttcctgattattggttgaaagccgatagagagggagtgagggacaaataactgatgggagttttcgggtatacactactatatgcttagtggagtatggattgttatcaaattgtctggttaacgttatcaaagcatcctggactggcactcagagggactctggtactacacgtctcttttatcgctgttattttgctgcttccacgcagtaaaacagttcttgcaaggtctcatcaaacagctaaaaaaatagcttgcacaaagggggggaaaaggagaaaagaatggagttactagagagacactttaccgatgtatggtattaaactgacatcctggcatgatacaacataaatcaacggagcaacgtaaactctccacgcaaggccacaagtcagacgatcaggaggggatagtcccatagctacatctacctccgatatccgaagctttaaacaccagcagaacacgtactatacttcgctgatgctacatgagaggcgcatgcgcagcgcggcgcagccttatctgtcagcagtgtgccgcagatcatcagttccaagccaatccatcatcagttccggagaaacgtccatggtcccctcgctgcccccatcctccaggtgctagctatggtcctcagactcatgtagatcgtcaatgcgatccatataccgatgaatccgttatgcgcagaaaggtacagcaggcatggtatcgacacagacgcaacagcaacctgaagattctcattcaggtccattttcattgttgggaagagtttcagagttgaaacctgacttttttatcagaatgggagatgtgaaaagagtttaccatggagtaagcagagtatctgtagtctgacgctccaaagttgatgccatcaaacacgaaggccagggaattgatggtctgcgtcccggcgacaaactgaaccgagataaaagatgtctaattcagtgtctgaatcttgtgaaatgcttgcgtatggagcggcgttgtttcgatagccaggccagggcacgtccttaccgggatgcctctgtgaatgacttggatcacgggcacgtcgcttgtgaaaatgccagccccgaacctcatagcaagtcccagcacgacggtgagacccatgcccaggacaatgctcagctgcaaggcaaagaggaccattagcacggtatgacacctgggttgctgttgcaggaaaagggttgacaaggacctgatacacactgctgttctatattgtgactttacctgcaacacacgggatgtcgcggcagcgaccttcttactgtcgttcttggcgaacgcgcttgcaagcaccgcctgcagtcagtcaacaacagcaggattcaattcgtgagtcgtgacgcaccgtctggttatgaacgaagctcactacgccgactagtctaaaaaaaatggttgtaaacctgacctgtcctgccacggccaatccatcggcgagaagagacgtggccagccagagctggcagcagatctggaagcctgccatgacggtgggtccatggcgagcggccagggacgccgccagcgtgacgcagaacgtcaccgcgacaacccttgcgagcagcaggaatcctgaagcagaaacaaaaagttcaatctccttcctgagggtagatattattatccgggctctggattccaacggtatctcaccacatccaagaaacctcccaaatttcagagatttaatgctgggtgggataacgtgaactcgctggacgagccggcacagcagtatcaacgttatcatgtacctgcaataaggggagagagagagagaaaacagagagaggataagcttatcatagaaatagaaaagctgttatactttctctatcggggaaagcaagacgcgtgagcagtgtctgaaactcactgagaaacaacatgagcaatagccgcaccagtgacgcccatatggcaaacaaacatcaaaatcgggtccagtatgatgttcgccgcgtcgccaaccactgagaacagaaaagggttgttaggttagcaatgccggatgaggtctatcccaaagccttgctagtacttcggattttttt

SEQ ID NO: 964 - DNA, 518 bp, Zea Mays
gggcactaaaaactatatatatatgcttgcctgaagctcagaacatggtacgagcctacgagtacgactgactgtctgtgatgaatcaaccacacgttatagcgccggaaatagtacacatgtagttttagatgaccaggcaaggatgtgattacaatccgtgtaaactctgcttgaaaattgaaagatactacaaatcaaagatgagcacggactctggccgaaacactgggctattgtacaacaacaaggcggcattgccatcgcagttgcagtactagcaattgccatcgggattgcggttgcggtgttgcagtagtagtgctgtagtactatcaagtgagtctgatgcatgaacagagcagacggagtagttaaacggaggcgccggtgagcttgccgttgacgatgtggtggttgtcgtcgtccatgtagcgcttccagaaccagtgctgcttccacaccctctcggtcatctcctcgatgggcacgttcttggtgcagaccatgacgacgac

SEQ ID NO: 965 - DNA, 1490 bp, Zea Mays
ctgcccccctttcggcctttcctctcagtcctctctcgccactccgcctcgccgtccacacctccctctccgtgaaaattgctgagatggccatcgacaaggtggacgccaaggagagggagaagatcgaggccgtacgcaagctgctgtgcaagcaggcgccgctctccgcgaagcaggcgcagtactgcaacgacgcgtgcttggagcggttcctgcggtcgcggggggacagcgtcaagaaggcggcgaagcacctgaggaccgtcctctcatggagggagagcgtcggagctgatcacatcatggccgacgagttctccgccgagctcgccgacggcgtggccttcgtctccggccacgacgacgacggccgcccagtcgtggtgtttcgaatcaagcaggactaccccaagttccactctcagaaatcgctttttccgctcggcgtcggctttcctcaacctactcatgggcacgctcaagatcgtcgccgactactaccccggccgcctccaccgcgccttcgtcatcgacccgccctccctcttctccgtcctctggaagggggtgcggccgttcgtggagctggcgccagcgacggcggtggtgtgctccctggacttcgaggactcgctcgaggacgcgtctttcacggcgtacccgcggaccgcgtcgctgcggttcgagccggcggccgtcgtggggaagaacccgggcgtggggtcggtctcgtcgcggttctccgtcacccccaccgacaaccccatcaagccgtggtacctctccaccatccccacctcggtgggctcccgctccgtggtgcccacctccagcagcccgtcgctggtcggcgcgtccccgctctccgcgcgctccttctccttcgcctcgcccgccacgctgcgctccacggtcgccacgccgccgccgttcccgcgcggcgcgggcgcgcccctgacgccgtcctccgccgccaaggcccagaagaccccgccgcagccgcagcagttcccgcggacgccgcgcccgtcgttcctgcagtcgccgtcgatgctgttcgcgttccggaaggacgggcaggccagccgcgtggagcgcgagcgcgagtccttcctcccgtacctgcgcttctaccgccggccctacgacgagatttcctaccgcgccaagatgcgccccccgctcggcggcctcatatccatcgtcggcgacaagttcaggcagaagccggtgccgcagccgcagccgctgcgtcgccacgctgggctccaccaccagcaccattaccagcagcagcagaggatctgattctcgtctcgtcgctgcatggcgaccagagaatttttctccatacaccatagatccgatgctatattatgccaagttccaactttttttcccctccagtgcttagtgcctatgatattcttgaatccatgtataataacatcccgaaaaatgtgagtaaaatcgacccctttctgcac

SEQ ID NO: 966 - DNA, 1787 bp, Zea Mays
ctttcacaacctgtgtacctgactaaccccgtgacgtcggagggtggaggctttgcctaaaccctcgttgctggccccttaacctcaccctaacccggccatggtgagctcggatccggacgggaacggaggcgcgccggacgtctccgagcttttctgccactacaactccctctacttccgcgattccctcggttcgtgcgctgtctcatggaccgaggacccactacctgattgtgatgtaagcacatgtgactattatccgggaggtggtggctgtataatactgctttccaaatcattatgcgggtctcataatggatctgatctgaagaatgctttgcttcatgagatgattcatgcctatatttgcatcaaagacaataacagtaaccatagtgatcatggtgcaaaatttcagaaactgatgaatacaatcaatttgagttctgtagctgatccccatgtgagttgaagtcctgcatcaactatgagctattctctgctccatgatgaatttctgtttaacatcattggttaattacattcagcgaccagttgatggctacagcataactctgctccatgagatccataagaaatattatcactacaaagtaagaatcaggattgcaataagcacactttaacctatatttttcacattaacatctagcaacctgtgcagtgtcaaagctgtgcagattttatcaagtcaaccaatatgagaggaccttctggtgatgactgcattgagagaaaaggtgtagatgacccatgtcataattctaactgtcactggcatagacacaagcagcagtgttcgggtaattattgtagagttcaagaatcatcaccaggaggtccagaactaaaatgtttggaagaagcattcaatgagggcaaggttgaagaacctgcctgtacaagttggcacaccacacatacatcaaataagagcagaagaagcaataaaaacgagcgggaagatgcctctgtggagttccttcatgttgcacataatgcagttgtctgttcaggactggattcctcttcaaaagacaggtccaataagaaaatcaaaatttcaaaggatgttaactctgaccttggaaggacagaaactgttcaggaagcaccaaaacgcagaagaacagctgtactagataaccaagagtgcagcagacggaagaaaaggaaacaaagcaatcggtgtggttcctattcggtaataattgaatggttgaattactattgtcttagtgagtcggatgaagatgaggtgccgttgatcaataagcgaacagaaagaaggcgccgacaaagattacatgaaatgtatctagccagggaatccaatgatgttgagtttggcagctcaacttctcataaggttggttcttgctcactagctcccaaggacaataacaaaggtgaaagtgtgccagcttctcaacctgaagaaagatcctgctcaagtcatcctgtgagtagcaacggagttgctggaaatcaagctggtcatgaacatatgtcttctccaacggattcaccaattagaggtgaaattgtagacatttcagatggttgagtgcaagagttccgcgttagttccttgtagctggatcctggatgaaataatatacagtgtaatggctataaagaccctgggttttcctatgcaccttccaactgctagacatgcgcacactgccaagcagcctttgtactgttttccccccttcatctagcctttgtatataagcttatttgttcctttctgcatt

SEQ ID NO: 967 - DNA, 3562 bp, Zea Mays
ccacgttcgtgctcgctgcgttggttctcagctcagattttagtgcgtacattggcgtgaacattggcacggccatgtcgtcggtgccagcgccgacgcagatcaccacgctgctccggtcgcagaacatccgccacgtgcgtctctacgacgcggacccggcgatgctggcggcgctgtccaacaccggcatccgcgtcatcgtgtccgtgcccaacgagcagctgctggccatcggcaactcgaacgcgacggcggccaactgggtggcgcgcaacgtggccgcgcacttccccgccgtgaacatcacggccatcgccgtggggtccgaggtgctctcggcgcagccgagcgcggcgccgctgctcatgcccgccatgcgctacctccagaacgcgctggtggccgcggcgctggaccggtacatcaaggtctcgacgccgcactcgtcgtccatcatcctcgactcgttcccgccgtcccaggccttcttcaaccggtcgctggacggcgtgctggtgccgatgctcaggttcctgcagtccacggggtcgccgctcatgctcaacgtgtacccttactacgactacatgcgctccaacggcgtcatcccgctggactacgcgctgttccggccgctgccgcccaacaaggaggccgtggacgccaacaccctgctgcactacaccaacgtgttcgacgcggtggtggacgccgcctacttcgccatggcgtacctgaacgtcaccaacgtgccggtgatggtgacggagaccgggtggccgcacaagggcgactcctcctccgagcccgacgccacctctgacaacgccgacacgtacaacagcaacctcatccgccacgtgatgaacagcaccggcacgccgaagcaccccggggtggccgtgccgacctacgtctacgagctgtacgacgaggacacccgcccgggctccacgtcggagaagtactggggcctgttcgacatgaacggcgtccctgcctacaccctgcacctgacgggctccggcgtcctgctggccaacgacacgacgaaccagacctactgcgtggcgcgggagggcgcggaccccaagatgctgcaggcggcgctggactgggcgtgcggccccgggaaggtggactgctccgtgctgatgcagggccagccgtgctacgacccggacaccgtggacgcgcacgccacgtacgccttcaacgcctactaccacggcatgggaatgggctccgggacgtgctacttcagcggcgtcgcggtggtcacgacgaccgacccgagtcacggatcttgtgtttatgctgggaagaacgggacgtcgttgatgaacggcacctccctggcgccgtcgtccaactccacggagggaggctccggcgcgcaccgggcgttcggcgacgtctcgtcactcgtccgcatcgtctccaccgcgctgctcttcagcgtcgtcctcctcctgttgtaggcagtagttagtactagaggtagaaggcaccttggaatggaaccatgcagtctttgcagaattaggcattcgtgagggagagggagggataattctttttgctgtcaagtggcgggccgggaatgttctgaggctctattctcccgtctggtattggtatggtatggaacaaaaattggtttgcatcccagcagttgctcacctacactgccggttggtcgagtgtgaggcaaacagttttaggctgctagatgggctgggccgaacaatgtcatttttggcccacgcggcaagaatgggcatagttgtaatttgcccggtcagccgtgcgcatgccctaaccaaggcctatataaggctgcaaaggcatcgcactcgttccacctgtgcgccgccgtcttcgttactcagcaacaatttctttggcatctcctttcgcagtttctgtcctcgaaaattctgcttcttgtctcgctctctggtcgcaaatttgctctgaaatcttgttctattttcttggtttagtttttctcgagcactcttcgcgttttgaaagatctgaagcccctggtcgccgttttgcggatcctggcttcggttttctgaagagatgcgatatcatacctctggacctctggacatgcgggttcgttctatacatcctcgcattttctcgaaggtccaacaatctgcttcaaatacaccagtgaatcataagaattgttcttggcagtttgcattttttttgttttttctattttttgctatgtgaatctatttgaatgaatcatatgcatcttgaatccgtgacgacgaatcgatggctcgatgatgattattcttgctttaaccacaccgaactaaaggctattggaagggtgctttcttccttcctccatttgcgccaggctcctctttcttggtgtttcctcatgaaaccttgctttcttgttgaagaatgcagttcctgttttcttccgcgagagtgcgaggtagaaggattcggtaagatttggtagcgtagcaaggggggaaagctggaggcctcgtccgctggttcttggcttgtagaaaaacctggcctttctctgagagcctttgccctgtatttgcaattgatacccctctttgaataagtatttcccccttttcaagccaatatgttccgctgatcaattatttatatgggtgttggacgataatctggaataaaatttgtcgctaacaaaacatattatgaaagtgattcggattattaaaatgattcttaatctgagatatatataaccatctagttacaaaacagttaactattcgcggacaggccggtctgccggtgcacaacctgcgagcgtcattgcatatctggtactttgaactaaattcccagagtgcaggagcccactaatcccttccaaatccgagcttcggtccctgctgctccccagctacccgcaggccgcagcaatggtgccgctttgttacgtagtccttatgtttcagacattctgcacaagaccacaacacaaatttacgaaaattttagtctatctgaacggccaaatttttgtgtcaaatcaattttggatatgtacttggctgtttcagatatccaaatcgtatctgttttctcagattaagataagcttgtacaattttaatgccgatgataatatatgttttggttgtttttaaataatcgtcctgtgcttatttattcgaaaatatactttgcgctgcagcttcggagcattgcactgaaaaataaaaaaaatgtcgtattaatcagaccgtaaaaaatggcactttattttgatttaagtgtgtagccacatatactccctaactttcccccttccatctattagtgtgtgatgtgtaactgccaaccaccagcaacgattcactgtgtttgctccagcttttttctcgggctgtcatgtcgcatcatatacatttaagaattaagatcgtttagccaaaagctcgtttgattggacccggtcttccgcgctgtcctttctattaatgctgtactatcttggtgcagcagctgagcaaccactggcaactggaat

SEQ ID NO: 968 - DNA, 1296 bp, Zea Mays
ctcgcagcgcttctcgatcgcgcccgtccgtccacgtgtgcttggccctgtgcgctgttctcctggtggacggaggcgggcggtgcaacgtctgcgccgcgcccgagtgagcggtgcacggtgcttcagttgccgccccgcgaagctttaaaagcaaaccgagagcgcacgtagagacatcccagcagcaggtagcagcagcgcatgactttgtatctgcaactcgtttcgactagcctgcacgccgggagccctcgtctcgcccttctccacctccgaagatcctgcgagttcaacccgcgagtgagcatgtcgtcctactccccgccgccgccgccgccgcgggaccagtccatggacaccgaggcacccaacgcgcccatcaccagggagcggaggctcaaccccgatctgcaggagcagctccccaagccatatctcgcgagagctctcgaggcggtggacccgagccacccgcaggggaccaaggggcgcgacccccgcggcatgagcgtgcttcagcagcacgccgccttcttcgaccgcaatggcgacggcgtcatctacccctgggagacgtttcaaggactgcgagcgataggatgtggactcactgtatcattcgcgttctccatactgatcaacctcttcctcagttatcccactcagccggttggccgctgccggtgaatggctcttactctacagcttggcgaaagacaaggatggcctcttgcagcgcgaaactgtccgtggtctatttgatgggagcctatttgagcgactggaagacgacaacaacaagaagaaatcgtcctgaatgctgagcagccttgtacagctcagggaagtgctgtcagtacaaaactaccagatataccattggtcgtgttcaaataacaaatgcttcggctttgttcatccgtcattaactatgagtgctgggatttgtttgtatgtgtgtcgtgctaccagtttcttctcctgtcgtctcacacaggtactgtattacgcatgtgttttctagtgtccgtgcggaagctgtattataagctgaaatatgtgcgtttgaaatttactagttaggcctagtttgggtactcttgattgaagtggtttggagggattgaagagtgtttaaatcctcaatagatcaaaaactctcccaatacatctcaatccacttcaatctgtctcattcctagagtatccaaaccaagccttaagggtgcgcgccctgcgcgcgtgtattgtatgcttaaaatatattgacagatgtgtgcgtttgaaatttac

SEQ ID NO: 969 - DNA, 1034 bp, Zea Mays
ctcgcagcgcttctcgatcgcgcccgtccgtccacgtgtgcttggccctgtgcgctgttctcctggtggacggaggcgggcggtgcaacgtctgcgccgcgcccgagtgagcggtgcacggtgcttcagttgccgccccgcgaagctttaaaagcaaaccgagagcgcacgtagagacatcccagcagcaggtagcagcagcgcatgactttgtatctgcaactcgtttcgactagcctgcacgccgggagccctcgtctcgcccttctccacctccgaagatcctgcgagttcaacccgcgagtgagcatgtcgtcctactccccgccgccgccgccgccgcgggaccagtccatggacaccgaggcacccaacgcgcccatcaccagggagcggaggctcaaccccgatctgcaggagcagctccccaagccatatctcgcgagagctctcgaggcggtggacccgagccacccgcaggggaccaaggggcgcgacccccgcggcatgagcgtgcttcagcagcacgccgccttcttcgaccgcaatggcgacggcgtcatctacccctgggagacgtttcaaggactgcgagcgataggatgtggactcactgtatcattcgcgttctccatactgatcaacctcttcctcagttatcccactcagccggttggccgctgccggtgaatggctcttactctacagcttggcgaaagacaaggatggcctcttgcagcgcgaaactgtccgtggtctatttgatgggagcctatttgagcgactggaagacgacaacaacaagaagaaatcgtcctgaatgctgagcagccttgtacagctcagggaagtgctgtcagtacaaaactaccagatataccattggtcgtgttcaaataacaaatgcttcggctttgttcatccgtcattaactatgagtgctgggatttgtttgtatgtgtgtcgtgctaccagtttcttctcctgtcgtctcacacagagtatcttcctcctgcactgaataagacaacact

SEQ ID NO: 970 - DNA, 667 bp, Zea Mays
gcaacgtctgcgccgcgcccgagtgagcggtgcacggtgcttcagttgccgccccgcgaagctttaaaagcaaaccgagagcgcacgtagagacatcccagcagcaggtagcagcagcgcatgactttgtatctgcaactcgtttcgactagcctgcacgccgggagccctcgtctcgcccttctccacctccgaagatcctgcgagttcaacccgcgagtgagcatgtcgtcctactccccgccgccgccgccgccgcgggaccagtccatggacaccgaggcacccaacgcgcccatcaccagggagcggaggctcaaccccgatctgcaggagcagctccccaagccatatctcgcgagagctctcgaggcggtggacccgagccacccgcaggggaccaaggggcgcgacccccgcggcatgagcgtgcttcagcagcacgccgccttcttcgaccgcaatggcgacggcgtcatctacccctgggagacgtttcaaggactgcgagcgataggatgtggactcactgtatcattcgcgttctccatactgatcaacctcttcctcagttatcccactcagccgagaattaattcagaaccagaatcaagatgtgattgagactaaattctgagagcggcaactggccaaaacctgagcggcg

SEQ ID NO: 971 - DNA, 1380 bp, Zea Mays
ccgcgaagctttaaaagcaaaccgagagcgcacgtagagacatcccagcagcaggtagcagcagcgcatgactttgtatctgcaactcgtttcgactagcctgcacgccgggagccctcgtctcgcccttctccacctccgaagatcctgcgagttcaacccgcgagtgagcatgtcgtcctactccccgccgccgccgccgccgcgggaccagtccatggacaccgaggcacccaacgcgcccatcaccagggagcggaggctcaaccccgatctgcaggagcagctccccaagccatatctcgcgagagctctcgaggcggtggacccgagccacccgcaggggaccaaggggcgcgacccccgcggcatgagcgtgcttcagcagcacgccgccttcttcgaccgcaatggcgacggcgtcatctacccctgggagacgtttcaaggactgcgagcgataggatgtggactcactgtatcattcgcgttctccatactgatcaacctcttcctcagttatcccactcagccgggatggttaccttctcctttgctgtccatccgtatagacaacatccacaagggtaagcacgggagtgattctgaaacttacgacactgaagggaggtttgatccatcaaagttcgatgctgtattcagtaagtatggtcgaacccatcctaatgctctaacaaaagacgagttgagctcaatgcttcaaggaaaccgcaatacgtacgatttccttggctggttggccgctgccggtgaatggctcttactctacagcttggcgaaagacaaggatggcctcttgcagcgcgaaactgtccgtggtctatttgatgggagcctatttgagcgactggaagacgacaacaacaagaagaaatcgtcctgaatgctgagcagccttgtacagctcagggaagtgctgtcagtacaaaactaccagatataccattggtcgtgttcaaataacaaatgcttcggctttgttcatccgtcattaactatgagtgctgggatttgtttgtatgtgtgtcgtgctaccagtttcttctcctgtcgtctcacacaggtactgtattacgcatgtgttttctagtgtccgtgcggaagctgtattataagctgaaatatgtgcgtttgaaatttactagttaggcctagtttgggtactcttgattgaagtggtttggagggattgaagagtgtttaaatcctcaatagatcaaaaactctcccaatacatctcaatccacttcaatctgtctcattcctagagtatccaaaccaagccttaagggtgcgcgccctgcgcgcgtgtattgtatgcttaaaatatattgacagatgtgtgcgtttgaaatttac

SEQ ID NO: 972 - DNA, 2921 bp, Zea Mays
cctgcttccacttgatggtcaaagtgtgcctaaactggaaaagctctacctcagttgcctgccaacactatatgttcgacatctctgccagtttgttgctctccagttgtctcggcaacccaaagaagtcgagatatatatcaggaaaagcaaagatgcatgcttgtcagccaattacacccgtaaatacgagacaaagccagaacaacctaatggtttagagagactgtgggaagagaagtctctttcggatctctacccttccctcgccacccgtcaaggagatctggtattctcactctccaaatgactgcccaagcactcctatttctacccttccctcgccacccgtcaaggagatctggcggcggcgcaggaggaagcaggggcgtccgcttctactgctggtgcggaagaggaggagcggcgagggtgattcggctgcaattcgttgcggcgctcgtgctcggggtggccgtgctgctgtcggcgctcttctggctcccgcccttcgcgggacagggtggcggcaaggagggctcggatccgggcgatgagtttggagctgctatagcggcaagctttaggctacacaagacagttcctgagctaagtggaaataaatcctagctcgtattggatatctgaggaagttggcattcctaattccacggtggttgtgaataagctacatccattagatggatcaaactggacaaacatcatcttcagcattgtccctttcccagagaacgcaactatatcatcaacatggttgagcattcttagatcaaagttcatgtccttggttgtacagcagtcaacaatccacttgactaagcctctattcgataattcatcatactttgaagtaattaaattcccaggaggaataacaattatccctccacaaactgcttttcttcttcagaagcctcatgcgacatttaattttactctgaactatccgatctacaaattacaagacaggactaatgagttaaaggatcaaatggaggcagcactactactcaatccatatgagctgtttgcgtgtccggctgcattgtcgaggagttacagatggaccagtccatgcagctgtacctcttgcgttcgccgccggaaaaaattgatggcagatcaaattccagaatgctccagcagggtgagaaagatcgtcatcaggttctaaaggatttctcaaagttgcttgatgatcaggagtttaatagtaagtattatcatccaagcaacgctaggatctggttctatggtgatgatgacccaaaagagcacacattctaagtgaataccttgatcaatttgaagatagccctgctcctaaatgttcggcagtggtgtgcatgaaggatttgagctccccgtgctctgctcgcccgccagtcgacatcccagtcttgtgctgcagatcggtgtgcccgtgcctgatagtggctagcagctctattcttaattactttgtttttccttttctgatcgaacgtttagatttagatgaatatggttttcacatcttcaaaatacacattacgggatttggtgtgggcggtctgcagagtacagagagatgtgaaacatgggcatcctaaacacctttcaaaagaattgaagaattgcatgttgaaaaatcttgccaaacttcagtgttataacctcatagggtatagtatatacttgtaaggaggaaaggcttgacaaattgaggttaaatttagacataatgaaatgtggcttaactatattaacaatttagagatcacgtatctaattttgtgccttagtgtgctacactattttaaatttgtttatggatggaatgaacaatctgataaatttaccctgatatagctgattatttgatttaatatgtaggcactgtgatactgtccatactatagtaatgagttgtgttatgtaatgctaatacttaacataactacctcacatgcctgatctattaatatgtccattatatatgtttggtttttctttgctttgtccacgttcagttttttttaaaaaaatctcctgaaatgagacaattagtgtggacataggattgtattttgttggttcttgttctgatctccagatatattcttgaaccatctttcccctcttgttaataatttctatttagaatcattaatctaggacacctatagcattatcaagttactccttgtgctgacgactttctgtattctgatttttgcatgcttaatgatattggtgttactctaatgactacagaaaatggcatcggatttcttgggtacttctagatttgggttgatgcgacttggtttgtctgtacagttttgatctagcaggttgtttttgatgatagagttgtctgacgccaagggtgtgaagcagaatttaaagcctaaaggccatttcaacttgtcagctaagggctcagatgactcgccctgcgagtttgatcttgagttgtttgatgttgtctatttaatacatgttgaattagcgttttagattttgattgtattggccttcctatttgcaggagagcaaagcagttgttgtcctaagaaccatatgctaccagaacaagaaagatgagagcggttggtggccaaggctcctgaaaaaggacctgtgttcttgaaggttgactggacaaatggtaggatgaggatgacgaagatgttggatgttagtatttcacttttggttgattatgttttttcttatgcgcctgacaaatctagatatgcaaccagacatgctttattcttgttcctgttttgttttccttatgtattaattacttcacttgtaatgcacatgatgttttccttatgtattaatttcttaacttgtaatgcacatgatgttttccttatgtattaattccttaacttttaaagcac

SEQ ID NO: 973 - DNA, 2644 bp, Zea Mays
gtcggcgctcttctggctcccgcccttcgcgggacagggtggcggcaaggagggctcggatccgggcgatgagtttggagctgctatagcggcaagctttaggctacacaagacagttcctgagctaagtggaaataaatcctagctcgtattggatatctgaggaagttggcattcctaattccacggtggttgtgaataagctacatccattagatggatcaaactggacaaacatcatcttcagcattgtccctttcccagagaacgcaactatatcatcaacatggttgagcattcttagatcaaagttcatgtccttggttgtacagcagtcaacaatccacttgactaagcctctattcgataattcatcatactttgaagtaattaaattcccaggaggaataacaattatccctccacaaactgcttttcttcttcagaagcctcatgcgacatttaattttactctgaactatccgatctacaaattacaagacaggactaatgagttaaaggatcaaatggaggcagcactactactcaatccatatgaggttagttgtaccttctggccttgtttctttgtgtttgtctgttcaattttatagcttcaaaggaggaaacatatgtacatgtaagatttgttcatttgatctccagctgtttgcgtgtccggctgcattgtcgaggagttacagatggaccagtccatgcagctgtacctcttgcgttcgccgccggaaaaaattgatggcagatcaaattccagaatgcaacaaattccaaatcattcggtggcttacgttcttttcaaattgataacgtggtgatgaaagatcgggtcatgctgacttgtagttcaatatggccagcagctccagcagggtgagaaagatcgtcatcaggttctaaaggatttctcaaagttgcttgatgatcaggagtttaatagtaagtattatcatccaagcaacgctaggatctggttctatggtgatgatgacccaaaagagcacacattctaagtgaataccttgatcaatttgaagatagccctgctcctaaatgttcggcagtggtgtgcatgaaggatttgagctccccgtgctctgctcgcccgccagtcgacatcccagtcttgtgctgcagatcggtgtgcccgtgcctgatagtggctagcagctctattcttaattactttgtttttccttttctgatcgaacgtttagatttagatgaatatggttttcacatcttcaaaatacacattacgggatttggtgtgggcggtctgcagagtacagagagatgtgaaacatgggcatcctaaacacctttcaaaagaattgaagaattgcatgttgaaaaatcttgccaaacttcagtgttataacctcatagggtatagtatatacttgtaaggaggaaaggcttgacaaattgaggttaaatttagacataatgaaatgtggcttaactatattaacaatttagagatcacgtatctaattttgtgccttagtgtgctacactattttaaatttgtttatggatggaatgaacaatctgataaatttaccctgatatagctgattatttgatttaatatgtaggcactgtgatactgtccatactatagtaatgagttgtgttatgtaatgctaatacttaacataactacctcacatgcctgatctattaatatgtccattatatatgtttggtttttctttgctttgtccacgttcagttttttttaaaaaaatctcctgaaatgagacaattagtgtggacataggattgtattttgttggttcttgttctgatctccagatatattcttgaaccatctttcccctcttgttaataatttctatttagaatcattaatctaggacacctatagcattatcaagttactccttgtgctgacgactttctgtattctgatttttgcatgcttaatgatattggtgttactctaatgactacagaaaatggcatcggatttcttgggtacttctagatttgggttgatgcgacttggtttgtctgtacagttttgatctagcaggttgtttttgatgatagagttgtctgacgccaagggtgtgaagcagaatttaaagcctaaaggccatttcaacttgtcagctaagggctcagatgactcgccctgcgagtttgatcttgagttgtttgatgttgtctatttaatacatgttgaattagcgttttagattttgattgtattggccttcctatttgcaggagagcaaagcagttgttgtcctaagaaccatatgctaccagaacaagaaagatgagagcggttggtggccaaggctcctgaaaaaggacctgtgttcttgaaggttgactggacaaatggtaggatgaggatgacgaagatgttggatgttagtatttcacttttggttgattatgttttttcttatgcgcctgacaaatctagatatgcaaccagacatgctttattcttgttcctgttttgttttccttatgtattaattacttcacttgtaatgcacatgatgttttccttatgtattaatttcttaacttgtaatgcacatgatgttttccttatgtattaattccttaacttttaaagcac

SEQ ID NO: 974 - DNA, 2002 bp, Zea Mays
atgagtttggagaagcctcatgcgacatttaattttactctgaactatccgatctacaaattacaagacaggactaatgagttaaaggatcaaatggaggcagcactactactcaatccatatgagctgtttgcgtgtccggctgcattgtcgaggagttacagatggaccagtccatgcagctgtacctcttgcgttcgccgccggaaaaaattgatggcagatcaaattccagaatgctccagcagggtgagaaagatcgtcatcaggttctaaaggatttctcaaagttgcttgatgatcaggagtttaatagtaagtattatcatccaagcaacgctaggatctggttctatggtgatgatgacccaaaagagcacacattctaagtgaataccttgatcaatttgaagatagccctgctcctaaatgttcggcagtggtgtgcatgaaggatttgagctccccgtgctctgctcgcccgccagtcgacatcccagtcttgtgctgcagatcggtgtgcccgtgcctgatagtggctagcagctctattcttaattactttgtttttccttttctgatcgaacgtttagatttagatgaatatggttttcacatcttcaaaatacacattacgggatttggtgtgggcggtctgcagagtacagagagatgtgaaacatgggcatcctaaacacctttcaaaagaattgaagaattgcatgttgaaaaatcttgccaaacttcagtgttataacctcatagggtatagtatatacttgtaaggaggaaaggcttgacaaattgaggttaaatttagacataatgaaatgtggcttaactatattaacaatttagagatcacgtatctaattttgtgccttagtgtgctacactattttaaatttgtttatggatggaatgaacaatctgataaatttaccctgatatagctgattatttgatttaatatgtaggcactgtgatactgtccatactatagtaatgagttgtgttatgtaatgctaatacttaacataactacctcacatgcctgatctattaatatgtccattatatatgtttggtttttctttgctttgtccacgttcagttttttttaaaaaaatctcctgaaatgagacaattagtgtggacataggattgtattttgttggttcttgttctgatctccagatatattcttgaaccatctttcccctcttgttaataatttctatttagaatcattaatctaggacacctatagcattatcaagttactccttgtgctgacgactttctgtattctgatttttgcatgcttaatgatattggtgttactctaatgactacagaaaatggcatcggatttcttgggtacttctagatttgggttgatgcgacttggtttgtctgtacagttttgatctagcaggttgtttttgatgatagagttgtctgacgccaagggtgtgaagcagaatttaaagcctaaaggccatttcaacttgtcagctaagggctcagatgactcgccctgcgagtttgatcttgagttgtttgatgttgtctatttaatacatgttgaattagcgttttagattttgattgtattggccttcctatttgcaggagagcaaagcagttgttgtcctaagaaccatatgctaccagaacaagaaagatgagagcggttggtggccaaggctcctgaaaaaggacctgtgttcttgaaggttgactggacaaatggtaggatgaggatgacgaagatgttggatgttagtatttcacttttggttgattatgttttttcttatgcgcctgacaaatctagatatgcaaccagacatgctttattcttgttcctgttttgttttccttatgtattaattacttcacttgtaatgcacatgatgttttccttatgtattaatttcttaacttgtaatgcacatgatgttttccttatgtattaattccttaacttttaaagcac

SEQ ID NO: 975 - DNA, 2908 bp, Zea Mays
gtttggtcggtatatcgaagttgtagggaacgagtgatatatactgtctctagtttttgacatggtttgactacaaaattagggtagttttggtcggtatccttttattttctatgtgaccccgtgtactaaaatcgtggctaaatattttttaatgtattgtctatactctatacttacgagaagccgaaatgtaccccccacggccggcggcgcgtttgccaccgtccagttccatgtcggccaccgtgttctttctgcccgcaaatccaagctcgacggctagtcccgctaacactctccggcaacttacgccggcttccacctccggaaagctccacttcgcggcgttcccgctccgcctcccccgccatgcctgcgcaaggacctatcgctccgccgcattcgggaggggatcgcctgtggccgggcgtagagagaaggactactacgccacgctgaacatccgccgcgactccacgctccaggagatcaagtctgcctaccggattcttgcccgcaagtaccatcctgatatgaataagagtcctgaagcagaagaaaagttcaaggagatcagtgctgcatatgaggttctatctgatcaagacaaaagatcattatatgatcgctttggagaagaggggctcagcggtgactacagaaatggagatattggcacacatgggattgatccatatgaactcttcaatgctttctttggtagttccgacaaactttttggggatagtatggggtctgggggatttcattatagtgcagaagcaaaggacaatagggcacttaacatcagctataatctgctcctttcttttgaagagtccatcctcggaggcaaacgtgaaatcaatgtttttcgccatgaaacatgtggcacctgccatggaactggagctaaatgtagcaatgacattacagaatgcacccgatgcagaggtcaaggcaggttgatgaaaactcaaaggacaccttttggtatagtttctcagatatcttcatgcttaaattgtgaaggcagcgggaaggtaattactgaacattgcacagaatgttacggttcgggcagagtccaaattgaacgcattatcaaagtagatatacctggaggtattgatgatggctccaccattcgaattagtggtggaggtaatgttgataagcaaaggggtgcaagtggtgacctgtatatatttgttcgcgttaataaaaaacaaggcatccacagagatggtctcaatctgtactcagatgcttcagttgattatactgatgtgattttaggtaccacagtgaaggttgaaacaatagaaggactcaaggatcttcacattcctcctggcacccagcctggagagaacttaaaattttctcagctgggagttcccgacattaagaagcctaatgtcagaggagatcactacttcatgataaaggtggtcattactgaggtgggggatggcacaaatacaaagttttggaaggataagtggttatatggttggcagctgcagcctgaggttgaggataaacatgttttcagtattgctcctaatggcatctattcaacaaagattgcttacgagggcttctttttgggtggccaggaacgtttgctagttgaagagcttgctgcactaaagaaagctcagaatatctcagttccagaacctacaaagatagaaaattttcgggagagaaaccatcatccatctgcaaagagaagatcattctggggacgtgtctggaattttttcagggatgataaaggtgataaaagatttgcttcaatcagtgtgcaacctattatcccaggatggaattcttgccgaggaactgatacggctgtccccttgctattaaaaggattcctcatgaccgcaatattcttatttgtaatcagaagtaaactcagcttcgtcctgggaaaagaatccggctttgcttgcagtgtatggtatccagacgcagcagtacagaagacacctgcagcaattccgagttttgacgaaagccacatgaaagacatgaagaaacatggccgtaggctaatgtacactaccgagacaagcgccgcagcccgcagcagaaggctcgcgacatcagctcgagccagctgacgggatccacacggtgccatgtcttcccggcggccgtcgcatccgtcccaccggaatccacggcgattcccgtccgcctgctatcttctagtactcacccttgccctcctcgtcgtctccgccgccgccaagtcctcccgccgccccatctccgacaacgagatccggcagaagaaggaggcctgctacaccgacgtcgagaacgggctgtggggatgggtgtgcaggtactcgccgacggagaaggagaactgcgtgctgcgctgcctctcgccggagtgctacgacctcatatacggcggggatccgcttgaggaaggggagttggactatgttcgaagccaggagtacaagtattgtatgcacaaatcatcccttggagaaagcttggatggtgtgaagggatccttcagctactcatgaaggaatgagaagaaaaaggttctgttagtctgctgtaaattttatttacaatcttgaacagacatgcatctttttagataatggaattgtaattccagactttgctttttctcaaagcatcaccggtgcatcatcttatattaaacttacaaatgcaaattaaacattggattcatttgttggccacaccaatatttcgtgcatatgaatatcacaaagttacaattcgttgaaataataattttagccaacacttgcagcaccaattgagggattttttaagggggcaactgagggagttttttaacggaccaaccgtggaaatttgtaaatagtctaaaaagaac

SEQ ID NO: 976 - DNA, 3006 bp, Zea Mays
ggtagttttggtcggtatccttttattttctatgtgaccccgtgtactaaaatcgtggctaaatattttttaatgtattgtctatactctatacttacgagaagccgaaatgtaccccccacggccggcggcgcgtttgccaccgtccagttccatgtcggccaccgtgttctttctgcccgcaaatccaagctcgacggctagtcccgctaacactctccggcaacttacgccggcttccacctccggaaagctccacttcgcggcgttcccgctccgcctcccccgccatgcctgcgcaaggacctatcgctccgccgcattcgggaggggatcgcctgtggccgggcgtagagagaaggactactacgccacgctgaacatccgccgcgactccacgctccaggagatcaagtctgcctaccggattcttgcccgcaagtaccatcctgatatgaataagagtcctgaagcagaagaaaagttcaaggagatcagtgctgcatatgaggttctatctgatcaagacaaaagatcattatatgatcgctttggagaagaggggctcagcggtgactacagaaatggagatattggcacacatgggattgatccatatgaactcttcaatgctttctttggtagttccgacaaactttttggggatagtatggggtctgggggatttcattatagtgcagaagcaaaggacaatagggcacttaacatcagctataatctgctcctttcttttgaagagtccatcctcggaggcaaacgtgaaatcaatgtttttcgccatgaaacatgtggcacctgccatggaactggagctaaatgtagcaatgacattacagaatgcacccgatgcagaggtcaaggcaggttgatgaaaactcaaaggacaccttttggtatagtttctcagatatcttcatgcttaaattgtgaaggcagcgggaaggtaattactgaacattgcacagaatgttacggttcgggcagagtccaaattgaacgcattatcaaagtagatatacctggaggtattgatgatggctccaccattcgaattagtggtggaggtaatgttgataagcaaaggggtgcaagtggtgacctgtatatatttgttcgcgttaataaaaaacaaggcatccacagagatggtctcaatctgtactcagatgcttcagttgattatactgatgtgattttaggtaccacagtgaaggttgaaacaatagaaggactcaaggatcttcacattcctcctggcacccagcctggagagaacttaaaattttctcagctgggagttcccgacattaagaagcctaatgtcagaggagatcactacttcatgataaagtggccaggaacgtttgctagttgaagagcttgctgcactaaagaaagctcagaatatctcagttccagaacctacaaagatagaaaattttcgggagagaaaccatcatccatctgcaaagagaagatcattctggggacgtgtctggaattttttcagggatgataaaggtgataaaagatttgcttcaatcagtgtgcaacctattatcccaggatggaattcttgccgaggaactgatacggctgtccccttgctattaaaaggattcctcatgaccgcaatattcttatttgtaatcagaagtaaactcagcttcgtcctgggaaaagaatccggctttgcttgcagtgtatggtatccagacgcagcagtacagaagacacctgcagcaattccgagttttgacgaaagccacatgaaagacatgaagaaacatggccgtaggctaatgtacactgtatgtatcttgtctgcacaaagttttgtaaccatcccggcttgatatcgtttaacgattttgttgcaacataattcataagcactgaatttatgcaaacaacagttctgacgcgagacgaattggaataatcacaattcacaaacacaacaatgctcctattcacaaaaaaaatgctcctatccatacagttcaaatgcctctgtcatgttcaaatggaaacgattcgtttcgctttgagacgaagcagttcaaatgcctctgccgtgttcaaatgaaaacgattcatttcgctttgagacgaagtagttcaaatgcctctgccatgttcgatcgatttccagaccgagacaagcgccgcagcccgcagcagaaggctcgcgacatcagctcgagccagctgacgggatccacacggtgccatgtcttcccggcggccgtcgcatccgtcccaccggaatccacggcgattcccgtccgcctgctatcttctagtactcacccttgccctcctcgtcgtctccgccgccgccaagtcctcccgccgccccatctccgacaacgagatccggcagaagaaggaggcctgctacaccgacgtcgagaacgggctgtggggatgggtgtgcaggtactcgccgacggagaaggagaactgcgtgctgcgctgcctctcgccggagtgctacgacctcatatacggcggggatccgcttgaggaaggggagttggactatgttcgaagccaggagtacaagtattgtatgcacaaatcatcccttggagaaagcttggatggtgtgaagggatccttcagctactcatgaaggaatgagaagaaaaaggttctgttagtctgctgtaaattttatttacaatcttgaacagacatgcatctttttagataatggaattgtaattccagactttgctttttctcaaagcatcaccggtgcatcatcttatattaaacttacaaatgcaaattaaacattggattcatttgttggccacaccaatatttcgtgcatatgaatatcacaaagttacaattcgttgaaataataattttagccaacacttgcagcaccaattgagggattttttaagggggcaactgagggagttttttaacggaccaaccgtggaaatttgtaaatagtctaaaaagaac

SEQ ID NO: 977 - DNA, 3205 bp, Zea Mays
gtatccttttattttctatgtgaccccgtgtactaaaatcgtggctaaatattttttaatgtattgtctatactctatacttacgagaagccgaaatgtaccccccacggccggcggcgcgtttgccaccgtccagttccatgtcggccaccgtgttctttctgcccgcaaatccaagctcgacggctagtcccgctaacactctccggcaacttacgccggcttccacctccggaaagctccacttcgcggcgttcccgctccgcctcccccgccatgcctgcgcaaggacctatcgctccgccgcattcgggaggggatcgcctgtggccgggcgtagagagaaggactactacgccacgctgaacatccgccgcgactccacgctccaggagatcaagtctgcctaccggattcttgcccgcaagtaccatcctgatatgaataagagtcctgaagcagaagaaaagttcaaggagatcagtgctgcatatgaggttctatctgatcaagacaaaagatcattatatgatcgctttggagaagaggggctcagcggtgactacagaaatggagatattggcacacatgggattgatccatatgaactcttcaatgctttctttggtagttccgacaaactttttggggatagtatggggtctgggggatttcattatagtgcagaagcaaaggacaatagggcacttaacatcagctataatctgctcctttcttttgaagagtccatcctcggaggcaaacgtgaaatcaatgtttttcgccatgaaacatgtggcacctgccatggaactggagctaaatgtagcaatgacattacagaatgcacccgatgcagaggtcaaggcaggttgatgaaaactcaaaggacaccttttgatatcttcatgcttaaattgtgaaggcagcgggaaggtaattactgaacattgcacagaatgttacggttcgggcagagtccaaattgaacgcattatcaaagtagatatacctggaggtattgatgatggctccaccattcgaattagtggtggaggtaatgttgataagcaaaggggtgcaagtggtgacctgtatatatttgttcgcgttaataaaaaacaaggcatccacagagatggtctcaatctgtactcagatgcttcagttgattatactgatgtgattttaggtaccacagtgaaggttgaaacaatagaaggactcaaggatcttcacattcctcctggcacccagcctggagagaacttaaaattttctcagctgggagttcccgacattaagaagcctaatgtcagaggagatcactacttcatgataaaggtgaaaatcccgaagagtatcagtggccaggaacgtttgctagttgaagagcttgctgcactaaagaaagctcagaatatctcagttccagaacctacaaagatagaaaattttcgggagagaaaccatcatccatctgcaaagagaagatcattctggggacgtgtctggaattttttcagggatgataaaggtgataaaagatttgcttcaatcagtgtgcaacctattatcccaggatggaattcttgccgaggaactgatacggctgtccccttgctattaaaaggattcctcatgaccgcaatattcttatttgtaatcagaagtaaactcaggtacactgggaagcgcattgaccgtccaactcaagctgaaatacctgttgagccagagtgaatttctgtcgtcttcatttctgaacgtttgcgacatcacagttttgatgatgatcataaatacgtaactttgccgcgcaaagcttcgtcctgggaaaagaatccggctttgcttgcagtgtatggtatccagacgcagcagtacaggttaacagaatatgggttgcttctcattagtcatttcttgattcattattccaatatgtagaagacacctgcagcaattccgagttttgacgaaagccacatgaaagacatgaagaaacatggccgtaggctaatgtacactgtatgtatcttgtctgcacaaagttttgtaaccatcccggcttgatatcgtttaacgattttgttgcaacataattcataagcactgaatttatgcaaacaacagttctgacgcgagacgaattggaataatcacaattcacaaacacaacaatgctcctattcacaaaaaaaatgctcctatccatacagttcaaatgcctctgtcatgttcaaatggaaacgattcgtttcgctttgagacgaagcagttcaaatgcctctgccgtgttcaaatgaaaacgattcatttcgctttgagacgaagtagttcaaatgcctctgccatgttcgatcgatttccagaccgagacaagcgccgcagcccgcagcagaaggctcgcgacatcagctcgagccagctgacgggatccacacggtgccatgtcttcccggcggccgtcgcatccgtcccaccggaatccacggcgattcccgtccgcctgctatcttctagtactcacccttgccctcctcgtcgtctccgccgccgccaagtcctcccgccgccccatctccgacaacgagatccggcagaagaaggaggcctgctacaccgacgtcgagaacgggctgtggggatgggtgtgcaggtactcgccgacggagaaggagaactgcgtgctgcgctgcctctcgccggagtgctacgacctcatatacggcggggatccgcttgaggaaggggagttggactatgttcgaagccaggagtacaagtattgtatgcacaaatcatcccttggagaaagcttggatggtgtgaagggatccttcagctactcatgaaggaatgagaagaaaaaggttctgttagtctgctgtaaattttatttacaatcttgaacagacatgcatctttttagataatggaattgtaattccagactttgctttttctcaaagcatcaccggtgcatcatcttatattaaacttacaaatgcaaattaaacattggattcatttgttggccacaccaatatttcgtgcatatgaatatcacaaagttacaattcgttgaaataataattttagccaacacttgcagcaccaattgagggattttttaagggggcaactgagggagttttttaacggaccaaccgtggaaatttgtaaatagtctaaaaagaac

SEQ ID NO: 978 - DNA, 2984 bp, Zea Mays
taaatattttttaatgtattgtctatactctatacttacgagaagccgaaatgtaccccccacggccggcggcgcgtttgccaccgtccagttccatgtcggccaccgtgttctttctgcccgcaaatccaagctcgacggctagtcccgctaacactctccggcaacttacgccggcttccacctccggaaagctccacttcgcggcgttcccgctccgcctcccccgccatgcctgcgcaaggacctatcgctccgccgcattcgggaggggatcgcctgtggccgggcgtagagagaaggactactacgccacgctgaacatccgccgcgactccacgctccaggagatcaagtctgcctaccggattcttgcccgcaagtaccatcctgatatgaataagagtcctgaagcagaagaaaagttcaaggagatcagtgctgcatatgaggttctatctgatcaagacaaaagatcattatatgatcgctttggagaagaggggctcagcggtgactacagaaatggagatattggcacacatgggattgatccatatgaactcttcaatgctttctttggtagttccgacaaactttttggggatagtatggggtctgggggatttcattatagtgcagaagcaaaggacaatagggcacttaacatcagagtccatcctcggaggcaaacgtgaaatcaatgtttttcgccatgaaacatgtggcacctgccatggaactggagctaaatgtagcaatgacattacagaatgcacccgatgcagaggtcaaggcaggttgatgaaaactcaaaggacaccttttggtatagtttctcagaattacatgttatgcatttctatcttattgtgcaggggtgcaagtggtgacctgtatatatttgttcgcgttaataaaaaacaaggcatccacagagatggtctcaatctgtactcagatgcttcagttgattatactgatgtgattttaggtaccacagtgaaggttgaaacaatagaaggactcaaggatcttcacattcctcctggcacccagcctggagagaacttaaaattttctcagctgggagttcccgacattaagaagcctaatgtcagaggagatcactacttcatgataaagtggccaggaacgtttgctagttgaagagcttgctgcactaaagaaagctcagaatatctcagttccagaacctacaaagatagaaaattttcgggagagaaaccatcatccatctgcaaagagaagatcattctggggacgtgtctggaattttttcagggatgataaaggtgataaaagatttgcttcaatcagtgtgcaacctattatcccaggatggaattcttgccgaggaactgatacggctgtccccttgctattaaaaggattcctcatgaccgcaatattcttatttgtaatcagaagtaaactcaggtacactgggaagcgcattgaccgtccaactcaagctgaaatacctgttgagccagagtgaatttctgtcgtcttcatttctgaacgtttgcgacatcacagttttgatgatgatcataaatacgtaactttgccgcgcaaagcttcgtcctgggaaaagaatccggctttgcttgcagtgtatggtatccagacgcagcagtacaggttaacagaatatgggttgcttctcattagtcatttcttgattcattattccaatatgtagaagacacctgcagcaattccgagttttgacgaaagccacatgaaagacatgaagaaacatggccgtaggctaatgtacactgtatgtatcttgtctgcacaaagttttgtaaccatcccggcttgatatcgtttaacgattttgttgcaacataattcataagcactgaatttatgcaaacaacagttctgacgcgagacgaattggaataatcacaattcacaaacacaacaatgctcctattcacaaaaaaaatgctcctatccatacagttcaaatgcctctgtcatgttcaaatggaaacgattcgtttcgctttgagacgaagcagttcaaatgcctctgccgtgttcaaatgaaaacgattcatttcgctttgagacgaagtagttcaaatgcctctgccatgttcgatcgatttccagaccgagacaagcgccgcagcccgcagcagaaggctcgcgacatcagctcgagccagctgacgggatccacacggtgccatgtcttcccggcggccgtcgcatccgtcccaccggaatccacggcgattcccgtccgcctgctatcttctagtactcacccttgccctcctcgtcgtctccgccgccgccaagtcctcccgccgccccatctccgacaacgagatccggcagaagaaggaggcctgctacaccgacgtcgagaacgggctgtggggatgggtgtgcaggtactcgccgacggagaaggagaactgcgtgctgcgctgcctctcgccggagtgctacgacctcatatacggcggggatccgcttgaggaaggggagttggactatgttcgaagccaggagtacaagtattgtatgcacaaatcatcccttggagaaagcttggatggtgtgaagggatccttcagctactcatgaaggaatgagaagaaaaaggttctgttagtctgctgtaaattttatttacaatcttgaacagacatgcatctttttagataatggaattgtaattccagactttgctttttctcaaagcatcaccggtgcatcatcttatattaaacttacaaatgcaaattaaacattggattcatttgttggccacaccaatatttcgtgcatatgaatatcacaaagttacaattcgttgaaataataattttagccaacacttgcagcaccaattgagggattttttaagggggcaactgagggagttttttaacggaccaaccgtggaaatttgtaaatagtctaaaaagaac

SEQ ID NO: 979 - DNA, 2807 bp, Zea Mays
gagaagccgaaatgtaccccccacggccggcggcgcgtttgccaccgtccagttccatgtcggccaccgtgttctttctgcccgcaaatccaagctcgacggctagtcccgctaacactctccggcaacttacgccggcttccacctccggaaagctccacttcgcggcgttcccgctccgcctcccccgccatgcctgcgcaaggacctatcgctccgccgcattcgggaggggatcgcctgtggccgggcgtagagagaaggactactacgccacgctgaacatccgccgcgactccacgctccaggagatcaagtctgcctaccggattcttgcccgcaagtaccatcctgatatgaataagagtcctgaagcagaagaaaagttcaaggagatcagtgctgcatatgaggttctatctgatcaagacaaaagatcattatatgatcgctttggagaagaggggctcagcggtgactacagaaatggagatattggcacacatgggattgatccatatgaactcttcaatgctttctttggtagttccgacaaactttttggggatagtatggggtctgggggatttcattatagtgcagaagcaaaggacaatagggcacttaacatcagctataatctgctcctttcttttgaagagtccatcctcggaggcaaacgtgaaatcaatgtttttcgccatgaaacatgtggcacctgccatggaactggagctaaatgtagcaatgacattacagaatgcacccgatgcagaggtcaaggcaggttgatgaaaactcaaaggacaccttttggtatagtttctcagatatcttcatgcttaaattgtgaaggcagcgggaaggtaattactgaacattgcacagaatgttacggttcgggcagagtccaaattgaacgcattatcaaagtagatatacctggaggtattgatgatggctccaccattcgaattagtggtggaggtaatgttgataagcaaaggggtgcaagtggtgacctgtatatatttgttcgcgttaataaaaaacaaggcatccacagagatggtctcaatctgtactcagatgcttcagttgattatactgatgtgattttaggtaccacagtgaaggttgaaacaatagaaggactcaaggatcttcacattcctcctggcacccagcctggagagaacttaaaattttctcagctgggagttcccgacattaagaagcctaatgtcagaggagatcactacttcatgataaaggtggtcattactgaggtgggggatggcacaaatacaaagttttggaaggataagtggttatatggttggcagctgcagcctgaggttgaggataaacatgttttcagtattgctcctaatggcatctattcaacaaagattgcttacgagggcttctttttgggtggccaggaacgtttgctagttgaagagcttgctgcactaaagaaagctcagaatatctcagttccagaacctacaaagatagaaaattttcgggagagaaaccatcatccatctgcaaagagaagatcattctggggacgtgtctggaattttttcagggatgataaaggtgataaaagatttgcttcaatcagtgtgcaacctattatcccaggatggaattcttgccgaggaactgatacggctgtccccttgctattaaaaggattcctcatgaccgcaatattcttatttgtaatcagaagtaaactcagcttcgtcctgggaaaagaatccggctttgcttgcagtgtatggtatccagacgcagcagtacagaagacacctgcagcaattccgagttttgacgaaagccacatgaaagacatgaagaaacatggccgtaggctaatgtacactgtatgtatcttgtctgcacaaagttttgtaaccatcccggcttgatatcgtttaacgattttgttgcaacataattcataagcactgaatttatgcaaacaacagttctgacgcgagacgaattggaataatcacaattcacaaacacaacaatgctcctattcacaaaaaaaatgctcctatccatacagttcaaatgcctctgtcatgttcaaatggaaacgattcgtttcgctttgagacgaagcagttcaaatgcctctgccgtgttcaaatgaaaacgattcatttcgctttgagacgaagtagttcaaatgcctctgccatgttcgatcgatttccagaccgagacaagcgccgcagcccgcagcagaaggctcgcgacatcagctcgagccagctgacgggatccacacggtgccatgtcttcccggcggccgtcgcatccgtcccaccggaatccacggcgattcccgtccgcctgctatcttctagtactcacccttgccctcctcgtcgtctccgccgccgccaagtcctcccgccgccccatctccgtacgtctccccgcctgacccgaccctgccatctctcctccgcccgcctctctagtctctatccatcccatcgcgcttaccgaactccgtggcgcaggacaacgagatccggcagaagaaggaggcctgctacaccgacgtcgagaacgggctgtggggatgggtgtgcaggtactcgccgacggagaaggagaactgcgtgctgcgctgcctctcgccggagtgctacgacctcatatacggcggggatccgcttgaggaaggggagttggactatgttcgaagccaggagtacaagtattgtatgcacaaattgaaggatcatattgtcgttaaggttgtcaagtcgtag

SEQ ID NO: 980 - DNA, 2764 bp, Zea Mays
gagaagccgaaatgtaccccccacggccggcggcgcgtttgccaccgtccagttccatgtcggccaccgtgttctttctgcccgcaaatccaagctcgacggctagtcccgctaacactctccggcaacttacgccggcttccacctccggaaagctccacttcgcggcgttcccgctccgcctcccccgccatgcctgcgcaaggacctatcgctccgccgcattcgggaggggatcgcctgtggccgggcgtagagagaaggactactacgccacgctgaacatccgccgcgactccacgctccaggagatcaagtctgcctaccggattcttgcccgcaagtaccatcctgatatgaataagagtcctgaagcagaagaaaagttcaaggagatcagtgctgcatatgaggttctatctgatcaagacaaaagatcattatatgatcgctttggagaagaggggctcagcggtgactacagaaatggagatattggcacacatgggattgatccatatgaactcttcaatgctttctttggtagttccgacaaactttttggggatagtatggggtctgggggatttcattatagtgcagaagcaaaggacaatagggcacttaacatcagctataatctgctcctttcttttgaagagtccatcctcggaggcaaacgtgaaatcaatgtttttcgccatgaaacatgtggcacctgccatggaactggagctaaatgtagcaatgacattacagaatgcacccgatgcagaggtcaaggcagatatcttcatgcttaaattgtgaaggcagcgggaaggtaattactgaacattgcacagaatgttacggttcgggcagagtccaaattgaacgcattatcaaagtagatatacctggaggtattgatgatggctccaccattcgaattagtggtggaggtaatgttgataagcaaaggggtgcaagtggtgacctgtatatatttgttcgcgttaataaaaaacaaggcatccacagagatggtctcaatctgtactcagatgcttcagttgattatactgatgtgattttaggtaccacagtgaaggttgaaacaatagaaggactcaaggatcttcacattcctcctggcacccagcctggagagaacttaaaattttctcagctgggagttcccgacattaagaagcctaatgtcagaggagatcactacttcatgataaaggtggtcattactgaggtgggggatggcacaaatacaaagttttggaaggataagtggttatatggttggcagctgcagcctgaggttgaggataaacatgttttcagtattgctcctaatggcatctattcaacaaagattgcttacgagggcttctttttgggtggccaggaacgtttgctagttgaagagcttgctgcactaaagaaagctcagaatatctcagttccagaacctacaaagatagaaaattttcgggagagaaaccatcatccatctgcaaagagaagatcattctggggacgtgtctggaattttttcagggatgataaaggtgataaaagatttgcttcaatcagtgtgcaacctattatcccaggatggaattcttgccgaggaactgatacggctgtccccttgctattaaaaggattcctcatgaccgcaatattcttatttgtaatcagaagtaaactcagcttcgtcctgggaaaagaatccggctttgcttgcagtgtatggtatccagacgcagcagtacagaagacacctgcagcaattccgagttttgacgaaagccacatgaaagacatgaagaaacatggccgtaggctaatgtacactgtatgtatcttgtctgcacaaagttttgtaaccatcccggcttgatatcgtttaacgattttgttgcaacataattcataagcactgaatttatgcaaacaacagttctgacgcgagacgaattggaataatcacaattcacaaacacaacaatgctcctattcacaaaaaaaatgctcctatccatacagttcaaatgcctctgtcatgttcaaatggaaacgattcgtttcgctttgagacgaagcagttcaaatgcctctgccgtgttcaaatgaaaacgattcatttcgctttgagacgaagtagttcaaatgcctctgccatgttcgatcgatttccagaccgagacaagcgccgcagcccgcagcagaaggctcgcgacatcagctcgagccagctgacgggatccacacggtgccatgtcttcccggcggccgtcgcatccgtcccaccggaatccacggcgattcccgtccgcctgctatcttctagtactcacccttgccctcctcgtcgtctccgccgccgccaagtcctcccgccgccccatctccgtacgtctccccgcctgacccgaccctgccatctctcctccgcccgcctctctagtctctatccatcccatcgcgcttaccgaactccgtggcgcaggacaacgagatccggcagaagaaggaggcctgctacaccgacgtcgagaacgggctgtggggatgggtgtgcaggtactcgccgacggagaaggagaactgcgtgctgcgctgcctctcgccggagtgctacgacctcatatacggcggggatccgcttgaggaaggggagttggactatgttcgaagccaggagtacaagtattgtatgcacaaattgaaggatcatattgtcgttaaggttgtcaagtcgtag

SEQ ID NO: 981 - DNA, 3012 bp, Zea Mays
gagaagccgaaatgtaccccccacggccggcggcgcgtttgccaccgtccagttccatgtcggccaccgtgttctttctgcccgcaaatccaagctcgacggctagtcccgctaacactctccggcaacttacgccggcttccacctccggaaagctccacttcgcggcgttcccgctccgcctcccccgccatgcctgcgcaaggacctatcgctccgccgcattcgggaggggatcgcctgtggccgggcgtagagagaaggactactacgccacgctgaacatccgccgcgactccacgctccaggagatcaagtctgcctaccggattcttgcccgcaagtaccatcctgatatgaataagagtcctgaagcagaagaaaagttcaaggagatcagtgctgcatatgaggttctatctgatcaagacaaaagatcattatatgatcgctttggagaagaggggctcagcggtgactacagaaatggagatattggcacacatgggattgatccatatgaactcttcaatgctttctttggtagttccgacaaactttttggggatagtatggggtctgggggatttcattatagtgcagaagcaaaggacaatagggcacttaacatcagctataatctgctcctttcttttgaagagtccatcctcggaggcaaacgtgaaatcaatgtttttcgccatgaaacatgtggcacctgccatggaactggagctaaatgtagcaatgacattacagaatgcacccgatgcagaggtcaaggcaggttgatgaaaactcaaaggacaccttttggtatagtttctcagaattacatgttatgcatttctatcttattgtgcaggggtgcaagtggtgacctgtatatatttgttcgcgttaataaaaaacaaggcatccacagagatggtctcaatctgtactcagatgcttcagttgattatactgatgtgattttaggtaccacagtgaaggttgaaacaatagaaggactcaaggatcttcacattcctcctggcacccagcctggagagaacttaaaattttctcagctgggagttcccgacattaagaagcctaatgtcagaggagatcactacttcatgataaaggtgaaaatcccgaagagtatcagttattttgacttctacagtggccaggaacgtttgctagttgaagagcttgctgcactaaagaaagctcagaatatctcagttccagaacctacaaagatagaaaattttcgggagagaaaccatcatccatctgcaaagagaagatcattctggggacgtgtctggaattttttcagggatgataaaggtgataaaagatttgcttcaatcagtgtgcaacctattatcccaggatggaattcttgccgaggaactgatacggctgtccccttgctattaaaaggattcctcatgaccgcaatattcttatttgtaatcagaagtaaactcaggtacactgggaagcgcattgaccgtccaactcaagctgaaatacctgttgagccagagtgaatttctgtcgtcttcatttctgaacgtttgcgacatcacagttttgatgatgatcataaatacgtaactttgccgcgcaaagcttcgtcctgggaaaagaatccggctttgcttgcagtgtatggtatccagacgcagcagtacaggttaacagaatatgggttgcttctcattagtcatttcttgattcattattccaatatgtagaagacacctgcagcaattccgagttttgacgaaagccacatgaaagacatgaagaaacatggccgtaggctaatgtacactgtatgtatcttgtctgcacaaagttttgtaaccatcccggcttgatatcgtttaacgattttgttgcaacataattcataagcactgaatttatgcaaacaacagttctgacgcgagacgaattggaataatcacaattcacaaacacaacaatgctcctattcacaaaaaaaatgctcctatccatacagttcaaatgcctctgtcatgttcaaatggaaacgattcgtttcgctttgagacgaagcagttcaaatgcctctgccgtgttcaaatgaaaacgattcatttcgctttgagacgaagtagttcaaatgcctctgccatgttcgatcgatttccagaccgagacaagcgccgcagcccgcagcagaaggctcgcgacatcagctcgagccagctgacgggatccacacggtgccatgtcttcccggcggccgtcgcatccgtcccaccggaatccacggcgattcccgtccgcctgctatcttctagtactcacccttgccctcctcgtcgtctccgccgccgccaagtcctcccgccgccccatctccgacaacgagatccggcagaagaaggaggcctgctacaccgacgtcgagaacgggctgtggggatgggtgtgcaggtactcgccgacggagaaggagaactgcgtgctgcgctgcctctcgccggagtgctacgacctcatatacggcggggatccgcttgaggaaggggagttggactatgttcgaagccaggagtacaagtattgtatgcacaaatcatcccttggagaaagcttggatggtgtgaagggatccttcagctactcatgaaggaatgagaagaaaaaggttctgttagtctgctgtaaattttatttacaatcttgaacagacatgcatctttttagataatggaattgtaattccagactttgctttttctcaaagcatcaccggtgcatcatcttatattaaacttacaaatgcaaattaaacattggattcatttgttggccacaccaatatttcgtgcatatgaatatcacaaagttacaattcgttgaaataataattttagccaacacttgcagcaccaattgagggattttttaagggggcaactgagggagttttttaacggaccaaccgtggaaatttgtaaatagtctaaaaagaac

SEQ ID NO: 982 - DNA, 2790 bp, Zea Mays
gagaagccgaaatgtaccccccacggccggcggcgcgtttgccaccgtccagttccatgtcggccaccgtgttctttctgcccgcaaatccaagctcgacggctagtcccgctaacactctccggcaacttacgccggcttccacctccggaaagctccacttcgcggcgttcccgctccgcctcccccgccatgcctgcgcaaggacctatcgctccgccgcattcgggaggggatcgcctgtggccgggcgtagagagaaggactactacgccacgctgaacatccgccgcgactccacgctccaggagatcaagtctgcctaccggattcttgcccgcaagtaccatcctgatatgaataagagtcctgaagcagaagaaaagttcaaggagatcagtgctgcatatgaggttctatctgatcaagacaaaagatcattatatgatcgctttggagaagaggggctcagcggtgactacagaaatggagatattggcacacatgggattgatccatatgaactcttcaatgctttctttggtagttccgacaaactttttggggatagtatggggtctgggggatttcattatagtgcagaagcaaaggacaatagggcacttaacatcagctataatctgctcctttcttttgaagagtccatcctcggaggcaaacgtgaaatcaatgtttttcgccatgaaacatgtggcacctgccatggaactggagctaaatgtagcaatgacattacagaatgcacccgatgcagaggtcaaggcaggttgatgaaaactcaaaggacaccttttggtatagtttctcagaattacatgttatgcatttctatcttattgtgcaggggtgcaagtggtgacctgtatatatttgttcgcgttaataaaaaacaaggcatccacagagatggtctcaatctgtactcagatgcttcagttgattatactgatgtgattttaggtaccacagtgaaggttgaaacaatagaaggactcaaggatcttcacattcctcctggcacccagcctggagagaacttaaaattttctcagctgggagttcccgacattaagaagcctaatgtcagaggagatcactacttcatgataaaggtgaaaatcccgaagagtatcagtggccaggaacgtttgctagttgaagagcttgctgcactaaagaaagctcagaatatctcagttccagaacctacaaagatagaaaattttcgggagagaaaccatcatccatctgcaaagagaagatcattctggggacgtgtctggaattttttcagggatgataaaggtgataaaagatttgcttcaatcagtgtgcaacctattatcccaggatggaattcttgccgaggaactgatacggctgtccccttgctattaaaaggattcctcatgaccgcaatattcttatttgtaatcagaagtaaactcagcttcgtcctgggaaaagaatccggctttgcttgcagtgtatggtatccagacgcagcagtacagaagacacctgcagcaattccgagttttgacgaaagccacatgaaagacatgaagaaacatggccgtaggctaatgtacactgtatgtatcttgtctgcacaaagttttgtaaccatcccggcttgatatcgtttaacgattttgttgcaacataattcataagcactgaatttatgcaaacaacagttctgacgcgagacgaattggaataatcacaattcacaaacacaacaatgctcctattcacaaaaaaaatgctcctatccatacagttcaaatgcctctgtcatgttcaaatggaaacgattcgtttcgctttgagacgaagcagttcaaatgcctctgccgtgttcaaatgaaaacgattcatttcgctttgagacgaagtagttcaaatgcctctgccatgttcgatcgatttccagaccgagacaagcgccgcagcccgcagcagaaggctcgcgacatcagctcgagccagctgacgggatccacacggtgccatgtcttcccggcggccgtcgcatccgtcccaccggaatccacggcgattcccgtccgcctgctatcttctagtactcacccttgccctcctcgtcgtctccgccgccgccaagtcctcccgccgccccatctccgacaacgagatccggcagaagaaggaggcctgctacaccgacgtcgagaacgggctgtggggatgggtgtgcaggtactcgccgacggagaaggagaactgcgtgctgcgctgcctctcgccggagtgctacgacctcatatacggcggggatccgcttgaggaaggggagttggactatgttcgaagccaggagtacaagtattgtatgcacaaatcatcccttggagaaagcttggatggtgtgaagggatccttcagctactcatgaaggaatgagaagaaaaaggttctgttagtctgctgtaaattttatttacaatcttgaacagacatgcatctttttagataatggaattgtaattccagactttgctttttctcaaagcatcaccggtgcatcatcttatattaaacttacaaatgcaaattaaacattggattcatttgttggccacaccaatatttcgtgcatatgaatatcacaaagttacaattcgttgaaataataattttagccaacacttgcagcaccaattgagggattttttaagggggcaactgagggagttttttaacggaccaaccgtggaaatttgtaaatagtctaaaaagaac

SEQ ID NO: 983 - DNA, 3109 bp, Zea Mays
gagaagccgaaatgtaccccccacggccggcggcgcgtttgccaccgtccagttccatgtcggccaccgtgttctttctgcccgcaaatccaagctcgacggctagtcccgctaacactctccggcaacttacgccggcttccacctccggaaagctccacttcgcggcgttcccgctccgcctcccccgccatgcctgcgcaaggacctatcgctccgccgcattcgggaggggatcgcctgtggccgggcgtagagagaaggactactacgccacgctgaacatccgccgcgactccacgctccaggagatcaagtctgcctaccggattcttgcccgcaagtaccatcctgatatgaataagagtcctgaagcagaagaaaagttcaaggagatcagtgctgcatatgaggttctatctgatcaagacaaaagatcattatatgatcgctttggagaagaggggctcagcggtgactacagaaatggagatattggcacacatgggattgatccatatgaactcttcaatgctttctttggtagttccgacaaactttttggggatagtatggggtctgggggatttcattatagtgcagaagcaaaggacaatagggcacttaacatcagagtccatcctcggaggcaaacgtgaaatcaatgtttttcgccatgaaacatgtggcacctgccatggaactggagctaaatgtagcaatgacattacagaatgcacccgatgcagaggtcaaggcaggttgatgaaaactcaaaggacaccttttggtatagtttctcagatatcttcatgcttaaattgtgaaggcagcgggaaggtaattactgaacattgcacagaatgttacggttcgggcagagtccaaattgaacgcattatcaaagtagatatacctggaggtattgatgatggctccaccattcgaattagtggtggaggtaatgttgataagcaaaggggtgcaagtggtgacctgtatatatttgttcgcgttaataaaaaacaaggcatccacagagatggtctcaatctgtactcagatgcttcagttgattatactgatgtgattttaggtaccacagtgaaggttgaaacaatagaaggactcaaggatcttcacattcctcctggcacccagcctggagagaacttaaaattttctcagctgggagttcccgacattaagaagcctaatgtcagaggagatcactacttcatgataaaggtgaaaatcccgaagagtatcagtggccaggaacgtttgctagttgaagagcttgctgcactaaagaaagctcagaatatctcagttccagaacctacaaagatagaaaattttcgggagagaaaccatcatccatctgcaaagagaagatcattctggggacgtgtctggaattttttcagggatgataaaggtgataaaagatttgcttcaatcagtgtgcaacctattatcccaggatggaattcttgccgaggaactgatacggctgtccccttgctattaaaaggattcctcatgaccgcaatattcttatttgtaatcagaagtaaactcaggtacactgggaagcgcattgaccgtccaactcaagctgaaatacctgttgagccagagtgaatttctgtcgtcttcatttctgaacgtttgcgacatcacagttttgatgatgatcataaatacgtaactttgccgcgcaaagcttcgtcctgggaaaagaatccggctttgcttgcagtgtatggtatccagacgcagcagtacaggttaacagaatatgggttgcttctcattagtcatttcttgattcattattccaatatgtagaagacacctgcagcaattccgagttttgacgaaagccacatgaaagacatgaagaaacatggccgtaggctaatgtacactgtatgtatcttgtctgcacaaagttttgtaaccatcccggcttgatatcgtttaacgattttgttgcaacataattcataagcactgaatttatgcaaacaacagttctgacgcgagacgaattggaataatcacaattcacaaacacaacaatgctcctattcacaaaaaaaatgctcctatccatacagttcaaatgcctctgtcatgttcaaatggaaacgattcgtttcgctttgagacgaagcagttcaaatgcctctgccgtgttcaaatgaaaacgattcatttcgctttgagacgaagtagttcaaatgcctctgccatgttcgatcgatttccagaccgagacaagcgccgcagcccgcagcagaaggctcgcgacatcagctcgagccagctgacgggatccacacggtgccatgtcttcccggcggccgtcgcatccgtcccaccggaatccacggcgattcccgtccgcctgctatcttctagtactcacccttgccctcctcgtcgtctccgccgccgccaagtcctcccgccgccccatctccgacaacgagatccggcagaagaaggaggcctgctacaccgacgtcgagaacgggctgtggggatgggtgtgcaggtactcgccgacggagaaggagaactgcgtgctgcgctgcctctcgccggagtgctacgacctcatatacggcggggatccgcttgaggaaggggagttggactatgttcgaagccaggagtacaagtattgtatgcacaaatcatcccttggagaaagcttggatggtgtgaagggatccttcagctactcatgaaggaatgagaagaaaaaggttctgttagtctgctgtaaattttatttacaatcttgaacagacatgcatctttttagataatggaattgtaattccagactttgctttttctcaaagcatcaccggtgcatcatcttatattaaacttacaaatgcaaattaaacattggattcatttgttggccacaccaatatttcgtgcatatgaatatcacaaagttacaattcgttgaaataataattttagccaacacttgcagcaccaattgagggattttttaagggggcaactgagggagttttttaacggaccaaccgtggaaatttgtaaatagtctaaaaagaac

SEQ ID NO: 984 - DNA, 2374 bp, Zea Mays
gagaagccgaaatgtaccccccacggccggcggcgcgtttgccaccgtccagttccatgtcggccaccgtgttctttctgcccgcaaatccaagctcgacggctagtcccgctaacactctccggcaacttacgccggcttccacctccggaaagctccacttcgcggcgttcccgctccgcctcccccgccatgcctgcgcaaggacctatcgctccgccgcattcgggaggggatcgcctgtggccgggcgtagagagaaggactactacgccacgctgaacatccgccgcgactccacgctccaggagatcaagtctgcctaccggattcttgcccgcaagtaccatcctgatatgaataagagtcctgaagcagaagaaaagttcaaggagatcagtgctgcatatgaggttctatctgatcaagacaaaagatcattatatgatcgctttggagaagaggggctcagcggtgactacagaaatggagatattggcacacatgggattgatccatatgaactcttcaatgctttctttggtagttccgacaaactttttggggatagtatggggtctgggggatttcattatagtgcagaagcaaaggacaatagggcacttaacatcagctataatctgctcctttcttttgaagagtccatcctcggaggcaaacgtgaaatcaatgtttttcgccatgaaacatgtggcacctgccatggaactggagctaaatgtagcaatgacattacagaatgcacccgatgcagaggtcaaggcaggttgatgaaaactcaaaggacaccttttggtatagtttctcagatatcttcatgcttaaattgtgaaggcagcgggaaggtaattactgaacattgcacagaatgttacggttcgggcagagtccaaattgaacgcattatcaaagtagatatacctggaggtattgatgatggctccaccattcgaattagtggtggaggtaatgttgataagcaaaggggtgcaagtggtgacctgtatatatttgttcgcgttaataaaaaacaaggcatccacagagatggtctcaatctgtactcagatgcttcagttgattatactgatgtgattttaggtaccacagtgaaggttgaaacaatagaaggactcaaggatcttcacattcctcctggcacccagcctggagagaacttaaaattttctcagctgggagttcccgacattaagaagcctaatgtcagaggagatcactacttcatgataaaggtgaaaatcccgaagagtatcagtggccaggaacgtttgctagttgaagagcttgctgcactaaagaaagctcagaatatctcagttccagaacctacaaagatagaaaattttcgggagagaaaccatcatccatctgcaaagagaagatcattctggggacgtgtctggaattttttcagggatgataaaggtgataaaagatttgcttcaatcagtgtgcaacctattatcccaggatggaattcttgccgaggaactgatacggctgtccccttgctattaaaaggattcctcatgaccgcaatattcttatttgtaatcagaagtaaactcagcttcgtcctgggaaaagaatccggctttgcttgcagtgtatggtatccagacgcagcagtacagaagacacctgcagcaattccgagttttgacgaaagccacatgaaagacatgaagaaacatggccgtaggctaatgtacactgacaacgagatccggcagaagaaggaggcctgctacaccgacgtcgagaacgggctgtggggatgggtgtgcaggtactcgccgacggagaaggagaactgcgtgctgcgctgcctctcgccggagtgctacgacctcatatacggcggggatccgcttgaggaaggggagttggactatgttcgaagccaggagtacaagtattgtatgcacaaatcatcccttggagaaagcttggatggtgtgaagggatccttcagctactcatgaaggaatgagaagaaaaaggttctgttagtctgctgtaaattttatttacaatcttgaacagacatgcatctttttagataatggaattgtaattccagactttgctttttctcaaagcatcaccggtgcatcatcttatattaaacttacaaatgcaaattaaacattggattcatttgttggccacaccaatatttcgtgcatatgaatatcacaaagttacaattcgttgaaataataattttagccaacacttgcagcaccaattgagggattttttaagggggcaactgagggagttttttaacggaccaaccgtggaaatttgtaaatagtctaaaaagaac

SEQ ID NO: 985 - DNA, 5315 bp, Zea Mays
aaatgacttcgggtccaacctgcaaaaccggaacccgcccacaaaaatgtgaatcaaaaatcaaccgaacttgccagccccgccgcccctccctgcctccatcgcgcactagggtttttcctcgctctcacgttcggccgttccccaccacttgcgcgttgtgccgcgacgctccggccatggcgtggggggaggacgaggccatcggtcccgacgtggcctcggcgggtcttcacgtctcggagcggatcggccgcgacgccgccgcgcagcccgacctggaggaggcccttgaagcctcgcgctacgcgtcccacccctactcctcgcaccccaaggagtggcctcctttggtagaagttgcagaaactcgtcaactccctcctatgttgattgaaagatataacacagctgccggtgaaggaacagctctttgcgggattttttctgacatacatcgggcctgggcaacagttgacaattcatttttcatctggcgatttgataaatgggacgggcattgccaagagcataatgttgacgagcaagcaatttgtgctgttggccttgctagggcaaaacctgggattttcattgaagccattcaataccttttagttttagcaactcctgttgaactgatacttgttggagtttgctgttctgctagtgctgatggaacagacccatatgctgagctttcattacaaccattacctgagtacatgattgccactgatggtgtcacaatgacatgcatcacatgtacagacaagggccaaatttttgtagctggtcgcgatggccatatatatgaattgcagtatacaactggttcaggttggcgtaaacgttgccgtaaagtttgtcttactactggcattggcagtcttctttctaggtgggtactgccaaatgcattcaaattctcaactgttgatccaattgttgatatggtcatggatgaggagaggaacactatctatgcgcgtaccgagggcatgaagttgcaattatttgatctaggagttaatggtgatggccctttgacaaaaattactgaagaaaagaacattgttgatccacgggatggaccttatggtggtcggaggtctaatgcgccaagagctgcacgatcaccaagaccatcaattgtttgcatctcacctgtatcttctgtggaatcaaagtggctccatgctgttgctgttttatcagatgggaagagattattcctcactacatctggtggaagtggttcttcagttggattgaacagtggtctgcagaggccaacctgtttaaaaattgttgctactaggccgtccccacctctgggggttggtggtgggcttacatttggtgctgtttctgtggctggcagggctcttcctgaagatctagcattgaaagttgagtctgcattctattctgctggtgctcttgtaatgtcagattcatccgctacagccatgtcatctcttctggctgtgcagaaagattcagctgcgcagctatctctccccagcacctttggaacagcttctagaacctccagagctctacgagaaacagtctctgctttacctgttgagggtcgaatgctttgtgcctctgatgtcttaccacttcccgatgctgcttacatgatgcagtctttatatgctgatgtggaatgtttcacatgtttcagaaaaccttctgagaaggcatgtataaaactgtgggcaaaaggggatcttcctacccagcatatcttgcctcggaggagggtggttgtattcaatactatgggtttgatggagttgatttttaacaggcctgttgatattctaaggaaattgtttgacgggaacaccctgagatcacaaattgaagaattctttaatcgctttggtgctggagaggctgcggcaatgtgcttaatgttagctgcgaagctactttatgctgaagatagtctgataagcaatgctgtttctgagaaagctgctgaggcgtttgaggaccctgggcttgttgggatgcctcaaattaacggcaccactgctttatctaatacacgaactcaggctggaggctttagtatgggccaagttgttcaagaggcagaacctttgttttctggtgcatatgaagggctttgtttgtgctcgtcaagactactttatcccatctgggagcttcctattatgtcgattcgaggaccgtctggtaataataaacgcgaggatggcgtaattgtttgcaggctttcagctggggccatgaaaattcttgagagtaagattcattcactggaaacatttttaagatctagaagaaacaagagaaggggcctttatggttatgttgctggtcttggcgattctggttccatactctacaaaacagggcctattattggccctggagggcatagcaatggaaggagtccctacaactcccaaattcgagatatgaaccctgtagataaatctgcatcgaataaaaagccaaggctgctttatacatcagcagaactagccgctatggaggtgagggcaatggagtgtcttaggcggttgcttaggagatctggtgaagcactgtttctgcttcaacttatttgccagcataatgttgcccgtttggctcagacactgggcaatgatttatgcaagaaatttgttcaattaacatttcatcaattggtatgttcagaggatggtgatcagctcgcgatgcgtcttatttctgcactcatggagtactatattggcccagagggcagaggaactgttgaagaaatcagtactaaattgagggagggttgccctagttacttcaatgagtcagactacaaatattacttggcagtggaatgccttgagagagcatctatgactaataatgctgatgagagagatattcttgctagagatgctttcaacctcttgactaaaattccagactctgctgatttgagtgccatatgcaagagatttgagaacctaagattttatgaggctgtagtccgattgcctctgcagaaagctcaagcacttgactccaatgctgatattatcaatggtcaaatagacccaaggcatcatgatacaataatgttgcagcgtgaacaatgctataggattgttatggatgcgctgtgcactctcaagggtgttgggcatagtcgaatgcaaagtgcagacaagtcatctgctctagcaactgctgctgatccagcttctcgaagcaagtatatcaaacaaatcatacaacttagtgtccaatggccggacacagttttccatgagcatctatacaggacacttattgagcttggtctagaaaatgagcttttagagtatggtggatctgatttggtttcttttctgcagagtgctggccgtaagcatcaagaagaggttcgggcagtttcttcagttacacctggagctgctaagatgcatgatttaggtgcacctatctcgactagtcaaacaaagtatctcgagctcctagctaggtactatgtccgcaagggggaacatattgctgctgccaggatgttgttaatattggcagagagacagtgctctaattctgaagaagctccagctcttgacaagcggtatgaatatctcagagatgcagtgcttcaggccaaaagcgcaggcatcgctgctgatttgtccaaaaatcctgttgatagcagcacagtggatttgcttgaaggaaaacttgtcgtgctacgcttccaaattcaaattaaagaagaattggagctcatgagactgctaaggctgctaaggataaggcaaaagaactatcattaaatctcaagagtatcactcaactgtataacgattatgctgttccatttgatctctgggaggtttgcttggaaatgctgagctttgctaattactctggagacgctgatagcaaaattgttcgagaagtttgggctagactccttgatcaggcacttactaaagggggtgttgcagaagcttgttctgttgtgaaaagagtaggctcgaaacttgatcctgcagatggagcttgtttacctttagatatcatatgccttcaccttgagaaggctgcagtggatagattaagttcaggagaagaattagttggtgatgatgatgttgcaagagctcttcttggtgcctgtaaaggtcttcctggacctgtactttctgtgtatgatcacctgttatcgaacggtgcaatcataccctcactaaatctgaagttgcgccttctgcgatcagttctagcaatcctccgtgagtgggggatatctgtcattgcacacaggctaggcaccacaagtgctggggcttcattctttcttgatggaacattctcattgaaccaaacagggactgcgaatcaaggtgctcgagataaaataattagtttggcgaacaggtacatgactgaggtgaggcgattaaaccttccacagaaccaaacggagaatgtctaccgtggtttccgtgaacttgaggagaaattactatcttcttattaagcagattgcagtcattcctcaagatagtgaagaatgatcttgcatctgttgtaccacaaaaccaaggaatagagtcgagggcttctggattcacctcagcatgatctgtattgttccttacacttatctgcaagaacccggggctgctgcaggactctagctgaggtggttagatggctctagtaccactcatgtcctggctgagttggttagatggctctaatagcacttctgatgtcctgggtttgacttctaggtaaagatctagatctggtctatagggagcggattctcttgctgcatgggaggcagttttcgtgacttggtcgtactccgattgagcttcttaatataataacgggggacagtcttttctcaccgttcgagttcttttcttttttgaacccaaggctgctttaatcattattaatcagatgtttttcatgactaagtgcagccttcttttatttgacttgagtcagtatggactgcagagccgtagatttggaaaattgtttagatgtcttcattacttgctaatctagtggtagatactgccggtcctgttttaagggtggactttgtccctgaacaacattaaactgttgaatacaagttgggttttgatgcaggaatcggaatttagtatgtgccatgacattgtacagttctatagtagattattctcagtgttgtaagcttttacgctgtgtttgtttgtatgaagataccgtttcagtagctgaaaaaaggtaaaggttattgccagaaatgtggatttata

SEQ ID NO: 986 - DNA, 6473 bp, Zea Mays
aatcaaaaatcaaccgaacttgccagccccgccgcccctccctgcctccatcgcgcactagggtttttcctcgctctcacgttcggccgttccccaccacttgcgcgttgtgccgcgacgctccggccatggcgtggggggaggacgaggccatcggtcccgacgtggcctcggcgggtcttcacgtctcggagcggatcggccgcgacgccgccgcgcagcccgacctggaggaggcccttgaagcctcgcgctacgcgtcccacccctactcctcgcaccccaaggaggcaagccctgcgcgacctgtggtcagctgcgtgtgtactgatagacgcgcacgcttgagttgttgatgtgtcagtgtccggtttgggcgaatgttaccgttgtattcagggttcctgcagttgtcctgggggattcgtgtcattgtttttcccagtagaatgggggtgacgaggaatcgaaagatgaaggtggaggaaaacatggcgagcagtgatttcatctgattatttctggtgtttttttttggttgcttcagacctgcagtagaagttcggactttcggttcatatattgcattgtagtatgagtagttttgggtcaaattttgggagtgagactccatgacagaagtactatatgtcacacgggagcaatttacaattgtgtgtcatacacatgacatgattccctggcaggatgtgaatcctgattctgacattagaaaacggtgaaagagtttttggtcctttaagttacgctgaaacttggaaattgaggcaaacacgtggaaattagcataaaccgaaggacactagtttttgcaaaaaagaaaaaaaaagaaaaaaaggggaggtccctatttgaaactggctactggcaagctcaaccttggcttatatgagatcagcagtgacgaacagcttttcggattgctgacatcattcattcaagggacatattcttgtatgtattggtaattgaattgaggaggtaggaactggacattctgtttgctttgtttggttgagcatggtttatagactactggtcagttttcacacttttaaagtagatagttgtctttggttttgctttgcattttctgtttgctggatttattaaatgtttcatgttttagctcttatgctgctaggatgaaacaccgcaaacacattggtacatgttggaactctttgttttgaatgctggaaaggtttcttcagaagttttaatgacattgaacacgatgatcatgcaggtctcagaaatgctttgctggaccaacccttctctaacataccatgtgtttgttctaagttttatttgaatttaataatgaagttgttctactaatattttgaaaatgcacttttatgttctcttaatacatattttgtcttggcagtggcctcctttggtagaagttgcagaaactcgtcaactccctcctatgttgattgaaagatataacacagctgccggtgaaggaacagctctttgcgggattttttctgacatacatcgggcctgggcaacagttgacaattcatttttcatctggcgatttgataaatgggacgggcattgccaagagcataatgttgacgagcaagcaatttgtgctgttggccttgctagggcaaaacctgggattttcattgaagccattcaataccttttagttttagcaactcctgttgaactgatacttgttggagtttgctgttctgctagtgctgatggaacagacccatatgctgagctttcattacaaccattacctgagtacatgattgccactgatggtgtcacaatgacatgcatcacatgtacagacaagggccaaatttttgtagctggtcgcgatggccatatatatgaattgcagtatacaactggttcaggttggcgtaaacgttgccgtaaagtttgtcttactactggcattggcagtcttctttctaggtgggtactgccaaatgcattcaaattctcaactgttgatccaattgttgatatggtcatggatgaggagaggaacactatctatgcgcgtaccgagggcatgaagttgcaattatttgatctaggagttaatggtgatggccctttgacaaaaattactgaagaaaagaacattgttgatccacgggatggaccttatggtggtcggaggtctaatgcgccaagagctgcacgatcaccaagaccatcaattgtttgcatctcacctgtatcttctgtggaatcaaagtggctccatgctgttgctgttttatcagatgggaagagattattcctcactacatctggtggaagtggttcttcagttggattgaacagtggtctgcagaggccaacctgtttaaaaattgttgctactaggccgtccccacctctgggggttggtggtgggcttacatttggtgctgtttctgtggctggcagggctcttcctgaagatctagcattgaaagttgagtctgcattctattctgctggtgctcttgtaatgtcagattcatccgctacagccatgtcatctcttctggctgtgcagaaagattcagctgcgcagctatctctccccagcacctttggaacagcttctagaacctccagagctctacgagaaacagtctctgctttacctgttgagggtcgaatgctttgtgcctctgatgtcttaccacttcccgatgctgcttacatgatgcagtctttatatgctgatgtggaatgtttcacatgtttcagaaaaccttctgagaaggcatgtataaaactgtgggcaaaaggggatcttcctacccagcatatcttgcctcggaggagggtggttgtattcaatactatgggtttgatggagttgatttttaacaggcctgttgatattctaaggaaattgtttgacgggaacaccctgagatcacaaattgaagaattctttaatcgctttggtgctggagaggctgcggcaatgtgcttaatgttagctgcgaagctactttatgctgaagatagtctgataagcaatgctgtttctgagaaagctgctgaggcgtttgaggaccctgggcttgttgggatgcctcaaattaacggcaccactgctttatctaatacacgaactcaggctggaggctttagtatgggccaagttgttcaagaggcagaacctttgttttctggtgcatatgaagggctttgtttgtgctcgtcaagactactttatcccatctgggagcttcctattatgtcgattcgaggaccgtctggtaataataaacgcgaggatggcgtaattgtttgcaggctttcagctggggccatgaaaattcttgagagtaagattcattcactggaaacatttttaagatctagaagaaacaagagaaggggcctttatggttatgttgctggtcttggcgattctggttccatactctacaaaacagggcctattattggccctggagggcatagcaatggaaggagtccctacaactcccaaattcgagatatgaaccctgtagataaatctgcatcgaataaaaagccaaggctgctttatacatcagcagaactagccgctatggaggtgagggcaatggagtgtcttaggcggttgcttaggagatctggtgaagcactgtttctgcttcaacttatttgccagcataatgttgcccgtttggctcagacactgggcaatgatttatgcaagaaatttgttcaattaacatttcatcaattggtatgttcagaggatggtgatcagctcgcgatgcgtcttatttctgcactcatggagtactatattggcccagagggcagaggaactgttgaagaaatcagtactaaattgagggagggttgccctagttacttcaatgagtcagactacaaatattacttggcagtggaatgccttgagagagcatctatgactaataatgctgatgagagagatattcttgctagagatgctttcaacctcttgactaaaattccagactctgctgatttgagtgccatatgcaagagatttgagaacctaagattttatgaggctgtagtccgattgcctctgcagaaagctcaagcacttgactccaatgctgatattatcaatggtcaaatagacccaaggcatcatgatacaataatgttgcagcgtgaacaatgctataggattgttatggatgcgctgtgcactctcaagggtgttgggcatagtcgaatgcaaagtgcagacaagtcatctgctctagcaactgctgctgatccagcttctcgaagcaagtatatcaaacaaatcatacaacttagtgtccaatggccggacacagttttccatgagcatctatacaggacacttattgagcttggtctagaaaatgagcttttagagtatggtggatctgatttggtttcttttctgcagagtgctggccgtaagcatcaagaagaggttcgggcagtttcttcagttacacctggagctgctaagatgcatgatttaggtgcacctatctcgactagtcaaacaaagtatctcgagctcctagctaggtactatgtccgcaagggggaacatattgctgctgccaggatgttgttaatattggcagagagacagtgctctaattctgaagaagctccagctcttgacaagcggtatgaatatctcagagatgcagtgcttcaggccaaaagcgcaggcatcgctgctgatttgtccaaaaatcctgttgatagcagcacagtggatttgcttgaaggaaaacttgtcgtgctacgcttccaaattcaaattaaagaagaattggagctcatggttgcacggctcgaaaatattccaagcagttctgaattacctaatgttccgttccctcgtgacaacattcttgctaatgcagagactgctaaggctgctaaggataaggcaaaagaactatcattaaatctcaagagtatcactcaactgtataacgattatgctgttccatttgatctctgggaggtttgcttggaaatgctgagctttgctaattactctggagacgctgatagcaaaattgttcgagaagtttgggctagactccttgatcaggcacttactaaagggggtgttgcagaagcttgttctgttgtgaaaagagtaggctcgaaacttgatcctgcagatggagcttgtttacctttagatatcatatgccttcaccttgagaaggctgcagtggatagattaagttcaggagaagaattagttggtgatgatgatgttgcaagagctcttcttggtgcctgtaaaggtcttcctggacctgtactttctgtgtatgatcacctgttatcgaacggtgcaatcataccctcactaaatctgaagttgcgccttctgcgatcagttctagcaatcctccgtgagtgggggatatctgtcattgcacacaggctaggcaccacaagtgctggggcttcattctttcttgatggaacattctcattgaaccaaacagggactgcgaatcaaggtgctcgagataaaataattagtttggcgaacaggtacatgactgaggtgaggcgattaaaccttccacagaaccaaacggagaatgtctaccgtggtttccgtgaacttgaggagaaattactatcttcttattaagcagattgcagtcattcctcaagatagtgaagaatgatcttgcatctgttgtaccacaaaaccaaggaatagagtcgagggcttctggattcacctcagcatgatctgtattgttccttacacttatctgcaagaacccggggctgctgcaggactctagctgaggtggttagatggctctagtaccactcatgtcctggctgagttggttagatggctctaatagcacttctgatgtcctgggtttgacttctaggtaaagatctagatctggtctatagggagcggattctcttgctgcatgggaggcagttttcgtgacttggtcgtactccgattgagcttcttaatataataacgggggacagtcttttctcaccgttcgagttcttttcttttttgaacccaaggctgctttaatcattattaatcagatgtttttcatgactaagtgcagccttcttttatttgacttgagtcagtatggactgcagagccgtagatttggaaaattgtttagatgtcttcattacttgctaatctagtggtagatactgccggtcctgttttaagggtggactttgtccctgaacaacattaaactgttgaatacaagttgggttttgatgcaggaatcggaatttagtatgtgccatgacattgtacagttctatagtagattattctcagtgttgtaagcttttacgctgtgtttgtttgtatgaagataccgtttcagtagctgaaaaaaggtaaaggttattgccagaaatgtggatttata

SEQ ID NO: 987 - DNA, 5466 bp, Zea Mays
aatcaaaaatcaaccgaacttgccagccccgccgcccctccctgcctccatcgcgcactagggtttttcctcgctctcacgttcggccgttccccaccacttgcgcgttgtgccgcgacgctccggccatggcgtggggggaggacgaggccatcggtcccgacgtggcctcggcgggtcttcacgtctcggagcggatcggccgcgacgccgccgcgcagcccgacctggaggaggcccttgaagcctcgcgctacgcgtcccacccctactcctcgcaccccaaggagctcttatgctgctaggatgaaacaccgcaaacacattggtacatgttggaactctttgttttgaatgctggaaaggtttcttcagaagttttaatgacattgaacacgatgatcatgcagtggcctcctttggtagaagttgcagaaactcgtcaactccctcctatgttgattgaaagatataacacagctgccggtgaaggaacagctctttgcgggattttttctgacatacatcgggcctgggcaacagttgacaattcatttttcatctggcgatttgataaatgggacgggcattgccaagagcataatgttgacgagcaagcaatttgtgctgttggccttgctagggcaaaacctgggattttcattgaagccattcaataccttttagttttagcaactcctgttgaactgatacttgttggagtttgctgttctgctagtgctgatggaacagacccatatgctgagctttcattacaaccattacctgagtacatgattgccactgatggtgtcacaatgacatgcatcacatgtacagacaagggccaaatttttgtagctggtcgcgatggccatatatatgaattgcagtatacaactggttcaggttggcgtaaacgttgccgtaaagtttgtcttactactggcattggcagtcttctttctaggtgggtactgccaaatgcattcaaattctcaactgttgatccaattgttgatatggtcatggatgaggagaggaacactatctatgcgcgtaccgagggcatgaagttgcaattatttgatctaggagttaatggtgatggccctttgacaaaaattactgaagaaaagaacattgttgatccacgggatggaccttatggtggtcggaggtctaatgcgccaagagctgcacgatcaccaagaccatcaattgtttgcatctcacctgtatcttctgtggaatcaaagtggctccatgctgttgctgttttatcagatgggaagagattattcctcactacatctggtggaagtggttcttcagttggattgaacagtggtctgcagaggccaacctgtttaaaaattgttgctactaggccgtccccacctctgggggttggtggtgggcttacatttggtgctgtttctgtggctggcagggctcttcctgaagatctagcattgaaagttgagtctgcattctattctgctggtgctcttgtaatgtcagattcatccgctacagccatgtcatctcttctggctgtgcagaaagattcagctgcgcagctatctctccccagcacctttggaacagcttctagaacctccagagctctacgagaaacagtctctgctttacctgttgagggtcgaatgctttgtgcctctgatgtcttaccacttcccgatgctgcttacatgatgcagtctttatatgctgatgtggaatgtttcacatgtttcagaaaaccttctgagaaggcatgtataaaactgtgggcaaaaggggatcttcctacccagcatatcttgcctcggaggagggtggttgtattcaatactatgggtttgatggagttgatttttaacaggcctgttgatattctaaggaaattgtttgacgggaacaccctgagatcacaaattgaagaattctttaatcgctttggtgctggagaggctgcggcaatgtgcttaatgttagctgcgaagctactttatgctgaagatagtctgataagcaatgctgtttctgagaaagctgctgaggcgtttgaggaccctgggcttgttgggatgcctcaaattaacggcaccactgctttatctaatacacgaactcaggctggaggctttagtatgggccaagttgttcaagaggcagaacctttgttttctggtgcatatgaagggctttgtttgtgctcgtcaagactactttatcccatctgggagcttcctattatgtcgattcgaggaccgtctggtaataataaacgcgaggatggcgtaattgtttgcaggctttcagctggggccatgaaaattcttgagagtaagattcattcactggaaacatttttaagatctagaagaaacaagagaaggggcctttatggttatgttgctggtcttggcgattctggttccatactctacaaaacagggcctattattggccctggagggcatagcaatggaaggagtccctacaactcccaaattcgagatatgaaccctgtagataaatctgcatcgaataaaaagccaaggctgctttatacatcagcagaactagccgctatggaggtgagggcaatggagtgtcttaggcggttgcttaggagatctggtgaagcactgtttctgcttcaacttatttgccagcataatgttgcccgtttggctcagacactgggcaatgatttatgcaagaaatttgttcaattaacatttcatcaattggtatgttcagaggatggtgatcagctcgcgatgcgtcttatttctgcactcatggagtactatattggcccagagggcagaggaactgttgaagaaatcagtactaaattgagggagggttgccctagttacttcaatgagtcagactacaaatattacttggcagtggaatgccttgagagagcatctatgactaataatgctgatgagagagatattcttgctagagatgctttcaacctcttgactaaaattccagactctgctgatttgagtgccatatgcaagagatttgagaacctaagattttatgaggctgtagtccgattgcctctgcagaaagctcaagcacttgactccaatgctgatattatcaatggtcaaatagacccaaggcatcatgatacaataatgttgcagcgtgaacaatgctataggattgttatggatgcgctgtgcactctcaagggtgttgggcatagtcgaatgcaaagtgcagacaagtcatctgctctagcaactgctgctgatccagcttctcgaagcaagtatatcaaacaaatcatacaacttagtgtccaatggccggacacagttttccatgagcatctatacaggacacttattgagcttggtctagaaaatgagcttttagagtatggtggatctgatttggtttcttttctgcagagtgctggccgtaagcatcaagaagaggttcgggcagtttcttcagttacacctggagctgctaagatgcatgatttaggtgcacctatctcgactagtcaaacaaagtatctcgagctcctagctaggtactatgtccgcaagggggaacatattgctgctgccaggatgttgttaatattggcagagagacagtgctctaattctgaagaagctccagctcttgacaagcggtatgaatatctcagagatgcagtgcttcaggccaaaagcgcaggcatcgctgctgatttgtccaaaaatcctgttgatagcagcacagtggatttgcttgaaggaaaacttgtcgtgctacgcttccaaattcaaattaaagaagaattggagctcatggttgcacggctcgaaaatattccaagcagttctgaattacctaatgttccgttccctcgtgacaacattcttgctaatgcagagactgctaaggctgctaaggataaggcaaaagaactatcattaaatctcaagagtatcactcaactgtataacgattatgctgttccatttgatctctgggaggtttgcttggaaatgctgagctttgctaattactctggagacgctgatagcaaaattgttcgagaagtttgggctagactccttgatcaggcacttactaaagggggtgttgcagaagcttgttctgttgtgaaaagagtaggctcgaaacttgatcctgcagatggagcttgtttacctttagatatcatatgccttcaccttgagaaggctgcagtggatagattaagttcaggagaagaattagttggtgatgatgatgttgcaagagctcttcttggtgcctgtaaaggtcttcctggacctgtactttctgtgtatgatcacctgttatcgaacggtgcaatcataccctcactaaatctgaagttgcgccttctgcgatcagttctagcaatcctccgtgagtgggggatatctgtcattgcacacaggctaggcaccacaagtgctggggcttcattctttcttgatggaacattctcattgaaccaaacagggactgcgaatcaaggtgctcgagataaaataattagtttggcgaacaggtacatgactgaggtgaggcgattaaaccttccacagaaccaaacggagaatgtctaccgtggtttccgtgaacttgaggagaaattactatcttcttattaagcagattgcagtcattcctcaagatagtgaagaatgatcttgcatctgttgtaccacaaaaccaaggaatagagtcgagggcttctggattcacctcagcatgatctgtattgttccttacacttatctgcaagaacccggggctgctgcaggactctagctgaggtggttagatggctctagtaccactcatgtcctggctgagttggttagatggctctaatagcacttctgatgtcctgggtttgacttctaggtaaagatctagatctggtctatagggagcggattctcttgctgcatgggaggcagttttcgtgacttggtcgtactccgattgagcttcttaatataataacgggggacagtcttttctcaccgttcgagttcttttcttttttgaacccaaggctgctttaatcattattaatcagatgtttttcatgactaagtgcagccttcttttatttgacttgagtcagtatggactgcagagccgtagatttggaaaattgtttagatgtcttcattacttgctaatctagtggtagatactgccggtcctgttttaagggtggactttgtccctgaacaacattaaactgttgaatacaagttgggttttgatgcaggaatcggaatttagtatgtgccatgacattgtacagttctatagtagattattctcagtgttgtaagcttttacgctgtgtttgtttgtatgaagataccgtttcagtagctgaaaaaaggtaaaggttattgccagaaatgtggatttata

SEQ ID NO: 988 - DNA, 969 bp, Zea Mays
cggaatagttccatacagaccagggttccggcttttaagccaaccacacacgcccgacatccaggacccacattacaaaaatacgcttttctcacacacaaacgccccacgctcggctgagcactttcccgccgtcttcagaccgtcacaccctcggtcgtgacaggtttctgcctccactgccttccccaccgccgccatgccctcctccgccgcccgggccctcacatccgtctcccgcgcagccttctcctggaagccgacggggcggccgcagcaaacgctggcggcggcggtgagcaggtcgggcgtggggctccactcgggagcgcgcgtcaccgccacgctgtttccgacgcaagctggagagggtaggtatttcctcgtggagggtgatgaggaggcgagggtagcggcagaggtggggaacgccgagccactgtcgcagctctgcacgacgcttcgtcggggcgaaggcgcccacacgcgggtccggacggtggaacaccttctttcggcgatggaggcgcttggcgtcgacaactgccgtatcgaggttagcggcggggatgagattcctttgcttgatggatcagcgcaagagtgggtagaggcagtacaaggcgttggcttgtgtgcggcagaggatgccaatggggaaaagttggataaactggcgcctgaaattcaggagcctgtttacctacggaaacacgattgctttatagctgcattccctagcccacaaatccacataacctgtggcattgatttcccaaagatcctagcttcgcccctggtaaggatggctcaggaaaagatgatccaacaggagaagatgaagcatcagaaggattgagccattagaagatggcgagatggggaaaaattccttgcacctagatgtacagaagcaacaccacatgcttcgtctgatcatgacacatgtccatcctactaatcttaaag

SEQ ID NO: 989 - DNA, 871 bp, Zea Mays
aaaaatacgcttttctcacacacaaacgccccacgctcggctgagcactttcccgccgtcttcagaccgtcacaccctcggtcgtgacaggtttctgcctccactgccttccccaccgccgccatgccctcctccgccgcccgggccctcacatccgtctcccgcgcagccttctcctggaagccgacggggcggccgcagcaaacgctggcggcggcggtgagcaggtcgggcgtggggctccactcgggagcgcgcgtcaccgccacgctgtttccgacgcaagctggagagggtaggtatttcctcgtggagggtgatgaggaggcgagggtagcggcagaggtggggaacgccgagccactgtcgcagctctgcacgacgcttcgtcggggcgaaggcgcccacacgcgggtccggacggtggaacaccttctttcggcgatggaggcgcttggcgtcgacaactgccgtatcgaggttagcggcggggatgagcgcaagagtgggtagaggcagtacaaggcgttggcttgtgtgcggcagaggatgccaatggggaaaagttggataaactggcgcctgaaattcaggagcctgtttacctacggaaacacgattgctttatagctgcattccctagcccacaaatccacataacctgtggcattgatttcccaaagatcctagcttcgcccctggtaaggatggctcaggaaaagatgatccaacaggagaagatgaagcatcagaaggattgagccattagaagatggcgagatggggaaaaattccttgcacctagatgtacagaagcaacaccacatgcttcgtctgatcatgacacatgtccatcctactaatcttaaag

SEQ ID NO: 990 - DNA, 825 bp, Zea Mays
cacgctcggctgagcactttcccgccgtcttcagaccgtcacaccctcggtcgtgacaggtttctgcctccactgccttccccaccgccgccatgccctcctccgccgcccgggccctcacatccgtctcccgcgcagccttctcctggaagccgcaaacgctggcggcggcggtgagcaggtcgggcgtggggctccactcgggagcgcgcgtcaccgccacgctgtttccgacgcaagctggagagggtaggtatttcctcgtggagggtgatgaggaggcgagggtagcggcagaggtggggaacgccgagccactgtcgcagctctgcacgacgcttcgtcggggcgaaggcgcccacacgcgggtccggacggtggaacaccttctttcggcgatggaggcgcttggcgtcgacaactgccgtatcgaggttagcggcggggatgagcgcaagagtgggtagaggcagtacaaggcgttggcttgtgtgcggcagaggatgccaatggggaaaagttggataaactggcgcctgaaattcaggagcctgtttacctacggaaacacgattgctttatagctgcattccctagcccacaaatccacataacctgtggcattgatttcccaaagatcctagcttcgcccctggtaaggatggctcaggaaaagatgatccaacaggagaagatgaagcatcagaaggattgagccattagaagatggcgagatggggaaaaattccttgcacctagatgtacagaagcaacaccacatgcttcgtctgatcatgacacatgtccatcctactaatcttaaag

SEQ ID NO: 991 - DNA, 2627 bp, Zea Mays
tcgctgcctgagctctccggccaatcgcgtcatttacttgctttactaatcacgcttagcgattttagtctcctcctcctcttcaccccacctcttcctccctcccttccctccctgttccctttcccacccctgcctgaggccttccgccttcgtctctgaatcgcggcggctcctgagtcccgaggcgccgcctgatgagcggctaggcgccggatctacggcagcgttggaggtctgatttggacgggagagagcgaggtgaggtctcggttttctcgatataggagatggcggcggcagaggcgcggggagcggacttccccgtggggatgaaggttctggttgtggacgacgacccgacgtgcctcgtcgtgctcaagaggatgctccttgagtgccgtgacaacatgtccgcaggctacaagagcactaactatgttgcgagaaaataggcgtggttttgatgttataataagtgatgtccacatgccggatatggatggattcaggctacttgaacttgtaggccttgagatggatcttccggttatcatgatgtctgctgattcaagaacggatattgtaatgaagggaattaagcatggagcatgtgactatttaataaaacctgtcagaatggaggagttgaaaaacatctggcaacatgttgttaggaaaaaatttaatggaaacaaggatcatgagcattctggtagcctagatgataccgatcgtaacagaccaaccaataatgataatgaatatgcttcctctgcgaatgatggaggtgatggcagctggaaatctcagaaaaagaaaagagagaaagaagatgatgaaactgacctagaaagtggcgatccttctacatcaaagaaaccaagagttgtttggtcagttgagcttcatcaacaatttgtgaatgcagtcaatcacctcgggatagacaaagctgttccaaagaaaattttggaattgatgaatgtccctggcttaaccagggaaaatgttgccagccatttgcagaaattcagactctacctgaagagaattgcacagcatcatgctggaatacctcatccatttgttgcgtctgcttctagtgctaaagttgctccgttaggaggactggaattccaagctttggctgcttctggtcagatccctcctcaagctctggctgctttgcaggatgaactccttggtcgacctacaagcagtttggcattgcctggaagagaccagtcatctttgcgactggctgcaatcaaaggaaacaagccccatggagagagagaaatagcatttggtcaacccatatacaagtgtcagaataacacgtatggtgcattttctcaaagcagcccagcagttggaggattgccatcttttgcagcttggcccaataacaaacttggtatgactgattcttcaaacacattgggaaatgtgggcaattctcaaaatagcaatatgttattgcatgaattgcagcaacagccagacaccttgctgtcaggaacccttcacaatattgatgtcaaaccttctggtgtagttatgccatctcagtcgttaaatgtgttcccggctagtgaaggcatctcacataatcaaaatccattggttataccatctcaatccccaagctttctggcatcagttcctccatccatgaaacatgaatcccttcttggatcaccttcaccatcaaccagtctgttgggtgggcttgatatggttaatcaagcttcaacaagtcagcctttgattagtagccatggagcaaatcttcctggtctcatgaaccgcagctcaaatgcaatgccttcaccaggaattagtaattttcaaagtgggaatattccttatgtggttactcagaatgctatgggagttagctcaagaccaccaggtgttctaaagactgagtgcactgaatcgctgactcatagttatggctatattggtggtagcaccagtgtggactctagcttgctctcttctcaggccaaaaatccacagtatggtttattgcagagtcaaaatgatgttagcagcagctggttgtcttcacaagattttgatagttttggaaattctcttgggcaaggccaccctggttccacttcgtctagcttccagagttccgctcttggcaaattgcctgaccaaggacgagggaggaatcatgggtttgtcgggaaaggcacttgcattccaagtcgctttgcggtggatgaggttggatctccaactaacttgagccacaacattgtaaacagtggagacatagtgaacccggacatattcggatttagtggacagatgtgaaactttcttgaatttggttgatcagtgaggactggaaacaaatttagtggtttgaatggttgctcgtattttcgtttcttccttttccttctgtaattggtttataaggggaatcggctatgtgacagcatatggaatcttgctttatagaagtttgttcagtttaaaggacttgaaattaatcagtcccttgccatatagctcctttcctttgttctcttgtagcacaatttttatgacagtcgtaactcaacctagccgatttattcctaaccatattctttctacta

SEQ ID NO: 992 - DNA, 2560 bp, Zea Mays
agtctcctcctcctcttcaccccacctcttcctccctcccttccctccctgttccctttcccacccctgcctgaggccttccgccttcgtctctgaatcgcggcggctcctgagtcccgaggcgccgcctgatgagcggctaggcgccggatctacggcagcgttggaggtctgatttggacgggagagagcgaggtgaggtctcggttttctcgatataggagatggcggcggcagaggcgcggggagcggacttccccgtggggatgaaggttctggttgtggacgacgacccgacgtgcctcgtcgtgctcaagaggatgctccttgagtgccggtacgacggctacaagagcactaactatgttgcgagaaaataggcgtggttttgatgttataataagtgatgtccacatgccggatatggatggattcaggctacttgaacttgtaggccttgagatggatcttccggttatcatgatgtctgctgattcaagaacggatattgtaatgaagggaattaagcatggagcatgtgactatttaataaaacctgtcagaatggaggagttgaaaaacatctggcaacatgttgttaggaaaaaatttaatggaaacaaggatcatgagcattctggtagcctagatgataccgatcgtaacagaccaaccaataatgataatgaatatgcttcctctgcgaatgatggaggtgatggcagctggaaatctcagaaaaagaaaagagagaaagaagatgatgaaactgacctagaaagtggcgatccttctacatcaaagaaaccaagagttgtttggtcagttgagcttcatcaacaatttgtgaatgcagtcaatcacctcgggatagacaaagctgttccaaagaaaattttggaattgatgaatgtccctggcttaaccagggaaaatgttgccagccatttgcagaaattcagactctacctgaagagaattgcacagcatcatgctggaatacctcatccatttgttgcgtctgcttctagtgctaaagttgctccgttaggaggactggaattccaagctttggctgcttctggtcagatccctcctcaagctctggctgctttgcaggatgaactccttggtcgacctacaagcagtttggcattgcctggaagagaccagtcatctttgcgactggctgcaatcaaaggaaacaagccccatggagagagagaaatagcatttggtcaacccatatacaagtgtcagaataacacgtatggtgcattttctcaaagcagcccagcagttggaggattgccatcttttgcagcttggcccaataacaaacttggtatgactgattcttcaaacacattgggaaatgtgggcaattctcaaaatagcaatatgttattgcatgaattgcagcaacagccagacaccttgctgtcaggaacccttcacaatattgatgtcaaaccttctggtgtagttatgccatctcagtcgttaaatgtgttcccggctagtgaaggcatctcacataatcaaaatccattggttataccatctcaatccccaagctttctggcatcagttcctccatccatgaaacatgaatcccttcttggatcaccttcaccatcaaccagtctgttgggtgggcttgatatggttaatcaagcttcaacaagtcagcctttgattagtagccatggagcaaatcttcctggtctcatgaaccgcagctcaaatgcaatgccttcaccaggaattagtaattttcaaagtgggaatattccttatgtggttactcagaatgctatgggagttagctcaagaccaccaggtgttctaaagactgagtgcactgaatcgctgactcatagttatggctatattggtggtagcaccagtgtggactctagcttgctctcttctcaggccaaaaatccacagtatggtttattgcagagtcaaaatgatgttagcagcagctggttgtcttcacaagattttgatagttttggaaattctcttgggcaaggccaccctggttccacttcgtctagcttccagagttccgctcttggcaaattgcctgaccaaggacgagggaggaatcatgggtttgtcgggaaaggcacttgcattccaagtcgctttgcggtggatgaggttggatctccaactaacttgagccacaacattgtaaacagtggagacatagtgaacccggacatattcggatttagtggacagatgtgaaactttcttgaatttgtaattagggttgatcagtgaggactggaaacaaatttagtggtttgaatggttgctcgtattttcgtttcttccttttccttctgtaattggtttataaggggaatcggctatgtgacagcatatggaatcttgctttatagaagtttgttcagtttaaaggacttgaaattaatcagtcccttgccatatagctcctttcctttgttctcttgtagcacaatttttatgacagtcgtaactcaacctagccgatttattcctaaccatattctttctacta

SEQ ID NO: 993 - DNA, 2569 bp, Zea Mays
agtctcctcctcctcttcaccccacctcttcctccctcccttccctccctgttccctttcccacccctgcctgaggccttccgccttcgtctctgaatcgcggcggctcctgagtcccgaggcgccgcctgatgagcggctaggcgccggatctacggcagcgttggaggtctgatttggacgggagagagcgaggtgaggtctcggttttctcgatataggagatggcggcggcagaggcgcggggagcggacttccccgtggggatgaaggttctggttgtggacgacgacccgacgtgcctcgtcgtgctcaagaggatgctccttgagtgccggtacgacgtgacaacatgtccgcaggctacaagagcactaactatgttgcgagaaaataggcgtggttttgatgttataataagtgatgtccacatgccggatatggatggattcaggctacttgaacttgtaggccttgagatggatcttccggttatcatgatgtctgctgattcaagaacggatattgtaatgaagggaattaagcatggagcatgtgactatttaataaaacctgtcagaatggaggagttgaaaaacatctggcaacatgttgttaggaaaaaatttaatggaaacaaggatcatgagcattctggtagcctagatgataccgatcgtaacagaccaaccaataatgataatgaatatgcttcctctgcgaatgatggaggtgatggcagctggaaatctcagaaaaagaaaagagagaaagaagatgatgaaactgacctagaaagtggcgatccttctacatcaaagaaaccaagagttgtttggtcagttgagcttcatcaacaatttgtgaatgcagtcaatcacctcgggatagacaaagctgttccaaagaaaattttggaattgatgaatgtccctggcttaaccagggaaaatgttgccagccatttgcagactctacctgaagagaattgcacagcatcatgctggaatacctcatccatttgttgcgtctgcttctagtgctaaagttgctccgttaggaggactggaattccaagctttggctgcttctggtcagatccctcctcaagctctggctgctttgcaggatgaactccttggtcgacctacaagcagtttggcattgcctggaagagaccagtcatctttgcgactggctgcaatcaaaggaaacaagccccatggagagagagaaatagcatttggtcaacccatatacaagtgtcagaataacacgtatggtgcattttctcaaagcagcccagcagttggaggattgccatcttttgcagcttggcccaataacaaacttggtatgactgattcttcaaacacattgggaaatgtgggcaattctcaaaatagcaatatgttattgcatgaattgcagcaacagccagacaccttgctgtcaggaacccttcacaatattgatgtcaaaccttctggtgtagttatgccatctcagtcgttaaatgtgttcccggctagtgaaggcatctcacataatcaaaatccattggttataccatctcaatccccaagctttctggcatcagttcctccatccatgaaacatgaatcccttcttggatcaccttcaccatcaaccagtctgttgggtgggcttgatatggttaatcaagcttcaacaagtcagcctttgattagtagccatggagcaaatcttcctggtctcatgaaccgcagctcaaatgcaatgccttcaccaggaattagtaattttcaaagtgggaatattccttatgtggttactcagaatgctatgggagttagctcaagaccaccaggtgttctaaagactgagtgcactgaatcgctgactcatagttatggctatattggtggtagcaccagtgtggactctagcttgctctcttctcaggccaaaaatccacagtatggtttattgcagagtcaaaatgatgttagcagcagctggttgtcttcacaagattttgatagttttggaaattctcttgggcaaggccaccctggttccacttcgtctagcttccagagttccgctcttggcaaattgcctgaccaaggacgagggaggaatcatgggtttgtcgggaaaggcacttgcattccaagtcgctttgcggtggatgaggttggatctccaactaacttgagccacaacattgtaaacagtggagacatagtgaacccggacatattcggatttagtggacagatgtgaaactttcttgaatttgtaattagggttgatcagtgaggactggaaacaaatttagtggtttgaatggttgctcgtattttcgtttcttccttttccttctgtaattggtttataaggggaatcggctatgtgacagcatatggaatcttgctttatagaagtttgttcagtttaaaggacttgaaattaatcagtcccttgccatatagctcctttcctttgttctcttgtagcacaatttttatgacagtcgtaactcaacctagccgatttattcctaaccatattctttctacta

SEQ ID NO: 994 - DNA, 1936 bp, Zea Mays
aactaatctaggaaaacttggaagcggacaggatcatcgccaaatcgaaggagattgaacgaagcagcccagccaaattcccctcgccgccccgtcccttctcgacatttcttgtcccgtcgtcgcctcaatctcgaagcctctccggcggagccgcctcatcatcgttccgaaggcctccaaccaaacatcctctagggtttccgcatcgtccgtcgcgatgggcttcacgaagcggtcgccccagcatcccgcctccccagccggcggcgaggtcggcgcccagacggcagggaaggtcacaccagtgccggcggcgccggagtcggcgcccgcggcggtggtgccgaggcctccggacgtggcgcccttcctgaccaaggtctacgacatggtctccgacccggccaccgacgcggtcatctcctggagcgccgccggcggcagtttcgtgatctgggactcgcacgctttcgagcgcgacctgctgccgcggcacttcaagcacaatcacttcaccagcttcatacgccagctcaacacctacggatttcataaagttgatccagatagatgggaatgggccaatgaaggctttgttaagggccaaaaacatcttttgaagaccatcaagagaaagaagaaatcctctcaggatgtacctagtgatctgcagtcggtgcctgtcaaaactgcacctggcactgagaatatcgagataggaaaatatggaggccttgaaaaggaggttgagacacttaagagggacaaggcccttctaatgcagcagcttgtagatctacggcagtaccagcaatcatctagcgctgaagtgcagaatttaattcaacgcctccgtgtgatggagcagaaccagcagcagatgatggcacttttggcaattgttgtccagaatccagacttcctgaaccagctcgtgcagcagcagcgcaggagtaactggtggaatgatgatggtaacaggaaaagaaggttccaagctctggaacatggtcctgtagatgaccaagagacttctggtggaggcgcacaaattattcaatatcgtcctcctgttcctgaaacttccaatcagccaataccagcaaatgaagctttctattcaacccctgcacaaccagcttcaagccctgcacttgagatgcccatggatgtagagatggcttcaaacaatgttaatacctttgattcaactggcaatgattttactgacacctctgctctatgtgaatgggatgacatggatatatttggtgatgaacttgagcacattcttcaacagccagagcaggactttcaagtggaccctcctttaacagttgaggattatggttatgatcatccacggttagagcaggactgtcagatggaagcacaacagaattgcaaaaatcctcaatatgttgcctgtgtcttgaagcaaagggaaagccatgcatctgatgtccattagtactgatcagtttgagctgatgtcataactgaagcatgagcggtggtcccccagaatgttgtccagtaacattagtggatagagtttttgcagatttgtgatgaacagaatcttgagactggcaggttagccaccattgggaacctgaagaccgtcgggattgctcagaattcagtatactaatactaatactaaaaaaaaaatatacagtaacacatgttgactatacatgatttcgttttccttactcgctcgaccaaaggcagccgtacaatgtttttacttttgtccaggtgggagcatctaggtctttaaatggtttcggtgattaatggtgatcctagattattatgatttgcagagactataacttaggttatgataacagtgattgattatgcgtacatggattttgtctcttaaggttggtttggttatcagggatctatagggactagggag

SEQ ID NO: 995 - DNA, 1748 bp, Zea Mays
aactaatctaggaaaacttggaagcggacaggatcatcgccaaatcgaaggagattgaacgaagcagcccagccaaattcccctcgccgccccgtcccttctcgacatttcttgtcccgtcgtcgcctcaatctcgaagcctctccggcggagccgcctcatcatcgttccgaaggcctccaaccaaacatcctctagggtttccgcatcgtccgtcgcgatgggcttcacgaagcggtcgccccagcatcccgcctccccagccggcggcgaggtcggcgcccagacggcagggaaggtcacaccagtgccggcggcgccggagtcggcgcccgcggcggtggtgccgaggcctccggacgtggcgcccttcctgaccaaggtctacgacatggtctccgacccggccaccgacgcggtcatctcctggagcgccgccggcggcagtttcgtgatctgggactcgcacgctttcgagcgcgacctgctgccgcggcacttcaagcacaatcacttcaccagcttcatacgccagctcaacacctacggatttcataaagttgatccagatagatgggaatgggccaatgaaggctttgttaagggccaaaaacatcttttgaagaccatcaagagaaagaagaaatcctctcaggatgtacctagtgatctgcagtcggtgcctgtcaaaactgcacctggcactgagaatatcgagataggaaaatatggaggccttgaaaaggaggttgagacacttaagagggacaaggcccttctaatgcagcagcttgtagatctacggcagtaccagcaatcatctagcgctgaagtgcagaatttaattcaacgcctccgtgtgatggagcagaaccagcagcagatgatggcacttttggcaattgttgtccagaatccagacttcctgaaccagctcgtgcagcagcagcgcaggagtaactggtggaatgatgatggtaacaggaaaagaaggttccaagctctggaacatggtcctgtagatgaccaagagacttctggtggaggcgcacaaattattcaatatcgtcctcctgttcctgaaacttccaatcagccaataccagcaaatgaagctttctattcaacccctgcacaaccagcttcaagccctgcacttgagatgcccatggatgtagagatggcttcaaacaatgttaatacctttgattcaactggcaatgattttactgacacctctgctctatgtgaatgggatgacatggatatatttggtgatgaacttgagcacattcttcaacagccagagcaggactttcaagtggaccctcctttaacagttgaggattatggttatgatcatccacggttagagcaggactgtcagatggaagcacaacagaattgcaaaaatcctcaatatgctgatgtcataactgaagcatgagcggtggtcccccagaatgttgtccagtaacattagtggatagagatttgtgatgaacagaatcttgagactggcaggttagccaccattgggaacctgaagaccgtcgggattgctcagaattcagtatactaatactaatactaaaaaaaaaatatacagtaacacatgttgactatacatgatttcgttttccttactcgctcgaccaaaggcagccgtacaatgtttttacttttgtccagtttgttgcttcggctagcgaggggtgtggaaaaaggaagggataaggcgcttggtt

SEQ ID NO: 996 - DNA, 1646 bp, Zea Mays
aactaatctaggaaaacttggaagcggacaggatcatcgccaaatcgaaggagattgaacgaagcagcccagccaaattcccctcgccgccccgtcccttctcgacatttcttgtcccgtcgtcgcctcaatctcgaagcctctccggcggagccgcctcatcatcgttccgaaggcctccaaccaaacatcctctagggtttccgcatcgtccgtcgcgatgggcttcacgaagcggtcgccccagcatcccgcctccccagccggcggcgaggtcggcgcccagacggcagggaaggtcacaccagtgccggcggcgccggagtcggcgcccgcggcggtggtgccgaggcctccggacgtggcgcccttcctgaccaaggtctacgacatggtctccgacccggccaccgacgcggtcatctcctggagcgccgccggcggcagtttcgtgatctgggactcgcacgctttcgagcgcgacctgctgccgcggcacttcaagcacaatcacttcaccagcttcatacgccagctcaacacctacggatttcataaagttgatccagatagatgggaatgggccaatgaaggctttgttaagggccaaaaacatcttttgaagaccatcaagagaaagaagaaatcctctcaggatgtacctagtgatctgcagtcggtgcctgtcaaaactgcacctggcactgagaatatcgagataggaaaatatggaggccttgaaaaggaggttgagacacttaagagggacaaggcccttctaatgcagcagcttgtagatctacggcagtaccagcaatcatctagcgctgaagtgcagaatttaattcaacgcctccgtgtgatggagcagaaccagcagcagatgatggcacttttggcaattgttgtccagaatccagacttcctgaaccagctcgtgcagcagcagcgcaggagtaactggtggaatgatgatggtaacaggaaaagaaggttccaagctctggaacatggtcctgtagatgaccaagagacttctggtggaggcgcacaaattattcaatatcgtcctcctgttcctgaaacttccaatcagccaataccagcaaatgaagctttctattcaacccctgcacaaccagcttcaagccctgcacttgagatgcccatggatgtagagatggcttcaaacaatgttaatacctttgattcaactggcaatgattttactgacacctctgctctatgtgaatgggatgacatggatatatttggtgatgaacttgagcacattcttcaacagccagagcaggactttcaagtggaccctcctttaacagttgaggattatggttatgatcatccacggttagagcaggactgtcagatggaagcacaacagaattgcaaaaatcctcaatatgttgcctgtgtcttgaagcaaagggaaagccatgcatctgatgtccattagtactgatcagtttgagctgatgtcataactgaagcatgagcggtggtcccccagaatgttgtccagtaacattagtggatagagatttgtgatgaacagaatcttgagactggcagtttgttgcttcggctagcgaggggtgtggaaaaaggaagggataaggcgcttggtt

SEQ ID NO: 997 - DNA, 1885 bp, Zea Mays
gtttcttaaaacccttgagccgtctccaggttttcttttgcttactaattatttcccatgcttttctgctgagggctagagaactgcagcagctgaactttgtcataatttttagcaattttgagatacaaatgcctctcatcagtatcttatagtttgccctttcctttctgcctcaccttgcagggggaggaactgcgcaagcacattggcgcaacttgttacatcgaatgcagctaaaaaactcagcagattattaagggcaggcagaccttacttgttttatggctagaaataatgagggtcatctccagctgccagagatggatcatattcaacccaagaacaccccgcacaatgaaccactgcctctagcctcctgagaactggaacagtggtgttgggtttgtgtctaaggaaatgatccaatctcattgtccagcgcctgctgagtacattcagatgtggtcctcctccgatgaacaaggccatggatgcacaccttgacgagctcaactacacaaaggagatgcagttccagttcacggatgcatatagccgagcatgcagctttcttaaaccacaaagacagttacatcagaagctgtatcagaagtggttcagagttctgtttctgtggcggtcgatgctgttgacttggtagatgacaagggagatagcgatgatgacatcgtcgatcaccatggggacgaggacaggatgactgatgtggagctgtggcagcaacttgaaagtgagttgtaccggaagagggagggagaagaagatgacatagccgaagagatggctgaaagtacaattgctgaggaggtgggtggcgtggctgaagatgtgctcagcgagacaaaggaagtgcataggttctaccctcctggaaaaatcatgcacatattattctccagcagtgaagaagcagttcgtggagaggagcctgatgatgatcatggacatcacttgtgctgttcgtgagatcatggacatcagttgtgctgcagttactgtgaatagaaagacatggtgtttgaatgggggtcagactttatttggacagaatgatgtatggatttatttggtgttcagcctgaggtgtttataaacatctaataaagttgctgtcggcacacatatttgtgaactgaagcaaaaatggaatcatgcagtgtaacgtttgcaatagactcttacagcctgattcgagttcatcctttacaactttacactggtcagaaataatgccattttttgtttatcatgtttcaacattaataatctacaggataatggcttagtgccaattgtggagccagagatccttcttgatggagaccatgggatcgaaagaactctcgaggtggcagagaaagtgtggtctgaggtgttcttctacttggcccagaacaatgttctgtttgagggtatcctgctgaagcccagcatggtcactcctggagccgaccacaaggagaaggcttctccagaagccatcgcaaagcacacgctaacaatgctcaagcggatcccttctggttgtgtccttcatgttgcacgagatgactaacctatagagggtggatagggattgggagacagatccttcatgttgcacgagaagcgtagaacaccccttctcactgtacaaactagatataataagaaaatcatcatggagattatgattcaggaatggttcactacaacgtagatttagtcccacgaccatgacacctgcagttgagtagcatatccagatgttactaaattaccaggttcccgagcttttccttttctcaattttagataggagcgtataactagacaatggatctaatcacttctgtcattaatgtgctaaggtgaaatgtat

SEQ ID NO: 998 - DNA, 1937 bp, Zea Mays
gctcccagtacccgagtatcgaccgagccagataatatcgtaacatcgtctgtccgccaccggttacctctttctccaggtagcgcaccatcggaacggcgaggagcagacgggaacggggatgggaagcgctggggcgctgctctggcacacgccgcagcagctgcacggccgtggcatcctcttccgccagagccggcctctcctgcgccagcgcaacctgcctctaatatcgctagctgccccggcgctcgagcccgagcgccgccgccggcagtgcctccgctgcgctgccgtcgacggggacggcgccctccgggagtctgggccactgccacagaaggagtctccgtccagcggcatcggtgccgcactcgaggacccgcctccaggacctcctgtggagaatggttcctttggaggcccctcacaggaagaacagagtgctctatatacttttctttatccaagcaaagacttacttccagatgataaggagatgagtatatttgatcatctagaggagcttcgtgacaggattttcatctcagttttggctgttggggctgcgatattaggctgttttgctttttcaaaagatttggttatttttcttgaggcaccagtgactgctcagggtgttcggtttttgcagctctcgcctggggaatttttctttacaacattaaaggtttcaggttattgtggccttttacttggaagtcctatcattttgtatgagatcattgcatttgttatcccagatggggcagtggaatcgttgtggtcaatagaccagtactttgaattcatacttgtgctgatgtttagcacagggttgtcctttcaggtccctgttatccagcttttgctgggacaacttggattggtttctagtgaccaaatgctttcgatctggagatatgttgttgttggtgctgttgttgctgctgctgtgcttacaccttcgacggacccgttgacacaaatgctcctggctggtcccttgcttggtttatacttgggtggtgcatggatggtcaagataactgggcgctaactgctttgtgcaaggtgatggtgctccggatagcaagagtcccagtgtaacctagtcttgtaaaaatgaattcactctgcttgcttgtaaaaatgaattcactctgcgtgctcattagatgatactagttagttatccgacactatggtttctatatatgatatatgttttctttatacaacaaaaaacaacataagctgcactggttagtgacaagtactcctagtagttgcacgttatatgcgtgcgcagggagtaagacgacacaagacgaaactcccgctttatattataattagtaaggattgttaccatttcactttataaggctagctttagcagatcttctatctcatcctctattttaaatttttctctgtaaacaatgtcatctacaattcaatgtcctctattttatacactccacttctctattttacatactccagctgaagacagtctaaatttcatgagcagcagaaagttgagcagacggttaaatagtttcatctaatcgatgttgaacgttgaagtggtgctcaatcgcaaaaggcagaaggcttccatccactacaacatcgctcgctgtgtttgccgctggactttcttggttgccggcttggcacagctgcgtcggagggcaggtatgccatcatacatacatatggttatatatcatatatggttttcttgtacaacacaaaccaacataagttgtagtggttagcagtgagtactctcttcctagataccatagttcgaattctagcaattgcacctcatttcttatagttcgctgacgagtggggagcaggacgacatcgaagaaactcccactttaagggtgactaatatgaatgtatgagttgaaaaggag

SEQ ID NO: 999 - DNA, 1502 bp, Zea Mays
gctcccagtacccgagtatcgaccgagccagataatatcgtaacatcgtctgtccgccaccggttacctctttctccaggtagcgcaccatcggaacggcgaggagcagacgggaacggggatgggaagcgctggggcgctgctctggcacacgccgcagcagctgcacggccgtggcatcctcttccgccagagccggcctctcctgcgccagcgcaacctgcctctaatatcgctagctgccccggcgctcgagcccgagcgccgccgccggcagtgcctccgctgcgctgccgtcgacggggacggcgccctccgggagtctgggccactgccacagaaggagtctccgtccagcggcatcggtgccgcactcgaggacccgcctccaggacctcctgtggagaatggttcctttggaggcccctcacaggaagaacagagtgctctatatacttttctttatccaagcaaagacttacttccagatgataaggagatgagtatatttgatcatctagaggagcttcgtgacaggattttcatctcagttttggctgttggggctgcgatattaggctgttttgctttttcaaaagatttggttatttttcttgaggcaccagtgactgctcagggtgttcggtttttgcagctctcgcctggggaatttttctttacaacattaaaggtttcaggttattgtggccttttacttggaagtcctatcattttgtatgagatcattgcatttgttatcccagatggggcagtggaatcgttgtggtcaatagaccagtactttgaattcatacttgtgctgatgtttagcacagggttgtcctttcaggtccctgttatccagcttttgctgggacaacttggattggtttctagtgaccaaatgctttcgatctggagatatgttgttgttggtgctgttgttgctgctgctgtgcttacaccttcgacggacccgttgacacaaatgctcctggctggtcccttgcttggtttatacttgggtggtgcatggatggtcaagataactgggcgctaactgctttgtgcaagctgaagacagtctaaatttcatgagcagcagaaagttgagcagacggttaaatagtttcatctaatcgatgttgaacgttgaagtggtgctcaatcgcaaaaggcagaaggcttccatccactacaacatcgctcgctgtgtttgccgctggactttcttggttgccggcttggcacagctgcgtcggagggcaggtatgccatcatacatacatatggttatatatcatatatggttttcttgtacaacacaaaccaacataagttgtagtggttagcagtgagtactctcttcctagataccatagttcgaattctagcaattgcacctcatttcttatagttcgctgacgagtggggagcaggacgacatcgaagaaactcccactttaagggtgactaatatgaatgtatgagttgaaaaggag

SEQ ID NO: 1000 - DNA, 1586 bp, Zea Mays
gatcccagtaccgctaaatttcctcagtgttgctagtctacagcaggcagattcaaagtgaatggtgttgcataggccttgtttggcacagctttagctccgaggtttacctcaaatcttgactttgtatgctaaatcatgaatcttgagactcacgtttgtctagaatagaaaggaaacagttcaacttcaaccaaacaattcaggtgtaacctacctccatctccacaaagtttctagggttagaaatacctagctccgggaaatcacatatttattgaaggtggagctccgcgcaactggcctatattaccattctcatgcaatttccatactataggtttcaggttattgtggccttttacttggaagtcctatcattttgtatgagatcattgcatttgttatcccagatggggcagtggaatcgttgtggtcaatagaccagtactttgaattcatacttgtgctgatgtttagcacagggttgtcctttcaggtccctgttatccagcttttgctgggacaacttggattggtttctagtgaccaaatgctttcgatctggagatatgttgttgttggtgctgttgttgctgctgctgtgcttacaccttcgacggacccgttgacacaaatgctcctggctggtcccttgcttggtttatacttgggtggtgcatggatggtcaagataactgggcgctaactgctttgtgcaaggtgatggtgctccggatagcaagagtcccagtgtaacctagtcttgtaaaaatgaattcactctgcttgcttgtaaaaatgaattcactctgcgtgctcattagatgatactagttagttatccgacactatggtttctatatatgatatatgttttctttatacaacaaaaaacaacataagctgcactggttagtgacaagtactcctagtagttgcacgttatatgcgtgcgcagggagtaagacgacacaagacgaaactcccgctttatattataattagtaaggattgttaccatttcactttataaggctagctttagcagatcttctatctcatcctctattttaaatttttctctgtaaacaatgtcatctacaattcaatgtcctctattttatacactccacttctctattttacatactccagctgaagacagtctaaatttcatgagcagcagaaagttgagcagacggttaaatagtttcatctaatcgatgttgaacgttgaagtggtgctcaatcgcaaaaggcagaaggcttccatccactacaacatcgctcgctgtgtttgccgctggactttcttggttgccggcttggcacagctgcgtcggagggcaggtatgccatcatacatacatatggttatatatcatatatggttttcttgtacaacacaaaccaacataagttgtagtggttagcagtgagtactctcttcctagataccatagttcgaattctagcaattgcacctcatttcttatagttcgctgacgagtggggagcaggacgacatcgaagaaactcccactttaagggtgactaatatgaatgtatgagttgaaaaggag

SEQ ID NO: 1001 - DNA, 2540 bp, Zea Mays
gcccaactatgcagccaacagcccaacaccggcacacggtctgcaccgcagaaactttgccttccccgcgtccggctactactgtcggggcgtcgacccatattcactcctctgccctctcagatcccgaactaccaaacccccttctcgccggcggaggaaggcgggggcggagaaaagagatcacgatcgctaatccgtgacggcagcggtcgggatggcggcggcgctagctccgggggtgtcccggaagttgaagaaggtgctggagacgcgtacggataacccggatctgctggcctcgctgggcgcgctctccactttctacgtccagaacaccccgcaggcgcgccgcaatctcaaatcctccattgagcagcgtgcacttgccatcaatcgccacttcctcgacgcctcgctccccgcccacaaggcgctggatcgcgtcgagggggaggtgcacgcgctgaacgactcctggaagaagatcgaggaagcattgaacagttgtagtgcaagtactggggacatcatcagtacaacagagaggttgcaacaggaacttgaagttatcactcagaggcaagaaattgtgtcatgcttcctgcgggattaccaactttcaaatgaagagataaatgcacttcgggaagaggagatagatgacaaattcttcaaagcattgctgcatgttcaagaaatacactcaaactgcaaggtcctgctgcgaacacaccaccagcgtgctggtttggagcttatggatatgatgtctgtgtaccaagaaggggcttacgaaagattatgcaggtgggttcaagctgaatgtaagaaattaggtgatactgacaatcctgaagtaagtgagcttttgaaaatggctgtttgctgcctgaaggaaagacctgttctgttcaagtattgtgcagaggaggttgccaacatgaggcaccatgccttattcaggcggtttataagtgctcttactagaggtggacctggagggttcccaagaccaatagaagtgcatgcccatgatcctcttcgctatgtaggcgaaatgctgggttggctacatcagtggtccaacttttcgacgtcagtctggtagagatggtgattcttccaaaggagaacctgatgtaacttctgtgcttgatagaatatttgaaggagcatgtcggccatttaaagttcgagttgagcaagttttgcagtcacagccaagcctgatagtttctttcaaacttagcaataccttggaattctattgttacacgatatcagaactgctgggtgaagacactgcgctgtgcaatacaatatggtcacttagagatgcagctcagcagacattcttcaatatcctgaagagtcgtggagagaagttattgcgatatcctccactagttgcagttgatctctctcctccaccagctgtaagagaaggaatttctttgctgcttgagctcatagatacctacaatagcatgatggttcctgcctctggaaaaagaccaaactttgaccctgttatttctgcattattggatccaataattcaggtgtgtgagcaagctgcagaggcacagaagtcaaaaggatcacttgcgcggcgtggtagaacaagctctgatcctagtggaaatagcagggattctatatcagttgatgctattctgtctaagaatttatctacgtcgattctgagtgccgaatcttcatccaaagtctacctcatcaactgcttgtcagctattcaggagccattgatgggccaggaggtcgctacaagctatgtaaacaacctgcgctctatgattgaagcacatatttgtgtccttgtcgataaagaagttgactgcattcttaggaaatgtggactatcaaataagatgccgtacataaaggagtatggtagcaaggctgatgcaaggcctctggcagatattatcgagacgtcgccacaaatgcttatggaatgcttgaaggcattctatggtattgtgactggaacagaaggttccttgcctgaatttgagcaactgcaggttccaaggttacgttcagatgcctgcaatggtttggcaagagctctagcagaatcttatgagctcatttacagcgcagtcatggatccgaataacagttatcctgacccaaggtctttggttaagcactctcctgaacagataagaactatactggaagcctgaggtcttcgcacgatgccttatggtacatgttaagtagaggtctttcgtgcatgaaactttgtcatgtaaatttccgactacaagctgtgggttcaattgattacagaaatatggaagcggtgactctctgaactcatgtatcggtatctagtgtctcgttgtcctatattccttttttctttatgtatcaagttattgtatacttcatgatgtaatttgaggtacaacttaagtgcttaaccgactattatgataccaaagctactatgcaagcatggtgaaggcttgtcggggagaaggtcgaatgggaccttgataatccgc

SEQ ID NO: 1002 - DNA, 2441 bp, Zea Mays
caactatgcagccaacagcccaacaccggcacacggtctgcaccgcagaaactttgccttccccgcgtccggctactactgtcggggcgtcgacccatattcactcctctgccctctcagatcccgaactaccaaacccccttctcgccggcggaggaaggcgggggcggagaaaagagatcacgatcgctaatccgtgacggcagcggtcgggatggcggcggcgctagctccgggggtgtcccggaagttgaagaaggtgctggagacgcgtacggataacccggatctgctggcctcgctgggcgcgctctccactttctacgtccagaacaccccgcaggcgcgccgcaatctcaaatcctccattgagcagcgtgcacttgccatcaatcgccacttcctcgacgcctcgctccccgcccacaaggcgctggatcgcgtcgagggggaggtgcacgcgctgaacgactcctggaagaagatcgaggaagcattgaacagttgtagtgcaagtactggggacatcatcagtacaacagagaggttgcaacaggaacttgaagttatcactcagaggcaagaaattgtgtcatgcttcctgcgggattaccaactttcaaatgaagagataaatgcacttcgggaagaggagatagatgacaaattcttcaaagcattgctgcatgttcaagaaatacactcaaactgcaaggtcctgctgcgaacacaccaccagcgtgctggtttggagcttatggatatgatgtctgtgtaccaagaaggggcttacgaaagattatgcaggtgggttcaagctgaatgtaagaaattaggtgatactgacaatcctgaagtaagtgagcttttgaaaatggctgtttgctgcctgaaggaaagacctgttctgttcaagtattgtgcagaggaggttgccaacatgaggcaccatgccttattcaggcggtttataagtgctcttactagaggtggacctggagggttcccaagaccaatagaagtgcatgcccatgatcctcttcgctatgtaggcgaaatgctgggttggctacatcagtctggtagagatggtgattcttccaaaggagaacctgatgtaacttctgtgcttgatagaatatttgaaggagcatgtcggccatttaaagttcgagttgagcaagttttgcagtcacagccaagcctgatagtttctttcaaacttagcaataccttggaattctattgttacacgatatcagaactgctgggtgaagacactgcgctgtgcaatacaatatggtcacttagagatgcagctcagcagacattcttcaatatcctgaagagtcgtggagagaagttattgcgatatcctccactagttgcagttgatctctctcctccaccagctgtaagagaaggaatttctttgctgcttgagctcatagatacctacaatagcatgatggttcctgcctctggaaaaagaccaaactttgaccctgttatttctgcattattggatccaataattcaggtgtgtgagcaagctgcagaggcacagaagtcaaaaggatcacttgcgcggcgtggtagaacaagctctgatcctagtggaaatagcagggattctatatcagttgatgctattctgtctaagaatttatctacgtcgattctgagtgccgaatcttcatccaaagtctacctcatcaactgcttgtcagctattcaggagccattgatgggccaggaggtcgctacaagctatgaaatgtggactatcaaataagatgccgtacataaaggagtatggtagcaaggctgatgcaaggcctctggcagatattatcgagacgtcgccacaaatgcttatggaatgcttgaaggcattctatggtattgtgactggaacagaaggttccttgcctgaatttgagcaactgcaggttccaaggttacgttcagatgcctgcaatggtttggcaagagctctagcagaatcttatgagctcatttacagcgcagtcatggatccgaataacagttatcctgacccaaggtctttggttaagcactctcctgaacagataagaactatactggaagcctgaggtcttcgcacgatgccttatggtacatgttaagtagaggtctttcgtgcatgaaactttgtcatgtaaatttccgactacaagctgtgggttcaattgattacagaaatatggaagcggtgactctctgaactcatgtatcggtatctagtgtctcgttgtcctatattccttttttctttatgtatcaagttattgtatacttcatgatgtaatttgaggtacaacttaagtgcttaaccgactattatgataccaaagctactatgcaagcatggtgaaggcttgtcggggagaaggtcgaatgggaccttgataatccgc

SEQ ID NO: 1003 - DNA, 2478 bp, Zea Mays
gaaactttgccttccccgcgtccggctactactgtcggggcgtcgacccatattcactcctctgccctctcagatcccgaactaccaaacccccttctcgccggcggaggaaggcgggggcggagaaaagagatcacgatcgctaatccgtgacggcagcggtcgggatggcggcggcgctagctccgggggtgtcccggaagttgaagaaggtgctggagacgcgtacggataacccggatctgctggcctcgctgggcgcgctctccactttctacgtccagaacaccccgcaggcgcgccgcaatctcaaatcctccattgagcagcgtgcacttgccatcaatcgccacttcctcgacgcctcgctccccgcccacaaggcgctggatcgcgtcgagggggaggtgcacgcgctgaacgactcctggaagaagatcgaggaagcattgaacagttgtagtgcaagtactggggacatcatcagtacaacagagaggttgcaacaggaacttgaagttatcactcagaggcaagaaattgtgtcatgcttcctgcgggattaccaactttcaaatgaagagataaatgcacttcgggaagaggagatagatgacaaattcttcaaagcattgctgcatgttcaagaaatacactcaaactgcaaggtcctgctgcgaacacaccaccagcgtgctggtttggagcttatggatatgatgtctgtgtaccaagaaggggcttacgaaagattatgcaggtgggttcaagctgaatgtaagaaattaggtgatactgacaatcctgaagtaagtgagcttttgaaaatggctgtttgctgcctgaaggaaagacctgttctgttcaagtattgtgcagaggaggttgccaacatgaggcaccatgccttattcaggcggtttataagtgctcttactagaggtggacctggagggttcccaagaccaatagaagtgcatgcccatgatcctcttcgctatgtaggcgaaatgctgggttggctacatcaggccctggcatctgaaagagagcttatagttgtcttgcttgatcctgatgcaatgactgacagtggtccaacttttcgacgtcagtctggtagagatggtgattcttccaaaggagaacctgatgtaacttctgtgcttgatagaatatttgaaggagcatgtcggccatttaaagttcgagttgagcaagttttgcagtcacagccaagcctgatagtttctttcaaacttagcaataccttggaattctattgttacacgatatcagaactgctgggtgaagacactgcgctgtgcaatacaatatggtcacttagagatgcagctcagcagacattcttcaatatcctgaagagtcgtggagagaagttattgcgatatcctccactagttgcagttgatctctctcctccaccagctgtaagagaaggaatttctttgctgcttgagctcatagatacctacaatagcatgatggttcctgcctctggaaaaagaccaaactttgaccctgttatttctgcattattggatccaataattcaggtgtgtgagcaagctgcagaggcacagaagtcaaaaggatcacttgcgcggcgtggtagaacaagctctgatcctagtggaaatagcagggattctatatcagttgatgctattctgtctaagaatttatctacgtcgattctgagtgccgaatcttcatccaaagtctacctcatcaactgcttgtcagctattcaggagccattgatgggccaggaggtcgctacaagctatgaaatgtggactatcaaataagatgccgtacataaaggagtatggtagcaaggctgatgcaaggcctctggcagatattatcgagacgtcgccacaaatgcttatggaatgcttgaaggcattctatggtattgtgactggaacagaaggttccttgcctgaatttgagcaactgcaggttccaaggttacgttcagatgcctgcaatggtttggcaagagctctagcagaatcttatgagctcatttacagcgcagtcatggatccgaataacagttatcctgacccaaggtctttggttaagcactctcctgaacagataagaactatactggaagcctgaggtcttcgcacgatgccttatggtacatgttaagtagaggtctttcgtgcatgaaactttgtcatgtaaatttccgactacaagctgtgggttcaattgattacagaaatatggaagcggtgactctctgaactcatgtatcggtatctagtgtctcgttgtcctatattccttttttctttatgtatcaagttattgtatacttcatgatgtaatttgaggtacaacttaagtgcttaaccgactattatgataccaaagctactatgcaagcatggtgaaggcttgtcggggagaaggtcgaatgggaccttgataatccgc

SEQ ID NO: 1004 - DNA, 901 bp, Zea Mays
aggtgtgagcaagctgcagaggcacagaagtcaaaaggatcacttgcgcggcgtggtagaacaagctctgatcctagtggaaatagcagggattctatatcagttgatgctattctgtctaagaatttatctacgtcgattctgagtgccgaatcttcatccaaagtctacctcatcaactgcttgtcagctattcaggagccattgatgggccaggaggtcgctacaagctatgaaatgtggactatcaaataagatgccgtacataaaggagtatggtagcaaggctgatgcaaggcctctggcagatattatcgagacgtcgccacaaatgcttatggaatgcttgaaggcattctatggtattgtgactggaacagaaggttccttgcctgaatttgagcaactgcaggttccaaggttacgttcagatgcctgcaatggtttggcaagagctctagcagaatcttatgagctcatttacagcgcagtcatggatccgaataacagttatcctgacccaaggtctttggttaagcactctcctgaacagataagaactatactggaagcctgaggtcttcgcacgatgccttatggtacatgttaagtagaggtctttcgtgcatgaaactttgtcatgtaaatttccgactacaagctgtgggttcaattgattacagaaatatggaagcggtgactctctgaactcatgtatcggtatctagtgtctcgttgtcctatattccttttttctttatgtatcaagttattgtatacttcatgatgtaatttgaggtacaacttaagtgcttaaccgactattatgataccaaagctactatgcaagcatggtgaaggcttgtcggggagaaggtcgaatgggaccttgataatccgc

SEQ ID NO: 1005 - DNA, 1039 bp, Zea Mays
ttcttacatatttctttgttacgaacaatgcattacaccatttctctaccaaaatctattaactagaacatgcaaacgatgaaaatgtggaatcatctgagacaacctaatcggacattactcacaatcattgcagtagctatggccacaatccatctcggaggcagccgagggtggcacatcatcataacaaacattgcaggtcacctccgccgaggaggttgggccggcattcctggtgtactgaagaggaataccagcctccgagaagagcctatccctgtccttctgatcaagaagctcgaaaatcctctccacgtcccagcggtagtggatgaggagcgtccgggcatggtgctccctcaaccctagcagctccatcaccttcctaagatcctctctctgcgccaccaaaagggattccttggtgatcacctgcaacaaacacaagcaaaggaatgcatcaagaaaaccaagagtggtctaacaacggagacagatgcccaggacaaaatcaggacagaacacgcacagatgaggcagaccaatggcagtcctcgaggtgctcgtcctcgagaacatggagaacagactcttctagggcatcgtccccctgatcgctcaggtagcaatcgtcgtcgtcttcctgctccaattccgacgaggacaccggagacgaagtatcctcagcgtcgcggcccatctgccgccgatccgatcagcctcgaaacgaaacggccggcgatagtacctctcgcacggaagaggggaacagataggcggattgggtcggtcaagtgcaagaaccggcgcgggcggggaaggcggggatagaggaatcgtggcgcgaaagcggtcgcatcgcgaagggagtcggagacggcggcggtgaagcttgcacgggaagcgaagacaaggggggaggcggcggcgcaagcgtagcaggtatggttgtggccggaaattgggaagtctggctgatgtcttttgcggcgtactagagagtgatggcaatggtaccgaataactgataggtttt

SEQ ID NO: 1006 - DNA, 2831 bp, Zea Mays
cggacatgaagtagagcgacgtggcgtagaagcacaccggctccatcacgtcccacgacagctcccagaaggaagctggcaagtcggttgtgctgaacaacctcatggggaaccctatgttgtgctgaacgacggaaatttatttgcaactgaagcataatattgttctatcttctgtgttttctctggttatgcacttggaaagatcctatgttatattggttgtgctttgtgttcggttgtctaaatagcactaattttttctaacttctctagcttatgttgctttgtggtagtttgctcatccttatatgttttatttctcagatattgttttggtccttggatgtgttatgtgttaatgtggtataattgctaatagaataccatcttatccggcgaatctattttctagaggtcacttgacccataggttctctcacaaccgcacatgcaatatatttcttaactatttttgtacaatattgtagtcaatatagtcgtttcaacttgcatcattgattaatatcctctgcagtagggcatacttagcactaaggggtgtttactgtctggggccacagttttaaatgctattaaaaaagcatttactttcagtgccagcctaattgatgttgtactagggcaattttatccttagctgattaccataggtacactgaccacttgcagtatagagatgttgttgttctttttcctctgttgcatcataactttgtcgttcgggttcataagacagtttagatttctctgattcttgtgcttttcctttggaatacacaatgctccttcaagcaactaagaaatagccttttgtttgattgccttctcatttaagacaacgttttatttatctgtgcgtcttcttttgttgttacctatagtttatagacaatgattttatccacttgctgcattgatgttggtaccattcagagtcaggttggtagaagttattcttgagcattataagcttgaatatgatgaagcgacggtcacattttttgtttgtctggttcctgttgcttgggatgtgtacgtaaagttttgtgtatgcctttttttatctaattaatggggataaaattagtttctaaaagttaagtagcataaactttttaaggaacatattaattttgtaagaaattctgtcctacggtcctgctataaattttattgtaagaaattagttttgtatatgcccttttgatctaattaatggggttgctgttggaaaatttaaatcttcttcaaagccaatatccacgttagctatgtcatcacgtatctccactatgacatgacttcttagcttatgactatgttggctctactacacttgctctcataaattgtgttttcttgatgttacactactccgattgctttgtaagaaccaacactaggttactctcagctctgtttgttttttaaaacaggtcggatcaattctgtattctaaattctgaataaatcatgtcatggaatacattactgaacaggtaggtaatctatattctgaacatataaacaaaatagagaatcagattagaggaatagattggaatgagattattgttttaacttgtgtaccttcaccatgtgatttcactttttcgaagtttattataattccccatgtaacattttcatcaatggaaaagttggctggctcatctgtactaaattcaacgtggacaagccttccaggttgtaagaaaggtagaaaatgttttggagagaggacaatatcatggacatccttcttcaaactcctgtgctactgtaagagatcataataatccttcgagctctctgcatcctcaatgaccatggaattctctctaattccagttccttgatttgctattgcttctgcatataattcaaacggagtgctattgtaagtttcaagaaatgctttaggtttcttcggtgggatttctgtgtttttttttacagaagtccctacgatgaccaaatgtcaataatataggtgccaccactcagtctaccaggctatcggcacaaattattatacttgcttgtaatggtccaaagcttactgcatgggtgcatctttgaagcactttggaatgtattaaataatgcttgagctctcatgttctttttcttcacatgaaacattatacatagggaaaactaagtcacagtggggtgggaaagaatattttaagctttggagcattaaccggctatttgagcttgaggagtttacgcgcttcgctaaaacaagttcagtttgcttggacttagttcagaagggagccatgttagactggctgaagaagatgcaccaagaaaagcagttggacacacttgtcgacaagggcctgaggagcaaatatgaccacattgagctagaggagatgatgcaagtggcgctgctatgtacccagttcctccctggccacagtacgtcagtaccaagatgttagaggtggtcaggatgctggaggccggcgatgggcttgcagagcagtgggtggcatcacaacacacaaagtcacacaaattcaaggtgcccgagttttccttcagctgctgctctgacctgacggacgattcgtcactgctgttgcaagcagtggagctttctgaaccgagatgtaacatgaacgtgtacgtacattacccaaatgtggcacacacactttctttttagtactactgtcaggatgagcgtgtaggaatatttacctttctggaagcttttagaattgggtcaaaatgatgcgtgtattctttctttcttttaattggcgccagctctccccttttgttgccat

SEQ ID NO: 1007 - DNA, 3024 bp, Zea Mays
gtgctcgactgcagccaccgcccaccactaccaccaccgatcgacacgaaacacccaggccccactccccaggcgcccagcaggtagcagccgcgccgccaaaagcgatcgcgcggcctcctccgtctccgtggctccgtccaaatccgctgggtcaagaggaggacgggtcgcgcggccccctcgccgagacccacgggccgacgcaaacccaggaaagaaacgaagcgagcggcaccaccggcgcgtcctcggctcctcgcgtgcgtgcttaccccggcgaatattcgaccacggaagccgcataacctccgtccatcccatccccgctcgcctctcctctcctcgccccgctctagacgatcgatggccgcgacggcggcggaggagatggagaggatggtggaggcggagtgggaggaggggaagcaggggatgaggaagaggaagcggtacgggctggtggagtaccgggcgctgccggcttacctgcgggacaacgagtacatccaccgccactaccgctgcgagtggccgctcccgcaggtgctgctctccgccttctccatccacaacgagaccctcaacgtctggacgcatcttataggatttttcatctttctcgctctgaccatatacacagcaacacaagttccaaatgcagtagatatccggagcttgcagcatttgccagatgtactgagaaaggctgatattcataagattcaggcagagcttgtgtcatgtcttccgtcgttacctcacctttcagatctacaaaagctgaaggatgagctgaagacctcttggaattctatggaggttcttccatctctgtcccgttggcatctcttggagttactcgcaaattgtctgccacacagatttacccatcccaatgaaacaagtttgtctgttcttgtaagtagtctacaactcgctgaattacttgattacattcttttacttttgctacaagggtactactgttttgcattaaggtcaagggaggttaatttttctgaagttggcgaagatttcacttctgtaggtttatatcagagaaaatctgaagatcaatgtgatagatctttctgaccttaggaactagccgattccctctcttaacctgtctcaattctttctaataaattgtagatttataacttgtgcactagtgaggtagagaaggagagagagggagtacgaggagccataccttcgggcctgaggtggagagcagccgcggtggtagtcggggtcgtagatggctttggaagttgagcgcctccgtcctgatttatttctcctccatatgtgtttggaccttggggtggagcattagtggccggcaacatagaactattaggtctacaggcgccatgggtagattgggtgatttctgtcattgaggcgctagataggagattggatcctttctttatttggctgctagggtttagcaaaagtgcggaagtgttggctttcgtgccggccactgcctcggttattatagcgcctgtgtcaggggctataaccacggaaagtttgcgcctcccgatcagggcgcgagttcgctccagactcggttccttaaccgagtacaagaacatatcctacgcaatgattactggaaaaacagtagcattcaggcagttgccgatttaagagattatattaagaacactagtgtcctagggctacatcactgtgtttttctgctatgtatcaatagaaacttgcactgatttgtgctgctggttaaaagaaaagaacattaatttatgtactactcacccaaattaatggaagtgtaattactagcatcgtcgccttgtaggttaagtttcgctaaacgacaataacattagtttacgtattactcatccaaatcagtgaaagtgtaattactcattgtagattaagtggccttacttttgataaaaatatatttaccttcagtggagttctgtagcatagggtggtaatttggtcatctgttccgatcagattatgggatgcattgcttttgaaagaggctcataacttgtgtgttcagaactggagacagcaacctttcttgttttcattttgcgcagcaaagcatgaaggaggatctagcaagcctgattgcaccgcaactgatcagaccaattgcgcggtggccattctatgccttcttgggaggagccatgttctgcctcctggccagcagcacttgccaccttctctcctgccattctcgccgcctagcatacattatgcttcggcttgattacgcaggcatcgcagctctaatcgccacatccttctaccctccagtatactattctttcatgtgctaccccttcttttgcaacctgtacctcagtttcataaccatcctaggagtggcaactatcgcgttctctctacttccggtcttccaaaatccggagttcagaaccatcagagcatgcctcttctttggcatgggtgcatctggcgtgatacctgttcttcacaagctagtactcttctggcaccaaccggaggcattgcacacgaccggatacgaaattctgatggggctcttctacgggctgggagcattggtatatgcggcacgggtacctgagcgctggatgcctgggaagtttgacatcgccgggcacagccaccagctgttccacgtcttggttgttgccggagcctacacacactaccacgcagggcttgtgtacctcaagtggagagacctgcaaggctgctgaaaggtactgcatcgttgaggatgtggatagattgtagattccgtgaattcaggctgaaggtcatggtctgttgtaaattgtaacagtaatcatgaaacaattgctacaagtctaccaggtagtcgggcttccattaataatcaattgaagactagtatttatgctattactaaatgttcgtgtgactgatgcgatatttcattttcagtctcttttctgctaattcatgtacagttgctagcagggccgcctccttgtattgtatgtggtt

SEQ ID NO: 1008 - DNA, 2710 bp, Zea Mays
cccatcgctttcctgtttatgtccgtagcaggagaaaaaaacgaaggctatttggtattagataaaaagaatataaaagaaaaaccaaaaaaagtgagatgacaaggggtgtgcagggaggcccacccacacgcgaagtgtcagtgagtgtgaaaaggaagggactggtccctacaattccatccaatccctccacacctctgccctcactcaaacacacacaaaagaaaaaaatgccagcacaaataaaatactcccatctggatattcctgctctcccttcttctccagtccacccactatagcttggactagatctcaaattctcccacagtttcccactccccgtctcccactctcccccaccccccgcacccgccgtcttcccctccctcccccgtcagatactcagatcttccccatatctctgtgttgcatcactcgccgcaatccactcccaatcctaaacccgaaagctctcagctccgcctccctgttcgttcgtccgccttttgactcccccctagctagcagctgttgcggagcaaccccgcaattccaagaaaagcaactggtcaagaaagagtggaagaaaggaggatggtggtgatgatggcgttaagtcaccccatgattcgccccatcattccgtcgcctccagggcctgcgtgctgctaaaagggtctcgccgtccgtcgtggtggtggtgtgcgtgggcggggggagtcgtcgctgcgccgccacaatgccgcagtaccaggagctgccctgcggcgggcaggtgctcgacatcgacacggcgctcaaggatggcatcctcgggggcgcgctggagcccgaggatgccgcggcgggggacgccgggaagcagcctgtggagctgcgcaagatgatggacgagctggacgcggccggggacggcggcggcgacgaggcggtgccggcggtcttcatctgcccgatctccctcgagcccatggtggatccggtgacgctctgcacggggcagacgtacgagcgggccaacatctcgcggtggctcgccctgggccaccggacctgcccgaccacgatgcaggagctctgggatgacgcgctcacccccaacgccactctccgacagctcatcgccgcctggttctcccgccggtacacgaggtttaagaagcgctccgcggacttccacggccgcgccgccgatctcgtccacggcctccggggcacggcgatgcccaggagacaggccctcaagggccaggcccgcgtcgcggcgctgcgggagctgcgcgccctcgccaccgcccaccaatccgtcaccaaggccatcgccgaggccggcggcgtggtcctgctgacgtcgctgctcggccccttcacgtcccacgccgtggggaccgaggcggtcgccattcttgtcagcggggtgccgcttgacgctgacacgaaggccgcgctcatgcagccggcgaaggtgtcgctcgtggtcgacatgctcaacgagggcgcggcggacaccaagatcaactgtgtccgcctcatccgcatcctcatggatgagaggggtttccggccggagacggtggcgagcctgagcctcttggttggtgtcatgcgcctcatccgggacaagcggcatccagacggtgtggtcgcggggctcgagctgcttaattcgatctgtgcggtgcacaggccagcgaggagtatggttgttagcatcggtgcggtgccgcagctggtggaattgttgccggagctagcaacggagtgtgttgagccggccttggacatcttggatgccctgtctgcggttccagagggtaggacggctcttaaggattgtccgcggacgatacccaatgccgtccgcgtgctgatgagagtttcagaggcatgcactcgacgggcgctgtcgatgctgtggacggtgtgtcggatggcacctgaagagtgtgcacctgccgccgtcgaagctgggctggcggcaaagcttctacttgtcatccaaagtggctgtgcaccggagctgaagcagaaagcgtcggagctgcttaagctgtgccgcctcaactgcactgacaccctcttcatctccaagtgcaaactcacaaggacgattcagtgaggagatgcaagtggtgtgatttgattcgatgatgcgtggtttgtcgattgaccttgctgagttcagagttccaaggaaatggaatttgccaaattgacgaatggtaataatgagcatgtatagaaacctgcagatttagccctgtcatcttatccgaagagatcagggtggttgagcagatggcgagactggtggttaccataacaattccaggggagaaaagaagcaagcaatgcagcatgattactggcaagcaggcgggtgtacatgcaaattgatgtggatttgatcagctcaataaacacctgaggctgggtggacccatgtctctcgtacccgcgttctaccagcatcctgggaaagctggtcttacaaatcacatcacatcagacgatccgccatcaatatttttcctagtccctgcttttccactccctagtcagcgagggtaagataaagccacggggcggtagagcctactatggccgtccatgattgatcggagcgtcaggcttttgctttacgcggccaaaaattagcaaagtaacagtagatgagacaccaacaaagagagagagagaggcg

SEQ ID NO: 1009 - DNA, 3765 bp, Zea Mays
aggagctgaggctgagcggcggcggcgggctgaacagactctccgagatcttcggcgagattagtctgggctgatgctcatccggttggctcctccccttctcagctccttaaaggcatggcgcgtgtaccagagtcggctcctctcggtttttctttctccagtttgctgttccagtcacaagttgatcgatccgttcggtccctgtgtggtgctgtgttcctctgatcgctgtcaaccgtggcctggtgcttgggctccctgctgcgcggtgttcatcttctcgggctggtgccgtggacgtctccctcggctccggcagcggctctagtatctccgtcaacctcccgccgtgcaggcccggacgtgggcggcggaattggttttctgggacagaacttcgtgttcgctgagctggtcttcccacgtagacaatctacgtgttgtgagttacccgttgcctcgctttatttattgagtaattttgtgcaatctgctagtattatttacttgggtgtgattgcacaatatgtgggcggatttgattgctcgatgatgatagcggtgtagtgagacgacgtgacagtctgggttttagtgtgttgttattttcagcattgatattatttgtgcctagttatttcttactattgtgcaagctgattatttaagttcattattgttccttaattcttatgcacactgttttgatcttaatattcatgcttgatttctaggctcataatatttgttctaaaaccctgttttggtaagataggattgtcacgttagtcgaggatctttgatcactttttagcgttggagggctgtctattgcagcaacccgctattttgagagcaatattttaatataaacaatcatgtttatttgtttaatctgccttcttcatctacttgccatgtttaatttgcaattggatttgagtagctatattacatgttttcatgtcctggaattgctactgttcattgctgttataattacatatggcatttatctgagttatatgcttgttttattcggaattagtatatttaatatatttaaatattatggaagtatgtcacttatttctctaaatttacaacaatccagaaaaccaattcgtataatggcctccagttctgatgtcattaagcctgaagcgttcgacggcgctagctttaagcgctggcagattaagactcgcatgtggctcactgacctaaaattattttgggtagtgacatcggctgttccccaggctgcatcagatgattctgatgatgcagcgaaggccgccgcacttgcggagaaggccaagtgggacgaagccaatgaggcatgcttgtctcgtctgctgaacgtcttgtcgaaccgcttatttgacgtgtactctggttttacctccgccaagggtctatggactgaacttgagaacgagttctctgaagttgacaatggcaatgagtcattcacaacggaaaactacctcaactataaaatggttgagggaaggtctgttatgaagcagctacaggagattcaactccttgttagggacttggtccaatatggctgcgtcctaccagacagttttcaggtgaatgcaatactggcaaagctcccgccttcttggcgagactttgtgacttcacgccgccacatgaagaagcaaatgactctcactgagttgtcagctgtgattaatgtggaagagcgtgcaaggtccagtaacaagccatcccagcaactccaggctcacgttgttgagaagggtggagatagaaaattccagaagaagaagaagaactctccacagaagaatatgaaccaacctaagtccaaaacgatgaagaagaaaaagaaggactttatctgctacgtttgtggtgtctccgggcatacagctcggaggtgcaaactgaggaagggaaaaggtcctccacctcagcgcaaagaagggaacgtggtggttaactccaccccagggtatgcacctcaggcctttatggcaagtccattagatgactggtggatggattccggtgctactgttcatatttgtgctgatcgatccatgttctcttcattccagggattcaacagcgcaccagtcttgatgggaaatggtgttccggcagcagttcgaggtactggacaggtctacctgaagttaacttcaggaaagacgctcgtgttgaaggacgtactctatgtgccatcgatgagccggaacctcatttcagtgtcgctgctatgtcgacagggtctcaaattagtgtttgagtctaataaagtggtcctgtctaagtttggtacttttgttggaaagtcatatgagtcaggcggtttgttccgtctttctgttttgaataatcattcttcttaccatgttaatgtggtctgtagtaacgattccattaataatatatggcattcccgtttgtgtcatgtgaattttgaggccattaagagattaagtgacatgtctttaattcctgaatataaacatgttaaaggtgtaaaatgtggtatttgtgtgcaagccaagtagcctagaaaaccgtttcatacggttgaaggcagaagtaccactcctttagaactaattcactcagatatctgtgagatgaatggtataatcacaaaaggcggtaaaagatactttcttaccttgatagatgatgctaccaggttctgttatatttacttactcagaactaaagatgaggcactagaacactttaagatctataagactgaagttgaaaaccagctagacaagaaaattaaaaggttacggtctgatagaggaggtgaatacctttccaacctttttgatgagtactgcaaagagtgtggaatcattcatgaaaccactgctccatattcacctcagtcaaatggggtagctgaaaggaagaaccgaacggtgtgtgacttagctaacgctttgttgcaaagttcggggatgcctgacatctggtggggcgaggcagtactcacggtgtgctatgtcctgaacagggtgccgcctcgcaaccgtgaggccacgccctatgaaggatttaaaggaaggaagccagatctttcgcatcttcggacttggggctgccttgcaaaggtgaatgtgccgttgccgaagaagagaaagctaggccctaagaccgtagactgtgtcttcctgggttatgcacataacagtgcagcttatagatttctagtggtccattccgagacaagcgaaatcgctataaatgtaataatggagtctcgggatgtgacgttctttgagagcattttccctatgcgggataaggaagtagtagccccagacggtccatctcggacatattctctgccctcgagtgtccatgaccagactccagatttggagttaaggaggagtaagagacaaaggactgaaaagtctctgggtgatgattatattatttatctagtggatgaagaaccacgctccctcacagaggcatatacatctccggatgcagagtactggagggaggctgtccgtagagagatggattcaatcatctcgaacggaacttgggagataactgatctcccagctggttgcaagcctgtgggctgtaaatggatctttaggaggaagaggagacccgatggtactattgaaaagtacaaggcccgtcttgtggctaagggttttactcaaaagaaagaggaggattattttgatacttattctccggtggctcgattgcccacaatccgtgtgc

SEQ ID NO: 1010 - DNA, 2263 bp, Zea Mays
cgcccactcatcgcgtgcgcctgctacatagccatgagagcgagggaggcgtagggaccagggagcggtggcagcgtgagagatcgacggccacaaggacagggcgggggccaacgtcgtcttcaagccccgctcaccttcctcctcctcctcttcagcgacgaccaccacctcgccaccattgccgttgtaggaagcgaaggtggatccggcgccctcttccccctgcgatgcaaatctcccccgcccccatccccttcttcgttgcatctccgcaatggcgtcgggctcctctcgcccccaaattgaccagggcaggtctggggcacgaattgaacatggttctatttcagcttgggagtgtgccagtcgtcgacgacacgcgatacgcttcaatcgacttcgccaaccactgcacgccgcagggggaggagagatgaagtggggactggcagccgtcatggcttccacgacgactgttgcacgtgatttctcgggggataaatgcaggagaagtgaggaaactgcaggatacaaggatttacagttgcaattgccttctaaaacagatttacagccaccagctacactgatggctgtcatgccctccagagagacagacaatattgcagaacacggacataatgcagccaagcatgtagcctcattaatcagtgtagatacgcctaaagtcggccctgacatacagcaacacacgaccaagaaaagagtgttcgatctgttagagctcgatcatcaccgataaaaaggctatgaagaaactgtttgtaagtcaacttgaatgtaaagacactcctgatgagcccaggctgcatacaacattggttcaaggctctgcttcttgccctccagaagattaaggtatctcaggagcagaaaaaaatctgcattgcgacaactgagccacttttgatgtttgcccttagctgtggaatgtattcttctcccaaggtaagctgtcaaagcatcttgggttttgacttctcagatgacaacgaaggtaacatatcttgatccaaatgcaccgttgaaagcaataaacatgtggctatactctaaaatgagattgttgatgatattattctgttaaatatttcatgacactcttttgcatggaagccatcttcttagaggtgctaactaaatgacaaacactttatgccaaggccacgagttgaggatccaggttgattctttatggtttttattaaatagcatgctttttgtgttgatgaattatcacagcccaaaaaatggaaatgaatgaccgattagtgtgtataaaatcaagcataagttctccttccatcatcagatggtgaatatcaatagacaggaatccgatgaaccaccatcagtatatatcttcatcaacagcagcatgtgtcaccttgcttctatagagaagtatgtggtatgtctacaatatgcttcatttgttggtgatgttcttgtatgtgtcatatgcacagtcagttgattctgtgttcgtgcttttgctaattttaggaaaattttgccacatttgttccagtccttctattcaatcttgaactagatacattccagtatgtctcatatatcccaaaccattgcctatttatgaggcagtggcttatgcaattcacgatacaattctaccgggggcttatggggtttccccaaaagacaatcacagttgatccatacatagtgaattacagtggagttgtattctgccaatagtaatgtaaatattggagaggtttatttggatttcttcacttgaaaagattatagtgttgggcatggaatagaagatcaaactaaataactatgagaagtcatttggttggtaatgtcatccctatttatcagcaccgacaactactattctactgaattactgtttgtaaaggccctgtcatgctgaagcaagctgatggttcatatgcatgtttcgtagatagtgaagctcggttcactttgggacaggtcataccataagctacttgaatacatttgctctacttttttctgctcgcttgtgtgtttgtggggaaaagatactaacttcgttgaacttgttgggtttgcaatgcaatttatcttcatttatacaaaagaactattgagagttattggtttacaagaagagggaagctcacttgaatttctaagaagaggatacaaggttcatctcatcctagctaaaaagttggctatagcttcaaagtgtctgcttgcataaattacatttcac

SEQ ID NO: 1011 - DNA, 1557 bp, Zea Mays
cctcctcctcttcagcgacgaccaccacctcgccaccattgccgttgtaggaagcgaaggtggatccggcgccctcttccccctgcgatgcaaatctcccccgcccccatccccttcttcgttgcatctccgcaatggcgtcgggctcctctcgcccccaaattgaccagggcaggtctggggcacgaattgaacatggttctatttcagcttgggagtgtgccagtcgtcgacgacacgcgatacgcttcaatcgacttcgccaaccactgcacgccgcagggggaggagagatgaagtggggactggcagccgtcatggcttccacgacgactgttgcacgtgatttctcgggggataaatgcaggagaagtgaggaaactgcaggatacaaggatttacagttgcaattgccttctaaaacagatttacagccaccagctacactgatggctgtcatgccctccagagagacagtaaggacaatattgcagaacacggacataatgcagccaagcatgtagcctcattaatcagtgtagatacgcctaaagtcggccctgacatacagcaacacacgaccaagaaaagctcgatcatcaccgataaaaaggctatgaagaaactgtttgtaagtcaacttgaatgtaaagacactcctgatgagcccagatctgctcgacgcgtgaacccccgcgtcgccgagaaggagatcgtcgtcgtcctctccttcgcctccgtggcccttgtcgagagcagtgttgccgtcgtcgaccacctcaccttcctcgtctctcaccttcctcccctccaaaatctcacagccgcttcctcctcttccttgcaggatccaatcatggaggagggagcacggacagaggaagtgccggtgcaacggtgcgcattaccaaatgcaccagatactgtatttatttcaataaatggctgcatacaacattggttcaaggctctgcttcttgccctccagaagattaaggtatctcaggagcagaaaaaaatctgcattgcgacaactgagccacttttgatgtttgcccttagctgtggaatgtattcttctcccaaggtaagctgtcaaagcatcttgggttttgacttctcagatgacaacgaaggtaacatatcttgatccaaatgcaccgttgaaagcaataaacatgtggctatactctaaaatgagattgttgatgatattattctgttaaatatttcatgacactcttttgcatggaagccatcttcttagaggtgctaactaaatgacaaacactttatgccaaggccacgagttgaggatccaggttgattctttatggtttttattaaatagcatgctttttgtgttgatgaattatcacagcccaaaaaatggaaatgaatgaccgattagtgtgtataaaatcaagcataagttctccttccatcatcagatggtgaatatcagtaagttcttatgttattattatgagttaattattgtataaatacccatgaataagttcttcataaccggctgcctggtgtggatacagatag

SEQ ID NO: 1012 - DNA, 4819 bp, Zea Mays
acgacgctactcgtcctcatccagtcacgaaaaatcggaatctctgaaaaatcctccgtaccatgaagctccggttgcgatctatgcaggcgcgcggcggctccgccgccgtggagacccaccgcgtggacctgccgcccacggccactctggccgacgtgaagaccctcctcgcgtcgaagctctctgcggcgcaacccgtccccgccgagtccgtccgcctctccctcaaccgtagcgaggagctcgtctcgccggaccctgccgctacgctcccgtccctcggcctcgcgtccggtgatctcgtatttttcaccctatcccccctcacggccctagcgccgccggctcaggccctgccacggaaccctagcccgagctctggcgctgcagcgtcgatcgctgaggctgccgaccgcgggaagggttcgaagcaatctggtactggagatttctcttcctcgtcactggcgcaggctgtggttgtgagccctagctttccggtcgcttccggtacgcgggatgtggtgatggaggaggaggccgtcgatgccacaaagggctggtcgagttttgtgcttagggatctcaagagggagatggacaacgtcggggccgcggagggaaccgccgcaggtcgcctggttgcggccttgcatgcagctctgcttgatgccggttttctcaccgctaaactgacgggctctcacctttcgctgcctcagggctggccgtcaggtgctttgaagccattgaccatcaagtatactataccagagctttcatcaatggtatctgtgactgaggaagggaaggtggtggtgctgaactactccttgatggccaatttcgtgatggtttatgggtatgttcctggggcacagtctgaggtttgccggttgtgcttggagttgccggggctggagcctctactttatctggatggcgatcagctgaatggagtgcatgagaagggagttcatgatctgtggagagtgctgaaggatgagatttgcctgccactgatgatatcattgtgccaactgaacggtctgcgcttgccgccttgcttgatggctttgcctgctgatctcaagactaaggtattggggtttttacctggggttgatcttgcaaaggttgagtgcacatgcaaggaaatgatgaatcttgcatcagatgatagtatctggaagaagcttgtatccaagtttgaaaattatggcgagggctctaggctggcaggcaagaatgcaaaggccatatttgtagaagcttggcaggccaataagagacggcagaagaggcccaatccaaccttttggaactatggctggggaaacagtccttatagccgcccacttaggctgccattgattggtggggactcggacagacttccttttattgggaatcatggttctgttgggcgccactttggaaatcaacgaaggaatatctcaccgaactgcattcttgatggtcaccgtcataacttcctttgaagccatgtcaatgagttttacttgtatgttaagagtgttttataaggacttcaatggtgcatatacggttagaccgccttgttcatatcgtcaagtcgcacacttatgcttgtgcacagcactcttatgatcttatcctaatatatccccttagtatcttagatcgtatctttactatctttttttggtaccaaatgtaatccagtgtcctagtaataaagtacccttgttctattctcaaacgaattatctagacacggtcattgtaatttggttgaatgtgtagatagatgtattcgtgtgtaatagctttaaacttcagggtgctgcttaaatttatttgcattaaatattcaatctataacattgatagctttatctccacatcttcatgttttccccatatcatgatgtcaatatgatttacatttttcttattaggtattttcctttgacatacatgctactttcagtagctcagtgataaatagaataatcaggttcttctattatactattattctgtcatcagtcttggtctagagctgtatgaaataatggaagcatactactccctccgtcccaaattagtattcgttttagcttttgatttttatgtctatattcaaatagatgatgatgaatctagacatatatacaaaacacatgcataaattattgtatgaatctattaaaaggctaaagcaaattttaatttgggacagagggagtattattaaggtgctgttttgttttatttaaaacagcgaaatatcactgatgccgagaactgcgtagtaatcttgtatacaaattagagctaaaacatcaaacaatctgatacagtttttgttttaatatctaccactagatggcgtatgcatgttttttttttaaaaaaatccattactggaagaatcagtgtgatgataagaagtgcagctttgaataaatgacatgtggatcattttgggatgtatgtaacatactaggactatgttgatgtaactagttgaggctataagcctataacaattctgtacctgggtatgttgtatgaatctatgattaaaaacgatgattgtttatttgtcgtgctgttgtgtggtgaatgtgaattgctcaatgggagaaggtacaagcctcgatctaaccatagtggcggtgagttgagggaacatgcataggccataacttcttttgttccttttattcctgaatattgtctctttatatagggatggctgggttaaacatactcctaaaagccagaatttaatactatacctattacctagctttctggaactacaaccccccaatcccccaaaacacacacgcacacacacatgcacatcatctgcagtacaagtttatgtgacatgatgaggaccgccagtgagtctccacgtgcgtgcatcggtgcatgcgtgtgtttttgcaaatccccaaccaaaaactaaatacaggtctaatgagttgtaattttttttgttctgttacagtttgtatgatacattgatacacaactcactggggtaacattctttctgttgtcgtagaatattattcttgcaagcactggatggttattatctcttttctctatagaaattatgagcttctgtattacctccagttgcgttgtcatggttctgagtatggtttcatatcactgtttacttatttgtccattttcgaggttgcagatacatgtttttgacatatggacatgagctgttgttgcatctgactggcatcttattgtcttctattctatgatactataatatcgatgtccttgttctcctcatacttctcacttggatgattcagaaagttgataatacatttatttattgtttgattggtcaaggcaaaatgtgaagatactgtcttgattggggtggttattattcagaatcttcactttgatgtgtttattcttgtgttatccgtgttcctagataatgtaaatatagtctgaactttcaggtgcttgagttgtggcttgaccatttcattatgcaattcagtcgtatcagactggggatagtgtggggcgatcatagcttgctggacttgtgaagcatttctgcttgatgcttttgtaccatgctgctttgtggcctatgatagatgtaatgaaccatacatagatcatcctccaccattgggggaccaaagattgcaaaattcttttaaggtgaactttacattgaccacatgaagaaaggacacttctttttggtgtacgcgtgcatgcactctgcattgtttacacatgtcctattgactattggcctcatttacccttttctattatgttattaaaccgtgaaatgactgtcacgaggtttagctttctgcctttctgatcacttaactggcactgagccactgttaccagtactaaaatcagacctgtctcggagcccgagaaaaggcttcagctttctgagacggactctttgcttgtggtttggtgcgctgaaaagactgtggggggtggcatgggaggaaagactttataaatctggattgggtaagtgttttactgccatgagatctcattgctatgattgttgatctgaattttgattctcatttgtggttggtgtatatgcttttatgtagtagcagttgcttgcacacaaaatggcactaggtgtgggggctataaaattgccagtgtgtattatgttggtgttagatcgttttctgcatggacaatttattgttttcatctactttttgtacgaggtgttttaatctattgtaccttctattatttgcacagttaacctaatcggtcgtttggctaaacgacaggtgatcgttggttcgacgtttaatggatcaggatatgtactatgcgattctgcacttgtatcgtcttgtgtaacttgtggacatattattcacataaaatacaaacacattcctgatgtgtttttatttatccagcatatatcaaccttggaacgtaggaagactactgcagcgagacagaatctctgttcccttcagttggacattggagtattctagtattcattgtgcattaattttggaacaggtacgaatgtacaacgatggaagctgcgcggtgctgcacctacacaagcgcaaacaagccccaaccagaatccaattcggtgacgatacgcctctattggctacctctgtcaggcaggaagcactgcaggatgtgatacccctgctgcatgctagtcttcgctttgactgtattattcggcgtccagccccctaccagcagctcccccatctccgctattgctcggtaataattc

SEQ ID NO: 1013 - DNA, 4074 bp, Zea Mays
tacatagatcatcctccaccattgggggaccaaagattgcaaaattcttttaaggtgaactttacattgaccacatgaagaaaggacacttctttttggtgtacgcgtgcatgcactctgcattgtttacacatgtcctattgactattggcctcatttacccttttctattatgttattaaaccgtgaaatgactgtcacgaggtttagctttctgcctttctgatcacttaactggcactgagccactgttaccagtactaaaatcagacctgtctcggagcccgagaaaaggcttcagctttctgagacggactctttgcttgtggtttggtgcgctgaaaagactgtggggggtggcatgggaggaaagactttataaatctggattgggtacgaatgtacaacgatggaagctgcgcggtgctgcacctacacaagcgcaaacaagccccaaccagaatccaattcggtgacgatacgcctctattggctacctctgtcaggcaggaagcactgcaggatgtgatacccctgctgcatgctagtcttcgctttgactgtattattcggcgtccagccccctaccagcagctcccccatctccgctattgctcggtaataattctggctgcgatggcacccatattcctgtgaaacaggacattgatgaaccgcttcctactcctactgtcctacatagacactaggaaaagcccactgagcggcagtaaagtatggcaatgtacaacgtgcaataatagaacatgtggtgtttgttaggaaagacctaatttcacggcagttggcagtgtggaaggactatctcgtggtgatgccaacatgcaagtacccaatcaggcttccacaagagaagtatttgtgtgcttgctgttgcggctaagtttactgggtgtagaaaaaaataatattaggcggtgaaagcctggtggagaactgttttcagtcgtggccacatgtgcgcacgacattcatggtgaaaactatttactctagcaaagggctgctgagcaacagtggaatatcagatcgaagacgaacaggggagcagcagctctcaccgctggtaacaagaaatcatatgctctattattggtactttatatgtactgtggcatgctctttgggaataggtctgtattcgggacaagtacaggtgcgtcgtaccttatttcatctttttttcctttctttatttgctactggcgctgcagtatgatgttctctttgaagatagcaaattgcgttcatctcttcatgagtactctgtctctttgaacagcccaatcatttgtctctgccccacccattcattttcaggaattatgctaactcattaagcgatattggccttgtaccaaatgatttatgcactgcatcggagtgttttttttttgcttctccatatcctgcttagtctttgcttcagagaaaagggacaagcaccagcatcgcttgagcctttcttggccgaaatttgcttctccgggatcctggtgattcttacatcgtcatgctatagaacaggatatgaagtagtgagttatgacgataatatttgccaatccatcacttgtggttccccaggatcaaatttcgatggtttggggtggggacagtacgctctgttaagttttgagcaatcccctatcctggaggcttggccccaggaaaaggaatacaaccagctagccttttggttttcggatggctggatcttagtccctaagctgcttcggttattcccctggtgatttgaatgccacactttcttagctgttgtcctctttcttgttctgtggatctgattctacggtctctgaattctcacattttcgttttgtaggggtgtgtgtgcaagtcagcaattacctaactttgtttaggcattgtacgtttgcactcgcaaatatgagaagaagaaaaaagagagatattagagttcttattggtgaccaatcactatatccacttgaacttgcattcagtatctgtgcaattatgctgaattgtggaatccatttcaagtaaatccttgaagagatctttatagtccttcagcaactaaatacagtaagtaaattgcttactttctcaaactttaggctcatgagttgggttggtaaggaaatctggaggacagaacttcagtagaggcaatgttttagagggtttagacttagatgggtccggttcgttgtctaataattaaccttattctgggctggcccatacatgcactggatagcattagcatctgatccttgggttggtcgctagggtcttcagtttccagcagccactgcaatcgatcttcactcagaacactctttattctgacctctggatgtgatccagctggtgcatggttgttagtagtagtaccagtaccagcaattctattccaggactcggtttccgcttttgcccttggcgtttgtctattgcgttgcgccaggcttacttagccttttcactttgggcaatctttatgtaaggctgcaccggttagttgttccttgttgagtcttgcaaggaattgactgtgcccagctctcgatctactccaccctttaagtaaggcaacttcagttggcagacctggcaatgacaagctagaagattaccaggcattccccctcccccaaaatgattgcaacgacatcgcactgagtccaagtatcagagtaggatgatgtattcccctccgcgcaccgatcccgacagagaggaagagcagtgcttctcaatcggaagtaatctgcttacttcactagaccattaccataccatggattttgatgagcctgtcgtctccccaatgaccaatgcaggcatgcaagagggggttcagctctacagttctactggagatgctcaactaaatagaaatatgaacacaggcaagtgtttagaggatggcaaaaggaagggttctggagaggacagttcatcactacgttctctagtaaggaagctagaagcttccattgctttctctcatcgtatcacactccctctatttcatcctactgtacatgtaaatgtattactgcagggtgaaaccagtgcattgcagcgagaagtcagcatggagtgtgctgatgagaaggcgggtgatgctagagccaagagagaggactacgtgcatgtccgggcaaagcgcggccaagccaccaacagccacagccttgcagaaagatttcgaagggaaaagataaatgaaaggatgaagcttcttcaagaccttgtcccaggttgcaacaagattacaggcaaggccatgatgcttgatgagatcataaactatgtgcaatctctgcagcgacagattgagttcctttcgatgaagctctcagcgatcggccctgggctcaactgtgacctcgacctacaagatatcctctgcacacaagatgctagctctgcttttccaggatacaacctgcaaacgagcaatgtgcatattaatctgtacagagcatctgaagaaggtttctcacacaggaacaggatcatccctagtccagcaaatgttcacgtgacaagaaacgcccagctatctgcatttcctcagagaggagttatctggaacgaggagctttgcagcatcgcttcagatagaaatgctggtagcctgattcaatgaaagtggagtgacattgtggcaactgacaagccggcagtttaatggtgatcaactctgaaagtcttgacaagttgggttgctactgaggtgccttttcaagttgcagtggtagcacgacttctcttgggatgagctagttaacttttggtatttgagaggaattctggtgtgtccacccatcctgtacagttattagaataactaatcaaaggagtactgtgaaattcttgcgatctggtggagaaaatagtggacaattttcgtctggaatttctgacacaactgagttagtgctttggtggggtgtggctccacctaattatttagttgtaatagctggcagagctctatgactataactgcttgagattcgtgacaacgaatttaaattggccaaataaaaa

SEQ ID NO: 1014 - DNA, 771 bp, Zea Mays
gcgtgcatgcactctgcattgtttacacatgtcctattgactattggcctcatttacccttttctattatgttattaaaccgtgaaatgactgtcacgaggtttagctttctgcctttctgatcacttaactggcactgagccactgttaccagtactaaaatcagacctgtctcggagcccgagaaaaggcttcagctttctgagacggactctttgcttgtggtttggtgcgctgaaaagactgtggggggtggcatgggaggaaagactttataaatctggattgggtgatcgttggttcgacgtttaatggatcaggatatgtactatgcgattctgcacttgtatcgtcttgtgtaacttgtggacatattattcacataaaatacaaacacattcctgatgtgtttttatttatccagcatatatcaaccttggaacgtaggaagactactgcagcgagacagaatctctgttcccttcagttggacattggagtattctagtattcattgtgcattaattttggaacaggtacgaatgtacaacgatggaagctgcgcggtgctgcacctacacaagcgcaaacaagccccaaccagaatccaattcggtgacgatacgcctctattggctacctctgtcaggcaggaagcactgcaggatgtgatacccctgctgcatgctagtcttcgctttgactgtattattcggcgtccagccccctaccagcagctcccccatctccgctattgctcggtaataattc

SEQ ID NO: 1015 - DNA, 1563 bp, Zea Mays
gcagctctcaccgctggtaacaagaaatcatatgctctattattggtactttatatgtactgtggcatgctctttgggaataggtctgtattcgggacaagtacaggggtgtgtgtgcaagtcagcaattacctaactttgtttaggcattgtacgtttgcactcgcaaatatgagaagaagaaaaaagagagatattagagttcttattggtgaccaatcactatatccacttgaacttgcattcagtatctgtgcaattatgctgaattgtggaatccatttcaagtaaatccttgaagagatctttatagtccttcagcaactaaatacattggcagacctggcaatgacaagctagaagattaccaggcattccccctcccccaaaatgattgcaacgacatcgcactgagtccaagtatcagagtaggatgatgtattcccctccgcgcaccgatcccgacagagaggaagagcagtgcttctcaatcggaagcatgcaagagggggttcagctctacagttctactggagatgctcaactaaatagaaatatgaacacaggcaagtgtttagaggatggcaaaaggaagggttctggagaggacagttcatcactacgttctctaggtgaaaccagtgcattgcagcgagaagtcagcatggagtgtgctgatgagaaggcgggtgatgctagagccaagagagaggactacgtgcatgtccgggcaaagcgcggccaagccaccaacagccacagccttgcagaaagatttcgaagggaaaagataaatgaaaggatgaagcttcttcaagaccttgtcccaggttgcaacaagattacaggcaaggccatgatgcttgatgagatcataaactatgtgcaatctctgcagcgacagattgagttcctttcgatgaagctctcagcgatcggccctgggctcaactgtgacctcgacctacaagatatcctctgcacacaagatgctagctctgcttttccaggatacaacctgcaaacgagcaatgtgcatattaatctgtacagagcatctgaagaaggtttctcacacaggaacaggatcatccctagtccagcaaatgttcacgtgacaagaaacgcccagctatctgcatttcctcagattcaatgaaagtggagtgacattgtggcaactgacaagccggcagtttaatggtgatcaactctgaaagtcttgacaagttgggttgctactgaggtgccttttcaagttgcagtggtagcacgacttctcttgggatgagctagttaacttttggtatttgagaggaattctggtgtgtccacccatcctgtacagttattagaataactaatcaaaggagtactgtgaaattcttgcgatctggtggagaaaatagtggacaattttcgtctggaatttctgacacaactgagttagtgctttggtggggtgtggctccacctaattatttagttgtaatagctggcagagctctatgactataactgcttgagattcgtgacaacgaatttaaattggccaaataaaaa

SEQ ID NO: 1016 - DNA, 1817 bp, Zea Mays
gcagctctcaccgctggtaacaagaaatcatatgctctattattggtactttatatgtactgtggcatgctctttgggaataggtctgtattcgggacaagtacaggggtgtgtgtgcaagtcagcaattacctaactttgtttaggcattgtacgtttgcactcgcaaatatgagaagaagaaaaaagagagatattagagttcttattggtgaccaatcactatatccacttgaacttgcattcagtatctgtgcaattatgctgaattgtggaatccatttcaagtaaatccttgaagagatctttatagtccttcagcaactaaatacattggcagacctggcaatgacaagctagaagattaccaggcattccccctcccccaaaatgattgcaacgacatcgcactgagtccaagtatcagagtaggatgatgtattcccctccgcgcaccgatcccgacagagaggaagagcagtgcttctcaatcggaagcatgcaagagggggttcagctctacagttctactggagatgctcaactaaatagaaatatgaacacaggcaagtgtttagaggatggcaaaaggaagggttctggagaggacagttcatcactacgttctctaggtgaaaccagtgcattgcagcgagaagtcagcatggagtgtgctgatgagaaggcgggtgatgctagagccaagagagaggactacgtgcatgtccgggcaaagcgcggccaagccaccaacagccacagccttgcagaaagatttcgaagggaaaagataaatgaaaggatgaagcttcttcaagaccttgtcccaggttgcaacaaggcagattacaggcaaggccatgatgcttgatgagatcataaactatgtgcaatctctgcagcgacagattgagttcctttcgatgaagctctcagcgatcggccctgggctcaactgtgacctcgacctacaagatatcctctgcacacaagatgctagctctgcttttccaggatacaacctgcaaacgagcaatgtgcatattaatctgtacagagcatctgaagaaggtttctcacacaggaacaggatcatccctagtccagcaaatgttcacgtgacaagaaacgcccagctatctgcatttcctcaggttttcattcgacgcccttgaacagcttcaagtgctttcctatgtcgattatactagtttctgccatggcagagaggagttatctggaacgaggagctttgcagcatcgcttcagatagaaatgctggtagcctggtagcatagattttttcgtgtcttttaattttcacattcatcgttatgttttacacttctcctgcagctgtactcaattttgtgagatttttcaagtcccattttgacattgcagattcaatgaaagtggagtgacattgtggcaactgacaagccggcagtttaatggtgatcaactctgaaagtcttgacaagttgggttgctactgaggtgccttttcaagttgcagtggtagcacgacttctcttgggatgagctagttaacttttggtatttgagaggaattctggtgtgtccacccatcctgtacagttattagaataactaatcaaaggagtactgtgaaattcttgcgatctggtggagaaaatagtggacaattttcgtctggaatttctgacacaactgagttagtgctttggtggggtgtggctccacctaattatttagttgtaatagctggcagagctctatgactataactgcttgagattcgtgacaacgaatttaaattggccaaataaaaa

SEQ ID NO: 1017 - DNA, 1825 bp, Zea Mays
gcagctctcaccgctggtaacaagaaatcatatgctctattattggtactttatatgtactgtggcatgctctttgggaataggtctgtattcgggacaagtacaggggtgtgtgtgcaagtcagcaattacctaactttgtttaggcattgtacgtttgcactcgcaaatatgagaagaagaaaaaagagagatattagagttcttattggtgaccaatcactatatccacttgaacttgcattcagtatctgtgcaattatgctgaattgtggaatccatttcaagtaaatccttgaagagatctttatagtccttcagcaactaaatacactctcgatctactccaccctttaagtaaggcaacttcagttggcagacctggcaatgacaagctagaagattaccaggcattccccctcccccaaaatgattgcaacgacatcgcactgagtccaagtatcagagtaggatgatgtattcccctccgcgcaccgatcccgacagagaggaagagcagtgcttctcaatcggaagtaatctgcttacttcactagaccattaccataccatggattttgatgagcctgtcgtctccccaatgaccaatgcaggcatgcaagagggggttcagctctacagttctactggagatgctcaactaaatagaaatatgaacacaggcaagtgtttagaggatggcaaaaggaagggttctggagaggacagttcatcactacgttctctagtaaggaagctagaagcttccattgctttctctcatcgtatcacactccctctatttcatcctactgtacatgtaaatgtattactgcagggtgaaaccagtgcattgcagcgagaagtcagcatggagtgtgctgatgagaaggcgggtgatgctagagccaagagagaggactacgtgcatgtccgggcaaagcgcggccaagccaccaacagccacagccttgcagaaagatttcgaagggaaaagataaatgaaaggatgaagcttcttcaagaccttgtcccaggttgcaacaagattacaggcaaggccatgatgcttgatgagatcataaactatgtgcaatctctgcagcgacagattgagttcctttcgatgaagctctcagcgatcggccctgggctcaactgtgacctcgacctacaagatatcctctgcacacaagatgctagctctgcttttccaggatacaacctgcaaacgagcaatgtgcatattaatctgtacagagcatctgaagaaggtttctcacacaggaacaggatcatccctagtccagcaaatgttcacgtgacaagaaacgcccagctatctgcatttcctcagagaggagttatctggaacgaggagctttgcagcatcgcttcagatagaaatgctgattcaatgaaagtggagtgacattgtggcaactgacaagccggcagtttaatggtgatcaactctgaaagtcttgacaagttgggttgctactgaggtgccttttcaagttgcagtggtagcacgacttctcttgggatgagctagttaacttttggtatttgagaggaattctggtgtgtccacccatcctgtacagttattagaataactaatcaaaggagtactgtgaaattcttgcgatctggtggagaaaatagtggacaattttcgtctggaatttctgacacaactgagttagtgctttggtggggtgtggctccacctaattatttagttgtaatagctggcagagctctatgactataactgcttgagattcgtgacaacgaatttaaattggccaaataaaaa

SEQ ID NO: 1018 - DNA, 2104 bp, Zea Mays
gcgtcgtaccttatttcatctttttttcctttctttatttgctactggcgctgcagtatgatgttctctttgaagatagcaaattgcgttcatctcttcatgagtactctgtctctttgaacagcccaatcatttgtctctgccccacccattcattttcaggaattatgctaactcattaagcgatattggccttgtaccaaatgatttatgcactgcatcggagtgttttttttttgcttctccatatcctgcttagtctttgcttcagagaaaagggacaagcaccagcatcgcttgagcctttcttggccgaaatttgcttctccgggatcctggtgattcttacatcgtcatgctatagaacaggatatgaagtagtgagttatgacgataatatttgccaatccatcacttgtggttccccaggatcaaatttcgatggtttggggtggggacagtacgctctgttaagttttgagcaatcccctatcctggaggcttggccccaggaaaaggaatacaaccagctagccttttggttttcggatggctggatcttagtccctaagctgcttcggttattcccctggggtgtgtgtgcaagtcagcaattacctaactttgtttaggcattgtacgtttgcactcgcaaatatgagaagaagaaaaaagagagatattagagttcttattggtgaccaatcactatatccacttgaacttgcattcagtatctgtgcaattatgctgaattgtggaatccatttcaagtaaatccttgaagagatctttatagtccttcagcaactaaatacattggcagacctggcaatgacaagctagaagattaccaggcattccccctcccccaaaatgattgcaacgacatcgcactgagtccaagtatcagagtaggatgatgtattcccctccgcgcaccgatcccgacagagaggaagagcagtgcttctcaatcggaagcatgcaagagggggttcagctctacagttctactggagatgctcaactaaatagaaatatgaacacaggcaagtgtttagaggatggcaaaaggaagggttctggagaggacagttcatcactacgttctctaggtgaaaccagtgcattgcagcgagaagtcagcatggagtgtgctgatgagaaggcgggtgatgctagagccaagagagaggactacgtgcatgtccgggcaaagcgcggccaagccaccaacagccacagccttgcagaaagatttcgaagggaaaagataaatgaaaggatgaagcttcttcaagaccttgtcccaggttgcaacaagattacaggcaaggccatgatgcttgatgagatcataaactatgtgcaatctctgcagcgacagattgagttcctttcgatgaagctctcagcgatcggccctgggctcaactgtgacctcgacctacaagatatcctctgcacacaagatgctagctctgcttttccaggatacaacctgcaaacgagcaatgtgcatattaatctgtacagagcatctgaagaaggtttctcacacaggaacaggatcatccctagtccagcaaatgttcacgtgacaagaaacgcccagctatctgcatttcctcagagaggagttatctggaacgaggagctttgcagcatcgcttcagatagaaatgctgattcaatgaaagtggagtgacattgtggcaactgacaagccggcagtttaatggtgatcaactctgaaagtcttgacaagttgggttgctactgaggtgccttttcaagttgcagtggtagcacgacttctcttgggatgagctagttaacttttggtatttgagaggaattctggtgtgtccacccatcctgtacagttattagaataactaatcaaaggagtactgtgaaattcttgcgatctggtggagaaaatagtggacaattttcgtctggaatttctgacacaactgagttagtgctttggtggggtgtggctccacctaattatttagttgtaatagctggcagagctctatgactataactgcttgagattcgtgacaacgaatttaaattggccaaataaaaa

SEQ ID NO: 1019 - DNA, 513 bp, Zea Mays
gatccacggaagcaaagcgaagcgaagccgcctgccggattttgccggctcgctcgccgaccagatctgggatctccgcctccgtgaccacgactctgcgaaaacttaacggagcagtggccggcagaagcgtgaacacgacgactagacgagcggcttgtccgttgcctgttgccatcagcattcactcgtcctccgctccctgtcgttatcaattacccgaagctacgatatcgcccgcacacaacaggaaagccacgtggccgccccagatgaaaagcatatcgccgctgacgtggcggaaccagggtctcacgaccacgggggagactagtcgtggtcgtggccgacgccgccacgccgggccgggccgggccgtgggattacgccgtgcttgacgcataaaggcgtcgctgccaagtatttatgactcccaaactagtcctaagaaaccttggtgcgtctgggcctgcaaatggagtggatgtaaatgggtattttatatgagtttaa

SEQ ID NO: 1020 - DNA, 2149 bp, Zea Mays
aaaaaaaacccaaacctgcatacaattctgaagaaattcagaaaatccagctaagccaagttagtccgcccgccagctatgcggacatggttgcgagcggcctcaacctcctcctcctgacctcctcctcctcctccataaaatgcggaagaatctcgaagagtcccagacgcatcaaaccgccctcctctgtccctccctctcccgtctgccccctcgcatccccaaattaagccccgcgcgcaaggcagcaaacgcgccgcgcaccggaaggccccggggagctgcacgaggtggccccattgcggcatggctgctacggccgccgccgctggcgtcgagttcccgctcattggcgttgccgtggccacgctcatcgtgacggtccttgtcgcggccgtgatgcgccgccgccgccgtccctggcaccaggcgcctctggtggaggggaaacccgcaccagaggcaggctgcgcggtcagcgatggcgggacggacgtcatcatcgtcggcgccggggtagctggatctgcgctggcatacacgctcggaaaggatggccgtcgggtgcatgtcatcgagagggatctgacagaacctgacagaattgtgggcgagctgttgcaacctgggggttacttgaaattaattgagctgggcctccaagatggaaggaacacaaagcttgcttatcccctggagaagttccattctgatgttgctggtaggagctttcacaatgggaggtttatacagaggatgcgtcaaaaagctgcgtctttgcccaatgtccaattagagcaaggaactgttacctcacttcttgaagaaaatggtactgttaaaggtgttcaatacaaaaccaagtcaggtgaagaactaaaggcttatgcgcccttgacgattgtatgtgatggctgcttttcgaatctacgacgcgccctttgctctccaaaggttgatgtcccatcatgttttgttgggctggtattggagaactgccaacttccacatccaaaccatggccatgttatcttggccaatccttctccaatcttattttacccaattagcagcacagaggtgcgctgtttggttgatgtccctggtcagaaggtgccttccatagctaccggtgaaatggcaaactatctcaaaactgttgttgcaccccagattcctccagaaatctatgactctttcatagcagccattgataagggaagcatacggacaatgccaaacaggagcatgccagcggctccacatccgacccctggtgcacttctgatgggggatgcgttcaatatgagacaccctttaactggtggaggaatgactgttgcattatctgacatcgttgtcctgcgtaatctgctcaagcctctccgcaatcttcatgacgcatcttccctgtgcaagtaccttgaatcgttctatacactgcggaagccggttgcttccacaataaacacattggccggtgctctgtacaaggtcttcagtgcctcgcctgatcaagctaggaatgagatgcgccaggcttgttttgattacttgagcctcggaggcgtcttctcgaacgggcctatcgctttactctctggccttaaccctcggccactgagtttagttgcgcacttctttgctgttgctatctacggtgtcggccgcttgatgctccctcttccttcacctaaacgaatgtggattggagctagactgatttctggtgcatgcggcatcatcctccctatcatcaaagctgaaggcgtgagacagatgttcttccctgctacagtacccgcatattaccgggccgcacctacgggagaaaaggcatgaacagagaaccgattccgtgctgctggtccgaccatgaatgatctcatggcaactgatgtttcacggatgacatttttcctttgctagtggttagttattggttattgttagaccgtcgatggaatgaggaacctgtatagtgtttgtcctgggtactggtaaagttggaaaatgtgttgggtttgttctctacgcgtgtcgattgctgccaagttgtgcacgtagccacgtatgattctgttgagctagtgaaacgtccccttcttccacgctgatgaaacttggttgctccctggctgagtac

SEQ ID NO: 1021 - DNA, 2584 bp, Zea Mays
aaaaaaaacccaaacctgcatacaattctgaagaaattcagaaaatccagctaagccaagttagtccgcccgccagctatgcggacatggttgcgagcggcctcaacctcctcctcctgacctcctcctcctcctccataaaatgcggaagaatctcgaagagtcccagacgcatcaaaccgccctcctctgtccctccctctcccgtctgccccctcgcatccccaaattaagccccgcgcgcaaggcagcaaacgcgccgcgcaccggaaggccccggggagctgcacgaggtggccccattgcggcatggctgctacggccgccgccgctggcgtcgagttcccgctcattggcgttgccgtggccacgctcatcgtgacggtccttgtcgcggccgtgatgcgccgccgccgccgtccctggcaccaggcgcctctggtggaggggaaacccgcaccagaggcaggctgcgcggtcagcgatggcgggacggacgtcatcatcgtcggcgccggggtagctggatctgcgctggcatacacgctcggaaaggatggccgtcgggtgcatgtcatcgagagggatctgacagaacctgacagaattgtgggcgagctgttgcaacctgggggttacttgaaattaattgagctgggcctccaaggtaaatcccaatttcggttatcttattctattttcatgtcatttctaaagttattatacaagtttttgttctattcagattgtgtggaagaaattgatgcccaacgcgtgcttggttacgcattattcaaagatggaaggaacacaaagcttgcttatcccctggagaagttccattctgatgttgctggtaggagctttcacaatgggaggtttatacagaggatgcgtcaaaaagctgcgtctttgcccaagtaatatcagtaattcttatatatttttcttattttgctatatttggcttatttattgtcctgtattcttgcttgactttgattcttttgctaaggttaactgtaataatggtattttatgttactttactgcattgacacctataatttgtcaaaagtttttggttagtgctctttgtttggtgtgttctagttctcatgttatgtccccttttctattctcaatttgacctgtataaacttcatgtattgaattatttttgcaaccacatctgcatgtagcatgctgttgtgtttatgcagtgtccaattagagcaaggaactgttacctcacttcttgaagaaaatggtactgttaaaggtgttcaatacaaaaccaagtcaggtgaagaactaaaggcttatgcgcccttgacgattgtatgtgatggctgcttttcgaatctacgacgcgccctttgctctccaaaggttgatgtcccatcatgttttgttgggctggtattggagaactgccaacttccacatccaaaccatggccatgttatcttggccaatccttctccaatcttattttacccaattagcagcacagaggtgcgctgtttggttgatgtccctggtcagaaggtgccttccatagctaccggtgaaatggcaaactatctcaaaactgttgttgcaccccagattcctccagaaatctatgactctttcatagcagccattgataagggaagcatacggacaatgccaaacaggagcatgccagcggctccacatccgacccctggtgcacttctgatgggggatgcgttcaatatgagacaccctttaactggtggaggaatgactgttgcattatctgacatcgttgtcctgcgtaatctgctcaagcctctccgcaatcttcatgacgcatcttccctgtgcaagtaccttgaatcgttctatacactgcggaagccggttgcttccacaataaacacattggccggtgctctgtacaaggtcttcagtgcctcgcctgatcaagctaggaatgagatgcgccaggcttgttttgattacttgagcctcggaggcgtcttctcgaacgggcctatcgctttactctctggccttaaccctcggccactgagtttagttgcgcacttctttgctgttgctatctacggtgtcggccgcttgatgctccctcttccttcacctaaacgaatgtggattggagctagactgatttctggtgcatgcggcatcatcctccctatcatcaaagctgaaggcgtgagacagatgttcttccctgctacagtacccgcatattaccgggccgcacctacgggagaaaaggcatgaacagagaaccgattccgtgctgctggtccgaccatgaatgatctcatggcaactgatgtttcacggatgacatttttcctttgctagtggttagttattggttattgttagaccgtcgatggaatgaggaacctgtatagtgtttgtcctgggtactggtaaagttggaaaatgtgttgggtttgttctctacgcgtgtcgattgctgccaagttgtgcacgtagccacgtatgattctgttgagctagtgaaacgtccccttcttccacgctgatgaaacttggttgctccctggctgagtac

SEQ ID NO: 1022 - DNA, 338 bp, Zea Mays
gccgtggcctcgcccacaaactaatcctacggcccacggaaccagtcagtcctctctccttccggcttccgctgctcttctttctttcctggcatcttggagacggcggcgagacgaggagaggactggaactggaccatggctgcctcttcggctctcaggctaatcctgggctcctcgtcggcgtcgcgtcgccagattctgtccgagatgggatacaagttcacgcttattagtgcggatatcgatgagaaagcgatcagaaaggagaacccagaggaactggtggtcgccttggctcatgcgaaagggatgggactgtgggactggagctggca

SEQ ID NO: 1023 - DNA, 873 bp, Zea Mays
gccgtggcctcgcccacaaactaatcctacggcccacggaaccagtcagtcctctctccttccggcttccgctgctcttctttctttcctggcatcttggagacggcggcgagacgaggagaggactggaactggaccatggctgcctcttcggctctcaggctaatcctgggctcctcgtcggcgtcgcgtcgccagattctgtccgagatgggatacaagttcacgcttattagtgcggatatcgatgagaaagcgatcagaaaggagaacccagaggaactggtggtcgccttggctcatgcgaaagcagacgctattctggagaagatgcagaacaatgggatgatgaaagagattcttgattctcaagatactactctgatgataactgctgatcagattatgaaatctgtcgggttgcagcaccttgctcctaaccttgagagctcttcctttgaggattggtgggaaggagttgtcgcagttcctgctgatccagcatacaaggggctgcacaagggcttgaattctttgatcatacttggtgcttgggccatctggaatcaccacaaccgttgtgtatttaatggtgtgcagtctagttccagcatggtcatcaattgggtcaaggaggagtctcacatctggtgtagggttggagccagtgatttatctagcatccttatgctccagtgaaccagtcggtaatctttattttagagtctccatggtcacgggtctagatgtcttttgttgttatttttctacctataattcagtgtatgtgggtttgtgtggagttgtatgaggtttattttgcctcacctattcttcttaatataatgatacacagctctcctgcgttttcgg

SEQ ID NO: 1024 - DNA, 992 bp, Zea Mays
gccgtggcctcgcccacaaactaatcctacggcccacggaaccagtcagtcctctctccttccggcttccgctgctcttctttctttcctggcatcttggagacggcggcgagacgaggagaggactggaactggaccatggctgcctcttcggctctcaggctaatcctgggctcctcgtcggcgtcgcgtcgccagattctgtccgagatgggatacaagttcacgcttattagtgcggatatcgatgagaaagcgatcagaaaggagaacccagaggaactggtggtcgccttggctcatgcgaaagcagacgctattctggagaagatgcagaacaatgggatgatgaaagagattcttgattctcaagatactactctgatgataactgctgatcagaccgcctagcaaagaaaggactgcctcaccctcaattttgtcccctctgtgatcaagaggaagagacgctaaaccatttgtaagtctcctgcgttttctcacgggaagtctggtttcagattatgaaatctgtcgggttgcagcaccttgctcctaaccttgagagctcttcctttgaggattggtgggaaggagttgtcgcagttcctgctgatccagcatacaaggggctgcacaagggcttgaattctttgatcatacttggtgcttgggccatctggaatcaccacaaccgttgtgtatttaatggtgtgcagtctagttccagcatggtcatcaattgggtcaaggaggagtctcacatctggtgtagggttggagccagtgatttatctagcatccttatgctccagtgaaccagtcggtaatctttattttagagtctccatggtcacgggtctagatgtcttttgttgttatttttctacctataattcagtgtatgtgggtttgtgtggagttgtatgaggtttattttgcctcacctattcttcttaatataatgatacacagctctcctgcgttttcgg

SEQ ID NO: 1025 - DNA, 775 bp, Zea Mays
gccgtggcctcgcccacaaactaatcctacggcccacggaaccagtcagtcctctctccttccggcttccgctgctcttctttctttcctggcatcttggagacggcggcgagacgaggagaggactggaactggaccatggctgcctcttcggctctcaggctaatcctgggctcctcgtcggcgtcgcgtcgccagattctgtccgagatgggatacaagttcacgcttattagtgcggatatcgatgagaaagcgatcagaaaggagaacccagaggaactggtggtcgccttggctcatgcgaaagcagacgctattctggagaagatgcagaacaatgggatgatgaaagagattcttgattctcaagatactactctgatgataactgctgatcaggatcatttgcaatttgaatggctccagtgctatcacacagaagaggtgtaggagtatcacaagagacaccaagatcaaccaataaccatcgtagccatataatctcgacagtagtggtagcaagagctcgaagttctgcttctgcactagatcttgatacaacaacttgcttctttgatttccatgcaataggagaggaactaaggaaaatacaataacctgtaatagagcagcgatcagtgcgatcacttgcccaagtggcatcagagtaggcatgaagccgaagaggaatattacaatcaagcctcgagatgtggttccccgtaagtatcttaatacacgaagcaagtgaccataatggtctgaagtaggc

SEQ ID NO: 1026 - DNA, 1190 bp, Zea Mays
gccgtggcctcgcccacaaactaatcctacggcccacggaaccagtcagtcctctctccttccggcttccgctgctcttctttctttcctggcatcttggagacggcggcgagacgaggagaggactggaactggaccatggctgcctcttcggctctcaggctaatcctgggctcctcgtcggcgtcgcgtcgccagattctgtccgagatgggatacaagttcacgcttattagtgcggatatcgatgagaaagcgatcagaaaggagaacccagaggaactggtggtcgccttggctcatgcgaaagcagacgctattctggagaagatgcagaacaatgggatgatgaaagagattcttgattctcaagatactactctgatgataactgctgatcagtgtcaaatcgtatccaaaactcgacaagtgcaagcttacgaccaataaaaaggttgaaaaatgaatttgcactttcagaccttgatgttgttcgaagaatgcctccaagccaaatttctctgaaatatgccggtatccatgactcacggatgtgataccttcctgtcaaccactcattgttctccaaatgatatgttgttatccaatattgccatctactctcaaactcttctattgtttctgaaccccatacacatgagttaatcattttcctaaactcgtcattatttagaagatgagcatcaattttctctagcaattttttcataatgtgccacatgcacaacctatgaatggtgtttggaagaacactagctatagcagccctcatgctagcatcctcatcagttacaatatatgcaggagccttccctcccatagcttgtagaaaattctgaaataaccacatatagctatcaatcttctcatcagctaagaaagcagcaccaaagaaaatagaacgcatatgatgattgaccccagtgaaagtgtcatgttcgggcgcgtctacacgaggcgccacaagactcgtgatgtacgtcgagcgcaggaacgggaagcgcgacacgcaagggacgtacagggagcaaacacaatcagtggctaggaggaaaagtaggatttgttattatctgttagttcctaaaataggggagtttgttcagtaatttagttgggccataggccatatataccgtgagaccggatggtggaaattaattaagaat

SEQ ID NO: 1027 - DNA, 2485 bp, Zea Mays
acccctcaagcgcgcgcgtatatatatatgggcaggccacagcccccccaaggcgacccaaacacaaaccaaccagcacgactcctgaaagcctgatcgcactccactgaccgcctcacctcctctggaggagaccaaaaggccgagcacaccagcaccaacccagaacagagagagagagagagagagagagattactaaaaggctcgcgagcaggttagtcaaaacgtacttgtagctcgcgccggcagcccggcaccaatcaccggaggacagcgcttccctctccctgcgtggctatatcttcttcgacagtgggagagacagagagagacaacacccacacgctcgggatcggagaacgcgcacaggcactttccatcccccgatcaaatcgtcatcatgtgcaacgccgccgggacagattccttgccggcgccggcgcccccgctcggctctctcaaggcctccgcgcaccagctcctccaccccgtcgacggcgaccaagccaacgcccatgcactgcagctctccaaggtggccggcgaggctcgggcgatcggcagggtgtcggtgccgatggcggtcacgggcctggtcatgtactcacgggctctcatctccatgctcttcctgggccgcctgggcgagctggcgctggccggcggctcgctggcgcttggcttcgccaacatcaccggctactccgtgctctcggggctggcgctcggcatggagcccatctgcggccaggccttcggcgcgcgccgcggcaagctgctggcgctggcgctgcaccgcaccgtgctgctgctcctcgccgtggcgctgcccatctcgctgctgtgggtcacctccacggggcacgtgctcaagctgctggggcaggacgagggcgtggcggacgcggcgcagacgttcgccgcgtacgcgtcggccgacctcgcggttctggccgtcctgcacccgctgcgcgtctacctccggtcgcagaacctgacgctgcccatcacggcgtgctccctcttctccgtgctgctgcacgggcccatcaactacctcctcgtggtgcgcctccgcatgggcgtcgccggggtggcgctcgccgtggcgctcaccgacctcaacctgctcctcgcgctcctctgcttcctcgccatctcgggcgcgcacagggactcctgggtgggccccaccctcgactgcctctgcggctggccggagctgctccgcctggcggtccccaccgccaccgcggtctgcctcgagtggtggtggtacgagctcatgatcgtgctgtcgggcctcctggccaacccgcgcgccaccgtggcgtccatgggcatcctcatccaggccacgtcgctcgtctacgtgttcccgtcctccttgggccagggcgcgtccacgcgcgtcagccaccagctcggcgcgggccgacccgcgggggcgcgccgcgccgccggcgccgccctctccatcggcgtcggcgtgggcctggttgccgccaccttcatggtgtccgtgcgcagccactggggacgcatgttcacgtcggacgcggacatcctccgcctcacgggcgtggcgctccccatcgcgggtctctgcgagctcggcaactgcccgcagacggccggctgcggcgtcctccgcggcagcgcccgcccgggcagcggcgcgcgcatcaacctcgcctccttctacctggtgggcatgccggtgggcgtggcgctggcattcggcgcccgcctgggcttcgccggcctatggctcggcctcctggcggcgcaggccgcgtgcgccgtctggatggcgcgcgcggtggccgccaccgactgggacgtggaggtcggacgcgccaaggagctgaccaaagcgaccgccagcaacaaccacagcgagtgcaacagcagcagcagcacctccgcgtctagtgatataaccactgtgatcgccactagcaacagcgccgccgggtgcaagaacaacggctacgtgccaatcagcgagcgctgcagcaacgacagcgagctggagaaactggaggagggcctcatgagcagcgacgacatccctagtgccagcgtcagcgggagcgcgtctgctggtgacaccggtgccgtggttagggagaaccgcggcagctgctgcaatgacagtggcgctgctggtacggcggcgacgacggagggaaaggagcagaggaggggcggatcggagcggggcccgctcatcagtgtgtcggacggggagcacgatggcgacggccgtggaggtggcggccaggtctaattaagcgcgtgtgatgtgcgtccatcaatccatttattatcttttgctgttgacttagcttggatccgcctccatttaatctctccttgtttcctgaattaactggggcgatcgaggtttaattttgtgaaaaaaatagtactagagaccgggaaagaggattatattttgctatctacatagatagtaa

SEQ ID NO: 1028 - DNA, 3511 bp, Zea Mays
ccactccactcaccacaccatccatggcgatggcgccctccacggcggccgcatccacccttctccccgtcctcctcctcatcgccaccgccacccagtgcaccgcagccgattcattctcttctcaggacgctgccgccctcctcaacctctctgcggcggtagcagacccctcgggctacctctccacgcactggactccggacaccgcggtctgctcgtggccgcgcgtgtcctgcgacgccaccgacacacgagtcatctccctcgacctctccggcctcaatctatctggccccatccccgccgccgcgctctcctctttcccgtacctccagtcgctcaacctctccaacaacatactcaactccaccgccttccccgacgagatcatcgcgtcgctcaagagccttcgcgttctcgacctctacaacaacaacctcaccggttcgctgccggcagcgctccccaacctcaccgacctcgtccacgtccacctcggcggcaatttcttctccggcagcatcccgaggtcctacggccagtggagccgcatccggtacctggccctctccgggaacgagctcaccggcgagataccggaggagctcggcaacctgacgacattgagggagctgtacctcggctactacaacaacttcaccggcggtataccacccgagctcgggaggctgcgggcgctcgtccggctcgacatggctaactgcggcatctccgaggagatcccgccggaactggcgaacttgacgtcgctcgacactctgtttcttcagatcaacgctctgtctgggaggctcccgacggagataggcgcaatggggtcgctcaaatcgctcgacctgtcgaacaacttgttcgtcggggagatccccgcgagcttcgcgtcgctcaagaacctgaccctgctgaacctcttccggaatcgcctcgccggtgagattcccgagttcatcggcgacttgccgaacctcgaggttctgcagctgtgggagaacaacttcacaggcgggatacccacgaacctcggcgtggcggcgaccaggctgaggatcgttgacgtgagcacgaacaagctcaccggcgttctgccatccgagctgtgcgccggccagcggctggagacgttcatcgctctgggaaattcgctattcggcgacgttccggacgggctcgcggggtgcccgtcgctgacgaggattcggctgggagagaattttctcaacgggacgatacctgcaaagctgttcacgttgccgaacctgacgcaggtagagctgcacaacaatttgctctccggcgagctccggctggacggagggaaggtgtcttcttcgatcggagagctgagtctgttcaacaaccgactgaccggccaggtgcctaccgggatcggtggactcctgggattacagaagctgttgctcgccgggaacatgttgtccggcgagctcccgccggaggtcgggaagcttcagcagctctcgaaggcggacctttctgggaacctgctctccggagcggtacccccggcgatcggcagatgccgtctgctcaccttcctcgatatctcgagcaacaagctctccggcagcatcccgccggagctcggcagcctccgcatcctcaactacctcaacgtttcccacaacgcgctccaaggggagattccgcctgccatcgccggaatgcagagcctgacagccgtggacttctcgtacaacaacctctcgggcgaggtcccgtccaccggtcagtttggctacttcaacgccacttccttcgcaggcaacgctggcctctgcggggcgttcctctccccgtgccgctccgtgggcgtggcgacttcggccctgggctccctctcttcgacgtccaaactcctgctcgtgctcggcctcctcgcgctgtccgtcgtcttcgcgggcgcggccgtgctgaaggcgcggtcgctgaagcggtccgccgaggcgcgcgcgtggcggctgacggcgttccagcggctggacttcgccgtggacgacgtgctggactgcctcaaggaggagaacgtgatcggcaagggcgggtccgggatcgtgtacaagggcgcgatgccgggcggcgccgtggtggccgtgaagcggctgccggccatcgggcgcgcgggcgcggcgcacgacgactacgggttctcggcggagatacagacgctggggcgcatcaggcaccgccacatcgtgcggctgctcggcttcgcggccaaccgggagaccaacctgctggtgtacgagtacatgccgaacggcagcctcggcgaggtgctccacggcaagaagggcggccacctgcagtgggcgacgcggttcaagatcgccgtggaggcggccaagggcctctgctacctgcaccacgactgctcgccgccgatcctgcaccgcgacgtcaagtccaacaacatcctcctcgacgccgacttcgaggcccacgtcgcggacttcggcctcgccaagttcctccggggcaacgctggcggttcggagtgcatgtccgctatcgccggctcgtacggctacattgctcctggtacgcctacacgctgaaggtggacgagaagagcgacgtgtacagcttcggcgtggtgctgctggagctcatcgccgggcgcaagcccgtcggggagttcggcgacggcgtggacatcgtgcactgggtgcggacggtgaccgggtcgagcaaggagggcgtgatgaagatcgccgacccacggctctcgacggtgcctctgtacgagctaacccacgtcttctacgtcgccatgctgtgcgtggcggagcagagcgtggagcggcccacgatgcgcgaggtcgtgcagatactggccgacatgcccggctcgacatccacgacgtccatagacgtgccccttgtcatcgagccgaaggaggaggacgggggcccggagaagaagcagcagcagcagcaggaagggccacacgactcgccgccgcagcaggatcttcttagtatctagaagcgcagttgcgagagttggtcgtactgatggtacttggtagcatccctgcctgccctgttctttgagtgaagcgttggaacgtggcgtgtgtgtagtgtaactgtgtatgcaggcggtgatttatatgcatgcttcctttaagtagattgccagtagtatttgcgtatggtgagctggtcggtccttaatgtctgtccccatgtacaaaaccagatcaagatgcttgggcttccggttgagtttacgccttaggtgctgtttgtttaccctcgacattatataatccagcttaaataaatcaagagttaaacaaacaacacagattatatattaggtggattatatagtctagatgtctagattatgataatttataagcatgtcattagatgcagatatggattagaattgctagtttgtttgtttgtttgttttcgagaaaaaagaagaatcgttcctttgaaaaaaaaaaactac

SEQ ID NO: 1029 - DNA, 1264 bp, Zea Mays
catggagcacagacgtacagtgcaggacttaccggagatgtgctcatggagcctgccatatgcactttcatgcatggttcttatccattaaggggtaaacactaccatgagatgataaatccatttcgtgtacttacagatgtttcttatatccatgtgtttcaggtcaagaagcttatcaaggagaaaaagaatgatgctggaatttctgaatatatcgatataaataaagagcttcaagaggtttatggcacgatgattcatctcagagtttctgattcttatgttttgtcacaagggcaagacgacaagcgagaatttttccaccgtttttacttaagcatagttcgagatgaaaggactatgttgaatccacatggagtaatgcatgctttgagtttgaatgttggtcacttcaatctgaccagacaacaggatgcttcagaagcttttctccatcttctgatctcattgagggatgaatttgcccattgttatgtaccacataggagttctctggcagacatcaccctttctgactccaaagtatacaagcaaagggaaggtaacctgcctgaatgcaagcggtggaaacaaaacctatttggcccctttgatgggacagttggcagcatattgtcttgcagaaactgttcttctgtggtagattcctaatttcctatgcttcttattctgtcactgttgaactgtggcttataaaaaagtaacctactgttgtctttcatatatgaatgcatttggttccggatataccactggatacatagatattgacacgatgtccagtgcatgcccctacctttcctagccgtggtaaaattaaagaattattattatggaagtaatttagccaacaacaagtgatgctattttcatattgccaatcagttattttgcgcattttgacagttagcttaaaatactcctgttttgttaattttaatgttctcccttgttacatatctcacagctgtcattggacttcgagaatttccactgcttgcctcttttgccagtccttaatgcaaatggagatattgtatatccgcgtcaaccttcctaaatttccttggatgattcaagtttttttttaaaaatattcattcgctgtccattttatgctcattaatggtatttttgtttgttacatttatcctatgtcatgacactagaccagtgggtgtagcttggtggattgcctaaagtacttcactgtggtggagcatcttgacaactatcgttg

SEQ ID NO: 1030 - DNA, 2252 bp, Zea Mays
aaaacacagcggctgccgcccgcgacacgctccgcctccttccactccctcgccaccaccacgcaccaccacctctgctctgctgtgtgtgtgcctaacgggtcggaggcggggacggccccaccgccccgagctcccaaccgccgacagtctccggcggctccaacttcaatacctccctcctcggcatgccggttgccgtcgcgttggcggcggccgccgcgctcgtcgtcctgctcgtcctgtccgcggtggccgccgccgttttcttcgcgcgcacgcggggcgccaggccgccctcgctgtcgcgcgtcgagcacgcgccgtcgtccgcctccggctcctcccgcgccgcgtcgtccgcgcgcaaggagaaggtcggcgcggaccaggtcgccgagccgggcgccgcctcctctggcgtggccagctcttccgcggccgcgagctccctcgagtcgccggtgaagaggaaggcggaagcggtcagggtcggcggcggcggcggcggggccgccgcgggggtggagatggaggttgggtgggggaggtggtacgacctgacggagctggagatcgccacgggcgggttctgcccagcgaacgtggtcggggagggaggctacggcaccgtgtaccgcggcatccttgccggcggcgaggtcgtcgcggtcaaggacttgtttgatcacaagccgagaaggaattcaaggtggaggttgaagccatcggcaaagtgaggcacaagcaccttgtcggtctcatcgggtactgcgcagaaggtccaaaacggatgctcctttacgagttcgtcgaaaatggcaacttggagcagtggctgcacggcgacgtcggaccggtcagccctctgacctgggaaatacggatgaagatcgccgtcggaacggccaaaggcatagcgtacctgcacgaaggcctggagccgaaggtggtgcaccgcgacatcaagtcgagcaacatcctgctggacaagagatggaaccccaaggtgtcggacttcggcatggccaaggtgctggggcccgggtccagctacgtgacgacccgcgtgatgggcacgttcgggtacgtggcccccgagtacgcgtcgacgggcatgctgaacgagagcagcgacgtctacagcttcggcgtgctgctcatggagctcatctccgggcggagccccgtggactacaaccggccggccggcgaggtgaacctggtggagtggttcagggccatggtgggcgcccggcgcgtggaggacctggtggacccgcggatccccgcgccgccgccgcctccgcgggtgctcaaccgggtgctgctcgtctgcctccgatgcatcgacgccgacgcgcacaagcggccccggatggggcagatcgtgcacatgctcgagggtgacgagttccccttccgcacggagcaccgctcgccgcgggcgtctcaccggacgtcgacgggctcacggccgtcgcttctgtcggagaacgtcggtgccaccgacgactcggacaagtcgatggcgagatgaaggatccgagctgcctgcacaagcaactctgcaaacaagcaagcaaccctccactaacggatctggcgccgtcgtgcggcgtgcgaggagctggagcagaggggcttgggggctggactgactttttttcacccgatgcttccggatttgggcaccacccgaagctttcttcgaccggcgtgctccctccgccacatgatcggattgcttacgggacgacgggaaatcccggtgatgagatcaagtgtggaacaacatgtgatttaggggcgaaagggaagacgggaggggtattgtttggtttaggttctatatattttgtaccaacgattatgcacttagatatagatttcttttatatctatgtacctagtagaaatagtatatttctaaagttaaagaggtgttatagtttataatgaaggggacagcttcttattgcctagcaaaatagaagtctaagaggagatgatgcagataaaataatcgttacatgccaaaggagcccaatttctgacatagttaccctatttcgatctaattccctgacatagttaccctgaccaagatggatctgaccatgataaaactagttggcatccccaaacataattaccccgaccaggttggacccgacctcgaccatcccaagcaaaagtcttgatccaagttgtcctagtcggttggcctcgactttagtcacgccaagata

SEQ ID NO: 1031 - DNA, 995 bp, Zea Mays
ctagtcccccgcacgggtgacagactgacaggtccgtccgcaaatctgcaacgttgcctcgtcacctctatcctccggtctctcaccgcctaacacggccgccatggccgccgcctccacctcccttccccttggcttctcctctcaccaccgcccaactcccagaatccggccgcagccccagtcccagtcgcaaccactgaaggcaaaaccccttaacccccttcgcttcagcctagccctcaccccggcgaccgcgaagccccgcctcgctgcgatgcccgacgatgtcgctgtcgccaacttcgtggagaaggactggtcgttcctcgagtccgcgggcgcaaacctccagcgcgctctcgcgtcgggggcgctctcgccggcgtcgcgggtgttggcattgacgcccacggcgtccttcgtgaggggtcaaggaggcgcacgacgaggtgaggtgcttccacctcgagggtgggggcggcggcagaggcggcggcgtggtggaggccgtgccagagaggttcgacgacttcgatgttgtgttcgtgtgctacttccctggaatgggagtctccgcgggggcgctcctcaaatcgctggccaagaggtgctcaaaaggtgcaagagttgtcatgttcttagatcaaggcagacagaattttgagcaacaacggagagagcatcctgatgttgtaacttcggatttgcccagtatagccttcctggagaaggctgcatctgggaacaagtatgaaataacagagttcgttgacgagcctagcttttaccttgctgttttgcagtttcaaggatgatttgttccttttttgcaatatttgtgaagcaaattgtgactgtctgtaaatttgcaatatttgtgaagcaaattgtgactgtctgtaaattctgatggacgtagtttgtgggtggcttatgtcgtactagcctgtttggtttgctgtctaatttatcacactttaactaattttttg

SEQ ID NO: 1032 - DNA, 406 bp, Zea Mays
atgctatggtgaatcggtcacaaatacagctggtgcaagagttgtcatgttcttagatcaaggcagacagaattttgagcaacaacggagagagcatcctgatgttgtaacttcggatttgcccagtatagccttcctggagaaggctgcatctgggaacaagtatgaaataacagagttcgttgacgagcctagcttttaccttgctgttttgcagtttcaaggatgatttgttccttttttgcaatatttgtgaagcaaattgtgactgtctgtaaatttgcaatatttgtgaagcaaattgtgactgtctgtaaattctgatggacgtagtttgtgggtggcttatgtcgtactagcctgtttggtttgctgtctaatttatcacactttaactaattttttg

SEQ ID NO: 1033 - DNA, 393 bp, Zea Mays
tggtgaatcggtcacaaatacagctgagttgtcatgttcttagatcaaggcagacagaattttgagcaacaacggagagagcatcctgatgttgtaacttcggatttgcccagtatagccttcctggagaaggctgcatctgggaacaagtatgaaataacagagttcgttgacgagcctagcttttaccttgctgttttgcagtttcaaggatgatttgttccttttttgcaatatttgtgaagcaaattgtgactgtctgtaaatttgcaatatttgtgaagcaaattgtgactgtctgtaaattctgatggacgtagtttgtgggtggcttatgtcgtactagcctgtttggtttgctgtctaatttatcacactttaactaattttttg

SEQ ID NO: 1034 - DNA, 50 bp, Zea Mays
tggcgtgcggtgtttttatacgtggttgcggcagcggttttagggtttcg

SEQ ID NO: 1035 - DNA, 1132 bp, Zea Mays
ccaaacacaggcacacagccgtgtcctccggactctcggggtctcccgacgtcgactcgtcctcggtttccctccatgccctcaaggcctcaatctatcctcgggctgtccgctgtccccttcccgcgtcgaaaccctagctcgtcacctcgccgccgtgctgtccgctgtcctagtccgcggctccgcgccccatctctcttgccgtcgcatctgatgttcttctcccgcaacgcattccgcgacctggaccccatcgactcgccggcctccatggcgtcctcgaagaaggttgcgacccgtgacgagtgggagcggaagcttcgcgacgtcaagatacgcaaggaggacatgaaccgcctcgtcatgaacttcctcgtcactgagggcttcgtcgacgccgccgacaagttccgcatcgacggagattgacctagcgatcatcgcggatcgaatggaggttaagagagcagtacagtcgggtaatgttcaggaagcgatcgagaagatcaacgatcttaaccccacgattctggacatgaatccccaactatactttcatctccagcaacagaaactaatagagttgattcgcgagggaaaaacaaatgaagctttggagttcgctcaagaagaacttgcaccgagaggcgaagaaaatagaactattggatgtttctcaacgtttgaagactgcaagtgaagttaatgctgctattcttgcaagccaaagtcatgggaaagattcgaagcttccaagcttgttaaagatgttgaaatggacacaaaatcatctggacgaaagggcggcatatcctgcaatcaatgacttcaccactgctgtagtggaagatccatcaatatgaatctgctgcaaaaaggttgatgataactgagggtaggcaccaagcctgcctggtggctgcatgtggtttgccccggatctgtcaatagatcatcatctgcagcgattgagttcacccctttcaccagtgttgaagcaattaagctcaatgcaaggagttgacctgaaacgtcacctgtgttctactacctgtacatgatgtagaaagacatgtttgaaccccttttcagccagtgaaaatattggatttgatttttcatggatata

SEQ ID NO: 1036 - DNA, 1120 bp, Zea Mays
ccaaacacaggcacacagccgtgtcctccggactctcggggtctcccgacgtcgactcgtcctcggtttccctccatgccctcaaggcctcaatctatcctcgggctgtccgctgtccccttcccgcgtcgaaaccctagctcgtcacctcgccgccgtgctgtccgctgtcctagtccgcggctccgcgccccatctctcttgccgtcgcatctgatgttcttctcccgcaacgcattccgcgacctggaccccatcgactcgccggcctccatggcgtcctcgaagaaggttgcgacccgtgacgagtgggagcggaagcttcgcgacgtcaagatacgcaaggaggacatgaaccgcctcgtcatgaacttcctcgtcactgagggcttcgtcgacgccgccgacaacggagattgacctagcgatcatcgcggatcgaatggaggttaagagagcagtacagtcgggtaatgttcaggaagcgatcgagaagatcaacgatcttaaccccacgattctggacatgaatccccaactatactttcatctccagcaacagaaactaatagagttgattcgcgagggaaaaacaaatgaagctttggagttcgctcaagaagaacttgcaccgagaggcgaagaaaatagaactattggatgtttctcaacgtttgaagactgcaagtgaagttaatgctgctattcttgcaagccaaagtcatgggaaagattcgaagcttccaagcttgttaaagatgttgaaatggacacaaaatcatctggacgaaagggcggcatatcctgcaatcaatgacttcaccactgctgtagtggaagatccatcaatatgaatctgctgcaaaaaggttgatgataactgagggtaggcaccaagcctgcctggtggctgcatgtggtttgccccggatctgtcaatagatcatcatctgcagcgattgagttcacccctttcaccagtgttgaagcaattaagctcaatgcaaggagttgacctgaaacgtcacctgtgttctactacctgtacatgatgtagaaagacatgtttgaaccccttttcagccagtgaaaatattggatttgatttttcatggatata

SEQ ID NO: 1037 - DNA, 1206 bp, Zea Mays
ccaaacacaggcacacagccgtgtcctccggactctcggggtctcccgacgtcgactcgtcctcggtttccctccatgccctcaaggcctcaatctatcctcgggctgtccgctgtccccttcccgcgtcgaaaccctagctcgtcacctcgccgccgtgctgtccgctgtcctagtccgcggctccgcgccccatctctcttgccgtcgcatctgatgttcttctcccgcaacgcattccgcgacctggaccccatcgactcgccggcctccatggcgtcctcgaagaaggttgcgacccgtgacgagtgggagcggaagcttcgcgacgtcaagatacgcaaggaggacatgaaccgcctcgtcatgaacttcctcgtcactgagggcttcgtcgacgccgccgacaagttccgcatcgacggagattgacctagcgatcatcgcggatcgaatggaggttaagagagcagtacagtcgggtaatgttcaggaagcgatcgagaagatcaacgatcttaaccccacgattctggacatgaatccccaactatactttcatctccagcaacagaaactaatagagttgattcgcgagggaaaaacaaatgaagctttggagttcgctcaagaagaacttgcaccgagaggcgaagaaaatcaaacatttctcgaggagatagaaaaaactgtagcgctactgatttttaaaggtgtaaaaaattgcccttacagagaactattggatgtttctcaacgtttgaagactgcaagtgaagttaatgctgctattcttgcaagccaaagtcatgggaaagattcgaagcttccaagcttgttaaagatgttgaaatggacacaaaatcatctggacgaaagggcggcatatcctgcaatcaatgacttcaccactgctgtagtggaagatccatcaatatgaatctgctgcaaaaaggttgatgataactgagggtaggcaccaagcctgcctggtggctgcatgtggtttgccccggatctgtcaatagatcatcatctgcagcgattgagttcacccctttcaccagtgttgaagcaattaagctcaatgcaaggagttgacctgaaacgtcacctgtgttctactacctgtacatgatgtagaaagacatgtttgaaccccttttcagccagtgaaaatattggatttgatttttcatggatata

SEQ ID NO: 1038 - DNA, 1991 bp, Zea Mays
atctttatacgagttcctggcgaaaaaactcacaactacactagttgtggcgactcagtcacacacagacacacacgactacacgagccgccgcagccgccgagccgagctccaagcggaggagaataggagagaccaccgatccgccgtcggagatgagggaggaggcgctggagcggctgcgcggggtggtacgggacagcgccgggaagcacctctacacgtcggccatcttcctcgccgacaaggtggcggcggccacgggggaccctggcgacgtctacatgctcgcgcaggcactcttcctcggccgtcaattccgtcacgcgctccacctcctcaacaattctcgcctgctccgcgacctccggttcagattcctcgccgccaagtgcctcgaggagttgaaagagtggcatcagtgtttgttgatgcttggggatgcaaaagtggatgagcatggaaatgtccttgatcatgatgatgacagtgatatttattttgataaggacgcggaagatcatgagatcaatatcaaatcagctctatgtttcttacgtggtaaggcatatgaagcactggacaaccgtgatcttgctcgccaatggtacaaggcagctgttaaagccgatcctctgtgttatgaggctctcgaacgtcttgttgataattatatgttgacatgtgaggaagaatctgagttattatcctctctgcaatttggggaagaagatgggtggctatcatcattctactcgtgtttgatcacgaagcatgaaaaagaatatttagttgaagcaaaattcaagaaacttgaagaagaggcctgcaatattttgtcctcgagttctggtgaaacaatgaaaaacaacattgatgttttggtttgcaaagctgaatactaccaccagagtggagagtaccaaaagtgttttaaactcacatcctcgttacttgagagagaccctttccatctaaagtgcacattagttcatttggcaactgcaatggagcttggtcattccaatgatctttatcttttagcatgcaacttagtgaaggattatcctgaaaaagctctttcatggtttgctgtcggttgctattactactgtattaagaagtatgatcaagcgcgaagatacttcgggtttagatgggacgtttcctcctgcttggattggtacaggcattgcctatgctgctcaagaggaaggtgaccaagcaatggctgcatttcggacggcagctcggttatttcctggatgtcatctgccaactttatacatgggcatgcaatatgtgcgaatgcacaatttcaaacttgcagagcagttcttcacacaagcaaaatccatctgcccatctgatccacttatttacaatgagttgggggttgttgcgtataatatgaaggagtaccgaaaagcagttcagttgtttgagttaacattggaccatacttcatcctctctgaatgaaatgtgggaaccaacattggtgaatcttgggcatgcacttcggaaactcaaggaatatcagaaagcagtatcatgttatgaaaaggcactcacttttccaaccaaaagtttgagtgcatttgctggtcttgcttatagttaccatcttatggataattttgaggctgccataaattattaccacaaggctctatggttgaaaccagacgaccagttttgcacagagatgctaacatatgctcttgagtccatctgtcaaagcactgctcgtagaaggcctagttgaggtttgctaatcgcaacatgctaggatattctttaccttacaagactagtagccaaattatatgtaaatttgttgttgtacaatatgtaattgctcaagttcatttcagccacttgaggctgatcgcattgtaaagccaaagttttcgatcttttaatttttatacaccccctccgttgtcatataataattaagttcgtcccgatgctatagcttcaaaagac

SEQ ID NO: 1039 - DNA, 1956 bp, Zea Mays
atctttatacgagttcctggcgaaaaaactcacaactacactagttgtggcgactcagtcacacacagacacacacgactacacgagccgccgcagccgccgagccgagctccaagcggaggagaataggagagaccaccgatccgccgtcggagatgagggaggaggcgctggagcggctgcgcggggtggtacgggacagcgccgggaagcacctctacacgtcggccatcttcctcgccgacaaggtggcggcggccacgggggaccctggcgacgtctacatgctcgcgcaggcactcttcctcggccgtcaattccgtcacgcgctccacctcctcaacaattctcgcctgctccgcgacctccggttcagattcctcgccgccaagtgcctcgaggagttgaaagagtggcatcagtgtttgttgatgcttggggatgcaaaagtggatgagcatggaaatgtccttgatcatgatgatgacagtgatatttattttgataaggacgcggaagatcatgagatcaatatcaaatcagctctatgtttcttacgtggtaaggcatatgaagcactggacaaccgtgatcttgctcgccaatggtacaaggcagctgttaaagccgatcctctgtgttatgagaatctgagttattatcctctctgcaatttggggaagaagatgggtggctatcatcattctactcgtgtttgatcacgaagcatgaaaaagaatatttagttgaagcaaaattcaagaaacttgaagaagaggcctgcaatattttgtcctcgagttctggtgaaacaatgaaaaacaacattgatgttttggtttgcaaagctgaatactaccaccagagtggagagtaccaaaagtgttttaaactcacatcctcgttacttgagagagaccctttccatctaaagtgcacattagttcatttggcaactgcaatggagcttggtcattccaatgatctttatcttttagcatgcaacttagtgaaggattatcctgaaaaagctctttcatggtttgctgtcggttgctattactactgtattaagaagtatgatcaagcgcgaagatacttcggcaaagctacaggtttagatgggacgtttcctcctgcttggattggtacaggcattgcctatgctgctcaagaggaaggtgaccaagcaatggctgcatttcggacggcagctcggttatttcctggatgtcatctgccaactttatacatgggcatgcaatatgtgcgaatgcacaatttcaaacttgcagagcagttcttcacacaagcaaaatccatctgcccatctgatccacttatttacaatgagttgggggttgttgcgtataatatgaaggagtaccgaaaagcagttcagttgtttgagttaacattggaccatacttcatcctctctgaatgaaatgtgggaaccaacattggtgaatcttgggcatgcacttcggaaactcaaggaatatcagaaagcagtatcatgttatgaaaaggcactcacttttccaaccaaaagtttgagtgcatttgctggtcttgcttatagttaccatcttatggataattttgaggctgccataaattattaccacaaggctctatggttgaaaccagacgaccagttttgcacagagatgctaacatatgctcttgagtccatctgtcaaagcactgctcgtagaaggcctagttgaggtttgctaatcgcaacatgctaggatattctttaccttacaagactagtagccaaattatatgtaaatttgttgttgtacaatatgtaattgctcaagttcatttcagccacttgaggctgatcgcattgtaaagccaaagttttcgatcttttaatttttatacaccccctccgttgtcatataataattaagttcgtcccgatgctatagcttcaaaagac

SEQ ID NO: 1040 - DNA, 2386 bp, Zea Mays
caatacgctccgtgtccaccttccaccacccaacctgaaaacgccattcgaggactcgacccaggccagtccttcagatctcccctcccttcctgtccttctctattatagcaagcaaagcgccactcgcaatcgcaacccaccaccctcagagaaagtgaaggagaagagcgaggcccttggcgaggtcctcaatggggatcggctagttgatgcgccttacaagcttgatttccgttcggaagttgagtccaaggcggtttgctcaaagaagcttaccaaagaggatgtagtgaagttccggaatgcagtagcgaaggactactacttccagatgtactatgatgatctcccactgtggggcttcattggtaaagttgagaagggaggcaaggccgatccgagcgagtggaagtactacctgtacaggcacatcatcttcgatatcctgtacaacaacgaccgggtgattgaaatcaatgtgcacactgatcagagtgctttggttgacctgacggaggataaggagacaaatgtggatttcctgtactcagtcaagtggaaggagacaccaacaccatttgagaagaggatggagaagtactccagctcctccaacatgccgcaccacctggaggttcattggttctcaattataaactcttgtgttactgtcctcctcctcacagggttccttgcaacaatcctcatgcgagtattgaagaatgattttgtcaagtatgcccatgatgaggaagcagctgatgaccaggaagagtctggatggaagtatattcatggtgacgtcttccggttcccaaagaataagtcgctattttccgctgctcttggcacaggaactcaattatttgcactcacaacctttatatttcttcttgcacttgttggagtattctacccttacaaccgtggtgcactatttactgcattggttgtcatctatgcactcacttcaggaattgctggatacgttgctacctctttttattctcagctggaggggacaaactgggtgaggaacttgctattgacaggatgcctgttctgtggacctctcttactgacattttgcttcttgaacactgttgctattgcttatagtgcaacagcagcactgccctttggcactatctgtgtcattgtgctcatctggaccttggtcacgtttcctttgcttgttttgggtggtattgctggtaaaaacagcaaaagtgagttccaagctccttgccgtaccacaaaataccccagggagattcctccacttccctggtaccggagaaccattccacagatggctatggctgggttcttgcctttcagcgccatatacattgagctatactacatctttgctagtgtttggggccacaggatctacacaatctacagcattctgtttattgtcttcatcatcctccttattgtcaccgcgttcatcactgttgcactgacatacttccagcttgctgctgaagaccatgagtggtggtggaggtcattcctttgcggaggatcaactgggtttttcgtgtacggctactgcctgtactactactatgcgcgatccgacatgtctggcttcatgcagacatctttcttctttggctacatggcctgcatctgctatgcattcttcttgatgctcgggatggtgggcttccgcgccgccctgttctttgtccgccacatatacaaatcaatcaagtgtgaatgagctgttgctggggagacgaagagcagcagagttgtacccgtttttggtgccccaccgagaggtcccagatatagaaaaggttagctctcgcatgcgacaggagcagctagagattgccatgtttcagagtaggccaattatttataggaacaggtaatgaacctataaatttgttctgtttttgtgactgctgtgataaaaagaccgtctgttccttcgtcctatgtatcatctcctagtgacgtcagacagcactataactttgttggaaccgtgacatgcctgaatatctgtggaaaaagaaacccgtgttatgttgttatatatgttctctaaagcatagaataatagaagtgtagacctctagtgtggcaggttcatctgtacgtgtatcctcttcgttcttgttcactgcggagtgttggaatttatacatatccccagacttttggtactgttgtatttgcattacttccagcgatgctttcttaggattgtggacctattggttctttaaacgtggtggctgattcgcttccttcgactgagctcgcatcttcggtacgttgttttcttctgacctcgatggttcccaatttggtttcagcttacacgcgtcgaagacccgggtaactgtcaggaaaacga

SEQ ID NO: 1041 - DNA, 2361 bp, Zea Mays
cagtccttcagatctcccctcccttcctgtccttctctattatagcaagcaaagcgccactcgcaatcgcaacccaccaccctcagtgagacatatcgttacttcgacctgcccttctgctctcctgagaaagtgaaggagaagagcgaggcccttggcgaggtcctcaatggggatcggctagttgatgcgccttacaagcttgatttccgttcggaagttgagtccaaggcggtttgctcaaagaagcttaccaaagaggatgtagtgaagttccggaatgcagtagcgaaggactactacttccagatgtactatgatgatctcccactgtggggcttcattggtaaagttgagaagggaggcaaggccgatccgagcgagtggaagtactacctgtacaggcacatcatcttcgatatcctgtacaacaacgaccgggtgattgaaatcaatgtgcacactgatcagagtgctttggttgacctgacggaggataaggagacaaatgtggatttcctgtactcagtcaagtggaaggagacaccaacaccatttgagaagaggatggagaagtactccagctcctccaacatgccgcaccacctggaggttcattggttctcaattataaactcttgtgttactgtcctcctcctcacagggttccttgcaacaatcctcatgcgagtattgaagaatgattttgtcaagtatgcccatgatgaggaagcagctgatgaccaggaagagtctggatggaagtatattcatggtgacgtcttccggttcccaaagaataagtcgctattttccgctgctcttggcacaggaactcaattatttgcactcacaacctttatatttcttcttgcacttgttggagtattctacccttacaaccgtggtgcactatttactgcattggttgtcatctatgcactcacttcaggaattgctggatacgttgctacctctttttattctcagctggaggggacaaactgggtgaggaacttgctattgacaggatgcctgttctgtggacctctcttactgacattttgcttcttgaacactgttgctattgcttatagtgcaacagcagcactgccctttggcactatctgtgtcattgtgctcatctggaccttggtcacgtttcctttgcttgttttgggtggtattgctggtaaaaacagcaaaagtgagttccaagctccttgccgtaccacaaaataccccagggagattcctccacttccctggtaccggagaaccattccacagatggctatggctgggttcttgcctttcagcgccatatacattgagctatactacatctttgctagtgtttggggccacaggatctacacaatctacagcattctgtttattgtcttcatcatcctccttattgtcaccgcgttcatcactgttgcactgacatacttccagcttgctgctgaagaccatgagtggtggtggaggtcattcctttgcggaggatcaactgggtttttcgtgtacggctactgcctgtactactactatgcgcgatccgacatgtctggcttcatgcagacatctttcttctttggctacatggcctgcatctgctatgcattcttcttgatgctcgggatggtgggcttccgcgccgccctgttctttgtccgccacatatacaaatcaatcaagtgtgaatgagctgttgctggggagacgaagagcagcagagttgtacccgtttttggtgccccaccgagaggtcccagatatagaaaaggttagctctcgcatgcgacaggagcagctagagattgccatgtttcagagtaggccaattatttataggaacaggtaatgaacctataaatttgttctgtttttgtgactgctgtgataaaaagaccgtctgttccttcgtcctatgtatcatctcctagtgacgtcagacagcactataactttgttggaaccgtgacatgcctgaatatctgtggaaaaagaaacccgtgttatgttgttatatatgttctctaaagcatagaataatagaagtgtagacctctagtgtggcaggttcatctgtacgtgtatcctcttcgttcttgttcactgcggagtgttggaatttatacatatccccagacttttggtactgttgtatttgcattacttccagcgatgctttcttaggattgtggacctattggttctttaaacgtggtggctgattcgcttccttcgactgagctcgcatcttcggtacgttgttttcttctgacctcgatggttcccaatttggtttcagcttacacgcgtcgaagacccgggtaactgtcaggaaaacga

SEQ ID NO: 1042 - DNA, 2567 bp, Zea Mays
cagtccttcagatctcccctcccttcctgtccttctctattatagcaagcaaagcgccactcgcaatcgcaacccaccaccctcaggtcaggcctcgctcagatctctccgccctcgtcccccctcacaccccaaaccctcggcccgcctctctcgtcaacgccgcccgacgagagcgatggcggcctcgccggccgcggccgcggcactcctcatcctcttcgccctcggggcggccggcggagtggcggccgacggctccgaccaccggtacaagatgtacgagcccgtcccgctctacgccaacaaggtcggccccttccacaatcccagagaaagtgaaggagaagagcgaggcccttggcgaggtcctcaatggggatcggctagttgatgcgccttacaagcttgatttccgttcggaagttgagtccaaggcggtttgctcaaagaagcttaccaaagaggatgtagtgaagttccggaatgcagtagcgaaggactactacttccagatgtactatgatgatctcccactgtggggcttcattggtaaagttgagaagggaggcaaggccgatccgagcgagtggaagtactacctgtacaggcacatcatcttcgatatcctgtacaacaacgaccgggtgattgaaatcaatgtgcacactgatcagagtgctttggttgacctgacggaggataaggagacaaatgtggatttcctgtactcagtcaagtggaaggagacaccaacaccatttgagaagaggatggagaagtactccagctcctccaacatgccgcaccacctggaggttcattggttctcaattataaactcttgtgttactgtcctcctcctcacagggttccttgcaacaatcctcatgcgagtattgaagaatgattttgtcaagtatgcccatgatgaggaagcagctgatgaccaggaagagtctggatggaagtatattcatggtgacgtcttccggttcccaaagaataagtcgctattttccgctgctcttggcacaggaactcaattatttgcactcacaacctttatatttcttcttgcacttgttggagtattctacccttacaaccgtggtgcactatttactgcattggttgtcatctatgcactcacttcaggaattgctggatacgttgctacctctttttattctcagctggaggggacaaactgggtgaggaacttgctattgacaggatgcctgttctgtggacctctcttactgacattttgcttcttgaacactgttgctattgcttatagtgcaacagcagcactgccctttggcactatctgtgtcattgtgctcatctggaccttggtcacgtttcctttgcttgttttgggtggtattgctggtaaaaacagcaaaagtgagttccaagctccttgccgtaccacaaaataccccagggagattcctccacttccctggtaccggagaaccattccacagatggctatggctgggttcttgcctttcagcgccatatacattgagctatactacatctttgctagtgtttggggccacaggatctacacaatctacagcattctgtttattgtcttcatcatcctccttattgtcaccgcgttcatcactgttgcactgacatacttccagcttgctgctgaagaccatgagtggtggtggaggtcattcctttgcggaggatcaactgggtttttcgtgtacggctactgcctgtactactactatgcgcgatccgacatgtctggcttcatgcagacatctttcttctttggctacatggcctgcatctgctatgcattcttcttgatgctcgggatggtgggcttccgcgccgccctgttctttgtccgccacatatacaaatcaatcaagtgtgaatgagctgttgctggggagacgaagagcagcagagttgtacccgtttttggtgccccaccgagaggtcccagatatagaaaaggttagctctcgcatgcgacaggagcagctagagattgccatgtttcagagtaggccaattatttataggaacaggtaatgaacctataaatttgttctgtttttgtgactgctgtgataaaaagaccgtctgttccttcgtcctatgtatcatctcctagtgacgtcagacagcactataactttgttggaaccgtgacatgcctgaatatctgtggaaaaagaaacccgtgttatgttgttatatatgttctctaaagcatagaataatagaagtgtagacctctagtgtggcaggttcatctgtacgtgtatcctcttcgttcttgttcactgcggagtgttggaatttatacatatccccagacttttggtactgttgtatttgcattacttccagcgatgctttcttaggattgtggacctattggttctttaaacgtggtggctgattcgcttccttcgactgagctcgcatcttcggtacgttgttttcttctgacctcgatggttcccaatttggtttcagcttacacgcgtcgaagacccgggtaactgtcaggaaaacga

SEQ ID NO: 1043 - DNA, 2519 bp, Zea Mays
cagtccttcagatctcccctcccttcctgtccttctctattatagcaagcaaagcgccactcgcaatcgcaacccaccaccctcaggtcaggcctcgctcagatctctccgccctcgtcccccctcacaccccaaaccctcggcccgcctctctcgtcaacgccgcccgacgagagcgatggcggcctcgccggccgcggccgcggcactcctcatcctcttcgccctcggggcggccggcggagtggcggccgacggctccgaccaccggtacaagatgtacgagcccgtcccgctctacgccaacaaggtcggccccttccacaatcccagtgagacatatcgttacttcgacctgcccttctgctctcctgagaaagtgaaggagaagagcgaggcccttggcgaggtcctcaatggggatcggctagttgatgcgccttacaagcttgatttccgttcggaagttgagtccaaggcggtttgctcaaagaagcttaccaaagaggatgtagtgaagttccggaatgcagtagcgaaggactactacttccagatgtactatgatgatctcccactgtggggcttcattggtaaagttgagaagggaggcaaggccgatccgagcgagtggaagtactacctgtacaggcacatcatcttcgatatcctgtacaacaacgaccgggtgattgaaatcaatgtgcacactgatcagagtgctttggttgacctgacggaggataaggagacaaatgtggatttcctgtactcagtcaagtggaaggagacaccaacaccatttgagaagaggatggagaaggttccttgcaacaatcctcatgcgagtattgaagaatgattttgtcaagtatgcccatgatgaggaagcagctgatgaccaggaagagtctggatggaagtatattcatggtgacgtcttccggttcccaaagaataagtcgctattttccgctgctcttggcacaggaactcaattatttgcactcacaacctttatatttcttcttgcacttgttggagtattctacccttacaaccgtggtgcactatttactgcattggttgtcatctatgcactcacttcaggaattgctggatacgttgctacctctttttattctcagctggaggggacaaactgggtgaggaacttgctattgacaggatgcctgttctgtggacctctcttactgacattttgcttcttgaacactgttgctattgcttatagtgcaacagcagcactgccctttggcactatctgtgtcattgtgctcatctggaccttggtcacgtttcctttgcttgttttgggtggtattgctggtaaaaacagcaaaagtgagttccaagctccttgccgtaccacaaaataccccagggagattcctccacttccctggtaccggagaaccattccacagatggctatggctgggttcttgcctttcagcgccatatacattgagctatactacatctttgctagtgtttggggccacaggatctacacaatctacagcattctgtttattgtcttcatcatcctccttattgtcaccgcgttcatcactgttgcactgacatacttccagcttgctgctgaagaccatgagtggtggtggaggtcattcctttgcggaggatcaactgggtttttcgtgtacggctactgcctgtactactactatgcgcgatccgacatgtctggcttcatgcagacatctttcttctttggctacatggcctgcatctgctatgcattcttcttgatgctcgggatggtgggcttccgcgccgccctgttctttgtccgccacatatacaaatcaatcaagtgtgaatgagctgttgctggggagacgaagagcagcagagttgtacccgtttttggtgccccaccgagaggtcccagatatagaaaaggttagctctcgcatgcgacaggagcagctagagattgccatgtttcagagtaggccaattatttataggaacaggtaatgaacctataaatttgttctgtttttgtgactgctgtgataaaaagaccgtctgttccttcgtcctatgtatcatctcctagtgacgtcagacagcactataactttgttggaaccgtgacatgcctgaatatctgtggaaaaagaaacccgtgttatgttgttatatatgttctctaaagcatagaataatagaagtgtagacctctagtgtggcaggttcatctgtacgtgtatcctcttcgttcttgttcactgcggagtgttggaatttatacatatccccagacttttggtactgttgtatttgcattacttccagcgatgctttcttaggattgtggacctattggttctttaaacgtggtggctgattcgcttccttcgactgagctcgcatcttcggtacgttgttttcttctgacctcgatggttcccaatttggtttcagcttacacgcgtcgaagacccgggtaactgtcaggaaaacga

SEQ ID NO: 1044 - DNA, 1254 bp, Zea Mays
ggaaaggaaaggaggtcgcgtcgcgtcgccgttgccgtcttgccgccaacgccagcccaacccaccaggtccccactgtatatatgagccgtgcccgcatgtgtgttaagcccagccaacacaagtcaagtcggagcccgcaggtgtcgacaccgcgcgccgggagccggaagaagggtggggggtgagctgtggaccatgagcgcgaccgggcgagccccgtgcggcctgccgcgcatcggcctgggcacggcggtgcagggcccgcggccggaccccgtccgcgccgcggtgctgcgcgccatccagctcggctaccgccacttcgacacggccgcgcactacgccaccgaggcgcccatcggggaggccgccgccgaggccgtgcgcacggggctcgtcgcctcccgcgaggacctcttcgtcacgtccaaggtctggtgcgccgacgcgcaccgggacagggtgctcccggccctccgccggacgctcaggttgagatcaacccggtgtggcagcagcggaagctgagggagttctgcagggcgaagggcatccagctatgcgcctactcgcccctgggcgccaagggcacgcactggggcagcgactcggtgatggactccggcgtcctgcacgagatcgccaagtccaagggcaagaccgtggcacaggtgtgcctgaggtgggtgtacgagcagggcgactgcctgatcgtgaagagcttcgacgaggggcggatgaaggagaacctggacatcgtggactgggagctgagcgaggaggagaggcagcgcatcagcaagatcccccagcggaagatcaaccagggccgtcgctacgtctccgagcacgggccctacaagtccttcgaggagctatgggacggcgagatatgatatgagtaaacgttacgtcggcgccccgctaggcggctgccttgcgtgacggagcaacgagctccccgtcgtgacagtgagcggctgctttgtgtggttttatgtcgtgccatctgtgcaacaaaaagtgatgcttagtgtcacagtatgtgtgaaataaattaaaaaggattttctggttacgccggtcaatgcgtgccactgccctgccaccagcccaccaccgcagggttggcagcgggaccatgacgccaccgggagatccgctcgccgcacgcacatcggcctgcgcttggcggtggccggagcccatccgcctcgcatctacacctatatacccagaaaaaaaataaaa

SEQ ID NO: 1045 - DNA, 2456 bp, Zea Mays
ctcgaaataggatcgatactgtaaccctttaatgcaaatatggacagagattggggagcgtgaacaagataaagatcgcatgttccttgaactggaaacagagtgcatgcgtgtgtaccgtagaaaggttgatagtgccaatgctgagagagcccagctccgtcagtcactgatggccaaagaagcagagcttaaagctctagttgcttctatcggggaaaatggcccacgatttacggtggatgaaaagcacacatcgttgaaagatcaacttgctgcagtggcacctcttttggaagatcttagagtaaagaaacaagacagagtcaaacaaatctcaaatgtgcaatgtcaaatcgagaagataaaagcacaaatttctgatcacaattatcaggacagtgatggttccatcaaacaacttaacgatgaccatgacttatcgaccagaagaatttctgatcttcaaatgcaactgcgtaatctacagaaggagaagtccgatcgtcttcagaaggtttttatatatgtggatgaagtgcacagcctatgtgcagtgcttgggatggattttccaaagactgtaaaagaggtccacccgagtttgcatggatccaactctgaaaattcaacaaatattagtgatagcactcttgaaggtcttactcagactatcctgaagctcaaagcagaaaagaagacaagagttttaaagttgcaagagactgtagaaaaacttcacaagttatggaatctgatggagtcaactgagaaagagaggatacacttctctgaagtagctgctattcttggatctactgaggaagagatcaattctccaggcattctgtcattggagacaattcagaagactgaagaggaagtcgaaaagctaactgtacaaaaaactagtagaatgaaggagcttgttctcaagaaaaggttagaactagaaggcatctgtagaaatgcacacatggagcctgatatgagcacagcaccagagaagatcaccgcgctgattgattccggtttagtggatccttgcgaactcctttccagcattgaagtgcaaataacaaaagcaaatgaagagtccttaacgaggaaagatatcatggagagagtggataaatggctatcagcttgtgatgaagagacttggcttgaggaatataaccaagatgataataggtatagtgctggcaggggtgcccacttgaatcttaagcgtgcagagaaggcaaggataactgtccaaaagattccaactatgattgacagcttgatagccaaaacttttgcatgggaggatgaaagaaatgtgccatttttatatgatgggattcgtttggttgccattttggaagagcaaaaactcagaagggcacaaagggaggaagagaagagacgcagccgggatcagaggaagctgcacagtttattgcttaaggagaaggagttgattttcgggtccaaacctagtcctagaaagacaagcagcttcaataggaggaccagcaaccaccatccaaacgcaaatggcgctggattcatgactccggtgccacgccgagtttcagctggcagtgccaccccagagcttctgaccccacgctcgtattctggccggtacaacaactacttcaaggagaacaggcgcctgacagctgcaccactgaacttctcagttggttccaaggaggatagcatgtcatccttcgcatccatcagtggctcggaacctgattcgccattgtttttgcactaagtgttggttagggaggagacttcttggtgagaagggtggatagcctcaagatcggaccattgtgtgtgtgtgtgtgtggcagctgttaacattgctgattggtaacaacaggttgtgacaagtttagatgcgattgcttgtagatataatatctaacattcatggttctgctgtacttccaaatttaagttgtaagtcgtttggttaggaaggatgcaatgcccaagtgtgcaatgtatttgtttcgtgttaagtctgtatgttttgcatgtgaagaaagggtgatttttttttgtcaatgacgtagcagttcagccttcaaggttacagctacagcatcttgtcttgtactggtcgtttggatcacagctggcgtgtgctatatgggaatctaacacccatctttttgtcagaacaaagagtgtcttgcatgttggatctcagttcacacatgctgtcaatagaggtactttgaaagcgtcacatggatatccaggtcactcttcattcgatacttaggtgcccacgtcttcagtagcatgatgagttgcttgctgctgcaattggagttcaaagtgttacaaaagtttcacatgtgatcaatcccaaccggtgtggcagttattgcctaagggtcgcaccctttgggaccctgtgttctgtactatatatacatgtatctctg

SEQ ID NO: 1046 - DNA, 1283 bp, Zea Mays
atcaggtagtagtacgtaacctgacgaaagtcaggtaaagaaaaagaaagaaacatgagaaggacggcagtatccaaagcagggagcaagtagacaaagagaggctactgtactattgattcttggtgccagtctacaccaatccagtgccatcccaaatgaaagcaagatgggaagggtcggggagaagctcgatatcgactttgttatatccaccggggacaacttctacaagaacggcctcaagggcgtgcgcgaccaggcatttgaagaatcgttcgtggatatctacacagctcaaagcttacagaagccatggtactcagttctaggaaatcatgattacaggggcaatgcgctcgcacagcttagcccagtcttgaggaagatcgacgaccgattcatttgcatgagatcgttcatcgttaacgcagaacttgtggacttcttctttgtcgacaccactccgttccaactggagtattggactcaccctggcaagcatcgttatgactggagaggggtggcgcctcgaggcaattacttagccaatttgctgaaggatctggatgtggctatgaagaaatcaactgcaaggtggaagattgtggttgggcatcacaccatgaggagtgtgagtgagcacagggacaccgaggagcttctggaattactacttccagtcctcaaggacaatggcgtcgacttctacatcaatggacacgatcactgtctggagcacattagcagcagagacagtccactccagtatttcacgagcggaggcggttccaaggcatggagaggagtcttccatccaaacaaggacaagctccgattcttctacgacgggcaagggttcatgtccctccagctgaaccaagaccaggctcactttatcttttacgacgttttcgggaacatactgtaccgatggagctcgagacatccccagtcttccacgtatctcgatgaggaataaattggattgattttgcgccattgatatgtacaaaacaccacctgccaactgtcatgtatgtgaaatgatgagtgttagacgcaaagaaggttatacaccagttagggttaaatcatctggttcagtggttcatgatggatccaagaatgcgacgattatatcatagacacgtagtgaagaacggaaagacttatgaacaaacctcaaagtctaaccaattatgcttaggcgacaaaaaaatgtctagtttccacgtaaactagccaatcaaccgtcgaagttctcaatcaaagggactatg

SEQ ID NO: 1047 - DNA, 1176 bp, Zea Mays
agagaatatgccatcgccgctccatcccgacagatgggcccgacctactacaatcatgcatgatgggaagggtcggggagaagctcgatatcgactttgttatatccaccggggacaacttctacaagaacggcctcaagggcgtgcgcgaccaggcatttgaagaatcgttcgtggatatctacacagctcaaagcttacagaagccatggtactcagttctaggaaatcatgattacaggggcaatgcgctcgcacagcttagcccagtcttgaggaagatcgacgaccgattcatttgcatgagatcgttcatcgttaacgcagaacttgtggacttcttctttgtcgacaccactccgttccaactggagtattggactcaccctggcaagcatcgttatgactggagaggggtggcgcctcgaggcaattacttagccaatttgctgaaggatctggatgtggctatgaagaaatcaactgcaaggtggaagattgtggttgggcatcacaccatgaggagtgtgagtgagcacagggacaccgaggagcttctggaattactacttccagtcctcaaggacaatggcgtcgacttctacatcaatggacacgatcactgtctggagcacattagcagcagagacagtccactccagtatttcacgagcggaggcggttccaaggcatggagaggagtcttccatccaaacaaggacaagctccgattcttctacgacgggcaagggttcatgtccctccagctgaaccaagaccaggctcactttatcttttacgacgttttcgggaacatactgtaccgatggagctcgagacatccccagtcttccacgtatctcgatgaggaataaattggattgattttgcgccattgatatgtacaaaacaccacctgccaactgtcatgtatgtgaaatgatgagtgttagacgcaaagaaggttatacaccagttagggttaaatcatctggttcagtggttcatgatggatccaagaatgcgacgattatatcatagacacgtagtgaagaacggaaagacttatgaacaaacctcaaagtctaaccaattatgcttaggcgacaaaaaaatgtctagtttccacgtaaactagccaatcaaccgtcgaagttctcaatcaaagggactatg

SEQ ID NO: 1048 - DNA, 2774 bp, Zea Mays
atcggccctgcggctccacatagtcgttaggtttccgctcgacgccgcgtcgccctctcgccggcctcccgtttcacgaatcttcggatgcccagatccggctctcctcttcccacctcctcttcactgtctactactgccgctagccgcgcctgcttgctgcttccccctctctttttctctcgtctccattccagcatcgccaccaccagtccaccattccagcatcatcaccaccacccgagacaaaaaaataaaaaaaacccaacaacactgtaacgagaatatacggcaaaaccctagatctctctctcctctcggcattgctggctggggtgtgcggcggcccgcagtggtgagggacgcacggcgatggcctccgccgccgccgtcatcgcctcgccggcccccggcgccgccgcggccgagcccgccgcctggctcgtcgacgagcgcgacggcttcatcacctggctgcgcggcgagttcgccgccgccaacgccatcgtcgaccacctcatcttccacctccgctccatcagcgagccgggcgagtacgaccacgtcttctctctcgtccagcagcgccgccaccactggccgcacgtgatccacatgcagcagttcttccccgtcagcgacatcgccttcgcgctccagcaagccagctggcgccgccacgcgccgccggcccaggcgctcggggctggcgcgtcgccggccgcgctcccgccgccgcctcctcgccgcgcctcgttctcgcagtcccatcactcccaccagcaccatcgccacggcgcccactaccgccccgatccagcgcgcggcgccgccactgcggcgactggatccgagaaagatggacgtgaagttcataataacaaggaagggagggggctgaaagaagcggggaatgtcgtcgatactaaaagtttgcggttggattctcctataactgatggttaatactgttgaagggctcaaggtttatgaaggattactaaatgtaaccgaggcaaataagatcctttccttagtcaatgaaacaagagcctcttaccggcgaggggggcttgaagctagacagaaggttattattgctaaaagaccaatgaagggtcatggacgggaaattgttcagctgggtgttcctattattgatggccctcctgatgatgaaaatctaagagagacaagggtggaggcgattcctgggctgctgaatgatctgtttgatcgcttgtctcagcaggaaattatacccttcaagccagattattgtgtcattgacatcttcaatgagggagactattctcatcctcaccaatccccttcttggtatggtagacctctttgtaccctctgcttaacagattgtgatatggtgtttggccgttatatatcaggagaaaaaggcgatcatagaggtcctctgaagctctcgctcgcaactgggtcacttctactcatgcaagggagaagtattgactgtgcaaagcgagctattcctgctacacgcaagcagagagtcatactgaattttggaaagtccgtagcaagaaagcacatcccagctgaaagtgcctggtctactccattaacacctcctatgccctggggtcagtcatcaaggccagttaacggctcccgccatccccaaagtcctaaacactatgggtatgctccaatcagcggtgtacttccagcaccaccagttggagctcatcacgtcccaccgtctgatgggatgcagccactatttgtagcccctgctcctatttctgctgcagccatacctttcacgccaactgttcccttgcaaaatacatcagctgcttggatacaagaagttactccaaggcctgctccgccacgattccctggtcctggtacgggggtcttccttcctccgggatcaggccaccctctgcctcatcagatgatgccggcttctcatggccatggcgaacccaactctccacaaggttcatccgcttacctgcatagtaaggtcaatggcaaggagacatctaatggcaatctttctcctaagaactcgccgagaaagacatcttgcacagccgaggagaaaccagaatgcaatgggagcttaaatggtggtggcggctctgcggatgagaagtcaactgtaggtatggagcagcagaatggtgttcagaagaatgttgggagtagcaaggtccagccacatggacatgcaactgaatagagtgggacttatagtacatagacaacagaaaactgaagagacgaggagttgaattttgggccgtgaatttgcggtagtgcgcagagctcagcagaggtctttgctggcactctcttgtccctgacaagaatcatcgtgtcaagttctcgagacggaaaacatttgtcctaaactttgtagctgcactgttgcaaatctagattatcgacattgcctcgggttatcatctgctatcagagtcgtgggcagtgaaaaccatttctgatggtttatgttgcccaaatattatcgacctagtacatctgaaatgggaaaaaatgtggacgaaatttcttgcatcgaactctcttgtgatcgactggcctttgatgcatctgtagcagactacttatggtagactgttacttgctgatagatggttctgctacaggtgtttgctgtggatgtcaattataacctagactgtgaacttatcactcttttgggtcctgaacgttttgcaagtgttcttattcaggacgtgggcaaagcatatggatttatg

SEQ ID NO: 1049 - DNA, 2754 bp, Zea Mays
gttaggtttccgctcgacgccgcgtcgccctctcgccggcctcccgtttcacgaatcttcggatgcccagatccggctctcctcttcccacctcctcttcactgtctactactgccgctagccgcgcctgcttgctgcttccccctctctttttctctcgtctccattccagcatcgccaccaccagtccaccattccagcatcatcaccaccacccgagacaaaaaaataaaaaaaacccaacaacactgtaacgagaatatacggcaaaaccctagatctctctctcctctcggcattgctggctggggtgtgcggcggcccgcagtggtgagggacgcacggcgatggcctccgccgccgccgtcatcgcctcgccggcccccggcgccgccgcggccgagcccgccgcctggctcgtcgacgagcgcgacggcttcatcacctggctgcgcggcgagttcgccgccgccaacgccatcgtcgaccacctcatcttccacctccgctccatcagcgagccgggcgagtacgaccacgtcttctctctcgtccagcagcgccgccaccactggccgcacgtgatccacatgcagcagttcttccccgtcagcgacatcgccttcgcgctccagcaagccagctggcgccgccacgcgccgccggcccaggcgctcggggctggcgcgtcgccggccgcgctcccgccgccgcctcctcgccgcgcctcgttctcgcagtcccatcactcccaccagcaccatcgccacggcgcccactaccgccccgatccagcgcgcggcgccgccactgcggcgactggatccgagaaagatgaaggtgaggaaaaatcaaagctgcaagctgtttctgaagaaagtagcaaaatggttgcaacccctgtagagtattcaaccaatgagatcattgatggcagcatggttaatactgttgaagggctcaaggtttatgaaggattactaaatgtaaccgaggcaaataagatcctttccttagtcaatgaaacaagagcctcttaccggcgaggggggcttgaagctagacagaaggttattattgctaaaagaccaatgaagggtcatggacgggaaattgttcagctgggtgttcctattattgatggccctcctgatgatgaaaatctaagagagacaagggtggaggcgattcctgggctgctgaatgatctgtttgatcgcttgtctcagcaggaaattatacccttcaagccagattattgtgtcattgacatcttcaatgagggagactattctcatcctcaccaatccccttcttggtatggtagacctctttgtaccctctgcttaacagattgtgatatggtgtttggccgttatatatcaggagaaaaaggcgatcatagaggtcctctgaagctctcgctcgcaactgggtcacttctactcatgcaagggagaagtattgactgtgcaaagcgagctattcctgctacacgcaagcagagagtcatactgaattttggaaagtccgtagcaagaaagcacatcccagctgaaagtgcctggtctactccattaacacctcctatgccctggggtcagtcatcaaggccagttaacggctcccgccatccccaaagtcctaaacactatgggtatgctccaatcagcggtgtacttccagcaccaccagttggagctcatcacgtcccaccgtctgatgggatgcagccactatttgtagcccctgctcctatttctgctgcagccatacctttcacgccaactgttcccttgcaaaatacatcagctgcttggatacaagaagttactccaaggcctgctccgccacgattccctggtcctggtacgggggtcttccttcctccgggatcaggccaccctctgcctcatcagatgatgccggcttctcatggccatggcgaacccaactctccacaaggttcatccgcttacctgcatagtaaggtcaatggcaaggagacatctaatggcaatctttctcctaagaactcgccgagaaagacatcttgcacagccgaggagaaaccagaatgcaatgggagcttaaatggtggtggcggctctgcggatgagaagtcaactgtaggtatggagcagcagaatggtgttcagaagaatgttgggagtagcaaggtccagccacatggacatgcaactgaatagagtgggacttatagtacatagacaacagaaaactgaagagacgaggagttgaattttgggccgtgaatttgcggtagtgcgcagagctcagcagaggtctttgctggcactctcttgtccctgacaagaatcatcgtgtcaagttctcgagacggaaaacatttgtcctaaactttgtagctgcactgttgcaaatctagattatcgacattgcctcgggttatcatctgctatcagagtcgtgggcagtgaaaaccatttctgatggtttatgttgcccaaatattatcgacctagtacatctgaaatgggaaaaaatgtggacgaaatttcttgcatcgaactctcttgtgatcgactggcctttgatgcatctgtagcagactacttatggtagactgttacttgctgatagatggttctgctacaggtgtttgctgtggatgtcaattataacctagactgtgaacttatcactcttttgggtcctgaacgttttgcaagtgttcttattcaggacgtgggcaaagcatatggatttatg

SEQ ID NO: 1050 - DNA, 2846 bp, Zea Mays
gttaggtttccgctcgacgccgcgtcgccctctcgccggcctcccgtttcacgaatcttcggatgcccagatccggctctcctcttcccacctcctcttcactgtctactactgccgctagccgcgcctgcttgctgcttccccctctctttttctctcgtctccattccagcatcgccaccaccagtccaccattccagcatcatcaccaccacccgagacaaaaaaataaaaaaaacccaacaacactgtaacgagaatatacggcaaaaccctagatctctctctcctctcggcattgctggctggggtgtgcggcggcccgcagtggtgagggacgcacggcgatggcctccgccgccgccgtcatcgcctcgccggcccccggcgccgccgcggccgagcccgccgcctggctcgtcgacgagcgcgacggcttcatcacctggctgcgcggcgagttcgccgccgccaacgccatcgtcgaccacctcatcttccacctccgctccatcagcgagccgggcgagtacgaccacgtcttctctctcgtccagcagcgccgccaccactggccgcacgtgatccacatgcagcagttcttccccgtcagcgacatcgccttcgcgctccagcaagccagctggcgccgccacgcgccgccggcccaggcgctcggggctggcgcgtcgccggccgcgctcccgccgccgcctcctcgccgcgcctcgttctcgcagtcccatcactcccaccagcaccatcgccacggcgcccactaccgccccgatccagcgcgcggcgccgccactgcggcgactggatccgagaaagatggacgtgaagttcataataacaaggaagggagggggctgaaagaagcggggaatgtcgtcgatactaaaagtttgcggttggattctcctataactgatgaaggtgaggaaaaatcaaagctgcaagctgtttctgaagaaagtagcaaaatggttgcaacccctgtagagtattcaaccaatgagatcattgatggcagcatggttaatactgttgaagggctcaaggtttatgaaggattactaaatgtaaccgaggcaaataagatcctttccttagtcaatgaaacaagagcctcttaccggcgaggggggcttgaagctagacagaaggttattattgctaaaagaccaatgaagggtcatggacgggaaattgttcagctgggtgttcctattattgatggccctcctgatgatgaaaatctaagagggtggaggcgattcctgggctgctgaatgatctgtttgatcgcttgtctcagcaggaaattatacccttcaagccagattattgtgtcattgacatcttcaatgagggagactattctcatcctcaccaatccccttcttggtatggtagacctctttgtaccctctgcttaacagattgtgatatggtgtttggccgttatatatcaggagaaaaaggcgatcatagaggtcctctgaagctctcgctcgcaactgggtcacttctactcatgcaagggagaagtattgactgtgcaaagcgagctattcctgctacacgcaagcagagagtcatactgaattttggaaagtccgtagcaagaaagcacatcccagctgaaagtgcctggtctactccattaacacctcctatgccctggggtcagtcatcaaggccagttaacggctcccgccatccccaaagtcctaaacactatgggtatgctccaatcagcggtgtacttccagcaccaccagttggagctcatcacgtcccaccgtctgatgggatgcagccactatttgtagcccctgctcctatttctgctgcagccatacctttcacgccaactgttcccttgcaaaatacatcagctgcttggatacaagaagttactccaaggcctgctccgccacgattccctggtcctggtacgggggtcttccttcctccgggatcaggccaccctctgcctcatcagatgatgccggcttctcatggccatggcgaacccaactctccacaaggttcatccgcttacctgcatagtaaggtcaatggcaaggagacatctaatggcaatctttctcctaagaactcgccgagaaagacatcttgcacagccgaggagaaaccagaatgcaatgggagcttaaatggtggtggcggctctgcggatgagaagtcaactgtaggtatggagcagcagaatggtgttcagaagaatgttgggagtagcaaggtccagccacatggacatgcaactgaatagagtgggacttatagtacatagacaacagaaaactgaagagacgaggagttgaattttgggccgtgaatttgcggtagtgcgcagagctcagcagaggtctttgctggcactctcttgtccctgacaagaatcatcgtgtcaagttctcgagacggaaaacatttgtcctaaactttgtagctgcactgttgcaaatctagattatcgacattgcctcgggttatcatctgctatcagagtcgtgggcagtgaaaaccatttctgatggtttatgttgcccaaatattatcgacctagtacatctgaaatgggaaaaaatgtggacgaaatttcttgcatcgaactctcttgtgatcgactggcctttgatgcatctgtagcagactacttatggtagactgttacttgctgatagatggttctgctacaggtgtttgctgtggatgtcaattataacctagactgtgaacttatcactcttttgggtcctgaacgttttgcaagtgttcttattcaggacgtgggcaaagcatatggatttatg

SEQ ID NO: 1051 - DNA, 2826 bp, Zea Mays
gtcgccctctcgccggcctcccgtttcacgaatcttcggatgcccagatccggctctcctcttcccacctcctcttcactgtctactactgccgctagccgcgcctgcttgctgcttccccctctctttttctctcgtctccattccagcatcgccaccaccagtccaccattccagcatcatcaccaccacccgagacaaaaaaataaaaaaaacccaacaacactgtaacgagaatatacggcaaaaccctagatctctctctcctctcggcattgctggctggggtgtgcggcggcccgcagtggtgagggacgcacggcgatggcctccgccgccgccgtcatcgcctcgccggcccccggcgccgccgcggccgagcccgccgcctggctcgtcgacgagcgcgacggcttcatcacctggctgcgcggcgagttcgccgccgccaacgccatcgtcgaccacctcatcttccacctccgctccatcagcgagccgggcgagtacgaccacgtcttctctctcgtccagcagcgccgccaccactggccgcacgtgatccacatgcagcagttcttccccgtcagcgacatcgccttcgcgctccagcaagccagctggcgccgccacgcgccgccggcccaggcgctcggggctggcgcgtcgccggccgcgctcccgccgccgcctcctcgccgcgcctcgttctcgcagtcccatcactcccaccagcaccatcgccacggcgcccactaccgccccgatccagcgcgcggcgccgccactgcggcgactggatccgagaaagatggacgtgaagttcataataacaaggaagggagggggctgaaagaagcggggaatgtcgtcgatactaaaagtttgcggttggattctcctataactgatgaaggtgaggaaaaatcaaagctgcaagctgtttctgaagaaagtagcaaaatggttgcaacccctgtagagtattcaaccaatgagatcattgatggcagcatggttaatactgttgaagggctcaaggtttatgaaggattactaaatgtaaccgaggcaaataagatcctttccttagtcaatgaaacaagagcctcttaccggcgaggggggcttgaagacagaaggttattattgctaaaagaccaatgaagggtcatggacgggaaattgttcagctgggtgttcctattattgatggccctcctgatgatgaaaatctaagagagacaagggtggaggcgattcctgggctgctgaatgatctgtttgatcgcttgtctcagcaggaaattatacccttcaagccagattattgtgtcattgacatcttcaatgagggagactattctcatcctcaccaatccccttcttggtatggtagacctctttgtaccctctgcttaacagattgtgatatggtgtttggccgttatatatcaggagaaaaaggcgatcatagaggtcctctgaagctctcgctcgcaactgggtcacttctactcatgcaagggagaagtattgactgtgcaaagcgagctattcctgctacacgcaagcagagagtcatactgaattttggaaagtccgtagcaagaaagcacatcccagctgaaagtgcctggtctactccattaacacctcctatgccctggggtcagtcatcaaggccagttaacggctcccgccatccccaaagtcctaaacactatgggtatgctccaatcagcggtgtacttccagcaccaccagttggagctcatcacgtcccaccgtctgatgggatgcagccactatttgtagcccctgctcctatttctgctgcagccatacctttcacgccaactgttcccttgcaaaatacatcagctgcttggatacaagaagttactccaaggcctgctccgccacgattccctggtcctggtacgggggtcttccttcctccgggatcaggccaccctctgcctcatcagatgatgccggcttctcatggccatggcgaacccaactctccacaaggttcatccgcttacctgcatagtaaggtcaatggcaaggagacatctaatggcaatctttctcctaagaactcgccgagaaagacatcttgcacagccgaggagaaaccagaatgcaatgggagcttaaatggtggtggcggctctgcggatgagaagtcaactgtaggtatggagcagcagaatggtgttcagaagaatgttgggagtagcaaggtccagccacatggacatgcaactgaatagagtgggacttatagtacatagacaacagaaaactgaagagacgaggagttgaattttgggccgtgaatttgcggtagtgcgcagagctcagcagaggtctttgctggcactctcttgtccctgacaagaatcatcgtgtcaagttctcgagacggaaaacatttgtcctaaactttgtagctgcactgttgcaaatctagattatcgacattgcctcgggttatcatctgctatcagagtcgtgggcagtgaaaaccatttctgatggtttatgttgcccaaatattatcgacctagtacatctgaaatgggaaaaaatgtggacgaaatttcttgcatcgaactctcttgtgatcgactggcctttgatgcatctgtagcagactacttatggtagactgttacttgctgatagatggttctgctacaggtgtttgctgtggatgtcaattataacctagactgtgaacttatcactcttttgggtcctgaacgttttgcaagtgttcttattcaggacgtgggcaaagcatatggatttatg

SEQ ID NO: 1052 - DNA, 2801 bp, Zea Mays
ctctcgccggcctcccgtttcacgaatcttcggatgcccagatccggctctcctcttcccacctcctcttcactgtctactactgccgctagccgcgcctgcttgctgcttccccctctctttttctctcgtctccattccagcatcgccaccaccagtccaccattccagcatcatcaccaccacccgagacaaaaaaataaaaaaaacccaacaacactgtaacgagaatatacggcaaaaccctagatctctctctcctctcggcattgctggctggggtgtgcggcggcccgcagtggtgagggacgcacggcgatggcctccgccgccgccgtcatcgcctcgccggcccccggcgccgccgcggccgagcccgccgcctggctcgtcgacgagcgcgacggcttcatcacctggctgcgcggcgagttcgccgccgccaacgccatcgtcgaccacctcatcttccacctccgctccatcagcgagccgggcgagtacgaccacgtcttctctctcgtccagcagcgccgccaccactggccgcacgtgatccacatgcagcagttcttccccgtcagcgacatcgccttcgcgctccagcaagccagctggcgccgccacgcgccgccggcccaggcgctcggggctggcgcgtcgccggccgcgctcccgccgccgcctcctcgccgcgcctcgttctcgcagtcccatcactcccaccagcaccatcgccacggcgcccactaccgccccgatccagcgcgcggcgccgccactgcggcgactggatccgagaaagatggacgtgaagttcataataacaaggaagggagggggctgaaagaagcggggaatgtcgtcgatactaaaagtttgcgaaggtgaggaaaaatcaaagctgcaagctgtttctgaagaaagtagcaaaatggttgcaacccctgtagagtattcaaccaatgagatcattgatggcagcatggttaatactgttgaagggctcaaggtttatgaaggattactaaatgtaaccgaggcaaataagatcctttccttagtcaatgaaacaagagcctcttaccggcgaggggggcttgaagctagacagaaggttattattgctaaaagaccaatgaagggtcatggacgggaaattgttcagctgggtgttcctattattgatggccctcctgatgatgaaaatctaagagagacaagggtggaggcgattcctgggctgctgaatgatctgtttgatcgcttgtctcagcaggaaattatacccttcaagccagattattgtgtcattgacatcttcaatgagggagactattctcatcctcaccaatccccttcttggtatggtagacctctttgtaccctctgcttaacagattgtgatatggtgtttggccgttatatatcaggagaaaaaggcgatcatagaggtcctctgaagctctcgctcgcaactgggtcacttctactcatgcaagggagaagtattgactgtgcaaagcgagctattcctgctacacgcaagcagagagtcatactgaattttggaaagtccgtagcaagaaagcacatcccagctgaaagtgcctggtctactccattaacacctcctatgccctggggtcagtcatcaaggccagttaacggctcccgccatccccaaagtcctaaacactatgggtatgctccaatcagcggtgtacttccagcaccaccagttggagctcatcacgtcccaccgtctgatgggatgcagccactatttgtagcccctgctcctatttctgctgcagccatacctttcacgccaactgttcccttgcaaaatacatcagctgcttggatacaagaagttactccaaggcctgctccgccacgattccctggtcctggtacgggggtcttccttcctccgggatcaggccaccctctgcctcatcagatgatgccggcttctcatggccatggcgaacccaactctccacaaggttcatccgcttacctgcatagtaaggtcaatggcaaggagacatctaatggcaatctttctcctaagaactcgccgagaaagacatcttgcacagccgaggagaaaccagaatgcaatgggagcttaaatggtggtggcggctctgcggatgagaagtcaactgtaggtatggagcagcagaatggtgttcagaagaatgttgggagtagcaaggtccagccacatggacatgcaactgaatagagtgggacttatagtacatagacaacagaaaactgaagagacgaggagttgaattttgggccgtgaatttgcggtagtgcgcagagctcagcagaggtctttgctggcactctcttgtccctgacaagaatcatcgtgtcaagttctcgagacggaaaacatttgtcctaaactttgtagctgcactgttgcaaatctagattatcgacattgcctcgggttatcatctgctatcagagtcgtgggcagtgaaaaccatttctgatggtttatgttgcccaaatattatcgacctagtacatctgaaatgggaaaaaatgtggacgaaatttcttgcatcgaactctcttgtgatcgactggcctttgatgcatctgtagcagactacttatggtagactgttacttgctgatagatggttctgctacaggtgtttgctgtggatgtcaattataacctagactgtgaacttatcactcttttgggtcctgaacgttttgcaagtgttcttattcaggacgtgggcaaagcatatggatttatg

SEQ ID NO: 1053 - DNA, 2647 bp, Zea Mays
gtctactactgccgctagccgcgcctgcttgctgcttccccctctctttttctctcgtctccattccagcatcgccaccaccagtccaccattccagcatcatcaccaccacccgagacaaaaaaataaaaaaaacccaacaacactgtaacgagaatatacggcaaaaccctagatctctctctcctctcggcattgctggctggggtgtgcggcggcccgcagtggtgagggacgcacggcgatggcctccgccgccgccgtcatcgcctcgccggcccccggcgccgccgcggccgagcccgccgcctggctcgtcgacgagcgcgacggcttcatcacctggctgcgcggcgagttcgccgccgccaacgccatcgtcgaccacctcatcttccacctccgctccatcagcgagccgggcgagtacgaccacgtcttctctctcgtccagcagcgccgccaccactggccgcacgtgatccacatgcagcagttcttccccgtcagcgacatcgccttcgcgctccagcaagccagctggcgccgccacgcgccgccggcccaggcgctcggggctggcgcgtcgccggccgcgctcccgccgccgcctcctcgccgcgcctcgttctcgcagtcccatcactcccaccagcaccatcgccacggcgcccactaccgccccgatccagcgcgcggcgccgccactgcggcgactggatccgagaaagatggacgtgaagttcataataacaaggaagggagggggctgaaagaagcggggaatgtcgtcgatactaaaagtttgcggttggattctcctataactgatgaaggtgaggaaaaatcaaagctgcaagctgtttctgaagaaagtagcaaaatggttgcaacccctgtagagtattcaaccaatgagatcattgatggcagcatggttaatactgttgaagggctcaaggtttatgaaggattactaaatgtaaccgaggcaaataagatcctttccttagtcaatgaaacaagagcctcttaccggcgaggggggcttgaagctagacagaaggttattattgctaaaagaccaatgaagggtcatggacgggaaattgttcagctgggtgttcctattattgatggccctcctgatgatgaaaatctaagagagacaagggtggaggcgattcctgggctgctgaatgatctgtttgatcgcttgtctcagcaggaaattatacccttcaagccagattattgtgtcattgacatcttcaatgaggagaaaaaggcgatcatagaggtcctctgaagctctcgctcgcaactgggtcacttctactcatgcaagggagaagtattgactgtgcaaagcgagctattcctgctacacgcaagcagagagtcatactgaattttggaaagtccgtagcaagaaagcacatcccagctgaaagtgcctggtctactccattaacacctcctatgccctggggtcagtcatcaaggccagttaacggctcccgccatccccaaagtcctaaacactatgggtatgctccaatcagcggtgtacttccagcaccaccagttggagctcatcacgtcccaccgtctgatgggatgcagccactatttgtagcccctgctcctatttctgctgcagccatacctttcacgccaactgttcccttgcaaaatacatcagctgcttggatacaagaagttactccaaggcctgctccgccacgattccctggtcctggtacgggggtcttccttcctccgggatcaggccaccctctgcctcatcagatgatgccggcttctcatggccatggcgaacccaactctccacaaggttcatccgcttacctgcatagtaaggtcaatggcaaggagacatctaatggcaatctttctcctaagaactcgccgagaaagacatcttgcacagccgaggagaaaccagaatgcaatgggagcttaaatggtggtggcggctctgcggatgagaagtcaactgtaggtatggagcagcagaatggtgttcagaagaatgttgggagtagcaaggtccagccacatggacatgcaactgaatagagtgggacttatagtacatagacaacagaaaactgaagagacgaggagttgaattttgggccgtgaatttgcggtagtgcgcagagctcagcagaggtctttgctggcactctcttgtccctgacaagaatcatcgtgtcaagttctcgagacggaaaacatttgtcctaaactttgtagctgcactgttgcaaatctagattatcgacattgcctcgggttatcatctgctatcagagtcgtgggcagtgaaaaccatttctgatggtttatgttgcccaaatattatcgacctagtacatctgaaatgggaaaaaatgtggacgaaatttcttgcatcgaactctcttgtgatcgactggcctttgatgcatctgtagcagactacttatggtagactgttacttgctgatagatggttctgctacaggtgtttgctgtggatgtcaattataacctagactgtgaacttatcactcttttgggtcctgaacgttttgcaagtgttcttattcaggacgtgggcaaagcatatggatttatg

SEQ ID NO: 1054 - DNA, 2077 bp, Zea Mays
cttctccatgtggatagtgttcattctgagcatttcataggtcttcttggtccacaatgaagacgtgaagttcataataacaaggaagggagggggctgaaagaagcggggaatgtcgtcgatactaaaagtttgcggttggattctcctataactgatgaaggtgaggaaaaatcaaagctgcaagctgtttctgaagaaagtagcaaaatggttgcaacccctgtagagtattcaaccaatgagatcattgatggcagcatggttaatactgttgaagggctcaaggtttatgaaggattactaaatgtaaccgaggcaaataagatcctttccttagtcaatgaaacaagagcctcttaccggcgaggggggcttgaagctagacagaaggttattattgctaaaagaccaatgaagggtcatggacgggaaattgttcagctgggtgttcctattattgatggccctcctgatgatgaaaatctaagagagacaagggtggaggcgattcctgggctgctgaatgatctgtttgatcgcttgtctcagcaggaaattatacccttcaagccagattattgtgtcattgacatcttcaatgagggagactattctcatcctcaccaatccccttcttggtatggtagacctctttgtaccctctgcttaacagattgtgatatggtgtttggccgttatatatcaggagaaaaaggcgatcatagaggtcctctgaagctctcgctcgcaactgggtcacttctactcatgcaagggagaagtattgactgtgcaaagcgagctattcctgctacacgcaagcagagagtcatactgaattttggaaagtccgtagcaagaaagcacatcccagctgaaagtgcctggtctactccattaacacctcctatgccctggggtcagtcatcaaggccagttaacggctcccgccatccccaaagtcctaaacactatgggtatgctccaatcagcggtgtacttccagcaccaccagttggagctcatcacgtcccaccgtctgatgggatgcagccactatttgtagcccctgctcctatttctgctgcagccatacctttcacgccaactgttcccttgcaaaatacatcagctgcttggatacaagaagttactccaaggcctgctccgccacgattccctggtcctggtacgggggtcttccttcctccgggatcaggccaccctctgcctcatcagatgatgccggcttctcatggccatggcgaacccaactctccacaaggttcatccgcttacctgcatagtaaggtcaatggcaaggagacatctaatggcaatctttctcctaagaactcgccgagaaagacatcttgcacagccgaggagaaaccagaatgcaatgggagcttaaatggtggtggcggctctgcggatgagaagtcaactgtaggtatggagcagcagaatggtgttcagaagaatgttgggagtagcaaggtccagccacatggacatgcaactgaatagagtgggacttatagtacatagacaacagaaaactgaagagacgaggagttgaattttgggccgtgaatttgcggtagtgcgcagagctcagcagaggtctttgctggcactctcttgtccctgacaagaatcatcgtgtcaagttctcgagacggaaaacatttgtcctaaactttgtagctgcactgttgcaaatctagattatcgacattgcctcgggttatcatctgctatcagagtcgtgggcagtgaaaaccatttctgatggtttatgttgcccaaatattatcgacctagtacatctgaaatgggaaaaaatgtggacgaaatttcttgcatcgaactctcttgtgatcgactggcctttgatgcatctgtagcagactacttatggtagactgttacttgctgatagatggttctgctacaggtgtttgctgtggatgtcaattataacctagactgtgaacttatcactcttttgggtcctgaacgttttgcaagtgttcttattcaggacgtgggcaaagcatatggatttatg

SEQ ID NO: 1055 - DNA, 2042 bp, Zea Mays
atttcataggtcttcttggtccacaatgaagacgtgaagttcataataacaaggaagggagggggctgaaagaagcggggaatgtcgtcgatactaaaagtttgcggttggattctcctataactgatgaaggtgaggaaaaatcaaagctgcaagctgtttctgaagaaagtagcaaaatggttgcaacccctgtagagtattcaaccaatgagatcattgatggcagcatggttaatactgttgaagggctcaaggtttatgaaggattactaaatgtaaccgaggcaaataagatcctttccttagtcaatgaaacaagagcctcttaccggcgaggggggcttgaagacagaaggttattattgctaaaagaccaatgaagggtcatggacgggaaattgttcagctgggtgttcctattattgatggccctcctgatgatgaaaatctaagagagacaagggtggaggcgattcctgggctgctgaatgatctgtttgatcgcttgtctcagcaggaaattatacccttcaagccagattattgtgtcattgacatcttcaatgagggagactattctcatcctcaccaatccccttcttggtatggtagacctctttgtaccctctgcttaacagattgtgatatggtgtttggccgttatatatcaggagaaaaaggcgatcatagaggtcctctgaagctctcgctcgcaactgggtcacttctactcatgcaagggagaagtattgactgtgcaaagcgagctattcctgctacacgcaagcagagagtcatactgaattttggaaagtccgtagcaagaaagcacatcccagctgaaagtgcctggtctactccattaacacctcctatgccctggggtcagtcatcaaggccagttaacggctcccgccatccccaaagtcctaaacactatgggtatgctccaatcagcggtgtacttccagcaccaccagttggagctcatcacgtcccaccgtctgatgggatgcagccactatttgtagcccctgctcctatttctgctgcagccatacctttcacgccaactgttcccttgcaaaatacatcagctgcttggatacaagaagttactccaaggcctgctccgccacgattccctggtcctggtacgggggtcttccttcctccgggatcaggccaccctctgcctcatcagatgatgccggcttctcatggccatggcgaacccaactctccacaaggttcatccgcttacctgcatagtaaggtcaatggcaaggagacatctaatggcaatctttctcctaagaactcgccgagaaagacatcttgcacagccgaggagaaaccagaatgcaatgggagcttaaatggtggtggcggctctgcggatgagaagtcaactgtaggtatggagcagcagaatggtgttcagaagaatgttgggagtagcaaggtccagccacatggacatgcaactgaatagagtgggacttatagtacatagacaacagaaaactgaagagacgaggagttgaattttgggccgtgaatttgcggtagtgcgcagagctcagcagaggtctttgctggcactctcttgtccctgacaagaatcatcgtgtcaagttctcgagacggaaaacatttgtcctaaactttgtagctgcactgttgcaaatctagattatcgacattgcctcgggttatcatctgctatcagagtcgtgggcagtgaaaaccatttctgatggtttatgttgcccaaatattatcgacctagtacatctgaaatgggaaaaaatgtggacgaaatttcttgcatcgaactctcttgtgatcgactggcctttgatgcatctgtagcagactacttatggtagactgttacttgctgatagatggttctgctacaggtgtttgctgtggatgtcaattataacctagactgtgaacttatcactcttttgggtcctgaacgttttgcaagtgttcttattcaggacgtgggcaaagcatatggatttatg

SEQ ID NO: 1056 - DNA, 1333 bp, Zea Mays
gtaaaacttccctagtcacttctactcatgcaagggagaagtattgactgtgcaaagcgagctattcctgctacacgcaagcagagagtcatactgaattttggaaagtccgtagcaagaaagcacatcccagctgaaagtgcctggtctactccattaacacctcctatgccctggggtcagtcatcaaggccagttaacggctcccgccatccccaaagtcctaaacactatgggtatgctccaatcagcggtgtacttccagcaccaccagttggagctcatcacgtcccaccgtctgatgggatgcagccactatttgtagcccctgctcctatttctgctgcagccatacctttcacgccaactgttcccttgcaaaatacatcagctgcttggatacaagaagttactccaaggcctgctccgccacgattccctggtcctggtacgggggtcttccttcctccgggatcaggccaccctctgcctcatcagatgatgccggcttctcatggccatggcgaacccaactctccacaaggttcatccgcttacctgcatagtaaggtcaatggcaaggagacatctaatggcaatctttctcctaagaactcgccgagaaagacatcttgcacagccgaggagaaaccagaatgcaatgggagcttaaatggtggtggcggctctgcggatgagaagtcaactgtaggtatggagcagcagaatggtgttcagaagaatgttgggagtagcaaggtccagccacatggacatgcaactgaatagagtgggacttatagtacatagacaacagaaaactgaagagacgaggagttgaattttgggccgtgaatttgcggtagtgcgcagagctcagcagaggtctttgctggcactctcttgtccctgacaagaatcatcgtgtcaagttctcgagacggaaaacatttgtcctaaactttgtagctgcactgttgcaaatctagattatcgacattgcctcgggttatcatctgctatcagagtcgtgggcagtgaaaaccatttctgatggtttatgttgcccaaatattatcgacctagtacatctgaaatgggaaaaaatgtggacgaaatttcttgcatcgaactctcttgtgatcgactggcctttgatgcatctgtagcagactacttatggtagactgttacttgctgatagatggttctgctacaggtgtttgctgtggatgtcaattataacctagactgtgaacttatcactcttttgggtcctgaacgttttgcaagtgttcttattcaggacgtgggcaaagcatatggatttatg

SEQ ID NO: 1057 - DNA, 1340 bp, Zea Mays
cacgtcagttctcaccttccactccatttccgcccgtggcgacgtggcgtggtggtggtgggtgctttggcgtgcagaagtcaaccgagcgcagcgcccgccccctcccttccccgcccgccggccaacaacaacaaaaaaaagcaccgaaatccgccccgcgctcacccggaggccggatccagcgacgatgttcggcgactccgacggatccaaggacgccagcgccgccgcgcccgggtccaactccaacccgccggagccgcctttcccaaaccgggagctcacgctcagcagctacctctgcgacaaggcgccgccagccgcggcggcggggccatcctcgccgcccaaccccgaggcggctgccccggcagacgatgccgcggccagcgccaagctgtgcgtcgagcgggatttcctccacctctccgcgcccaagcgcggggatccgccaggcgacgactcctccgtggtcggggatggtgtaacagactgttctgttactggtagcaagtcaaaaggaatactggcggctcagacgagtaaatctacagatatgcttcatcttcagaccccaaccatcactccgccaaaatccccgtttaacttcaagccgagcacctccattcttgattcacagatcgatgtgctcaaggccagcccaaaaccactccctatagaaccccatttcagctccagctcaaaggacgatgactcctccagccttgagaccatcgtgaagtgcaaggaagctgaggcgaaactgttccagaaactggccgatgatgccaggaaggaggtagacagctaccgtcagatcgtccgcaccaagacccagaaactagaggaggagtacgccacgaaggtggcaaagctgtgcttccaggagacggaggagaagaggaggaagaaagttgaagagctgaagacgctcgagaactcgcactacgactaccacaagatgaagctgcggatgcagaccgaaatccagggcttgctcgagcggatggaagccacaaagaagatgtgggtataggctcctgttaacaatttcatgttgctgctgcttaatgtttcgggtatagactccagctaacaactgcctgatgctgctgctgctgctgaatacctgagatttggtgttgttcgttaggagagtgtccattgttgtattttttttcaccatcttgtgttataatctaaatgctgttgtaacttgcaagtggatgcctagccttgcgcttgctgatataacttggcagcattcactcagttaatcacttcagggttgttccgagttcgaagtaccatttggccaaagaaaaagtcgcttctat

SEQ ID NO: 1058 - DNA, 2906 bp, Zea Mays
agcataccaagatcattgaataaagagagatatctcgagctcttgcacatccaactgctgtacaaaaattcttgcacgcacacgaaacaataggaagaatctggtcaagcaagagaccgccacggtctgatctgcatcagccatgggccgatcatcaatttaaagagaatgaaagcctgacggattaaccagtctagtcgacggatcagttcacacacacttcacagcctgagcgtcagatcgggctcctcccgggcatgcacggcgacgccgccagccgagttcaggacggcgctccccgccggcgcaggagcgacggcggtggctggtctgaagctcccgggccagccgaagctcatctccgcctcgtcggccacgaggaatggcatggggctcagcagcccccgcgcgggcctcagctcggcggcgtcctcgtgccgctgctgctgctccgggtgcgctgccatcgatgcgtgcgcctggatgccgatggggtacaggccggagccgtacagcggcagggacgccacgtcggcgtagtagccgtaggggcccgccgcgtcgagccgcagcgtgcgccgggccagcgtgcgctcccgccggtgcgcgttctggtgcccgcccagcgcctgcgagctgaagaacttgcgctggcagtagttgcacgtgaacacgcgcgacggctcgcgggcgaccgccgccgcgtcggccggcgtgccgccgctgttactgttgtcggtagtgctcgactcggcggcggcggcggcggcgacggtgagcgtgaggtcgaggcttaccaggccggaggagttggacgcctcctggctgctgatctcggacagctcgtcgcacggttcttggcacatctccttgctgttcatccctgactgatggcaacaatcttttcacccgtcacttgatttctctgctgtctcaccgtacctgcatgcagacaacacgccagctcattctagttaggtaaggcaggaacaccgatgcatggatccatgatgaagatatgaaacatgctttgtgttcaagggtagagaaaagcaactttatgagatgtgttcatgcacaaaacttggaggggggatcccagtggtttaagtcgcagttgcactcattggtttgcctactggtgtgcagattggtgatcaacagtttatgactagcttcagataaaccaatgacaaactgattatttcaagatgggataaaaaggatgttgtcgcaaatgattattttggctaaaattccttgcagcttaagtgatcctcaagatggcccatgtttgtccatatgcactagaggttgtccattgagtaatactttgtcatgtgtcagtagggaaacaaaatatatgcttgctgaattactaagctaaaccacctttttttagagaaaaagaatcttgggcaaactggagctaaagagtagccagtgcaaactggatgcagataatgacgtaaagagcaaacgaggggaaggagaatcttagcctatttccagagtggtcgattttctgttcaacaatcatgagaagcatctgattcttttcataggcctggatatgctacattcaaattccatgtctgaggacaaacatatgaaaagcatgccatcttttctggtctgggaatctctaaaatcgaaccttatctaatgcttcatccgtttcaaattaaaagtcatcccaacttgtagagctaaagcatctgaccgtatttgtataatcaaataataacatttattgtaccaaataagtattattatattcttcagtaattgttttttagagtatgcctatttgatgccataaatatatgcaattctctatgtacttttgtttaaacttgagatttttttttgattctctaagaaagttggggtattttgtaatttggatcggaaggagtagtaaagtccaagaatagcatattcagtagttgtcaggaaagatgggagctctgttgttcctatctaaaccacattagttcaaataatgttgtactttaggctaattcacctgctcagaatgcagtacctaaccttgagttagattttagtgttctccagataatcccaccaccagctcacagtaataaaactgtaaaggttgagtaactatgccagattacagacagcgtaacaggaaagactctcactggtattttctgcatatataatacaaaaatttattcgatgtagccacgaaattactggttgaaaattcgaacaagttggagtacagttagctctcttagacatagcgctggaagataatgtcagcaaaattatcttgttttttttttggcttggtacactagcaaagcatccggaccagcagagactaataatgatcttatgtcacgaggcatagcaaggagacagaaatatctggacaagatatgctatattacctgactcgtcggctgctgcatctagcaccactaggcggcccaaagtaatatcaggacaaaaaaaacatgatgggggcttagacaggactaacatgcaagcatgtttttagcatagacaccaacgaactaaagtgattttatttatttccatgtaagaattccacttccatgtgtatgaactcgacggaacaatctcgggtttggacgaatcacgagagcaaaagttttgggagggccttggttcaaaactcttggggaccaaaattctactgcaagtaccttgtggtcgaagccagcatgcctagagagagagagagagagagaagcagctattcagagaaccgagacgtcgagaaggctaggccacgatgaacatgacatgaactgggtgaggcaagaactcaaggaaggctgccaagaaaagaaaaaaaaacaagagaatcggtggttaccagcgcgaaagcagaattacctgctctacca

SEQ ID NO: 1059 - DNA, 1500 bp, Zea Mays
taaatgatggcaagaactcggagcttccagatgagccagctaatgtgcccccctctcagtttggcagccaaaagcaagctcatgttcctataactcaagcttttgaggatgatcagggaatgaattgtgtggcaatatctgcagtagagtgggcagatacccttacaaatatcagttttgggcacttactgacagaagcatctaaaggcactcatttggactgcggaggaactagtgtaaaaaatcctttgttttttgagaatccatgcagctatgactcgtttgatgctgctgttgcccttcatgcttctcgttatcaagcatcagagcagtcagcccatgctccccattcaaccatatggggagcagaagagacatgtgatgagttcatctttaatttgtcagcctccaggaagcaagaaggttcaaacactcttagcagctctcctgatactaacaatggagttcatccctcaaattctgaaggatttaaaggttttcttgaggacttggctggagaggctgatgctgataatcattataataatgatgatgccaaagacgaggagttttatgccaaatcaccacctcgaaatgatgaaactaatgagttgaaggatcaatctttagctgacatatattggcctgattcactcggaccactggacttggacataccgtctgtgagatacgaagccgatgacatacttataggggacagtcaaaatagttggaaccgtctaatggcaaatagcctcgacgcatttcgaaacctgtcattcttctcagataaaaatgactctattccatcgatcatgtagaactggggatgttagggcttccacgatttgttttggtaaggaaggaacctccaatctgccattcccggaagagggagctttatattgcccaagtgagctgtttgctgctgatacgggtatccaacagatgcggatttgatgcatatgagaggggctcgtgctgttgtaagataacataacggatgtgctaacctgtactccatgtaaatgtgttgcccttgtacataaagcacatacaagcacttgggtacaggtaaagcttcctggggccgagtataagataagtttgcctaatgaccatcaaatgattgtgcacttcattcttccggtttacatctaatatgtccacgtgggttatctcaaggcaatcagatcggagaattgtgacaatggaggacttctgttgagtagtttagttactttgacacgaaggatttctgtaagattcagtttttttttacgagagcctttagaacataggattgcaaagggaaggatccaatgtaatcctttcttagaatatagggttgcaaagggtccaatgctctttcctatgcctcacggaaagaaatcctacgtcgagagtaagcaccctcgcatgcaggaggcttatgtataccgagactttcgtgttctatcatgcacggtttttaggtgagatcaatcgatacatactctt

SEQ ID NO: 1060 - DNA, 1498 bp, Zea Mays
caacagtctcggcctctcctcccggcttcctcacacggcactccagccgctagccctcactcaaccagacaaccagtacaccaccgccaccaagcccgggccgaataactctgccgggcaaccgccgcccttcgccggcaaagaacgcccaccagatccaccccggcctgctatggagtccgcggtgaacccgaaggcgtacccgctggctgatgcgcagctgacgatgggtatcctcgatatcatccagcaggccgccaactacaagcagctcaagaagggagcgaacgaagcgacgaaaaccctgaatagggggatatcggagttcgttgtgatggcggcggacacggagcctctcgagatcctgctccacctccccttgttagccgaggataagaacgtcccatatgtatttgttccatcgaaacaagctcttggccgtgcttgtggtgtgacaagacccgtcattgcttgctcagtgaccagcaatgagggtagccagctgaaacaacagatacagggtctcaagtgtgatgggcctcggcgacacatttttcagaggcttggactggtgatggtgtcttgtttacattacgctttccaaactatatttgaacactgctaagtcaatcatatttgaattgtgcttcactttatatttgtgattgtcatgtatcctcaagatgcctctgtatcgtggtggctggtttctgttctggatccgaccacatcattgtgatggctgattgctatgtttttgagtattggatcgttcccatcgattaacttctgtgatgacgaatcagcgcaaataaagtcacttatatgtgatcacgagcagcgcaaataaagttgtatgtgggggcataaataactgaactgaagaattggttcattagaacagccccagatcgcaggtaacaaaaacattctggttcctacactcggataacttggtagggaaccaaactggatacaaagcagcctggcctgggcggttgattgcttggctgtatacttttggtcctggcatagttcgccagttgcaaaatgctctgtagtgttcgttcggttagtctggattggattggagggcaggaaccattccagctacaatgtaatacaaatgtgtgaaccattctaaccctaaactattctaggcactggttccggagcaatcaagcggggccttcggcagcctaggaactactgttccaggccgagattcagtgcatccgggtgtgtcactctttccaggcagagaactgttccaggccgggatttaaaggcctgttcggcaggctaggattgaagaaggctgttttataaacacagaacatatttgaacaatctgacactgctgctttataaacgcagtgaataatcaaccaatctgacagtccatcattctttctaccataggatagcatgctgccgagacaatctggcagtcttgctaccaaaataagacaatcaagaaacatagaacaatcttgat

SEQ ID NO: 1061 - DNA, 1507 bp, Zea Mays
caacagtctcggcctctcctcccggcttcctcacacggcactccagccgctagccctcactcaaccagacaaccagtacaccaccgccaccaagcccgggccgaataactctgccgggcaaccgccgcccttcgccggcaaagaacgcccaccagatccaccccggcctgctatggagtccgcggtgaacccgaaggcgtacccgctggctgatgcgcagctgacgatgggtatcctcgatatcatccagcaggccgccaactacaagcagctcaagaagggagcgaacgaagcgacgaaaaccctgaatagggggatatcggagttcgttgtgatggcggcggacacggagcctctcgagatcctgctccacctccccttgttagccgaggataagaacgtcccatatgtatttgttccatcgaaacaagctcttggccgtgcttgtggtgtgacaagacccgtcattgcttgctcagtgaccagcaatgagggtagccagctgaaacaacagatacagggtctcaagatctttcagtgtgatgggcctcggcgacacatttttcagaggcttggactggtgatggtgtcttgtttacattacgctttccaaactatatttgaacactgctaagtcaatcatatttgaattgtgcttcactttatatttgtgattgtcatgtatcctcaagatgcctctgtatcgtggtggctggtttctgttctggatccgaccacatcattgtgatggctgattgctatgtttttgagtattggatcgttcccatcgattaacttctgtgatgacgaatcagcgcaaataaagtcacttatatgtgatcacgagcagcgcaaataaagttgtatgtgggggcataaataactgaactgaagaattggttcattagaacagccccagatcgcaggtaacaaaaacattctggttcctacactcggataacttggtagggaaccaaactggatacaaagcagcctggcctgggcggttgattgcttggctgtatacttttggtcctggcatagttcgccagttgcaaaatgctctgtagtgttcgttcggttagtctggattggattggagggcaggaaccattccagctacaatgtaatacaaatgtgtgaaccattctaaccctaaactattctaggcactggttccggagcaatcaagcggggccttcggcagcctaggaactactgttccaggccgagattcagtgcatccgggtgtgtcactctttccaggcagagaactgttccaggccgggatttaaaggcctgttcggcaggctaggattgaagaaggctgttttataaacacagaacatatttgaacaatctgacactgctgctttataaacgcagtgaataatcaaccaatctgacagtccatcattctttctaccataggatagcatgctgccgagacaatctggcagtcttgctaccaaaataagacaatcaagaaacatagaacaatcttgat

SEQ ID NO: 1062 - DNA, 858 bp, Zea Mays
caacagtctcggcctctcctcccggcttcctcacacggcactccagccgctagccctcactcaaccagacaaccagtacaccaccgccaccaagcccgggccgaataactctgccgggcaaccgccgcccttcgccggcaaagaacgcccaccagatccaccccggcctgctatggagtccgcggtgaacccgaaggcgtacccgctggctgatgcgcagctgacgatgggtatcctcgatatcatccagcaggccgccaactacaagcagctcaagaagggagcgaacgaagcgacgaaaaccctgaatagggggatatcggagttcgttgtgatggcggcggacacggagcctctcgagatcctgctccacctccccttgttagccgaggataagaacgtcccatatgtatttgttccatcgaaacaagctcttggccgtgcttgtggtgtgacaagacccgtcattgcttgctcagtgaccagcaatgagggtagccagctgaaacaacagatacagggtctcaaggactcgattgagaagcttctcatctgatttacctaagatctttcagtgtgatgggcctcggcgacacatttttcagaggcttggactggtgatggtgtcttgtttactagattttacgtctttccaaactatgtttgaacactgttaggtcgaccatacttgaattgtgcttatatatttgactgtcatgtattctgaagatgcatctgcattctggtgccttggtttatgttgagattctgaccatcattgtaacggttgattactatgagtttgagaattggatcgattggatggttgcaatttccatgtgaccaggacagataaaa

SEQ ID NO: 1063 - DNA, 632 bp, Zea Mays
caacagtctcggcctctcctcccggcttcctcacacggcactccagccgctagccctcactcaaccagacaaccagtacaccaccgccaccaagcccgggccgaataactctgccgggcaaccgccgcccttcgccggcaaagaacgcccaccagatccaccccggcctgctatggagtccgcggtgaacccgaaggcgtacccgctggctgatgcgcagctgacgatgggtatcctcgatatcatccagcaggccgccaactacaagcagctcaagaagggagcgaacgaagcgacgaaaaccctgaatagggggatatcggagttcgttgtgatggcggcggacacggagcctctcgagatcctgctccacctccccttgttagccgaggataagaacgtcccatatgtatttgttccatcgaaacaagctcttggccgtgcttgtggtgtgacaagacccgtcattgcttgctcagtgaccagcaatgagggtagccagctgaaacaacagatacagggtctcaaggactcgattgagaagcttctcatctgatttacctaagatctttcagtgtgatgggcctcggcgacacatttttcagaggcttggactggtgatgggcctctgc

SEQ ID NO: 1064 - DNA, 1406 bp, Zea Mays
gtattcccacccatctcgtcccggtctgcagtgcgaaactgacttttcaaaccctaacatcaaatccaccccggcctgctatggagtccgcggtgaacccgaaggcgtacccgctggctgatgcgcagctgacgatgggtatcctcgatatcatccagcaggccgccaactacaagcagctcaagaagggagcgaacgaagcgacgaaaaccctgaatagggggatatcggagttcgttgtgatggcggcggacacggagcctctcgagatcctgctccacctccccttgttagccgaggataagaacgtcccatatgtatttgttccatcgaaacaagctcttggccgtgcttgtggtgtgacaagacccgtcattgcttgctcagtgaccagcaatgagggtagccagctgaaacaacagatacagggtctcaagtgtgatgggcctcggcgacacatttttcagaggcttggactggtgatggtgtcttgtttacattacgctttccaaactatatttgaacactgctaagtcaatcatatttgaattgtgcttcactttatatttgtgattgtcatgtatcctcaagatgcctctgtatcgtggtggctggtttctgttctggatccgaccacatcattgtgatggctgattgctatgtttttgagtattggatcgttcccatcgattaacttctgtgatgacgaatcagcgcaaataaagtcacttatatgtgatcacgagcagcgcaaataaagttgtatgtgggggcataaataactgaactgaagaattggttcattagaacagccccagatcgcaggtaacaaaaacattctggttcctacactcggataacttggtagggaaccaaactggatacaaagcagcctggcctgggcggttgattgcttggctgtatacttttggtcctggcatagttcgccagttgcaaaatgctctgtagtgttcgttcggttagtctggattggattggagggcaggaaccattccagctacaatgtaatacaaatgtgtgaaccattctaaccctaaactattctaggcactggttccggagcaatcaagcggggccttcggcagcctaggaactactgttccaggccgagattcagtgcatccgggtgtgtcactctttccaggcagagaactgttccaggccgggatttaaaggcctgttcggcaggctaggattgaagaaggctgttttataaacacagaacatatttgaacaatctgacactgctgctttataaacgcagtgaataatcaaccaatctgacagtccatcattctttctaccataggatagcatgctgccgagacaatctggcagtcttgctaccaaaataagacaatcaagaaacatagaacaatcttgat

SEQ ID NO: 1065 - DNA, 1386 bp, Zea Mays
agtgcgaaactgacttttcaaaccctaacatcaaatccaccccggcctgctatggagtccgcggtgaacccgaaggcgtacccgctggctgatgcgcagctgacgatgggtatcctcgatatcatccagcaggccgccaactacaagcagctcaagaagggagcgaacgaagcgacgaaaaccctgaatagggggatatcggagttcgttgtgatggcggcggacacggagcctctcgagatcctgctccacctccccttgttagccgaggataagaacgtcccatatgtatttgttccatcgaaacaagctcttggccgtgcttgtggtgtgacaagacccgtcattgcttgctcagtgaccagcaatgagggtagccagctgaaacaacagatacagggtctcaagatctttcagtgtgatgggcctcggcgacacatttttcagaggcttggactggtgatggtgtcttgtttacattacgctttccaaactatatttgaacactgctaagtcaatcatatttgaattgtgcttcactttatatttgtgattgtcatgtatcctcaagatgcctctgtatcgtggtggctggtttctgttctggatccgaccacatcattgtgatggctgattgctatgtttttgagtattggatcgttcccatcgattaacttctgtgatgacgaatcagcgcaaataaagtcacttatatgtgatcacgagcagcgcaaataaagttgtatgtgggggcataaataactgaactgaagaattggttcattagaacagccccagatcgcaggtaacaaaaacattctggttcctacactcggataacttggtagggaaccaaactggatacaaagcagcctggcctgggcggttgattgcttggctgtatacttttggtcctggcatagttcgccagttgcaaaatgctctgtagtgttcgttcggttagtctggattggattggagggcaggaaccattccagctacaatgtaatacaaatgtgtgaaccattctaaccctaaactattctaggcactggttccggagcaatcaagcggggccttcggcagcctaggaactactgttccaggccgagattcagtgcatccgggtgtgtcactctttccaggcagagaactgttccaggccgggatttaaaggcctgttcggcaggctaggattgaagaaggctgttttataaacacagaacatatttgaacaatctgacactgctgctttataaacgcagtgaataatcaaccaatctgacagtccatcattctttctaccataggatagcatgctgccgagacaatctggcagtcttgctaccaaaataagacaatcaagaaacatagaacaatcttgat

SEQ ID NO: 1066 - DNA, 545 bp, Zea Mays
aagagcgcggcaacaccgcgcatatacatggaatgagaagggctcagctacagccaagcgaataaatatactgtgaattaaccctaacctaaccgaagcgtccgcctcccacacacgggactccggccgcgagaacccgcgactaagccaggacgcgggacgccacagccaccggcctcagcatccgcctaggacgaataacccttctaggctgccgccgccgccgtccttagctcatattgttgccggcgaagagcgccccagatccgcccctgctatggagtcggcggtgaacccgaaggcgtacccgctggctgatgcgcagctgacgataggtatcatcgatatcatccagcaggccgccaactacaagcagctcaagaagggagctaacgaagcgacgaagaccctgaacagggggatatcggagttcgtagtgatggcggcggacacggagccgctcgagatcctcctccacctccccttgctagctgaggataaggagaactgtgtatcattatattaagaagaaagaaaggtctaat

SEQ ID NO: 1067 - DNA, 1854 bp, Zea Mays
ggattattttggccgtgtatagcaatagcaactgacaccttttgtgttcattgaaagtttttgttctagagtgtgcagtgttgcaggtcttaactgttgtcaagaaagtaatgtgttcaacatgattgtaaactgaatgcaattctttggctaactgtgtaattataagtcaatgataattgaacaatctttgtgaagcatcactgtctgaactgtgcaaatgctacaaccatttcttgtgtccttgtaaatatcaaaattcatatattgcaaaaatactgcattgcatcccgtcgtctgttctaaatcagaattgacgattgctctggtggctgaagcttcagaaagaaagggaaagggctcacaagaagaaagataaaaggagtgacaagaaagctccccaactgggtgagacgtccaaacattcaaagcacaaccataagaagagaaagctcgaagatgtcagcacaggtgatcaggagcccaaaaaagtattcaaagaatcagctgagctattggagaagagtggactctcagaagagcatggagctccttgttttgtacagatgtttcgtgactctcctgagagctcgcaggacagcagcaagagaagaaaggctgtcctgcccagtcccagccaagctaagaatggtaacatcattcgcatcaagctaaaaagtaaccaagatccccaatcagttcttttggagaaaccaagggttctggagcaaccactggtccaacaaatgagttcggtttcatccctgtcgagcaaacaaaattcaatcaatcgtaaggtgaatgtgagatctacagctggccagcagtgggtcaatggtgactcccaagcagtacaaaaatctttggttacagaaaccctgtcaagggcaatgcagagaactgtcccccagcctgcagtgaaggtcacacgtcgggctgatccccagctatctgttaaggcgccggttggaagatctgacctacctccaaagttttcgggaagtgtgggcccttcacctgctagagtgaccggaagattttgtcctgcacctgttaagacgcaacagagaattgagcatccaccttccatggtgtcacagagagttgatcctcaggcgaaggtgtcacagaaggaaatgggatctgctgtttgcctgccacaagctccacatcctcctgttttgcagaaacccaaggacttgcctgttcctaaacagcgggagcctatcaactctttgccaaaagaagagccttgtttctctggaaggactgtggaagcagatcaagggaaggaagctaagctctcccgttcagatcggaagaaaatccacaaaactgagaagaaaaataagaagttcagagatctgtttgttacctggaatccgctattgatggagaatgaaggttcagatttgggtggtcaagactggctgttcagcagtacaagaagctctgatggtagcatggctcaacccacagtacctgatggtttagggccgattcatccgatggtgcagcagcagccttatttgcaacccagggcaacttttttgccggaccttcatatctatcagctgccttatgttgtaccgttttaagtctgttcgtagatgagaagtagatgagatgttgtgaaggagctgtgtggatgtgggatataatggttccctgccgcaattttccagctttgttagcaagattgtaatgtaatgttggttaattattttgctcatttatgtaagcagttgaactgcaaaatcttctttctaggcagttactgtaatacgacacgcaatatttgtttttatccataataatagccttgccacaatataaatggattaattgcagcaa

SEQ ID NO: 1068 - DNA, 1700 bp, Zea Mays
gcggccctcgtggcgatcgtatccgtccgaatatgccttgctttggcgccccaccccctttactccgcccacacccacctattccgctattcgatctctcgttcgacctcgtctctcttccccttctgctttgccttttccccttcctctctcccctgtcccccctccgtcccagccgagcgagaaagcgaaggggccaaaaaagccgcaccggcttccttcccccacccgaagagatggaactgttctacgaactgctcctcacggcggcggtcaccctcctcgctgccctcctgctcgccacgctcttcgcagccaatgattcccatcgccggaccgatcgcgccgcagccgcgatcgccgaggaggtggcggaggaggagaggatcatcgaggtcgacgaggtgatgcgtagcgaagggatggcggcggtggcgccgtcggaggcggatgggtgggttgaggcggagaaggcgccggcggtggtcgtcgcggaggtgaaggagccggagagcttgcccgaggaggagggggttcccgtgaaggctgttcgggaggtgcgccttgctgcggaagtggaggagggggaggacggtggtggcggcgtgaagcggcctgatttgacctccgcaactgttgtggcggcggtgggtgctgaagcgagccagctggtgtcgggcgctgaggttgtgcctaaggaggtttctggtgcggcagggttggaggaacgaaccgtgcaggatgttgtggtgaaccagtatgatctgggtgctgaggttgctcttgttcccgttgaagttctcgaagcaggaccggacaagcagggagtagaagttgttggagttgcgcaagtgcctcccttggaaacagaagctgctgaagtgaaacagcaccatctcgttgccgaagcggctcctgctgaagatgttcttgacgtgggattagtggacaagagtgtacgagctatcgaagtgaggcccaacgaattggattccgagactgttcttgaagagattcttgatgcggtattggaggaggaggagcaagtagagcatgaattgcctgctggggctgctccacaaccagttctcgatgtgccattggcagggaagggagagcttaaacatcatcagcccgttgaagaagctgccgaggtacacgaggatgtgcagtgcaagcaggaagctgagtgtgaggcccaaacagttgatcaacaacaagaactggttcctgaagaggagtcggtcgcaggaaaaaatgatgatgtgaatgttatccatgaatgtagcttcagtgatgaagtggttaccgaattgcctgtgggggaagtgacatcgcaagggctgccgaaggatgaccctgaggcagacatggagtttgaggagtgggaagggatcgagaggagtgaagtggagaagaggtttggtgcggctgcagcatttgctgctagtggggctggggcggctgccctgtcaaagctcgatagtgatgtgcagctgcagcttcaaggtctcctcaaggttgccattgacggtccctgttatgactcagcgcagccacttacactgagaccctcatctcgtgcaaaatggagatctggtacagtttaagtaacagggcatcaaattcttcaatactgttagtattttttttttctagctcagagatcacctgtaggcttgcttgttaatgactctgct

SEQ ID NO: 1069 - DNA, 2252 bp, Zea Mays
ggcgatcgtatccgtccgaatatgccttgctttggcgccccaccccctttactccgcccacacccacctattccgctattcgatctctcgttcgacctcgtctctcttccccttctgctttgccttttccccttcctctctcccctgtcccccctccgtcccagccgagcgagaaagcgaaggggccaaaaaagccgcaccggcttccttcccccacccgaagagatggaactgttctacgaactgctcctcacggcggcggtcaccctcctcgctgccctcctgctcgccacgctcttcgcagccaatgattcccatcgccggaccgatcgcgccgcagccgcgatcgccgaggaggtggcggaggaggagaggatcatcgaggtcgacgaggtgatgcgtagcgaagggatggcggcggtggcgccgtcggaggcggatgggtgggttgaggcggagaaggcgccggcggtggtcgtcgcggaggtgaaggagccggagagcttgcccgaggaggagggggttcccgtgaaggctgttcgggaggtgcgccttgctgcggaagtggaggagggggaggacggtggtggcggcgtgaagcggcctgatttgacctccgcaactgttgtggcggcggtgggtgctgaagcgagccagctggtgtcgggcgctgaggttgtgcctaaggaggtttctggtgcggcagggttggaggaacgaaccgtgcaggatgttgtggtgaaccagtatgatctgggtgctgaggttgctcttgttcccgttgaagttctcgaagcaggaccggacaagcagggagtagaagttgttggagttgcgcaagtgcctcccttggaaacagaagctgctgaagtgaaacagcaccatctcgttgccgaagcggctcctgctgaagatgttcttgacgtgggattagtggacaagagtgtacgagctatcgaagtgaggcccaacgaattggattccgagactgttcttgaagagattcttgatgcggtattggaggaggaggagcaagtagagcatgaattgcctgctggggctgctccacaaccagttctcgatgtgccattggcagggaagggagagcttaaacatcatcagcccgttgaagaagctgccgaggtacacgaggatgtgcagtgcaagcaggaagctgagtgtgaggcccaaacagttgatcaacaacaagaactggttcctgaagaggagtcggtcgcaggaaaaaatgatgatgtgaatgttatccatgaatgtagcttcagtgatgaagtggttaccgaattgcctgtgggggaagtgacatcgcaagggctgccgaaggatgaccctgaggcagacatggagtttgaggagtgggaagggatcgagaggagtgaagtggagaagaggtttggtgcggctgcagcatttgctgctagtggggctggggcggctgccctgtcaaagctcgatagtgatgtgcagctgcagcttcaaggtctcctcaaggttgccattgacggtccctgttatgactcagcgcagccacttacactgagaccctcatctcgtgcaaaatggtctgcttggcagaagttagggaatatgaaccctgagattgctatggagaaatacatgaatcttttatcagaaacaattccagggtggatgatgaatgaaaccttgagaacactggcagtttacctgcggagactatcttaacaacgatggcttctacaagtgatcaacggagcaatcaagggaatgaagataattctagcataggtgaaggtcatccaataacttcccctaacccagagaaaggccagagctctgatatcccaactgaatgaaggcaacactgataaaacatttcttgcatcagtggttccagcccattgctgggagcattatcgatgcgttcgtcataaaattagatttgtacagttgtggcggttgtgctgtgatgatgttggttcgtgtatgtatatgactgtatatatatgtttgtgctaatactactgctgcggcctgtatatttggccagttgacgacttgtcaccggttgtggtcagtagtaaatgatgagtggtaactgtgtttgttaccacgtagtttggaacgaagaacttgagcggttcaggtaaaagacttgtcgcattacaaattgttgaacttatccgatgtagggttgcattgcatagttggactgctatgctttcgagagaaaaaaaaaaacttgtcacgctcca

SEQ ID NO: 1070 - DNA, 723 bp, Zea Mays
gtcaattgatctgtttcccttgctgataaatcatgtttactgaagtctgcttggcagaagttagggaatatgaaccctgagattgctatggagaaatacatgaatcttttatcagaaacaattccagggtggatgatgaatgaaaccttggacacagagaacactggcagtttacctgcggagactatcttaacaacgatggcttctacaagtgatcaacggagcaatcaagggaatgaagataattctagcataggtgaaggtcatccaataacttcccctaacccagagaaaggccagagctctgatatcccaactgaatgaaggcaacactgataaaacatttcttgcatcagtggttccagcccattgctgggagcattatcgatgcgttcgtcataaaattagatttgtacagttgtggcggttgtgctgtgatgatgttggttcgtgtatgtatatgactgtatatatatgtttgtgctaatactactgctgcggcctgtatatttggccagttgacgacttgtcaccggttgtggtcagtagtaaatgatgagtggtaactgtgtttgttaccacgtagtttggaacgaagaacttgagcggttcaggtaaaagacttgtcgcattacaaattgttgaacttatccgatgtagggttgcattgcatagttggactgctatgctttcgagagaaaaaaaaaaacttgtcacgctcca

SEQ ID NO: 1071 - DNA, 2118 bp, Zea Mays
gccaactgccatgtgaccaccggctatatatagcgatgcacagctccccttgctctgatcacgacccgcgtgtaggtgtagcactctccatcctcattgctaactgctcgattctcctccatacccttgtgcacgcacagccgacactgcagtgaggaacttgaacagaggaagaagcccggctgagcgctctctcgtctagctagctgcgctgcggcgatgaagatgcatcgcttcgctctgcgtggcctggggtttctcgtcctgtggatgctgcattgcggaagcgagctcgccgcggcggtgcctccaggggccagccggagccggcgctgtacaacggaggcattctcaagttcggcagcagcggcggagacccggacggataccgcacgacggagaccggcgtcttctccccggcgttcgtggtgtacaacctcaacaagaccaccatgctgggtgaagctggaaggcgcgtactcggctctgatcaccgcgaggctggcgccggacaacaccggcgccaggtgcatcgccacggtcgttgccaggagcgactgctgggccttcgtcaagggcggattcgtcctggactggccgacgcagacctcggtcatcttctttcagaatgctgacaagacgcccatgaagatcaccgtggcgagcgggtcgctgcagccgttcaccacggaccagtgggcgatgcaccagcaggataccatccggaagaggaggaagcgcgtggcgaccatccacgtggccgacccgcagggcgcccgcgtggtgggcgcgtccgtgtcggtgcagcagacggccaaggacttcccgatcggttcggcgatcgcgtccaccatccttgggaaccaggcgtaccagcagtggttcgtggaccggttcaacgcggcggtgttcgaggacgagctcaagtggtactcgacggagcccatgtcggggcagctgcgcttcgacgtgccggaccagatgctggcgttcgtgcggtcgcaccgcgtgatggtgcgcggccacaacatcttctgggagaaccaggacgcgacgccccggtgggtgaagaacctgacggcggacgacctccgcgccgccgtcaacacgcgcatccagagcctcatgacccgctaccgcggcgagttcgcgcactgggacgtgaacaacgagatgctgcactacaacttctacgagcagcggctggggcccaacgcgtccgcggagttcttcagcgtggcgcaggacgccgacccgctggccacgctcttcatgaacgagtacaacgtcatcgagacctgcgacgaccccttctccaccgtcgacacgtacgtgtccaagctcaaggacctccgctccgccggcgccatcctggaagggatcggcctggagggacacttctccaagcccaacatcccgctcatgagggccatactcgacaagctcgccaccctggggctgcccatctggttcaccgagatcgacatcagcaacaagttcgacgcgcagacgcaggccgcctacctggagcaggtgctgcgggaggcatactcgcacccggccgtcagcggagtcatgctgtggacggcgctgcaccccagcgggtgctaccagatgtgcctcacggactggaacctcagcaacctgcccacgggggacgtggtcgaccgcctgctcaacgagtggcggacgctgcaggcggccggccagaccgacgcgcacggcgcctacagcttcaccggctacctgggggagtacgtcctcactgtcagctacaacaacaggacgacgcaatccaccttctcgctgtcgccgggagacgagaccaggcacatcaacgttcagatgtgatgcgccaacattatatttagggctcctcggatcggactacttattactagctgatgtagtgattgttgtggaagaagattgcacagtcaatctatgtttcttacttgtcctgtgtcaaatttagtgtaagaactggcgtccttgacagctggtatgtaaaatagtatgaccaccactattactatatataacaagagacttcactccacattaatcttcacaagacgcataaatgagaaggggcagggccgcagcccgcaggggatc

SEQ ID NO: 1072 - DNA, 2132 bp, Zea Mays
gccaactgccatgtgaccaccggctatatatagcgatgcacagctccccttgctctgatcacgacccgcgtgtaggtgtagcactctccatcctcattgctaactgctcgattctcctccatacccttgtgcacgcacagccgacactgcagtgaggaacttgaacagaggaagaagcccggctgagcgctctctcgtctagctagctgcgctgcggcgatgaagatgcatcgcttcgctctgcgtggcctggggtttctcgtcctgtggatgctgcattgcggaagcgagctcgccgcggcggtgcctccaggggccagccggagccggcgctgtacaacggaggcattctcaagttcggcagcagcggcggagacccggacggataccgcacgacggagaccggcgtcttctccccggcgttcgtggtgtacaacctcaacaagaccaccatgtacaccttctcatgctgggtgaagctggaaggcgcgtactcggctctgatcaccgcgaggctggcgccggacaacaccggcgccaggtgcatcgccacggtcgttgccaggagcgactgctgggccttcgtcaagggcggattcgtcctggactggccgacgcagacctcggtcatcttctttcagaatgctgacaagacgcccatgaagatcaccgtggcgagcgggtcgctgcagccgttcaccacggaccagtgggcgatgcaccagcaggataccatccggaagaggaggaagcgcgtggcgaccatccacgtggccgacccgcagggcgcccgcgtggtgggcgcgtccgtgtcggtgcagcagacggccaaggacttcccgatcggttcggcgatcgcgtccaccatccttgggaaccaggcgtaccagcagtggttcgtggaccggttcaacgcggcggtgttcgaggacgagctcaagtggtactcgacggagcccatgtcggggcagctgcgcttcgacgtgccggaccagatgctggcgttcgtgcggtcgcaccgcgtgatggtgcgcggccacaacatcttctgggagaaccaggacgcgacgccccggtgggtgaagaacctgacggcggacgacctccgcgccgccgtcaacacgcgcatccagagcctcatgacccgctaccgcggcgagttcgcgcactgggacgtgaacaacgagatgctgcactacaacttctacgagcagcggctggggcccaacgcgtccgcggagttcttcagcgtggcgcaggacgccgacccgctggccacgctcttcatgaacgagtacaacgtcatcgagacctgcgacgaccccttctccaccgtcgacacgtacgtgtccaagctcaaggacctccgctccgccggcgccatcctggaagggatcggcctggagggacacttctccaagcccaacatcccgctcatgagggccatactcgacaagctcgccaccctggggctgcccatctggttcaccgagatcgacatcagcaacaagttcgacgcgcagacgcaggccgcctacctggagcaggtgctgcgggaggcatactcgcacccggccgtcagcggagtcatgctgtggacggcgctgcaccccagcgggtgctaccagatgtgcctcacggactggaacctcagcaacctgcccacgggggacgtggtcgaccgcctgctcaacgagtggcggacgctgcaggcggccggccagaccgacgcgcacggcgcctacagcttcaccggctacctgggggagtacgtcctcactgtcagctacaacaacaggacgacgcaatccaccttctcgctgtcgccgggagacgagaccaggcacatcaacgttcagatgtgatgcgccaacattatatttagggctcctcggatcggactacttattactagctgatgtagtgattgttgtggaagaagattgcacagtcaatctatgtttcttacttgtcctgtgtcaaatttagtgtaagaactggcgtccttgacagctggtatgtaaaatagtatgaccaccactattactatatataacaagagacttcactccacattaatcttcacaagacgcataaatgagaaggggcagggccgcagcccgcaggggatc

SEQ ID NO: 1073 - DNA, 812 bp, Zea Mays
ccagccagactgcaggcccatatggtccatatggacacggctccatcacaggatgaaaccagcgctgtgccgccgccggcgtccggccccagcgccgcgtcgcgcagccacccagtgtcgagccgccgcctagctccagagccgcgtcgcggatctccgcagcttcgctaaatcgcagttgctagcttcatcctctcgatgatgtgtcgtggacttgacgtcgttcggcgtcccaactcgcgccccggcatcaattcgtctatgtaccgtgtcatcctgaatccggaacaaccgtccttgagcgctttggctcaaaaataaaaaatcctatcgatattatattaaaaagataccgaaacatgaccctggttacttaaaacattatcgtttatccctcaagtagccaaacttttgtgtaagatgcttatcagacccccttccatagaactgttactcaagcttgtctggctatcaaactttccacagtagagctgcctattggctattgatgcttgcagtgcactcttctttgaatctggcgtttcaacaactgcaactggagtagcatgcataagctggcagtggaatatataatattttctttggtattttgacagctacctgtgcttaatcgttgcttgtttatgcaactagattactggttgcaggttgaaagtaatgttatttgctgccgctttctatgactatgcatctgcttgcttgggtgacgtcttgctaacaatgattgataagctgacgtcttgaccaacgatgattgaagacttgtgttatctcaatctagtgtttgctgc

SEQ ID NO: 1074 - DNA, 3293 bp, Zea Mays
cgactttggctgggaggctgacctcagggcccaagtgaccgacggtcctcccctcccctctccttggggggtcggtcgtcctcgtcccttgggctgcgctgagagcctggactcctcctatataaagtcaagcggacgtcaaagatcagtcgtccgcctctcatccctcccgttgcggccgaccatcaccaacggaagtcggcagagtgagccaaggccctgtgtgtgtgtgtgtctgccacattacctacccagatcgaaatggcgcggtgcccagctgctcatgccgctctctgctcccttgctctgctcctcctgcttccagctgcgcgggcggcgacgttcaccatgaccaacaactgcggctacacggtgtggccggggctgctgtcgggcgccggcacggcgccgctgcccacgacggggttcgcgctggcgcacggcgcgtcggcggcggtggacgcgcccgcgggctggtcgggccgcgtgtgggcgcgcacgctctgcgccgcggacgccgccaccggcaggttctcctgcgccacgggcgactgcggctcgggagccgtccagtgcaacggcggcggcgccgccccgcccgccacgctggcggagttcacgctcggcggatccggcggcctggacttcttcgacgtcagccttgtggacggctacaacgtcccgatgctcatcgtccccgcgcagggcgcgggcggtggtggcagcagcagcagcagcaacgggtccgcgggcggctcgagcaagtgcatggccaccggctgcctcgtggatctcaacggcgcgtgcccagctgatctgagggtaatggctgcgtcggcgtcggcgtccgcgtccggcgccggaggggctgtggcgtgccgcagcgcgtgcgaggcgttcgggtcgccgcagtactgctgcagtggcgcctacggaaaccccaacacgtgccgcccgtcaacctactcgcagttcttcaagaacgcttgcccgcgcgcctacagctacgcctacgacgactctacctccaccttcacgtgcgccaccggcatcagctacgccatcacattctgcccgagcaccaccaggtaaattctttcccaaaatggaggtttcccttgtcatacaagctccaaaggttagtgtttacctgaaatggcaccaaattattgaggtggctgaatgcctattccggatggcaaattggatagcttgagaccagaggctgagacatcacacagacagtccacaccactaaggctttatttgtgtactctattagggcttgttcggttctaccccagtccatatggattgagggggattgagggggtttcaatccctaacaaatcaaaatcccctccaatccgtatcaatcccctccaatccatatggattgaaaataaccgaacaagcccttattaacctcactccatatcggttgagatgtattagggtttaaggtcatgtttggtttgatcgactaaagattagtcccttcattttaatcttatttagtttctaaattgtcaaacggtagtactaaaataggaggctaaaatggactaaaccatattaattccacatttgcccctcatttagtttaattgtactaatagcaggagaatgttaaaggtcattttagtgtttttatgagtcatttagtatatttttactaattttagtccataggactaaacatgttaggtactaaactttattctcctaactaaatttagtctctagactaaagaaaccaaacatgacctacattagtttaaaatacaccttaatacatctcacacgaattgagctcaatactagagtatccaagctaggtttaaagagttattcattttacttttaattcatgtgaattaagtgggattgagtgagtttcagtccaaacaattaaaaaaatattttttccgaatcttacttaatccatacgtgataaaataacctaacaagtactaatgtgttatcgtgggcaatgtccgatgagaacctttttctaaccgctatctccgactgggggtggttggttctgtggactaaagtttagctcgggttacattaagcgtttgactttcaaatatgagtatgaaatatagactcaaccaactgtaatagattcgtctcactttttaatcttcggctgagaaattagttttataatccgactatatttaataccccgaacggaggttcaaacattcgatgtgataggggctaaattttagcaggggcaaaccaaacagccctctgaagctgtgctggtcggcatcgtctacactcctgtcagaaaaaaaaaatgtctagccgttgatggctctgacgagacgaggaggaggagaggcggcaacggccaacgggcggatccaacgggctatggatccagggcctagacactgctggtttgcgtgtggtcacttctcctgcccgcacacccaggccaacgggccgctactggcttctagttctagtagccgtttcaaccgtacggtccccataccataaccataggcccttgccctgtcctgtcttgtcctatcctgcacccccaactgcaacccatgttcccacgctcagagaggcgtgcagtgcagctgcccaagacattcaagttccatgtaccaccactgtcccggacaaaagatctcgcatcaaatcctctccgattcttcggcaagtactccggcgagaacccgcaggccgcgggcgtgcagcccacgaacggctcgatggtctacctcggcggcgagcaactcgccacctcggtcgccgccgcggcccgtgcgtcacagctcctcctagccgccgccgccctcgccgccgtcgcgctgctctgagcttcgttcccgacgtggccgtgtgaagtcggcggctcgagtctttgtcctctttccggcgtgacggggccagcgataaaagattcgacaaccagcagagaggctcagacgagacgagtgacgacggtgctgctacgactaaccgagagaaaaaaaacaatgaaatataggtagcttatggcgtagggtttaggataactggtagcatgagttttaacctttgcattcttctccacgcttcctcgatttgttgagccagccgaaagatgtattctatatttctatccatcgttgttcgccgtgatgctatagattacagcaatgatgattatttactctttaccagttgaacatagaccctatttgtttcggattataatctctctagattatataatccagcgcaaataatttaatagataaacaaacacctagtttatg

SEQ ID NO: 1075 - DNA, 1444 bp, Zea Mays
gctgacctcagggcccaagtgaccgacggtcctcccctcccctctccttggggggtcggtcgtcctcgtcccttgggctgcgctgagagcctggactcctcctatataaagtcaagcggacgtcaaagatcagtcgtccgcctctcatccctcccgttgcggccgaccatcaccaacggaagtcggcagagtgagccaaggccctgtgtgtgtgtgtgtctgccacattacctacccagatcgaaatggcgcggtgcccagctgctcatgccgctctctgctcccttgctctgctcctcctgcttccagctgcgcgggcggcgacgttcaccatgaccaacaactgcggctacacggtgtggccggggctgctgtcgggcgccggcacggcgccgctgcccacgacggggttcgcgctggcgcacggcgcgtcggcggcggtggacgcgcccgcgggctggtcgggccgcgtgtgggcgcgcacgctctgcgccgcggacgccgccaccggcaggttctcctgcgccacgggcgactgcggctcgggagccgtccagtgcaacggcggcggcgccgccccgcccgccacgctggcggagttcacgctcggcggatccggcggcctggacttcttcgacgtcagccttgtggacggctacaacgtcccgatgctcatcgtccccgcgcagggcgcgggcggtggtggcagcagcagcagcagcaacgggtccgcgggcggctcgagcaagtgcatggccaccggctgcctcgtggatctcaacggcgcgtgcccagctgatctgagggtaatggctgcgtcggcgtcggcgtccgcgtccggcgccggaggggctgtggcgtgccgcagcgcgtgcgaggcgttcgggtcgccgcagtactgctgcagtggcgcctacggaaaccccaacacgtgccgcccgtcaacctactcgcagttcttcaagaacgcttgcccgcgcgcctacagctacgcctacgacgactctacctccaccttcacgtgcgccaccggcatcagctacgccatcacattctgcccgagcaccaccaggggcaaaccaaacagccctctgaagctgtgctggtcggcatcgtctacactcctgtcagaaaaaaaaaatgtctagccgttgatggctctgacgagacgaggaggaggagaggcggcaacggccaacgggcggatccaacgggctatggatccagggcctagacactgctggtttgcgtgtggtcacttctcctgcccgcacacccaggccaacgggccgctactggcttctagttctagtagccgtttcaaccgtacggtccccataccataaccataggcccttgccctgtcctgtcttgtcctatcctgcacccccaactgcaacccatgttcccacgctcagagaggcgtgcagtgcagctgcccaag

SEQ ID NO: 1076 - DNA, 3068 bp, Zea Mays
aagaaacagagataaggagaaagacgggtttcttttatcgtcgcctgtcggacgtgctctgctgcagagtcttgcttcacccgtccggcacctcactctctggcctgctgtatatatccacctccctccggcctccatttcttctcgacttgaacacggccagcgtctcatcggctgggcgtggtctacactgcacgcacacttaccaccagccaccgcaagtgaatcactagccggaagacaggccaaccccactgctagtgctaggaatctaggagcgagaacgagagaccatgtcctcagaggccagcagcgtcgtcgtcgccgacgagaatggagcggcggagacggtcggcgtcgggcggtacgtggaaatggagaaggaccaagagtcgagcgcagccaagtcgcggctctccggcctgctctggcacggcggctccgcctacgacgcttggttcagctgcgcgtccaaccaggtggctcaggtgctcctgaccctgccctactcgttctcgcaactggggatgctgagcggcatactgttccagctcctgtacgggctgatgggcagctggacggcgtacctcatcagcgttctctacgtggagtaccgggccaggaaggagagggagaaggcggacttcaggaaccatgtcatccagtggttcgaggtgctggacgggctgctcgggaggcactggaggaacgtcggcctggccttcaactgcacgttcctgctcttcggctcggtcatccagctcatcgcatgcgcaagcaacatctactacatcaacgacaagctggacaagcggacgtggacgtacatcttcggcgcctgctgcgccacgacggtgttcatcccgtcgttccacaactaccggatctggtcgttcctgggcctcgtcatgaccacctacacggcgtggtacctcgccgtcgcgtccctcatccatggccaggttgatggcgtgaagcactccgggccgaccaagatggtgctctacttcaccggggccacaaacattctctacactttcggagggcacgctgttaccgtgtaaggagacaaaacacctttctttcttttttatatatgcatggtccccggaacaaagaagaagaaataacgcatcacaactgggaccaacgaaagcattggctaccatacattttgcttgcttcgtctggccattccatacagtttttgctccttggcgccatacccgtgcacaaggtcttttccggccttcaatatatctcccgtcccgtcgtctccgtctcactctcacagggcacggcaggcctatctatctcctttgatgagtttgcttgtacagtcaaaggagccactccgactactggctagtaggagagcgtgcattgctgctttacgtctacagagctcctgcgcttttgcgcttgcaaccatggagccctgactcctgagccagcctggcctggtagatgccgatacgataccccctctgcagatgcacaagcaagcatgcatggcacggacgtccaagtctctgcgtgcacgaaaagagaaaacgcaaatcaaagcagtactagcaattaattgaaaggtgactggactgaacgaacagcatcaacagtaattagtaatggtttgcacgcatatatatatacacgcagggagatcatgcacgcgatgtggcggccgcagaagttcaaggcgatctacctgatggcgacgctgtacgtgctgacgctgacgctgccgtcggcggccagcgtgtactgggcgttcggcgaccagctgctgacccgctccaacgcgctggcgctgctcccgcgcacggcgttccgcgacgccgccgtcgtgctcatgctcgcccaccagttcatcaccttcggcttcgcctgcacgccgctctacttcgtctgggagaagctcgtcggcctgcacgactgccgcagcctctgcaggcgcgccgccgcgcgcctccccgtcgtcgtccccatctggttcctcgccatcatcttccccttcttcgggcccatcaactccgccgtcggctccctcctcgtcagcttcaccgtctacatcatcccggcgctggcgcacatgatcacgttccggtccgcaacagcccgtgagaacgcgatggagccgccgccgcggctgctggggcgttggacgggcgcgtacatgatcaacgcgttcgtggtggcgtgggtgctggtggtcggcttcggcttcggcggctgggcgagcatgacaaacttcgtccgccagatcgacaccttcggcctcttcaccaagtgctaccagtgcccgccgccaccgcccctgccgttccccggcggcggcctcggcaacatcacgatgccattcaacggcgacgggctccctcctaccccggctccttcgccggcgcattacttcttccgccaccaccggcatcacagccaccaccgcgggctctgatgagagacgatgaaatgaacccggcttaccaccagtagtgcgtgcgtggcacactgctgctttagtttgagctgatcccttagttaagtctagcttaattagcacctgcatgcagcatcttcgttctctcctctagcttgctggtgtcgaacgcatgctttcccggtttcagtgactttagagaccctgcctgagcctgacacgaggggagtatcactgtatcagtactagcatgcagtctcttgtgttccgggctgtgtcctggcgtggagctcaaagaaggggaatccatttctacagccgcatagagctcgtcacctttgcagtctggtctggcagtattccaccactcagtgctgtatcattggcagcacctcggcgctggtgcatgcgctcacgagtcactcagggctcgccaagtagaactctggatgcacgatgcaggatctctttgccccatctctcggtcgccgtgaactgtgtattggcattgccaatatatacagttcacagttctatttcacagctttacaggctactcaaagagagtgacactatcattaaacgttctcagagtactgaatattcacgtgaagaaactctgagaaaaaac

SEQ ID NO: 1077 - DNA, 2903 bp, Zea Mays
cactctctggcctgctgtatatatccacctccctccggcctccatttcttctcgacttgaacacggccagcgtctcatcggctgggcgtggtctacactgcacgcacacttaccaccagccaccgcaagtgaatcactagccggaagacaggccaaccccactgctagtgctaggaatctaggagcgagaacgagagaccatgtcctcagaggccagcagcgtcgtcgtcgccgacgagaatggagcggcggagacggtcggcgtcgggcggtacgtggaaatggagaaggaccaagagtcgagcgcagccaagtcgcggctctccggcctgctctggcacggcggctccgcctacgacgcttggttcagctgcgcgtccaaccagctcctgtacgggctgatgggcagctggacggcgtacctcatcagcgttctctacgtggagtaccgggccaggaaggagagggagaaggcggacttcaggaaccatgtcatccagtggttcgaggtgctggacgggctgctcgggaggcactggaggaacgtcggcctggccttcaactgcacgttcctgctcttcggctcggtcatccagctcatcgcatgcgcaagcaacatctactacatcaacgacaagctggacaagcggacgtggacgtacatcttcggcgcctgctgcgccacgacggtgttcatcccgtcgttccacaactaccggatctggtcgttcctgggcctcgtcatgaccacctacacggcgtggtacctcgccgtcgcgtccctcatccatggccaggttgatggcgtgaagcactccgggccgaccaagatggtgctctacttcaccggggccacaaacattctctacactttcggagggcacgctgttaccgtgtaaggagacaaaacacctttctttcttttttatatatgcatggtccccggaacaaagaagaagaaataacgcatcacaactgggaccaacgaaagcattggctaccatacattttgcttgcttcgtctggccattccatacagtttttgctccttggcgccatacccgtgcacaaggtcttttccggccttcaatatatctcccgtcccgtcgtctccgtctcactctcacagggcacggcaggcctatctatctcctttgatgagtttgcttgtacagtcaaaggagccactccgactactggctagtaggagagcgtgcattgctgctttacgtctacagagctcctgcgcttttgcgcttgcaaccatggagccctgactcctgagccagcctggcctggtagatgccgatacgataccccctctgcagatgcacaagcaagcatgcatggcacggacgtccaagtctctgcgtgcacgaaaagagaaaacgcaaatcaaagcagtactagcaattaattgaaaggtgactggactgaacgaacagcatcaacagtaattagtaatggtttgcacgcatatatatatacacgcagggagatcatgcacgcgatgtggcggccgcagaagttcaaggcgatctacctgatggcgacgctgtacgtgctgacgctgacgctgccgtcggcggccagcgtgtactgggcgttcggcgaccagctgctgacccgctccaacgcgctggcgctgctcccgcgcacggcgttccgcgacgccgccgtcgtgctcatgctcgcccaccagttcatcaccttcggcttcgcctgcacgccgctctacttcgtctgggagaagctcgtcggcctgcacgactgccgcagcctctgcaggcgcgccgccgcgcgcctccccgtcgtcgtccccatctggttcctcgccatcatcttccccttcttcgggcccatcaactccgccgtcggctccctcctcgtcagcttcaccgtctacatcatcccggcgctggcgcacatgatcacgttccggtccgcaacagcccgtgagaacgcgatggagccgccgccgcggctgctggggcgttggacgggcgcgtacatgatcaacgcgttcgtggtggcgtgggtgctggtggtcggcttcggcttcggcggctgggcgagcatgacaaacttcgtccgccagatcgacaccttcggcctcttcaccaagtgctaccagtgcccgccgccaccgcccctgccgttccccggcggcggcctcggcaacatcacgatgccattcaacggcgacgggctccctcctaccccggctccttcgccggcgcattacttcttccgccaccaccggcatcacagccaccaccgcgggctctgatgagagacgatgaaatgaacccggcttaccaccagtagtgcgtgcgtggcacactgctgctttagtttgagctgatcccttagttaagtctagcttaattagcacctgcatgcagcatcttcgttctctcctctagcttgctggtgtcgaacgcatgctttcccggtttcagtgactttagagaccctgcctgagcctgacacgaggggagtatcactgtatcagtactagcatgcagtctcttgtgttccgggctgtgtcctggcgtggagctcaaagaaggggaatccatttctacagccgcatagagctcgtcacctttgcagtctggtctggcagtattccaccactcagtgctgtatcattggcagcacctcggcgctggtgcatgcgctcacgagtcactcagggctcgccaagtagaactctggatgcacgatgcaggatctctttgccccatctctcggtcgccgtgaactgtgtattggcattgccaatatatacagttcacagttctatttcacagctttacaggctactcaaagagagtgacactatcattaaacgttctcagagtactgaatattcacgtgaagaaactctgagaaaaaac

SEQ ID NO: 1078 - DNA, 2304 bp, Zea Mays
cactctctggcctgctgtatatatccacctccctccggcctccatttcttctcgacttgaacacggccagcgtctcatcggctgggcgtggtctacactgcacgcacacttaccaccagccaccgcaagtgaatcactagccggaagacaggccaaccccactgctagtgctaggaatctaggagcgagaacgagagaccatgtcctcagaggccagcagcgtcgtcgtcgccgacgagaatggagcggcggagacggtcggcgtcgggcggtacgtggaaatggagaaggaccaagagtcgagcgcagccaagtcgcggctctccggcctgctctggcacggcggctccgcctacgacgcttggttcagctgcgcgtccaaccagctcctgtacgggctgatgggcagctggacggcgtacctcatcagcgttctctacgtggagtaccgggccaggaaggagagggagaaggcggacttcaggaaccatgtcatccagtggttcgaggtgctggacgggctgctcgggaggcactggaggaacgtcggcctggccttcaactgcacgttcctgctcttcggctcggtcatccagctcatcgcatgcgcaagcaacatctactacatcaacgacaagctggacaagcggacgtggacgtacatcttcggcgcctgctgcgccacgacggtgttcatcccgtcgttccacaactaccggatctggtcgttcctgggcctcgtcatgaccacctacacggcgtggtacctcgccgtcgcgtccctcatccatggccaggttgatggcgtgaagcactccgggccgaccaagatggtgctctacttcaccggggccacaaacattctctacactttcggagggcacgctgttaccgtggagatcatgcacgcgatgtggcggccgcagaagttcaaggcgatctacctgatggcgacgctgtacgtgctgacgctgacgctgccgtcggcggccagcgtgtactgggcgttcggcgaccagctgctgacccgctccaacgcgctggcgctgctcccgcgcacggcgttccgcgacgccgccgtcgtgctcatgctcgcccaccagttcatcaccttcggcttcgcctgcacgccgctctacttcgtctgggagaagctcgtcggcctgcacgactgccgcagcctctgcaggcgcgccgccgcgcgcctccccgtcgtcgtccccatctggttcctcgccatcatcttccccttcttcgggcccatcaactccgccgtcggctccctcctcgtcagcttcaccgtctacatcatcccggcgctggcgcacatgatcacgttccggtccgcaacagcccgtgagaacgcgatggagccgccgccgcggctgctggggcgttggacgggcgcgtacatgatcaacgcgttcgtggtggcgtgggtgctggtggtcggcttcggcttcggcggctgggcgagcatgacaaacttcgtccgccagatcgacaccttcggcctcttcaccaagtgctaccagtgcccgccgccaccgcccctgccgttccccggcggcggcctcggcaacatcacgatgccattcaacggcgacgggctccctcctaccccggctccttcgccggcgcattacttcttccgccaccaccggcatcacagccaccaccgcgggctctgatgagagacgatgaaatgaacccggcttaccaccagtagtgcgtgcgtggcacactgctgctttagtttgagctgatcccttagttaagtctagcttaattagcacctgcatgcagcatcttcgttctctcctctagcttgctggtgtcgaacgcatgctttcccggtttcagtgactttagagaccctgcctgagcctgacacgaggggagtatcactgtatcagtactagcatgcagtctcttgtgttccgggctgtgtcctggcgtggagctcaaagaaggggaatccatttctacagccgcatagagctcgtcacctttgcagtctggtctggcagtattccaccactcagtgctgtatcattggcagcacctcggcgctggtgcatgcgctcacgagtcactcagggctcgccaagtagaactctggatgcacgatgcaggatctctttgccccatctctcggtcgccgtgaactgtgtattggcattgccaatatatacagttcacagttctatttcacagctttacaggctactcaaagagagtgacactatcattaaacgttctcagagtactgaatattcacgtgaagaaactctgagaaaaaac

SEQ ID NO: 1079 - DNA, 3773 bp, Zea Mays
ctgtcagctctcagctgcgcccaaggcttgattatggtccatgagtagaagataccgcgtcaagtaagctctgatactctgcaagcaatggatcggcgcagctggccttggaagaagaaatcatctgatagatcatcaaatgcagatgcgttgcagaattctaatcatgctgaacaggaagataaagctccaaagtttgtgcaaatttcacctcaaacatattcacatcttactgagtcagaggaaaaagtaaaagttttagaagaaaatgtgaaggtcttgaatgaaaaactgtctgctgcacaatctgagatcacaactaaagatgctcttgtgaagcagcatgcaaaggttgctgaagaagcagtatcaggttgggagaaagctgaagcagaggcctccgcactgaaggttcagctagaaactgttacattgtctaagctagcagctgaagaaagaggtgctcatctggatggtgcattgaaagaatgcatgaagcaagtaaggactgttaaagaagaaggtgagcagaagctacatgatgtagtatttgcaaaaaccaaacagtgggagaagataaaggccgagttcgaagcaaaattacttgaatttgaacaggaactcataagggctggtgctgagaatgatgcactcacaagatcacttcaagaacgggcagaactattgatgaaaattgatgaggaaaaaggtcaagctgaagctgagatcgaaattttaaaaagcacaattcaatcaggtgaaagggagataaattcgctaaaatatgaattgcatgttgtctccaaagagcttgaaatccgcaatgaagaaaagaatatgagtgtgcgctcagctgatgtagcaactaaacagcaccaggaagatgtcaagaaaatatcaaaactcgaagctgaatgccaaagattacgcggccttgttcgaaagaagttacctggccctgctgcactagctcaaatgaaaatggaggtggagagcttgggtagagaatatggagaccacagagtacgaagatcccctgcaaagaattctagttttcatcggcctatgtctcctgttcctgattatgcaatggagaacatacatcacatgcagagagacaatgagtttctgactgctcgtttattaacaatggaagaagaaaccaagatgcttaaagaggcattggcaaagagaaacagtgagctgcaatcttcaagaagcatgtatgctaagacaacaggaaagctccgaagcttggaagttcaaatgttgactggaaacaaacataagagtccatcaactccaaacatggatattcactttgatggtgcatttagccaaaatggaagcaacccacctagcatgacttccatgtctgaagatggggtagatgatgaaggaagttgtacagaatcttggaccaatgctctggtatctgagccctgtcaattcaaaaaagagaaggcagccaagagcagcacgacagaaagctccaataggttggagctcatggatgacttcttagagatggagagattagcatgtctgtcttctgaagttaatggcaatggcagtactgttgacaagatgaaggtagacaatgttggggctacttttgctggctttactgaaagagatggtgttaaagatttgcagtcagcttcaccaatgtcagaaactccatctaataaacagtgtctgtctgagaaatctccgcttttgaatttccagtcaagaatatcttccttactggattctgaatcaccagagaataatgctggaaaggtacttgatagcatcagaaacattctaaaggatattgaagatgaggcagattcggtgaatgtaaatgggactcatccttcagatgggaccttaagttcagagagcaaatttgccatggatcaagatcttaagaatgccatattgaaaattctagactttgtgaagttacttgatcaagaaatctccaagtttcaaggccagtcacctgattatgatggactatgtgagaaaacacaacagttctctgcattagtcgataaagttctgtcaaacgttgatgttctaaatgatattgtcatagcactgtctgttatcttgtcagaaactagccagattaagttcacattgttgagagacaatagcaatgaagcagaaagtaataacttagattgtgttgataaagtgactctacttgaaaataaggtgcagcttgagccagtaaaagacaatgttcctggtatctgcccactgttgcctcattcatcttctgatcctgagtttgaggggcctgctgatgctagattcgatgttaagactgcagtgaaggtgtactcgccggaggaatatgaacaacttaaatctgagaaggcaaatttggagggagaactagcaaagtgcaacaaaataatagaagaaacaatggctaggttaagtgatatggagaaaaaactggaagacctgacatctaagttggctgacagtgagaaatcaaatagcttgaatgagacacagttgaagtgtatggctgaatcctacaagtcacttgaatcaaggaaaattgaattagaaaatgagatagaagcgttacggtccagaatagatgctctaacagctgaactctttgatgaaagacagagtcatcaggaggacttagttaaatacagagatctcgaggagaagatggaaaggtatgagatggagaggagttcaattcttgtggatgaggacccagacaacaagtcaaagcaggagagagagatagcggctgcagcagaaaagctggcagagtgccaggagaccatattgattcttggccgtcagctgcaagctatgcgtcctccagccgagtcgctaggctcttcacctaatcggcaacgcatggaggagtttctgaaggatgcggcaggaacaaccgcaggagaatatttccagaaaccttcaggccaacctgatacagaccaggatatgcttgggacaggaaatgtgtctccgatcagtgggtacaagacacacatgatcccttctgatgcggacgttagccctttcccttctccaaacacctccaagcgcccgaagcatcgatcgagatcctcttcgtcttcctcattcaccaaccaccagttgccagacaaacagaaccgaggattcagtcggttcttcgcgaagagcaaagagtgaaactattccggatcgcggtgttaggtttgttgatttttggcgccaattgggtgggatggtggtcatgaatttctgtagagctagtgagggatgcttgcttgtgcgttctctcaggtcaggtgattcctttgggttgctggaataatactcagcttgcagtcgagcgggttgtggcgagagtgtgtgggggaatatttaagttgtcagtctcttctgctagagcttttctgggtttctgtgtgctcgaaacctcactaaaacctcactgtacatgtgcttacttgcttgaaggagcttggctgttggtttgtgtttaatcctcttgtgaattagcccgtgtattgtgcttgtactggtttggtgtacaattaacctgcgcccatttcaagggtattgatgtcttccctcggttctaaaattgactcttccatctttgcgtctatttgttttaatctcaaaatctcttttaatccctcctaaccctctcaaatccacgtgggatatgaataaaacaagaccttaaatgtcattcttctatcccaataagtaaaatattttttttaactttgattaaatatatctaaaaaact

SEQ ID NO: 1080 - DNA, 3767 bp, Zea Mays
cagaagcttctgcctttcgataattggagctgtacgtctcctgcgagtggaatgttgagctcgtgagatactctgcaagcaatggatcggcgcagctggccttggaagaagaaatcatctgatagatcatcaaatgcagatgcgttgcagaattctaatcatgctgaacaggaagataaagctccaaagtttgtgcaaatttcacctcaaacatattcacatcttactgagtcagaggaaaaagtaaaagttttagaagaaaatgtgaaggtcttgaatgaaaaactgtctgctgcacaatctgagatcacaactaaagatgctcttgtgaagcagcatgcaaaggttgctgaagaagcagtatcaggttgggagaaagctgaagcagaggcctccgcactgaaggttcagctagaaactgttacattgtctaagctagcagctgaagaaagaggtgctcatctggatggtgcattgaaagaatgcatgaagcaagtaaggactgttaaagaagaaggtgagcagaagctacatgatgtagtatttgcaaaaaccaaacagtgggagaagataaaggccgagttcgaagcaaaattacttgaatttgaacaggaactcataagggctggtgctgagaatgatgcactcacaagatcacttcaagaacgggcagaactattgatgaaaattgatgaggaaaaaggtcaagctgaagctgagatcgaaattttaaaaagcacaattcaatcaggtgaaagggagataaattcgctaaaatatgaattgcatgttgtctccaaagagcttgaaatccgcaatgaagaaaagaatatgagtgtgcgctcagctgatgtagcaactaaacagcaccaggaagatgtcaagaaaatatcaaaactcgaagctgaatgccaaagattacgcggccttgttcgaaagaagttacctggccctgctgcactagctcaaatgaaaatggaggtggagagcttgggtagagaatatggagaccacagagtacgaagatcccctgcaaagaattctagttttcatcggcctatgtctcctgttcctgattatgcaatggagaacatacatcacatgcagagagacaatgagtttctgactgctcgtttattaacaatggaagaagaaaccaagatgcttaaagaggcattggcaaagagaaacagtgagctgcaatcttcaagaagcatgtatgctaagacaacaggaaagctccgaagcttggaagttcaaatgttgactggaaacaaacataagagtccatcaactccaaacatggatattcactttgatggtgcatttagccaaaatggaagcaacccacctagcatgacttccatgtctgaagatggggtagatgatgaaggaagttgtacagaatcttggaccaatgctctggtatctgagccctgtcaattcaaaaaagagaaggcagccaagagcagcacgacagaaagctccaataggttggagctcatggatgacttcttagagatggagagattagcatgtctgtcttctgaagttaatggcaatggcagtactgttgacaagatgaaggtagacaatgttggggctacttttgctggctttactgaaagagatggtgttaaagatttgcagtcagcttcaccaatgtcagaaactccatctaataaacagtgtctgtctgagaaatctccgcttttgaatttccagtcaagaatatcttccttactggattctgaatcaccagagaataatgctggaaaggtacttgatagcatcagaaacattctaaaggatattgaagatgaggcagattcggtgaatgtaaatgggactcatccttcagatgggaccttaagttcagagagcaaatttgccatggatcaagatcttaagaatgccatattgaaaattctagactttgtgaagttacttgatcaagaaatctccaagtttcaaggccagtcacctgattatgatggactatgtgagaaaacacaacagttctctgcattagtcgataaagttctgtcaaacgttgatgttctaaatgatattgtcatagcactgtctgttatcttgtcagaaactagccagattaagttcacattgttgagagacaatagcaatgaagcagaaagtaataacttagattgtgttgataaagtgactctacttgaaaataaggtgcagcttgagccagtaaaagacaatgttcctggtatctgcccactgttgcctcattcatcttctgatcctgagtttgaggggcctgctgatgctagattcgatgttaagactgcagtgaaggtgtactcgccggaggaatatgaacaacttaaatctgagaaggcaaatttggagggagaactagcaaagtgcaacaaaataatagaagaaacaatggctaggttaagtgatatggagaaaaaactggaagacctgacatctaagttggctgacagtgagaaatcaaatagcttgaatgagacacagttgaagtgtatggctgaatcctacaagtcacttgaatcaaggaaaattgaattagaaaatgagatagaagcgttacggtccagaatagatgctctaacagctgaactctttgatgaaagacagagtcatcaggaggacttagttaaatacagagatctcgaggagaagatggaaaggtatgagatggagaggagttcaattcttgtggatgaggacccagacaacaagtcaaagcaggagagagagatagcggctgcagcagaaaagctggcagagtgccaggagaccatattgattcttggccgtcagctgcaagctatgcgtcctccagccgagtcgctaggctcttcacctaatcggcaacgcatggaggagtttctgaaggatgcggcaggaacaaccgcaggagaatatttccagaaaccttcaggccaacctgatacagaccaggatatgcttgggacaggaaatgtgtctccgatcagtgggtacaagacacacatgatcccttctgatgcggacgttagccctttcccttctccaaacacctccaagcgcccgaagcatcgatcgagatcctcttcgtcttcctcattcaccaaccaccagttgccagacaaacagaaccgaggattcagtcggttcttcgcgaagagcaaagagtgaaactattccggatcgcggtgttaggtttgttgatttttggcgccaattgggtgggatggtggtcatgaatttctgtagagctagtgagggatgcttgcttgtgcgttctctcaggtcaggtgattcctttgggttgctggaataatactcagcttgcagtcgagcgggttgtggcgagagtgtgtgggggaatatttaagttgtcagtctcttctgctagagcttttctgggtttctgtgtgctcgaaacctcactaaaacctcactgtacatgtgcttacttgcttgaaggagcttggctgttggtttgtgtttaatcctcttgtgaattagcccgtgtattgtgcttgtactggtttggtgtacaattaacctgcgcccatttcaagggtattgatgtcttccctcggttctaaaattgactcttccatctttgcgtctatttgttttaatctcaaaatctcttttaatccctcctaaccctctcaaatccacgtgggatatgaataaaacaagaccttaaatgtcattcttctatcccaataagtaaaatattttttttaactttgattaaatatatctaaaaaact

SEQ ID NO: 1081 - DNA, 1160 bp, Zea Mays
tgtacgtctcctgcgagtggaatgttgagctcgtgagatactctgcaagcaatggatcggcgcagctggccttggaagaagaaatcatctgatagatcatcaaatgcagatgcgttgcagaattctaatcatgctgaacaggagagagagatagcggctgcagcagaaaagctggcagagtgccaggagaccatattgattcttggccgtcagctgcaagctatgcgtcctccagccgagtcgctaggctcttcacctaatcggcaacgcatggaggagtttctgaaggatgcggcaggaacaaccgcaggagaatatttccagaaaccttcaggccaacctgatacagaccaggatatgcttgggacaggaaatgtgtctccgatcagtgggtacaagacacacatgatcccttctgatgcggacgttagccctttcccttctccaaacacctccaagcgcccgaagcatcgatcgagatcctcttcgtcttcctcattcaccaaccaccagttgccagacaaacagaaccgaggattcagtcggttcttcgcgaagagcaaagagtgaaactattccggatcgcggtgttaggtttgttgatttttggcgccaattgggtgggatggtggtcatgaatttctgtagagctagtgagggatgcttgcttgtgcgttctctcaggtcaggtgattcctttgggttgctggaataatactcagcttgcagtcgagcgggttgtggcgagagtgtgtgggggaatatttaagttgtcagtctcttctgctagagcttttctgggtttctgtgtgctcgaaacctcactaaaacctcactgtacatgtgcttacttgcttgaaggagcttggctgttggtttgtgtttaatcctcttgtgaattagcccgtgtattgtgcttgtactggtttggtgtacaattaacctgcgcccatttcaagggtattgatgtcttccctcggttctaaaattgactcttccatctttgcgtctatttgttttaatctcaaaatctcttttaatccctcctaaccctctcaaatccacgtgggatatgaataaaacaagaccttaaatgtcattcttctatcccaataagtaaaatattttttttaactttgattaaatatatctaaaaaact

SEQ ID NO: 1082 - DNA, 3725 bp, Zea Mays
ttgtctgaaggccgggaggccatacatactctgcaagcaatggatcggcgcagctggccttggaagaagaaatcatctgatagatcatcaaatgcagatgcgttgcagaattctaatcatgctgaacaggaagataaagctccaaagtttgtgcaaatttcacctcaaacatattcacatcttactgagtcagaggaaaaagtaaaagttttagaagaaaatgtgaaggtcttgaatgaaaaactgtctgctgcacaatctgagatcacaactaaagatgctcttgtgaagcagcatgcaaaggttgctgaagaagcagtatcaggttgggagaaagctgaagcagaggcctccgcactgaaggttcagctagaaactgttacattgtctaagctagcagctgaagaaagaggtgctcatctggatggtgcattgaaagaatgcatgaagcaagtaaggactgttaaagaagaaggtgagcagaagctacatgatgtagtatttgcaaaaaccaaacagtgggagaagataaaggccgagttcgaagcaaaattacttgaatttgaacaggaactcataagggctggtgctgagaatgatgcactcacaagatcacttcaagaacgggcagaactattgatgaaaattgatgaggaaaaaggtcaagctgaagctgagatcgaaattttaaaaagcacaattcaatcaggtgaaagggagataaattcgctaaaatatgaattgcatgttgtctccaaagagcttgaaatccgcaatgaagaaaagaatatgagtgtgcgctcagctgatgtagcaactaaacagcaccaggaagatgtcaagaaaatatcaaaactcgaagctgaatgccaaagattacgcggccttgttcgaaagaagttacctggccctgctgcactagctcaaatgaaaatggaggtggagagcttgggtagagaatatggagaccacagagtacgaagatcccctgcaaagaattctagttttcatcggcctatgtctcctgttcctgattatgcaatggagaacatacatcacatgcagagagacaatgagtttctgactgctcgtttattaacaatggaagaagaaaccaagatgcttaaagaggcattggcaaagagaaacagtgagctgcaatcttcaagaagcatgtatgctaagacaacaggaaagctccgaagcttggaagttcaaatgttgactggaaacaaacataagagtccatcaactccaaacatggatattcactttgatggtgcatttagccaaaatggaagcaacccacctagcatgacttccatgtctgaagatggggtagatgatgaaggaagttgtacagaatcttggaccaatgctctggtatctgagccctgtcaattcaaaaaagagaaggcagccaagagcagcacgacagaaagctccaataggttggagctcatggatgacttcttagagatggagagattagcatgtctgtcttctgaagttaatggcaatggcagtactgttgacaagatgaaggtagacaatgttggggctacttttgctggctttactgaaagagatggtgttaaagatttgcagtcagcttcaccaatgtcagaaactccatctaataaacagtgtctgtctgagaaatctccgcttttgaatttccagtcaagaatatcttccttactggattctgaatcaccagagaataatgctggaaaggtacttgatagcatcagaaacattctaaaggatattgaagatgaggcagattcggtgaatgtaaatgggactcatccttcagatgggaccttaagttcagagagcaaatttgccatggatcaagatcttaagaatgccatattgaaaattctagactttgtgaagttacttgatcaagaaatctccaagtttcaaggccagtcacctgattatgatggactatgtgagaaaacacaacagttctctgcattagtcgataaagttctgtcaaacgttgatgttctaaatgatattgtcatagcactgtctgttatcttgtcagaaactagccagattaagttcacattgttgagagacaatagcaatgaagcagaaagtaataacttagattgtgttgataaagtgactctacttgaaaataaggtgcagcttgagccagtaaaagacaatgttcctggtatctgcccactgttgcctcattcatcttctgatcctgagtttgaggggcctgctgatgctagattcgatgttaagactgcagtgaaggtgtactcgccggaggaatatgaacaacttaaatctgagaaggcaaatttggagggagaactagcaaagtgcaacaaaataatagaagaaacaatggctaggttaagtgatatggagaaaaaactggaagacctgacatctaagttggctgacagtgagaaatcaaatagcttgaatgagacacagttgaagtgtatggctgaatcctacaagtcacttgaatcaaggaaaattgaattagaaaatgagatagaagcgttacggtccagaatagatgctctaacagctgaactctttgatgaaagacagagtcatcaggaggacttagttaaatacagagatctcgaggagaagatggaaaggtatgagatggagaggagttcaattcttgtggatgaggacccagacaacaagtcaaagcaggagagagagatagcggctgcagcagaaaagctggcagagtgccaggagaccatattgattcttggccgtcagctgcaagctatgcgtcctccagccgagtcgctaggctcttcacctaatcggcaacgcatggaggagtttctgaaggatgcggcaggaacaaccgcaggagaatatttccagaaaccttcaggccaacctgatacagaccaggatatgcttgggacaggaaatgtgtctccgatcagtgggtacaagacacacatgatcccttctgatgcggacgttagccctttcccttctccaaacacctccaagcgcccgaagcatcgatcgagatcctcttcgtcttcctcattcaccaaccaccagttgccagacaaacagaaccgaggattcagtcggttcttcgcgaagagcaaagagtgaaactattccggatcgcggtgttaggtttgttgatttttggcgccaattgggtgggatggtggtcatgaatttctgtagagctagtgagggatgcttgcttgtgcgttctctcaggtcaggtgattcctttgggttgctggaataatactcagcttgcagtcgagcgggttgtggcgagagtgtgtgggggaatatttaagttgtcagtctcttctgctagagcttttctgggtttctgtgtgctcgaaacctcactaaaacctcactgtacatgtgcttacttgcttgaaggagcttggctgttggtttgtgtttaatcctcttgtgaattagcccgtgtattgtgcttgtactggtttggtgtacaattaacctgcgcccatttcaagggtattgatgtcttccctcggttctaaaattgactcttccatctttgcgtctatttgttttaatctcaaaatctcttttaatccctcctaaccctctcaaatccacgtgggatatgaataaaacaagaccttaaatgtcattcttctatcccaataagtaaaatattttttttaactttgattaaatatatctaaaaaact

SEQ ID NO: 1083 - DNA, 370 bp, Zea Mays
ctcaggccctgtttgtttaccctctaaattgtagtataatccagcttaaataagttaagaggcaaacaaacagtatagattattggagtggattatataatgaggtatctagattatgataatccataagcaggtcattagatgattaattttagattattgtttggcactttaccttctaatagtttatgtaaacaaacacctataataggactatatgaactggattatataatctatataaaatatctggattatataatcctgcaaagaaacaaacatgcccttaagttatgacatggctccataattagcaaaaaaaggacttaatatctaagatcccttgcctcacgccctcaccttcaacaag

SEQ ID NO: 1084 - DNA, 1035 bp, Zea Mays
cgcgcgggagagtcgtcccctgtcgccaggcgaagaggagaaacactcgaaagtaccaaaccaactgacagtcggcccataaatcatatcgctatgcgggccagtcttgcagttacacgagtgcggcacttccgccccgcggtccacagaggcacagccgaagtgtcgcagcagtgcagaggcgatagataaagctcgaggaagacgaccggcacacacgggcactgtgaatctgaggagggaaaatcacccaaaatcgagagcataattttttccccggagatgccgaagatcacctcgtcgccgtctcccaccatctccgccatgaatcccctcctcccgtcctcctttcccaaatcaccccacccgccggacccaaaccctagctccccgaatcctagcccctgcagctacctcctccacgccgacgccgacgacgaggcgctgattcaaatccctggtcagaaccctagcctggtgggtgcctccgcctccttcgcgctgctgccgtctatcgacccggctccacacgtctcgtcgcagttctacaccttcagcgccgcctcctacgggctcatgctacgctgcatccgcgcgggccgctccgcctcctccgacgaggtccgcggcgccacgtcgctctccgtgctcgcctcctggcgggcggtctggaaagatcgaaacgaggacacggcctacctcaccgcgtggaagcgcatccaggacaagctcgccgcgtcggccgacggcctgcaccttcacttcaagtccaacgccgcgcagcgcgtctcccacgtcggcatgtggagggacatagtctcggaggcgcatgccgaccctgaactgctacggcacctcgcgttcagggacaccgtcgaccgcatcaaacagtcgtggactgtgggggccaaattctacggttcatcagcaacgtttgcgatgtgcagcctttcagcaaggttattgtcaagcactgacatcagatggtataccaccagttcaagctaaaaagcaagcaaacgaaggctaacaatg

SEQ ID NO: 1085 - DNA, 4973 bp, Zea Mays
gttacacgagtgcggcacttccgccccgcggtccacagaggcacagccgaagtgtcgcagcagtgcagaggcgatagataaagctcgaggaagacgaccggcacacacgggcactgtgaatctgaggagggaaaatcacccaaaatcgagagcataattttttccccggagatgccgaagatcacctcgtcgccgtctcccaccatctccgccatgaatcccctcctcccgtcctcctttcccaaatcaccccacccgccggacccaaaccctagctccccgaatcctagcccctgcagctacctcctccacgccgacgccgacgacgaggcgctgattcaaatccctggtcagaaccctagcctggtgggtgcctccgcctccttcgcgctgctgccgtctatcgacccggctccacacgtctcgtcgcagttctacaccttcagcgccgcctcctacgggctcatgctacgctgcatccgcgcgggccgctccgcctcctccgacgaggtccgcggcgccacgtcgctctccgtgctcgcctcctggcgggcggtctggaaagatcgaaacgaggacacggcctacctcaccgcgtggaagcgcatccaggacaagctcgccgcgtcggccgacggcctgcaccttcacttcaagtccaacgccgcgcagcgcgtctcccacgtcggcatgtggagggacatagtctcggaggcgcatgccgaccctgaactgctacggcacctcgcgttcagggacaccgtcgaccgcatcaaacagtcgtggactgtgggggccaaattctacggtattccagaatcatttgtccgcgcatgtgttgctgcatgccctgtttgtaaagctgcgcctgctggccagccgtatttcactatctcatcacctggacatgggaagcggcggcgcaggtttgaatatactgagacattggatgtgccggctagagatgtagctcgtaggttacagcaattggctgctaagcacaaggttgttctttgtataaggcagaagtatattaggtataggcccttcatggctgaggtgaaagattatgcatgccaccgtgctggagagcccacttcaagtagtgggagtgctgcatcctcagccggtaatttagagggtaagaaggcgcgggtaaagcgagagccataccagtcgaagaggtgtggttgtgggttccgtattcgggcaattgtgccgatagctaattacaatgaaaaagacaagagttttgtgtacttggaggagggcactgcagtgttcaagctttacgctgtgcattcagggcatgagccagggccacttgatggcaatgcacgaattgttcacaggttggttggtcataagggaggtcttgagtttgatccagacatttatggtgtcagtggggaaggtgatcctaccttttcagcaaaggggtatgaatatgctgatattgatgattcgcaccaggcagtcttgcagcaagtacgggatctgagatcagaagttctcttgctagaagggaaggtggctaagatgcacccagaattgttagggtcactgtccaccgagttgtctgaggttttgcacaggattaggaagtttaatttggagggtaatgtctaccaacatgagacattgatggtaggcaatgaagaagtcaggggatgggggtcagcggatgtatctcaccagttagaccagcatgatcgagcattctgcaaggatgatgagatgcttgatgatgatactgactttggctcaagccttggacctattgtctcgtgggataggatggaagcagagtgcgaggatagaaagatgctcatgggtgatagcccaaagtgcgacaagtggatgcttaaggatgatgtgggtgaatttgatgcgaagagtattcttaactgtggggatgatgatggcgtgggagattccaaggtcatcaaaccattgatgcatgatgacaccatggtaactggcccaagtttggtaggtattcatgtagaaggattttatgccggaacaaaatggtatgattcacaaggtttggattccagtgttgatggaggggatagcagttttaggcatggcggaatcgtgtgaattgtgataacctgatacctggaaggtcctgtaaattatgtatactagatgtatttagctcacaccagtttaattaagtgtctgtaggtggagcttcagtcaaagtaacatgtctgccctgatatatacaggctgcattatcaaagcaacttttgttttaacttgcatatagtccctgtattggttatctgcttgcttcaatacattaaagctatgtttctgttggggtgtgccttagtattttgttgagttactctgtgggcatcatagttttgctaggcgctaggcggaatctaggcgatgacccttagcctagggactagtccagcctaggcttgcctaggcgatgctaggcgttttgccaacttatataatatatacatttatagataaaaaaataggcaacaatcatctgagttcaagccaacagtcaacaaattagaaactgaaaatgggaataacagaggagatgagaggagagaagcaggggacgaggaacaaaccttgggctgtctgctgtcgcgcgtacaggagagaaaccttcagcaagcagtagccgcccgcgtacaggagagaaacaagattgggaggagagaagcaagttttaccgcgtacaggagaaaagcaagcagctacaggggtcttctctaccgcgtgttttctctccttccttttctggcgtacagcttcttttactggcgtacagtccttttctgcgcgcgctagccttttctctaccgcgcgcgtcctattttctcccccgcgcgcgccattctctcctgcgcgcgtgaccttttcccacccgccattttcccccgcgcgcgcctagctcgcctacgcggacgcctgagctcctgggcgcgcggaatcgccgctcggcgccgcctaggcgctccaaacgcctagcagcctgcctaccccctagtccaggcgggaggccgtggcctagcgcctaggcgcgtcgtagtcgtggattttcaaaaccctggtgggcatgcgtgcgagtttagcagcagtttagtcacaattatatgttagttttctcaattctcattcctccacaaggttgcattagtctcatcctcactttgttgcatcccttttaagaagtgtctatgcttaattatacatttttgggcctgttccggtttgtatcttgggtacaatgatttagaaactagtatgtttttatttatcttgcttaccccaacttgctgggactaaaaggctttgttgttgttgaatgctttttatcttgccctctgaatctaaaatatatatatcaggtaaatgatatggtattttctgttatgcaactgcagacatttgtagcttaatgatccattcataaatatatattgtttccttcagttcctattgttgttggctagttggtttgtgccatgacaattgatgcttcccatgttggggttacatgaaacatgatatcataggaaatgcaaacttagtgttttgaatacattattgagattttgcgttccttttttccaagctccaagatgcctctgtgtcacatatagtactgcttcctccattccaaattgtaaattgttgtattaatattgtcctaaacttttctaatttgacaatatttatagaaaaatatgttaacatctgcaataccgatgaagtactatcaaaatgtatttcatggtgtattaagcaaaactaacttgaggttatagaagttggtgcacttttctataaatttggttaaagttaaggaagtttaacttatatatactaccgaacaaaaacaacatacagtttggaacagagggatactgtcaacactgttgttcgtactcattttttatgggatgagtccatgctcattaaagcaaacaagagtgatatcgcttcaataacatttacacttttctagtttctgtatttaatgtttcagatgagattttgtattttgattttggttaaatgttatttcaatgttttcagtttaaaatatttcctccattccaaactataaaacatgttggcttttctagatacatagcttttaatatgcacttagatatacacactgtctactctagatacatagttaaagccatgaatctataaaagccaaaatgccttataatttggatggagtgcattggatatttcactcaaaatctcaagtaggactgagcctcacatgtaagtggtgggcctgtggcatggttctaaattgtgtgttatagtgacattttactaattctgtcacataatttgctattttgaaatgtgatggtatgataaaagataattaaatgtttgattcagaaccttggagaattaacaatagaacaaatttcaccaattaacttgtatgttcttaacctacaaactggggcatttcaagagataacaatctgcataacttttgcatttctgcggttcaagattatttcattctgcatttctttgtttgttgaggtagaagattttgtcttggcatgcatatacacagtacattgaatagagggtgacttcatttccttagtctgattgcattacaccatttcctttgctactacatgtttcttgctgctgatgaatttaccagcaatattaatgaactaaccaaccatttgttcatgtatcatgaccttcgacatataggttcatcagcaacgtttgcgatgtgcagcctttcagcaaggttattgtcaagcactgacatcagatggtataccaccagttcaagctaaaaagcaagcaaacgaaggctaacaatggaactagtgctgtctggttaaacagctaacggattttgagcggcttgctacagtgatgggtgtggtacgacttaaattataggaatgaaattgagcccatctttg

SEQ ID NO: 1086 - DNA, 2156 bp, Zea Mays
cagcagtgcagaggcgatagataaagctcgaggaagacgaccggcacacacgggcactgtgaatctgaggagggaaaatcacccaaaatcgagagcataattttttccccggagatgccgaagatcacctcgtcgccgtctcccaccatctccgccatgaatcccctcctcccgtcctcctttcccaaatcaccccacccgccggacccaaaccctagctccccgaatcctagcccctgcagctacctcctccacgccgacgccgacgacgaggcgctgattcaaatccctggtcagaaccctagcctggtgggtgcctccgcctccttcgcgctgctgccgtctatcgacccggctccacacgtctcgtcgcagttctacaccttcagcgccgcctcctacgggctcatgctacgctgcatccgcgcgggccgctccgcctcctccgacgaggtccgcggcgccacgtcgctctccgtgctcgcctcctggcgggcggtctggaaagatcgaaacgaggacacggcctacctcaccgcgtggaagcgcatccaggacaagctcgccgcgtcggccgacggcctgcaccttcacttcaagtccaacgccgcgcagcgcgtctcccacgtcggcatgtggagggacatagtctcggaggcgcatgccgaccctgaactgctacggcacctcgcgttcagggacaccgtcgaccgcatcaaacagtcgtggactgtgggggccaaattctacggtattccagaatcatttgtccgcgcatgtgttgctgcatgccctgtttgtaaagctgcgcctgctggccagccgtatttcactatctcatcacctggacatgggaagcggcggcgcaggtttgaatatactgagacattggatgtgccggctagagatgtagctcgtaggttacagcaattggctgctaagcacaaggttgttctttgtataaggcagaagtatattaggtataggcccttcatggctgaggtgaaagattatgcatgccaccgtgctggagagcccacttcaagtagtgggagtgctgcatcctcagccggtaatttagagggtaagaaggcgcgggtaaagcgagagccataccagtcgaagaggtgtggttgtgggttccgtattcgggcaattgtgccgatagctaattacaatgaaaaagacaagagttttgtgtacttggaggagggcactgcagtgttcaagctttacgctgtgcattcagggcatgagccagggccacttgatggcaatgcacgaattgttcacaggttggttggtcataagggaggtcttgagtttgatccagacatttatggtgtcagtggggaaggtgatcctaccttttcagcaaaggggtatgaatatgctgatattgatgattcgcaccaggcagtcttgcagcaagtacgggatctgagatcagaagttctcttgctagaagggaaggtggctaagatgcacccagaattgttagggtcactgtccaccgagttgtctgaggttttgcacaggattaggaagtttaatttggagggtaatgtctaccaacatgagacattgatggtaggcaatgaagaagtcaggggatgggggtcagcggatgtatctcaccagttagaccagcatgatcgagcattctgcaaggatgatgagatgcttgatgatgatactgactttggctcaagccttggacctattgtctcgtgggataggatggaagcagagtgcgaggatagaaagatgctcatgggtgatagcccaaagtgcgacaagtggatgcttaaggatgatgtgggtgaatttgatgcgaagagtattcttaactgtggggatgatgatggcgtgggagattccaaggtcatcaaaccattgatgcatgatgacaccatggtaactggcccaagtttggttcatcagcaacgtttgcgatgtgcagcctttcagcaaggttattgtcaagcactgacatcagatggtataccaccagttcaagctaaaaagcaagcaaacgaaggctaacaatggaactagtgctgtctggttaaacagctaacggattttgagcggcttgctacagtgatgggtgtggtacgacttaaattataggaatgaaattgagcccatctttg

SEQ ID NO: 1087 - DNA, 424 bp, Zea Mays
ctatctccagcactttactcatcccaatactcatattcaaactctattttgcgaacagtgtagtttacagtgcagaacattacaaaacaatatttttaggtaaactataggtagattgctgcagacggtttaaagcacatgatagtctacatgcaattgacccgctgcccatgcaggtggtgtcagcaagatgcaacttctagttctaacaatatgttggtacatttagggtgtgtttggttcagatttctgaaccagattcgctaccaaaaatctgaaatctcaatcaaacagtttcgacaaaacaaatttcagtggagattgctggtgtggttcagtggagattgctgatacgatttttgcgagtatggatgctctgacgaagcccagaagcctagaagtgagaagcctggtatgcccttga

SEQ ID NO: 1088 - DNA, 367 bp, Zea Mays
tcaaactctattttgcgaacagtgtagtttacagtgcagaacattacaaaacaatatttttaggtaaactataggtagattgctgcagacggtttaaagcacatgatagtctacatgcaattgacccgctgcccatgcaggtggtgtcagcaagatgcaacttctagttctaacaatatgttggtacatttagggtgtgtttggttcagatttctgaaccagattcgctaccaaaaatctgaaatctcaatcaaacagtggagattgctggtgtggttcagtggagattgctgatacgatttttgcgagtatggatgctctgacgaagcccagaagcctagaagtgagaagcctggtatgcccttga

SEQ ID NO: 1089 - DNA, 2838 bp, Zea Mays
gctaagcccacgtttagccaaattgcaaatttttcgccggccggccgcctgcgccctaacacttacaccacacgagcccacggccgcacagatgaccggccgccggccacccacgctggcgaggatctagttcctgcgagactgacttcatcgaatcgatgaggcggcagacggcgggcgacatcccgcggcgttgagaagctgcggtccaccttctcggtcggtgggccgtcggcgtcggagtctcggacgtcggaccaccaacggcggcgtccgagagctggtcctggagtgtacttcgtgcaacaaccatcgcggcatcgcccgccgtatgcgcggcccgaagatgctgacatccatgctctcaaaatcaacagcctcgccgtctccggcacgcctctatcacctcctccccgtctcttccctccaaacgaccagcgatctccgtcctgcacccaatggcgcatctcctccacctccgcctcctgctcaaatccccgccttcctctccccgtgcccatctccgtacaaccatagcaattacgccaccatcctccgatcctgcgtcctctccagagccgttcggcccggtcggcagctccacgccaggctcctcgtgtcgggcactggcctcgatgcggtcctcgccaccaggcttgttgacctatacgcgtcttgcggccatgtgtctcttgcccgtcgtgtgttcgacgaaatgcccaaccaggggaacgtctttctgtggaacgtgctcatccgtgcctatgcacgcgacgggccatgcgaggcggcaatagaactgtaccgcgcgatgctggcatatggtagcatgaaaccagacaacttcacctatccgccggttctcaaggcgtgcgctgcactcctggacctgagcgctggccgggaggtgcacgatcgtgtcatgcgaacgaattgggccactgatgtttttgtatgtacaggcctcatcgacatgtacgccaagtgtggttgcatggacgaggcttgggcggtgtttaatgacaccacaatcagggatgctgcggtgtggaattcgatgattgcagcatgtgggcaaaatgggcgaccagcagaggcgctcactctgtgccgtaacatggcggctgaaggcattgcgccaacgatcgccactctggtgagtgcgatatcagctgcagctgttgcgtctgcgctgcctagagggagggagctgcatggatatggttggaggagagggtttggatcacaggacaagctgaagacttcccttctcgacatgtatgccaagagtggttgggttatggtggcgcatgttctctttgagcaacttttacacagggagcttatttcttggaatgccatgatctgcggatttgggatgcatggccatgctgatcatgcatttgagctgtttagcagaatgcggagtgaggctcaggtgatgcctgaccatattacttttgttggagtcctatctgcttgtaaccatggaggaatggtacaagaagcaaaagaagtatttgatctgatggtgactgtatattccatcaagccgacagtgcagcattacacctgccttgtagatgttcttggtcactctggtaggttcaaagaagcttctgatgttattaaaggaatgttggtgaagccagattcagggatatggggtgcactgctaaatggttgtaagattcacaaaaatgttgagctagctgaattagccctgcaaaaactgattgaattggagcctgaagatgctggtaactatgtgcttctatctaatatatatgctgaatctgggaaatgggaagaagctgcaagggtgaggaagctgatgaccaatagaggcttgaaaaagatcattgcttgtagctggatcgaattgaaagggaagttccatggttttcttgtgggtgatgcttctcatcctagatcagatgatatatatgaagagttggagcgattggaaggtctcatcagtcaaactggctatgtgcctgacaccacgccggttttccataatgtggaagatgatgaaaagaggaacatggtatggggccacagcgagaggttggccattgcatttggactcattagtacaccgcctaggacaaagttgcttgtgacaaagaatcttcgagtttgtgaggactgccatgttgtcatcaagctgatttcacagattgagcagcgtgaaattatcataagagatgttaaccgctatcaccactttgtaaatggtgaatgttcatgcaaagaccattggtaacttacacaagcaagagtattgttgtacactatctattccatggaaattaaaaatgtcagaatgagatcacagagacaattcgatttgaagaaggccagccaaaagtctactgataggtcagatatcgtagctcgtgttttccatatgaaacttagaataccttgctgatataaaggaaggccacatttttggtcctgttcgtgcaggtacatagtctctcattactctactatgttatttcgttgaacaattgaagggcaggcctggtgcagtgatgatagttgtttcactaggtcgtgagttagaagcagcctctccgcttttatgggggaaggcatgaagactccactcacgtgggagcctcaagcattgggcctgcctgccctttttttatcgtgtagttcctgacgtgtacatgttcactgtaagataatctgctgcccccttttgaacttttgctgcagcagagagattgtattttggtcagctcttgctgtccaactattgtactgtaggagtatggcaataggctaatgatatagtggcatacatcagtcatgtagtagtag

SEQ ID NO: 1090 - DNA, 1106 bp, Zea Mays
gattggttgctgttgcttcctgctttcgcttcgccttcacccgttcgccgtgcggccgagctctctagttccgccgctcgctagtcgccttcctcccaaatggcgaccgccatgcggggcagcagcctcctgcggttcggtttccgccatccttcctgcctcctgttccagtcccctcggtgtcctgccccgagcctgggtctgaacctggccgttggccgcaccgggcttatacgcctccgatgctcggcggccggggccggcgacgccggtggaaagaaggtgtcggctcggctggctctgacgcagcaggtgctgcggaacgccgaggagcgcgccgcgtcggcgggttcggaccctgcccccaagatcaccctggatcatgttactgttaattttgcaagaagtggtggtcctggtggtcagaatgttaacaaagttaacacaaaggttgacatgcgattcaatgttaaggaagctcactggcttggggagagaatcaaggaacggatattacaagcggagaagaataggataaataaagatggagagcttgttatatcttctacaaaaactagaacacagaagggcaatattgaagatgcattgcagaaaatacaggcaatcattgatgctgcatcatatgttcctccacccccaacagaagaccaaaagaaaaagattgaaaaaattgctgcagttgctgaaaggaagagacttcagaataagaaggtgctttcacagaagaaggaatttagacggaacagaactagctgggattgatgcaagtggtgtacagagaccgacgaaaaacaagggtcagacttgctgaaggcatcttggtgaagaagatatagctaagtttcgtaggcatctccagtttttgtttcgtctattagtagggatggattcggatcggatactcatggaaacagatccgaacgtcactatttaccatattttaatccgaatacgaatactatcggatacgaatacaaaacggatagttcgaattcggatttacattcgaatacttacttgatttggaacatagcatcataacaagtattaatttgttttatcgatggatttatagttgataaaaa

SEQ ID NO: 1091 - DNA, 1206 bp, Zea Mays
gattggttgctgttgcttcctgctttcgcttcgccttcacccgttcgccgtgcggccgagctctctagttccgccgctcgctagtcgccttcctcccaaatggcgaccgccatgcggggcagcagcctcctgcggttcggtttccgccatccttcctgcctcctgttccagtcccctcggtgtcctgccccgagcctgggtctgaacctggccgttggccgcaccgggcttatacgcctccgatgctcggcggccggggccggcgacgccggtggaaagaaggtgtcggctcggctggctctgacgcagcaggtgctgcggaacgccgaggagcgcgccgcgtcggcgggttcggaccctgcccccaagatcaccctggatcatgttactgttaattttgcaagaagtggtggtcctggtggtcagaatgttaacaaagttaacacaaaggttgacatgcgattcaatgttaaggaagctcactggcttggggagagaatcaaggaacggatattacaagcggagaagaataggataaataaagatggagagcttgttatatcttctacaaaaactagaacacagaaatgcattgcagaaaatacaggcaatcattgatgctgcatcatatgttcctccacccccaacagaagaccaaaagaaaaagattgaaaaaattgctgcagttgctgaaaggaagagacttcagaataagaaggtgctttcacagaagaaggaatttagacggaacagaactagctgggattgatgcaaggtatcttgcacagacccgtctttctgttttgtgccattccgcggtgggcattggcaatagtttagagggcttgttctcggggtagcaaaagcattcggctgatccttacagcagtggtgtacagagaccgacgaaaaacaagggtcagacttgctgaaggcatcttggtgaagaagatatagctaagtttcgtaggcatctccagtttttgtttcgtctattagtagggatggattcggatcggatactcatggaaacagatccgaacgtcactatttaccatattttaatccgaatacgaatactatcggatacgaatacaaaacggatagttcgaattcggatttacattcgaatacttacttgatttggaacatagcatcataacaagtattaatttgttttatcgatggatttatagttgataaaaa

SEQ ID NO: 1092 - DNA, 1621 bp, Zea Mays
ttcgtctatttgcggttctcggcgcaatacatttcccaacacagcgccgtacgcacagcacagtcacggtactccaccgctaaaaccttcggaaagaatccccaaatctcgcacacctcgaagccttcgaggcccgaaaccctagctcctcggcctccccgccgcttccacccatggctccaggactgcagcgcttcactgacattgcggacgacggcacgccccagctcgacgccgcgtccggcgaggagctggtccgtgtggaccgcaccgtggctgtcgcccttggcccccgctcgccggagtccccggggactctgttcgtcaccaccaggagggtgatttggctcagcgaagcggagaagggcaagggctacgcggtggacttcctcgccatctcgcttcacgctgtgtcgcgcgacctcgaggcgtacccctcgccctgtatctacactcagattgaggcagcagttggtacagaagaggaggctggggaatcaaatcctgaagcaaatgaactagagctatctagagtatctgaaatgaggctcatactagcggaccccggtcaactggatgcactttttgatgtcttctgtcattgtgctgaactgaatcctgaccctaatagtgcaatggggagaatggctggatccgtggtgaagatatgtctaatggtgactggattcgtgatgatgtggacatggttgatgaaaatgtcccgcagtttttcaatgccaatccgataggtcaaaatggtggatatgaccttagtcgttcagtatttgagcttcaaatcaacgaccaacgttttgaggatgcagaggaggaacaggagagccatgaaaataatggacattagaaacagagacatgttcctcgagagcatcatgtgatttattttgttgtaaatcactaccgatgcagctcggtttgcctactgtttcatctacactttctcttcctttttccttgatgttataggattaacatcactgggtgactttctggaattgcatcgatggttccttttggtgagaaaaggtcttgctgctggtcaagaatgtaacttgtagagcatgatgttgaatcgtgtgaaattagttcagtacttttgatctaacaaatagaaggtcgaattgggaaaggagatatattatcttttcccttgtatatcatggcaccgttatgttacgtctgcttagaattaaattcagtttgggtgttgcagggacccgtctctctttcgtatatcagggatagtagcaattgaagtacagcggcttcaggattggccatatggacaatggacacgagacgagtgtagagcgcgtggtgtccatcccgacggtgcaacagagaacgcaaagcaagtgttgctgtgtactttacaattgctgtgtattcgtataatatgtttgttaaggatgtctttaccagccattctatgattctatcctatcctctatcttatcccatattttaaacttaggccttatttgttttctaatactaaattttagtccttgtcatatcaaatatatgacaaatgttttggaagctagttagaatattaaatataatttaattacaaaattaattaaactgataagaactaaac

SEQ ID NO: 1093 - DNA, 1064 bp, Zea Mays
cgcgtaacccacatggtccacaaccccccggctgtctctacctccttcctcgctcacctcctcacgacgtgaggaatcgatcaggccaccgccgtacccgtcggagatccgctccgcccgcgcgatttcgatccgaaacacctcgtcggatcttcagggatctgactgaggggcagcgcgccggctgctgacacggcgggcacgcgcgcagccagccatggcgcgtggtggcggaggcggctgctgcccgccaatggatctgatgcgatcggaggcgatgcagctggtgcaggtcatcatacccgctgagtcagcgcacctcaccgtctcctacctcggagacctcggcctcctccagttcaaagaccttaatatagataagagcccgtttcaacggacatatgctgcccagattaaaaggtgtagtgaaatggctcgtaaattaaggttttttaaggagcagatgtcaaaagctgacataacagcctctcctacacaactaaatggaactcatatggattttgatgaattggagataaagcttggagaactggaagctgagctaactgaagttaatgcaaacaatgaaaaattacagaggacctataatgagctattagagtaccatactgttctccaaaagctcaaagaactgctgcagcgcaacaaatggaaatggaggcaaatcaatctggtcaaacttcactggagagccctctgttggaacaggagatgacaactgatccatcaaaacaagtgaagcttggctcattgagtggacttgttccaaaggaaaaggcaatggcttttgaacggatcttattccgtgccacaaggggtaacattttccttaggcaagagcctgttgatgagccagtcactgatccagtttctagggagaaggtaacgaaaaatgcatttgtcatattctactctggagagagagcaaaaaccaaaattctgaagatatgtgatgcctttaatgcgaaccgttacccgtttccagaagatgttggcaaacaacttcatgctgttcaggaggaattcaagttagaaaattccgc

SEQ ID NO: 1094 - DNA, 4246 bp, Zea Mays
cgcgtaacccacatggtccacaaccccccggctgtctctacctccttcctcgctcacctcctcacgacgtgaggaatcgatcaggccaccgccgtacccgtcggagatccgctccgcccgcgcgatttcgatccgaaacacctcgtcggatcttcagggatctgactgaggggcagcgcgccggctgctgacacggcgggcacgcgcgcagccagccatggcgcgtggtggcggaggcggctgctgcccgccaatggatctgatgcgatcggaggcgatgcagctggtgcaggtcatcatacccgctgagtcagcgcacctcaccgtctcctacctcggagacctcggcctcctccagttcaaagacgtatggttgcttgcccctgctcgtcccttcgattacgggggtggggcgatccaacttgctccggagctgaatccctttcgatctaagatagtggtttggtgataagtaggacttcgtgatcggggcttcctgggagttagagagggtgtcctgtgggcattgcgattttggggaatttgcagctataacgtgcaattgtttgctgtttactgttcttcagcgttggaattgtggtataatggttcacattggtgtgattggttgtagttggagccatgaatttagcataggaatgtttttattgggaattatcttgcatatgcagaatttccagtagtcaatgaaaattacagttccagcaaaaggttacgttggtatgctattgtgcttcattagctgatcgtgatggtgtgctgttgattcttgctctgggtgctgattctttacctgtgggtttaatcttattactgttttttttgccacagcttaatatagataagagcccgtttcaacggacatatgctgcccagattaaaaggtgtagtgaaatggctcgtaaattaaggttttttaaggagcagatgtcaaaagctgacataacagcctctcctacacaactaaatggaactcatatggattttgatgaattggagataaagcttggagaactggaagctgagctaactgaagttaatgcaaacaatgaaaaattacagaggacctataatgagctattagagtaccatactgttctccaaaaggctggtgaatttttctattcagctcaaagaactgctgcagcgcaacaaatggaaatggaggcaaatcaatctggtcaaacttcactggagagccctctgttggaacaggagatgacaactgatccatcaaaacaagtgaagcttggctcattgagtggacttgttccaaaggaaaaggcaatggcttttgaacggatcttattccgtgccacaaggggtaacattttccttaggcaagagcctgttgatgagccagtcactgatccagtttctagggagaaggtaacgaaaaatgcatttgtcatattctactctggagagagagcaaaaaccaaaattctgaagatatgtgatgcctttaatgcgaaccgttacccgtttccagaagatgttggcaaacaacttcatgctgttcaggaggtatctgggaagatctcagagttgaagacaacaattgacatgggtttagctcatcgtgacagtatactaaaaaatattgcttctgattttgaacagtggaaccatctggtcaaaaaggaaaaggcaatttatcacaccttgaacatgctaagtgttgatgttacgaagaaatgtttagttgctgagggctggagtccaatttttgcaagcattcagattcaagacgctcttcagcgtgctactcttgatagcaaatcccaagttggctcaatatttcaagttctcaacacaaaagaatctcctccaacatatttccagacaaataaatttacttcagcgttccaggaaattgttgatgcgtatggtgtagccaagtatcaagaagcaaatcctggagtattcaccattgtgactttccctttcttatttgctgtcatgtttggtgattggggccatggaatttgcttgttacttgcaacactctatcttataatccgggagaagaaactagcttcacagaaacttggagacataatggagatgatgtttggtgggcgttatgtaattatgatgatggcagttttttcaatctacacaggattaatatacaatgaatttttctctgttccatttgggcttttcggtaaatctgcctatgcatgccgtgattcttcttgcagtgatgctactaccgaaggacttcttaaagtaagagatgcatacccttttggtgtggaccctgtctggcatggtagccgcagtgagctaccgtttctcaactcactgaagatgaagatgtcgattcttcttggagttgcacaaatgaaccttgggattgtgattagttacttcaatgcaaaatttttcaggaacagtattaatgtgtggtaccagttcattccccagctgatcttcttgaacagcttatttggctacctgtccttgctcattattattaagtggtgcacggggtcgaaagcagatctataccacgttatgatctacatgttccttagcccaacagatgatcttagtgagaaccagttgtttagtggccagaagacagtgcagcttgttctacttctgcttgctttagtgtctgtaccttggatgttgattccaaaacctcttcttttgaagaaacaacatcagcaaaggcatcaaggtcaccagtacgctatgcttcagggcattgatgaatcagtgggagcagaattgggggaacatcatgaggacgcacatgaccacgaggagtttgagttcggtgaagtttttgttcaccaactgattcacacgatagaatttgttctgggtgcagtctcaaacaccgcttcataccttcgtctttgggctctgagtcttgcacactctgagttgtccactgtattctacgagaaagtactaatgacggcatatgggtttaacaatgttttcatccttattattggtgtcgtcatcttcatctttgccacgattggtgtcttgcttgttatggagaccctgagtgcattccttcacgcgctgaggcttcactgggtggagttccagaacaagttctatgaaggtgatggctacaagtttgccccattctccttcgcgctgattcgtgaggaggaagattgagcttgtctcaacatttgtatttattgtagccgataaaaaatctttggtggtctttgttcccagaccaaatcattttttcatctgttgtgtcggatgtggatcataaaccaccgtccctttgtttaaactgggacgaacagcatcatttttccttagctatgcagaggattcttgggttggttggcaacagatatggggtgatgtcacccttgtatgatgctaataagtagttgccgattgggcggtgtgttggatataaataagcactgtattgaaggttagacaatctccatcacgttcattgtcaataaaataaagagtgctatttacgctgctggtgttaatcatctcctggtctgttgttaaccattgtcagtgcttcatcttatcccattgatactctgaatcagctgtctcttataaccaaagcaaaagctaaaccagaatcacgttataaaagtagttaaacatgtcgagtctgtctgcttgtgggcaatctagtaacataggtagctgcagcctagtttcgtcagtcgtcaacgacgttgggaacgctgctggtgctgcgcctagagctgctgaaaggtcccgtgacagtccggccaacgaacttgccggccttgctgagtccgctaccgaacgcgccaatgccggagccgacggcgccgatgcccgtgccaaccatcccaacgccggagccggccgcgctgacacccgtgccggcaacggtgccggccgccgcgatgcccgtgccggccacgttggtgaccgtggacgccatgccgcttgccgcgtccgcggcgccgctgacggcccccgtctcgctcttcaccttccgccgctcatccacggtctgcttctccagctccagggcctcccgcgcctctgcgttggtgaactggtggtacgccaccttaatgctgagcacgcccctgtccttcttgtccttgaccttggtcgtgtccagcgacgacagcagctgcagtttcacctcctgcacggtttccatctccaggtcgctcaggggcagcttggcgatgccaagcctcttgtcttgcttcatcttgtcctcatc

SEQ ID NO: 1095 - DNA, 5844 bp, Zea Mays
gtcccctcccctcccatctctatccacgacaaccgacgccccactccccgatccaaaccacctcaaacccccgccccgcccagatccagatccacgcggcgcggcgcgaccgcggctaccggatcccgccgcggaataatggcctccgcggttgcggcgccgccgccaaccccgccggagtccgacccgcgcctcgtcgagatcttctcccccttcctcgagaagctcataaaaaatgcctcgtggcgcaacaaggcgcactccaagctctcgcacaccgccaagtccatcctcgaccgcctccagaagcccccgccgccgcccgcagccgaggcgcaggcgccgtccacgccgacctcctccccctcgacgccgacctcctcttccgcacagcctggtccgttgcgcagcctgtcgctcgcggactcggagctgctcctcgcccctgtgatctcgacactcctctcggcggtcacctctacgtctgtacgcctccacggcgattgccttctacgtgccgtgcgcgcatgttatgatatgtacctcgggagccgtagtgccgtcaatcaagccactgccaaggcttcgcttgtgcagatgctggtgattgtgttccgccgaatggaagctgactcctcgaccgtgcctgtacaacccatagtcgtggctgatgtgattgagctacctgatgcaatttcgggctcctcgcccactgctgaccccaacgttgtacagggattcatttcgaagatcattggtgacttcgatggtgcactcacacctctggctcggacaacttcatcagcaggggcaggacccaccgttgcccatgatggtgcatttgagacaacggcagcggcagaggaaggggcaaacccagcggatttgcttgattcaacagataaggacatgcttgatgccaagtactgggagatcagcatgtacaaaacagctattgagggtcgtaaagatgagcttggtgtcgagggggcagtggttggcaccttggacgatgatgctgatgtgagaattgggaacaagttacggagggatgctttcttagttttccgggctttgtgtaagctttccatgaagacaccacccaaggatgcaccagcagatcccatagtaatgcggggaaagatccttgctcttgagcttctcaagatcttgcttgaaaatgctggggctgtgttccggaccagtgagaggtttctcggtgctatcaagcagtatctatgcctgtcacttttaaagaactgtgcctcatcccatatgattgtttttcagctatcttgttctatttttattagcttagtggcaagattcagaccaggattgaaggcagagattggtgtattctttcccatgatcatcttgagagtgttggaaaatattgctcaaccaaattatcaggcaaagatgattgttcttcgttttttggaaaagctctgtggtgattctcaaatcctagttgatattttccttaattatgattgtgatgtccactcatcaaacatatttgagaggatggtaaatggtctactaaagacagctcaaggacctcctgctggtgtccctaccacattggtaccacctcaggacaccacaatgaaaagtgaagcaatgaaatgcttagttgctattctgaggtccatgggagattggatgaataagcagctacgaattccagatcctgcttctcctaatgtagaatcagagaagaacgacaatgatgatggcaatgagcttccgcaggcagataacaatggagatgagtctagtgaagcatctgattcacattctgagttatcgaatggaatttcagaggcagcatcattggaacaacgtcgagcttacaagatagagcttcaggagggtatctatttgtttaatcggaagccgaagaaggggattgagttccttgttaatgcaagcaaggtgggggagacaccagaggagatagctgcgttcctaaaaagtgcttctggcttgaacaagactatgattggtgattatttaggtgaaagggaagatttatcgctgaaagtcatgcatgcatatgtggactcatttgattttcaaagactggagtttgatgaagcaattagagctttcctccaaggcttcaggttgcctggagaagctcagaagattgatcggattatggaaaagtttgcagagcgttactgcaaatgtaatccaaaggccttttccagtgcagatacagcttatgttctggcttattcagtcataatgcttaacactgatgcacataacccaatggtcaaaaataagatgtcaccagaagatttcattagaaacaatcgtggtatcgatgatgggaaggacctacctgaagaatttatgagatcattgtatgaaaggatttggaaaaaggagattaagatgaaagaagatgaatttgttccacagcagcaacaatcaacaagttctaacaaaattcttgggttggataacattcttaacattgttgtacgcaagcgaggttcatctatggagacaagtgatgacctcattaagcatatgcaggagcaatttaaagaaaaggcccgcatgtctgagtctgtattttatccagccacagatgtagttgttttgaagttcatggttgaggtttgctgggctcctatgcttgcagcattcagtgttccacttgaccagagtgatgatgaaattgttgtatcccagtgccttgaaggatttcgctctgcaatccatgttactgcagccatgtcaatgaagactcaaagagatgcatttatcacttcacttgccaagtttacatcacttcactctgctgctgatattaagcagaaaaatgttgaagccattaagatgaagatggaaattacttgcaagaagcatgggagcatatattgacatgtgtttctcgttttgaaaatctacatcttgttggagagggagcacctccagatgccactttctttgcgctgcagcagccggaccttgataaatcaaaacaggctaagtcatcgattcttcctgttctgaaaaagaaggctcctaatgctacttcagcttctaaaagaggctcttatgatagcgctggtgtcggtggcaaagcttctggtgtggatcaaatgaataatgaggtgacaagcctcttggagcaagttgggatggctgaaatgaaccgtgtatttgtaagaagtcaaaaactcaacagcgagggtataattgattttgtgaaggctctctgtaaggtttcaatggaggaattacgttcggcttctgatccacgagtttttagtctgacaaagatagtcgagatagcgcattacaatatgaaccgcatcagacttgtttggtcaagtatatggcatgtcttgtctgatttttttgtcaccattggctgctcagaaaatctttcaatcgcaatatttgctatggactccttgcggcagttatctatgaagttcctggagcgtgaggagctcacaaactacaatttccaaaatgaatttatgaagccttttgttgttgtaatgaggaagagccgagctgttgagatcagagaacttatcattaggtgtgtctctcaaatggtattggcccgtgttagtcatgtgaagtcagggtggaagagtatgtttatggtctttgcgacagcgtcatatgatgatcacaaaaatattgtactattggcctttgaaattatagaaaagattttgcgggaatactttccatacattactgagactgagacaacgactttcaacgattgtgtgaattgtcttatcgcgtttactaacagcaggtttaacaaggatataagtcttaatgcaattggatttcttcgattctgcgcagcaaagttggccgaaggtgatattggatcctcaaggttgaaggacaatccttcaaacagtaatccaccctcgcctcatttgactaatgatggaaagcaggaatgcacagttcttgttgacaaggaagaccatatacacttttggtttcctttactagcgggactgtctgaacttacctttgacttaagaccagaaatcaggaaaagtgctttgcaagtgttatttgatacattaagaaaccatggccatcttttctctctgcctttatgggagaaggtgtttgattcagtgcttttccccatatttgattatgtacgtcatgctattgatccatctggtaatcctccacaaggacaaagcgtggaaaatgatcctgcagaacttgatcaagatgcttggttatacgagacatgcactttggcacttcagttggttgtagatctctttgttaagttctatgatacagtcaatcctcttctaaagaaggttctgctgctcttgacaagtttcataaagcgtccccatcagagtcttgctggtataggtattgctgcatttgttcgtttgatgagcagtgctggatctatgttcgtggatgaaaaatggctagaggttgtattgtcattgaaagaagctgccactgagacacttcctgatttcacttatgtttcatctggagcctacctggaaaatgtgccaacagaaaatggagtctctgctgacaatagagaggacgaatctgaaccagtagcggatgacaatgaagaatcctctagatcaaggaatctatactttacaattggtgatgccaaatgtcgagctgctgtacaactcctgttgattcaggctgtgatggaggtatataacatgtacagaggacagttatcagcacagaacacagtaatcctcttcgaagccttgcatactgttgccgcacatgctcacaaaataaacagtgatagtgatttgcgttccaagttgcaagagttgggctcgatgacacagatgcaggacccgccattgttacgccttgagaatgagtcgtaccagctgtgcctcagtatccttcagaacatatttctggacagctctcctgatcatggaagcacagaggtggtggagagtcaccttattggcttgtgcaaggaggtccttgaggtatacttgagcacagcaagaccttctcagccttccagtggcacacagccgctaggccattggcttatccctgttggttcatcgaagcgaagggaacttgcggcaagagcacctcttgttgtctcaaccctgcaagctatcagcggactaggtgactcagctttcgagaagaaccttcgccagttctttcctcttctcgctgggctcataagctgcgagcatggttctagtgaagtacaggtggccctgagtgatatgttcagcacttgggttggcccactcgttctccagtcttgctgatgctgaacatcatgttatacatagtagtatacatcccatcgtgttcctcctttcctccattatgttatgttaatcttttagtcgctgggagttcatattgttgtgctgaactgatcatgcagatcaatttttccttgacgttattttcttgttcgtatcgggaggagtgtatgtcactatagagaactgaattatgtacggtagtttagctaaaattgtgcccattctgttcctaatgtgctgatttctagatttttaggcatgttttgcatgcttttgctcagtagcgtttctcctttctggaattctggaatgtggtagggttggattataattcttgcgagttgggtgtgttaggctatcttcttttatcttaccttctattttaaactctattatgtaattagtgcaatttatagtataaaacattgttttgcacgtccatttacactggccgttggagatggccatagcggatatataaatttccatatattccaaacaataggcatatatgagtgttttgatcaag

SEQ ID NO: 1096 - DNA, 5949 bp, Zea Mays
ccacgacaaccgacgccccactccccgatccaaaccacctcaaacccccgccccgcccagatccagatccacgcggcgcggcgcgaccgcggctaccggatcccgccgcggaataatggcctccgcggttgcggcgccgccgccaaccccgccggagtccgacccgcgcctcgtcgagatcttctcccccttcctcgagaagctcataaaaaatgcctcgtggcgcaacaaggcgcactccaagctctcgcacaccgccaagtccatcctcgaccgcctccagaagcccccgccgccgcccgcagccgaggcgcaggcgccgtccacgccgacctcctccccctcgacgccgacctcctcttccgcacagcctggtccgttgcgcagcctgtcgctcgcggactcggagctgctcctcgcccctgtgatctcggcactcggctcgggcagcgccaagctcgccgaggccgcgctggagctccttcacaggctgatcgcacactcctacatccatggcgaggccgacccatctgctgatccctcagcacagctcgtcgcctcactcctggacgccgcctgcaatgcgcttggccttgatgacgagcacattgagctcctcctcctcaagacactcctctcggcggtcacctctacgtctgtacgcctccacggcgattgccttctacgtgccgtgcgcgcatgttatgatatgtacctcgggagccgtagtgccgtcaatcaagccactgccaaggcttcgcttgtgcagatgctggtgattgtgttccgccgaatggaagctgactcctcgaccgtgcctgtacaacccatagtcgtggctgatgtgattgagctacctgatgcaatttcgggctcctcgcccactgctgaccccaacgttgtacagggattcatttcgaagatcattggtgacttcgatggtgcactcacacctctggctcggacaacttcatcagcaggggcaggacccaccgttgcccatgatggtgcatttgagacaacggcagcggcagaggaaggggcaaacccagcggatttgcttgattcaacagataaggacatgcttgatgccaagtactgggagatcagcatgtacaaaacagctattgagggtcgtaaagatgagcttggtgtcgagggggcagtggttggcaccttggacgatgatgctgatgtgagaattgggaacaagttacggagggatgctttcttagttttccgggctttgtgtaagctttccatgaagacaccacccaaggatgcaccagcagatcccatagtaatgcggggaaagatccttgctcttgagcttctcaagatcttgcttgaaaatgctggggctgtgttccggaccagtgagaggtttctcggtgctatcaagcagtatctatgcctgtcacttttaaagaactgtgcctcatcccatatgattgtttttcagctatcttgttctatttttattagcttagtggcaagattcagaccaggattgaaggcagagattggtgtattctttcccatgatcatcttgagagtgttggaaaatattgctcaaccaaattatcaggcaaagatgattgttcttcgttttttggaaaagctctgtggtgattctcaaatcctagttgatattttccttaattatgattgtgatgtccactcatcaaacatatttgagaggatggtaaatggtctactaaagacagctcaaggacctcctgctggtgtccctaccacattggtaccacctcaggacaccacaatgaaaagtgaagcaatgaaatgcttagttgctattctgaggtccatgggagattggatgaataagcagctacgaattccagatcctgcttctcctaatgtagaatcagagaagaacgacaatgatgatggcaatgagcttccgcaggcagataacaatggagatgagtctagtgaagcatctgattcacattctgagttatcgaatggaatttcagaggcagcatcattggaacaacgtcgagcttacaagatagagcttcaggagggtatctatttgtttaatcggaagccgaagaaggggattgagttccttgttaatgcaagcaaggtgggggagacaccagaggagatagctgcgttcctaaaaagtgcttctggcttgaacaagactatgattggtgattatttaggtgaaagggaagatttatcgctgaaagtcatgcatgcatatgtggactcatttgattttcaaagactggagtttgatgaagcaattagagctttcctccaaggcttcaggttgcctggagaagctcagaagattgatcggattatggaaaagtttgcagagcgttactgcaaatgtaatccaaaggccttttccagtgcagatacagcttatgttctggcttattcagtcataatgcttaacactgatgcacataacccaatggtcaaaaataagatgtcaccagaagatttcattagaaacaatcgtggtatcgatgatgggaaggacctacctgaagaatttatgagatcattgtatgaaaggatttggaaaaaggagattaagatgaaagaagatgaatttgttccacagcagcaacaatcaacaagttctaacaaaattcttgggttggataacattcttaacattgttgtacgcaagcgaggttcatctatggagacaagtgatgacctcattaagcatatgcaggagcaatttaaagaaaaggcccgcatgtctgagtctgtattttatccagccacagatgtagttgttttgaagttcatggttgaggtttgctgggctcctatgcttgcagcattcagtgttccacttgaccagagtgatgatgaaattgttgtatcccagtgccttgaaggatttcgctctgcaatccatgttactgcagccatgtcaatgaagactcaaagagatgcatttatcacttcacttgccaagtttacatcacttcactctgctgctgatattaagcagaaaaatgttgaagccattaaggcaattctattaattgcagatgaagatggaaattacttgcaagaagcatgggagcatatattgacatgtgtttctcgttttgaaaatctacatcttgttggagagggagcacctccagatgccactttctttgcgctgcagcagccggaccttgataaatcaaaacaggctaagtcatcgattcttcctgttctgaaaaagaaggctcctaatgctacttcagcttctaaaagaggctcttatgatagcgctggtgtcggtggcaaagcttctggtgtggatcaaatgaataatgaggtgacaagcctcttggagcaagttgggatggctgaaatgaaccgtgtatttgtaagaagtcaaaaactcaacagcgagggtataattgattttgtgaaggctctctgtaaggtttcaatggaggaattacgttcggcttctgatccacgagtttttagtctgacaaagatagtcgagatagcaaaatctttcaatcgcaatatttgctatggactccttgcggcagttatctatgaagttcctggagcgtgaggagctcacaaactacaatttccaaaatgaatttatgaagccttttgttgttgtaatgaggaagagccgagctgttgagatcagagaacttatcattaggtgtgtctctcaaatggtattggcccgtgttagtcatgtgaagtcagggtggaagagtatgtttatggtctttgcgacagcgtcatatgatgatcacaaaaatattgtactattggcctttgaaattatagaaaagattttgcgggaatactttccatacattactgagactgagacaacgactttcaacgattgtgtgaattgtcttatcgcgtttactaacagcaggtttaacaaggatataagtcttaatgcaattggatttcttcgattctgcgcagcaaagttggccgaaggtgatattggatcctcaaggttgaaggacaatccttcaaacagtaatccaccctcgcctcatttgactaatgatggaaagcaggaatgcacagttcttgttgacaaggaagaccatatacacttttggtttcctttactagcgggactgtctgaacttacctttgacttaagaccagaaatcaggaaaagtgctttgcaagtgttatttgatacattaagaaaccatggccatcttttctctctgcctttatgggagaaggtgtttgattcagtgcttttccccatatttgattatgtacgtcatgctattgatccatctggtaatcctccacaaggacaaagcgtggaaaatgatcctgcagaacttgatcaagatgcttggttatacgagacatgcactttggcacttcagttggttgtagatctctttgttaagttctatgatacagtcaatcctcttctaaagaaggttctgctgctcttgacaagtttcataaagcgtccccatcagagtcttgctggtataggtattgctgcatttgttcgtttgatgagcagtgctggatctatgttcgtggatgaaaaatggctagaggttgtattgtcattgaaagaagctgccactgagacacttcctgatttcacttatgtttcatctggagcctacctggaaaatgtgccaacagaaaatggagtctctgctgacaatagagaggacgaatctgaaccagtagcggatgacaatgaagaatcctctagatcaaggaatctatactttacaattggtgatgccaaatgtcgagctgctgtacaactcctgttgattcaggctgtgatggaggtatataacatgtacagaggacagttatcagcacagaacacagtaatcctcttcgaagccttgcatactgttgccgcacatgctcacaaaataaacagtgatagtgatttgcgttccaagttgcaagagttgggctcgatgacacagatgcaggacccgccattgttacgccttgagaatgagtcgtaccagctgtgcctcagtatccttcagaacatatttctggacagctctcctgatcatggaagcacagaggtggtggagagtcaccttattggcttgtgcaaggaggtccttgaggtatacttgagcacagcaagaccttctcagccttccagtggcacacagccgctaggccattggcttatccctgttggttcatcgaagcgaagggaacttgcggcaagagcacctcttgttgtctcaaccctgcaagctatcagcggactaggtgactcagctttcgagaagaaccttcgccagttctttcctcttctcgctgggctcataagctgcgagcatggttctagtgaagtacaggtggccctgagtgatatgttcagcacttgggttggcccactcgttctccagtcttgctgatgctgaacatcatgttatacatagtagtatacatcccatcgtgttcctcctttcctccattatgttatgttaatcttttagtcgctgggagttcatattgttgtgctgaactgatcatgcagatcaatttttccttgacgttattttcttgttcgtatcgggaggagtgtatgtcactatagagaactgaattatgtacggtagtttagctaaaattgtgcccattctgttcctaatgtgctgatttctagatttttaggcatgttttgcatgcttttgctcagtagcgtttctcctttctggaattctggaatgtggtagggttggattataattcttgcgagttgggtgtgttaggctatcttcttttatcttaccttctattttaaactctattatgtaattagtgcaatttatagtataaaacattgttttgcacgtccatttacactggccgttggagatggccatagcggatatataaatttccatatattccaaacaataggcatatatgagtgttttgatcaag

SEQ ID NO: 1097 - DNA, 5970 bp, Zea Mays
ctcaaacccccgccccgcccagatccagatccacgcggcgcggcgcgaccgcggctaccggatcccgccgcggaataatggcctccgcggttgcggcgccgccgccaaccccgccggagtccgacccgcgcctcgtcgagatcttctcccccttcctcgagaagctcataaaaaatgcctcgtggcgcaacaaggcgcactccaagctctcgcacaccgccaagtccatcctcgaccgcctccagaagcccccgccgccgcccgcagccgaggcgcaggcgccgtccacgccgacctcctccccctcgacgccgacctcctcttccgcacagcctggtccgttgcgcagcctgtcgctcgcggactcggagctgctcctcgcccctgtgatctcggcactcggctcgggcagcgccaagctcgccgaggccgcgctggagctccttcacaggctgatcgcacactcctacatccatggcgaggccgacccatctgctgatccctcagcacagctcgtcgcctcactcctggacgccgcctgcaatgcgcttggccttgatgacgagcacattgagctcctcctcctcaagacactcctctcggcggtcacctctacgtctgtacgcctccacggcgattgccttctacgtgccgtgcgcgcatgttatgatatgtacctcgggagccgtagtgccgtcaatcaagccactgccaaggcttcgcttgtgcagatgctggtgattgtgttccgccgaatggaagctgactcctcgaccgtgcctgtacaacccatagtcgtggctgatgtgattgagctacctgatgcaatttcgggctcctcgcccactgctgaccccaacgttgtacagggattcatttcgaagatcattggtgacttcgatggtgcactcacacctctggctcggacaacttcatcagcaggggcaggacccaccgttgcccatgatggtgcatttgagacaacggcagcggcagaggaaggggcaaacccagcggatttgcttgattcaacagataaggacatgcttgatgccaagtactgggagatcagcatgtacaaaacagctattgagggtcgtaaagatgagcttggtgtcgagggggcagtggttggcaccttggacgatgatgctgatgtgagaattgggaacaagttacggagggatgctttcttagttttccgggctttgtgtaagctttccatgaagacaccacccaaggatgcaccagcagatcccatagtaatgcggggaaagatccttgctcttgagcttctcaagatcttgcttgaaaatgctggggctgtgttccggaccagtgagaggtttctcggtgctatcaagcagtatctatgcctgtcacttttaaagaactgtgcctcatcccatatgattgtttttcagctatcttgttctatttttattagcttagtggcaagattcagaccaggattgaaggcagagattggtgtattctttcccatgatcatcttgagagtgttggaaaatattgctcaaccaaattatcaggcaaagatgattgttcttcgttttttggaaaagctctgtggtgattctcaaatcctagttgatattttccttaattatgattgtgatgtccactcatcaaacatatttgagaggatggtaaatggtctactaaagacagctcaaggacctcctgctggtgtccctaccacattggtaccacctcaggacaccacaatgaaaagtgaagcaatgaaatgcttagttgctattctgaggtccatgggagattggatgaataagcagctacgaattccagatcctgcttctcctaatgtagaatcagagaagaacgacaatgatgatggcaatgagcttccgcaggcagataacaatggagatgagtctagtgaagcatctgattcacattctgagttatcgaatggaatttcagaggcagcatcattggaacaacgtcgagcttacaagatagagcttcagccgaagaaggggattgagttccttgttaatgcaagcaaggtgggggagacaccagaggagatagctgcgttcctaaaaagtgcttctggcttgaacaagactatgattggtgattatttaggtgaaagggaagatttatcgctgaaagtcatgcatgcatatgtggactcatttgattttcaaagactggagtttgatgaagcaattagagctttcctccaaggcttcaggttgcctggagaagctcagaagattgatcggattatggaaaagtttgcagagcgttactgcaaatgtaatccaaaggccttttccagtgcagatacagcttatgttctggcttattcagtcataatgcttaacactgatgcacataacccaatggtcaaaaataagatgtcaccagaagatttcattagaaacaatcgtggtatcgatgatgggaaggacctacctgaagaatttatgagatcattgtatgaaaggatttggaaaaaggagattaagatgaaagaagatgaatttgttccacagcagcaacaatcaacaagttctaacaaaattcttgggttggataacattcttaacattgttgtacgcaagcgaggttcatctatggagacaagtgatgacctcattaagcatatgcaggagcaatttaaagaaaaggcccgcatgtctgagtctgtattttatccagccacagatgtagttgttttgaagttcatggttgaggtttgctgggctcctatgcttgcagcattcagtgttccacttgaccagagtgatgatgaaattgttgtatcccagtgccttgaaggatttcgctctgcaatccatgttactgcagccatgtcaatgaagactcaaagagatgcatttatcacttcacttgccaagtttacatcacttcactctgctgctgatattaagcagaaaaatgttgaagccattaaggcaattctattaattgcagatgaagatggaaattacttgcaagaagcatgggagcatatattgacatgtgtttctcgttttgaaaatctacatcttgttggagagggagcacctccagatgccactttctttgcgctgcagcagccggaccttgataaatcaaaacaggctaagtcatcgattcttcctgttctgaaaaagaaggctcctaatgctacttcagcttctaaaagaggctcttatgatagcgctggtgtcggtggcaaagcttctggtgtggatcaaatgaataatgaggtgacaagcctcttggagcaagttgggatggctgaaatgaaccgtgtatttgtaagaagtcaaaaactcaacagcgagggtataattgattttgtgaaggctctctgtaaggtttcaatggaggaattacgttcggcttctgatccacgagtttttagtctgacaaagatagtcgagatagcgcattacaatatgaaccgcatcagacttgtttggtcaagtatatggcatgtcttgtctgatttttttgtcaccattggctgctcagaaaatctttcaatcgcaatatttgctatggactccttgcggcagttatctatgaagttcctggagcgtgaggagctcacaaactacaatttccaaaatgaatttatgaagccttttgttgttgtaatgaggaagagccgagctgttgagatcagagaacttatcattaggtgtgtctctcaaatggtattggcccgtgttagtcatgtgaagtcagggtggaagagtatgtttatggtctttgcgacagcgtcatatgatgatcacaaaaatattgtactattggcctttgaaattatagaaaagattttgcgggaatactttccatacattactgagactgagacaacgactttcaacgattgtgtgaattgtcttatcgcgtttactaacagcaggtttaacaaggatataagtcttaatgcaattggatttcttcgattctgcgcagcaaagttggccgaaggtgatattggatcctcaaggttgaaggacaatccttcaaacagtaatccaccctcgcctcatttgactaatgatggaaagcaggaatgcacagttcttgttgacaaggaagaccatatacacttttggtttcctttactagcgggactgtctgaacttacctttgacttaagaccagaaatcaggaaaagtgctttgcaagtgttatttgatacattaagaaaccatggccatcttttctctctgcctttatgggagaaggtgtttgattcagtgcttttccccatatttgattatgtacgtcatgctattgatccatctggtaatcctccacaaggacaaagcgtggaaaatgatcctgcagaacttgatcaagatgcttggttatacgagacatgcactttggcacttcagttggttgtagatctctttgttaagttctatgatacagtcaatcctcttctaaagaaggttctgctgctcttgacaagtttcataaagcgtccccatcagagtcttgctggtataggtattgctgcatttgttcgtttgatgagcagtgctggatctatgttcgtggatgaaaaatggctagaggttgtattgtcattgaaagaagctgccactgagacacttcctgatttcacttatgtttcatctggagcctacctggaaaatgtgccaacagaaaatggagtctctgctgacaatagagaggacgaatctgaaccagtagcggatgacaatgaagaatcctctagatcaaggaatctatactttacaattggtgatgccaaatgtcgagctgctgtacaactcctgttgattcaggctgtgatggaggtatataacatgtacagaggacagttatcagcacagaacacagtaatcctcttcgaagccttgcatactgttgccgcacatgctcacaaaataaacagtgatagtgatttgcgttccaagttgcaagagttgggctcgatgacacagatgcaggacccgccattgttacgccttgagaatgagtcgtaccagctgtgcctcagtatccttcagaacatatttctggacagctctcctgatcatggaagcacagaggtggtggagagtcaccttattggcttgtgcaaggaggtccttgaggtatacttgagcacagcaagaccttctcagccttccagtggcacacagccgctaggccattggcttatccctgttggttcatcgaagcgaagggaacttgcggcaagagcacctcttgttgtctcaaccctgcaagctatcagcggactaggtgactcagctttcgagaagaaccttcgccagttctttcctcttctcgctgggctcataagctgcgagcatggttctagtgaagtacaggtggccctgagtgatatgttcagcacttgggttggcccactcgttctccagtcttgctgatgctgaacatcatgttatacatagtagtatacatcccatcgtgttcctcctttcctccattatgttatgttaatcttttagtcgctgggagttcatattgttgtgctgaactgatcatgcagatcaatttttccttgacgttattttcttgttcgtatcgggaggagtgtatgtcactatagagaactgaattatgtacggtagtttagctaaaattgtgcccattctgttcctaatgtgctgatttctagatttttaggcatgttttgcatgcttttgctcagtagcgtttctcctttctggaattctggaatgtggtagggttggattataattcttgcgagttgggtgtgttaggctatcttcttttatcttaccttctattttaaactctattatgtaattagtgcaatttatagtataaaacattgttttgcacgtccatttacactggccgttggagatggccatagcggatatataaatttccatatattccaaacaataggcatatatgagtgttttgatcaag

SEQ ID NO: 1098 - DNA, 5822 bp, Zea Mays
gcccagatccagatccacgcggcgcggcgcgaccgcggctaccggatcccgccgcggaataatggcctccgcggttgcggcgccgccgccaaccccgccggagtccgacccgcgcctcgtcgagatcttctcccccttcctcgagaagctcataaaaaatgcctcgtggcgcaacaaggcgcactccaagctctcgcacaccgccaagtccatcctcgaccgcctccagaagcccccgccgccgcccgcagccgaggcgcaggcgccgtccacgccgacctcctccccctcgacgccgacctcctcttccgcacagcctggtccgttgcgcagcctgtcgctcgcggactcggagctgctcctcgcccctgtgatctcggcactcggctcgggcagcgccaagctcgccgaggccgcgctggagctccttcacaggctgatcgcacactcctacatccatggcgaggccgacccatctgctgatccctcagcacagctcgtcgcctcactcctggacgccgcctgcaatgcgcttggccttgatgacgagcacattgagctcctcctcctcaagacactcctctcggcggtcacctctacgtctgtacgcctccacggcgattgccttctacgtgccgtgcgcgcatgttatgatatgtacctcgggagccgtagtgccgtcaatcaagccactgccaaggcttcgcttgtgcagatgctggtgattgtgttccgccgaatggaagctgactcctcgaccgtgcctgtacaacccatagtcgtggctgatgtgattgagctacctgatgcaatttcgggctcctcgcccactgctgaccccaacgttgtacagggattcatttcgaagatcattggtgacttcgatggtgcactcacacctctggctcggacaacttcatcagcaggggcaggacccaccgttgcccatgatggtgcatttgagacaacggcagcggcagaggaaggggcaaacccagcggatttgcttgattcaacagataaggacatgcttgatgccaagtactgggagatcagcatgtacaaaacagctattgagggtcgtaaagatgagcttggtgtcgagggggcagtggttggcaccttggacgatgatgctgatgtgagaattgggaacaagttacggagggatgctttcttagttttccgggctttgtgtaagctttccatgaagacaccacccaaggatgcaccagcagatcccatagtaatgcggggaaagatccttgctcttgagcttctcaagatcttgcttgaaaatgctggggctgtgttccggaccagtgagaggtttctcggtgctatcaagcagtatctatgcctgtcacttttaaagaactgtgcctcatcccatatgattgtttttcagctatcttgttctatttttattagcttagtggcaagattcagaccaggattgaaggcagagattggtgtattctttcccatgatcatcttgagagtgttggaaaatattgctcaaccaaattatcaggcaaagatgattgttcttcgttttttggaaaagctctgtggatggtaaatggtctactaaagacagctcaaggacctcctgctggtgtccctaccacattggtaccacctcaggacaccacaatgaaaagtgaagcaatgaaatgcttagttgctattctgaggtccatgggagattggatgaataagcagctacgaattccagatcctgcttctcctaatgtagaatcagagaagaacgacaatgatgatggcaatgagcttccgcaggcagataacaatggagatgagtctagtgaagcatctgattcacattctgagttatcgaatggaatttcagaggcagcatcattggaacaacgtcgagcttacaagatagagcttcaggagggtatctatttgtttaatcggaagccgaagaaggggattgagttccttgttaatgcaagcaaggtgggggagacaccagaggagatagctgcgttcctaaaaagtgcttctggcttgaacaagactatgattggtgattatttaggtgaaagggaagatttatcgctgaaagtcatgcatgcatatgtggactcatttgattttcaaagactggagtttgatgaagcaattagagctttcctccaaggcttcaggttgcctggagaagctcagaagattgatcggattatggaaaagtttgcagagcgttactgcaaatgtaatccaaaggccttttccagtgcagatacagcttatgttctggcttattcagtcataatgcttaacactgatgcacataacccaatggtcaaaaataagatgtcaccagaagatttcattagaaacaatcgtggtatcgatgatgggaaggacctacctgaagaatttatgagatcattgtatgaaaggatttggaaaaaggagattaagatgaaagaagatgaatttgttccacagcagcaacaatcaacaagttctaacaaaattcttgggttggataacattcttaacattgttgtacgcaagcgaggttcatctatggagacaagtgatgacctcattaagcatatgcaggagcaatttaaagaaaaggcccgcatgtctgagtctgtattttatccagccacagatgtagttgttttgaagttcatggttgaggtttgctgggctcctatgcttgcagcattcagtgttccacttgaccagagtgatgatgaaattgttgtatcccagtgccttgaaggatttcgctctgcaatccatgttactgcagccatgtcaatgaagactcaaagagatgcatttatcacttcacttgccaagtttacatcacttcactctgctgctgatattaagcagaaaaatgttgaagccattaaggcaattctattaattgcagatgaagatggaaattacttgcaagaagcatgggagcatatattgacatgtgtttctcgttttgaaaatctacatcttgttggagagggagcacctccagatgccactttctttgcgctgcagcagccggaccttgataaatcaaaacaggctaagtcatcgattcttcctgttctgaaaaagaaggctcctaatgctacttcagcttctaaaagaggctcttatgatagcgctggtgtcggtggcaaagcttctggtgtggatcaaatgaataatgaggtgacaagcctcttggagcaagttgggatggctgaaatgaaccgtgtatttgtaagaagtcaaaaactcaacagcgagggtataattgattttgtgaaggctctctgtaaggtttcaatggaggaattacgttcggcttctgatccacgagtttttagtctgacaaagatagtcgagatagcaaaatctttcaatcgcaatatttgctatggactccttgcggcagttatctatgaagttcctggagcgtgaggagctcacaaactacaatttccaaaatgaatttatgaagccttttgttgttgtaatgaggaagagccgagctgttgagatcagagaacttatcattaggtgtgtctctcaaatggtattggcccgtgttagtcatgtgaagtcagggtggaagagtatgtttatggtctttgcgacagcgtcatatgatgatcacaaaaatattgtactattggcctttgaaattatagaaaagattttgcgggaatactttccatacattactgagactgagacaacgactttcaacgattgtgtgaattgtcttatcgcgtttactaacagcaggtttaacaaggatataagtcttaatgcaattggatttcttcgattctgcgcagcaaagttggccgaaggtgatattggatcctcaaggttgaaggacaatccttcaaacagtaatccaccctcgcctcatttgactaatgatggaaagcaggaatgcacagttcttgttgacaaggaagaccatatacacttttggtttcctttactagcgggactgtctgaacttacctttgacttaagaccagaaatcaggaaaagtgctttgcaagtgttatttgatacattaagaaaccatggccatcttttctctctgcctttatgggagaaggtgtttgattcagtgcttttccccatatttgattatgtacgtcatgctattgatccatctggtaatcctccacaaggacaaagcgtggaaaatgatcctgcagaacttgatcaagatgcttggttatacgagacatgcactttggcacttcagttggttgtagatctctttgttaagttctatgatacagtcaatcctcttctaaagaaggttctgctgctcttgacaagtttcataaagcgtccccatcagagtcttgctggtataggtattgctgcatttgttcgtttgatgagcagtgctggatctatgttcgtggatgaaaaatggctagaggttgtattgtcattgaaagaagctgccactgagacacttcctgatttcacttatgtttcatctggagcctacctggaaaatgtgccaacagaaaatggagtctctgctgacaatagagaggacgaatctgaaccagtagcggatgacaatgaagaatcctctagatcaaggaatctatactttacaattggtgatgccaaatgtcgagctgctgtacaactcctgttgattcaggctgtgatggaggtatataacatgtacagaggacagttatcagcacagaacacagtaatcctcttcgaagccttgcatactgttgccgcacatgctcacaaaataaacagtgatagtgatttgcgttccaagttgcaagagttgggctcgatgacacagatgcaggacccgccattgttacgccttgagaatgagtcgtaccagctgtgcctcagtatccttcagaacatatttctggacagctctcctgatcatggaagcacagaggtggtggagagtcaccttattggcttgtgcaaggaggtccttgaggtatacttgagcacagcaagaccttctcagccttccagtggcacacagccgctaggccattggcttatccctgttggttcatcgaagcgaagggaacttgcggcaagagcacctcttgttgtctcaaccctgcaagctatcagcggactaggtgactcagctttcgagaagaaccttcgccagttctttcctcttctcgctgggctcataagctgcgagcatggttctagtgaagtacaggtggccctgagtgatatgttcagcacttgggttggcccactcgttctccagtcttgctgatgctgaacatcatgttatacatagtagtatacatcccatcgtgttcctcctttcctccattatgttatgttaatcttttagtcgctgggagttcatattgttgtgctgaactgatcatgcagatcaatttttccttgacgttattttcttgttcgtatcgggaggagtgtatgtcactatagagaactgaattatgtacggtagtttagctaaaattgtgcccattctgttcctaatgtgctgatttctagatttttaggcatgttttgcatgcttttgctcagtagcgtttctcctttctggaattctggaatgtggtagggttggattataattcttgcgagttgggtgtgttaggctatcttcttttatcttaccttctattttaaactctattatgtaattagtgcaatttatagtataaaacattgttttgcacgtccatttacactggccgttggagatggccatagcggatatataaatttccatatattccaaacaataggcatatatgagtgttttgatcaag

SEQ ID NO: 1099 - DNA, 2224 bp, Zea Mays
atgccctcgcggcagcctacgccgtcgccgggcccggccgccgccgtcgcggtctcggacccccgatcccgcgggccccgccaccgccgggccccgcccgccggccccgtcgccgcgtgggcgtcggccgcggcgctggtcttggtggctgccgtcgcgctgctgctgctgctgctgtggcggaggcgccgccgccggaagctcaccgtggcggccggcgcgcagcccgccgccgacctgcggaggttgtcgtaccagcagctgcgccgcgccacgggcggcttcgcggcggggagcaagctggggcagggcggcttcggcccggtcttccgcggcgcgctgcctcggtcggggcagcccgtcgccgtcaaggtcatggacgccgcgggctccctccagggcgagcgcgagttccacaacgagctctccctggcctcccacctcctcggctgcgccgccacggcccacggcggaggaggagggggagggccccccgcacccgacccgccccccatcctgctcccgttcgcctactccctctccacgcagccacgccgctgccggatgatgcttgtgtacgacctcatgcccaacggctcgctgcaggacgcgctgctcgggaagaggtgccccgacctggtgtccggctggccgcgccgcctctccgtcgcccgagacgtcgccaccgcgctccactaccttcattccgttgtgcagccgcccgtcatccacggggacgtcaagcccagcaatgtgttgctggatgcggatctccgcgcccgcctctcagatttcggactcgcacggatcaggtctgaagaggaggatgagttggggagcggtgccattggggccgacgcagacggtaacgccaatcccagcggtggatgtgacgaggatatgtcggtggccggcgagagcaccactgctgtcgtggttaatggggaagacaatgctgccaagtccccggaggatgatgaggcactcaccacggcgtctcctgctgcagaggctgtgtccacttccggatgtgacaagactagtgttggtagtggatgtaatgcccgaagctgcaatgggggaggtgcaggaggatcaggaactgggagtgactggtggtggcgtcaggacaatggtggtggtggtagtggcggcggcggcagtggcggcgttaaggactatgtgatggaatggattagatcggagatcaagaaggagcgaccgaagaatgactggattgcagggccatctgcagtaacccctgttgctccaacagagaggaagaagccaaagaggagggcacgggagtggtggcgcgaggagtatgcagaggagctcacgaagaagcaaaaacgaagggcacttgccaagtcaaaaagtgatgctggtgcgatgtctggtttgcaatggtgggagagggattgtgattttgaggagaagggccattcaaggtggacgatgatgaaaagctggagccggaggagcagcaatggcaatggcaatagcaattccagcatcagttggtgggtggacggtgtgagaaggagcagcagggattgggccagcggggaatttgtgcctaagagtggtggagcagtgagcagcacaccgagcatgcgtggcacagtctgctatgtggctcctgagtatggtggaggagggcctctatcagaaaaatgcgacatttacagctttggtgtgttgttgttggtccttatatctggacgacgcccactccaaatgacaacctcaccaatgtcagagtttgagaaagcgagcctcatttcgtgggcaaggcatcttgctcaagttggccgcttgcttgatcttgtagaccctgcactgcaggatgttgaccgagaccaagcgctgctatgcattactgttgcactcctttgcattcagaggtcaccagctcgccgcccatcaagtgcagaggtgcttgatatgcttgctggtgagggtgagccaccgcctcttccgatagagttctcaccatcacctcctggcggattccccttcaagtcacgaaggaaaggccgtttgtgctgctcttagggcaactacagttgagatgatgaacagaagaggaaaaataccttgatacaagcagcaggtttctgatgtgaatgttttcctgtttggtcggccaatgttaactctggcacggtacttgaattgtaaaatgtttgtgatgattaccctgttgcaatattatcataat

SEQ ID NO: 1100 - DNA, 192 bp, Zea Mays
atggatggctttcatcttcaagggtatccgatgtggatcaaaagcagtctgaaagaactgccgcagaaactcgcttcaaggatgaggaaagcctggagatgtcggattcagtatgtccagctgatacaaacaggcggattccaacggggagtttgcacctatccagatttgacttctttgatgtcacaatga

SEQ ID NO: 1101 - DNA, 505 bp, Zea Mays
tgaggcggcggcgcctggtggtggtggccgtggccggagctccgacggcggtgaccagcggcagcgcctccaccgttgctacccgcgttgcccatcctcttgcgtagatcgatgcggatagcgcgggaaaggcctcagagttggatcttgaggcctgagtgcaccggaattgcaaacagccttttctgctcttgagaaaactcgcacaaataaaccaaaagaaatcggggggtggggtgggggtgggggtgggaggaggctcgcgaagaactccggctcccaagatcacaagctcaaaggggagcgggatgcaattggatcctcgcgcaagcctagatcgacgcacaaacctgggaatggttcgagcgattcgattggagttgaggggaggaaaggaggagacgataaggaagtggtcacgcttcttgcttttccgcctgtattttgggcgttataatggagggttgcgcggaaagcaccaccactgtcctccgttgcttttccg

SEQ ID NO: 1102 - DNA, 456 bp, Zea Mays
gcgaagacagagaaggaagtgctcggtcgcgtcgagacaagaagagaaagggaaacagacggcgtagagttaccgtaagggtataatggggacaaattttcgcgggcccacttgacaggtgctccaaatgtatctgtgaccccttttggcgagcgacagacttgagcgacccgttgatgcagtgtattttgcagagcggcaaactagagtgacctattttgccaaattcctccgcccaggcacgcacacacatcctctccgctccgcccaccaaagcaaaagcaaaccagcccgagcctcttccccggcgacgtccccacgcccactgctccgcccagatcgacgtccccttagccgctacgctgccccacgccacctcacccgctcccccgtaccgtcgccctctcggaaccctcgccattccgcgccgcgagaggtcttcctagccgctgcggg

SEQ ID NO: 1103 - DNA, 2645 bp, Zea Mays
ggtccctttaggccgacgtcagcgtcatggcccgcctcaccacgactcgtttatccacttgggctgccgcgccacttgactcgagcgtgacggctacacgtatgacgtagcttccgcgcctccctccgcctccttggcatccacggccgcgcgcgcggttctccgccgtccgtttcgtggctccggagatccggcctcatccgccccgccccgcccgcctcccggcctcgtcgtctcctcgtccccccactcccgtctcgtccgctttctttaatcaatcctccgcgccccacaaccccaagcaactcccactaatcgtcccctttccttccctttcccggcgggggcaacaatggtcggtgacggcgatcggtttgctgcatcggcggttcctgcggcgccgtgcaggtttctcggtcacctgtgagctcgatttgaccgcccccacctggcgtcgtgctggttccgttctgggtattcttggcgctggtctgggctctggggcgatcgggacacacctccgctctgcttatcgagggtcgaggcacccgacgatcttctccggaaaagcgccctactcttcataccatcaggtagggccatatctgaacaacttctgagtacagtgagtgtcctgataaacagatatgtaactatgatgctgtttttgtgatttggacttgcattatttttctgaaagttcctgaaagatatgtttagaaaatgtgcatagttctgtgacggtggatggtggattggtggtcatggaagggacagtaatcagaatagctagtgagtcaaaacgaggcaatgagcaaacagactctttgacagaggaatggagtttgagtctgaagatgctgcaagggatttctacagcacatatgcaagaagtgcaggttttcggattcggatcagcagattgtgtgttctaaggaaggcttccgtgaagttcggaccaagaaagtgttgacagatgaaggaaaaacaaagcgcccaagaatgataactagagttggttgcaaagctatgattgtagtgaaaaagatgaactctggaaagtggatggtttcgaaatttgagaaggagcataatcattcgctgtcatattctaaaatggtccctagtacctcaaacattacttctggagaaattgtcgatttagctgcaaagggtgcacatcctagtgaagtaaaaaatgaaggatacagtgcaggaacccaatgtaatcctgcagattccctcactatactttataacaacttatgccaggaggccataaaatttgcaaaagaaggttcagtcacagaagaaatttaccatgtggcagtttctgccttaaaagaggctgcagaaaaggttgctgaagtcaaaaggagtcgtccaacattgtcacattgtggtttcgttagagaaagcaaacatgatgtcttacaggagaaaagtatgagtgctttgcaatgttcaaatcaggttgaactgacaagaacatctcctgggtccaggcctcttcaagattctgcatcaaatcttctgctgataccaaccgacattttgactgattcaaggttatatagcggtgtcgatactgctcctctaacaggaggtttccccacaaatgagagtgaaagtacacatgcatcagaaagttcttttatgcattttaagaacacaaagaaaacctcttcagaaaaatctcagaacacttgttttaatcaactcatccatggaaaggagcaaggtatccatggatcttctaaagataccatggttgctattcctgcgatacctcttgcactgtgcatgcctgtgacgcagagcttacctggatcttctacagaaggaccatatagattgttggctgcacctattgaagcagttccaatttcatactgccctgcagaacccataagacagacacaaaaaggtatttgtgctttaggtccatttggaggtgttctgtctgaactgaagaaccaaggaacagtccccaaatctatagttcatgctacagctcttgcttgtggtgctcgtgctgttcctcttgaagatgcagcttcgcttattagtgccattgaatccaaaatcagatctggaggggccataatagcgaaacttccttcaaacaacctagcacctctagttcctccagccattgctatgtcatcttctagtgaagatgacgaggagcatgaccacagtgagccctcgcaatgatcgatgtcgatcgcaacgttaatcatcagagctccaacgcgatgaagcttcagagggagctatcggagttcgaaactgaagctggcaactgacctggtctgaagacgaaagaaaatgatcatactgattgctaacatacgcgaagtgaaggactgaagttgttctaaagatcaaagcttccctgaaaggtggcagatctattctatgatttgagacattttttaaaagattggattaggattgtagtcacttgtttctgttgagtttatattgtaatcagattaactcaagttaatacctccagtggagaattgtagaaaggagtaaccatgctatgtacatgtcttctgcataaaagaaaggcgatagagtttaaaatccagctgtgctaaacatgatgttcataacctgaggcacccgtgtaaaac

SEQ ID NO: 1104 - DNA, 2836 bp, Zea Mays
ctcgtttatccacttgggctgccgcgccacttgactcgagcgtgacggctacacgtatgacgtagcttccgcgcctccctccgcctccttggcatccacggccgcgcgcgcggttctccgccgtccgtttcgtggctccggagatccggcctcatccgccccgccccgcccgcctcccggcctcgtcgtctcctcgtccccccactcccgtctcgtccgctttctttaatcaatcctccgcgccccacaaccccaagcaactcccactaatcgtcccctttccttccctttcccggcgggggcaacaatggtcggtgacggcgatcggtttgctgcatcggcggttcctgcggcgccgtgcaggtttctcggtcacctgtgagctcgatttgaccgcccccacctggcgtcgtgctggttccgttctgggtattcttggcgctggtctgggctctggggcgatcgggacacacctccgctctgcttatcgagggtcgaggcacccgacgatcttctccggaaaagcgccctactcttcataccatcagttcctgaaagatatgtttagaaaatgtgcatagttctgtgacggtggatggtggattggtggtcatggaagggacagtaatcagaatagctagtgagtcaaaacgaggcaatgagcaaacagactctttgacagaggaatggagtttgagtctgaagatgctgcaagggatttctacagcacatatgcaagaagtgcaggttttcggattcggatcagcaggtactagagttggttgcaaggcaatgatattaattaaaaagtttagtcctggcaagtgggtggtaaccaaattcataaagaaccataatcatggaccagttccaccaagaaaacttgattccagactagtagaccaggactgtgatccaatggagaagccacattctattgaggtggaccctgttgaggagccatttgagggcatggaatttgaatcggaagaagctgcaaaattgttctatgtaaactatgcaaggctaaatggttttcgtgcacgtattagtagatattgtcgttcaaggcgtgataattcaattatttctcgccagattgtgtgttctaaggaaggcttccgtgaagttcggaccaagaaagtgttgacagatgaaggaaaaacaaagcgcccaagaatgataactagagttggttgcaaagctatgattgtagtgaaaaagatgaactctggaaagtggatggtttcgaaatttgagaaggagcataatcattcgctgtcatattctaaaatggtccctagtacctcaaacattacttctggagaaattgtcgatttagctgcaaagggtgcacatcctagtgaagtaaaaaatgaaggatacagtgcaggaacccaatgtaatcctgcagattccctcactatactttataacaacttatgccaggaggccataaaatttgcaaaagaaggttcagtcacagaagaaatttaccatgtggcagtttctgccttaaaagaggctgcagaaaaggttgctgaagtcaaaaggagtcgtccaacattgtcacattgtggtttcgttagagaaagcaaacatgatgtcttacaggagaaaagtatgagtgctttgcaatgttcaaatcaggttgaactgacaagaacatctcctgggtccaggcctcttcaagattctgcatcaaatcttctgctgataccaaccgacattttgactgattcaaggttatatagcggtgtcgatactgctcctctaacaggaggtttccccacaaatggtaaatatgctatgagagtgaaagtacacatgcatcagaaagttcttttatgcattttaagaacacaaagaaaacctcttcagaaaaatctcagaacacttgttttaatcaactcatccatggaaaggagcaaggtatccatggatcttctaaagataccatggttgctattcctgcgatacctcttgcactgtgcatgcctgtgacgcagagcttacctggatcttctacagaaggaccatatagattgttggctgcacctattgaagcagttccaatttcatactgccctgcagaacccataagacagacacaaaaaggtatttgtgctttaggtccatttggaggtgttctgtctgaactgaagaaccaaggaacagtccccaaatctatagttcatgctacagctcttgcttgtggtgctcgtgctgttcctcttgaagatgcagcttcgcttattagtgccattgaatccaaaatcagatctggaggggccataatagcgaaacttccttcaaacaacctagcacctctagttcctccagccattgctatgtcatcttctagtgaagatgacgaggagcatgaccacagtgagccctcgcaatgatcgatgtcgatcgcaacgttaatcatcagagctccaacgcgatgaagcttcagagggagctatcggagttcgaaactgaagctggcaactgacctggtctgaagacgaaagaaaatgatcatactgattgctaacatacgcgaagtgaaggactgaagttgttctaaagatcaaagcttccctgaaaggtggcagatctattctatgatttgagacattttttaaaagattggattaggattgtagtcacttgtttctgttgagtttatattgtaatcagattaactcaagttaatacctccagtggagaattgtagaaaggagtaaccatgctatgtacatgtcttctgcataaaagaaaggcgatagagtttaaaatccagctgtgctaaacatgatgttcataacctgaggcacccgtgtaaaac

SEQ ID NO: 1105 - DNA, 2727 bp, Zea Mays
gtagcttccgcgcctccctccgcctccttggcatccacggccgcgcgcgcggttctccgccgtccgtttcgtggctccggagatccggcctcatccgccccgccccgcccgcctcccggcctcgtcgtctcctcgtccccccactcccgtctcgtccgctttctttaatcaatcctccgcgccccacaaccccaagcaactcccactaatcgtcccctttccttccctttcccggcgggggcaacaatggtcggtgacggcgatcggtttgctgcatcggcggttcctgcggcgccgtgcaggtttctcggtcacctgtgagctcgatttgaccgcccccacctggcgtcgtgctggttccgttctgggtattcttggcgctggtctgggctctggggcgatcgggacacacctccgctctgcttatcgagggtcgaggcacccgacgatcttctccggaaaaggaatggagtttgagtctgaagatgctgcaagggatttctacagcacatatgcaagaagtgcaggttttcggattcggatcagcaggtatactcgctcccgacgtgataattcagttatttctcgtcgaattgtgtgttcaaaagagggatttcatgaaacccgtgcttgtgatggcctccatcctgaacaaaaacaacaagaacgggcaggtactagagttggttgcaaggcaatgatattaattaaaaagtttagtcctggcaagtgggtggtaaccaaattcataaagaaccataatcatggaccagttccaccaagaaaacttgattccagactagtagaccaggactgtgatccaatggagaagccacattctattgaggtggaccctgttgaggagccatttgagggcatggaatttgaatcggaagaagctgcaaaattgttctatgtaaactatgcaaggctaaatggttttcgtgcacgtattagtagatattgtcgttcaaggcgtgataattcaattatttctcgccagattgtgtgttctaaggaaggcttccgtgaagttcggaccaagaaagtgttgacagatgaaggaaaaacaaagcgcccaagaatgataactagagttggttgcaaagctatgattgtagtgaaaaagatgaactctggaaagtggatggtttcgaaatttgagaaggagcataatcattcgctgtcatattctaaaatggtccctagtacctcaaacattacttctggagaaattgtcgatttagctgcaaagggtgcacatcctagtgaagtaaaaaatgaaggatacagtgcaggaacccaatgtaatcctgcagattccctcactatactttataacaacttatgccaggaggccataaaatttgcaaaagaaggttcagtcacagaagaaatttaccatgtggcagtttctgccttaaaagaggctgcagaaaaggttgctgaagtcaaaaggagtcgtccaacattgtcacattgtggtttcgttagagaaagcaaacatgatgtcttacaggagaaaagtatgagtgctttgcaatgttcaaatcaggttgaactgacaagaacatctcctgggtccaggcctcttcaagattctgcatcaaatcttctgctgataccaaccgacattttgactgattcaaggttatatagcggtgtcgatactgctcctctaacaggaggtttccccacaaatgagagtgaaagtacacatgcatcagaaagttcttttatgcattttaagaacacaaagaaaacctcttcagaaaaatctcagaacacttgttttaatcaactcatccatggaaaggagcaaggtatccatggatcttctaaagataccatggttgctattcctgcgatacctcttgcactgtgcatgcctgtgacgcagagcttacctggatcttctacagaaggaccatatagattgttggctgcacctattgaagcagttccaatttcatactgccctgcagaacccataagacagacacaaaaaggtatttgtgctttaggtccatttggaggtgttctgtctgaactgaagaaccaaggaacagtccccaaatctatagttcatgctacagctcttgcttgtggtgctcgtgctgttcctcttgaagatgcagcttcgcttattagtgccattgaatccaaaatcagatctggaggggccataatagcgaaacttccttcaaacaacctagcacctctagttcctccagccattgctatgtcatcttctagtgaagatgacgaggagcatgaccacagtgagccctcgcaatgatcgatgtcgatcgcaacgttaatcatcagagctccaacgcgatgaagcttcagagggagctatcggagttcgaaactgaagctggcaactgacctggtctgaagacgaaagaaaatgatcatactgattgctaacatacgcgaagtgaaggactgaagttgttctaaagatcaaagcttccctgaaaggtggcagatctattctatgatttgagacattttttaaaagattggattaggattgtagtcacttgtttctgttgagtttatattgtaatcagattaactcaagttaatacctccagtggagaattgtagaaaggagtaaccatgctatgtacatgtcttctgcataaaagaaaggcgatagagtttaaaatccagctgtgctaaacatgatgttcataacctgaggcacccgtgtaaaac

SEQ ID NO: 1106 - DNA, 2730 bp, Zea Mays
catccacggccgcgcgcgcggttctccgccgtccgtttcgtggctccggagatccggcctcatccgccccgccccgcccgcctcccggcctcgtcgtctcctcgtccccccactcccgtctcgtccgctttctttaatcaatcctccgcgccccacaaccccaagcaactcccactaatcgtcccctttccttccctttcccggcgggggcaacaatggtcggtgacggcgatcggtttgctgcatcggcggttcctgcggcgccgtgcaggtttctcggtcacctgtgagctcgatttgaccgcccccacctggcgtcgtgctggttccgttctgggtattcttggcgctggtctgggctctggggcgatcgggacacacctccgctctgcttatcgagggtcgaggcacccgacgatcttctccggaaaagcgccctactcttcataccatcagttcctgaaagatatgtttagaaaatgtgcatagttctgtgacggtggatggtggattggtggtcatggaagggacagtaatcagaatagctagtgagtcaaaacgaggcaatgagcaaacagactctttgacagaggaatggagtttgagtctgaagatgctgcaagggatttctacagcacatatgcaagaagtgcaggttttcggattcggatcagcaggtactagagttggttgcaaggcaatgatattaattaaaaagtttagtcctggcaagtgggtggtaaccaaattcataaagaaccataatcatggaccagttccaccaagaaaacttgattccagactagtagaccaggactgtgatccaatggagaagccacattctattgaggtggaccctgttgaggagccatttgagggcatggaatttgaatcggaagaagctgcaaaattgttctatgtaaactatgcaaggctaaatggttttcgtgcacgtattagtagatattgtcgttcaaggcgtgataattcaattatttctcgccagattgtgtgttctaaggaaggcttccgtgaagttcggaccaagaaagtgttgacagatgaaggaaaaacaaagcgcccaagaatgataactagagttggttgcaaagctatgattgtagtgaaaaagatgaactctggaaagtggatggtttcgaaatttgagaaggagcataatcattcgctgtcatattctaaaatggtccctagtacctcaaacattacttctggagaaattgtcgatttagctgcaaagggtgcacatcctagtgaagtaaaaaatgaaggatacagtgcaggaacccaatgtaatcctgcagattccctcactatactttataacaacttatgccaggaggccataaaatttgcaaaagaaggttcagtcacagaagaaatttaccatgtggcagtttctgccttaaaagaggctgcagaaaaggttgctgaagtcaaaaggagtcgtccaacattgtcacattgtggtttcgttagagaaagcaaacatgatgtcttacaggagaaaagtatgagtgctttgcaatgttcaaatcaggttgaactgacaagaacatctcctgggtccaggcctcttcaagattctgcatcaaatcttctgctgataccaaccgacattttgactgattcaaggttatatagcggtgtcgatactgctcctctaacaggaggtttccccacaaatgagagtgaaagtacacatgcatcagaaagttcttttatgcattttaagaacacaaagaaaacctcttcagaaaaatctcagaacacttgttttaatcaactcatccatggaaaggagcaaggtatccatggatcttctaaagataccatggttgctattcctgcgatacctcttgcactgtgcatgcctgtgacgcagagcttacctggatcttctacagaaggaccatatagattgttggctgcacctattgaagcagttccaatttcatactgccctgcagaacccataagacagacacaaaaaggtatttgtgctttaggtccatttggaggtgttctgtctgaactgaagaaccaaggaacagtccccaaatctatagttcatgctacagctcttgcttgtggtgctcgtgctgttcctcttgaagatgcagcttcgcttattagtgccattgaatccaaaatcagatctggaggggccataatagcgaaacttccttcaaacaacctagcacctctagttcctccagccattgctatgtcatcttctagtgaagatgacgaggagcatgaccacagtgagccctcgcaatgatcgatgtcgatcgcaacgttaatcatcagagctccaacgcgatgaagcttcagagggagctatcggagttcgaaactgaagctggcaactgacctggtctgaagacgaaagaaaatgatcatactgattgctaacatacgcgaagtgaaggactgaagttgttctaaagatcaaagcttccctgaaaggtggcagatctattctatgatttgagacattttttaaaagattggattaggattgtagtcacttgtttctgttgagtttatattgtaatcagattaactcaagttaatacctccagtggagaattgtagaaaggagtaaccatgctatgtacatgtcttctgcataaaagaaaggcgatagagtttaaaatccagctgtgctaaacatgatgttcataacctgaggcacccgtgtaaaac

SEQ ID NO: 1107 - DNA, 2801 bp, Zea Mays
ccgcgcgcgcggttctccgccgtccgtttcgtggctccggagatccggcctcatccgccccgccccgcccgcctcccggcctcgtcgtctcctcgtccccccactcccgtctcgtccgctttctttaatcaatcctccgcgccccacaaccccaagcaactcccactaatcgtcccctttccttccctttcccggcgggggcaacaatggtcggtgacggcgatcggtttgctgcatcggcggttcctgcggcgccgtgcaggtttctcggtcacctgtgagctcgatttgaccgcccccacctggcgtcgtgctggttccgttctgggtattcttggcgctggtctgggctctggggcgatcgggacacacctccgctctgcttatcgagggtcgaggcacccgacgatcttctccggaaaagcgccctactcttcataccatcagttcctgaaagatatgtttagaaaatgtgcatagttctgtgacggtggatggtggattggtggtcatggaagggacagtaatcagaatagctagtgagtcaaaacgaggcaatgagcaaacagactctttgacagaggtgcctagagctattgggactttagtaacacataatcgtgaagtagaaaacttaattgtacttgaagatgacacggaattaacaccttatgaaggaatggagtttgagtctgaagatgctgcaagggatttctacagcacatatgcaagaagtgcaggttttcggattcggatcagcaggtatactcgctcccgacgtgataattcagttatttctcgtcgaattgtgtgttcaaaagagggatttcatgaaacccgtgcttgtgatggcctccatcctgaacaaaaacaacaagaacgggcaggtactagagttggttgcaaggcaatgatattaattaaaaagtttagtcctggcaagtgggtggtaaccaaattcataaagaaccataatcatggaccagttccaccaagaaaacttgattccagactagtagaccaggactgtgatccaatggagaagccacattctattgaggtggaccctgttgaggagccatttgagggcatggaatttgaatcggaagaagctgcaaaattgttctatgtaaactatgcaaggctaaatggttttcgtgcacgtattagtagatattgtcgttcaaggcgtgataattcaattatttctcgccagattgtgtgttctaaggaaggcttccgtgaagttcggaccaagaaagtgttgacagatgaaggaaaaacaaagcgcccaagaatgataactagagttggttgcaaagctatgattgtagtgaaaaagatgaactctggaaagtggatggtttcgaaatttgagaaggagcataatcattcgctgtcatattctaaaatggtccctagtacctcaaacattacttctggagaaattgtcgatttagctgcaaagggtgcacatcctagtgaagtaaaaaatgaaggatacagtgcaggaacccaatgtaatcctgcagattccctcactatactttataacaacttatgccaggaggccataaaatttgcaaaagaaggttcagtcacagaagaaatttaccatgtggcagtttctgccttaaaagaggctgcagaaaaggttgctgaagtcaaaaggagtcgtccaacattgtcacattgtggtttcgttagagaaagcaaacatgatgtcttacaggagaaaagtatgagtgctttgcaatgttcaaatcaggttgaactgacaagaacatctcctgggtccaggcctcttcaagattctgcatcaaatcttctgctgataccaaccgacattttgactgattcaaggttatatagcggtgtcgatactgctcctctaacaggaggtttccccacaaatgagagtgaaagtacacatgcatcagaaagttcttttatgcattttaagaacacaaagaaaacctcttcagaaaaatctcagaaggaccatatagattgttggctgcacctattgaagcagttccaatttcatactgccctgcagaacccataagacagacacaaaaaggtatttgtgctttaggtccatttggaggtgttctgtctgaactgaagaaccaaggaacagtccccaaatctatagttcatgctacagctcttgcttgtggtgctcgtgctgttcctcttgaagatgcagcttcgcttattagtgccattgaatccaaaatcagatctggaggggccataatagcgaaacttccttcaaacaacctagcacctctagttcctccagccattgctatgtcatcttctagtgaagatgacgaggagcatgaccacagtgagccctcgcaatgatcgatgtcgatcgcaacgttaatcatcagagctccaacgcgatgaagcttcagagggagctatcggagttcgaaactgaagctggcaactgacctggtctgaagacgaaagaaaatgatcatactgattgctaacatacgcgaagtgaaggactgaagttgttctaaagatcaaagcttccctgaaaggtggcagatctattctatgatttgagacattttttaaaagattggattaggattgtagtcacttgtttctgttgagtttatattgtaatcagattaactcaagttaatacctccagtggagaattgtagaaaggagtaaccatgctatgtacatgtcttctgcataaaagaaaggcgatagagtttaaaatccagctgtgctaaacatgatgttcataacctgaggcacccgtgtaaaac

SEQ ID NO: 1108 - DNA, 2572 bp, Zea Mays
cgtggctccggagatccggcctcatccgccccgccccgcccgcctcccggcctcgtcgtctcctcgtccccccactcccgtctcgtccgctttctttaatcaatcctccgcgccccacaaccccaagcaactcccactaatcgtcccctttccttccctttcccggcgggggcaacaatggtcggtgacggcgatcggtttgctgcatcggcggttcctgcggcgccgtgcaggtttctcggtcacctgtgagctcgatttgaccgcccccacctggcgtcgtgctggttccgttctgggtattcttggcgctggtctgggctctggggcgatcgggacacacctccgctctgcttatcgagggtcgaggcacccgacgatcttctccggaaaagcgccctactcttcataccatcagttcctgaaagatatgtttagaaaatgtgcatagttctgtgacggtggatggtggattggtggtcatggaagggacagtaatcagaatagctagtgagtcaaaacgaggcaatgatattaattaaaaagtttagtcctggcaagtgggtggtaaccaaattcataaagaaccataatcatggaccagttccaccaagaaaacttgattccagactagtagaccaggactgtgatccaatggagaagccacattctattgaggtggaccctgttgaggagccatttgagggcatggaatttgaatcggaagaagctgcaaaattgttctatgtaaactatgcaaggctaaatggttttcgtgcacgtattagtagatattgtcgttcaaggcgtgataattcaattatttctcgccagattgtgtgttctaaggaaggcttccgtgaagttcggaccaagaaagtgttgacagatgaaggaaaaacaaagcgcccaagaatgataactagagttggttgcaaagctatgattgtagtgaaaaagatgaactctggaaagtggatggtttcgaaatttgagaaggagcataatcattcgctgtcatattctaaaatggtccctagtacctcaaacattacttctggagaaattgtcgatttagctgcaaagggtgcacatcctagtgaagtaaaaaatgaaggatacagtgcaggaacccaatgtaatcctgcagattccctcactatactttataacaacttatgccaggaggccataaaatttgcaaaagaaggttcagtcacagaagaaatttaccatgtggcagtttctgccttaaaagaggctgcagaaaaggttgctgaagtcaaaaggagtcgtccaacattgtcacattgtggtttcgttagagaaagcaaacatgatgtcttacaggagaaaagtatgagtgctttgcaatgttcaaatcaggttgaactgacaagaacatctcctgggtccaggcctcttcaagattctgcatcaaatcttctgctgataccaaccgacattttgactgattcaaggttatatagcggtgtcgatactgctcctctaacaggaggtttccccacaaatggtaaatatgctatgagagtgaaagtacacatgcatcagaaagttcttttatgcattttaagaacacaaagaaaacctcttcagaaaaatctcagaacacttgttttaatcaactcatccatggaaaggagcaaggtatccatggatcttctaaagataccatggttgctattcctgcgatacctcttgcactgtgcatgcctgtgacgcagagcttacctggatcttctacagaaggaccatatagattgttggctgcacctattgaagcagttccaatttcatactgccctgcagaacccataagacagacacaaaaaggtatttgtgctttaggtccatttggaggtgttctgtctgaactgaagaaccaaggaacagtccccaaatctatagttcatgctacagctcttgcttgtggtgctcgtgctgttcctcttgaagatgcagcttcgcttattagtgccattgaatccaaaatcagatctggaggggccataatagcgaaacttccttcaaacaacctagcacctctagttcctccagccattgctatgtcatcttctagtgaagatgacgaggagcatgaccacagtgagccctcgcaatgatcgatgtcgatcgcaacgttaatcatcagagctccaacgcgatgaagcttcagagggagctatcggagttcgaaactgaagctggcaactgacctggtctgaagacgaaagaaaatgatcatactgattgctaacatacgcgaagtgaaggactgaagttgttctaaagatcaaagcttccctgaaaggtggcagatctattctatgatttgagacattttttaaaagattggattaggattgtagtcacttgtttctgttgagtttatattgtaatcagattaactcaagttaatacctccagtggagaattgtagaaaggagtaaccatgctatgtacatgtcttctgcataaaagaaaggcgatagagtttaaaatccagctgtgctaaacatgatgttcataacctgaggcacccgtgtaaaac

SEQ ID NO: 1109 - DNA, 2282 bp, Zea Mays
cccggcctcgtcgtctcctcgtccccccactcccgtctcgtccgctttctttaatcaatcctccgcgccccacaaccccaagcaactcccactaatcgtcccctttccttccctttcccggcgggggcaacaatggtcggtgacggcgatcggtttgctgcatcggcggttcctgcggcgccgtgcaggtttctcggtcacctgtgagctcgatttgaccgcccccacctggcgtcgtgctggttccgttctgggtattcttggcgctggtctgggctctggggcgatcgggacacacctccgctctgcttatcgagggtcgaggcacccgacgatcttctccggaaaagcgccctactcttcataccatcaggaatggagtttgagtctgaagatgctgcaagggatttctacagcacatatgcaagaagtgcaggttttcggattcggatcagcagattgtgtgttctaaggaaggcttccgtgaagttcggaccaagaaagtgttgacagatgaaggaaaaacaaagcgcccaagaatgataactagagttggttgcaaagctatgattgtagtgaaaaagatgaactctggaaagtggatggtttcgaaatttgagaaggagcataatcattcgctgtcatattctaaaatggtccctagtacctcaaacattacttctggagaaattgtcgatttagctgcaaagggtgcacatcctagtgaagtaaaaaatgaaggatacagtgcaggaacccaatgtaatcctgcagattccctcactatactttataacaacttatgccaggaggccataaaatttgcaaaagaaggttcagtcacagaagaaatttaccatgtggcagtttctgccttaaaagaggctgcagaaaaggttgctgaagtcaaaaggagtcgtccaacattgtcacattgtggtttcgttagagaaagcaaacatgatgtcttacaggagaaaagtatgagtgctttgcaatgttcaaatcaggttgaactgacaagaacatctcctgggtccaggcctcttcaagattctgcatcaaatcttctgctgataccaaccgacattttgactgattcaaggttatatagcggtgtcgatactgctcctctaacaggaggtttccccacaaatgagagtgaaagtacacatgcatcagaaagttcttttatgcattttaagaacacaaagaaaacctcttcagaaaaatctcaggtaagttgttacatgcttacttatgtcctttgcatggatccagcattttttggtatttcattttggaccagaagatgcttatttgttgctggaaccacagaacacttgttttaatcaactcatccatggaaaggagcaaggtatccatggatcttctaaagataccatggttgctattcctgcgatacctcttgcactgtgcatgcctgtgacgcagagcttacctggatcttctacagaaggaccatatagattgttggctgcacctattgaagcagttccaatttcatactgccctgcagaacccataagacagacacaaaaaggtatttgtgctttaggtccatttggaggtgttctgtctgaactgaagaaccaaggaacagtccccaaatctatagttcatgctacagctcttgcttgtggtgctcgtgctgttcctcttgaagatgcagcttcgcttattagtgccattgaatccaaaatcagatctggaggggccataatagcgaaacttccttcaaacaacctagcacctctagttcctccagccattgctatgtcatcttctagtgaagatgacgaggagcatgaccacagtgagccctcgcaatgatcgatgtcgatcgcaacgttaatcatcagagctccaacgcgatgaagcttcagagggagctatcggagttcgaaactgaagctggcaactgacctggtctgaagacgaaagaaaatgatcatactgattgctaacatacgcgaagtgaaggactgaagttgttctaaagatcaaagcttccctgaaaggtggcagatctattctatgatttgagacattttttaaaagattggattaggattgtagtcacttgtttctgttgagtttatattgtaatcagattaactcaagttaatacctccagtggagaattgtagaaaggagtaaccatgctatgtacatgtcttctgcataaaagaaaggcgatagagtttaaaatccagctgtgctaaacatgatgttcataacctgaggcacccgtgtaaaac

SEQ ID NO: 1110 - DNA, 321 bp, Zea Mays
agcagcttcaacaggttctgttatgtcagtgctgactactggaagttgtcccgctgtattcacaacactgggtgcctgagccagagcattctccaatgcacttctccactcatttaggtcttctgtagtttctgcctgctcgatgaaaaatcacacctttaaatccatatatgataccatgagccttattaattattttttgacacccaaattgcaaccctaatcccaatgacgcacttgttgcctcactagtgaaccctaatcccaattacacactcccagtgccaaccctcctatagtaactaagaaactgaatcaccg

SEQ ID NO: 1111 - DNA, 114 bp, Zea Mays
ttttttttttggaaaacgcaggagaactgcgcctcaatatattaagaagaagagataaatccagatcaaagagatctggacaaattacaaggcctcctcagggaggccagaaac

SEQ ID NO: 1112 - DNA, 334 bp, Zea Mays
tcattgtctcatagacgcctggatcccaacctacgaaggattccgcacaccaccccctgaaatgcgcaacgcgcaccgatcgaagagcggaggcgacaatgcggctcacctgcgggcacgtgcggcccggaatctcacgtcggcgcgcgcggaaccgagcctgccacctcctcttccttcctctcttctgttcgcgcgcgttcctctcgatcccctctccctcctcctcctcccgcctccgctccagtctcccggttctatttcctcacaccgctcggcctcgtccctcacgcccgcacttcctacggacccagtcacatgacccggacctgac

SEQ ID NO: 1113 - DNA, 472 bp, Zea Mays
gtgacaagagcgaattcgctaaaactatagagaccaactcgcaggctcgcagccggcctctccgcctccggctctcccctcctcgagcgctttcggcaccgtagttcggtacgatggcagcggcggccccgacgagggcagaggtgctgtcgcttttccggtccttactccgcacggcgaagcagttctcggactacaacatccgcgagtacacacgccgacgcgccgcggacgccttccgcgaaaacagcgccctctccgacgcgccgtccgccgccgccttgtttgcggtggggaagcagcagctagaggttgcgaagcgacaagcggtgatttactcaatctacgcccccaaggccaagagcgtgatggagttgaaggtgcagtgatggacgaggtgctacaatcaagatcctgtattaggttgtatgtaaattctgtggcaaagtggacttctctttttagagacttg

SEQ ID NO: 1114 - DNA, 453 bp, Zea Mays
ctcagttactctctctgtcccaattcccaaaaagatgcaattctagctttctaccaagtcaatctatctcaactttgaccaaatacatatatgtaaaaatattatttcagataccaaatagttattgtttgaatcatcatgaaatatattttcatagtatatatatatttggagtctcaaatgttgctaatattttactccctctgtcctaaattaatggattcatacaatatttgatgtatgtgttttatatatgggtctagatttatcattatccatttgaatatatacataaaaaaccaaaaactaaaatgacaactatttggggacaagggagtatataaacttagttaaacttatgaaagatttacttggtccaaaacctgaattgcattctttttttacggatggtaaaaactaaaaccagactagatagcttatgactttcttcag

SEQ ID NO: 1115 - DNA, 531 bp, Zea Mays
cccatttagtcgatcagttgagtctctggtcgtctcgttccttctggaaccctgcgcgactcagagtgggtctcgaactcctagagcaatcctagggtttcgagtggatccaaaccattctcaatcaaaatccatccattcccccgcatctaatccacattgcgccccttgctgcctttcccgttcttgtccctgtgtatctgccctagcaggtgtgcagtgacgtgctggtgggaagattggtgaggtatggagcttcgggaagagagggaggaggaagatctggggctcaagctgagtggtctgcgcctttcagaagcggagcggagaggagtgaagggagcctggctgaatctagaagaaggaggagggaaggtgcaggtggtgggcaagctgtttgctgaaaagcctggcagagcagacggaatagctcagacattggggaaaatctggtgcccaataaagggaataaaatgcaaggaactcgttgtaaagcgggatctccagcatgtcgccgtggacacgtcgccg

SEQ ID NO: 1116 - DNA, 984 bp, Zea Mays
gctggttttgccaaaggccaaagtaaacgatgagaagaggccatggcgttctatattttgactgttgcatgtagcaactagcaatgactcctcttttagcggcgagagactgagagcttggctcaacgcgtcctcggcttctgtggaaggccattccatgcgctccgtgtagccagccattcgctcaaacacaaagcagcatcacactgactccactgctctgcctccataataagcacagaagcgccccaataatcagcagcgcaggagcgagcgatcgctatggctcagggaagaggcagtgcgacgcgggggcttgccctcggcagcctactcgccgccgctttcctcctcctcctcggcgtcgccgacgcggccacccacagggtcgactggtccttcaacgcggacagctggtccaagggcaagagcttccgtgccggcgacgtcctcgagttcaactacgacccctccgtgcacaacgtggtggccgtggacgccggcggctacaacggctgccggccctccggcacgtcgtacggctccgggagcgaccgcatcacgctcggccccggcaccagctacttcatctgcagcctcaacgggcactgcgggatggggatgaagatggtcgtcaacgccagctgagcacgacgcttatatgttagtactgcaaaaatatatgggctagtggtggtccgatagatcgtgcaagaactcaatcgtgtggcatactcgtaccgtgtgttcgatggacacggttcatgtgttgtgtatgcatgcgactgctggtaggtcaggcatgatgtacgtgtggctgatggcgtgttagtaaagcgtcctgcagctttgttgttactttgttcgatcgaagcagcggcttcttttgtttgttcatcaataacatctttcattaaattttttttattgttgctctccgaatgtgacagttagacttatatgcaatgcacatctttactacta

SEQ ID NO: 1117 - DNA, 3272 bp, Zea Mays
ggacacgtctccactgcgggtcccatctccacgtcatagtcctagaagctgcccgctcgacatgccccacctgccagcatcccctgcgcagtcccaagtcccaactcctactccctgccgtgcaacgggggtgagatcttgtgttctcgtaggctatgccttccccgatggctcgcgtcctgcaccgccgtctcctcctcctcgccgccgtctccttcgccgtggtcgcttctctccttcgcccagctgctgcagtgcgcccgtttgttttggttctctccggtgaggacttcctcaaggattcggccgcgcacccgtccctcccctctgccgactccaccgacgacgacgggtgggacgacttcgccgacgattcaccagccgccgacccgctcctctccccgtcctcctgggtccctcttcttgacccagcaagccctcccctttctggcgatgagacggactcgtcggccgacgcgctcttcgtcgcgggcgcccgcgcgatgctctccgcagcgtccgatggggacgacgcggcgttcgccacggctgccgcgcagatcgaggccgcggcagaggcggggcacccgggcgcgcagtccgcgctcgcgttcctcaccggcgccgggatgacgcgcccggcatcccgatcgctcgcattcctgttgcacaagttcgccgccgacgcgggagatcttcagtcaaagatggccctcgcgtactcctacttccgccaggagatgtatgaagaagctgttatactatacgctgaacttgcagaagctgccctaactagctccttgatatcaaaggagccaccagtgattgaaccaatccgtcttcacagtgggactgaagaaaataaagaggccttgaggaagtcccgaggcgaggacgatgaagattttcaaatcacagagtaccaggcacagcgaggcaatgctgctaacatgtacaaattagggcttctgtattactatggactacgtgggctccgccgtgattatggaaaagcttttcattggttttctaaggctgttgagaaaggagagacacgagcattggaacttctgggtgagatctatgctagaggtgctggagtggaaaggaactatactgaagcatacaagtggttggcacttgctgcaaagcagcaacattactcagcttacaatggattgggttatctatatgttaaaggctatggggtggagaagaaaaacctgacaaaagcaaaggaactttttgaacttgcagccgagaataaggaagctgggggacattataaccttgttaatgctgggcaaccaaaagctatttatcaggtggcgaaactgttccagaaaggcattggtcttaagaggaacctccatatggcaacaatgttgtacaagtctgttgctgagaggggaccctggagttcattgtccagatgggctttggaatcttatttgaaaggcgatgtagggaaagcattgctcttgtattccagaatggccgatcttggatatgaggttgcacagagcaatgctgcctggattcttgataggtatggtgatcaaagtatttgcatgggagaatctagtttttgtacagatatggaaagacatcttcgtgcgcatgctttgtggtggcaagcatccgagcagggtaatgagcatgctgcattgttgattggcgatgcctactactatggtcggggcgtagcaagggactatgaacgtgcagcagaggcatatatgcatgctcggtcacagtctaatgctcaggctatttttaaccttgggtacatgcatgagcatggtcatggacttccccttgatttgcacttagcaaaaagatattatgatcaagccgttgaggtggattcagcagctaagctccctgtcatgcttgcactaacaagtttgtggctaaggaagaactacgcagacagttttttgattggaagaactttgatctcagattttaaacagtcaaaatgtgaatctgtgattccaaagacacgacacagcacaaatatatattaattttaaattttggttcgctttatcgattcacttccagaaatatatcctgttgttaacaaatgggtggaagatgttctcctggatgaagggaatgccacaattttgactctctttgcttgccttgtaactgtcctctacttgcgagagcgtcaaaggcgtcaagtggcagcagccaacccccaacaacctgatgatgtggtcatgtaaatgtctgttttcatgacatgtgcagccctgttgcttgagggaattggagatgtaaaacggtagctccttcacatgactcatgtacactaaattgagtaggggacatgaaaacctgtggaaactcagacaatgtttcctgcctggtgaatattcacctttccaagacttgggagctatgcttgtaaaggacaacatttcttggaaactggctgcttagaaatattgtttagaaatatcacagatgtttaaaagtagacttttccccccttgtgcatttgcacggccatcgaatttcgacaagcacacactgatagcatatctggaagaggcaactttgcaattggtagtttaggggtcagattaactttccatcagcatttaaacacactgcatagttttcgctggatgttttaattgaaaatgggcggtgcaaaactgcatattgggagaatcaagtttgcaatagtatccatcagcgttggaagtttaaacacattgttttcagtagtctgaaaaagaatcttgtagcgcagggtgttgaatgacggcgacagtcgcgcgcgcggagcagccgttgccgggttacagaagtgtgcatgatgaaccggccgatcttttgttcgatctagctccaccgacgtgcgacgaagaagatagaatgaaactacaacagctgcaatacatttgagctgcagagctagcttagtgcctgtttgggatcctggtctttcactgcctggtgtggtagatgaacggtggtgagcactcccttaagcctagtgtttgggaggaaaggggggctatacctagagagggaaaaccccacagataactaaatatcttatttaaatgtctttttaagccttgttcatattcacctcatttcatgtatattgaggtggattggaccattgaggtataacttagtttaatttacaccataattcacctcaatacacaggttgaggtgaatacgtgactatccaaacaaggtcttagggattactcgtcccggaaaatgaagaggattctgag

SEQ ID NO: 1118 - DNA, 2661 bp, Zea Mays
gtcccaagtcccaactcctactccctgccgtgcaacgggggtgagatcttgtgttctcgtaggctatgccttccccgatggctcgcgtcctgcaccgccgtctcctcctcctcgccgccgtctccttcgccgtggtcgcttctctccttcgcccagctgctgcagtgcgcccgtttgttttggttctctccggtgaggacttcctcaaggattcggccgcgcacccgtccctcccctctgccgactccaccgacgacgacgggtgggacgacttcgccgacgattcaccagccgccgacccgctcctctccccgtcctcctgggtccctcttcttgacccagcaagccctcccctttctggcgatgagacggactcgtcggccgacgcgctcttcgtcgcgggcgcccgcgcgatgctctccgcagcgtccgatggggacgacgcggcgttcgccacggctgccgcgcagatcgaggccgcggcagaggcggggcacccgggcgcgcagtccgcgctcgcgttcctcaccggcgccgggatgacgcgcccggcatcccgatcgctcgcattcctgttgcacaagttcgccgccgacgcgggagatcttcagtcaaagatggccctcgcgtactcctacttccgccaggagatgtatgaagaagctgttatactatacgctgaacttgcagaagctgccctaactagctccttgatatcaaaggagccaccagtgattgaaccaatccgtcttcacagtgggactgaagaaaataaagaggccttgaggaagtcccgaggcgaggacgatgaagattttcaaatcacagagtaccaggcacagcgaggcaatgctgctaacatgtacaaattagggcttctgtattactatggactacgtgggctccgccgtgattatggaaaagcttttcattggttttctaaggctgttgagaaaggagagacacgagcattggaacttctgggtgagatctatgctagaggtgctggagtggaaaggaactatactgaagcatacaagtggttggcacttgctgcaaagcagcaacattactcagcttacaatggattgggttatctatatgttaaaggctatggggtggagaagaaaaacctgacaaaagcaaaggaactttttgaacttgcagccgagaataaggaagctgggggacattataaccttggtgtgttgtatcttaagggtattggtgtgaagagggatgtaattagagcatgcaatctcttgcttcatgcagttaatgctgggcaaccaaaagctatttatcaggtggcgaaactgttccagaaaggcattggtcttaagaggaacctccatatggcaacaatgttgtacaagtctgttgctgagaggggaccctggagttcattgtccagatgggctttggaatcttatttgaaaggcgatgtagggaaagcattgctcttgtattccagaatggccgatcttggatatgaggttgcacagagcaatgctgcctggattcttgataggtatggtgatcaaagtatttgcatgggagaatctagtttttgtacagatatggaaagacatcttcgtgcgcatgctttgtggtggcaagcatccgagcagggtaatgagcatgctgcattgttgattggcgatgcctactactatggtcggggcgtagcaagggactatgaacgtgcagcagaggcatatatgcatgctcggtcacagtctaatgctcaggctatttttaaccttgggtacatgcatgagcatggtcatggacttccccttgatttgcacttagcaaaaagatattatgatcaagccgttgaggtggattcagcagctaagctccctgtcatgcttgcactaacaagtttgtggctaaggaagaactacgcagacagttttttggttcgctttatcgattcacttccagaaatatatcctgttgttaacaaatgggtggaagatgttctcctggatgaagggaatgccacaattttgactctctttgcttgccttgtaactgtcctctacttgcgagagcgtcaaaggcgtcaagtggcagcagccaacccccaacaacctgatgatgtggtcatgtaaatgtctgttttcatgacatgtgcagccctgttgcttgagggtgttgaatgacggcgacagtcgcgcgcgcggagcagccgttgccgggttacagaagtgtgcatgatgaaccggccgatcttttgttcgatctagctccaccgacgtgcgacgaagaagatagaatgaaactacaacagctgcaatacatttgagctgcagagctagcttagtgcctgtttgggatcctggtctttcactgcctggtgtggtagatgaacggtggtgagcactcccttaagcctagtgtttgggaggaaaggggggctatacctagagagggaaaaccccacagataactaaatatcttatttaaatgtctttttaagccttgttcatattcacctcatttcatgtatattgaggtggattggaccattgaggtataacttagtttaatttacaccataattcacctcaatacacaggttgaggtgaatacgtgactatccaaacaaggtcttagggattactcgtcccggaaaatgaagaggattctgag

SEQ ID NO: 1119 - DNA, 3079 bp, Zea Mays
caagtcccaactcctactccctgccgtgcaacgggggtgagatcttgtgttctcgtaggctatgccttccccgatggctcgcgtcctgcaccgccgtctcctcctcctcgccgccgtctccttcgccgtggtcgcttctctccttcgcccagctgctgcagtgcgcccgtttgttttggttctctccggtgaggacttcctcaaggattcggccgcgcacccgtccctcccctctgccgactccaccgacgacgacgggtgggacgacttcgccgacgattcaccagccgccgacccgctcctctccccgtcctcctgggtccctcttcttgacccagcaagccctcccctttctggcgatgagacggactcgtcggccgacgcgctcttcgtcgcgggcgcccgcgcgatgctctccgcagcgtccgatggggacgacgcggcgttcgccacggctgccgcgcagatcgaggccgcggcagaggcggggcacccgggcgcgcagtccgcgctcgcgttcctcaccggcgccgggatgacgcgcccggcatcccgatcgctcgcattcctgttgcacaagttcgccgccgacgcgggagatcttcagtcaaagatggccctcgcgtactcctacttccgccaggagatgtatgaagaagctgttatactatacgctgaacttgcagaagctgccctaactagctccttgatatcaaaggagccaccagtgattgaaccaatccgtcttcacagtgggactgaagaaaataaagaggccttgaggaagtcccgaggcgaggacgatgaagattttcaaatcacagagtaccaggcacagcgaggcaatgctgctaacatgtacaaattagggcttctgtattactatggactacgtgggctccgccgtgattatggaaaagcttttcattggttttctaaggctgttgagaaaggagagacacgagcattggaacttctgggtgagatctatgctagaggtgctggagtggaaaggaactatactgaagcatacaagtggttggcacttgctgcaaagcagcaacattactcagcttacaatggattgggttatctatatgttaaaggctatggggtggagaagaaaaacctgacaaaagcaaaggaactttttgaacttgcagccgagaataaggaagctgggggacattataaccttgttaatgctgggcaaccaaaagctatttatcaggtggcgaaactgttccagaaaggcattggtcttaagaggaacctccatatggcaacaatgttgtacaagtctgttgctgagaggggaccctggagttcattgtccagatgggctttggaatcttatttgaaaggcgatgtagggaaagcattgctcttgtattccagaatggccgatcttggatatgaggttgcacagagcaatgctgcctggattcttgataggtatggtgatcaaagtatttgcatgggagaatctagtttttgtacagatatggaaagacatcttcgtgcgcatgctttgtggtggcaagcatccgagcagggtaatgagcatgctgcattgttgattggcgatgcctactactatggtcggggcgtagcaagggactatgaacgtgcagcagaggcatatatgcatgctcggtcacagtctaatgctcaggctatttttaaccttgggtacatgcatgagcatggtcatggacttccccttgatttgcacttagcaaaaagatattatgatcaagccgttgaggtggattcagcagctaagctccctgtcatgcttgcactaacaagtttgtggctaaggaagaactacgcagacagttttttggttcgctttatcgattcacttccagaaatatatcctgttgttaacaaatgggtggaagatgttctcctggatgaagggaatgccacaattttgactctctttgcttgccttgtaactgtcctctacttgcgagagcgtcaaaggcgtcaagtggcagcagccaacccccaacaacctgatgatgtggtcatgtaaatgtctgttttcatgacatgtgcagccctgttgcttgagggaattggagatgtaaaacggtagctccttcacatgactcatgtacactaaattgagtaggggacatgaaaacctgtggaaactcagacaatgtttcctgcctggtgaatattcacctttccaagacttgggagctatgcttgtaaaggacaacatttcttggaaactggctgcttagaaatattgtttagaaatatcacagatgtttaaaagtagacttttccccccttgtgcatttgcacggccatcgaatttcgacaagcacacactgatagcatatctggaagaggcaactttgcaattggtagtttaggggtcagattaactttccatcagcatttaaacacactgcatagttttcgctggatgttttaattgaaaatgggcggtgcaaaactgcatattgggagaatcaagtttgcaatagtatccatcagcgttggaagtttaaacacattgttttcagtagtctgaaaaagaatcttgtagcgcagggtgttgaatgacggcgacagtcgcgcgcgcggagcagccgttgccgggttacagaagtgtgcatgatgaaccggccgatcttttgttcgatctagctccaccgacgtgcgacgaagaagatagaatgaaactacaacagctgcaatacatttgagctgcagagctagcttagtgcctgtttgggatcctggtctttcactgcctggtgtggtagatgaacggtggtgagcactcccttaagcctagtgtttgggaggaaaggggggctatacctagagagggaaaaccccacagataactaaatatcttatttaaatgtctttttaagccttgttcatattcacctcatttcatgtatattgaggtggattggaccattgaggtataacttagtttaatttacaccataattcacctcaatacacaggttgaggtgaatacgtgactatccaaacaaggtcttagggattactcgtcccggaaaatgaagaggattctgag

SEQ ID NO: 1120 - DNA, 2134 bp, Zea Mays
cctgggctaaaacatctcacacgtcgccgactcgcgtcaagaaccagcagccacactacaacgccaccacatagttcccagttcccaccattgtttgcacttggcaacatgcctaagaagggtcacatggggacccctaagcaggcttacgctaccgacggcggcaagggtgacgtcgccgctggcagcacggtgacggcgagcgccatcgcgtcctcctacgacgaccagatccgcccgctcctcgacgcggtggaccggctgcgccacctcaaggtgacgcaggagggcatccagctgcccaccatcgtcgtcgtcggggaccagtccagcggcaagtccagcgtcctcgagtccctcgccggcatcagccttccgcgcggccagggcatctgcacgcgcgtgccactcgtcatgcgcctgcaggacgacccctctgcggactcgcccaaacttcagctcgagtacagcaacggccgcgtggtgaccaccaccgaggccgacgtcgcggacgccatcaacgccgccaccgcggagatagccgggagcggcaagggtatctccgatgcgcctatcacgctcgttgtgcgcaagcgcggcgtgcccgacctcacgctcgtcgacctccccggcatcacgcgcgttcccgtccatggccagccggaggacatctacgaccaggttgcaaagatcatcaaggagtacatcgccccgaaggagagcatcatcctgaacgtgctctcggccacggtggacttcccaacgtgcgagtctatccgcatgtcgcagcaggtggaccgctccggcgagcgcacgcttgccgtggtcaccaaagtcgacaaaaaccccgagggactgcttgagaaggtcaccatggacgacgtgaacatcggcctcggctacgtctgcgtccgcaaccgcatcggcgacgagacttatgaccaagcgcgcgtcgaggaggaacggctctttaaataccatcctttgctgtcgaagatcgacaaggacatggtcggcatcccagtccttgctaataggctcatgcagatacagtccaccatcattgccaagtgcctcccggacatcgtgaagcagatcaacgaccgcctcagccgcagcagcgccgagctggaccagatgccgcaggacttgaacaacgtcgctgatgctgtcagggtcttcttccacatagtgaagcaggtctgtaactcacttgaaaagttgctggtgaggggcgactttgctgagtaccctgatgcgcgtgagtttcatggcacggcgcgcattgccgacatgctgtctggatatgcaaaggaactccccgcgcagtgcccgataaacaggaacgaaccgtttctgatggaggagatgcagtcgccctgccgccgtgccgtgcagaccctgatggacaaggcgcggctgcgctcggcacatcacgtgaaggagctgattgccatggagctggtggcagattacaccgccaacccagactacatgaagacctggaccgagataatggaagggtacgagatgttcatggaggccgtggaggacaagtcgaagccgacaagaatcaccctgaaaggctttggcgaggtggacgtgtcgcatcttagggtctatgctgactttgcagggaaggcgttcgacctgagggcgcgtcttacggcatactggaagagcatagtgctgaggcaggttgatggccttgcattgcacgtccttctcagcgtcaagctgctggttgagaaagaccttgaggaggagctcggcaacgagctgctgagcaacaagttagctggggtggagaagatgctcgcgccgtcgccgggcactggaacaaagcgtgagcgcctgaagaagagcatcgtcctccttcgtcaatcgaaggaggtcgtggcaaacataatggataggattagcgcggctggtgacatctaggcatgtcatggtgtgctctgcgtgacattgacttttgggttgcgttcccagccgtatggactttgttaaggtttacatgctatgtttctgttttaatgcatgttactatcgtttagattgttatgttttatctcatcactgttcatggtggctacctatggttaacggtggcttgttcgcgccttggcgaccc

SEQ ID NO: 1121 - DNA, 1257 bp, Zea Mays
gactctatcccgttcccttccgtccctcgtcacgctcacgaagcacgctgtcgtcttgcggctctcgcccgtcgccccccgagccccgaaaccaaagccgagccgagagcccgagccccgccccgacctcatcttctcctcgtcggtttcacccctccaccacctccatggggtcgtcggaggccgacgaggaccagctcctcaagagcttcctcgcggaggtcagcgaggccgagcgggacaacgaagtgctgaggatacttggttgcttcaagttaaaccccttcgagcatcttaagttgtcttttgattcatcaccagatgaggtgaaaaagcaatataggaagttgtcattgctggtccatcctgataaatgcaagcatcctcaggcacaagaagcttttgcagctctggcgaaagcacaacagctcctgcttgatccacaggaaagaggctacattcttgaccaagttactgctgcaaaagaagaattgagggcaaaacggaaaaaggagctgaagaaagacagtgcgtccaagataaaatctcttgtagatgagggaaaatatgaagagcagtttgaacgatcggatggatttcagcagcaattaataattaaagtacgtgaaattttgaccgacaaagaatggcgtaggagaaaaatgcaaatgaggatatcagaggaagaaggaagacttaagaaggatgaggaggaaacaaaagagatgtggaagaggaagagagagcatgaagagaagtgggaggagaccagagacaagcggggtccttgtcatttggtataacatttgagtaatcttcgtcaatcccaagacaataatgcaaggtctccagctggagggatttcatgaagacaggaaagaagggacggaaaggtgaaatcaagcccccaaaactgaagactgaagatccgaacaaatcttatgtgcaaaggccagtaaagcgaaactgagtggaatgtcagcaatcaaagaacatccggtagcggcctttcatctcaccagattagagctgcaacccttcaatgttgtacttgtcctgaatgtggtaaggttcaattacgcccgctgggaaacagaacggaacagagcagattttacccgtattgctagctagagtgatttggtttgatgtactcatcatccgtctgaagattttactgggaaaaaaagtacaaacttttccgttggaaaagaacctaatgaagtgaatgttgacaggccgtctctttactgcttc

SEQ ID NO: 1122 - DNA, 1187 bp, Zea Mays
gactctatcccgttcccttccgtccctcgtcacgctcacgaagcacgctgtcgtcttgcggctctcgcccgtcgccccccgagccccgaaaccaaagccgagccgagagcccgagccccgccccgacctcatcttctcctcgtcggtttcacccctccaccacctccatggggtcgtcggaggccgacgaggaccagctcctcaagagcttcctcgcggaggtcagcgaggccgagcgggacaacgaagtgctgaggatacttggttgcttcaagttaaaccccttcgagcatcttaagttgtcttttgattcatcaccagatgaggtgaaaaagcaatataggaagttgtcattgctggtccatcctgataaatgcaagcatcctcaggcacaagaagcttttgcagctctggcgaaagcacaacagctcctgcttgatccacaggaaagaggctacattcttgaccaagttactgctgcaaaagaagaattgagggcaaaacggaaaaaggagctgaagaaagacagtgcgtccaagataaaatctcttgtagatgagggaaaatatgaagagcagtttgaacgatcggatggatttcagcagcaattaataattaaagtacgtgaaattttgaccgacaaagaatggcgtaggagaaaaatgcaaatgaggatatcagaggaagaaggaagacttaagaaggatgaggaggaaacaaaagagatgtggaagaggaagagagagcatgaagagaagtgggaggagaccagagacaagcggctggagggatttcatgaagacaggaaagaagggacggaaaggtgaaatcaagcccccaaaactgaagactgaagatccgaacaaatcttatgtgcaaaggccagtaaagcgaaactgagtggaatgtcagcaatcaaagaacatccggtagcggcctttcatctcaccagattagagctgcaacccttcaatgttgtacttgtcctgaatgtggtaaggttcaattacgcccgctgggaaacagaacggaacagagcagattttacccgtattgctagctagagtgatttggtttgatgtactcatcatccgtctgaagattttactgggaaaaaaagtacaaacttttccgttggaaaagaacctaatgaagtgaatgttgacaggccgtctctttactgcttc

SEQ ID NO: 1123 - DNA, 2458 bp, Zea Mays
aagtctagtagtactagcagtagattaccaccgctcgcctcgtcgactcctcgtccccgcaccgccggcctgacatcgcgtcgcgtgccaaagccgacgcgcacaaaagcaacgaaagcgaaagcaaagcggccaccaccggcctccccggcagcccggctccccctcgctgtcctccctccacccatcacaattcacaccgaagcccgagcgggagcggccattttctctcgtctcgtcttctcgtcccctaaaatgagaaacctagtactgctgctatagaagtcaagtcactcgactcgcccgcgtgcccaaccaatcacacggccgcgctcgagacgagaggcgcccacggaaacggagcctcctatgccaccgggcgccgcggctgtcgccgccacctcgcaacaggccgactgctgcggacacgggcccgggcccgggcccagctggcgcggtggcggcggctgcgatgtccccggcggcgcgtcctgcagctacctgccgctgcgcaagcggctgtccgttgacggcaagttcccggcgccgcggatatgcatctgggagtgcgacggcgaggccggggacatcacctgcgatatcgtcgccgctccgatccgccgcagctgcagcgcgagggcaatgccgccgccgccggcggcctcgctcttccgccggatgatgaccccgccgccctcgcggcccaggccgccgcagagggaggtggaggatgctgtggcggctaggaggcccggggagaccatctccaagggccaccggagctacggtctcatgcttaacctgcagcttggcgtaagctattcggtggggaagtcatcggcgctgccgttcaggaagctctcgtcatcagacttcgacccgcgggagaaggtgtggacgcggttcccgccagaggggtccaagctcacgccgccgcatcactccgtggatttccggtggaaggactactgccccgcagtattcaggcacctgaggaagctgttcggggtggatcctgcggactacatgctcgccatctgcgggagcgacacgcttcgcgagctggcgtcaccaggtcctaattaggatgctgaggagttactatgaacatgtttgtcggtacaagtccactttgttgacaaggttctatggcacacattgcatcaagcaagctggatgtcccaaggtccggttcattataatgggcaatttttgctgctcggagtataagatccatagacgttttgatttgaaaggctcatcacatggtcgtactattgataaggcggaagagaagatcgatgaagcaactactctaaaggacctggaccttgattatgcattccacctacagagattttggtatgacgagctgatgaggcaaattcagatggactgcacattcttagagacacaaggaattatggactacagcttgttgctaggagttcactttcgtgatgatttctcaatgtctaaaataggtgtatctcagtttattggtttgccaaaatccacaggcaaaagaaaatcatttgaaggtggaggcgatgtttgtgagctttgctttacggaatctggatgcaaggacagagatttcattgttgactctcggaaaccactggtccagttaggcaagaacatgcctgcccaggcagagcggaggtcgaagagagtcctggataagtttctcctaaacgaaagacacttgtttataaccacatcaagtggcggattccaggatgtctatctcttctttggaataattgacattctacaagactacgacataaccaagaagctcgagcatgcatacaagtcctttcaggtcaaccctggttgcatttctgccgtagacccaaagttgtactcgagaagattccaagagttcagtcgcagagtgttcatcagagaacattaaagaacaatttgtccagcgggtgactgctccactggcattttacatcatgggatccattggtgaagtcctggggtatgatggtttcaccgatcccgagcgtgccctggaacagtggaaaggatggtcggtttacccgacgcatagttttctgaataattggcgtcgagggaggaggagcactgccgacacgcatgctaatgctgaaaggatgcgagctaaaactgtagagctttgccttttcaaggacttgtaaaatgtaagtgccggctccatgattgcggagcacatacccaaaccttgctgtttgtttattcttcttccgcactcgcatcttccaagaatctcaagtgattttagcttcttgggatgcttgatgaatactaccagtatgaatgatcttggccaaatggggaccagacattgtacatgcacatactgtcgtgtagtgtgtacactagtagatggatatcttgtcagagtttaaaaggattttggatgcattactgcattcagtaagtgtcactagcatcttgcttt

SEQ ID NO: 1124 - DNA, 2432 bp, Zea Mays
aagtctagtagtactagcagtagattaccaccgctcgcctcgtcgactcctcgtccccgcaccgccggcctgacatcgcgtcgcgtgccaaagccgacgcgcacaaaagcaacgaaagcgaaagcaaagcggccaccaccggcctccccggcagcccggctccccctcgctgtcctccctccacccatcacaattcacaccgaagcccgagcgggagcggccattttctctcgtctcgtcttctcgtcccctaaaatgagaaacctagtactgctgctatagaagtcaagtcactcgactcgcccgcgtgcccaaccaatcacacggccgcgctcgagacgagaggcgcccacggaaacggagcctcctatgccaccgggcgccgcggctgtcgccgccacctcgcaacaggccgactgctgcggacacgggcccgggcccgggcccagctggcgcggtggcggcggctgcgatgtccccggcggcgcgtcctgcagctacctgccgctgcgcaagcggctgtccgttgacggcaagttcccggcgccgcggatatgcatctgggagtgcgacggcgaggccggggacatcacctgcgatatcgtcgccgctccgatccgccgcagctgcagcgcgagggcaatgccgccgccgccggcggcctcgctcttccgccggatgatgaccccgccgccctcgcggcccaggccgccgcagagggaggtggaggatgctgtggcggctaggaggcccggggagaccatctccaagggccaccggagctacggtctcatgcttaacctgcagcttggcgtaagctattcggtggggaagtcatcggcgctgccgttcaggaagctctcgtcatcagacttcgacccgcgggagaaggtgtggacgcggttcccgccagaggggtccaagctcacgccgccgcatcactccgtggatttccggtggaaggactactgccccgcagtattcaggcacctgaggaagctgttcggggtggatcctgcggactacatgctcgccatctgcgggagcgacacgcttcgcgagctggcgtcaccaggtcctaattaggatgctgaggagttactatgaacatgtttgtcggtacaagtccactttgttgacaaggttctatggcacacattgcatcaagcaagctggatgtcccaaggtccggttcattataatgggcaatttttgctgctcggagtataagatccatagacgttttgatttgaaaggctcatcacatggtcgtactattgataaggcggaagagaagatcgatgaagcaactactctaaaggacctggaccttgattatgcattccacctacagagattttggtatgacgagctgatgaggcaaattcagatggactgcacattcttagagacacaaggaattatggactacagcttgttgctaggagttcactttcgtgatgatttctcaatgtctaaaataggtgtatctcagtttattggtttgccaaaatccacaggcaaaagaaaatcatttgaaggtggaggcgatgtttgtgagctttgctttacggaatctggatgcaaggacagagatttcattgttgactctcggaaaccactggtccagttaggcaagaacatgcctgcccaggcagagcggaggtcgaagagagtcctggataagtttctcctaaacgaaagacacttgtttataaccacatcaagtggcggattccaggatgtctatctcttctttggaataattgacattctacaagactacgacataaccaagaagctcgagcatgcatacaagtcctttcaggtcaaccctggttgcatttctgccgtagacccaaagttgtactcgagaagattccaagagttcagtcgcagagtgttcatcagagaacattaaagaacaatttgtccagcgggtgactgctccactggcattttacatcatgggatccattggtgaagtcctggggtatgatggtttcaccgatcccgagcgtgccctggaacagtggaaaggatggtcggtttacccgacgcatagttttctgaataattggcgtcgagggaggaggagcactgccgacacgcatgctaatgctgaaaggatgcgagctaaaactgtagagctttgccttttcaaggacttgtaaaatgactgtttggatgaatgaattcctgaggcagccatgttcttttgttcagaaaagaagctggaccgtagacattgttgccttctttgcaagcatttgcagtcgcaggttggtatcttttcgctcgccctcgcccctgctctgggtctggctgaccacggtggtgactggagtctggagggaggcagagcaccacaccactggctcggcgaactggcgaaagataaagtggaaaaaagcggaggggggaggagacag

SEQ ID NO: 1125 - DNA, 2522 bp, Zea Mays
aagtctagtagtactagcagtagattaccaccgctcgcctcgtcgactcctcgtccccgcaccgccggcctgacatcgcgtcgcgtgccaaagccgacgcgcacaaaagcaacgaaagcgaaagcaaagcggccaccaccggcctccccggcagcccggctccccctcgctgtcctccctccacccatcacaattcacaccgaagcccgagcgggagcggccattttctctcgtctcgtcttctcgtcccctaaaatgagaaacctagtactgctgctatagaagtcaagtcactcgactcgcccgcgtgcccaaccaatcacacggccgcgctcgagacgagaggcgcccacggaaacggagcctcctatgccaccgggcgccgcggctgtcgccgccacctcgcaacaggccgactgctgcggacacgggcccgggcccgggcccagctggcgcggtggcggcggctgcgatgtccccggcggcgcgtcctgcagctacctgccgctgcgcaagcggctgtccgttgacggcaagttcccggcgccgcggatatgcatctgggagtgcgacggcgaggccggggacatcacctgcgatatcgtcgccgctccgatccgccgcagctgcagcgcgagggcaatgccgccgccgccggcggcctcgctcttccgccggatgatgaccccgccgccctcgcggcccaggccgccgcagagggaggtggaggatgctgtggcggctaggaggcccggggagaccatctccaagggccaccggagctacggtctcatgcttaacctgcagcttggcgtaagctattcggtggggaagtcatcggcgctgccgttcaggaagctctcgtcatcagacttcgacccgcgggagaaggtgtggacgcggttcccgccagaggggtccaagctcacgccgccgcatcactccgtggatttccggtggaaggactactgccccgcagtattcaggcacctgaggaagctgttcggggtggatcctgcggactacatgctcgccatctgcgggagcgacacgcttcgcgagctggcgtcaccaggcaagagtgggagctgcttcttcgttacacaggacgatagattcatgattaaaaccgtgaagaaggcagaaatgaaggtcctaattaggatgctgaggagttactatgaacatgtttgtcggtacaagtccactttgttgacaaggttctatggcacacattgcatcaagcaagctggatgtcccaaggtccggttcattataatgggcaatttttgctgctcggagtataagatccatagacgttttgatttgaaaggctcatcacatggtcgtactattgataaggcggaagagaagatcgatgaagcaactactctaaaggacctggaccttgattatgcattccacctacagagattttggtatgacgagctgatgaggcaaattcagatggactgcacattcttagagacacaaggaattatggactacagcttgttgctaggagttcactttcgtgatgatttctcaatgtctaaaataggtgtatctcagtttattggtttgccaaaatccacaggcaaaagaaaatcatttgaaggtggaggcgatgtttgtgagctttgctttacggaatctggatgcaaggacagagatttcattgttgactctcggaaaccactggtccagttaggcaagaacatgcctgcccaggcagagcggaggtcgaagagagtcctggataagtttctcctaaacgaaagacacttgtttataaccacatcaagtggcggattccaggatgtctatctcttctttggaataattgacattctacaagactacgacataaccaagaagctcgagcatgcatacaagtcctttcaggtcaaccctggttgcatttctgccgtagacccaaagttgtactcgagaagattccaagagttcagtcgcagagtgttcatcagagaacattaaagaacaatttgtccagcgggtgactgctccactggcattttacatcatgggatccattggtgaagtcctggggtatgatggtttcaccgatcccgagcgtgccctggaacagtggaaaggatggtcggtttacccgacgcatagttttctgaataattggcgtcgagggaggaggagcactgccgacacgcatgctaatgctgaaaggatgcgagctaaaactgtagagctttgccttttcaaggacttgtaaaatgtaagtgccggctccatgattgcggagcacatacccaaaccttgctgtttgtttattcttcttccgcactcgcatcttccaagaatctcaagtgattttagcttcttgggatgcttgatgaatactaccagtatgaatgatcttggccaaatggggaccagacattgtacatgcacatactgtcgtgtagtgtgtacactagtagatggatatcttgtcagagtttaaaaggattttggatgcattactgcattcagtaaaaaaagaa

SEQ ID NO: 1126 - DNA, 1368 bp, Zea Mays
ctagaaaaacaaagaaaaagcgaaggcaaaatatgaaagagaaaaaaccgcaattccggttgccttcgactcaactcctcgctctggtagcccgactcccctaaacccattgtgtgcccgccgtcgacgcagcctccgtcctcccccgcatccgaatcacgcacgccacgtcccacccctgtcatggccacctccagcgacggcggcggcgaccagcggcgcctcctctccatccccaaggaaggcgagcgcatcatcgcgcccacgcgccgccccgacggcacgctccgcaaggccatccgcatccgcgccggttacgtgccccaggaggaggtcgccatctaccagtccaagggcgccctaatgaggaagtcagggcccgacgtgccgccggggtacgacccggcgctagtggccgacgccaaacccaagacgaaggcggccaaacggaacgagcgacggaaggagaaacggcagcagcaggccagtttggcaaatgataaaggaaagagtatgaacatagagggaactgatgctggagaaaccgacaaggtcctttcttccaaaacggataagcagaaggattcggtggaaagtgtaacaaagcagatgagtggcattgctatttctgagtcacatgcaatgccgtccacaaatactataaacaattcgcaaccagaatcatctgctccagacatagacaagaagattcgagcactgaaaaagaaggtttactcttgctctttcttgcgtctgcacattttctatgaaaaaaagatgaatatacgcttagctgaagcacaagtacaaggtgaccctgaaaaattgaaatctgaaacgctggaaaagattaaaaagattgatggatggtgtatggaactgaagcttttggaggacagcagagctcctgcggcctagacaaaatcgacttcggctctgatgtagtagaatagacagtagagccatcgcgaccacaccagggtgctgagctaaattccaaggtgcactgaatcaccctaggcttttccattacctgtgttggttactggaaaaccagtccggtagatgcgggtttgcgcagaacgatggagtgtttttccctgcacatttgatgtctcatgttcgccaccaagtttcaaggtttgtaccacaagatccatttatcagaaagaccacacagtgagataattcaaacgattattgtgacagtgtggttaaactttagtatactatgataattctgggaatctcttaagactgaatcagaatttagtttctccctcccggctagaattcatctcggctttaccatcattattcaattattcagttaactttacaggctgttacatctaggttgaaactgac

SEQ ID NO: 1127 - DNA, 1365 bp, Zea Mays
ctagaaaaacaaagaaaaagcgaaggcaaaatatgaaagagaaaaaaccgcaattccggttgccttcgactcaactcctcgctctggtagcccgactcccctaaacccattgtgtgcccgccgtcgacgcagcctccgtcctcccccgcatccgaatcacgcacgccacgtcccacccctgtcatggccacctccagcgacggcggcggcgaccagcggcgcctcctctccatccccaaggaaggcgagcgcatcatcgcgcccacgcgccgccccgacggcacgctccgcaaggccatccgcatccgcgccggttacgtgccccaggaggaggtcgccatctaccagtccaagggcgccctaatgaggaagtcagggcccgacgtgccgccggggtacgacccggcgctagtggccgacgccaaacccaagacgaaggcggccaaacggaacgagcgacggaaggagaaacggcagcaggccagtttggcaaatgataaaggaaagagtatgaacatagagggaactgatgctggagaaaccgacaaggtcctttcttccaaaacggataagcagaaggattcggtggaaagtgtaacaaagcagatgagtggcattgctatttctgagtcacatgcaatgccgtccacaaatactataaacaattcgcaaccagaatcatctgctccagacatagacaagaagattcgagcactgaaaaagaaggtttactcttgctctttcttgcgtctgcacattttctatgaaaaaaagatgaatatacgcttagctgaagcacaagtacaaggtgaccctgaaaaattgaaatctgaaacgctggaaaagattaaaaagattgatggatggtgtatggaactgaagcttttggaggacagcagagctcctgcggcctagacaaaatcgacttcggctctgatgtagtagaatagacagtagagccatcgcgaccacaccagggtgctgagctaaattccaaggtgcactgaatcaccctaggcttttccattacctgtgttggttactggaaaaccagtccggtagatgcgggtttgcgcagaacgatggagtgtttttccctgcacatttgatgtctcatgttcgccaccaagtttcaaggtttgtaccacaagatccatttatcagaaagaccacacagtgagataattcaaacgattattgtgacagtgtggttaaactttagtatactatgataattctgggaatctcttaagactgaatcagaatttagtttctccctcccggctagaattcatctcggctttaccatcattattcaattattcagttaactttacaggctgttacatctaggttgaaactgac

SEQ ID NO: 1128 - DNA, 2191 bp, Zea Mays
cttggtttcgctcttcttgatgagctggctatggatgcgattctccagtctctctctacgagctatgagtcattcattttgaactttcacattaatagcatgaagaagacttgggatgcttaaaacagtcaaggagagcattaaaaattactataatcatgtgatgatggttcggaaggatggaaagaaacgctctatgaaggacaagggtgaatatgagatctcaaagctaaatgcaaagcccaagtttggcccttctatttgcaccatacaacatatcaggtgaaggtctatggccattctatttgattatatgattaacatcttcactatatacccatttctcatcctcatcgagcaagatcgacagttgcatccatgcctcggttgtcggttcatgagcggctgggcccgcgagtgcggtcctcggtgttggcggggtccacagtgcctcgtatgccggttcaccccagtctgctgctcacatggaagtcattggtggccaactttccccggaagtcttatttctggaggttatcccagcggataatggtgaatgtttgcctcattcaaacagaagcactatcccgtctgacactctgaaagctgctgatgtcgttgaaactgctgatggcgtggaggacattgcttcgactgagtctcccacctcagccgcccttgagttgatgcttccgtcagccccaccgcctcagctgctagtttattcaagaaaaagatttccaaagaagcagctgatagaggaaaaaattatgaggacatggagaatgataggactgaggagcactcagttgaggaggacagggatgatgataggactgtggaggacccagttgaggaggagtcatcaaggatagaagaggagtgtcataatgttgcagccattagcactaacgttgaaccttcaccttcgcaggtagctgtcctgcctgcaggtcagttacagttcctcaaaaaactgtccaaggaaatctccggtattcttccaacccctgtgatggctctggaggcccagccacctgcgcctacccctcgtcatagtcgccgcattgcaggggcgggggttgaatttgacaagcatgatctaaacttaaagagccaagaaaaaagtaatgaaggccctggaggtgattggggtcactgaagatcttagtaaccaagcaaggaaggattatgagaaggtgttctcttcaagtctctctttggctcagattgaagctctcgcggcctcttcagatggaatgtgccggatgagcttagggctccatcgaccagcgaggttgttgctgcttgttaattgtcctttttagtgtcagttgtgtccatctatgatttaatggatccaaagaaaatatttatatggaatgtcggggtttgaactctccctccaagcaacactctgtacgaactttcattgattccgttggagcagacattgtttgcctacaagaaaccaaaatgcagaatatttctagaggaactggccttgctattcttggagtgaattttgaagaattcctctttttacctacctctggggctagtggtggtattcttttagcctggaaaagacatgtacaagcaacagggcataatagaatggacacttattctgtttctgtccaattccagcagtcaaatggccaaccttggtggttaactggtgtctatgggcctcaggacattgatgacaagattctattcctccaagagctgaggcaaatcagaaccatgggttgttgtgggtgacttcaatctaatttatagggtggaagacaaaaaataatggcaacctaaacagggcaatgatggggagattcaggagatttattaatgatgtcaaactcattgatctccctctatgtggcagaaagtatacttggtctaatcatcaatcttcgcctactttggttaaactggacagagctctttactctgctgattgggaagccctttttcccaactcccttctccagagtgctgcttcagaagactcggatcattgccccttaattcttggtcttaaaagcaactgctatggtaaacgaaggtttcattttgagtctttttggcccaaattggagggattccaggaagtagtccaggaagtgtgggcatcgagtagtggtagctcctgccccttcctgactcttgagatgaagttgaaagccac

SEQ ID NO: 1129 - DNA, 1452 bp, Zea Mays
tccttggaagttgttgtctttaaggatgatggttgtgagatttgagcaactgctaagggctggtggcagctctccagacatgttgttattgtctaagtgaagctcctccagcctcttgagctgcccaatagaattcgggatcttgccatttagtccattccaaccaagatcaaggatgaccaaatttctgagttttcctatacactcaggatcaagtgttccttgcaaatggttgttagggaaagagaggtgctctagtgaggtaacgttgaagatctcagatggaagggtcccattgagttggttctggccagccttaagcactttcaaaccagagcaattaccaagctctgagggtattctaccaatgaactggttgtagctaaggtcaaggaccacaaagaatggtttgtcaacacaaattgtgctcggaatttccccagcaaagctattattgctcatattgagagcagccagattcttcatgccctccaatgtggtggatggaaaatatcctgtgaggaagttactcgagatgttcattaccttcatcgcgctgttaggcgtggattgcagctgatggaattctccactgagcttgttgaagctgacatcaaggacagtaatgctgctggagagcaacagtttcgatgggagtccaccggagagcaagttgccagataggttgagcttcaacaggccgttgagattgccaagtgagggtgatatgtgcccctcaaggcccatagcagccagtgaaatgtctatgacagttctatctccattgcaaatgacaagatactgatatactcaaagcaggttgggtacactccagattatctcttcctcctccagaccatcttgcgtacagatccacagggagctgtgaactttgctcttatgatgtcacaaatggagggaggctgcccagtagattataatacaataactgatcttttccttcagagaaatatgatatgggaggcaacaacgtttctgttggatgttctgaaaccaaacttgccagagcatgcttttattcaaaccaaggttttggagataaacttagtgacttacccgaatgttgttgatgccattcttgctaatggtatgttcagtcattatgatcgccctcgtattgctcagctgtgtgaaaaggctgggttgtacttgcgagccctccagcattactcagagttgcctgatatcaagcgtgccattgtaaatacccatgtcattgaaccacagacacttgttgagttctttggcacattgtcaagagagtgggctttggaatgcatgaaagaccttctactggttaatctaaggggaaatcttcagattgttgtgcaggccgtgaaagaatactctgagcagctaggggttgatgcttgcatcaaattatttgagcaattcaaatcttatgagggcctttactttttcttgggatcc

SEQ ID NO: 1130 - DNA, 1761 bp, Zea Mays
aaaaatagcccggctatgccaaaatcacccccggcacgctcttctctacgcgcccctaccgtcccggcggcggccagcgctgggctcttttgccgtgccccgcggcactgcccccacgccatccgcacacacccactggaaaaacagcagccgcgcgttacggcgttagcggccaagccactttacgccagtggccgccggcaagcgcggtcaggtcgggactcgacggagagagctctcagcttctcccgacctaagtaagctaggtggacaacgcctgcaggctgcggcaccaacgcggccttcgccgcgaccccctccccatctccctcctccctaccatgcgcgagggcgaggcccacgcccacgccctcccgtcgaaaacccagctactcccgtgcctcaaagatgacgagccgcgacaaggtggggtgctcctcgatcccgctgcccctcgaccgtgtccttgccgcgctggtcgccagcacccagcaactcgggagggggtgggaggcggccttccgcgtccgatgcgggaaggcagctggagcggcggtcggggaggcggaggggaaaggagaggttatagagatgcacacgccgctgttctacgctacctgcgccctcggcggcgttctcagcaccggcctcactcacctcgctgtaacgccgctcgacctcgtcaagtgcaacatgcaggtggatcctagcaagtacagggacattacatctgcctttggtgtcatgctccatgagcaaggaccccgtggcttgttcaggggatggatggccacactggttgggtacagctgccagggggcctgcaagtttgggttctacgagttcttcaagaagtgctactctgacatttctggtcccgagaacgttgaaaggttgaggactttgatctaccttgcagcttccgcgtccgctgaggtgattgcggatgtagctctctgccccatggaggctgtcaaaattcgggtccagacacaaccgggatttgctcgctgcctggtcgatgggcttccgaagattgtccaatctgaaggctttacaaaggtctacttcctctttggggccgccaagttccctacactatgatgaaatttgcttgctttgaaactattgttgagatggtctacaagcatgctgttccgaaaccgaaagaccaatgcagtaagccactacaactagcagtgagctttgcagggggatacattgctggagtattctgcgcggctatatctcatcctgcagacaacctcgtatctttcctgaacaatgcaaatggagccaccgtggcagatgagcgcaatgggcagcctatgacgcgtttaaagtgtttgttggactgccaacatctggcggagtggttcgtagctgtgctgctgtgcctcctattcgcgccaagagggtgcaccgagaagacgtgctaaaccaacggagagtagacgtaccgcattgagaagatgtgctgaaccaacaaagcagaataggaaatgtgttgcgatttcactgagttttgtaggagttcgaaaccagttgtttaagttttagctggtagagcaaaagagcattcactttcaaggggcttttattggaacctcttgaacaacagacattgtaatgataaacagctttagaaatgcgccatgcctggtgtagcagtacaccagcaccccgtctctactagtcagagtcaaattttgcttgtgtgaccgaccattctattcaacacacgtgattatggttatgcag

SEQ ID NO: 1131 - DNA, 1840 bp, Zea Mays
aaaaatagcccggctatgccaaaatcacccccggcacgctcttctctacgcgcccctaccgtcccggcggcggccagcgctgggctcttttgccgtgccccgcggcactgcccccacgccatccgcacacacccactggaaaaacagcagccgcgcgttacggcgttagcggccaagccactttacgccagtggccgccggcaagcgcggtcaggtcgggactcgacggagagagctctcagcttctcccgacctaagtaagctaggtggacaacgcctgcaggctgcggcaccaacgcggccttcgccgcgaccccctccccatctccctcctccctaccatgcgcgagggcgaggcccacgcccacgccctcccgtcgaaaacccagctactcccgtgcctcaaagatgacgagccgcgacaaggtggggtgctcctcgatcccgctgcccctcgaccgtgtccttgccgcgctggtcgccagcacccagcaactcgggagggggtgggaggcggccttccgcgtccgatgcgggaaggcagctggagcggcggtcggggaggcggaggggaaaggagaggttatagagatgcacacgccgctgttctacgctacctgcgccctcggcggcgttctcagcaccggcctcactcacctcgctgtaacgccgctcgacctcgtcaagtgcaacatgcaggtggatcctagcaagtacagggacattacatctgcctttggtgtcatgctccatgagcaaggaccccgtggcttgttcaggggatggatggccacactggttgggtacagctgccagggggcctgcaagtttgggttctacgagttcttcaagaagtgctactctgacatttctggtcccgagaacgttgaaaggttgaggactttgatctaccttgcagcttccgcgtccgctgaggtgattgcggatgtagctctctgccccatggaggctgtcaaaattcgggtccagacacaaccgggatttgctcgctgcctggtcgatgggcttccgaagattgtccaatctgaaggctttacaaaggtctacttcctctttggggccgccaagttccctacactatgatgaaatttgcttgctttgaaactattgttgagatggtctacaagcatgctgttccgaaaccgaaagaccaatgcagtaagccactacaactagcagtgagctttgcagggggatacattgctggagtattctgcgcggctatatctcatcctgcagacaacctcgtatctttcctgaacaatgcaaatggagccaccgtggcagatgctgtaagaactcttggaatatggggtcttttcacacgcggccttcctcttcgtataattatggttggtactctcacaggagcgcaatgggcagcctatgacgcgtttaaagtgtttgttggactgccaacatctggcggagtggttcgtagctgtgctgctgtgcctcctattcgcgccaagagggtgcaccgagaagacgtgctaaaccaacggagagtagacgtaccgcattgagaagatgtgctgaaccaacaaagcagaataggaaatgtgttgcgatttcactgagttttgtaggagttcgaaaccagttgtttaagttttagctggtagagcaaaagagcattcactttcaaggggcttttattggaacctcttgaacaacagacattgtaatgataaacagctttagaaatgcgccatgcctggtgtagcagtacaccagcaccccgtctctactagtcagagtcaaattttgcttgtgtgaccgaccattctattcaacacacgtgattatggttatgcag

SEQ ID NO: 1132 - DNA, 850 bp, Zea Mays
gaaatcatcaataaaagtgatcatataatcacaacctccaatagaagaatgaggagcccgaccccaaagatcagaatgaatataatcaagaatgcatttggtgcaacactatgatgaaatttgcttgctttgaaactattgttgagatggtctacaagcatgctgttccgaaaccgaaagaccaatgcagtaagccactacaactagcagtgagctttgcagggggatacattgctggagtattctgcgcggctatatctcatcctgcagacaacctcgtatctttcctgaacaatgcaaatggagccaccgtggcagatgctgtaagaactcttggaatatggggtcttttcacacgcggccttcctcttcgtataattatggttggtactctcacaggagcgcaatgggcagcctatgacgcgtttaaagtgtttgttggactgccaacatctggcggagtggttcgtagctgtgctgctgtgcctcctattcgcgccaagagggtgcaccgagaagacgtgctaaaccaacggagagtagacgtaccgcattgagaagatgtgctgaaccaacaaagcagaataggaaatgtgttgcgatttcactgagttttgtaggagttcgaaaccagttgtttaagttttagctggtagagcaaaagagcattcactttcaaggggcttttattggaacctcttgaacaacagacattgtaatgataaacagctttagaaatgcgccatgcctggtgtagcagtacaccagcaccccgtctctactagtcagagtcaaattttgcttgtgtgaccgaccattctattcaacacacgtgattatggttatgcag

SEQ ID NO: 1133 - DNA, 1483 bp, Zea Mays
cttcctttcctctcctctctcacgagcttctctctcacatctcgtactgccgcatcgtcccacacgtccctccgtccatggtctcaccggcgttcccctcccccgctccccccattccccccgcattccgtccgtggtctcatgggacaagacggtgaggctttacgacgctgacgccaacgtgctcaagagggagttcatgcaccctggggccatcctcgactgctgcttccacgacgactcctcaggctttagcgccggagccgaccacaccattcggaggttggtattaagctcgtccaaggaagatgttttggggcggcatgatggtccagttcgttgtgtggaatactcttatgctgcagatacttttatttctatggatttgcttttggatttcttttctagcgtttctttttcttctgcaaggtacttctgcagcctgatgcagctataaatagaacacattgatagctatttttgtacttgaattccaaaaacactatatatagttatgcagttatgcttttgaaagtatttactcctaggccaagataaaaattatattctgcacagtttacaatgccacaatgcaaaatctttatctctcaatttgaactaagaattgtacatatgtccttgccagaatcgtgtctttggtacctggttttttcttttctttttgtccttggaatatattttgtagtattttagttgtcagcaacttaactatgcattgtcctcaatctaatcacaatctctgtccaatcgtgccatgtctttgttctatattttacacatttttttagaaataaataactattaaccgctcacctgattactaagcttatacgagaggaaacattctataactttcaagttagtcgatactggaagtaattggcttctggatatttggttacaacatttactttggttgcaagaagaggggtaactttagcccctgtttcagaatactggaaagggaccgctacttaaaaatggatgcttccatgaattccatccaacattacttttcagtatgagtgacacgttggggtcagatttgaacatgattattgcaagtcaagacatcgtcatataattattccaatatcaagtatgatgcaaaatcaagggatgggaactccatctgttcaacaatcagagagctcagggtcagaaccatacaggctctttcacaggactgctggaaaagagctatggaggttgaactgaagttaattcaagaaaatcagacctgggagattgctgatctgccaagggatcactaaggctataggactcaaatgggttttcaaagtaaagagggatccaacattagtgcgaacaattgtattttagtttagatttagagtacacttatgtatgagttgtttgacaatgcttatttatgagacattaaaatgtacttatttatattatattaattataatgttgttcaatatatgtttatgtata

SEQ ID NO: 1134 - DNA, 1468 bp, Zea Mays
cttcctttcctctcctctctcacgagcttctctctcacatctcgtactgccgcatcgtcccacacgtccctccgtccatggtctcaccggcgttcccctcccccgctccccccattccccccgcattccgtccgtggtctcatgggacaagacggtgaggctttacgacgctgacgccaacgtgctcaagagggagttcatgcaccctggggccatcctcgactgctgcttccacgacgactcctcaggctttagcgccggagccgaccacaccattcggaggttggtattaagctcgtccaaggaagatgttttggggcggcatgatggtccagttcgttgtgtggaatactcttatgctgcagatacttttatttctatggatttgcttttggatttcttttctagcgtttctttttcttctgcaaggtacttctgcagcctgatgcagctataaatagaacacattgatagctatttttgtacttgaattccaaaaacactatatatagttatgcagttatgcttttgaaagtatttactcctaggccaagataaaaattatattctgcacagtttacaatgccacaatgcaaaatctttatctctcaatttgaactaagaattgtacatatgtccttgccagaatcgtgtctttggtacctggttttttcttttctttttgtccttggaatatattttgtagtattttagttgtcagcaacttaactatgcattgtcctcaatctaatcacaatctctgtccaatcgtgccatgtctttgttctatattttacacatttttttagaaataaataactattaaccgctcacctgattactaagcttatacgagaggaaacattctataactttcaagttagtcgatactggaagtaattggcttctggatatttggttacaacatttactttggttgcaagaagaggggtaactttagcccctgtttcagaatactggaaagggaccgctacttaaaaatggatgcttccatgaattccatccaacattacttttcagtatgagtgacacgttggggtcagatttgaacatgattattgcaagtcaagacatcgtcatataattattccaatatcaagtatgatgcaaaatcaagggatgggaactccatctgttcaacaatcagagagctcagggctctttcacaggactgctggaaaagagctatggaggttgaactgaagttaattcaagaaaatcagacctgggagattgctgatctgccaagggatcactaaggctataggactcaaatgggttttcaaagtaaagagggatccaacattagtgcgaacaattgtattttagtttagatttagagtacacttatgtatgagttgtttgacaatgcttatttatgagacattaaaatgtacttatttatattatattaattataatgttgttcaatatatgtttatgtata

SEQ ID NO: 1135 - DNA, 1500 bp, Zea Mays
cttcctttcctctcctctctcacgagcttctctctcacatctcgtactgccgcatcgtcccacacgtccctccgtccatggtctcaccggcgttcccctcccccgctccccccattccccccgcattccgtccgtggtctcatgggacaagacggtgaggctttacgacgctgacgccaacgtgctcaagagggagttcatgcaccctggggccatcctcgactgctgcttccacgacgactcctcaggctttagcgccggagccgaccacaccattcggaggttggtattaagctcgtccaaggaagatgttttggggcggcatgatggtccagttcgttgtgtggaatactcttatgctgcagatacttttatttctatggatttgcttttggatttcttttctagcgtttctttttcttctgcaaggtacttctgcagcctgatgcagctataaatagaacacattgatagctatttttgtacttgaattccaaaaacactatatatagttatgcagttatgcttttgaaagtatttactcctaggccaagataaaaattatattctgcacagtttacaatgccacaatgcaaaatctttatctctcaatttgaactaagaattgtacatatgtccttgccagaatcgtgtctttggtacctggttttttcttttctttttgtccttggaatatattttgtagtattttagttgtcagcaacttaactatgcattgtcctcaatctaatcacaatctctgtccaatcgtgccatgtctttgttctatattttacacatttttttagaaataaataactattaaccgctcacctgattactaagcttatacgagaggaaacattctataactttcaagttagtcgatactggaagtaattggcttctggatatttggttacaacatttactttggttgcaagaagaggggtaactttagcccctgtttcagaatactggaaagggaccgctacttaaaaatggatgcttccatgaattccatccaacattacttttcagtatgagtgacacgttggggtcagatttgaacatgattattgcaagtcaagacatcgtcatataattattccaatatcaagtatgatgcaaaatcaagggatgggaactccatctgttcaacaatcagagagctcagggtcagaaccatacaggttcagaacattgactggctctttcacaggactgctggaaaagagctatggaggttgaactgaagttaattcaagaaaatcagacctgggagattgctgatctgccaagggatcactaaggctataggactcaaatgggttttcaaagtaaagagggatccaacattagtgcgaacaattgtattttagtttagatttagagtacacttatgtatgagttgtttgacaatgcttatttatgagacattaaaatgtacttatttatattatattaattataatgttgttcaatatatgtttatgtata

SEQ ID NO: 1136 - DNA, 936 bp, Zea Mays
cctttcctctcctctctcacgagcttctctctcacatctcgtactgccgcatcgtcccacacgtccctccgtccatggtctcaccggcgttcccctcccccgctccccccattccccccgcattccgtccgtggtctcatgggacaagacggtgaggctttacgacgctgacgccaacgtgctcaagagggagttcatgcaccctggggccatcctcgactgctgcttccacgacgactcctcaggctttagcgccggagccgaccacaccattcggaggttggtattaagctcgtccaaggaagatgttttggggcggcatgatggtccagttcgttgtgtggaatactcttatgctgcagatacttttatttctatggatttgcttttggatttcttttctagcgtttctttttcttctgcaagaatactggaaagggaccgctacttaaaaatggatgcttccatgaattccatccaacattacttttcagtatgagtgacacgttggggtcagatttgaacatgattattgcaagtcaagacatcgtcatataattattccaatatcaagtatgatgcaaaatcaagggatgggaactccatctgttcaacaatcagagagctcagggtcagaaccatacaggctctttcacaggactgctggaaaagagctatggaggttgaactgaagttaattcaagaaaatcagacctgggagattgctgatctgccaagggatcactaaggctataggactcaaatgggttttcaaagtaaagagggatccaacattagtgcgaacaattgtattttagtttagatttagagtacacttatgtatgagttgtttgacaatgcttatttatgagacattaaaatgtacttatttatattatattaattataatgttgttcaatatatgtttatgtata

SEQ ID NO: 1137 - DNA, 1033 bp, Zea Mays
ctcctctctcacgagcttctctctcacatctcgtactgccgcatcgtcccacacgtccctccgtccatggtctcaccggcgttcccctcccccgctccccccattccccccgcattccgtccgtggtctcatgggacaagacggtgaggctttacgacgctgacgccaacgtgctcaagagggagttcatgcaccctggggccatcctcgactgctgcttccacgacgactcctcaggctttagcgccggagccgaccacaccattcggaggttggtattaagctcgtccaaggaagatgttttggggcggcatgatggtccagttcgttgtgtggaatactcttatgctgcagatacttttatttctatggatttgcttttggatttcttttctagcgtttctttttcttctgcaagatactggaaagggaccgctacttaaaaatggatgcttccatgaattccatccaacattacttttcagtatgagtgacacgttggggtcagatttgaacatgattattgcaagtcaagacatcgtcatataattattccaatatcaagtatgatgcaaaatcaagggatgggaactccatctgttcaacaatcagagagctcagggtcagaaccatacaggttcagaacattgactggtttgtttgatgcaactgaacaagtgcatcactttgagtatagtggagtgtgcatgctggcagctgatgaacctgcatgtgtggaacaggctctttcacaggactgctggaaaagagctatggaggttgaactgaagttaattcaagaaaatcagacctgggagattgctgatctgccaagggatcactaaggctataggactcaaatgggttttcaaagtaaagagggatccaacattagtgcgaacaattgtattttagtttagatttagagtacacttatgtatgagttgtttgacaatgcttatttatgagacattaaaatgtacttatttatattatattaattataatgttgttcaatatatgtttatgtata

SEQ ID NO: 1138 - DNA, 803 bp, Zea Mays
agctgcaccactaatccactatacagcaccaagtttgagggctcgatgctggttgaccttgaccttgtgctcgtcaaccgagtcccgactgcatcgatctgacggcctttctacgcgcaacgacgaagcttcgcgaatcccctccttccttcggcctcaccttcttattctccgccgaacaagtcttagacgcctaatccgtagtttacatcccgaagggcggcaagggtgatccaggccgaccatggcttacgtcgagagaggtgttgtgaaagacaagcggactatatggcgactgagcataatctcagacttctttcgggctattgtcaacttcatcagaatcttctttgacacactgttctcagtggacaaaactgacagctacaagaaagggtatggtgctggtaagaagtgggatggtggacctggtggtggtggtgggcggggcccatatggaggtggaggtggttctctccctgcttgtggatcctgctgcggctaatgagcgcacagccgttctgcctgatgactgcttaacagatgaatacacatgcttcaatatgttctgaagaacatcatagctatcaatatgtatttcactgtcagacgattgtattatatataattagtgtgtcgtttattaacagttaatttacctgtaacttgactctggcatgattcacatggcacattcatggtttatcttttgtgtactgctgtccggttgcataatctctatttatttattaaggtttacttgttaaggcagcaagggtagtttgtcttcctttggttctgtc

SEQ ID NO: 1139 - DNA, 792 bp, Zea Mays
agctgcaccactaatccactatacagcaccaagtttgagggctcgatgctggttgaccttgaccttgtgctcgtcaaccgagtcccgactgcatcgatctgacggcctttctacgcgcaacgacgaagcttcgcgaatcccctccttccttcggcctcaccttcttattctccgccgaacaagtcttagacgcctaatccgtagtttacatcccgaagggcggcaagggtgatccaggccgaccatggcttacgtcgagagaggtgttgtgaaagacaagcggactatatggcgactgagcataatctcagacttctttcgggctattgtcaacttcatcagaatcttctttgacacactgttctcagtggacaaaactgacagctacaagaaagggtatggtgctggtaagaagtgggatggtggacctggtggtggtggtgggcggggcccatatggaggtggaggtggtggatttggcggcggaggtggaggtggtaggggtcctcgcactctatctgacatccaatccaatgaccacagttctctccctgcttgtggatcctgctgcggctaatgagcgcacagccgttctgcctgatgactgcttaacagatgaatacacatgcttcaatatgttctgaagaacatcatagctatcaatatgtatttcactgtcagacgattgtattatatataattagtgtgtcgtttattaacagttaatttacctgtaacttgactctggcatgattcacatggcacattcatggtttatcttttgaaaagaaa

SEQ ID NO: 1140 - DNA, 747 bp, Zea Mays
agctgcaccactaatccactatacagcaccaagtttgagggctcgatgctggttgaccttgaccttgtgctcgtcaaccgagtcccgactgcatcgatctgacggcctttctacgcgcaacgacgaagcttcgcgaatcccctccttccttcggcctcaccttcttattctccgccgaacaagtcttagacgcctaatccgtagtttacatcccgaagggcggcaagggtgatccaggccgaccatggcttacgtcgagagaggtgttgtgaaagacaagcggactatatggcgactgagcataatctcagacttctttcgggctattgtcaacttcatcagaatcttctttgacacactgttctcagtggacaaaactgacagctacaagaaagggtatggtgctggtaagaagtgggatggtggacctggtggtggtggtgggcggggcccatatggaggtggaggtggtggatttggcggcggaggtggaggtggttctctccctgcttgtggatcctgctgcggctaatgagcgcacagccgttctgcctgatgactgcttaacagatgaatacacatgcttcaatatgttctgaagaacatcatagctatcaatatgtatttcactgtcagacgattgtattatatataattagtgtgtcgtttattaacagttaatttacctgtaacttgactctggcatgattcacatggcacattcatggtttatcttttgaaaagaaa

SEQ ID NO: 1141 - DNA, 3809 bp, Zea Mays
taggccttccaaacgtgtgttctacccaaaaaaatgatgtggaataaaactggtaataccatgctagctaggaacacagattatcagacaagtcattgtactcttaaaggacatagttacacttaaaggtagaaataccaaattaagaaccagaactaaaatatcaagatcaattgacgccaatacttacctccacatctcattgccattgagagtttgcttttgtattgcatgtataatctcagatccaactgtttatcaatacattttgaggaatcaaactaacatacttttctcacttcatctagaaaaatattgactactcaaaagatttgaataattatctaaattcagtattgttatggttgctagatcggtgagggattggagacggatatcgatgggcaagaacgtcggccgggggcctctgcccacggccgagcaagaggagggtttctcccttctaattcttgactactttatttcccatccattgattacataaataggtcagctgaccggctggacgcccctgtctagctagagattcttatctctttaaaactctcctaaaaactctcaacaaactactaattgataaccttcctagataatctcaactaatcttctaatcttatctctaattatccttatttaatcccctttggaggacccatggctgctgctgccgcaacccctccgtgggcctccataggccctgacactacaccccccctggacaagcagctcgtctcgagctacaacatccaacaaacgatctgtaatgacctaacctatcaccgaaaaatgaaccttttacatctcggctcatcttttaattattctagatatactgcaactgcaagcatcatcatgtgtcccaaggaaacgttgcacaacgaagaggggggcgcgagctggaaccacggaggtaaagacacaacagccttcagaggcgggcccgtggaggccaacattggtgttccctgcagcaagtggatcccgtgtagtgcagccctcatggccccgtggccaccagtgcgcagagggtggtgtagccagagcagatggtggcgacgctagcagacccccttgtacgaaggagagtagtcgtggtagttgcccggtcgccacaaacgaggcccagcgccggacgaagcgttgtagaggggtgccatgtcttgcagcctcttgtacgcggaggtgaacatccaccatgttgctcagccacgctggtgtaactacggctcccccgcaatggagcacccccaacatctgcttcacctgccgacacgataggaaactgcatgttgcaacctacaggtggacgaccgccgccgtctatcgcagagcaaccaccctctcctggacgtcgctcttggggtcaagggtagcagtgatggctgcccctgatgaagggggcagtgtcggtgatgagggcacgacaaatgtggcaacagaagtcgccactgctgcgagggaaccaaagtgctgctagcacaagatcttgaaatgtggccacgtgacctgacgctcatcgcgttctagccaccagaaccatgtatgtgcgtggccggtgaggtgatacgatgccagccaggccttgttggactccaaggtgcgctggctccagaagaattgctcgcatccgtttaaccacccagagggtcaccgatgtcgtcgtagatggggaaagatggggtgctgcggtcgccgacatggtagcagcagcgagggtcggtgccaggggctagtacaccggtcctggtatggttgcccctggcatcgtcagccatgcagctggtgataaagacggccctaagggcacaacgcaactggtaggcatcgcctcccacgaagatgtaggtgccggagcgggcgacaacggccaggccactggtgctagcgtgctgctggagagcgccatgttgattgcgttgagcctcgcaaacagatcgtcgaagtacgcctggtcgggaacccaaggacccatgagaggagaggcgcggccgcgggccgctcgtactgcatgacgttggtgtcggggttccagtagtagaggtagccggtgatgccatcgacgaggccgcgccacggcttgggcagcgacgggtcttccgacgcgtaccccgggactgcgcgcccgaacgagccactaccgctcgacatcgggtccggtcaggcctaggcaacccgcggtggtgcccacaacgtgatgcggaggtggcgtcccggcgtcgcggggcagacgcgtcccggcagcacggaggtgacgcaacctgccggcgtggaggtggaggcggcggcggcgaacccagagcgacgaggcctccggcgtggaagtgtcctggcggggggtgctgcgtgcgagggatcgcgcttcagcgctggagggtcggttgtacgcgcgctggttgaggtgtggcggtgagcgacggcgtagatgtggcagacgcgcggcggagatgtggtggcggctgcgcgttgcgggcgagcagcgcagaacagacgcagtggaagggcgatgggaaaaaatttggctccgaattctagacgttatgatagttagatcagtgagggattggagaagggtatcgatgggcaggaacgtcggccgagggcctctgcccacggccgagtaagaggaaggtttctcaggcccccggccaagtaagaggagggtttttcccttctaattcttgcctactttatttctcatccattgatgacataaataggtcggctagccggctggccgcccctgtcaagctagagatccttatctcctaaaaattatcaacaaactactaactgataacctttcccgatagtctcaactcttagataatatcaactaatcttctaatcttatctataactatccttatctaatccccattggagggcccatggctgctgccgccgcagcccctctgtgggcctccttaggccctgacaagtatagcctagaattcttgtgtcacttatggacaaattgattacactgtagcctcataaattcacaatttaatttgttgaccctaaatagacagcaccagaataagagaggaagttgtgaagtgcaaaacatcattaagtgcacagaaaaagttttaccctgtcagatatgaaactccaataagagtagatgttattacatgatgagacatcattacagcaaaatcttttctgcgggtttcccaagcaacaagagcaccaatgctgtagatataaaatccacactggcacatatagaaaagcatcaacgaggacctgagagaaagcagaatatacattagagggcgcaaaaattaccacttagctccagaagtcgagagaacatgttaaatggtaaccaagtaatatgcatggggttctttaacttgtggaaataagtactgaagaatgacagcccccaatctaagccattcaatcagcatgagttcaaatacaaggattttgcgggtgctgccattgaatggcacagatcaaaagtttgtatagcccgtttttagcagaaggccacaagatgtgcccctgcgaccctgtcatttgtagaaaaacaatggcaaacagaagtaaatttgaagcggttacatttatgattcatatggtttacaggtggtagcgattcagctgtcaagaattcaagatacataagctgtgaaaaccacgctgaagaaaaggaagcagaacaagtagcatgtttacagattttgtttgtattgtatgcacgcagcatgcccaatatcacctctgatgactacataaagggcacgactaatatgcaagcaggtactaggtacaag

SEQ ID NO: 1142 - DNA, 1806 bp, Zea Mays
cttgcgttcgctggtcgccggttttggcgctagactagaaaaacgtggacttccacctggtggtggtgggtggctgcgtactgcgggccgctgccgatcgagtaaaaaaaaaacgccgggcatcggccgcctcctacccccaaccccctccaccctgtcctcggacaggcggcgtcggtgcgccggcggtgccagcgcggaggcggaacacccagacagcccggaccttcagctgtctgcttctgcgtctggcttgcgggagcgatcccgtcttctgtcgaccagtcgtggactcaaactagagctggcttcgccatagacttctggaggaggcaacgggattgggaattggaacatggggagttcggtcggctgcttgggaggcggctccaagtcgaggcaagatcagaatggtcaggtcgtcgcgggttcgtctccccgttcaggtcatgaattatcaagacctggaaataatgtacatgtattctccctaaacgagttgaagactgccacacgaaactttcacatgttgaattgcattggccgtggggggttcggagcagtgtataaggcacccaaaccttatcaagctgattggttgctgtgttgaagggagtaacagactattggtgtacgaatatgcagagaataatagtttggcgaatgctttgcttggaccaaagaacaaatgtatcccattggactggcagaaaagagttgctatatgtattggaactgcttctggccttgcttttcttcatgaggaagcacaaccacggattgtccaccgtgatatcaaggctagcaacattttacttgataagaagctgctgccgaaaattggagattttggattggcgaaactctttcctgatactgtcactcacattagcacgcgtgttgcaggaacaatgggttatttggcaccagagtatgccttgttgggacaattgaccaagaaagcagacatatatagttttggggtgcttcttcttgaaatgataagtggtgaaagcagcagcaagtcgacttggggacctaatatgcatgttctcgtggaatggacatggaagctgcgggaagaaggaaggctcttggaaattgttgatccagaactggaaaagtacccagaggagcaaatgcttcgtttcattaaagtggcactgctgtgtacgcaagccacgtcccagcagaggccgtccatgaagcaggtcgttaatatgctatctaaccaaacagaaattgatctgcaaaatgtagctccaccaggtgtgctgaaagaacctcggcagcgtaccggtggctttgggggtttgatagcagacacgtcctcaagccaaagcactaaaggcaacccagctgaatcatacagcacacagaccaacatgaacagctctcagtttagcacaactgatgtatcaccacggtgacgttgtcgactattgtttgacgtcttcagaggtgtctcgcgcctcccacaaggtttattgtgctgagcccggacaaaatcgcttgatatggaaggcctgatccattttcatcctgttttagagctacgtaggatgcgaaggccgctgtgaattgctgatgtacaggaattgtagctcatctgtttttcttttctgcggaggatgatttgcagttaaatttgacattttttttatgttctccattaaagcctgttgtaggtatacattgcaagagtacaagacatgtattcgaaatttcaaaaattcatgaagactactgtagctttccttcatgctttcaacaacccgtgaaactcttcatgagttagaaaaaaaa

SEQ ID NO: 1143 - DNA, 1755 bp, Zea Mays
ctggtcgccggttttggcgctagactagaaaaacgtggacttccacctggtggtggtgggtggctgcgtactgcgggccgctgccgatcgagtaaaaaaaaaacgccgggcatcggccgcctcctacccccaaccccctccaccctgtcctcggacaggcggcgtcggtgcgccggcggtgccagcgcggaggcggaacacccagacagcccggaccttcagctgtctgcttctgcgtctggcttgcgggagcgatcccgtcttctgtcgaccagtcgtggactcaaactagagctggcttcgccatagacttctggaggaggcaacgggattgggaattggaacatggggagttcggtcggctgcttgggaggcggctccaagtcgaggcaagatcagaatggtcaggtcgtcgcgggttcgtctccccgttcaggtcatgaattatcaagacctggaaataatgtacatgtattctccctaaacgagttgaagactgccacacgaaactttcacatgttgaattgcattggccgtggggggttcggagcagtgtataagggagtaacagactattggtgtacgaatatgcagagaataatagtttggcgaatgctttgcttggaccaaagaacaaatgtatcccattggactggcagaaaagagttgctatatgtattggaactgcttctggccttgcttttcttcatgaggaagcacaaccacggattgtccaccgtgatatcaaggctagcaacattttacttgataagaagctgctgccgaaaattggagattttggattggcgaaactctttcctgatactgtcactcacattagcacgcgtgttgcaggaacaatgggttatttggcaccagagtatgccttgttgggacaattgaccaagaaagcagacatatatagttttggggtgcttcttcttgaaatgataagtggtgaaagcagcagcaagtcgacttggggacctaatatgcatgttctcgtggaatggacatggaagctgcgggaagaaggaaggctcttggaaattgttgatccagaactggaaaagtacccagaggagcaaatgcttcgtttcattaaagtggcactgctgtgtacgcaagccacgtcccagcagaggccgtccatgaagcaggtcgttaatatgctatctaaccaaacagaaattgatctgcaaaatgtagctccaccaggtgtgctgaaagaacctcggcagcgtaccggtggctttgggggtttgatagcagacacgtcctcaagccaaagcactaaaggcaacccagctgaatcatacagcacacagaccaacatgaacagctctcagtttagcacaactgatgtatcaccacggtgacgttgtcgactattgtttgacgtcttcagaggtgtctcgcgcctcccacaaggtttattgtgctgagcccggacaaaatcgcttgatatggaaggcctgatccattttcatcctgttttagagctacgtaggatgcgaaggccgctgtgaattgctgatgtacaggaattgtagctcatctgtttttcttttctgcggaggatgatttgcagttaaatttgacattttttttatgttctccattaaagcctgttgtaggtatacattgcaagagtacaagacatgtattcgaaatttcaaaaattcatgaagactactgtagctttccttcatgctttcaacaacccgtgaaactcttcatgagttagaaaaaaaa

SEQ ID NO: 1144 - DNA, 1875 bp, Zea Mays
cgtggacttccacctggtggtggtgggtggctgcgtactgcgggccgctgccgatcgagtaaaaaaaaaacgccgggcatcggccgcctcctacccccaaccccctccaccctgtcctcggacaggcggcgtcggtgcgccggcggtgccagcgcggaggcggaacacccagacagcccggaccttcagctgtctgcttctgcgtctggcttgcgggagcgatcccgtcttctgtcgaccagtcgtggactcaaactagagctggcttcgccatagacttctggaggaggcaacgggattgggaattggaacatggggagttcggtcggctgcttgggaggcggctccaagtcgaggcaagatcagaatggtcaggtcgtcgcgggttcgtctccccgttcagtgcaggtcatgaattatcaagacctggaaataatgtacatgtattctccctaaacgagttgaagactgccacacgaaactttcacatgttgaattgcattggccgtggggggttcggagcagtgtataagggaaacctgaaaaatggcactccaattgcaattaaaaaacttgcagctgagtcaaaacaaggaattagtgaattcttgacagagattaatgtcatatcaaatgttaggcacccaaaccttatcaagctgattggttgctgtgttgaagggagtaacagactattggtgtacgaatatgcagagaataatagtttggcgaatgctttgcttggaccaaagaacaaatgtatcccattggactggcagaaaagagttgctatatgtattggaactgcttctggccttgcttttcttcatgaggaagcacaaccacggattgtccaccgtgatatcaaggctagcaacattttacttgataagaagctgctgccgaaaattggagattttggattggcgaaactctttcctgatactgtcactcacattagcacgcgtgttgcaggaacaatgggttatttggcaccagagtatgccttgttgggacaattgaccaagaaagcagacatatatagttttggggtgcttcttcttgaaatgataagtggtgaaagcagcagcaagtcgacttggggacctaatatgcatgttctcgtggaatggacatggaagctgcgggaagaaggaaggctcttggaaattgttgatccagaactggaaaagtacccagaggagcaaatgcttcgtttcattaaagtggcactgctgtgtacgcaagccacgtcccagcagaggccgtccatgaagcaggtcgttaatatgctatctaaccaaacagaaattgatctgcaaaatgtagctccaccaggtgtgctgaaagaacctcggcagcgtaccggtggctttgggggtttgatagcagacacgtcctcaagccaaagcactaaaggcaacccagctgaatcatacagcacacagaccaacatgaacagctctcagtttagcacaactgatgtatcaccacggtgacgttgtcgactattgtttgacgtcttcagaggtgtctcgcgcctcccacaaggtttattgtgctgagcccggacaaaatcgcttgatatggaaggcctgatccattttcatcctgttttagagctacgtaggatgcgaaggccgctgtgaattgctgatgtacaggaattgtagctcatctgtttttcttttctgcggaggatgatttgcagttaaatttgacattttttttatgttctccattaaagcctgttgtaggtatacattgcaagagtacaagacatgtattcgaaatttcaaaaattcatgaagactactgtagctttccttcatgctttcaacaacccgtgaaactcttcatgagttagaaaaaaaa

SEQ ID NO: 1145 - DNA, 1862 bp, Zea Mays
cgtggacttccacctggtggtggtgggtggctgcgtactgcgggccgctgccgatcgagtaaaaaaaaaacgccgggcatcggccgcctcctacccccaaccccctccaccctgtcctcggacaggcggcgtcggtgcgccggcggtgccagcgcggaggcggaacacccagacagcccggaccttcagctgtctgcttctgcgtctggcttgcgggagcgatcccgtcttctgtcgaccagtcgtggactcaaactagagctggcttcgccatagacttctggaggaggcaacgggattgggaattggaacatggggagttcggtcggctgcttgggaggcggctccaagtcgaggcaagatcagaatggtcaggtcgtcgcgggttcgtctccccgttcaggtcatgaattatcaagacctggaaataatgtacatgtattctccctaaacgagttgaagactgccacacgaaactttcacatgttgaattgcattggccgtggggggttcggagcagtgtataagggaaacctgaaaaatggcactccaattgcaattaaaaaacttgcagctgagtcaaaacaaggaattagtgaattcttgacagagattaatgtcatatcaaatgttaggcacccaaaccttatcaagctgattggttgctgtgttgaagggagtaacagactattggtgtacgaatatgcagagaataatagtttggcgaatgctttgcttgaacaaatgtatcccattggactggcagaaaagagttgctatatgtattggaactgcttctggccttgcttttcttcatgaggaagcacaaccacggattgtccaccgtgatatcaaggctagcaacattttacttgataagaagctgctgccgaaaattggagattttggattggcgaaactctttcctgatactgtcactcacattagcacgcgtgttgcaggaacaatgggttatttggcaccagagtatgccttgttgggacaattgaccaagaaagcagacatatatagttttggggtgcttcttcttgaaatgataagtggtgaaagcagcagcaagtcgacttggggacctaatatgcatgttctcgtggaatggacatggaagctgcgggaagaaggaaggctcttggaaattgttgatccagaactggaaaagtacccagaggagcaaatgcttcgtttcattaaagtggcactgctgtgtacgcaagccacgtcccagcagaggccgtccatgaagcaggtcgttaatatgctatctaaccaaacagaaattgatctgcaaaatgtagctccaccaggtgtgctgaaagaacctcggcagcgtaccggtggctttgggggtttgatagcagacacgtcctcaagccaaagcactaaaggcaacccagctgaatcatacagcacacagaccaacatgaacagctctcagtttagcacaactgatgtatcaccacggtgacgttgtcgactattgtttgacgtcttcagaggtgtctcgcgcctcccacaaggtttattgtgctgagcccggacaaaatcgcttgatatggaaggcctgatccattttcatcctgttttagagctacgtaggatgcgaaggccgctgtgaattgctgatgtacaggaattgtagctcatctgtttttcttttctgcggaggatgatttgcagttaaatttgacattttttttatgttctccattaaagcctgttgtaggtatacattgcaagagtacaagacatgtattcgaaatttcaaaaattcatgaagactactgtagctttccttcatgctttcaacaacccgtgaaactcttcatgagttagaaaaaaaa

SEQ ID NO: 1146 - DNA, 1819 bp, Zea Mays
cgtggacttccacctggtggtggtgggtggctgcgtactgcgggccgctgccgatcgagtaaaaaaaaaacgccgggcatcggccgcctcctacccccaaccccctccaccctgtcctcggacaggcggcgtcggtgcgccggcggtgccagcgcggaggcggaacacccagacagcccggaccttcagctgtctgcttctgcgtctggcttgcgggagcgatcccgtcttctgtcgaccagtcgtggactcaaactagagctggcttcgccatagacttctggaggaggcggctccaagtcgaggcaagatcagaatggtcaggtcgtcgcgggttcgtctccccgttcaggtcatgaattatcaagacctggaaataatgtacatgtattctccctaaacgagttgaagactgccacacgaaactttcacatgttgaattgcattggccgtggggggttcggagcagtgtataagggaaacctgaaaaatggcactccaattgcaattaaaaaacttgcagctgagtcaaaacaaggaattagtgaattcttgacagagattaatgtcatatcaaatgttaggcacccaaaccttatcaagctgattggttgctgtgttgaagggagtaacagactattggtgtacgaatatgcagagaataatagtttggcgaatgctttgcttggaccaaagaacaaatgtatcccattggactggcagaaaagagttgctatatgtattggaactgcttctggccttgcttttcttcatgaggaagcacaaccacggattgtccaccgtgatatcaaggctagcaacattttacttgataagaagctgctgccgaaaattggagattttggattggcgaaactctttcctgatactgtcactcacattagcacgcgtgttgcaggaacaatgggttatttggcaccagagtatgccttgttgggacaattgaccaagaaagcagacatatatagttttggggtgcttcttcttgaaatgataagtggtgaaagcagcagcaagtcgacttggggacctaatatgcatgttctcgtggaatggacatggaagctgcgggaagaaggaaggctcttggaaattgttgatccagaactggaaaagtacccagaggagcaaatgcttcgtttcattaaagtggcactgctgtgtacgcaagccacgtcccagcagaggccgtccatgaagcaggtcgttaatatgctatctaaccaaacagaaattgatctgcaaaatgtagctccaccaggtgtgctgaaagaacctcggcagcgtaccggtggctttgggggtttgatagcagacacgtcctcaagccaaagcactaaaggcaacccagctgaatcatacagcacacagaccaacatgaacagctctcagtttagcacaactgatgtatcaccacggtgacgttgtcgactattgtttgacgtcttcagaggtgtctcgcgcctcccacaaggtttattgtgctgagcccggacaaaatcgcttgatatggaaggcctgatccattttcatcctgttttagagctacgtaggatgcgaaggccgctgtgaattgctgatgtacaggaattgtagctcatctgtttttcttttctgcggaggatgatttgcagttaaatttgacattttttttatgttctccattaaagcctgttgtaggtatacattgcaagagtacaagacatgtattcgaaatttcaaaaattcatgaagactactgtagctttccttcatgctttcaacaacccgtgaaactcttcatgagttagaaaaaaaa

SEQ ID NO: 1147 - DNA, 1389 bp, Zea Mays
gccgcctctgcgcactgcgcggatgggagcgcgcggtaaaattccgactccgacgcccgcccgccgcaccaccagcaccagttacatttccggttacaagaaccggtttcagaacttcatcaagcatctacgagagatgggcgatgaggtactggtggtgactacacacaagggagcccctgaggagttccatggagcaaaggtcattggctcgtggagctttccatgtcctctgtaccaaaatgttccactctcgctggcattgagccccagaatattttctgaggtgaataaattcaagccggacataatccatgccacctcacctggaattatggttctcggcgctctggctatatcaaagatgatatcagttccaatggtgatgtcttatcacacacatcttccagcgtacataccgaggtacaatttaaattggttacttgagcccacgtggagttttataagatgcctccacagatcagcagatcttactctagttccttcggtagctattgctgaagacttcgaaaccgctaaagtagtaccagcaaacagaatacggctttggaataagggtgtagattctgaaagctttcatactaaatatcggaggcatgaaatgcgtgtcagattgagtggtggtgaaccagaaaagccattggtaatacatgtgggtcgttttggacgtgaaaaaaatttggattttctgaaaagggttatggagaggctcccaggagcaaggattgcctttgttggagacgggccatacaggtccgagttggaaaaaatgttcacgggcatgcctgcagtttttaccggaatgctccaaggtgaggagctctcacaagcgtacgccagtggagatgtatttgcaatgccttcagaatccgagaccctcgggcaagtagtgctggagtccatggcttctggagtcccagtcgttgctgctcgtgctggagggatacctgatataatacccaaggacaaggaggggaaaccattggaatggctgccagagaagagatggagaagtgtgactggaggacagcctcgaagaaaatccgcaacgagcactacagcaccgcgatatcgtactggcggaagaagatgggcaagactaaccagacctccttgtttcaggattcttctgtcgctgccctctccaactagttgctgttaataactaaagaatttgtacattgtacccaaacagcttgcgagttttgtgtggctagctgcattcaaatgtccacagtctgactgactacggcttgtattcgattcatgtacatttagacagcacttaagattgccgatctgctaactcagaaggtttggcacaaatgctccgataattttgacgtacttgtctcgtgctgatgtgca

SEQ ID NO: 1148 - DNA, 2211 bp, Zea Mays
gccgcctctgcgcactgcgcggatgggagcgcgcggtaaaattccgactccgacgcccgcccgccgcaccaccagcaccagttacatttccggttacaagaaccggtttcagaacttcatcaagcatctacgagagatgggcgatgaggtactggtggtgactacacacaagggagcccctgaggagttccatggagcaaaggtcattggctcgtggagctttccatgtcctctgtaccaaaatgttccactctcgctggcattgagccccagaatattttctgaggtgaataaattcaagccggacataatccatgccacctcacctggaattatggttctcggcgctctggctatatcaaagatgatatcagttccaatggtgatgtcttatcacacacatcttccagcgtacataccgaggtacaatttaaattggttacttgagcccacgtggagttttataagatgcctccacagatcagcagatcttactctagttccttcggtagctattgctgaagacttcgaaaccgctaaagtagtaccagcaaacagaatacggctttggaataagggtgtagattctgaaagctttcatactaaatatcggaggcatgaaatgcgtgtcagattgagtggtggtgaaccagaaaagccattggtaatacatgtgggtcgttttggacgtgaaaaaaatttggattttctgaaaagggttatggagaggctcccaggagcaaggattgcctttgttggagacgggccatacaggtgcaccattcctcagtcgttagctatatgttttttttagtatgatgcacacctgatgagatttttatgtatgttaaccacatattagtacttacatgctgtcaaaatggctttatctgtgtcacatgcctgctaaatacccttctgtaaacaatttgttttaaatcacaagtgaacatacataatttcaatcatgggtttggtagtgtttctagtcctaccagggatctgccgaagggagtatgggtgaggggaggagcaggccgggctacgacctggaggtggtgctggtggctgcctcttgggcgccatagtcgcagggaacggcgcactgggatgtgtattccagctcccgtgaggaagctggcagaagatatctgctattgcttgcctttcttgattacaaagtcctaattatataggcctaaggccaaccgactattccacaatactaggagataaaagatttatccaactactccataatattaggagataaactgctaagacttatccaactaaactgattacttatctgatctcctgcgcctattttggtgggtctagtcgccttttcgtagaccaggccggtcataacagggttggcctgagaattcatttttccaatagctggccataattgttcaatgctggacagttttacacgatgtacagtagttataatgcactaaagtacagccacaccacacatgtcgtagcagcaccatcgacaactaacttttactttggatgtttggtcatctgtttgaccattgcaatggtttgatcttcaaactagaaatatttacattggacatgcaggtccgagttggaaaaaatgttcacgggcatgcctgcagtttttaccggaatgctccaaggtgaggagctctcacaagcgtacgccagtggagatgtatttgcaatgccttcagaatccgagaccctcgggcaagtagtgctggagtccatggcttctggagtcccagtcgttgctgctcgtgctggagggatacctgatataatacccaaggacaaggaggggaaaccattggaatggctgccagagaagagatggagaagtgtgactggaggacagcctcgaagaaaatccgcaacgagcactacagcaccgcgatatcgtactggcggaagaagatgggcaagactaaccagacctccttgtttcaggattcttctgtcgctgccctctccaactagttgctgttaataactaaagaatttgtacattgtacccaaacagcttgcgagttttgtgtggctagctgcattcaaatgtccacagtctgactgactacggcttgtattcgattcatgtacatttagacagcacttaagattgccgatctgctaactcagaaggtttggcacaaatgctccgataattttgacgtacttgtctcgtgctgatgtgca

SEQ ID NO: 1149 - DNA, 1876 bp, Zea Mays
cacaggctgacaggcaggcgagtccaaggccaggcggccaggcggactaggtggggcccccacacgcggcactgcggcaggatactggtcggcggccttgtgcctggacagttattctctccctcgtcgacggccgtgtcccgcttgatttcgatcggcagctggagagaatcggttcgattccccgtctgccgcagtgcctcctttcctttcctttggcttaggctcggctcgttccttcgctcgtcgtattttttctccaccacttccttcatttttttttctttctccctccctacacggccactaccagtccaccacaaaccacgtccccgccgtcgtcgtcgcgcttcccctacgcgcgccccgtcgcgtctcggtgctgctgttgggtgcgcccgcgcgttgccgtgaagggtgaagctgcttccgcgcgccgccgccgccacctgccccgcgtgggttgcaagtcaagcagcaggctgggacggggccggagccggagggggcgggcgaagcgggataagggcggccgcggcacgcgcgtgagcggcacaaccgaagcaggctgcgtttagttggactgcggccggggatcgctcgcgtcgcgtcggaggaggatgtctcagacaggggaggcgcaggtgccgctgttgcagactcaggaggcggacgccgagtggagctccaagccgcgccgcattgctctcttcgtcgagccgtcgccctttgcttacatttccggttacaagaaccggtttcagaacttcatcaagcatctacgagagatgggcgatgaggtactggtggtgactacacacaagggagcccctgaggagttccatggagcaaaggtcattggctcgtggagctttccatgtcctctgtaccaaaatgttccactctcgctggcattgagccccagaatattttctgaggtgaataaattcaagccggacataatccatgccacctcacctggaattatggttctcggcgctctggctatatcaaagatgatatcagttccaatggtgatgtcttatcacacacatcttccagcgtacataccgaggtacaatttaaattggttacttgagcccacgtggagttttataaggttatggagaggctcccaggagcaaggattgcctttgttggagacgggccatacaggtccgagttggaaaaaatgttcacgggcatgcctgcagtttttaccggaatgctccaaggtgaggagctctcacaagcgtacgccagtggagatgtatttgcaatgccttcagaatccgagaccctcgggcaagtagtgctggagtccatggcttctggagtcccagtcgttgctgctcgtgctggagggatacctgatataatacccaaggacaaggagggtaagacaagctttctgtttacacccggagatctcgatgagtgtgtgaggaagatagagcagctcctcagttcaaaagatctcagggaaaccattggaatggctgccagagaagagatggagaagtgtgactggaggacagcctcgaagaaaatccgcaacgagcactacagcaccgcgatatcgtactggcggaagaagatgggcaagactaaccagacctccttgtttcaggattcttctgtcgctgccctctccaactagttgctgttaataactaaagaatttgtacattgtacccaaacagcttgcgagttttgtgtggctagctgcattcaaatgtccacagtctgactgactacggcttgtattcgattcatgtacatttagacagcacttaagattgccgatctgctaactcagaaggtttggcacaaatgctccgataattttgacgtacttgtctcgtgctgatgtgca

SEQ ID NO: 1150 - DNA, 2815 bp, Zea Mays
caaggccaggcggccaggcggactaggtggggcccccacacgcggcactgcggcaggatactggtcggcggccttgtgcctggacagttattctctccctcgtcgacggccgtgtcccgcttgatttcgatcggcagctggagagaatcggttcgattccccgtctgccgcagtgcctcctttcctttcctttggcttaggctcggctcgttccttcgctcgtcgtattttttctccaccacttccttcatttttttttctttctccctccctacacggccactaccagtccaccacaaaccacgtccccgccgtcgtcgtcgcgcttcccctacgcgcgccccgtcgcgtctcggtgctgctgttgggtgcgcccgcgcgttgccgtgaagggtgaagctgcttccgcgcgccgccgccgccacctgccccgcgtgggttgcaagtcaagcagcaggctgggacggggccggagccggagggggcgggcgaagcgggataagggcggccgcggcacgcgcgtgagcggcacaaccgaagcaggctgcgtttagttggactgcggccggggatcgctcgcgtcgcgtcggaggaggatgtctcagacaggggaggcgcaggtgccgctgttgcagactcaggaggcggacgccgagtggagctccaagccgcgccgcattgctctcttcgtcgagccgtcgccctttgcttacatttccggttacaagaaccggtttcagaacttcatcaagcatctacgagagatgggcgatgaggtactggtggtgactacacacaagggagcccctgaggagttccatggagcaaaggtcattggctcgtggagctttccatgtcctctgtaccaaaatgttccactctcgctggcattgagccccagaatattttctgaggtgaataaattcaagccggacataatccatgccacctcacctggaattatggttctcggcgctctggctatatcaaagatgatatcagttccaatggtgatgtcttatcacacacatcttccagcgtacataccgaggtacaatttaaattggttacttgagcccacgtggagttttataagatgcctccacagatcagcagatcttactctagttccttcggtagctattgctgaagacttcgaaaccgctaaagtagtaccagcaaacagaatacggctttggaataagggtgtagattctgaaagctttcatactaaatatcggaggcatgaaatgcgtgtcagattgagtggtggtgaaccagaaaagccattggtaatacatgtgggtcgttttggacgtgaaaaaaatttggattttctgaaaagggttatggagaggctcccaggagcaaggattgcctttgttggagacgggccatacaggtgcaccattcctcagtcgttagctatatgttttttttagtatgatgcacacctgatgagatttttatgtatgttaaccacatattagtacttacatgctgtcaaaatggctttatctgtgtcacatgcctgctaaatacccttctgtaaacaatttgttttaaatcacaagtgaacatacataatttcaatcatgggtttggtagtgtttctagtcctaccagggatctgccgaagggagtatgggtgaggggaggagcaggccgggctacgacctggaggtggtgctggtggctgcctcttgggcgccatagtcgcagggaacggcgcactgggatgtgtattccagctcccgtgaggaagctggcagaagatatctgctattgcttgcctttcttgattacaaagtcctaattatataggcctaaggccaaccgactattccacaatactaggagataaaagatttatccaactactccataatattaggagataaactgctaagacttatccaactaaactgattacttatctgatctcctgcgcctattttggtgggtctagtcgccttttcgtagaccaggccggtcataacagggttggcctgagaattcatttttccaatagctggccataattgttcaatgctggacagttttacacgatgtacagtagttataatgcactaaagtacagccacaccacacatgtcgtagcagcaccatcgacaactaacttttactttggatgtttggtcatctgtttgaccattgcaatggtttgatcttcaaactagaaatatttacattggacatgcaggtccgagttggaaaaaatgttcacgggcatgcctgcagtttttaccggaatgctccaaggtgaggagctctcacaagcgtacgccagtggagatgtatttgcaatgccttcagaatccgagaccctcgggcaagtagtgctggagtccatggcttctggagtcccagtcgttgctgctcgtgctggagggatacctgatataatacccaaggacaaggaggagaagagatggagaagtgtgactggaggacagcctcgaagaaaatccgcaacgagcactacagcaccgcgatatcgtactggcggaagaagatgggcaagactaaccagacctccttgtttcaggattcttctgtcgctgccctctccaactagttgctgttaataactaaagaatttgtacattgtacccaaacagcttgcgagttttgtgtggctagctgcattcaaatgtccacagtctgactgactacggcttgtattcgattcatgtacatttagacagcacttaagattgccgatctgctaactcagaaggtttggcacaaatgctccgataattttgacgtacttgtctcgtgctgatgtgca

SEQ ID NO: 1151 - DNA, 1868 bp, Zea Mays
ctcaggtgcaatgctgcagagctcatttggtatagtgcatgtggagtgtggacatagatccagtacaggtacataccgaggtacaatttaaattggttacttgagcccacgtggagttttataagatgcctccacagatcagcagatcttactctagttccttcggtagctattgctgaagacttcgaaaccgctaaagtagtaccagcaaacagaatacggctttggaataagggtgtagattctgaaagctttcatactaaatatcggaggcatgaaatgcgtgtcagattgagtggtggtgaaccagaaaagccattggtaatacatgtgggtcgttttggacgtgaaaaaaatttggattttctgaaaagggttatggagaggctcccaggagcaaggattgcctttgttggagacgggccatacaggtgcaccattcctcagtcgttagctatatgttttttttagtatgatgcacacctgatgagatttttatgtatgttaaccacatattagtacttacatgctgtcaaaatggctttatctgtgtcacatgcctgctaaatacccttctgtaaacaatttgttttaaatcacaagtgaacatacataatttcaatcatgggtttggtagtgtttctagtcctaccagggatctgccgaagggagtatgggtgaggggaggagcaggccgggctacgacctggaggtggtgctggtggctgcctcttgggcgccatagtcgcagggaacggcgcactgggatgtgtattccagctcccgtgaggaagctggcagaagatatctgctattgcttgcctttcttgattacaaagtcctaattatataggcctaaggccaaccgactattccacaatactaggagataaaagatttatccaactactccataatattaggagataaactgctaagacttatccaactaaactgattacttatctgatctcctgcgcctattttggtgggtctagtcgccttttcgtagaccaggccggtcataacagggttggcctgagaattcatttttccaatagctggccataattgttcaatgctggacagttttacacgatgtacagtagttataatgcactaaagtacagccacaccacacatgtcgtagcagcaccatcgacaactaacttttactttggatgtttggtcatctgtttgaccattgcaatggtttgatcttcaaactagaaatatttacattggacatgcaggtccgagttggaaaaaatgttcacgggcatgcctgcagtttttaccggaatgctccaaggtgaggagctctcacaagcgtacgccagtggagatgtatttgcaatgccttcagaatccgagaccctcgggcaagtagtgctggagtccatggcttctggagtcccagtcgttgctgctcgtgctggagggatacctgatataatacccaaggacaaggaggggaaaccattggaatggctgccagagaagagatggagaagtgtgactggaggacagcctcgaagaaaatccgcaacgagcactacagcaccgcgatatcgtactggcggaagaagatgggcaagactaaccagacctccttgtttcaggattcttctgtcgctgccctctccaactagttgctgttaataactaaagaatttgtacattgtacccaaacagcttgcgagttttgtgtggctagctgcattcaaatgtccacagtctgactgactacggcttgtattcgattcatgtacatttagacagcacttaagattgccgatctgctaactcagaaggtttggcacaaatgctccgataattttgacgtacttgtctcgtgctgatgtgca

SEQ ID NO: 1152 - DNA, 1649 bp, Zea Mays
gacttgagttcaccggtactatttatgtaccgtacataaagtaaagtttaacgaaaagaaaagcacgggagacgggacgggaccgctgggcgcgccgggccgcgccgagccgagcgagtcgtccactctccactccgcccgccacgcccacgccccgtcctcgcttccgtctcccacaatccaaggacaccgagcagcaggcggcggaagcaacccgctgtgggggcggcgtggagtccagttttgctcggctcgtcgctgggatccgccggccggcgaagcggggaagggaagaggagcggagattggagagtacaagcaggggaagatgtcagacgcgctgatcaacggcctcgccggcgccggcggcgggatcatcgcccagctccttacctacccgctccagaccgtgaacgcgcggcaacagacggagcgcgacccctccaagccggcgttcaaggacggcgccgctcgccagttgtatctggttgtgaagaacgaggggtgggagcgcctgtatggcgggcttatgccctctctcgtcggcaccgctgcctcccagggtgtctactactacttctaccaaatattccggaacagggccgaggcaagggcccttgagcgatccaggagagggcttggcgatgggtctgtcggcatgctccagtctctcactgtcgctgccctgtctggctgtgtcaatgtactgctcacaaacccgatttgggttgttgttacacgaatgcaaactcacagaaaggcaaacaaacagcaaagacctcagggtttgaattgtgctcttgataagccccttgaagctgctacagctgaaaacgctccatacaaaacgattgatgtttttcaggaactctacaaagaatctggagttcttggcttctggaaaggggtaattccggctcttatcatgcaatcccgcaattcagttcatgctatatgagactcttctgaagaaattgaagaagagacgagcctctaattttaagggagctgatggattgactgctcttgaaatttttcttcttggtgctgttgcgaaacttggtgcaaccgtcgttacgtatccccttctagttgttaaggcaagacttcaggcaaagcacatgattaacgatgacaagaggcatcgctacaaaggtacacttgatgcgttcacaaagatggtacgatatgagggtctgtcagggatgtacaaaggaatgggcacaaaaattgtgcaaagtgtttttgcttctgctttgctttttatgattaaggaggagctggtgaagggtgctcgactattggtaactggtaacactagtctggttaagaaactaccatcaaagtcatcaagatgaactacgggcatcgcaagcgttagtatatcatcctaaaaagccatttattatccgcataaaccgtaaacaaggtcgacaagctatagagctcgcctctgctttggatatgtcaactgtaggttacacaatagccagtatgattcacgtagggaccaaagactatgttggatagatatttgtatcattcatgtagaatgtatcgtggaagatcgaaacagaagaaaataaataagtatgataatttgaacttcggccatctgctctaaacttctgatttcctgacttgctttt

SEQ ID NO: 1153 - DNA, 1685 bp, Zea Mays
gacttgagttcaccggtactatttatgtaccgtacataaagtaaagtttaacgaaaagaaaagcacgggagacgggacgggaccgctgggcgcgccgggccgcgccgagccgagcgagtcgtccactctccactccgcccgccacgcccacgccccgtcctcgcttccgtctcccacaatccaaggacaccgagcagcaggcggcggaagcaacccgctgtgggggcggcgtggagtccagttttgctcggctcgtcgctgggatccgccggccggcgaagcggggaagggaagaggagcggagattggagagtacaagcaggggaagatgtcagacgcgctgatcaacggcctcgccggcgccggcggcgggatcatcgcccagctccttacctacccgctccagaccgtgaacgcgcggcaacagacggagcgcgacccctccaagccggcgttcaaggacggcgccgctcgccagttgtatctggttgtgaagaacgaggggtgggagcgcctgtatggcgggcttatgccctctctcgtcggcaccgctgcctcccagggtgtctactactacttctaccaaatattccggaacagggccgaggcaagggcccttgagcgatccaggagagggcttggcgatgggtctgtcggcatgctccagtctctcactgtcgctgccctgtctggctgtgtcaatgtactgctcacaaacccgatttgggttgttgttacacgaatgcaaactcacagaaaggcaaacaaacagcaaagacctcagggtttgaattgtgctcttgataagccccttgaagctgctacagctgaaaacgctccatacaaaacgattgatgtttttcaggaactctacaaagaatctggagttcttggcttctggaaaggggtaattccggctcttatcatggttagcaatcccgcaattcagttcatgctatatgagactcttctgaagaaattgaagaagagacgagcctctaattttaagggagctgatggattgactgctcttgaaatttttcttcttggtgctgttgcgaaacttggtgcaaccgtcgttacgtatccccttctagttgttaaggcaagacttcaggcaaagcacatgattaacgatgacaagaggcatcgctacaaaggtacacttgatgcgttcacaaagatggtacgatatgagggtctgtcagggatgtacaaaggaatgggcacaaaaattgtgcaaagtgtttttgcttctgctttgctttttatgattaaggaggagctggtgaagggtgctcgactattggtaactggtaacactagtctggttaagaaactaccatcaaagtcatcaagatgaactacgggcatcgcaagcatgcaactgaagagggcgaggcagacagcagctcctaggcgggaagtgtagatttgttgtttcgcatttgttatgttaccctcaggtgaggatggtggggaattctttcctaacggggagaccttttgtctgcttttattgtaagttgattatgttctcttactgaagcagtatactagatttccaaacctcacataagagcatgttttcaaatacatcatccgttgtcgaccactgcatataaagtgttctttcatctacgctgcaatggtgaagaacagcggacaattatcctggaaactga

SEQ ID NO: 1154 - DNA, 2339 bp, Zea Mays
agccgcacaccgcccggagaaaaggttccaccgtctctaccttgccccgaccggaactggaacccctaaaaatttccctttcgtacctttccccttcctcctcccgtccaccacaccccggctccaccccgtgcaaatccgctggccgcagcaagagaggtcgaggagggaaacagatcgggtggcggcaaccggtagccggttccgctggcacgatgggcggcgaggccgagggcggggagcggcggctggggcgggtcctgagctttgggatcccggacacggcgctggggctagtgatggggtacgtggaggacccttgggaccgcgacgccatctcgctggtgtgccgccactggtgccgcgtcgacgcgctcagccgcaagcacgtcacggtggccatggcctactccacaacacccgagcgcctgttcggccgcttcccgtgcctcgagtcactcaagctcaaagcaaagccccgcgcggccatgttcaacctcatctccgacgactggggcgggtctgcgtcgccgtggattcgacagctctcggccactttccactccctcaagaagctccacctgcgcaggatgatagtatccaatgacgacatcaacacgctcgtccgcgccaaagcccatatgctcgtgtcgctgaagctcgaccgctgctcaggcttctccacgccctccatcgcactcatcgcccgctcttgcaggaaactggaaacacttttcctggaagaaagcatgattgatgagaaagaaaatgatgaatggatccgtgagcttgctacgagcaattctgttcttgagacactgaatttctttcagacagatctcagggcatccccagagtatcttacccttcttgtgcgcaactgtcaaaggctgaaaaccttgaagattagcgagtgtttcatgcctgatctggttagtttgttccgaactgcacaaacactacaagaattcgctggtggttcctttgaagatcagggtcaacctgtggcagatactgtttccatatgctgctgcacttaagaagttagaccttcagtttacattcctttccacagaggatcactgtcagatagttcagcgctgccccaatctggaaaccttagaggtgagggatgtcataggggatcgtgggctacaagttgttgcagagacctgcaagaaattgcagaggctcagagtagagagaggagatgatgatcaaggaggtcttgaggatgaacaaggtaggatttcacaggttggggtgatggctatagcccaaggctgccctgagttgacatactgggcaatatatgtatcggacattacaaatgcagctctagaggcggttggtacatgcagcagaaatcttaatgatttccgccttgtccttcttgatagagaagcacatataactgagttgccactggacaatggggttcgtgctttgcttagaggttgcaccaaactcaggaggtttgcattttatgtgagacctggggtcctatctgatgttggtcttggctatgttggagaatttagcaagagcattcgatatatgttgcttggcaatgttggtgaatctgataatggaattatacaattatcaaaaggctgcccaagcttgcaaaaactggagctgaggggttgtttgtttagtgagcatgctttagctatggctgcactagagctcaagtcactgaggtatctgtgggtgcaaggattcaggtcatctccaaccggaactgatcttatggcaatggtacgccccttctggaacattgagtatattcttccagaccaagatgaaccttgcccagagtataagaaacagattctggcatactactcccttgctggaaggaggacagattgccctccatcggtaactccactttacccagcagtttgagcgtagatacttgctttttgctagactgaatctcatggtactaagctccattgctcccacaatctgtgaaatcgatggttcctgttgatggggacatgcagacgttccattgcacataaccccagagctaagctttaagcaggacgacagctcggagctgaggctagctgagaacaatcgtgaatacctgaaggcagcactttgtggatcagattggcctagctgtccagtatggaaatgtaaactttgccattttgaatagttttggagaaacaattttgtaataatttacccctgtttagtgtacattattgattttcgtttatatgatgatgttgtattgctttatttaacatttaagtcaattagttaatctacagtctgacttgctgtgattcgatgaatttatggattttccttgctgctcg

SEQ ID NO: 1155 - DNA, 2273 bp, Zea Mays
ccgcacaccgcccggagaaaaggttccaccgtctctaccttgccccgaccggaactggaacccctaaaaatttccctttcgtacctttccccttcctcctcccgtccaccacaccccggctccaccccgtgcaaatccgctggccgcagcaagagaggtcgaggagggaaacagatcgggtggcggcaaccggtagccggttccgctggcacgatgggcggcgaggccgagggcggggagcggcggctggggcgggtcctgagctttgggatcccggacacggcgctggggctagtgatggggtacgtggaggacccttgggaccgcgacgccatctcgctggtgtgccgccactggtgccgcgtcgacgcgctcagccgcaagcacgtcacggtggccatggcctactccacaacacccgagcgcctgttcggccgcttcccgtgcctcgagtcactcaagctcaaagcaaagccccgcgcggccatgttcaacctcatctccgacgactggggcgggtctgcgtcgccgtggattcgacagctctcggccactttccactccctcaagaagctccacctgcgcaggatgatagtatccaatgacgacatcaacacgctcgtccgcgccaaagcccatatgctcgtgtcgctgaagctcgaccgctgctcaggcttctccacgccctccatcgcactcatcgcccgctcttgcaggaaactggaaacacttttcctggaagaaagcatgattgatgagaaagaaaatgatgaatggatccgtgagcttgctacgagcaattctgttcttgagacactgaatttctttcagacagatctcagggcatccccagagtatcttacccttcttgtgcgcaactgtcaaaggctgaaaaccttgaagattagcgagtgtttcatgcctgatctggttagtttgttccgaactgcacaaacactacaagaattcgctggtggttcctttgaagatcagggtcaacctgtggcagaggatcactgtcagatagttcagcgctgccccaatctggaaaccttagaggtgagggatgtcataggggatcgtgggctacaagttgttgcagagacctgcaagaaattgcagaggctcagagtagagagaggagatgatgatcaaggaggtcttgaggatgaacaaggtaggatttcacaggttggggtgatggctatagcccaaggctgccctgagttgacatactgggcaatatatgtatcggacattacaaatgcagctctagaggcggttggtacatgcagcagaaatcttaatgatttccgccttgtccttcttgatagagaagcacatataactgagttgccactggacaatggggttcgtgctttgcttagaggttgcaccaaactcaggaggtttgcattttatgtgagacctggggtcctatctgatgttggtcttggctatgttggagaatttagcaagagcattcgatatatgttgcttggcaatgttggtgaatctgataatggaattatacaattatcaaaaggctgcccaagcttgcaaaaactggagctgaggggttgtttgtttagtgagcatgctttagctatggctgcactagagctcaagtcactgaggtatctgtgggtgcaaggattcaggtcatctccaaccggaactgatcttatggcaatggtacgccccttctggaacattgagtatattcttccagaccaagatgaaccttgcccagagtataagaaacagattctggcatactactcccttgctggaaggaggacagattgccctccatcggtaactccactttacccagcagtttgagcgtagatacttgctttttgctagactgaatctcatggtactaagctccattgctcccacaatctgtgaaatcgatggttcctgttgatggggacatgcagacgttccattgcacataaccccagagctaagctttaagcaggacgacagctcggagctgaggctagctgagaacaatcgtgaatacctgaaggcagcactttgtggatcagattggcctagctgtccagtatggaaatgtaaactttgccattttgaatagttttggagaaacaattttgtaataatttacccctgtttagtgtacattattgattttcgtttatatgatgatgttgtattgctttatttaacatttaagtcaattagttaatctacagtctgacttgctgtgattcgatgaatttatggattttccttgctgctcg

SEQ ID NO: 1156 - DNA, 4431 bp, Zea Mays
caatccataccttctcggcttgtccctccgtcctgtcctgcgtgcgacccgacccgacccgaaaagtcccactaggctagacagacaagcctgctcgccggagatctcccgctcgcgcggcgcggcccctcgctccgcgaccatggcctccgggcaggactcgtcgggcaccacgctgatggatctcatcacctcggatccttcggccacgtcgactgccggggcatcgtcgcagcagcagtcctcctcgggcgtcggcagcgccggtggctcccttttggggaagcccgtggctccggcggcggatcgcaagtcgaagaaggggacgctgatgcagatccagaacgagacaatatccgctgccaaggcgcttaaccccgtcaaggtcctgccccagcgcaacaggaagaagaagaaaagttcccagaggcagctcgtaaatagtgtgttccccaagcttgctgtgtacaattctgtggatccttcggtggctccatctcttctcatgctccatcagcaatgtgaggacagaaatgttctgcgctatgtatactactatctggcccgtatactgtcagataatggttcccagggtttaagtgctgctggtggcatacccacgcccaattgggacgctcttgcagacattgatgccgtcgggggagtgacacgagcagatgttgtaccgagaatagttgatcaactttcagcggaatcctcgagtgatgatgttgagtttcatgcacggagacttgctgctctgaaggcccttacctcctgttccactagcagttctgagatgatggaaaagctaaatgaaattgtgtttggcatcttggaaaaggtagcagatactaaacaaaaacggaaaaagggtatttttactaagcaaggtggtgataaggagtctatcatacgtggtaatttgcaatatgcttctctaagtgcactgagaaggtttccacttgatcccggtaaccaagcattcctccaccgagctgtgcaagggattgaattttccgacccagttgcagtcagacatgcattgtcaataatatctgaaattgctgcgaaagatccatactctgtcgcaatggcattgggcaaaagtgcacaacccggtggtatgcttcctttttcttcagcatcttttgagctcttcaggacattcttcatttgcatgatgtccttgccagggtttaccttgcaaagttgtgtcattcgatatctagagcacgtgtattggaccagaggcctgacataaagtcacagtacagttccctcctttatcaacttcttctggatcccagtgacagggtctgctttgaggccataaattgtgtgttgggaaaagtcgacaacacagaaagcacggaggacagagctggtggatggattcagttaactagagaaattctcaaattgccagaggccccttctgtagcatcaaagggtgttctggcaaaatctagtgaaaaatcttcaaaagcaaggcgccctcagcctctcatcaaacttgtaatgagaagattggagagctcattccgtagcttctctcgtccggttcttcatgctgctgcaagagtagttcaggaaatgggcaaaagtagagcagctgcttttgctttaggtgcatatgatgagggtgccagtcttgatgttggatctcttgattctgattttgagaatccaatggctgaaggtacccgaaagcaaaatccgctatccaatggtcatggtggaacggacacaatagcaggattattagcatcactgatggaagttgtgcggacaacagtagcatgcgagtgtgtatatgttcgagcaatggtcatcaaagctttgatatggatgcaaaatccacatgaatcttttgaagagctaaaatctatcattgcatgcgagttgtctgacccagcctggccttcctcgctcctgaatgatgtcctactaaccttacatgctaggttcaaggcaacccctgatatggctgtgactctgcttgagattgcaagaatttttgccactaaagttcctggaaagattgatgctgatgttctacagttgttatggaagacatgccttgtaggagcaggaccagatgggaaacatacagccttggaagctgtaactatagttcttgatctgccaccacctcagcctggttcaatgtctggactcacttctgttgatatggtatctgcctctgatccaaaatctgcaatggcactccaaagattagttcaagctgctgtttggtttctaggagaaaatgctaattatgctgcatctgagtatgcctgggagtctgcaacaccacccggtactgcattaatgatgctagatgctgataaaatggttgctgctgcaagttcccgtaatcctacacttgctagcgctctgacaaggcttcaaaggtgtgcatttagtggaagctgggagatccgcattgctgctgtacaagccctaactaccattgcaataaggtctggtgaaccttatagactgcagatatatgaatttcttcatgctttggctcttggaggtgtgcagtcaaacttttcagaattgcagctaagtaatggggaaaatcaaggtgccagtggtactggtcttggatctttaataagcccaatgcttaaggtcctagatgaaatgtatagaggccaagatgatcttgccagagatattcgccagcatgataacagcaaacaggaatggagtgatgaggaactcaagaaactttatgaaacccatgagaggcttcttgattttgtttccttattctgttttgttccaagggctaaatacttgccccttggtcctaccagtgccaagctaattgagatctaccgcaaccgtcataacataagtgcttctggtggtctaagtgatcctgctgttgccactggaatatctgatctcatgtatgagtccaaagaagtacataaagagaccaatactgtccagtctggtattgatcccgatctggcaatggcctgggcagcaggtttggaagacgatgtttgggcaaacaacgctccagctgtggataaagtaaaggacttccttgccggtgctggaactgatgctcctgatgtggatgatgaggaatacatgaactcgaggccatcagtcggatatgatgatatgtgggctaagacaattcttgaaacttacgatgcagaggaagatgatggtaggtactctggtggatcctctcctgaatcaactggttctgttgaaacctccatatcgtcccattttggaggcatgaactatccatcactgttcagttcaaaaccgtcaagtcatggggcctcacaacaaacgatacgtgaagaaccaccctcatattcgacgtcagtactacagaggaaggaatcatttgaaaacccccttggagggggtggaggacgaagtttcggatcccacgaggatgaagataagagttctggtaaccctcagtctgggaaagctttgtatgacttcacagcaggcggtgatgatgagctgagtttaaactctggagaagaagtggagattgaatacgaggtcgatggttggtattatgtgaagaaaaggaggcctggaagggatggaaagatggcaggtctggttcctgttctgtatgtgagttcatgataacagccgtgtgtatcgtttcccacacttgtggaagctgtttggagttcatgggcttaacaaaaaggcacactggaatgctcccgagagatcttcgcataaactcgtgcccgtcgtataggcacgtggccttgtggaagcaggtcatatccagtcatcttggggttcgtatgatgctgcagtgctgttcctgggaaagatttacgtgttgatttgtctggacccacaccactagtcattcaattgattgttttttgttgctaaggtggagactcttcagaggttaaaccgttcatctgtgccattttgctgccgtctgtgttcaagaaggcaatttcgtcgtctccagttcgtgttgtgcgatatatattctagtaaaattgtagaggcatcatttccccggcatatattattttggtcgtgtatggtgtgattctggtggtaaaatagtgtcattaatgttgtgtatatttgtttccgggtggattacagagtatataactataagggggtgtttggtttaagaaatcactacatccaaattgaggtggtgcatcatgtgttcattcctcaaatttggtaggatgaccctattcctcatattagtactaactaactaattatgacgaatgaggtggtgatgatcaacttattccatttcacaaaccaaacaaaaatagtgaggagtgagaagatgatggactagttcattcctcaaaccaaacatcctataaagccgtagttttgtttaggatcatcaggctaaagcttggtaccgaagtccgg

SEQ ID NO: 1157 - DNA, 4944 bp, Zea Mays
cttgtccctccgtcctgtcctgcgtgcgacccgacccgacccgaaaagtcccactaggctagacagacaagcctgctcgccggagatctcccgctcgcgcggcgcggcccctcgctccgcgaccatggcctccgggcaggactcgtcgggcaccacgctgatggatctcatcacctcggatccttcggccacgtcgactgccggggcatcgtcgcagcagcagtcctcctcgggcgtcggcagcgccggtggctcccttttggggaagcccgtggctccggcggcggatcgcaagtcgaagaaggggacgctgatgcagatccagaacgagacaatatccgctgccaaggcgcttaaccccgtcaaggtcctgccccagcgcaacaggaagaagaagcccgtctcctacgcacagctggcccggagcatccacgagctcgccgcgacgtgcgaccagaaaagttcccagaggcagctcgtaaatagtgtgttccccaagcttgctgtgtacaattctgtggatccttcggtggctccatctcttctcatgctccatcagcaatgtgaggacagaaatgttctgcgctatgtatactactatctggcccgtatactgtcagataatggttcccagggtttaagtgctgctggtggcatacccacgcccaattgggacgctcttgcagacattgatgccgtcgggggagtgacacgagcagatgttgtaccgagaatagttgatcaactttcagcggaatcctcgagtgatgatgttgagtgtatgcctttatactatctcagtctacatcgaagttatagtatgaaaaatgtatttctaatcatacttttggccacttattaaaaaaaactttgagtatttcacagggactacttaattgaaccaaatttacttgcccgcatttcttgcttacttttttcaaaccaaacttatgatctatcttcttattctcttgttgggaattggtttcctcttggattttttaaaagcagtacaataagaatgtatattcctggaaagtattgcataagaaaatcaactattatgatcaaatttatgaaatacctcagttgaaatttgtaatctgaacatatttgttgcgagcaataagaatcagtgtcattatgaaaggctcagcaagacagtttccatgccaatttaaaacaattaatgtttccatcctttcccttttaattccgttgttgaatcatgtttctttgttcctcattgttcttaattatggatgctggtcctttgaagttcatgcacggagacttgctgctctgaaggcccttacctcctgttccactagcagttctgagatgatggaaaagctaaatgaaattgtgtttggcatcttggaaaaggtagcagatactaaacaaaaacggaaaaagggtatttttactaagcaaggtggtgataaggagtctatcatacgtggtaatttgcaatatgcttctctaagtgcactgagaaggtttccacttgatcccggtaaccaagcattcctccaccgagctgtgcaagggattgaattttccgacccagttgcagtcagacatgcattgtcaataatatctgaaattgctgcgaaagatccatactctgtcgcaatggcattgggcaaaagtgcacaacccggtggagctcttcaggacattcttcatttgcatgatgtccttgccagggtttaccttgcaaagttgtgtcattcgatatctagagcacgtgtattggaccagaggcctgacataaagtcacagtacagttccctcctttatcaacttcttctggatcccagtgacagggtctgctttgaggccataaattgtgtgttgggaaaagtcgacaacacagaaagcacggaggacagagctggtggatggattcagttaactagagaaattctcaaattgccagaggccccttctgtagcatcaaagggtgttctggcaaaatctagtgaaaaatcttcaaaagcaaggcgccctcagcctctcatcaaacttgtaatgagaagattggagagctcattccgtagcttctctcgtccggttcttcatgctgctgcaagagtagttcaggaaatgggcaaaagtagagcagctgcttttgctttaggtgcatatgatgagggtgccagtcttgatgttggatctcttgattctgattttgagaatccaatggctgaaggtacccgaaagcaaaatccgctatccaatggtcatggtggaacggacacaatagcaggattattagcatcactgatggaagttgtgcggacaacagtagcatgcgagtgtgtatatgttcgagcaatggtcatcaaagctttgatatggatgcaaaatccacatgaatcttttgaagagctaaaatctatcattgcatgcgagttgtctgacccagcctggccttcctcgctcctgaatgatgtcctactaaccttacatgctaggttcaaggcaacccctgatatggctgtgactctgcttgagattgcaagaatttttgccactaaagttcctggaaagattgatgctgatgttctacagttgttatggaagacatgccttgtaggagcaggaccagatgggaaacatacagccttggaagctgtaactatagttcttgatctgccaccacctcagcctggttcaatgtctggactcacttctgttgatatggtatctgcctctgatccaaaatctgcaatggcactccaaagattagttcaagctgctgtttggtttctaggagaaaatgctaattatgctgcatctgagtatgcctgggagtctgcaacaccacccggtactgcattaatgatgctagatgctgataaaatggttgctgctgcaagttcccgtaatcctacacttgctagcgctctgacaaggcttcaaaggtgtgcatttagtggaagctgggagatccgcattgctgctgtacaagccctaactaccattgcaataaggtctggtgaaccttatagactgcagatatatgaatttcttcatgctttggctcttggaggtgtgcagtcaaacttttcagaattgcagctaagtaatggggaaaatcaaggtgccagtggtactggtcttggatctttaataagcccaatgcttaaggtcctagatgaaatgtatagaggccaagatgatcttgccagagatattcgccagcatgataacagcaaacaggaatggagtgatgaggaactcaagaaactttatgaaacccatgagaggcttcttgattttgtttccttattctgttttgttccaagggctaaatacttgccccttggtcctaccagtgccaagctaattgagatctaccgcaaccgtcataacataagtgcttctggtggtctaagtgatcctgctgttgccactggaatatctgatctcatgtatgagtccaaagaagtacataaagagaccaatactgtccagtctggtattgatcccgatctggcaatggcctgggcagcaggtttggaagacgatgtttgggcaaacaacgctccagctgtggataaagtaaaggacttccttgccggtgctggaactgatgctcctgatgtggatgatgaggaatacatgaactcgaggccatcagtcggatatgatgatatgtgggctaagacaattcttgaaacttacgatgcagaggaagatgatggtaggtactctggtggatcctctcctgaatcaactggttctgttgaaacctccatatcgtcccattttggaggcatgaactatccatcactgttcagttcaaaaccgtcaagtcatggggcctcacaacaaacgatacgtgaagaaccaccctcatattcgacgtcagtactacagaggaaggaatcatttgaaaacccccttggagggggtggaggacgaagtttcggatcccacgaggatgaagataagagttctggtaaccctcagtctgggaaagctttgtatgacttcacagcaggcggtgatgatgagctgagtttaaactctggagaagaagtggagattgaatacgaggtcgatggttggtattatgtgaagaaaaggaggcctggaagggatggaaagatggcaggtctggttcctgttctgtatgtgagttcatgataacagccgtgtgtatcgtttcccacacttgtggaagctgtttggagttcatgggcttaacaaaaaggcacactggaatgctcccgagagatcttcgcataaactcgtgcccgtcgtataggcacgtggccttgtggaagcaggtcatatccagtcatcttggggttcgtatgatgctgcagtgctgttcctgggaaagatttacgtgttgatttgtctggacccacaccactagtcattcaattgattgttttttgttgctaaggtggagactcttcagaggttaaaccgttcatctgtgccattttgctgccgtctgtgttcaagaaggcaatttcgtcgtctccagttcgtgttgtgcgatatatattctagtaaaattgtagaggcatcatttccccggcatatattattttggtcgtgtatggtgtgattctggtggtaaaatagtgtcattaatgttgtgtatatttgtttccgggtggattacagagtatataactataagggggtgtttggtttaagaaatcactacatccaaattgaggtggtgcatcatgtgttcattcctcaaatttggtaggatgaccctattcctcatattagtactaactaactaattatgacgaatgaggtggtgatgatcaacttattccatttcacaaaccaaacaaaaatagtgaggagtgagaagatgatggactagttcattcctcaaaccaaacatcctataaagccgtagttttgtttaggatcatcaggctaaagcttggtaccgaagtccgg

SEQ ID NO: 1158 - DNA, 4881 bp, Zea Mays
gtccctccgtcctgtcctgcgtgcgacccgacccgacccgaaaagtcccactaggctagacagacaagcctgctcgccggagatctcccgctcgcgcggcgcggcccctcgctccgcgaccatggcctccgggcaggactcgtcgggcaccacgctgatggatctcatcacctcggatccttcggccacgtcgactgccggggcatcgtcgcagcagcagtcctcctcgggcgtcggcagcgccggtggctcccttttggggaagcccgtggctccggcggcggatcgcaagtcgaagaaggggacgctgatgcagatccagaacgagacaatatccgctgccaaggcgcttaaccccgtcaaggtcctgccccagcgcaacaggaagaagaagaaaagttcccagaggcagctcgtaaatagtgtgttccccaagcttgctgtgtacaattctgtggatccttcggtggctccatctcttctcatgctccatcagcaatgtgaggacagaaatgttctgcgctatgtatactactatctggcccgtatactgtcagataatggttcccagggtttaagtgctgctggtggcatacccacgcccaattgggacgctcttgcagacattgatgccgtcgggggagtgacacgagcagatgttgtaccgagaatagttgatcaactttcagcggaatcctcgagtgatgatgttgagtgtatgcctttatactatctcagtctacatcgaagttatagtatgaaaaatgtatttctaatcatacttttggccacttattaaaaaaaactttgagtatttcacagggactacttaattgaaccaaatttacttgcccgcatttcttgcttacttttttcaaaccaaacttatgatctatcttcttattctcttgttgggaattggtttcctcttggattttttaaaagcagtacaataagaatgtatattcctggaaagtattgcataagaaaatcaactattatgatcaaatttatgaaatacctcagttgaaatttgtaatctgaacatatttgttgcgagcaataagaatcagtgtcattatgaaaggctcagcaagacagtttccatgccaatttaaaacaattaatgtttccatcctttcccttttaattccgttgttgaatcatgtttctttgttcctcattgttcttaattatggatgctggtcctttgaagttcatgcacggagacttgctgctctgaaggcccttacctcctgttccactagcagttctgagatgatggaaaagctaaatgaaattgtgtttggcatcttggaaaaggtagcagatactaaacaaaaacggaaaaagggtatttttactaagcaaggtggtgataaggagtctatcatacgtggtaatttgcaatatgcttctctaagtgcactgagaaggtttccacttgatcccggtaaccaagcattcctccaccgagctgtgcaagggattgaattttccgacccagttgcagtcagacatgcattgtcaataatatctgaaattgctgcgaaagatccatactctgtcgcaatggcattgggcaaaagtgcacaacccggtggagctcttcaggacattcttcatttgcatgatgtccttgccagggtttaccttgcaaagttgtgtcattcgatatctagagcacgtgtattggaccagaggcctgacataaagtcacagtacagttccctcctttatcaacttcttctggatcccagtgacagggtctgctttgaggccataaattgtgtgttgggaaaagtcgacaacacagaaagcacggaggacagagctggtggatggattcagttaactagagaaattctcaaattgccagaggccccttctgtagcatcaaagggtgttctggcaaaatctagtgaaaaatcttcaaaagcaaggcgccctcagcctctcatcaaacttgtaatgagaagattggagagctcattccgtagcttctctcgtccggttcttcatgctgctgcaagagtagttcaggaaatgggcaaaagtagagcagctgcttttgctttaggtgcatatgatgagggtgccagtcttgatgttggatctcttgattctgattttgagaatccaatggctgaaggtacccgaaagcaaaatccgctatccaatggtcatggtggaacggacacaatagcaggattattagcatcactgatggaagttgtgcggacaacagtagcatgcgagtgtgtatatgttcgagcaatggtcatcaaagctttgatatggatgcaaaatccacatgaatcttttgaagagctaaaatctatcattgcatgcgagttgtctgacccagcctggccttcctcgctcctgaatgatgtcctactaaccttacatgctaggttcaaggcaacccctgatatggctgtgactctgcttgagattgcaagaatttttgccactaaagttcctggaaagattgatgctgatgttctacagttgttatggaagacatgccttgtaggagcaggaccagatgggaaacatacagccttggaagctgtaactatagttcttgatctgccaccacctcagcctggttcaatgtctggactcacttctgttgatatggtatctgcctctgatccaaaatctgcaatggcactccaaagattagttcaagctgctgtttggtttctaggagaaaatgctaattatgctgcatctgagtatgcctgggagtctgcaacaccacccggtactgcattaatgatgctagatgctgataaaatggttgctgctgcaagttcccgtaatcctacacttgctagcgctctgacaaggcttcaaaggtgtgcatttagtggaagctgggagatccgcattgctgctgtacaagccctaactaccattgcaataaggtctggtgaaccttatagactgcagatatatgaatttcttcatgctttggctcttggaggtgtgcagtcaaacttttcagaattgcagctaagtaatggggaaaatcaaggtgccagtggtactggtcttggatctttaataagcccaatgcttaaggtcctagatgaaatgtatagaggccaagatgatcttgccagagatattcgccagcatgataacagcaaacaggaatggagtgatgaggaactcaagaaactttatgaaacccatgagaggcttcttgattttgtttccttattctgttttgttccaagggctaaatacttgccccttggtcctaccagtgccaagctaattgagatctaccgcaaccgtcataacataagtgcttctggtggtctaagtgatcctgctgttgccactggaatatctgatctcatgtatgagtccaaagaagtacataaagagaccaatactgtccagtctggtattgatcccgatctggcaatggcctgggcagcaggtttggaagacgatgtttgggcaaacaacgctccagctgtggataaagtaaaggacttccttgccggtgctggaactgatgctcctgatgtggatgatgaggaatacatgaactcgaggccatcagtcggatatgatgatatgtgggctaagacaattcttgaaacttacgatgcagaggaagatgatggtaggtactctggtggatcctctcctgaatcaactggttctgttgaaacctccatatcgtcccattttggaggcatgaactatccatcactgttcagttcaaaaccgtcaagtcatggggcctcacaacaaacgatacgtgaagaaccaccctcatattcgacgtcagtactacagaggaaggaatcatttgaaaacccccttggagggggtggaggacgaagtttcggatcccacgaggatgaagataagagttctggtaaccctcagtctgggaaagctttgtatgacttcacagcaggcggtgatgatgagctgagtttaaactctggagaagaagtggagattgaatacgaggtcgatggttggtattatgtgaagaaaaggaggcctggaagggatggaaagatggcaggtctggttcctgttctgtatgtgagttcatgataacagccgtgtgtatcgtttcccacacttgtggaagctgtttggagttcatgggcttaacaaaaaggcacactggaatgctcccgagagatcttcgcataaactcgtgcccgtcgtataggcacgtggccttgtggaagcaggtcatatccagtcatcttggggttcgtatgatgctgcagtgctgttcctgggaaagatttacgtgttgatttgtctggacccacaccactagtcattcaattgattgttttttgttgctaaggtggagactcttcagaggttaaaccgttcatctgtgccattttgctgccgtctgtgttcaagaaggcaatttcgtcgtctccagttcgtgttgtgcgatatatattctagtaaaattgtagaggcatcatttccccggcatatattattttggtcgtgtatggtgtgattctggtggtaaaatagtgtcattaatgttgtgtatatttgtttccgggtggattacagagtatataactataagggggtgtttggtttaagaaatcactacatccaaattgaggtggtgcatcatgtgttcattcctcaaatttggtaggatgaccctattcctcatattagtactaactaactaattatgacgaatgaggtggtgatgatcaacttattccatttcacaaaccaaacaaaaatagtgaggagtgagaagatgatggactagttcattcctcaaaccaaacatcctataaagccgtagttttgtttaggatcatcaggctaaagcttggtaccgaagtccgg

SEQ ID NO: 1159 - DNA, 3616 bp, Zea Mays
cgtttcaagaatgtgcatttatttttggtgctgctaaggactcctgtttgtataccattattgaccttgctaattataagcatgaaaaggcatctatcatacgtggtaatttgcaatatgcttctctaagtgcactgagaaggtttccacttgatcccggtaaccaagcattcctccaccgagctgtgcaagggattgaattttccgacccagttgcagtcagacatgcattgtcaataatatctgaaattgctgcgaaagatccatactctgtcgcaatggcattgggcaaaagtgcacaacccggtggtatgcttcctttttcttcagcatcttttgagctcttcaggacattcttcatttgcatgatgtccttgccagggtttaccttgcaaagttgtgtcattcgatatctagagcacgtgtattggaccagaggcctgacataaagtcacagtacagttccctcctttatcaacttcttctggatcccagtgacagggtctgctttgaggccataaattgtgtgttgggaaaagtcgacaacacagaaagcacggaggacagagctggtggatggattcagttaactagagaaattctcaaattgccagaggccccttctgtagcatcaaagggtgttctggcaaaatctagtgaaaaatcttcaaaagcaaggcgccctcagcctctcatcaaacttgtaatgagaagattggagagctcattccgtagcttctctcgtccggttcttcatgctgctgcaagagtagttcaggaaatgggcaaaagtagagcagctgcttttgctttaggtgcatatgatgagggtgccagtcttgatgttggatctcttgattctgattttgagaatccaatggctgaaggtacccgaaagcaaaatccgctatccaatggtcatggtggaacggacacaatagcaggattattagcatcactgatggaagttgtgcggacaacagtagcatgcgagtgtgtatatgttcgagcaatggtcatcaaagctttgatatggatgcaaaatccacatgaatcttttgaagagctaaaatctatcattgcatgcgagttgtctgacccagcctggccttcctcgctcctgaatgatgtcctactaaccttacatgctaggttcaaggcaacccctgatatggctgtgactctgcttgagattgcaagaatttttgccactaaagttcctggaaagattgatgctgatgttctacagttgttatggaagacatgccttgtaggagcaggaccagatgggaaacatacagccttggaagctgtaactatagttcttgatctgccaccacctcagcctggttcaatgtctggactcacttctgttgatatggtatctgcctctgatccaaaatctgcaatggcactccaaagattagttcaagctgctgtttggtttctaggagaaaatgctaattatgctgcatctgagtatgcctgggagtctgcaacaccacccggtactgcattaatgatgctagatgctgataaaatggttgctgctgcaagttcccgtaatcctacacttgctagcgctctgacaaggcttcaaaggtgtgcatttagtggaagctgggagatccgcattgctgctgtacaagccctaactaccattgcaataaggtctggtgaaccttatagactgcagatatatgaatttcttcatgctttggctcttggaggtgtgcagtcaaacttttcagaattgcagctaagtaatggggaaaatcaaggtgccagtggtactggtcttggatctttaataagcccaatgcttaaggtcctagatgaaatgtatagaggccaagatgatcttgccagagatattcgccagcatgataacagcaaacaggaatggagtgatgaggaactcaagaaactttatgaaacccatgagaggcttcttgattttgtttccttattctgttttgttccaagggctaaatacttgccccttggtcctaccagtgccaagctaattgagatctaccgcaaccgtcataacataagtgcttctggtggtctaagtgatcctgctgttgccactggaatatctgatctcatgtatgagtccaaagaagtacataaagagaccaatactgtccagtctggtattgatcccgatctggcaatggcctgggcagcaggtttggaagacgatgtttgggcaaacaacgctccagctgtggataaagtaaaggacttccttgccggtgctggaactgatgctcctgatgtggatgatgaggaatacatgaactcgaggccatcagtcggatatgatgatatgtgggctaagacaattcttgaaacttacgatgcagaggaagatgatggtaggtactctggtggatcctctcctgaatcaactggttctgttgaaacctccatatcgtcccattttggaggcatgaactatccatcactgttcagttcaaaaccgtcaagtcatggggcctcacaacaaacgatacgtgaagaaccaccctcatattcgacgtcagtactacagaggaaggaatcatttgaaaacccccttggagggggtggaggacgaagtttcggatcccacgaggatgaagataagagttctggtaaccctcagtctgggaaagctttgtatgacttcacagcaggcggtgatgatgagctgagtttaaactctggagaagaagtggagattgaatacgaggtcgatggttggtattatgtgaagaaaaggaggcctggaagggatggaaagatggcaggtctggttcctgttctgtatgtgagttcatgataacagccgtgtgtatcgtttcccacacttgtggaagctgtttggagttcatgggcttaacaaaaaggcacactggaatgctcccgagagatcttcgcataaactcgtgcccgtcgtataggcacgtggccttgtggaagcaggtcatatccagtcatcttggggttcgtatgatgctgcagtgctgttcctgggaaagatttacgtgttgatttgtctggacccacaccactagtcattcaattgattgttttttgttgctaaggtggagactcttcagaggttaaaccgttcatctgtgccattttgctgccgtctgtgttcaagaaggcaatttcgtcgtctccagttcgtgttgtgcgatatatattctagtaaaattgtagaggcatcatttccccggcatatattattttggtcgtgtatggtgtgattctggtggtaaaatagtgtcattaatgttgtgtatatttgtttccgggtggattacagagtatataactataagggggtgtttggtttaagaaatcactacatccaaattgaggtggtgcatcatgtgttcattcctcaaatttggtaggatgaccctattcctcatattagtactaactaactaattatgacgaatgaggtggtgatgatcaacttattccatttcacaaaccaaacaaaaatagtgaggagtgagaagatgatggactagttcattcctcaaaccaaacatcctataaagccgtagttttgtttaggatcatcaggctaaagcttggtaccgaagtccgg

SEQ ID NO: 1160 - DNA, 3552 bp, Zea Mays
aaggactcctgtttgtataccattattgaccttgctaattataagcatgaaaaggcatctatcatacgtggtaatttgcaatatgcttctctaagtgcactgagaaggtttccacttgatcccggtaaccaagcattcctccaccgagctgtgcaagggattgaattttccgacccagttgcagtcagacatgcattgtcaataatatctgaaattgctgcgaaagatccatactctgtcgcaatggcattgggcaaaagtgcacaacccggtggagctcttcaggacattcttcatttgcatgatgtccttgccagggtttaccttgcaaagttgtgtcattcgatatctagagcacgtgtattggaccagaggcctgacataaagtcacagtacagttccctcctttatcaacttcttctggatcccagtgacagggtctgctttgaggccataaattgtgtgttgggaaaagtcgacaacacagaaagcacggaggacagagctggtggatggattcagttaactagagaaattctcaaattgccagaggccccttctgtagcatcaaagggtgttctggcaaaatctagtgaaaaatcttcaaaagcaaggcgccctcagcctctcatcaaacttgtaatgagaagattggagagctcattccgtagcttctctcgtccggttcttcatgctgctgcaagagtagttcaggaaatgggcaaaagtagagcagctgcttttgctttaggtgcatatgatgagggtgccagtcttgatgttggatctcttgattctgattttgagaatccaatggctgaaggtacccgaaagcaaaatccgctatccaatggtcatggtggaacggacacaatagcaggattattagcatcactgatggaagttgtgcggacaacagtagcatgcgagtgtgtatatgttcgagcaatggtcatcaaagctttgatatggatgcaaaatccacatgaatcttttgaagagctaaaatctatcattgcatgcgagttgtctgacccagcctggccttcctcgctcctgaatgatgtcctactaaccttacatgctaggttcaaggcaacccctgatatggctgtgactctgcttgagattgcaagaatttttgccactaaagttcctggaaagattgatgctgatgttctacagttgttatggaagacatgccttgtaggagcaggaccagatgggaaacatacagccttggaagctgtaactatagttcttgatctgccaccacctcagcctggttcaatgtctggactcacttctgttgatatggtatctgcctctgatccaaaatctgcaatggcactccaaagattagttcaagctgctgtttggtttctaggagaaaatgctaattatgctgcatctgagtatgcctgggagtctgcaacaccacccggtactgcattaatgatgctagatgctgataaaatggttgctgctgcaagttcccgtaatcctacacttgctagcgctctgacaaggcttcaaaggtgtgcatttagtggaagctgggagatccgcattgctgctgtacaagccctaactaccattgcaataaggtctggtgaaccttatagactgcagatatatgaatttcttcatgctttggctcttggaggtgtgcagtcaaacttttcagaattgcagctaagtaatggggaaaatcaaggtgccagtggtactggtcttggatctttaataagcccaatgcttaaggtcctagatgaaatgtatagaggccaagatgatcttgccagagatattcgccagcatgataacagcaaacaggaatggagtgatgaggaactcaagaaactttatgaaacccatgagaggcttcttgattttgtttccttattctgttttgttccaagggctaaatacttgccccttggtcctaccagtgccaagctaattgagatctaccgcaaccgtcataacataagtgcttctggtggtctaagtgatcctgctgttgccactggaatatctgatctcatgtatgagtccaaagaagtacataaagagaccaatactgtccagtctggtattgatcccgatctggcaatggcctgggcagcaggtttggaagacgatgtttgggcaaacaacgctccagctgtggataaagtaaaggacttccttgccggtgctggaactgatgctcctgatgtggatgatgaggaatacatgaactcgaggccatcagtcggatatgatgatatgtgggctaagacaattcttgaaacttacgatgcagaggaagatgatggtaggtactctggtggatcctctcctgaatcaactggttctgttgaaacctccatatcgtcccattttggaggcatgaactatccatcactgttcagttcaaaaccgtcaagtcatggggcctcacaacaaacgatacgtgaagaaccaccctcatattcgacgtcagtactacagaggaaggaatcatttgaaaacccccttggagggggtggaggacgaagtttcggatcccacgaggatgaagataagagttctggtaaccctcagtctgggaaagctttgtatgacttcacagcaggcggtgatgatgagctgagtttaaactctggagaagaagtggagattgaatacgaggtcgatggttggtattatgtgaagaaaaggaggcctggaagggatggaaagatggcaggtctggttcctgttctgtatgtgagttcatgataacagccgtgtgtatcgtttcccacacttgtggaagctgtttggagttcatgggcttaacaaaaaggcacactggaatgctcccgagagatcttcgcataaactcgtgcccgtcgtataggcacgtggccttgtggaagcaggtcatatccagtcatcttggggttcgtatgatgctgcagtgctgttcctgggaaagatttacgtgttgatttgtctggacccacaccactagtcattcaattgattgttttttgttgctaaggtggagactcttcagaggttaaaccgttcatctgtgccattttgctgccgtctgtgttcaagaaggcaatttcgtcgtctccagttcgtgttgtgcgatatatattctagtaaaattgtagaggcatcatttccccggcatatattattttggtcgtgtatggtgtgattctggtggtaaaatagtgtcattaatgttgtgtatatttgtttccgggtggattacagagtatataactataagggggtgtttggtttaagaaatcactacatccaaattgaggtggtgcatcatgtgttcattcctcaaatttggtaggatgaccctattcctcatattagtactaactaactaattatgacgaatgaggtggtgatgatcaacttattccatttcacaaaccaaacaaaaatagtgaggagtgagaagatgatggactagttcattcctcaaaccaaacatcctataaagccgtagttttgtttaggatcatcaggctaaagcttggtaccgaagtccgg

SEQ ID NO: 1161 - DNA, 1256 bp, Zea Mays
ggaggatagatggctcatggctgccatcgtctaggctcaacatccgaaagacgggccatggtcggtttccttcctcaccccagcggcggacatctatccgaaaataggccgcacctcgtccgctttgctccttgttcatccttcacctgctgatggcggcagcggcgcggccatccaacgccactcttctcgcgcgcctccgggacggcacggccaagttcgagctgctggatgactctgcgtttgcgcttgcgcacgcgcccccggcctggccccgacttcactgctttgccaggattgccccctcgttgaggggtgggtggtcggcagcgttgaacaaggtggagcattacggggttcagagggttaccggcgatggccggtgcatgtttcgagcgctggctaaaggaatggcaaaaaacaaggggattcctttggccccaagggaggaggtagaagatgcagatgatttacggatggcagtgaaagaaattatatgtgacagcgagactgggcggcaggagtacgaagaagcagttatagcaattactgtggagcaatcattgaaacgctactgccaaaggataaggaggcctgatttctggggtggagagtcagaattcctggtatagatttcattgttctaaaaacttgaagttcttagtttgtgcagtcatcttttatttatcagattatatccatggagaatctgattgacatgatagacaagctcatgcgtcattcttaattgtacttttgttgaacttctgaaggttctagccaaaatagatggagcagaatgctagtgctttactgctccgtcaagttgtattatatgtctgtcttttagatattatttgcgtataacatttttttcctttcaggttttgtctagactgtgtcggcagccaataattatttatattccagagcgtgagtaccatggtcggggtaatggtttcattcctatagctgaatatggtttggaattcaccaaaaatacaaagcagtggaagaaaaagacaccagtaagactattatacagtggaaggaaccattatgatttgcttgtgtgacatagttgcagagcaatgtatttttctagtgcccgtcgtcataccatggttgtattattttttgtttttatacctgtgcttgtgccccttttttgagccaccaatggaattgattcagttatccaaatatcagtttcgaaatatatatatttctcgtttgcatgctttgatcgtgcatat

SEQ ID NO: 1162 - DNA, 934 bp, Zea Mays
ggaggatagatggctcatggctgccatcgtctaggctcaacatccgaaagacgggccatggtcggtttccttcctcaccccagcggcggacatctatccgaaaataggccgcacctcgtccgctttgctccttgttcatccttcacctgctgatggcggcagcggcgcggccatccaacgccactcttctcgcgcgcctccgggacggcacggccaagttcgagctgctggatgactctgcgtttgcgcttgcgcacgcgcccccggcctggccccgacttcactgctttgccaggattgccccctcgttgaggggtgggtggtcggcagcgttgaacaaggtggagcattacggggttcagagggttaccggcgatggccggtgcatgtttcgagcgctgatgatttacggatggcagtgaaagaaattatatgtgacagcgagactgggcggcaggagtacgaagaagcagttatagcaattactgtggagcaatcattgaaacgctactgccaaaggataaggaggcctgatttctggggtggagagtcagaattcctggttttgtctagactgtgtcggcagccaataattatttatattccagagcgtgagtaccatggtcggggtaatggtttcattcctatagctgaatatggtttggaattcaccaaaaatacaaagcagtggaagaaaaagacaccagtaagactattatacagtggaaggaaccattatgatttgcttgtgtgacatagttgcagagcaatgtatttttctagtgcccgtcgtcataccatggttgtattattttttgtttttatacctgtgcttgtgccccttttttgagccaccaatggaattgattcagttatccaaatatcagtttcgaaatatatatatttctcgtttgcatgctttgatcgtgcatat

SEQ ID NO: 1163 - DNA, 647 bp, Zea Mays
agtcatcaggtcatgggtttcaagcagcctctccatttttatggaggaaggctaaaggaatggcaaaaaacaaggggattcctttggccccaagggaggaggtagaagatgcagatgatttacggatggcagtgaaagaaattatatgtgacagcgagactgggcggcaggagtacgaagaagcagttatagcaattactgtggagcaatcattgaaacgctactgccaaaggataaggaggcctgatttctggggtggagagtcagaattcctggttttgtctagactgtgtcggcagccaataattatttatattccagagcgtgagtaccatggtcggggtaatggtttcattcctatagctgaatatggtttggaattcaccaaaaatacaaagcagtggaagaaaaagacaccagtaagactattatacagtggaaggaaccattatgatttgcttgtgtgacatagttgcagagcaatgtatttttctagtgcccgtcgtcataccatggttgtattattttttgtttttatacctgtgcttgtgccccttttttgagccaccaatggaattgattcagttatccaaatatcagtttcgaaatatatatatttctcgtttgcatgctttgatcgtgcatat

SEQ ID NO: 1164 - DNA, 583 bp, Zea Mays
agtcatcaggtcatgggtttcaagcagcctctccatttttatggaggaagatgatttacggatggcagtgaaagaaattatatgtgacagcgagactgggcggcaggagtacgaagaagcagttatagcaattactgtggagcaatcattgaaacgctactgccaaaggataaggaggcctgatttctggggtggagagtcagaattcctggttttgtctagactgtgtcggcagccaataattatttatattccagagcgtgagtaccatggtcggggtaatggtttcattcctatagctgaatatggtttggaattcaccaaaaatacaaagcagtggaagaaaaagacaccagtaagactattatacagtggaaggaaccattatgatttgcttgtgtgacatagttgcagagcaatgtatttttctagtgcccgtcgtcataccatggttgtattattttttgtttttatacctgtgcttgtgccccttttttgagccaccaatggaattgattcagttatccaaatatcagtttcgaaatatatatatttctcgtttgcatgctttgatcgtgcatat

SEQ ID NO: 1165 - DNA, 1095 bp, Zea Mays
gcacgtcgacaatttggtcgggagtcgacactcgggctcggggattgtgcgttcttggtcttttgcggctcggcatgtctccgttccagggatacagaggagatgcggtttcagggtttgaacgttactaattatgcttctcttgtcatgatggggtactatgggaagtcaatcaaagatctggccctcgctcgcatccctgctgtcagcctggagagtttgcagatcgaggaatgcagcaaggttactcttacgggcattcttgctttcttcctcaactgtagcccaaagttcaagtccctctctctgtccaagtgcatcgagatcaaggacatatgctccgcatctgcacagcttccagtatgcaaatcgcttcggtccctggccatcaaggattgctcaggcttcaccgacaccagccttcctatggtgggcatgttctgccctcagctggagaacatcaatttgagtggccttagtgcagtcaccgacaatggcttccttccactaatgaagagctcggacagtgggctggtcgacattgatttgaacagctgcgagaatctcacggtcacggacgcggctgtttctgccttggttaaggaccatgacgcttcccttgccacctcattgaccatgatgcaagcctgttcgccatctgtgagagttgcagccagctcatcgagctcaacctttcgaactgcatggtcaatgactacaatggcgcggtcttggaagcgacgaagcagctcaggctgtgtggctgtatgaaggtcacccagaagagcgtgagcttgaagcccttcatcaaacgtttctaagaagcatttgaagacgcagaaattactcatgttgacgatacagtagatcctgttagagacatgatatagagttcatgaaaaagaaacttgagggccttgataagccaatgaagaggagcaatgataagctgctcaaaattgagcatgaattatgtgagagggtgcggcatcaattacttcaattcttctgcataactatgggtcttttagcagccttactaaaatatgattgaaaatgaaaatcctttatcggcggctttgtataatggcacaa

SEQ ID NO: 1166 - DNA, 1034 bp, Zea Mays
gcacgtcgacaatttggtcgggagtcgacactcgggctcggggattgtgcgttcttggtcttttgcggctcggcatgtctccgttccagggatacagaggagatgcggtttcagggtttgaacgttactaattatgcttctcttgtcatgatggggtactatgggaagtcaatcaaagatctggccctcgctcgcatccctgctgtcagcctggagagtttgcagatcgaggaatgcagcaaggttactcttacgggcattcttgctttcttcctcaactgtagcccaaagttcaagtccctctctctgtccaagtgcatcgagatcaaggacatatgctccgcatctgcacagcttccagtatgcaaatcgcttcggtccctggccatcaaggattgctcaggcttcaccgacaccagccttcctatggtgggcatgttctgccctcagctggagaacatcaatttgagtggccttagtgcagtcaccgacaatggcttccttccactaatgaagagctcggacagtgggctggtcgacattgatttgaacagctgcgagaatctcacggtcacggacgcggctgtttctgccttggttaaggaccatgacgcttcccttgccacctcattgaccatgatgcaagcctgttcgccatctgtgagagttgcagccagctcatcgagctcaacctttcgaactgcatggtcaatgactacaatggcgcggtcttggaagcgacgaagcagctcaggctgtgtggctgtatgaaggtcacccagaagagcgtgagcttgaagcccttcatcaaacgtttctaaggatatagagttcatgaaaaagaaacttgagggccttgataagccaatgaagaggagcaatgataagctgctcaaaattgagcatgaattatgtgagagggtgcggcatcaattacttcaattcttctgcataactatgggtcttttagcagccttactaaaatatgattgaaaatgaaaatcctttatcggcggctttgtataatggcacaa

SEQ ID NO: 1167 - DNA, 968 bp, Zea Mays
ccattgtaaacctagaccctctccttacgcctataaaaggaaggtccatggctctcgtacgagaaggttggccgtgtgggagaacgggccggcgcataaggctctcgccctctctctctcccacgcgaacgcttgtaaccccctactgcaagcgcacccgacctgggcgcaaggcaacacgaaggccgtgggttttccctttgcctgtttcttccccccttcgtgctccgtctcgcgccgacccatctgggctgggacacgcagcgacaattcactcgtcggtccagggaccccctggggtcgaaacgccgacactcccgcgcttcctccacgctcccttccatacagcgggcccgatccgattcggcttccgtctcactcatctcacctggcctccgcggagagatctagcggtggaggcgatgccactgggcgacggcgcggaggcgacggacttcgtgctgccggacgagctcctggcggcgttgccgcaggacccctacgagcagctggatctggcacgccacatcaccgcgctggcggtatccgggcgggtgtccggcctggagcgggaggcagggcgcctacgggcggagggtgcggggaaggaccgcgagaacgccgagctccgggagcgagtgaacgagattattgggaggtctgtcctggcgcacggaccttatgggaagctagagaagcatttgaagacgcagaaattactcatgttgacgatacagtagatcctgttagagacatgatatagagttcatgaaaaagaaacttgagggccttgataagccaatgaagaggagcaatgataagctgctcaaaattgagcatgaattatgtgagagggtgcggcatcaattacttcaattcttctgcataactatgggtcttttagcagccttactaaaatatgattgaaaatgaaaatcctttatcggcggctttgtataatggcacaa

SEQ ID NO: 1168 - DNA, 1042 bp, Zea Mays
atgtcgctgatccgccgcagcaacgtgttcgatcccttctccctcgacctctgggacccctttgagggcttccccttcggctccgacagcaagcaccaagcagcgatccgaagctcaatcaattcactcaaacctcttccccaaatcttcgattagattctcgttgacaagaagactagaaccgaacctgaccatgtcgctgatccgccgcagcaacgtgttcgatcccttctccctcgacctctgggacccctttgagggcttccccttcggctccggcagcagcagcagtctcttcccctcgttcccgcggaccagctcggagaccgcggccttcgctggcgcgcggatcgactggaaggagactccagaggcgcacgtgttcaaggccgacgtaccggggctgaagaaggaggaggtcaaggtggaggtcgaggacggcaacgtccttcagatcagcggcgaacgcaacaaggagcaggaggagaagacggacacctggcaccgcgtggagcggagcagcgggaggttcctgcgcaggttccgactgcccgagaacgctaagacggagcagatcacggccgccatggagaacggcgtgcttacagtcactgtgccgaaggaggacgccaagaagcctgaagtgaagtccattcagatctccggctagacctcggtctgcggtcgtcgtacctgcgtggtttgaggaacggcagttcgcctcggtcgttctgtgaaataaaattgggttacaagaattatggcgtttgtcaatatggtcgtaatgtcgtaggatggtggaatgtggtcacaaactttgcgtatgttgggtctactggtggtgtctgaatctatgtatggatgtcatgagtttgtctactagagtcccagttcctgtggtgttcgtatgatgtatatcatgggttaactctatctaaaatttcttcattatggtatttttaagaaataaattcttcattatggtattttttaaggggaatctgtccaccctaataagagcaaaaatttaagaaccgaatag

SEQ ID NO: 1169 - DNA, 1972 bp, Zea Mays
cttttttaccttgccagtgccaggcgcgcgacaaacggcagcaaccgctacagcgaagcaggcgaggaggaggcccgcccggcgccccctccctatcctctcacccacgaccacgacccaccccaccgcaccccaggtccccaccccactcactacaccaccagtccaccaccgctctcttaccccggaggccggaacaaaacacggagtggccgcgccccgcgcccgcgcggaatcggacgagccacggtctaccagcacagcgctatacaccgccggccttcttggcttccttctaccgattccgtgtgctgttcgctgtcgcctattgcgcttgcgcctacttggtaactacagcgtcggccgccatcccccgcagcagccgttttctagctgcttcccgctggttcgcggccgccgtcctgggcgtctgagcgaggggtaaccctgcccttttgttcctgggctattcctcagctcgcgccgctgtcgcctcaccccccaatccaatcctccgcgatcgatcggcgggcgcggatggaggcgctgaagaagcaggccagcaagctccgcgagcacgtcgccaagcagcagcaggcggtcctcaagcagttcagtacgcggtatagtcaagatccttctcttgttgatgaagcggagcttgagtgccaccagaatctccaaaggctttacagtactacaagagcagctaagcatttccagcggaatattgtacgaggggtggaaggtttcattgcagttagcaccaaacagatggagattgtgaaaaaactagccggggattgttgtaaatatggagacgacaatcagcattttggttttgctcttgcaagggcgtctgaggagttcggtaaatctcataaacaaatagagaaagagcgggaggatcttcttaaaattcttggagagcagatttttgagcctctccgagaaatgataatgagtgctcctcttgaagatgctcgattgctaacttaccgttatcaacggatcagacaggacatggagtctcagaatcgaaattatcagatcttcgaactacactggcagcgttaggaagagaagcaactgcagctatggaggctgtagaggctcagcaacagcaagttacgtacgaacgtctccttgcaatggttgatgctgagaggacatatcatcaaaatgctgctgatattctgaataaactccatgatgagatgctctatgcaaagcatcataatgagtcagcaaaccactacgatgaacagtcttcagagcctgaatcagatgcaggcccagcacaagtgcactcacgtagcacatctgaagatccagtattgactaaacctagcgaatccacagggaacagtcaggaggtgcaatttctgggggaggttattcatccattcgatgctcaggctgatggtgagctcagtctcgcggtgggtgaatacgttgtggtccgccaggtggctgcaaatggttggtctgaaggtgaatgcaagggaaaggctggctggttcccatctgcctacgtagagcagagggacagagccccggcaagcaaggtgatagagcctggacttctgactacctgatccatcccgtagttatggctgctgacttgctgtcatggtcctttttttttctacattattgtacatgacatgccccatgagtgattagcgtatggcagaaccttcaccttttctgtgcagattattgttcttctagccttttcgttggtcggtaactgtatgtaaaatgtagttctgtctgttaggatttccttccggtattataacattgtacagagctattggtgatgagatgctgtcagcttgccctttcttttcggacagtgtgcttcctgacagatttatgctaactaatggtttcgtaacagtgagactggcactgctgccggtggttatggtacgaaacactgtagatggtagaagcggaatatgat

SEQ ID NO: 1170 - DNA, 1990 bp, Zea Mays
aagcaggcgaggaggaggcccgcccggcgccccctccctatcctctcacccacgaccacgacccaccccaccgcaccccaggtccccaccccactcactacaccaccagtccaccaccgctctcttaccccggaggccggaacaaaacacggagtggccgcgccccgcgcccgcgcggaatcggacgagccacggtctaccagcacagcgctatacaccgccggccttcttggcttccttctaccgattccgtgtgctgttcgctgtcgcctattgcgcttgcgcctacttggtaactacagcgtcggccgccatcccccgcagcagccgttttctagctgcttcccgctggttcgcggccgccgtcctgggcgtctgagcgaggggtaaccctgcccttttgttcctgggctattcctcagctcgcgccgctgtcgcctcaccccccaatccaatcctccgcgatcgatcggcgggcgcggatggaggcgctgaagaagcaggccagcaagctccgcgagcacgtcgccaagcagcagcaggcggtcctcaagcagttcagtacgcggtatagtcaagatccttctcttgttgatgaagcggagcttgagtgccaccagaatctccaaaggctttacagtactacaagagcagctaagcggaatattgtacgaggggtggaaggtttcattgcagttagcaccaaacagatggagattgtgaaaaaactagccggggattgttgtaaatatggagacgacaatcagcattttggttttgctcttgcaagggcgtctgaggagttcggtaaatctcataaacaaatagagaaagagcgggaggatcttcttaaaattcttggagagcagatttttgagcctctccgagaaatgataatgagtgctcctcttgaagatgctcgattgctaacttaccgttatcaacggatcagacaggacatggagtctcagatagctgatgtgatgagaaagcaacttaaatccaaggaaagtagtggtaacacagataactctgtgaaactgcaacatgcagaatcgaaattatcagatcttcgaactacactggcagcgttaggaagagaagcaactgcagctatggaggctgtagaggctcagcaacagcaagttacgtacgaacgtctccttgcaatggttgatgctgagaggacatatcatcaaaatgctgctgatattctgaataaactccatgatgagatgctctatgcaaagcatcataatgagtcagcaaaccactacgatgaacagtcttcagagcctgaatcagatgcaggcccagcacaagtgcactcacgtagcacatctgaagatccagtattgactaaacctagcgaatccacagggaacagtcaggaggtgcaatttctgggggaggttattcatccattcgatgctcaggctgatggtgagctcagtctcgcggtgggtgaatacgttgtggtccgccaggtggctgcaaatggttggtctgaaggtgaatgcaagggaaaggctggctggttcccatctgcctacgtagagcagagggacagagccccggcaagcaaggtgatagagcctggacttctgactacctgatccatcccgtagttatggctgctgacttgctgtcatggtcctttttttttctacattattgtacatgacatgccccatgagtgattagcgtatggcagaaccttcaccttttctgtgcagattattgttcttctagccttttcgttggtcggtaactgtatgtaaaatgtagttctgtctgttaggatttccttccggtattataacattgtacagagctattggtgatgagatgctgtcagcttgccctttcttttcggacagtgtgcttcctgacagatttatgctaactaatggtttcgtaacagtgagactggcactgctgccggtggttatggtacgaaacactgtagatggtagaagcggaatatgat

SEQ ID NO: 1171 - DNA, 1853 bp, Zea Mays
ggcccgcccggcgccccctccctatcctctcacccacgaccacgacccaccccaccgcaccccaggtccccaccccactcactacaccaccagtccaccaccgctctcttaccccggaggccggaacaaaacacggagtggccgcgccccgcgcccgcgcggaatcggacgagccacggtctaccagcacagcgctatacaccgccggccttcttggcttccttctaccgattccgtgtgctgttcgctgtcgcctattgcgcttgcgcctacttgctcgcgccgctgtcgcctcaccccccaatccaatcctccgcgatcgatcggcgggcgcggatggaggcgctgaagaagcaggccagcaagctccgcgagcacgtcgccaagcagcagcaggcggtcctcaagcagttcagtacgcggtatagtcaagatccttctcttgttgatgaagcggagcttgagtgccaccagaatctccaaaggctttacagtactacaagagcagctaagcatttccagcggaatattgtacgaggggtggaaggtttcattgcagttagcaccaaacagatggagattgtgaaaaaactagccggggattgttgtaaatatggagacgacaatcagcattttggttttgctcttgcaagggcgtctgaggagttcggtaaatctcataaacaaatagagaaagagcgggaggatcttcttaaaattcttggagagcagatttttgagcctctccgagaaatgataatgagtgctcctcttgaagatgctcgattgctaacttaccgttatcaacggatcagacaggacatggagtctcagatagctgatgtgatgagaaagcaacttaaatccaaggaaagtagtggtaacacagataactctgtgaaactgcaacatgcagaatcgaaattatcagatcttcgaactacactggcagcgttaggaagagaagcaactgcagctatggaggctgtagaggctcagcaacagcaagttacgtacgaacgtctccttgcaatggttgatgctgagaggacatatcatcaaaatgctgctgatattctgaataaactccatgatgagatgctctatgcaaagcatcataatgagtcagcaaaccactacgatgaacagtcttcagagcctgaatcagatgcaggcccagcacaagtgcactcacgtagcacatctgaagatccagtattgactaaacctagcgaatccacagggaacagtcaggaggtgcaatttctgggggaggttattcatccattcgatgctcaggctgatggtgagctcagtctcgcggtgggtgaatacgttgtggtccgccaggtggctgcaaatggttggtctgaaggtgaatgcaagggaaaggctggctggttcccatctgcctacgtagagcagagggacagagccccggcaagcaaggtgatagagcctggacttctgactacctgatccatcccgtagttatggctgctgacttgctgtcatggtcctttttttttctacattattgtacatgacatgccccatgagtgattagcgtatggcagaaccttcaccttttctgtgcagattattgttcttctagccttttcgttggtcggtaactgtatgtaaaatgtagttctgtctgttaggatttccttccggtattataacattgtacagagctattggtgatgagatgctgtcagcttgccctttcttttcggacagtgtgcttcctgacagatttatgctaactaatggtttcgtaacagtgagactggcactgctgccggtggttatggtacgaaacactgtagatggtagaagcggaatatgat

SEQ ID NO: 1172 - DNA, 1840 bp, Zea Mays
ctctcacccacgaccacgacccaccccaccgcaccccaggtccccaccccactcactacaccaccagtccaccaccgctctcttaccccggaggccggaacaaaacacggagtggccgcgccccgcgcccgcgcggaatcggacgagccacggtctaccagcacagcgctatacaccgccggccttcttggcttccttctaccgattccgtgtgctgttcgctgtcgcctattgcgcttgcgcctacttggtaactacagcgtcggccgccatcccccgcagcagccgttttctagctgcttcccgctggttcgcggccgccgtcctgggcgtctgagcgaggggtaaccctgcccttttgttcctgggctattcctcagctcgcgccgctgtcgcctcaccccccaatccaatcctccgcgatcgatcggcgggcgcggatggaggcgctgaagaagcaggccagcaagctccgcgagcacgtcgccaagcagcagcagcatttccagcggaatattgtacgaggggtggaaggtttcattgcagttagcaccaaacagatggagattgtgaaaaaactagccggggattgttgtaaatatggagacgacaatcagcattttggttttgctcttgcaagggcgtctgaggagttcggtaaatctcataaacaaatagagaaagagcgggaggatcttcttaaaattcttggagagcagatttttgagcctctccgagaaatgataatgagtgctcctcttgaagatgctcgattgctaacttaccgttatcaacggatcagacaggacatggagtctcagatagctgatgtgatgagaaagcaacttaaatccaaggaaagtagtggtaacacagataactctgtgaaactgcaacatgcagaatcgaaattatcagatcttcgaactacactggcagcgttaggaagagaagcaactgcagctatggaggctgtagaggctcagcaacagcaagttacgtacgaacgtctccttgcaatggttgatgctgagaggacatatcatcaaaatgctgctgatattctgaataaactccatgatgagatgctctatgcaaagcatcataatgagtcagcaaaccactacgatgaacagtcttcagagcctgaatcagatgcaggcccagcacaagtgcactcacgtagcacatctgaagatccagtattgactaaacctagcgaatccacagggaacagtcaggaggtgcaatttctgggggaggttattcatccattcgatgctcaggctgatggtgagctcagtctcgcggtgggtgaatacgttgtggtccgccaggtggctgcaaatggttggtctgaaggtgaatgcaagggaaaggctggctggttcccatctgcctacgtagagcagagggacagagccccggcaagcaaggtgatagagcctggacttctgactacctgatccatcccgtagttatggctgctgacttgctgtcatggtcctttttttttctacattattgtacatgacatgccccatgagtgattagcgtatggcagaaccttcaccttttctgtgcagattattgttcttctagccttttcgttggtcggtaactgtatgtaaaatgtagttctgtctgttaggatttccttccggtattataacattgtacagagctattggtgatgagatgctgtcagcttgccctttcttttcggacagtgtgcttcctgacagatttatgctaactaatggtttcgtaacagtgagactggcactgctgccggtggttatggtacgaaacactgtagatggtagaagcggaatatgat

SEQ ID NO: 1173 - DNA, 1959 bp, Zea Mays
gaccacgacccaccccaccgcaccccaggtccccaccccactcactacaccaccagtccaccaccgctctcttaccccggaggccggaacaaaacacggagtggccgcgccccgcgcccgcgcggaatcggacgagccacggtctaccagcacagcgctatacaccgccggccttcttggcttccttctaccgattccgtgtgctgttcgctgtcgcctattgcgcttgcgcctacttggtaactacagcgtcggccgccatcccccgcagcagccgttttctagctgcttcccgctggttcgcggccgccgtcctgggcgtctgagcgaggggtaaccctgcccttttgttcctgggctattcctcagctcgcgccgctgtcgcctcaccccccaatccaatcctccgcgatcgatcggcgggcgcggatggaggcgctgaagaagcaggccagcaagctccgcgagcacgtcgccaagcagcagcaggcggtcctcaagcagttcagtacgcggtatagtcaagatccttctcttgttgatgaagcggagcttgagtgccaccagaatctccaaaggctttacagtactacaagagcagctaagcatttccagcggaatattgtacgaggggtggaaggtttcattgcagttagcaccaaacagatggagattgtgaaaaaactagccggggattgttgtaaatatggagacgacaatcagcattttggttttgctcttgcaagggcgtctgaggagttcggtaaatctcataaacaaatagagaaagagcgggaggatcttcttaaaattcttggagagcagatttttgagcctctccgagaaatgataatgagtgctcctcttgaagatgctcgattgctaacttaccgttatcaacggatcagacaggacatggagtctcagatagctgatgtgatgagaaagcaacttaaatccaaggaaagtagtggtaacacagataactctgtgaaactgcaacatgcagaatcgaaattatcagatcttcgaactacactggcagcgttaggaagagaagcaactgcagctatggaggctgtagaggctcagcaacagcaagttacgtacgaacgtctccttgcaatgtctatgcttacaggttgatgctgagaggacatatcatcaaaatgctgctgatattctgaataaactccatgatgagatgctctatgcaaagcatcataatgagtcagcaaaccactacgatgaacagtcttcagagcctgaatcagatgcaggcccagcacaagtgcactcacgtagcacatctgaagatccagtattgactaaacctagcgaatccacagggaacagtcaggaggtgcaatttctgggggaggttattcatccattcgatgctcaggctgatggtgagctcagtctcgcggtgggtgaatacgttgtggtccgccaggtggctgcaaatggttggtctgaaggtgaatgcaagggaaaggctggctggttcccatctgcctacgtagagcagagggacagagccccggcaagcaaggtgatagagcctggacttctgactacctgatccatcccgtagttatggctgctgacttgctgtcatggtcctttttttttctacattattgtacatgacatgccccatgagtgattagcgtatggcagaaccttcaccttttctgtgcagattattgttcttctagccttttcgttggtcggtaactgtatgtaaaatgtagttctgtctgttaggatttccttccggtattataacattgtacagagctattggtgatgagatgctgtcagcttgccctttcttttcggacagtgtgcttcctgacagatttatgctaactaatggtttcgtaacagtgagactggcactgctgccggtggttatggtacgaaacactgtagatggtagaagcggaatatgat

SEQ ID NO: 1174 - DNA, 1715 bp, Zea Mays
ccccaccccactcactacaccaccagtccaccaccgctctcttaccccggaggccggaacaaaacacggagtggccgcgccccgcgcccgcgcggaatcggacgagccacggtctaccagcacagcgctatacaccgccggccttcttggcttccttctaccgattccgtgtgctgttcgctgtcgcctattgcgcttgcgcctacttggtaactacagcgtcggccgccatcccccgcagcagccgttttctagctgcttcccgctggttcgcggccgccgtcctgggcgtctgagcgaggggtaaccctgcccttttgttcctgggctattcctcagctcgcgccgctgtcgcctcaccccccaatccaatcctccgcgatcgatcggcgggcgcggatggaggcgctgaagaagcaggccagcaagctccgcgagcacgtcgccaagcagcagcaggcggtcctcaagcagttcagtacgcggtatagtcaagatccttctcttgttgatgaagcggagcttgagtgccaccagaatctccaaaggctttacagtactacaagagcagctaagcatttccagcggaatattgtacgaggggtggaaggtttcattgcagttagcaccaaacagatggagattgtgaaaaaactagccggggattgttgtaaatatggagacgacaatcagcattttggttttgctcttgcaagggcgtctgaggagttcggtaaatctcataaacaaatagagaaagagcgggaggatcttcttaaaattcttggagagcagatttttgagcctctccgagaaatgataatgagtgctcctcttgaagatgctcgattgctaacttaccgttatcaacggatcagacaggacatggagtctcaggttgatgctgagaggacatatcatcaaaatgctgctgatattctgaataaactccatgatgagatgctctatgcaaagcatcataatgagtcagcaaaccactacgatgaacagtcttcagagcctgaatcagatgcaggcccagcacaagtgcactcacgtagcacatctgaagatccagtattgactaaacctagcgaatccacagggaacagtcaggaggtgcaatttctgggggaggttattcatccattcgatgctcaggctgatggtgagctcagtctcgcggtgggtgaatacgttgtggtccgccaggtggctgcaaatggttggtctgaaggtgaatgcaagggaaaggctggctggttcccatctgcctacgtagagcagagggacagagccccggcaagcaaggtgatagagcctggacttctgactacctgatccatcccgtagttatggctgctgacttgctgtcatggtcctttttttttctacattattgtacatgacatgccccatgagtgattagcgtatggcagaaccttcaccttttctgtgcagattattgttcttctagccttttcgttggtcggtaactgtatgtaaaatgtagttctgtctgttaggatttccttccggtattataacattgtacagagctattggtgatgagatgctgtcagcttgccctttcttttcggacagtgtgcttcctgacagatttatgctaactaatggtttcgtaacagtgagactggcactgctgccggtggttatggtacgaaacactgtagatggtagaagcggaatatgat

SEQ ID NO: 1175 - DNA, 1728 bp, Zea Mays
cccaccccactcactacaccaccagtccaccaccgctctcttaccccggaggccggaacaaaacacggagtggccgcgccccgcgcccgcgcggaatcggacgagccacggtctaccagcacagcgctatacaccgccggccttcttggcttccttctaccgattccgtgtgctgttcgctgtcgcctattgcgcttgcgcctacttggtaactacagcgtcggccgccatcccccgcagcagccgttttctagctgcttcccgctggttcgcggccgccgtcctgggcgtctgagcgaggggtaaccctgcccttttgttcctgggctattcctcagctcgcgccgctgtcgcctcaccccccaatccaatcctccgcgatcgatcggcgggcgcggatggaggcgctgaagaagcaggccagcaagctccgcgagcacgtcgccaagcagcagcagtgaaaaaactagccggggattgttgtaaatatggagacgacaatcagcattttggttttgctcttgcaagggcgtctgaggagttcggtaaatctcataaacaaatagagaaagagcgggaggatcttcttaaaattcttggagagcagatttttgagcctctccgagaaatgataatgagtgctcctcttgaagatgctcgattgctaacttaccgttatcaacggatcagacaggacatggagtctcagatagctgatgtgatgagaaagcaacttaaatccaaggaaagtagtggtaacacagataactctgtgaaactgcaacatgcagaatcgaaattatcagatcttcgaactacactggcagcgttaggaagagaagcaactgcagctatggaggctgtagaggctcagcaacagcaagttacgtacgaacgtctccttgcaatggttgatgctgagaggacatatcatcaaaatgctgctgatattctgaataaactccatgatgagatgctctatgcaaagcatcataatgagtcagcaaaccactacgatgaacagtcttcagagcctgaatcagatgcaggcccagcacaagtgcactcacgtagcacatctgaagatccagtattgactaaacctagcgaatccacagggaacagtcaggaggtgcaatttctgggggaggttattcatccattcgatgctcaggctgatggtgagctcagtctcgcggtgggtgaatacgttgtggtccgccaggtggctgcaaatggttggtctgaaggtgaatgcaagggaaaggctggctggttcccatctgcctacgtagagcagagggacagagccccggcaagcaaggtgatagagcctggacttctgactacctgatccatcccgtagttatggctgctgacttgctgtcatggtcctttttttttctacattattgtacatgacatgccccatgagtgattagcgtatggcagaaccttcaccttttctgtgcagattattgttcttctagccttttcgttggtcggtaactgtatgtaaaatgtagttctgtctgttaggatttccttccggtattataacattgtacagagctattggtgatgagatgctgtcagcttgccctttcttttcggacagtgtgcttcctgacagatttatgctaactaatggtttcgtaacagtgagactggcactgctgccggtggttatggtacgaaacactgtagatggtagaagcggaatatgat

SEQ ID NO: 1176 - DNA, 1553 bp, Zea Mays
ccaccaccgctctcttaccccggaggccggaacaaaacacggagtggccgcgccccgcgcccgcgcggaatcggacgagccacggtctaccagcacagcgctatacaccgccggccttcttggcttccttctaccgattccgtgtgctgttcgctgtcgcctattgcgcttgcgcctacttggtaactacagcgtcggccgccatcccccgcagcagccgttttctagctgcttcccgctggttcgcggccgccgtcctgggcgtctgagcgaggggtaaccctgcccttttgttcctgggctattcctcagctcgcgccgctgtcgcctcaccccccaatccaatcctccgcgatcgatcggcgggcgcggatggaggcgctgaagaagcaggccagcaagctccgcgagcacgtcgccaagcagcagcagatttttgagcctctccgagaaatgataatgagtgctcctcttgaagatgctcgattgctaacttaccgttatcaacggatcagacaggacatggagtctcagatagctgatgtgatgagaaagcaacttaaatccaaggaaagtagtggtaacacagataactctgtgaaactgcaacatgcagaatcgaaattatcagatcttcgaactacactggcagcgttaggaagagaagcaactgcagctatggaggctgtagaggctcagcaacagcaagttacgtacgaacgtctccttgcaatggttgatgctgagaggacatatcatcaaaatgctgctgatattctgaataaactccatgatgagatgctctatgcaaagcatcataatgagtcagcaaaccactacgatgaacagtcttcagagcctgaatcagatgcaggcccagcacaagtgcactcacgtagcacatctgaagatccagtattgactaaacctagcgaatccacagggaacagtcaggaggtgcaatttctgggggaggttattcatccattcgatgctcaggctgatggtgagctcagtctcgcggtgggtgaatacgttgtggtccgccaggtggctgcaaatggttggtctgaaggtgaatgcaagggaaaggctggctggttcccatctgcctacgtagagcagagggacagagccccggcaagcaaggtgatagagcctggacttctgactacctgatccatcccgtagttatggctgctgacttgctgtcatggtcctttttttttctacattattgtacatgacatgccccatgagtgattagcgtatggcagaaccttcaccttttctgtgcagattattgttcttctagccttttcgttggtcggtaactgtatgtaaaatgtagttctgtctgttaggatttccttccggtattataacattgtacagagctattggtgatgagatgctgtcagcttgccctttcttttcggacagtgtgcttcctgacagatttatgctaactaatggtttcgtaacagtgagactggcactgctgccggtggttatggtacgaaacactgtagatggtagaagcggaatatgat

SEQ ID NO: 1177 - DNA, 1807 bp, Zea Mays
cgctctcttaccccggaggccggaacaaaacacggagtggccgcgccccgcgcccgcgcggaatcggacgagccacggtctaccagcacagcgctatacaccgccggccttcttggcttccttctaccgattccgtgtgctgttcgctgtcgcctattgcgcttgcgcctacttggtaactacagcgtcggccgccatcccccgcagcagccgttttctagctgcttcccgctggttcgcggccgccgtcctgggcgtctgagcgaggggtaaccctgcccttttgttcctgggctattcctcagctcgcgccgctgtcgcctcaccccccaatccaatcctccgcgatcgatcggcgggcgcggatggaggcgctgaagaagcaggccagcaagctccgcgagcacgtcgccaagcagcagcaggcggtcctcaagcagttcagtacgcggtatagtcaagatccttctcttgttgatgaagcggagcttgagtgccaccagaatctccaaaggctttacagtactacaagagcagctaagcatttccagcggaatattgtacgaggggtggaaggtttcattgcagttagcaccaaacagatggagattgtgaaaaaactagccggggattgttgtaaatatggagacgacaatcagcattttggttttgctcttgcaagggcgtctgaggagttcggtaaatctcataaacaaatagagaaagagcgggaggatcttcttaaaattcttggagagcagatttttgagcctctccgagaaatgataatgagtgctcctcttgaagatgctcgattgctaacttaccgttatcaacggatcagacaggacatggagtctcagatagctgatgtgatgagaaagcaacttaaatccaaggaaagtagtggtaacacagataactctgtgaaactgcaacatgcagaatcgaaattatcagatcttcgaactacactggcagcgttaggaagagaagcaactgcagctatggaggctgtagaggctcagcaacagcaagttacgtacgaacgtctccttgcaatggttgatgctgagaggacatatcatcaaaatgctgctgatattctgaataaactccatgatgagatgctctatgcaaagcatcataatgagtcagcaaaccactacgatgaacagtcttcagagcctgaatcagatgcaggcccagcacaagtgcactcacgtagcacatctgaagatccagtattgactaaacctagcgaatccacagggaacagtcaggaggtgcaatttctgggggaggtggctgcaaatggttggtctgaaggtgaatgcaagggaaaggctggctggttcccatctgcctacgtagagcagagggacagagccccggcaagcaaggtgatagagcctggacttctgactacctgatccatcccgtagttatggctgctgacttgctgtcatggtcctttttttttctacattattgtacatgacatgccccatgagtgattagcgtatggcagaaccttcaccttttctgtgcagattattgttcttctagccttttcgttggtcggtaactgtatgtaaaatgtagttctgtctgttaggatttccttccggtattataacattgtacagagctattggtgatgagatgctgtcagcttgccctttcttttcggacagtgtgcttcctgacagatttatgctaactaatggtttcgtaacagtgagactggcactgctgccggtggttatggtacgaaacactgtagatggtagaagcggaatatgat

SEQ ID NO: 1178 - DNA, 1855 bp, Zea Mays
cgctctcttaccccggaggccggaacaaaacacggagtggccgcgccccgcgcccgcgcggaatcggacgagccacggtctaccagcacagcgctatacaccgccggccttcttggcttccttctaccgattccgtgtgctgttcgctgtcgcctattgcgcttgcgcctacttggtaactacagcgtcggccgccatcccccgcagcagccgttttctagctgcttcccgctggttcgcggccgccgtcctgggcgtctgagcgaggggtaaccctgcccttttgttcctgggctattcctcagctcgcgccgctgtcgcctcaccccccaatccaatcctccgcgatcgatcggcgggcgcggatggaggcgctgaagaagcaggccagcaagctccgcgagcacgtcgccaagcagcagcaggcggtcctcaagcagttcagtacgcggtatagtcaagatccttctcttgttgatgaagcggagcttgagtgccaccagaatctccaaaggctttacagtactacaagagcagctaagcatttccagcggaatattgtacgaggggtggaaggtttcattgcagttagcaccaaacagatggagattgtgaaaaaactagccggggattgttgtaaatatggagacgacaatcagcattttggttttgctcttgcaagggcgtctgaggagttcggtaaatctcataaacaaatagagaaagagcgggaggatcttcttaaaattcttggagagcagatttttgagcctctccgagaaatgataatgagtgctcctcttgaagatgctcgattgctaacttaccgttatcaacggatcagacaggacatggagtctcagatagctgatgtgatgagaaagcaacttaaatccaaggaaagtagtggtaacacagataactctgtgaaactgcaacatgcagaatcgaaattatcagatcttcgaactacactggcagcgttaggaagagaagcaactgcagctatggaggctgtagaggctcagcaacagcaagttgatgctgagaggacatatcatcaaaatgctgctgatattctgaataaactccatgatgagatgctctatgcaaagcatcataatgagtcagcaaaccactacgatgaacagtcttcagagcctgaatcagatgcaggcccagcacaagtgcactcacgtagcacatctgaagatccagtattgactaaacctagcgaatccacagggaacagtcaggaggtgcaatttctgggggaggttattcatccattcgatgctcaggctgatggtgagctcagtctcgcggtgggtgaatacgttgtggtccgccaggtggctgcaaatggttggtctgaaggtgaatgcaagggaaaggctggctggttcccatctgcctacgtagagcagagggacagagccccggcaagcaaggtgatagagcctggacttctgactacctgatccatcccgtagttatggctgctgacttgctgtcatggtcctttttttttctacattattgtacatgacatgccccatgagtgattagcgtatggcagaaccttcaccttttctgtgcagattattgttcttctagccttttcgttggtcggtaactgtatgtaaaatgtagttctgtctgttaggatttccttccggtattataacattgtacagagctattggtgatgagatgctgtcagcttgccctttcttttcggacagtgtgcttcctgacagatttatgctaactaatggtttcgtaacagtgagactggcactgctgccggtggttatggtacgaaacactgtagatggtagaagcggaatatgat

SEQ ID NO: 1179 - DNA, 1702 bp, Zea Mays
cccgcgcccgcgcggaatcggacgagccacggtctaccagcacagcgctatacaccgccggccttcttggcttccttctaccgattccgtgtgctgttcgctgtcgcctattgcgcttgcgcctacttgctcgcgccgctgtcgcctcaccccccaatccaatcctccgcgatcgatcggcgggcgcggatggaggcgctgaagaagcaggccagcaagctccgcgagcacgtcgccaagcagcagcaggcggtcctcaagcagttcagtacgcggtatagtcaagatccttctcttgttgatgaagcggagcttgagtgccaccagaatctccaaaggctttacagtactacaagagcagctaagcatttccagcggaatattgtacgaggggtggaaggtttcattgcagttagcaccaaacagatggagattgtgaaaaaactagccggggattgttgtaaatatggagacgacaatcagcattttggttttgctcttgcaagggcgtctgaggagttcggtaaatctcataaacaaatagagaaagagcgggaggatcttcttaaaattcttggagagcagatttttgagcctctccgagaaatgataatgagtgctcctcttgaagatgctcgattgctaacttaccgttatcaacggatcagacaggacatggagtctcagctgatgtgatgagaaagcaacttaaatccaaggaaagtagtggtaacacagataactctgtgaaactgcaacatgcagaatcgaaattatcagatcttcgaactacactggcagcgttaggaagagaagcaactgcagctatggaggctgtagaggctcagcaacagcaagttacgtacgaacgtctccttgcaatggttgatgctgagaggacatatcatcaaaatgctgctgatattctgaataaactccatgatgagatgctctatgcaaagcatcataatgagtcagcaaaccactacgatgaacagtcttcagagcctgaatcagatgcaggcccagcacaagtgcactcacgtagcacatctgaagatccagtattgactaaacctagcgaatccacagggaacagtcaggaggtgcaatttctgggggaggttattcatccattcgatgctcaggctgatggtgagctcagtctcgcggtgggtgaatacgttgtggtccgccaggtggctgcaaatggttggtctgaaggtgaatgcaagggaaaggctggctggttcccatctgcctacgtagagcagagggacagagccccggcaagcaaggtgatagagcctggacttctgactacctgatccatcccgtagttatggctgctgacttgctgtcatggtcctttttttttctacattattgtacatgacatgccccatgagtgattagcgtatggcagaaccttcaccttttctgtgcagattattgttcttctagccttttcgttggtcggtaactgtatgtaaaatgtagttctgtctgttaggatttccttccggtattataacattgtacagagctattggtgatgagatgctgtcagcttgccctttcttttcggacagtgtgcttcctgacagatttatgctaactaatggtttcgtaacagtgagactggcactgctgccggtggttatggtacgaaacactgtagatggtagaagcggaatatgat

SEQ ID NO: 1180 - DNA, 2823 bp, Zea Mays
gctccctctctttcacggcaggaatctctcgctttctcgaccccgccccaaatgatctgtcattttcggtcagcatatgccatgcacgtacatgcgcccccctgattaatcaatcaatccattttagctacgagaaagaaaggtgggggaagaaaaaaaggcagggaaagcggtgcgaggagcagaaattcgggggtgactagctagctgttcgtcccgtgtcccgttcctcctcgcccaccaccaccgcacgccggacaaaaccgctctcctcgccacattcgcagcccccctcgctcgcgcacacgccacaccacaccaccagtacactgctctacgccacagtacagcagcatccagcgggcggctggctgcctaatctttccagctctttcgtcccctcgccacgccgcccaccgctgccgcatcatccgcccgttgcccgccgtcgtcgcctggcccgcggattccgcccccattcgccgtcgcagcgcgccgagccccgtcccagatcgccgcggcgcttcctgccgccgtcggcgcggcgcagggttgaaatctatttgaccactcagttataaccatttctggtctgaagatgcttcgtcaatgacatctggaaactgtaatagtatgcgctgatcttctatgcttcaccacctgactatcaatgggctctttcctgtggaaacagcccagctacctcttcattttgataattctccaccttgttgctcatgaggcaagaacgctgagttcagatggtgaagcacttcttgccttcaagaaggcagttacaaattcagatggagtctttctaaattggcgtgagcaagatgcagacccctgcaattggaagggtgttagatgtgatagtcatagcaagagagtgattgatctgattcttgcataccacagattagttgggcccataccacccgaaattggaaagttaaatcagttgcaaaccttgtcactgcaggggaacagtttgtatggttcactccctcctgaactggggaattgtaccaagctgcaacaattgtatctacaaggaaactatttaagtggatacatcccttcagaatttggcgatctggtggaactcgaggcattggacttgtccagtaatacattgagtggatctgttccacattctcttgataagttgtccaaacttacattattcaatgtttccatgaacttcctgacaggagccataccatcttctggttcacttgtcaatttcaatgagacatcctttgttggcaaccttggtttatgtgggaagcagataaacttggtgtgcaaagatgcacttcaatcatcatcaaatggtctgcagtcaccttcaccagatgacatgattaataaaaggaatgggaagaattcgaccagacttgttataagtgcagtggcaacagtgggagctctcctattggtggctttaatgtgtttctggggttgctttctttacaaaaattttggaaaaaaagatatgcgtggtttcagagtggagctctgtggaggctcttctgtcgtgatgttccatggggacctcccttactcctcaaaagacatcctcaagaagctagagactatagatgaagaaaatatcattggagcaggaggcttcggaactgtttataaacttgcaatggatgatggcaatgtctttgctttgaaaaggatagtgaaaacaaatgaagggctagatcggttctttgatagagaacttgagatattgggaagtgttaaacatcgctatttggtcaatctccgtggttattgcaactccccttcatcaaaacttttgatatatgattatcttcaaggtggaagcctggatgaagtgcttcatggtttctgaatattgtgggcacacaagagtatgggacgctaggtcacactaagcaattgattctgatatagagcaatgatctaaaggtcgaaaagatttttggagcacaacaattccatgttctcttttgagaaaaatctgaacagttggattgggatgcacgtattaacattatacttggagctgcaaaagtttcgaggcccgtgtatcagactttggacttgcaaagcttttagaggatgaagaatcacatattactacaatagttgcaggaacatttggctaccttgcaccagagtatatgcaatttggcagagccaccgagaagactgatgtctacagttttggggttttggtactcgaaatactcagtggaaagcggcctactgatgcatccttcattgagaagggactaaacattgttggatggttaaattttcttgctagtgagaaccgggagagggaaattgtcgacctgaactgtgaaggagtgcagactgagaccttagatgccctgctctctcttgccaagcaatgtgttagctcctcgccagaggagaggccgacaatgcacagggtggtacatatgctggagtcggatgtaattacaccgtgccctagcgacttctatgattcagagtagtctcctggacaagccacgctgctgctagtttcccgtgggggcgcattcctttattctttgcgtatattgtgtaaatgcattgccgcggtgtttggtctccaatcggctggctcaacgggtgacttttttttgcgtctgtatacctatgtatgtatctgtcatggtacaagttggctatatgctgatttaataataagagagaacttactagtagactattgtatgtttaactatagtctttagatactcgtagatgttgtgggatctacaaaagaaatggggaaataatgaatatcgcttggaacaaacaagaatagat

SEQ ID NO: 1181 - DNA, 2636 bp, Zea Mays
ggaagaaaaaaaggcagggaaagcggtgcgaggagcagaaattcgggggtgactagctagctgttcgtcccgtgtcccgttcctcctcgcccaccaccaccgcacgccggacaaaaccgctctcctcgccacattcgcagcccccctcgctcgcgcacacgccacaccacaccaccagtacactgctctacgccacagtacagcagcatccagcgggcggctggctgcctaatctttccagctctttcgtcccctcgccacgccgcccaccgctgccgcatcatccgcccgttgcccgccgtcgtcgcctggcccgcggattccgcccccattcgccgtcgcagcgcgccgagccccgtcccagatcgccgcggcgcttcctgccgccgtcggcgcggcgcagggttgaaatctatttgaccactcagttataaccatttctggtctgaagatgcttcgtcaatgacatctggaaactgtaatagtatgcgctgatcttctatgcttcaccacctgactatcaatgggctctttcctgtggaaacagcccagctacctcttcattttgataattctccaccttgttgctcatgaggcaagaacgctgagttcagatggtgaagcacttcttgccttcaagaaggcagttacaaattcagatggagtctttctaaattggcgtgagcaagatgcagacccctgcaattggaagggtgttagatgtgatagtcatagcaagagagtgattgatctgattcttgcataccacagattagttgggcccataccacccgaaattggaaagttaaatcagttgcaaaccttgtcactgcaggggaacagtttgtatggttcactccctcctgaactggggaattgtaccaagctgcaacaattgtatctacaaggaaactatttaagtggatacatcccttcagaatttggcgatctggtggaactcgaggcattggacttgtccagtaatacattgagtggatctgttccacattctcttgataagttgtccaaacttacattattcaatgtttccatgaacttcctgacaggagccataccatcttctggttcacttgtcaatttcaatgagacatcctttgttggcaaccttggtttatgtgggaagcagataaacttggtgtgcaaagatgcacttcaatcatcatcaaatggtctgcagtcaccttcaccagatgacatgattaataaaaggaatgggaagaattcgaccagacttgttataagtgcagtggcaacagtgggagctctcctattggtggctttaatgtgtttctggggttgctttctttacaaaaattttggaaaaaaagatatgcgtggtttcagagtggagctctgtggagatttttcaggctcttctgtcgtgatgttccatggggacctcccttactcctcaaaagacatcctcaagaagctagagactatagatgaagaaaatatcattggagcaggaggcttcggaactgtttataaacttgcaatggatgatggcaatgtctttgctttgaaaaggatagtgaaaacaaatgaagggctagatcggttctttgatagagaacttgagatattgggaagtgttaaacatcgctatttggtcaatctccgtggttattgcaactccccttcatcaaaacttttgatatatgattatcttcaaggtggaagcctggatgaagtgcttcatgaaaaatctgaacagttggattgggatgcacgtattaacattatacttggagctgcaaaaggcttgtcttacttgcatcatgactgttcgcctcgaataatacatcgtgatattaagtctagcaacatcttgcttgatggcagtttcgaggcccgtgtatcagactttggacttgcaaagcttttagaggatgaagaatcacatattactacaatagttgcaggaacatttggctaccttgcaccagagtatatgcaatttggcagagccaccgagaagactgatgtctacagttttggggttttggtactcgaaatactcagtggaaagcggcctactgatgcatccttcattgagaagggactaaacattgttggatggttaaattttcttgctagtgagaaccgggagagggaaattgtcgacctgaactgtgaaggagtgcagactgagaccttagatgccctgctctctcttgccaagcaatgtgttagctcctcgccagaggagaggccgacaatgcacagggtggtacatatgctggagtcggatgtaattacaccgtgccctagcgacttctatgattcagagtagtctcctggacaagccacgctgctgctagtttcccgtgggggcgcattcctttattctttgcgtatattgtgtaaatgcattgccgcggtgtttggtctccaatcggctggctcaacgggtgacttttttttgcgtctgtatacctatgtatgtatctgtcatggtacaagttggctatatgctgatttaataataagagagaacttactagtagactattgtatgtttaactatagtctttagatactcgtagatgttgtgggatctacaaaagaaatggggaaataatgaatatcgcttggaacaaacaagaatagat

SEQ ID NO: 1182 - DNA, 2694 bp, Zea Mays
gcgaggagcagaaattcgggggtgactagctagctgttcgtcccgtgtcccgttcctcctcgcccaccaccaccgcacgccggacaaaaccgctctcctcgccacattcgcagcccccctcgctcgcgcacacgccacaccacaccaccagtacactgctctacgccacagtacagcagcatccagcgggcggctggctgcctaatctttccagctctttcgtcccctcgccacgccgcccaccgctgccgcatcatccgcccgttgcccgccgtcgtcgcctggcccgcggattccgcccccattcgccgtcgcagcgcgccgagccccgtcccagatcgccgcggcgcttcctgccgccgtcggcgcggcgcagggttgaaatctatttgaccactcagttataaccatttctggtctgaagatgcttcgtcaatgacatctggaaactgtaatagtatgcgctgatcttctatgcttcaccacctgactatcaatgggctctttcctgtggaaacagcccagctacctcttcattttgataattctccaccttgttgctcatgaggcaagaacgctgagttcagatggtgaagcacttcttgccttcaagaaggcagttacaaattcagatggagtctttctaaattggcgtgagcaagatgcagacccctgcaattggaagggtgttagatgtgatagtcatagcaagagagtgattgatctgattcttgcataccacagattagttgggcccataccacccgaaattggaaagttaaatcagttgcaaaccttgtcactgcaggggaacagtttgtatggttcactccctcctgaactggggaattgtaccaagctgcaacaattgtatctacaaggaaactatttaagtggatacatcccttcagaatttggcgatctggtggaactcgaggcattgtgaagggctcttcacaattgaagcacaaccccatacatcggtgcaccatcatcttcgatgtcgggtgtctgaaggggcgaggtggtgtagctggcggagatgctgatgacaatgctagagttggtggagtagctagtgttgatgtgccttcaaggaagaggacgagctgttaaagggacttgtccagtaatacattgagtggatctgttccacattctcttgataagttgtccaaacttacattattcaatgtttccatgaacttcctgacaggagccataccatcttctggttcacttgtcaatttcaatgagacatcctttgttggcaaccttggtttatgtgggaagcagataaacttggtgtgcaaagatgcacttcaatcatcatcaaatggtctgcagtcaccttcaccagatgacatgattaataaaaggaatgggaagaattcgaccagacttgttataagtgcagtggcaacagtgggagctctcctattggtggctttaatgtgtttctggggttgctttctttacaaaaattttggaaaaaaagatatgcgtggtttcagagtggagctctgtggaggctcttctgtcgtgatgttccatggggacctcccttactcctcaaaagacatcctcaagaagctagagactatagatgaagaaaatatcattggagcaggaggcttcggaactgtttataaacttgcaatggatgatggcaatgtctttgctttgaaaaggatagtgaaaacaaatgaagggctagatcggttctttgatagagaacttgagatattgggaagtgttaaacatcgctatttggtcaatctccgtggttattgcaactccccttcatcaaaacttttgatatatgattatcttcaaggtggaagcctggatgaagtgcttcatgaaaaatctgaacagttggattgggatgcacgtattaacattatacttggagctgcaaaagtttcgaggcccgtgtatcagactttggacttgcaaagcttttagaggatgaagaatcacatattactacaatagttgcaggaacatttggctaccttgcaccagagtatatgcaatttggcagagccaccgagaagactgatgtctacagttttggggttttggtactcgaaatactcagtggaaagcggcctactgatgcatccttcattgagaagggactaaacattgttggatggttaaattttcttgctagtgagaaccgggagagggaaattgtcgacctgaactgtgaaggagtgcagactgagaccttagatgccctgctctctcttgccaagcaatgtgttagctcctcgccagaggagaggccgacaatgcacagggtggtacatatgctggagtcggatgtaattacaccgtgccctagcgacttctatgattcagagtagtctcctggacaagccacgctgctgctagtttcccgtgggggcgcattcctttattctttgcgtatattgtgtaaatgcattgccgcggtgtttggtctccaatcggctggctcaacgggtgacttttttttgcgtctgtatacctatgtatgtatctgtcatggtacaagttggctatatgctgatttaataataagagagaacttactagtagactattgtatgtttaactatagtctttagatactcgtagatgttgtgggatctacaaaagaaatggggaaataatgaatatcgcttggaacaaacaagaatagat

SEQ ID NO: 1183 - DNA, 2582 bp, Zea Mays
cagaaattcgggggtgactagctagctgttcgtcccgtgtcccgttcctcctcgcccaccaccaccgcacgccggacaaaaccgctctcctcgccacattcgcagcccccctcgctcgcgcacacgccacaccacaccaccagtacactgctctacgccacagtacagcagcatccagcgggcggctggctgcctaatctttccagctctttcgtcccctcgccacgccgcccaccgctgccgcatcatccgcccgttgcccgccgtcgtcgcctggcccgcggattccgcccccattcgccgtcgcagcgcgccgagccccgtcccagatcgccgcggcgcttcctgccgccgtcggcgcggcgcagggttgaaatctatttgaccactcagttataaccatttctggtctgaagatgcttcgtcaatgacatctggaaactgtaatagtatgcgctgatcttctatgcttcaccacctgactatcaatgggctctttcctgtggaaacagcccagctacctcttcattttgataattctccaccttgttgctcatgaggcaagaacgctgagttcagatggtgaagcacttcttgccttcaagaaggcagttacaaattcagatggagtctttctaaattggcgtgagcaagatgcagacccctgcaattggaagggtgttagatgtgatagtcatagcaagagagtgattgatctgattcttgcataccacagattagttgggcccataccacccgaaattggaaagttaaatcagttgcaaaccttgggaacagtttgtatggttcactccctcctgaactggggaattgtaccaagctgcaacaattgtatctacaaggaaactatttaagtggatacatcccttcagaatttggcgatctggtggaactcgaggcattggacttgtccagtaatacattgagtggatctgttccacattctcttgataagttgtccaaacttacattattcaatgtttccatgaacttcctgacaggagccataccatcttctggttcacttgtcaatttcaatgagacatcctttgttggcaaccttggtttatgtgggaagcagataaacttggtgtgcaaagatgcacttcaatcatcatcaaatggtctgcagtcaccttcaccagatgacatgattaataaaaggaatgggaagaattcgaccagacttgttataagtgcagtggcaacagtgggagctctcctattggtggctttaatgtgtttctggggttgctttctttacaaaaattttggaaaaaaagatatgcgtggtttcagagtggagctctgtggaggctcttctgtcgtgatgttccatggggacctcccttactcctcaaaagacatcctcaagaagctagagactatagatgaagaaaatatcattggagcaggaggcttcggaactgtttataaacttgcaatggatgatggcaatgtctttgctttgaaaaggatagtgaaaacaaatgaagggctagatcggttctttgatagagaacttgagatattgggaagtgttaaacatcgctatttggtcaatctccgtggttattgcaactccccttcatcaaaacttttgatatatgattatcttcaaggtggaagcctggatgaagtgcttcatgaaaaatctgaacagttggattgggatgcacgtattaacattatacttggagctgcaaaaggcttgtcttacttgcatcatgactgttcgcctcgaataatacatcgtgatattaagtctagcaacatcttgcttgatggcagtttcgaggcccgtgtatcagactttggacttgcaaagcttttagaggatgaagaatcacatattactacaatagttgcaggaacatttggctaccttgcaccagagtatatgcaatttggcagagccaccgagaagactgatgtctacagttttggggttttggtactcgaaatactcagtggaaagcggcctactgatgcatccttcattgagaagggactaaacattgttggatggttaaattttcttgctagtgagaaccgggagagggaaattgtcgacctgaactgtgaaggagtgcagactgagaccttagatgccctgctctctcttgccaagcaatgtgttagctcctcgccagaggagaggccgacaatgcacagggtggtacatatgctggagtcggatgtaattacaccgtgccctagcgacttctatgattcagagtagtctcctggacaagccacgctgctgctagtttcccgtgggggcgcattcctttattctttgcgtatattgtgtaaatgcattgccgcggtgtttggtctccaatcggctggctcaacgggtgacttttttttgcgtctgtatacctatgtatgtatctgtcatggtacaagttggctatatgctgatttaataataagagagaacttactagtagactattgtatgtttaactatagtctttagatactcgtagatgttgtgggatctacaaaagaaatggggaaataatgaatatcgcttggaacaaacaagaatagat

SEQ ID NO: 1184 - DNA, 2605 bp, Zea Mays
ctagctgttcgtcccgtgtcccgttcctcctcgcccaccaccaccgcacgccggacaaaaccgctctcctcgccacattcgcagcccccctcgctcgcgcacacgccacaccacaccaccagtacactgctctacgccacagtacagcagcatccagcgggcggctggctgcctaatctttccagctctttcgtcccctcgccacgccgcccaccgctgccgcatcatccgcccgttgcccgccgtcgtcgcctggcccgcggattccgcccccattcgccgtcgcagcgcgccgagccccgtcccagatcgccgcggcgcttcctgccgccgtcggcgcggcgcagggttgaaatctatttgaccactcagttataaccatttctggtctgaagatgcttcgtcaatgacatctggaaactgtaatagtatgcgctgatcttctatgcttcaccacctgactatcaatgggctctttcctgtggaaacagcccagctacctcttcattttgataattctccaccttgttgctcatgaggcaagaacgctgagttcagatggtgaagcacttcttgccttcaagaaggcagttacaaattcagatggagtctttctaaattggcgtgagcaagatgcagacccctgcaattggaagggtgttagatgtgatagtcatagcaagagagtgattgatctgattcttgcataccacagattagttgggcccataccacccgaaattggaaagttaaatcagttgcaaaccttgtcactgcaggggaacagtttgtatggttcactccctcctgaactggggaattgtaccaagctgcaacaattgtatctacaaggaaactatttaagtggatacatcccttcagaatttggcgatctggtggaactcgaggcattgtgaagggctcttcacaattgaagcacaaccccatacatcggtgcaccatcatcttcgatgtcgggtgtctgaaggggcgaggtggtgtagctggcggagatgctgatgacaatgctagagttggtggagtagctagtgttgatgtgccttcaaggaagaggacgagctgttaaagggacttgtccagtaatacattgagtggatctgttccacattctcttgataagttgtccaaacttacattattcaatgtttccatgaacttcctgacaggagccataccatcttctggttcacttgtcaatttcaatgagacatcctttgttggcaaccttggtttatgtgggaagcagataaacttggtgtgcaaagatgcacttcaatcatcatcaaatggtctgcagtcaccttcaccagatgacatgattaataaaaggaatgggaagaattcgaccagacttgttataagtgcagtggcaacagtgggagctctcctattggtggctttaatgtgtttctggggttgctttctttacaaaaattttggaaaaaaagatatgcgtggtttcagagtggagctctgtggaggctcttctgtcgtgatgttccatggggacctcccttactcctcaaaagacatcctcaagaagctagagactatagatgaagaaaatatcattggagcaggaggcttcggaactgtttataaacttgcaatggatgatggcaatgtctttgctttgaaaaggatagtgaaaacaaatgaagggctagatcggttctttgatagagaacttgagatattgggaagtgttaaacatcgctatttggtcaatctccgtggttattgcaactccccttcatcaaaacttttgatatatgattatcttcaaggtggaagcctggatgaagtgcttcatgtttcgaggcccgtgtatcagactttggacttgcaaagcttttagaggatgaagaatcacatattactacaatagttgcaggaacatttggctaccttgcaccagagtatatgcaatttggcagagccaccgagaagactgatgtctacagttttggggttttggtactcgaaatactcagtggaaagcggcctactgatgcatccttcattgagaagggactaaacattgttggatggttaaattttcttgctagtgagaaccgggagagggaaattgtcgacctgaactgtgaaggagtgcagactgagaccttagatgccctgctctctcttgccaagcaatgtgttagctcctcgccagaggagaggccgacaatgcacagggtggtacatatgctggagtcggatgtaattacaccgtgccctagcgacttctatgattcagagtagtctcctggacaagccacgctgctgctagtttcccgtgggggcgcattcctttattctttgcgtatattgtgtaaatgcattgccgcggtgtttggtctccaatcggctggctcaacgggtgacttttttttgcgtctgtatacctatgtatgtatctgtcatggtacaagttggctatatgctgatttaataataagagagaacttactagtagactattgtatgtttaactatagtctttagatactcgtagatgttgtgggatctacaaaagaaatggggaaataatgaatatcgcttggaacaaacaagaatagat

SEQ ID NO: 1185 - DNA, 2483 bp, Zea Mays
gttcgtcccgtgtcccgttcctcctcgcccaccaccaccgcacgccggacaaaaccgctctcctcgccacattcgcagcccccctcgctcgcgcacacgccacaccacaccaccagtacactgctctacgccacagtacagcagcatccagcgggcggctggctgcctaatctttccagctctttcgtcccctcgccacgccgcccaccgctgccgcatcatccgcccgttgcccgccgtcgtcgcctggcccgcggattccgcccccattcgccgtcgcagcgcgccgagccccgtcccagatcgccgcggcgcttcctgccgccgtcggcgcggcgcagggttgaaatctatttgaccactcagttataaccatttctggtctgaagatgcttcgtcaatgacatctggaaactgtaatagtatgcgctgatcttctatgcttcaccacctgactatcaatgggctctttcctgtggaaacagcccagctacctcttcattttgataattctccaccttgttgctcatgaggcaagaacgctgagttcagatggtgaagcacttcttgccttcaagaaggcagttacaaattcagatggagtctttctaaattggcgtgagcaagatgcagacccctgcaattggaagggtgttagatgtgatagtcatagcaagagagtgattgatctgattcttgcataccacagattagttgggcccataccacccgaaattggaaagttaaatcagttgcaaaccttgtcactgcaggggaacagtttgtatggttcactccctcctgaactggggaattgtaccaagctgcaacaattgtatctacaaggaaactatttaagtggatacatcccttcagaatttggcgatctggtggaactcgaggcattggacttgtccagtaatacattgagtggatctgttccacattctcttgataagttgtccaaacttacattattcaatgtttccatgaacttcctgacaggagccataccatcttctggttcacttgtcaatttcaatgagacatcctttgttggcaaccttggtttatgtgggaagcagataaacttggtgtgcaaagatgcacttcaatcatcatcaaatggtctgcagtcaccttcaccagatgacatgattaataaaaggaatgggaagaattcgaccagacttgttataagtgcagtggcaacagtgggagctctcctattggtggctttaatgtgtttctggggttgctttctttacaaaaattttggaaaaaaagatatgcgtggtttcagagtggagctctgtggaggctcttctgtcgtgatgttccatggggacctcccttactcctcaaaagacatcctcaagaagctagagactatagatgaagaaaatatcattggagcaggaggcttcggaactgtttataaacttgcaatggatgatggcaatgtctttgctttgaaaaggatagtgaaaacaaatgaagggctagatcggttctttgatagagaacttgagatattgggaagtgttaaacatcgctatttggtcaatctccgtggttattgcaactccccttcatcaaaacttttgatatatgattatcttcaaggtggaagcctggatgaagtgcttcatgaaaaatctgaacagttggattgggatgcacgtattaacattatacttggagctgcaaaagtttcgaggcccgtgtatcagactttggacttgcaaagcttttagaggatgaagaatcacatattactacaatagttgcaggaacatttggctaccttgcaccagagtatatgcaatttggcagagccaccgagaagactgatgtctacagttttggggttttggtactcgaaatactcagtggaaagcggcctactgatgcatccttcattgagaagggactaaacattgttggatggttaaattttcttgctagtgagaaccgggagagggaaattgtcgacctgaactgtgaaggagtgcagactgagaccttagatgccctgctctctcttgccaagcaatgtgttagctcctcgccagaggagaggccgacaatgcacagggtggtacatatgctggagtcggatgtaattacaccgtgccctagcgacttctatgattcagagtagtctcctggacaagccacgctgctgctagtttcccgtgggggcgcattcctttattctttgcgtatattgtgtaaatgcattgccgcggtgtttggtctccaatcggctggctcaacgggtgacttttttttgcgtctgtatacctatgtatgtatctgtcatggtacaagttggctatatgctgatttaataataagagagaacttactagtagactattgtatgtttaactatagtctttagatactcgtagatgttgtgggatctacaaaagaaatggggaaataatgaatatcgcttggaacaaacaagaatagat

SEQ ID NO: 1186 - DNA, 2620 bp, Zea Mays
cgtcccgtgtcccgttcctcctcgcccaccaccaccgcacgccggacaaaaccgctctcctcgccacattcgcagcccccctcgctcgcgcacacgccacaccacaccaccagtacactgctctacgccacagtacagcagcatccagcgggcggctggctgcctaatctttccagctctttcgtcccctcgccacgccgcccaccgctgccgcatcatccgcccgttgcccgccgtcgtcgcctggcccgcggattccgcccccattcgccgtcgcagcgcgccgagccccgtcccagatcgccgcggcgcttcctgccgccgtcggcgcggcgcagggttgaaatctatttgaccactcagttataaccatttctggtctgaagatgcttcgtcaatgacatctggaaactgtaatagtatgcgctgatcttctatgcttcaccacctgactatcaatgggctctttcctgtggaaacagcccagctacctcttcattttgataattctccaccttgttgctcatgaggcaagaacgctgagttcagatggtgaagcacttcttgccttcaagaaggcagttacaaattcagatggagtctttctaaattggcgtgagcaagatgcagacccctgcaattggaagggtgttagatgtgatagtcatagcaagagagtgattgatctgattcttgcataccacagattagttgggcccataccacccgaaattggaaagttaaatcagttgcaaaccttgtcactgcaggggaacagtttgtatggttcactccctcctgaactggggaattgtaccaagctgcaacaattgtatctacaaggaaactatttaagtggatacatcccttcagaatttggcgatctggtggaactcgaggcattggacttgtccagtaatacattgagtggatctgttccacattctcttgataagttgtccaaacttacattattcaatgtttccatgaacttcctgacaggagccataccatcttctggttcacttgtcaatttcaatgagacatcctttgttggcaaccttggtttatgtgggaagcagataaacttggtgtgcaaagatgcacttcaatcatcatcaaatggtctgcagtcaccttcaccagatgacatgattaataaaaggaatgggaagaattcgaccagacttgttataagtgcagtggcaacagtgggagctctcctattggtggctttaatgtgtttctggggttgctttctttacaaaaattttggaaaaaaagatatgcgtggtttcagagtggagctctgtggagatttttcaggctcttctgtcgtgatgttccatggggacctcccttactcctcaaaagacatcctcaagaagctagagactatagatgaagaaaatatcattggagcaggaggcttcggaactgtttataaacttgcaatggatgatggcaatgtctttgctttgaaaaggatagtgaaaacaaatgaagggctagatcggttctttgatagagaacttgagatattgggaagtgttaaacatcgctatttggtcaatctccgtggttattgcaactccccttcatcaaaacttttgatatatgattatcttcaaggtggaagcctggatgaagtgcttcatggtttctgaatattgtgggcacacaagagtatgggacgctaggtcacactaagcaattgattctgatatagagcaatgatctaaaggtcgaaaagatttttggagcacaacaattccatgttctcttttgagaaaaatctgaacagttggattgggatgcacgtattaacattatacttggagctgcaaaagtttcgaggcccgtgtatcagactttggacttgcaaagcttttagaggatgaagaatcacatattactacaatagttgcaggaacatttggctaccttgcaccagagtatatgcaatttggcagagccaccgagaagactgatgtctacagttttggggttttggtactcgaaatactcagtggaaagcggcctactgatgcatccttcattgagaagggactaaacattgttggatggttaaattttcttgctagtgagaaccgggagagggaaattgtcgacctgaactgtgaaggagtgcagactgagaccttagatgccctgctctctcttgccaagcaatgtgttagctcctcgccagaggagaggccgacaatgcacagggtggtacatatgctggagtcggatgtaattacaccgtgccctagcgacttctatgattcagagtagtctcctggacaagccacgctgctgctagtttcccgtgggggcgcattcctttattctttgcgtatattgtgtaaatgcattgccgcggtgtttggtctccaatcggctggctcaacgggtgacttttttttgcgtctgtatacctatgtatgtatctgtcatggtacaagttggctatatgctgatttaataataagagagaacttactagtagactattgtatgtttaactatagtctttagatactcgtagatgttgtgggatctacaaaagaaatggggaaataatgaatatcgcttggaacaaacaagaatagat

SEQ ID NO: 1187 - DNA, 2618 bp, Zea Mays
cgttcctcctcgcccaccaccaccgcacgccggacaaaaccgctctcctcgccacattcgcagcccccctcgctcgcgcacacgccacaccacaccaccagtacactgctctacgccacagtacagcagcatccagcgggcggctggctgcctaatctttccagctctttcgtcccctcgccacgccgcccaccgctgccgcatcatccgcccgttgcccgccgtcgtcgcctggcccgcggattccgcccccattcgccgtcgcagcgcgccgagccccgtcccagatcgccgcggcgcttcctgccgccgtcggcgcggcgcagggttgaaatctatttgaccactcagttataaccatttctggtctgaagatgcttcgtcaatgacatctggaaactgtaatagtatgcgctgatcttctatgcttcaccacctgactatcaatgggctctttcctgtggaaacagcccagctacctcttcattttgataattctccaccttgttgctcatgaggcaagaacgctgagttcagatggtgaagcacttcttgccttcaagaaggcagttacaaattcagatggagtctttctaaattggcgtgagcaagatgcagacccctgcaattggaagggtgttagatgtgatagtcatagcaagagagtgattgatctgattcttgcataccacagattagttgggcccataccacccgaaattggaaagttaaatcagttgcaaaccttgtcactgcaggggaacagtttgtatggttcactccctcctgaactggggaattgtaccaagctgcaacaattgtatctacaaggaaactatttaagtggatacatcccttcagaatttggcgatctggtggaactcgaggcattggacttgtccagtaatacattgagtggatctgttccacattctcttgataagttgtccaaacttacattattcaatgtttccatgaacttcctgacaggagccataccatcttctggttcacttgtcaatttcaatgagacatcctttgttggcaaccttggtttatgtgggaagcagataaacttggtgtgcaaagatgcacttcaatcatcatcaaatggtctgcagtcaccttcaccagatgacatgattaataaaaggaatgggaagaattcgaccagacttgttataagtgcagtggcaacagtgggagctctcctattggtggctttaatgtgtttctggggttgctttctttacaaaaattttggaaaaaaagatatgcgtggtttcagagtggagctctgtggaggtaaccgtggcatgtaatatgttgtgcaagtatttattatttttcaaaggaaattgtcttatgacattgctagatttttcaggctcttctgtcgtgatgttccatggggacctcccttactcctcaaaagacatcctcaagaagctagagactatagatgaagaaaatatcattggagcaggaggcttcggaactgtttataaacttgcaatggatgatggcaatgtctttgctttgaaaaggatagtgaaaacaaatgaagggctagatcggttctttgatagagaacttgagatattgggaagtgttaaacatcgctatttggtcaatctccgtggttattgcaactccccttcatcaaaacttttgatatatgattatcttcaaggtggaagcctggatgaagtgcttcatgttggattgggatgcacgtattaacattatacttggagctgcaaaaggcttgtcttacttgcatcatgactgttcgcctcgaataatacatcgtgatattaagtctagcaacatcttgcttgatggcagtttcgaggcccgtgtatcagactttggacttgcaaagcttttagaggatgaagaatcacatattactacaatagttgcaggaacatttggctaccttgcaccagagtatatgcaatttggcagagccaccgagaagactgatgtctacagttttggggttttggtactcgaaatactcagtggaaagcggcctactgatgcatccttcattgagaagggactaaacattgttggatggttaaattttcttgctagtgagaaccgggagagggaaattgtcgacctgaactgtgaaggagtgcagactgagaccttagatgccctgctctctcttgccaagcaatgtgttagctcctcgccagaggagaggccgacaatgcacagggtggtacatatgctggagtcggatgtaattacaccgtgccctagcgacttctatgattcagagtagtctcctggacaagccacgctgctgctagtttcccgtgggggcgcattcctttattctttgcgtatattgtgtaaatgcattgccgcggtgtttggtctccaatcggctggctcaacgggtgacttttttttgcgtctgtatacctatgtatgtatctgtcatggtacaagttggctatatgctgatttaataataagagagaacttactagtagactattgtatgtttaactatagtctttagatactcgtagatgttgtgggatctacaaaagaaatggggaaataatgaatatcgcttggaacaaacaagaatagat

SEQ ID NO: 1188 - DNA, 1563 bp, Zea Mays
gttgatgtgccttcaaggaagaggacgagctgttaaagggacttgtccagtaatacattgagtggatctgttccacattctcttgataagttgtccaaacttacattattcaatgtttccatgaacttcctgacaggagccataccatcttctggttcacttgtcaatttcaatgagacatcctttgttggcaaccttggtttatgtgggaagcagataaacttggtgtgcaaagatgcacttcaatcatcatcaaatggtctgcagtcaccttcaccagatgacatgattaataaaaggaatgggaagaattcgaccagacttgttataagtgcagtggcaacagtgggagctctcctattggtggctttaatgtgtttctggggttgctttctttacaaaaattttggaaaaaaagatatgcgtggtttcagagtggagctctgtggagatttttcaggctcttctgtcgtgatgttccatggggacctcccttactcctcaaaagacatcctcaagaagctagagactatagatgaagaaaatatcattggagcaggaggcttcggaactgtttataaacttgcaatggatgatggcaatgtctttgctttgaaaaggatagtgaaaacaaatgaagggctagatcggttctttgatagagaacttgagatattgggaagtgttaaacatcgctatttggtcaatctccgtggttattgcaactccccttcatcaaaacttttgatatatgattatcttcaaggtggaagcctggatgaagtgcttcatgtttcgaggcccgtgtatcagactttggacttgcaaagcttttagaggatgaagaatcacatattactacaatagttgcaggaacatttggctaccttgcaccagagtatatgcaatttggcagagccaccgagaagactgatgtctacagttttggggttttggtactcgaaatactcagtggaaagcggcctactgatgcatccttcattgagaagggactaaacattgttggatggttaaattttcttgctagtgagaaccgggagagggaaattgtcgacctgaactgtgaaggagtgcagactgagaccttagatgccctgctctctcttgccaagcaatgtgttagctcctcgccagaggagaggccgacaatgcacagggtggtacatatgctggagtcggatgtaattacaccgtgccctagcgacttctatgattcagagtagtctcctggacaagccacgctgctgctagtttcccgtgggggcgcattcctttattctttgcgtatattgtgtaaatgcattgccgcggtgtttggtctccaatcggctggctcaacgggtgacttttttttgcgtctgtatacctatgtatgtatctgtcatggtacaagttggctatatgctgatttaataataagagagaacttactagtagactattgtatgtttaactatagtctttagatactcgtagatgttgtgggatctacaaaagaaatggggaaataatgaatatcgcttggaacaaacaagaatagat

SEQ ID NO: 1189 - DNA, 1326 bp, Zea Mays
aaaacataagagttttttataatataatatttgtaaataaagtccactaactgaaaaactgaaacagcccaggcgagacgcgagagtttatctagctgtctggttccctttgcccaatctctctcctccgtccctccgccggttcgcccccttcgcccttcccgacgcgccgcccgaaaccctagctccaccgatctatctctctccagcccaggcagggggaggagatggcggcggcgccagcggcgggagggcagggaggcgggggtatggacgccgcgctcctcgacgacatcatacgccgcctgctcgaggtgcggaccgcgcgccccgggaagcaggtgcagctctccgagtcggagatccgccagctctgcaccgtctcccgcgagatcttcctcaaccaacccaaccttctcgagctcgaggcgcccatcaagatctgcggtgattatgttgatcgaggcaaacaaagtttggagactatatgccttcttcttgcttacaaaatcaagtaccctgagaacttttttcttctgaggggcaatcatgaatgcgcctcaataaacagaatatatggattctatgatgaatgcaagcgtcgatttaatgtgcggctatggaaggtcttcacagaatgttttaacactctacctgtggctgctcttatcgatgataaaatattatgtatgcacggtggactctctcctgatctagcacacttggatgagataaagaacttgcagcgtccaactgatgtaccagatcaaggtctactgtgtgacttgctttggtcagatccaggaaaagatgctcaagggtggggcatgaatgatagaggggtctcatatacctttggtgctgacaaggtttcagaattcttgcaaaagcatgatcttgatcttatctgtcgtgctcaccaggttgtcgaggatgggtatgaattttttgctgacagacagcttgtcaccatattctcggcccccaattattgtggtgaatttgataatgctggtgcaatgatgagtgtcgatgaaactttgatgtgctcattccaaattctgaaacctgctgagagaaaaaacaaatttatggggtccaacaaaatgtgatagtgaaagccattttgcttccagcagctctagcctgttaagtacggaccgacattattgaaagcaactattacgaatcaagactactagaaactagcactccaacattaccagaagttcacaattccgcaaaaacttacttggaacagcattcacggggcaagtttagttaccttcgaggcttcgacctttcaccttgaatcccaaagaccac

SEQ ID NO: 1190 - DNA, 1372 bp, Zea Mays
aaagtccactaactgaaaaactgaaacagcccaggcgagacgcgagagtttatctagctgtctggttccctttgcccaatctctctcctccgtccctccgccggttcgcccccttcgcccttcccgacgcgccgcccgaaaccctagctccaccgatctatctctctccagcccaggcagggggaggagatggcggcggcgccagcggcgggagggcagggaggcgggggtatggacgccgcgctcctcgacgacatcatacgccgcctgctcgaggtgcggaccgcgcgccccgggaagcaggtgcagctctccgagtcggagatccgccagctctgcaccgtctcccgcgagatcttcctcaaccaacccaaccttctcgagctcgaggcgcccatcaagatctgcggtgacatccatggtcaatacagtgatcttctaaggctttttgaatatggaggctttcctcctgaagccaattatctattcttaggtgattatgttgatcgaggcaaacaaagtttggagactatatgccttcttcttgcttacaaaatcaagtaccctgagaacttttttcttctgaggggcaatcatgaatgcgcctcaataaacagaatatatggattctatgatgaatgcaagcgtcgatttaatgtgcggctatggaaggtcttcacagaatgttttaacactctacctgtggctgctcttatcgatgataaaatattatgtatgcacggtggactctctcctgatctagcacacttggatgagataaagaacttgcagcgtccaactgatgtaccagatcaaggtctactgtgtgacttgctttggtcagatccaggaaaagatgctcaagggtggggcatgaatgatagaggggtctcatatacctttggtgctgacaaggtttcagaattcttgcaaaagcatgatcttgatcttatctgtcgtgctcaccaggttgtcgaggatgggtatgaattttttgctgacagacagcttgtcaccatattctcggcccccaattattgtggtgaatttgataatgctggtgcaatgatgagtgtcgatgaaactttgatgtgctcattccaaattctgaaacctgctgagagaaaaaacaaatttatggggtccaacaaaatgtgatagtgaaagccattttgcttccagcagctctagcctgttaagtacggaccgacattattgaaagcaactattacgaatcaagactactagaaactagcactccaacattaccagaagttcacaattccgcaaaaacttacttggaacagcattcacggggcaagtttagttaccttcgaggcttcgacctttcaccttgaatcccaaagaccac

SEQ ID NO: 1191 - DNA, 1900 bp, Zea Mays
aaagtccactaactgaaaaactgaaacagcccaggcgagacgcgagagtttatctagctgtctggttccctttgcccaatctctctcctccgtccctccgccggttcgcccccttcgcccttcccgacgcgccgcccgaaaccctagctccaccgatctatctctctccagcccaggcagggggaggagatggcggcggcgccagcggcgggagggcagggaggcgggggtatggacgccgcgctcctcgacgacatcatacgccgcctgctcgaggtgcggaccgcgcgccccgggaagcaggtgcagctctccgagtcggagatccgccagctctgcaccgtctcccgcgagatcttcctcaaccaacccaaccttctcgagctcgaggcgcccatcaagatctgcggtgacatccatggtcaatacagtgatcttctaaggctttttgaatatggaggctttcctcctgaagccaattatctattcttaggtgattatgttgatcgaggcaaacaaagtttggagactatatgccttcttcttgcttacaaaatcaagtaccctgagaacttttttcttctgaggggcaatcatgaatgcgcctcaataaacagaatatatggattctatgatgaatgcaagcgtcgatttaatgtgcggctatggaaggtcttcacagaatgttttaacactctacctgtggctgctcttatcgatgataaaatattatgtatgcacggtggactctctcctgatctagcacacttggatgagataaagaacttgcagcgtccaactgatgtaccagatcaaggtctactgtgtgacttgctttggtcagatccaggaaaagatgctcaagggtggggcatgaatgatagaggggtctcatatacctttggtgctgacaaggtttcagaattcttgcaaaagcatgatcttgatcttatctgtcgtgctcaccaggttgtcgaggatgggtatgaattttttgctgacagacagcttgtcaccatattctcggcccccaattattgtggtgaatttgataatgctggtgcaatgatgagtgtcgatgaaactttgatgtgctcattccaaattctgaaacctgctgagagaaaaaacaaatttatggggtccaacaaaatgtgatagtgaaagccattttgcttccagcagctctagcctgttaagcatgctggcgccaagtttgagggcagcattgggctactatcagagaaaccaaataatcccatacctaactgttcatctggaagttactcatcatgacaagtgcctgaaatttttcctctttcctgttaccttgtgtcagaacattatgtagctgtagatatattgattatggaaggatgaagttgccaaattgacctgaggagattcctttctccagccaggaaaaattctgaacatcaaggagtttctgtttgcaagtttcactatttaaaagcagttatgttgcttgtgcggaggtaagtactggaccgaggtactattatcagtttcatggatatggactgttgtgatagtttcgatagaggtgtcaaacatcaattagggtgaagtggtgagcaacatttcaaggaggtgctgatgcttgctgacaacctatgaaaaggcgtttctgtagctgactacttggtttgtccgtcagacaattctagacgtgaattttgatctgttggctagattagctgccaagtaggtatttcgtatctctagatttatgggattcacattcactcattcttgttgctattcacttgcctttgttatgttgctacatgggtgccaaacgcggtctgcaaagcagtcgtttcggtttgtttggtaatgcattttgcgcacaaccctctgggcatggttttgttttgcc

SEQ ID NO: 1192 - DNA, 2134 bp, Zea Mays
aaagtccactaactgaaaaactgaaacagcccaggcgagacgcgagagtttatctagctgtctggttccctttgcccaatctctctcctccgtccctccgccggttcgcccccttcgcccttcccgacgcgccgcccgaaaccctagctccaccgatctatctctctccagcccaggcagggggaggagatggcggcggcgccagcggcgggagggcagggaggcgggggtatggacgccgcgctcctcgacgacatcatacgccgcctgctcgaggtgcggaccgcgcgccccgggaagcaggtgcagctctccgagtcggagatccgccagctctgcaccgtctcccgcgagatcttcctcaaccaacccaaccttctcgagctcgaggcgcccatcaagatctgcgtggcggagcccggcgaaattcaaaggctggacaccgttggttggaggcgaggggcggcggcgcggcacctaggtctggggatgcggatgatcgcagctggctcacatcccctctccattgaccatgctcagagtcgcagacaggcgcctctcccccatgaccctcacatcccctctccatcgaccatggtcagagttgcagacaggtgacatccatggtcaatacagtgatcttctaaggctttttgaatatggaggctttcctcctgaagccaattatctattcttaggtgattatgttgatcgaggcaaacaaagtttggagactatatgccttcttcttgcttacaaaatcaagtaccctgagaacttttttcttctgaggggcaatcatgaatgcgcctcaataaacagaatatatggattctatgatgaatgcaagcgtcgatttaatgtgcggctatggaaggtcttcacagaatgttttaacactctacctgtggctgctcttatcgatgataaaatattatgtatgcacggtggactctctcctgatctagcacacttggatgagataaagaacttgcagcgtccaactgatgtaccagatcaaggtctactgtgtgacttgctttggtcagatccaggaaaagatgctcaagggtggggcatgaatgatagaggggtctcatatacctttggtgctgacaaggtttcagaattcttgcaaaagcatgatcttgatcttatctgtcgtgctcaccaggttgtcgaggatgggtatgaattttttgctgacagacagcttgtcaccatattctcggcccccaattattgtggtgaatttgataatgctggtgcaatgatgagtgtcgatgaaactttgatgtgctcattccaaattctgaaacctgctgagagaaaaaacaaatttatggggtccaacaaaatgtgatagtgaaagccattttgcttccagcagctctagcctgttaaggttctcctgtggatgcatcgagacaacagcatgctggcgccaagtttgagggcagcattgggctactatcagagaaaccaaataatcccatacctaactgttcatctggaagttactcatcatgacaagtgcctgaaatttttcctctttcctgttaccttgtgtcagaacattatgtagctgtagatatattgattatggaaggatgaagttgccaaattgacctgaggagattcctttctccagccaggaaaaattctgaacatcaaggagtttctgtttgcaagtttcactatttaaaagcagttatgttgcttgtgcggaggtaagtactggaccgaggtactattatcagtttcatggatatggactgttgtgatagtttcgatagaggtgtcaaacatcaattagggtgaagtggtgagcaacatttcaaggaggtgctgatgcttgctgacaacctatgaaaaggcgtttctgtagctgactacttggtttgtccgtcagacaattctagacgtgaattttgatctgttggctagattagctgccaagtaggtatttcgtatctctagatttatgggattcacattcactcattcttgttgctattcacttgcctttgttatgttgctacatgggtgccaaacgcggtctgcaaagcagtcgtttcggtttgtttggtaatgcattttgcgcacaaccctctgggcatggttttgttttgcc

SEQ ID NO: 1193 - DNA, 1843 bp, Zea Mays
aaagtccactaactgaaaaactgaaacagcccaggcgagacgcgagagtttatctagctgtctggttccctttgcccaatctctctcctccgtccctccgccggttcgcccccttcgcccttcccgacgcgccgcccgaaaccctagctccaccgatctatctctctccagcccaggcagggggaggagatggcggcggcgccagcggcgggagggcagggaggcgggggtatggacgccgcgctcctcgacgacatcatacgccgcctgctcgaggtgcggaccgcgcgccccgggaagcaggtgcagctctccgagtcggagatccgccagctctgcaccgtctcccgcgagatcttcctcaaccaacccaaccttctcgagctcgaggcgcccatcaagatctgcggtgacatccatggtcaatacagtgatcttctaaggctttttgaatatggaggctttcctcctgaagccaattatctattcttaggtgattatgttgatcgaggcaaacaaagtttggagactatatgccttcttcttgcttacaaaatcaagtaccctgagaacttttttcttctgaggggcaatcatgaatgcgcctcaataaacagaatatatggattctatgatgaatgcaagcgtcgatttaatgtgcggctatggaaggtcttcacagaatgttttaacactctacctgtggctgctcttatcgatgataaaatattatgtatgcacggtggactctctcctgatctagcacacttggatgagataaagaacttgcagcgtccaactgatgtaccagatcaaggtctactgtgtgacttgctttggtcagatccaggaaaagatgctcaagggtggggcatgaatgatagaggggtctcatatacctttggtgctgacaaggtttcagaattcttgcaaaagcatgatcttgatcttatctgtcgtgctcaccaggttgtcgaggatgggtatgaattttttgctgacagacagcttgtcaccatattctcggcccccaattattgtggtgaatttgataatgctggtgcaatgatgagtgtcgatgaaactttgatgtgctcattccaaattctgaaacctgctgagagaaaaaacaaatttatggggtccaacaaaatgtgatagtgaaagccattttgcttccagcagctctagcctgttaaggttctcctgtggatgcatcgagacaacagcatgctggcgccaagtttgagggcagcattgggctactatcagagaaaccaaataatcccatacctaactgttcatctggaagttactcatcatgacaagtgcctgaaatttttcctctttcctgttaccttgtgtcagaacattatgtagctgtagatatattgattatggaaggatgaagttgccaaattgacctgaggagattcctttctccagccaggaaaaattctgaacatcaaggagtttctgtttgcaagtttcactatttaaaagcagttatgttgcttgtgcggagggtgaagtggtgagcaacatttcaaggaggtgctgatgcttgctgacaacctatgaaaaggcgtttctgtagctgactacttggtttgtccgtcagacaattctagacgtgaattttgatctgttggctagattagctgccaagtaggtatttcgtatctctagatttatgggattcacattcactcattcttgttgctattcacttgcctttgttatgttgctacatgggtgccaaacgcggtctgcaaagcagtcgtttcggtttgtttggtaatgcattttgcgcacaaccctctgggcatggttttgttttgcc

SEQ ID NO: 1194 - DNA, 1116 bp, Zea Mays
aaaaaaggttctagaccgttgtaggtcgccttactctcgtaaaaaccatgatcaatgcacccaaatcctaccacggcggggcatctgagaccaagatttgtccgtcgacttggactgtagtgagcgggagaccaaccagccaggacaaacaaggtgacatccatggtcaatacagtgatcttctaaggctttttgaatatggaggctttcctcctgaagccaattatctattcttaggtgattatgttgatcgaggcaaacaaagtttggagactatatgccttcttcttgcttacaaaatcaagtaccctgagaacttttttcttctgaggggcaatcatgaatgcgcctcaataaacagaatatatggattctatgatgaatgcaagcgtcgatttaatgtgcggctatggaaggtcttcacagaatgttttaacactctacctgtggctgctcttatcgatgataaaatattatgtatgcacggtggactctctcctgatctagcacacttggatgagataaagaacttgcagcgtccaactgatgtaccagatcaaggtctactgtgtgacttgctttggtcagatccaggaaaagatgctcaagggtggggcatgaatgatagaggggtctcatatacctttggtgctgacaaggtttcagaattcttgcaaaagcatgatcttgatcttatctgtcgtgctcaccaggttgtcgaggatgggtatgaattttttgctgacagacagcttgtcaccatattctcggcccccaattattgtggtgaatttgataatgctggtgcaatgatgagtgtcgatgaaactttgatgtgctcattccaaattctgaaacctgctgagagaaaaaacaaatttatggggtccaacaaaatgtgatagtgaaagccattttgcttccagcagctctagcctgttaagtacggaccgacattattgaaagcaactattacgaatcaagactactagaaactagcactccaacattaccagaagttcacaattccgcaaaaacttacttggaacagcattcacggggcaagtttagttaccttcgaggcttcgacctttcaccttgaatcccaaagaccac

SEQ ID NO: 1195 - DNA, 1017 bp, Zea Mays
cttggactgtagtgagcgggagaccaaccagccaggacaaacaaggtgacatccatggtcaatacagtgatcttctaaggctttttgaatatggaggctttcctcctgaagccaattatctattcttaggtgattatgttgatcgaggcaaacaaagtttggagactatatgccttcttcttgcttacaaaatcaagtaccctgagaacttttttcttctgaggggcaatcatgaatgcgcctcaataaacagaatatatggattctatgatgaatgcaagcgtcgatttaatgtgcggctatggaaggtcttcacagaatgttttaacactctacctgtggctgctcttatcgatgataaaatattatgtatgcacggtggactctctcctgatctagcacacttggatgagataaagaacttgcagcgtccaactgatgtaccagatcaaggtctactgtgtgacttgctttggtcagatccaggaaaagatgctcaagggtggggcatgaatgatagaggggtctcatatacctttggtgctgacaaggtttcagaattcttgcaaaagcatgatcttgatcttatctgtcgtgctcaccaggttgtcgaggatgggtatgaattttttgctgacagacagcttgtcaccatattctcggcccccaattattgtggtgaatttgataatgctggtgcaatgatgagtgtcgatgaaactttgatgtgctcattccaaattctgaaacctgctgagagaaaaaacaaatttatggggtccaacaaaatgtgatagtgaaagccattttgcttccagcagctctagcctgttaagaatcaacaaggacgatatatgagtctgtttggttcgcctttttcccaacgactcagagaacagcttttcacagaagtagacctagaatctcgatgtttgggaactataagcgacttctggccaccaaaatccgtagagaagcgtttttgcatctgttacatacatgtaaaataatcaccgt

SEQ ID NO: 1196 - DNA, 1350 bp, Zea Mays
atgggatgcgatgcgatgcaatgcaatgcaatgcaagggccccttgtgatttggatttggcgccccagatttactcccggatcacatgacgatctcgggcttgaggatgctggatttgatctccttgtgcgggagcacgacgccgccgttgctgtagatctcgtcgcagacgtggacgtcctcgccgaggatggtcatgttctcgacgcgcgcccacttgccgacggtggagtgccagccgatgatgctgctggagacgcaggcgtgctgcttgacgcgcgcggccctggcgggcgccttcttccgcagcgagtccaggtacaggcgcaggcccgtgatgtagtccctcggctgcccgatgtccatccagaaacccgggagaaccatggcgaagagggccccgtccgccgcgacgcgcgggaacacctccttctcgatggacgtcggcttcagctcgatgcggccgagcacggacgggttgagcaggtagatgccggcgttgatcttgttgcccacgaacgccttgggcttctccacgaaccgctccaccttgccggtgccctcctccatgaccaccacgccgtacttggacggctcgtcgaccttggtcaccatgatcgtggcctcgccgccgtgggccctgtggaactcaatgagctcggcgaacgggtactcgctgatcacgtcgctgttgagcacgaagaaagggtcgccggatccgtcggcgagcttgtcgcgggccagggccagcgggcctgcggtcccgaggggctccgtctcctgcgagcaggtgatcttgatgccaagcttgctctcgaagtccttgagaaagttgagcatgacctgcggctggtaattgatggccaggacaacctctgtaacaccaacttccttcagagcctcgatctggtgcaggatcatgggcttgttgccgaaatccacgagcggcttgggcacgctgagcgtgagcgggcgcaggcgggtgccgaagcctccgacgagaatgagggccttcatggctgcagcagcagtcctcctcccaactcagctcccacacccagcgcaccttctctctgcaagaagcgcggtgcacgcaccttgaatccttggcgcgacgggcggccgttccttccgagacgacgagagacgggggagggaggtggtttgtcgacggcgcccaggacctcggcggcgagagctgcagcgaggaagaagacaaggaggaggaaaaggcgtcggctgcgactgcgagcgactcaggacgcggctgccgacgaacgacgccgcggctttataccgcttcctcctcctcctccgtctccccttgagcactactacggttggggttga

SEQ ID NO: 1197 - DNA, 904 bp, Zea Mays
gatagatggccgcatggtcaatctctttctttccttccccccaatctggccattgtggttccctgaagaattagtaacaaaataacagtcagggaggctcttactaatctgcagtgggtcaaggacatcaggggacaacacctttcttcccaggctctcacagaatatttactggtatgggatttgcttgcggatgtgattttgtctcctacggttcctgatcaattcaaatggactccctcggcctctggttcttactcttccaagtcggcttatgaccctttatttgagggatcagttaagttcgagccagcggatagaatatagaggagctgggtgccacctaggtgcaagtttttcatttggctggctgcgctaaaccgattgctggacatcagatcgtcttgctaggagggttggatcacccggaatgctgtcctctttgtgcacaagaacaagaaactattgaacacttgctggtgacttgtgtctttgctagggaaatatggtataaagtgctttcctttgttgggttgcagcagctttctccatctttggatgaggagagttttcaggattggtggcccaaggctgaggatcgggtggctagccaaagaaagaaaggcttcaattccttagtgattctagtagcttggggcctttggaagcatcgcaatgcctgtgttttttatgaggcttcccctaatgtttccaaactttttttagacattaagggtgatgctagttcatggtgtatggctggtgacgtgaagctgtcggagttgtggcctccttagagtttaggtttggtttttttttgttttggtgtgtgtgtaccccaacatgcttgggacaaaaaggctttgttgttgttgtgtgtgtgtgtttttgtgcctgccttcgg

SEQ ID NO: 1198 - DNA, 2294 bp, Zea Mays
ccaaccctatcaaaccgagagttaaaaaacgcgcgttttattccggtcgtgccacgcccacgccgcagcgtcctcccgagctaaacgccacatgcgagtgatgataataaggaaggaattgaaggaagcgcccaaaccaccacagcacccacgaggccacgaccgcagtatcgccgccgccgtttcgtttccttatcgatcgtgcggcgcgccggcgggatatagtagctcgaggcgagagagagagagagagagagcagcgctagccttccgttcccattcgcgcgcggccgccacgattccgccgttcccgcagaacggtgctcggaaggggcgcaccgccagcagcctctgatcatccttcgcggggaaggaacggccgggggtctcgagcccctgccggccatttcgccccgcctcgcgggattcccgccaagccgttggtgtagcgcgtggaaggcggcgatctcgggcagggccggatgctgcacaaatggaaggccgcggatggcggcgggtgtgccggcgtcgcgggcggcgtcgaccagcgccggcggtgcgtggcggcgtcgctgtccacgctgatagcggctacgctggcgttccttgcctacgtcgccttcttccccgacggcggcgcgcacgggctgtaccggctgtggacgtgccaggactgcgcgggcgatctgggcgagtttcccggcgacgaggcggccgcggctgacggcccttcggccgcgcgcgcggcccgctcgccgacgacgctgtcgcacgtcgcgttcggcatcggcgcgtcggcgcggacgtgggaccagcgccgcgggtacgcggagctgtggtggcgccccggccagatgcgcgggcacgtctggctcgaggagcagcccgcgagcccgtggcccgcggcgacgtgcccgccgtaccgcgtctcggcggacgcgtcccggttcggggaccgcgcgccggcgtcgcggatggcccggatcgtggtggactcgttcctggccgtcgcgggggagctcgggaacggcacggcccgcgaggaggcgcggtggttcgtgatgggcgacgacgacaccgtcttcttcccggacaacctggtggcggtgctgagcaagtacgaccacgaggagatgtactacgtcggggcgccgtcggagagcgtggagcaggacgtgatgcactcgtacggcacggccttcggcggcggcggcttcgcggtcagctacccggccgcggccgcgctcgccacggcgatcgacggctgcctggaccggtacaggtacttcttcggcagcgatgagcgcgtgaaggcctgcctcagcgagctcggcgtgccgctcacccgcgagcccgggttccaccaggacagcgtggtgtcgcccttggccggacccaggtctacatgtccgtgaagcccttgagttgagccgaggggcacgggaaccctctctcgctctctttcaccaaccagttcaccacccccatgtggccatgtggcgaggggatcgagcaggacaagcgtcgacagaccacaagagatgactaccctagccaaccaccgctaaaaaaggacatcctctcttgttttcattttttgccggcaccacgccagtgccagtgccagattgccaccgcatttcttctgccgtgccccagccgggacgttaggatgtctctgttggaatgtgaaaaataggagaagcagaactgtagactacactctttgtagagagatgtttgaaataaatgatgtgatagaaaacaagattgacggaacgtgaaaaataggagacacaaaactgtaaatgacactctttgtagagaaatgtttgaaataaatgatgtgatagaaaataggattgacgatatgctcgagatggttggccttagtagtttctatcatcctcatccctacaccctacccagatttaaagcttataaagctatttaagagtgctcttttagcatacaacgtaacatggttggatttaaagcctaaagctatttaagagtgctcttttagcataaaacgtaaaatggttggctgggattaaatgtctctccatattagaccgtctttagctgttcatccatggtcatcatccaaatcattgtttttgccctagatcatactctgtttctccacaacttaacagtaaaaagaatctaatgtgcttcctccacaccatcttcttgacccgtcgtctccatcccttgtgctaacttgacactttcgggctaccattgtgatgtcccgtctttaccctggccatggaggccttgcctttttt

SEQ ID NO: 1199 - DNA, 2455 bp, Zea Mays
aaaacgcgcgttttattccggtcgtgccacgcccacgccgcagcgtcctcccgagctaaacgccacatgcgagtgatgataataaggaaggaattgaaggaagcgcccaaaccaccacagcacccacgaggccacgaccgcagtatcgccgccgccgtttcgtttccttatcgatcgtgcggcgcgccggcgggatatagtagctcgaggcgagagagagagagagagagagcagcgctagccttccgttcccattcgcgcgcggccgccacgattccgccgttcccgcagaacggtgctcggaaggggcgcaccgccagcagcctctgatcatccttcgcggggaaggaacggccgggggtctcgagcccctgccggccatttcgccccgcctcgcgggattcccgccaagccgttggtgtagcgcgtggaaggcggcgatctcgggcagggccggatgctgcacaaatggaaggccgcggatggcggcgggtgtgccggcgtcgcgggcggcgtcgaccagcgccggcggtgcgtggcggcgtcgctgtccacgctgatagcggctacgctggcgttccttgcctacgtcgccttcttccccgacggcggcgcgcacgggctgtaccggctgtggacgtgccaggactgcgcgggcgatctgggcgagtttcccggcgacgaggcggccgcggctgacggcccttcggccgcgcgcgcggcccgctcgccgacgacgctgtcgcacgtcgcgttcggcatcggcgcgtcggcgcggacgtgggaccagcgccgcgggtacgcggagctgtggtggcgccccggccagatgcgcgggcacgtctggctcgaggagcagcccgcgagcccgtggcccgcggcgacgtgcccgccgtaccgcgtctcggcggacgcgtcccggttcggggaccgcgcgccggcgtcgcggatggcccggatcgtggtggactcgttcctggccgtcgcgggggagctcgggaacggcacggcccgcgaggaggcgcggtggttcgtgatgggcgacgacgacaccgtcttcttcccggacaacctggtggcggtgctgagcaagtacgaccacgaggagatgtactacgtcggggcgccgtcggagagcgtggagcaggacgtgatgcactcgtacggcacggccttcggcggcggcggcttcgcggtcagctacccggccgcggccgcgctcgccacggcgatcgacggctgcctggaccggtacaggtacttcttcggcagcgatgagcgcgtgaaggcctgcctcagcgagctcggcgtgccgctcacccgcgagcccgggttccaccaggtggacatccggggcgacgcgtacgggatgttggcggcccacccggtggcgccgctggtgtcgctgcaccacctggaccacgtggcgcccataagcccgcagggcaagacggcgctggacgcggtccggccgctggtgggcgcgtcccgcttcgacccggcgcgggcgctgcagcagagcttctgctaccagcgcgggccgggctacgtatggtccgtgtcgatctcgtggggctacacggtgcaggtgtacccgtgggccgtggccccgcacgagctggaggtgccgctgcagacgttccggacctggcggagctgggccgacgggccgttcgtgttcaacacgcggccgctgagcccgcacgacgcgtgcgcccgccccgccatgttcttcctcggccgggtccggaacgggacggcgcgcaccaccgtgacggagtacgccaggcgcgccggcccgtcgaaggagtgcgacaaggctagcttccgtgcggcgtccacggtgcacacggtcagggtcatcgcccccaggatgagcgagagtgactggaggcaccgcggcggcagtgctgcaagacgaagcggacgaggtggggctccgtgctggaggtgcggatacggcgttgcggcagaggagagctcacgtcgccgtagaatagaaacaaccggtccgttttcgctgtgatttatccacggaaggccaacgaaaacagcagtagatatttgagtggagagtatctgccttctagcgacaacagatttgtccacgctgtgtataaaaaagctttacctacgcgactgatgagatatacaggtcacgtacacatacagtagcatatccgaaagtcacgttttgaaaacgttgcggtgctgtacaaattggaaaataaaatcgtcccgtagcattgtgaataatggtagaaatacaagaactcactagataaatttcatatcgtgcccgtcttctgttaaatactcaaatacatgagtaattctatggctcttataaagagtcacgttgatcatactttaaaataagtcgtctgcctatgtgtcatagcctcataggtcgtaagagtagtgtatcggaagtatagatgagcatgtagcccag

SEQ ID NO: 1200 - DNA, 1895 bp, Zea Mays
gttttattccggtcgtgccacgcccacgccgcagcgtcctcccgagctaaacgccacatgcgagtgatgataataaggaaggaattgaaggaagcgcccaaaccaccacagcacccacgaggccacgaccgcagtatcgccgccgccgtttcgtttccttatcgatcgtgcggcgcgccggcgggatatagtagctcgaggcgagagagagagagagagagagcagcgctagccttccgttcccattcgcgcgcggccgccacgattccgccgttcccgcagaacggtgctcggaaggggcgcaccgccagcagcctctgatcatccttcgcggggaaggaacggccgggggtctcgagcccctgccggccatttcgccccgcctcgcgggattcccgccaagccgttggtgtagcgcgtggaaggcggcgatctcgggcagggccggatgctgcacaaatggaaggccgcggatggcggcgggtgtgccggcgtcgcgggcggcgtcgaccagcgccggcggtgcgtggcggcgtcgctgtccacgctgatagcggctacgctggcgttccttgcctacgtcgccttcttccccgacggcggcgcgcacgggctgtaccggctgtggacgtgccaggactgcgcgggcgatctgggcgagtttcccggcgacgaggcggccgcggctgacggcccttcggccgcgcgcgcggcccgctcgccgacgacgctgtcgcacgtcgcgttcggcatcggcgcgtcggcgcggacgtgggaccagcgccgcgggtacgcggagctgtggtggcgccccggccagatgcgcgggcacgtctggctcgaggagcagcccgcgagcccgtggcccgcggcgacgtgcccgccgtaccgcgtctcggcggacgcgtcccggttcggggaccgcgcgccggcgtcgcggatggcccggatcgtggtggactcgttcctggccgtcgcgggggagctcgggaacggcacggcccgcgaggaggcgcggtggttcgtgatgggcgacgacgacaccgtcttcttcccggacaacctggtggcggtgctgagcaagtacgaccacgaggagatgtactacgtcggggcgccgtcggagagcgtggagcaggacgtgatgcactcgtacggcacggccttcggcggcggcggcttcgcggtcagctacccggccgcggccgcgctcgccacggcgatcgacggctgcctggaccggtacaggtacttcttcggcagcgatgagcgcgtgaaggcctgcctcagcgagctcggcgtgccgctcacccgcgagcccgggttccaccaggcaccgcggcggcagtgctgcaagacgaagcggacgaggtggggctccgtgctggaggtgcggatacggcgttgcggcagaggagagctcacgtcgccgtagaatagaaacaaccggtccgttttcgctgtgatttatccacggaaggccaacgaaaacagcagtagatatttgagtggagagtatctgccttctagcgacaacagatttgtccacgctgtgtataaaaaagctttacctacgcgactgatgagatatacaggtcacgtacacatacagtagcatatccgaaagtcacgttttgaaaacgttgcggtgctgtacaaattggaaaataaaatcgtcccgtagcattgtgaataatggtagaaatacaagaactcactagataaatttcatatcgtgcccgtcttctgttaaatactcaaatacatgagtaattctatggctcttataaagagtcacgttgatcatactttaaaataagtcgtctgcctatgtgtcatagcctcataggtcgtaagagtagtgtatcggaagtatagatgagcatgtagcccag

SEQ ID NO: 1201 - DNA, 1195 bp, Zea Mays
cccaaacaaatctcaacgtcgccatccctagagcgtgccggtagttggttggtgcgacgcgtgacctcgccgggccaggtggacatccggggcgacgcgtacgggatgttggcggcccacccggtggcgccgctggtgtcgctgcaccacctggaccacgtggcgcccataagcccgcagggcaagacggcgctggacgcggtccggccgctggtgggcgcgtcccgcttcgacccggcgcgggcgctgcagcagagcttctgctaccagcgcgggccgggctacgtatggtccgtgtcgatctcgtggggctacacggtgcaggtgtacccgtgggccgtggccccgcacgagctggaggtgccgctgcagacgttccggacctggcggagctgggccgacgggccgttcgtgttcaacacgcggccgctgagcccgcacgacgcgtgcgcccgccccgccatgttcttcctcggccgggtccggaacgggacggcgcgcaccaccgtgacggagtacgccaggcgcgccggcccgtcgaaggagtgcgacaaggctagcttccgtgcggcgtccacggtgcacacggtcagggtcatcgcccccaggatgagcgagagtgactggaggcgggcaccgcggcggcagtgctgcaagacgaagcggacgaggtggggctccgtgctggaggtgcggatacggcgttgcggcagaggagagctcacgtcgccgtagaatagaaacaaccggtccgttttcgctgtgatttatccacggaaggccaacgaaaacagcagtagatatttgagtggagagtatctgccttctagcgacaacagatttgtccacgctgtgtataaaaaagctttacctacgcgactgatgagatatacaggtcacgtacacatacagtagcatatccgaaagtcacgttttgaaaacgttgcggtgctgtacaaattggaaaataaaatcgtcccgtagcattgtgaataatggtagaaatacaagaactcactagataaatttcatatcgtgcccgtcttctgttaaatactcaaatacatgagtaattctatggctcttataaagagtcacgttgatcatactttaaaataagtcgtctgcctatgtgtcatagcctcataggtcgtaagagtagtgtatcggaagtatagatgagcatgtagcccag

SEQ ID NO: 1202 - DNA, 1552 bp, Zea Mays
tggaaagcacatgtaactttgacaaggaccaaacaagaacaaagacaacttagcgaatgccaatatataagttaaagagaaacagttggcgtccatagagtgatgtaaaatgtaaatacatagaaacttgttaaacagataacatggaacttgtacaaaaaaacagctggattcagcacaactttgtcattcagactcagttccaaattctggttagaacaccacccagcgagttaacgtgacatcacaccagaaatttccagcgcctgatgaaattttactacataaactgaatttagataacaataaacagcaatctggaaaagactaaccacagctaaccaaagcaactcgacattttctccacacaacccaagataaaaggtcagtaggtcacagcaccacaaaattacttagatatgcaagtctatgcgaaacctagtataaacgtgcgtgtcagtaggatgctacatcccaaacatcatagtgaaggaaacaagtgtgcatcacacctatacccaacaccaagaatgaaattggtcttaatcctgaacatcagtgacccagacagaatgagcaaataaaagcatgattcctctaccccttaaagctccagtcggcagtgatgggctgatggcttcaccacgacaccaccccaccctaccatgtctagtcactatacatggtctacctgatgcatgattgtatcaacatgtatacatgtagtaatagcctaatgcttcttttccttctaacactggtcagagtatcattggaactgcaagtaatagcctaatggtgtgtttggtttgtggagtcactctatgcttcatgaggtgatgcatcataagttcatttcatcaattttggtggaatcaacccactcctcatgtatatactaattattagcttatgaggaatggggtggtgatggatcaacccattctattccacaaaccaaataaaaaagtgaggagtgagaagaagatggattacttcattcctcacaccaaacacactataagtttgtgaactaaacctggagtccattaaagtcctttgatgttacaaactgtgtgcatttcatcctaggtggaagatgatttctgcaaatattaattgtatctcaaatcaccagctggtttgctgattccatatgtgaaagaaggtggcacaggatttctttttcttcagtcaatatcataaataagttactgaaagtaatgattaatatcagtctagccccctaggcatcgtaaattatcgagtgcctgaaattgttttctgatatgagaacctattaatcagataatattgactgctgcacaaacctgaaactaagaaggaatgctttagcagattttccaatcaatatgttaccaacttgtttttgttgaggcgttgatcatatcatcctgaggaacataaaaagcttgtgcacatggagctaatctgccaataacccaaattcaaatcaacaaagtggcacagtatacagcagctaagtgtccacaaaagtgaaagaaaaaataaataagagtagcattatgca

SEQ ID NO: 1203 - DNA, 3122 bp, Zea Mays
ggactgcagcagctaaaccctcaacagaaagctcgaaatctggggtgcgaaggataggagagaggagacccctccccctccccctgcccctcctcgtcctcggaccttcccccctcgtcgacacctaccctcaccgcatccgcggtcgcaatggcgctagcctcccaaggcatcaccctgcgttccccgccagcggggtccgggggccacagcgggaggcggtcctcttccgtgcccgccgccgcggccccgcgcggctgggggcagccccacgcggggcaagccttatccatctcgcccgccaggtacgaaccagccgctcgtccaccatggcgaggctccctcgctgccgccatacgtgccgctgcctcggccggtgcgcaccacggcagcgacccggtccctgccgagcccagaatcgagctccccgcgatatttaccgtcttctccgaggccgctaagaccggcgctgccttcttcatcgcctcgtcgagcgcggccttcctcctcggctcgtttggggggttcggaggcggcgctgggggtctcttcggcggcggtggtggagggggtggatggggcgcggggggtggtggtgccggtggcggagggggtggagacttctggtcctggctgttctccgccggtgcggcgaacgcggacgacaagtcatcgggggattgggacgcgcacgggctccccgtcaacatgacggtgccgctcacgaagctgagcgggctgaagaggtacaagctgtctgagctcaagttctttgaccgggcagctgccggcggtggcgcctacacggggccagaggattccttcttcgaaatggtcacactgcagcctggtggcgtgtacaccaagtcgcagctgttgaaggagcttgaaacactcgtttcctgtggcatgttcgagcgggttgatctggaggtgaagcccaagccagataacacaattgggctcacagtctcctttgtggagagtgtgtggagtgctgcaaagcagttcaagtgcatcaatgtggggcttatgtcacagtcagggcaggttgacttcgaccaggacatgacagagagggagaaaatggattacctccgcaagcaggaacgcgattaccagcagcgtgtaaggggtgccaagccctgcatcttgccagaaaatgtacgtggagaggtgctgggaatgatgaagaagcaggagaaggtgagcgccaggatgctgcagaagatcagggaccatgtccagaaatggtaccacaacgagggtttcgtatgcgcacaggttgttaactttggaaaccttaacaccaatgaggttgtctgtgaggtggttgagggtgacatcaccaaggtggagtaccagttccaggataagcttggaaatattgttgagggaaatacccagcttcagatcatagaccgtgagctgccccaacagggaaacaggctctgaagaatataaattcacttgctttgttttcaaatatagaagttaatccacgtcctgatgagacaaaggaagggggcatagtagttgaaattaagcttaaggaactggaacccaagtcagctgaagtaagcacagaatggagtattgtacctgggcgtgaaggccggccaactttggcatccatacaacctggaggaactgtgtcatttgagcaccggaacatctatggtctaaatagatctattgttggttctgtcacttccagcaacctgctgaaccctcaggatgatctttcattcaagcttgagtatgttcatccttatttggatggtgtggatgatcgtagtaaaaaccgtacatttaaaactagctgcttcaacaccaggaagttgagtcctgtctttgttgctggtcccaacatggatgaggctccacctgtttggatcgatagagttggatttaaagccaacataactgagagcttcacacggcaaagcaaattcacatatggcctcgtggttgaagagattacaacacgtgatgaaactaatactatctgtacccatggttcacgagcaatgcctagcggcggtttgagcatggacggacctcccacaacactcagtggtactggagttgaccggatggcattccttcaggctaatataacccgtgacaatactgagtttgtgaatggtgcaattgttggagacagatacattttccagctagaccaaggtcttggcatcgggagcaaaaacccattcttcaaccgtcatcaactgactctgaccaagttcatcaatttaaataagcaagagaaaggtgctggcaagccactaccagctgttttggttcttcatagtcattatgctggttgtgtgggtgatttgccaagctatgatgcatttgcacttggagggccttactctgttaggggctttagtaatggtgaactgggcgcttctaggaatattcttgagcttgctactgagttgcgtgtccctataagaaacacccacgtgtatgcatttgctgaacatgggactgaccttggaagttccaaggacgtgaaaggaaaccctacggagtttttcaggcgcgtaggtcatggatcttcatatggcgttggcgtcaagcttgggttggtaaggggagagtacatcgtagatcacaatgctggtactgggaccgtttttttcagatttggtgagagattttgagtatgctgcctcccgttaccgtggaaggcaggcttctgaggtactttgtttagcgatgtttgtggtctgataggactcaaacggcattggagctctgctgaaataatgaagctattttctgaggaagagtgatagctagtgtgagattaaattttcttcatgtaggatgtaagatctgttctttcagagctgggagctcataaatagatgaatgttcagaaacgttgtcccaatttttaccgtcagttgtgtttgtgcttctgacaaattgtccatttcgttttgcccggaaccttttgtcaattgcttatctacagttttgtttcattttcagattgtgtaaacttcctgttgatgatgcccttgtgttggatctgaatgctgtccttattcggcggctattgttgactagcttcaaattcagaaatagtaattagttagaaaatt

SEQ ID NO: 1204 - DNA, 3152 bp, Zea Mays
ggactgcagcagctaaaccctcaacagaaagctcgaaatctggggtgcgaaggataggagagaggagacccctccccctccccctgcccctcctcgtcctcggaccttcccccctcgtcgacacctaccctcaccgcatccgcggtcgcaatggcgctagcctcccaaggcatcaccctgcgttccccgccagcggggtccgggggccacagcgggaggcggtcctcttccgtgcccgccgccgcggccccgcgcggctgggggcagccccacgcggggcaagccttatccatctcgcccgccaggtacgaaccagccgctcgtccaccatggcgaggctccctcgctgccgccatacgtgccgctgcctcggccggtgcgcaccacggcagcgacccggtccctgccgagcccagaatcgagctccccgcgatatttaccgtcttctccgaggccgctaagaccggcgctgccttcttcatcgcctcgtcgagcgcggccttcctcctcggctcgtttggggggttcggaggcggcgctgggggtctcttcggcggcggtggtggagggggtggatggggcgcggggggtggtggtgccggtggcggagggggtggagacttctggtcctggctgttctccgccggtgcggcgaacgcggacgacaagtcatcgggggattgggacgcgcacgggctccccgtcaacatgacggtgccgctcacgaagctgagcgggctgaagaggtacaagctgtctgagctcaagttctttgaccgggcagctgccggcggtggcgcctacacggggccagaggattccttcttcgaaatggtcacactgcagcctggtggcgtgtacaccaagtcgcagctgttgaaggagcttgaaacactcgtttcctgtggcatgttcgagcgggttgatctggaggtgaagcccaagccagataacacaattgggctcacagtctcctttgtggagagtgtgtggagtgctgcaaagcagttcaagtgcatcaatgtggggcttatgtcacagtcagggcaggttgacttcgaccaggacatgacagagagggagaaaatggattacctccgcaagcaggaacgcgattaccagcagcgtgtaaggggtgccaagccctgcatcttgccagaaaatgtacgtggagaggtgctgggaatgatgaagaagcaggagaaggtgagcgccaggatgctgcagaagatcagggaccatgtccagaaatggtaccacaacgagggtttcgtatgcgcacaggttgttaactttggaaaccttaacaccaatgaggttgtctgtgaggtggttgagggtgacatcaccaaggtggagtaccagttccaggataagcttggaaatattgttgagggaaatacccagcttcagatcatagaccgtgagctgccccaacagcttcgacctggccacatctttaacattggagcagggaaacaggctctgaagaatataaattcacttgctttgttttcaaatatagaagttaatccacgtcctgatgagacaaaggaagggggcatagtagttgaaattaagcttaaggaactggaacccaagtcagctgaagtaagcacagaatggagtattgtacctgggcgtgaaggccggccaactttggcatccatacaacctggaggaactgtgtcatttgagcaccggaacatctatggtctaaatagatctattgttggttctgtcacttccagcaacctgctgaaccctcaggatgatctttcattcaagcttgagtatgttcatccttatttggatggtgtggatgatcgtagtaaaaaccgtacatttaaaactagctgcttcaacaccaggaagttgagtcctgtctttgttgctggtcccaacatggatgaggctccacctgtttggatcgatagagttggatttaaagccaacataactgagagcttcacacggcaaagcaaattcacatatggcctcgtggttgaagagattacaacacgtgatgaaactaatactatctgtacccatggttcacgagcaatgcctagcggcggtttgagcatggacggacctcccacaacactcagtggtactggagttgaccggatggcattccttcaggctaatataacccgtgacaatactgagtttgtgaatggtgcaattgttggagacagatacattttccagaccaaggtcttggcatcgggagcaaaaacccattcttcaaccgtcatcaactgactctgaccaagttcatcaatttaaataagcaagagaaaggtgctggcaagccactaccagctgttttggttcttcatagtcattatgctggttgtgtgggtgatttgccaagctatgatgcatttgcacttggagggccttactctgttaggggctttagtaatggtgaactgggcgcttctaggaatattcttgagcttgctactgagttgcgtgtccctataagaaacacccacgtgtatgcatttgctgaacatgggactgaccttggaagttccaaggacgtgaaaggaaaccctacggagtttttcaggcgcgtaggtcatggatcttcatatggcgttggcgtcaagcttgggttggtaaggggagagtacatcgtagatcacaatgctggtactgggaccgtttttttcagatttggtgagagattttgagtatgctgcctcccgttaccgtggaaggcaggcttctgaggtactttgtttagcgatgtttgtggtctgataggactcaaacggcattggagctctgctgaaataatgaagctattttctgaggaagagtgatagctagtgtgagattaaattttcttcatgtaggatgtaagatctgttctttcagagctgggagctcataaatagatgaatgttcagaaacgttgtcccaatttttaccgtcagttgtgtttgtgcttctgacaaattgtccatttcgttttgcccggaaccttttgtcaattgcttatctacagttttgtttcattttcagattgtgtaaacttcctgttgatgatgcccttgtgttggatctgaatgctgtccttattcggcggctattgttgactagcttcaaattcagaaatagtaattagttagaaaatt

SEQ ID NO: 1205 - DNA, 1801 bp, Zea Mays
ttcgactgttcatttgcatccacgagcgccgtggagggaggggatgggatggcagcagtgagctcggtctgtgtcctgcctctcgcgccgctgagccagtgagccgtgctgctaggaatgtgttgtagggaggagggaaaagggcttcgagtactccgcaactcgcgaggtatggactgcggcgcggacgccctgctgctgctgccatggccggggatgcggagttgcctctcgaagaggcggaggccgcgatgagatccgccgacgacgacagcgtcacggccacggtggtcaatatgtaccacttttaatatttgatggaccagttaacaaaagctttacctgatcgaatcctaaaatgacttacatttggcataggatgcattagttactagttagagcagctggcacctcccttcgtcaataaaccatatttcctgtacgaggctggccgttgtcatgtttatgttcctcatgtgaaatctgatcatacaactgatcttatctacttagatgatactgcacacagctgtcatgtttatgttcctcatgtgaaatccgaccttatagctgatcacctatgctatgtatctaccatatttagatgatactgtatacttaagttagtctttgcctagctactctgtccgctcgaattaattttatgcacattatgtgtgctgcttatgctaataatgctcttaagatgcatgtgtcttactgtcttcaacatgtccttttctcaggttttatgtcattatgaagactggttagctccttgcttttgttaggtctgttcaaattagcctgatttcttctcatttattcaagtttgtgagtaacaagttattgtacaacagatgcttcgtaaattctatgtcgcacttgaaccacatcgtgcttcaatctgaatcttgcagtaataacatgttttgatcagttgcgtttctggggtgttcatatatggtgcctttcacaccaaaaggtgatagggctgttactggtgttggggggatgaacacctcggcactttggatgaatttgatattattaacatcaaatctgcctgaattgttgtgcaatatacactaataactctgaaactgaaatcttgtatcttatatttctctgttgcttgcatgttgaaactggggctggttaggcattgacttctggatagggaccttggaaacagaagctacatctacatttaatattatataaatttctgtttgttattcttctagaagagcaaaatatcttgatcgttcctttgtgaattgtgccaagtgagctgtgaggatatatagagaaggtgggaatggactggctaccttgcctacctattgctggactatggtctatggagtttggagtatggacatttgcagcctccgcatagcctgttgatggtgttgaaattgcttcatcgactttggaatagcagaggctgtgggctgtggctagaccacaaggaatggggaggaagcttcttgtcagctctccctttcttcgcagacaaggagttatgtatcgtgtattcatgactgattgagcatgacagcatctgaagtttctttgttcgttgtgtagatctgacctatctacccctgacgtggagcacatgccaaactttattgacttttggaatctggctattttgttcctgtacatgtgaaggtcaattggtctggggtttttaaaatacagtaattggtttacgggtttttttgtttaaccagaaaatgtgccgtataattaagggaaaaaaataatataatagcttaaggagacctttttg

SEQ ID NO: 1206 - DNA, 1367 bp, Zea Mays
cgactgttcatttgcatccacgagcgccgtggagggaggggatgggatggcagcagtgagctcggtctgtgtcctgcctctcgcgccgctgagccagtgagccgtgctgctaggaatgtgttgtagggaggagggaaaagggcttcgagtactccgcaactcgcgaggtatggactgcggcgcggacgccctgctgctgctgccatggccggggatgcggagttgcctctcgaagaggcggaggccgcgatgagatccgccgacgacgacagcgtcacggccacggtggtcaatatgtaccacttttaatatttgatggaccagttaacaaaagctttacctgatcgaatcctaaaatgacttacatttggcataggatgcattagttactagttagagcagctggcacctcccttcgtcaataaaccatatttcctgtacgaggctggccgttgtcatgtttatgttcctcatgtgaaatctgatcatacaactgatcttatctacttagatgatactgcacacagctgtcatgtttatgttcctcatgtgaaatccgaccttatagctgatcacctatgctatgtatctaccatatttagatgatactgtatacttaagttagtctttgcctagctactctgtccgctcgaattaattttatgcacattatgtgtgctgcttatgctaataatgctcttaagatgcatgtgtcttactgtcttcaacatgtccttttctcaggttttatgtcattatgaagactggttagctccttgcttttgttagtgagctgtgaggatatatagagaaggtgggaatggactggctaccttgcctacctattgctggactatggtctatggagtttggagtatggacatttgcagcctccgcatagcctggtgattgggaatggacatgttttttaaagatgtgtcttgtatcgattatttttcttctaaaatgaagttgatggtgttgaaattgcttcatcgactttggaatagcagaggctgtgggctgtggctagaccacaaggaatggggaggaagcttcttgtcagctctccctttcttcgcagacaaggagttatgtatcgtgtattcatgactgattgagcatgacagcatctgaagtttctttgttcgttgtgtagatctgacctatctacccctgacgtggagcacatgccaaactttattgacttttggaatctggctattttgttcctgtacatgtgaaggtcaattggtctggggtttttaaaatacagtaattggtttacgggtttttttgtttaaccagaaaatgtgccgtataattaagggaaaaaaataatataatagcttaaggagacctttttg

SEQ ID NO: 1207 - DNA, 1184 bp, Zea Mays
cgactgttcatttgcatccacgagcgccgtggagggaggggatgggatggcagcagtgagctcggtctgtgtcctgcctctcgcgccgctgagccagtgagccgtgctgctaggaatgtgttgtagggaggagggaaaagggcttcgagtactccgcaactcgcgaggtatggactgcggcgcggacgccctgctgctgctgccatggccggggatgcggagttgcctctcgaagaggcggaggccgcgatgagatccgccgacgacgacagcgtcacggccacggtggtcaatatgtaccacttttaatatttgatggaccagttaacaaaagctttacctgatcgaatcctaaaatgacttacatttggcataggatgcattagttactagttagagcagctggcacctcccttcgtcaataaaccatatttcctgtacgaggctggccgttgtcatgtttatgttcctcatgtgaaatctgatcatacaactgatcttatctacttagatgatactgcacacagctgtcatgtttatgttcctcatgtgaaatccgaccttatagctgatcacctatgctatgtatctaccatatttagatgatactgtatacttaagttagtctttgcctagctactctgtccgctcgaattaattttatgcacattatgtgtgctgcttatgctaataatgctcttaagatgcatgtgtcttactgtcttcaacatgtccttttctcaggttttatgtcattatgaagactggttagctccttgcttttgttagttgatggtgttgaaattgcttcatcgactttggaatagcagaggctgtgggctgtggctagaccacaaggaatggggaggaagcttcttgtcagctctccctttcttcgcagacaaggagttatgtatcgtgtattcatgactgattgagcatgacagcatctgaagtttctttgttcgttgtgtagatctgacctatctacccctgacgtggagcacatgccaaactttattgacttttggaatctggctattttgttcctgtacatgtgaaggtcaattggtctggggtttttaaaatacagtaattggtttacgggtttttttgtttaaccagaaaatgtgccgtataattaagggaaaaaaataatataatagcttaaggagacctttttg

SEQ ID NO: 1208 - DNA, 1466 bp, Zea Mays
cactttatttaaaattagttagaagtaactttagaaataaaagttagtcaaaatatgacaatttaaacagcgcccttcgtcctaccggccaccgtggcgctcgcactcgaaaccgctgaacggcagaaaacccaggcctttctagcttctgctatcctgctgctgcccctctttcccccaatctgcaggctgcaggcgctgctcctttcgccctccgctagcgagcgaatcgctggctcgaccccgcggcgggaggtatcccgccttcgatctggttcactggccaattcgttgcttcgtggggctttggagtttggagccaatcttgccccttaaagtgtcggtggcagcgttttgtgatcatcatgagctttgtgttccgagggagcaggaccgacatcgaggccggtggcttcccagggttcgctcccgagcgccgcgccatgggagcaggccggtgaatagcaattccttggcttttcttctaactgttcttgttttgttcatggtactgaactcgcaccagatctctcccaatcttctgctttggcttgtcttgggagtcttcctaatggccacgagcctcagaatgtatgccacgtgccagcagcttgctcatgctgcagctgccaacagttttctcggccacactgagctgcgtgtgcatgtaccgccgtccattacccttgctacgagaggccggttacagagccttagacttcaactggctcttcttgatcgtgaatttgacgatttagattatgacactctgagagcattggatgctgacaatagcccacatgctccatctatgagtgaagaagaaataaattctcttcctgtcttcaaatataaagttcaggcacaacagaggcatccccctgcccgaaaaagtgatgggccatctcagctatcggtttcttcaactgggtccggcaatgaggaaaagcaggatggtttaaaagcagatggaaccagcaaaccttcagaggatgaactaacatgtagtgtttgcttagagcaagtcacggtgggtgatctgttgagaagcctaccatgcttgcatcagtttcacgtaaactgcatcgacccatggctgcgccaacagggtacatgcccaatctgcaagcaccaggtgagcgatgggtggcatgctacaggcaacggtgaagaggatgcttcttacatggtgtgagtagctgactaggagtaggccatagctaactaccagtagctgctaactgaatccgtggaacatagttttcgaggtgacgggttggactgatctagggatgtgatctaatccctttctatcctaacaaaaccgcgtgtggaaacagttgtccagtacggttcttttacaggtaacgctcatttcaatcattctctgtaacggggcgtttggatcccttcattttagaggaattggaattcactcaataaagtaacttatttagtttggaatt

SEQ ID NO: 1209 - DNA, 1331 bp, Zea Mays
cactttatttaaaattagttagaagtaactttagaaataaaagttagtcaaaatatgacaatttaaacagcgcccttcgtcctaccggccaccgtggcgctcgcactcgaaaccgctgaacggcagaaaacccaggcctttctagcttctgctatcctgctgctgcccctctttcccccaatctgcaggctgcaggcgctgctcctttcgccctccgctagcgagcgaatcgctggctcgaccccgcggcgggaggtatcccgccttcgatctggttcactggccaattcgttgcttcgtggggctttggagtttggagccaatcttgccccttaaagtgtcggtggcagcgttttgtgatcatcatgagctttgtgttccgagggagcaggaccgacatcgaggccggtggcttcccagggttcgctcccgagcgccgcgccatgcgaattcatgcagggagcaggccggtgaatagcaattccttggcttttcttctaactgttcttgttttgttcatggtactgaactcgcaccagatctctcccaatcttctgctttggcttgtcttgggagtcttcctaatggccacgagcctcagaatgtatgccacgtgccagcagcttgctcatgctgcagctgccaacagttttctcggccacactgagctgcgtgtgcatgtaccgccgtccattacccttgctacgagaggccggttacagagccttagacttcaactggctcttcttgatcgtgaatttgacgatttagattatgacactctgagagcattggatgctgacaatagcccacatgctccatctatgagtgaagaagaaataaattctcttcctgtcttcaaatataaagttcaggcacaacagaggcatccccctgcccgaaaaagtgatgggccatctcagctatcggtttcttcaactgggtccggcaatgaggaaaagcaggatggtttaaaagcagatggaaccagcaaaccttcagaggatgaactaacatgtagtgtttgcttagagcaagtcacggtgggtgatctgttgagaagcctaccatgcttgcatcagtttcacgtaaactgcatcgacccatggctgcgccaacagggtacatgcccaatctgcaagcaccagagacactgacattcatcaccccccttgagcaagatctaattaaggaacatgagctgaaacttcaagccgagagccaaaccctcatgctggaagtcactcaagggagggcaaagatttctgagctcgagggcagtctagcctaggaggcgttgaagtctcaaggcctaaagcaggaggtcgact

SEQ ID NO: 1210 - DNA, 1778 bp, Zea Mays
acggtttgttacagttccaacagcatggaaaaagtctacgccatcagcagtcctagtaagaaaagaaaatcacagtatgagctgagtgatccaaagttgctaccacttaaatgcaagtttcgcaaacggttatattgccaggatgatgagtctgcaaccacagaaagtttaggatatgatggtattttcatgaacaagacctctgggacggacatggtcagcatacctgaagaattggactcttgtgagaacactataagcctgttttgtggatgcattgaagttgactcaaaaaatggaattcaggaacaatctttgagaaaaatgtttgagatccggacatctgcatccagtagctcgagcaacaatttttcatcagaggcttttagttcttcccatagcagcggcacgagagacactgacagctgggctatggacgatatagagcgtcatcatccatatgtgatgctgaaaccgcataatgacgaccttgaaaggatattcaacgtgcttgaacagtatgatgacctaatggaggacgaactaatggctggcgatgtttttggttctgctgctcaggtcatggatgaaaagctttactcgaatagcgttgacgattttcagattttgccaacaggtcagactggctatcacggtgagaagaagctaaccatcgatcaagaatttgagcagtattttgcgaacctcatgctgtaggatcgagtggataattttgtgacagaaatggcgttgcgacatccaaacatggtttgcttgctgagcaaagtggcgaaccttggctaccattggagctatcgttctatggtgctgtttggtaacataaatggtaatgataataattcacacctgagtaccaacgacccgagtaccaacggtaacaagtttaaataggtcgatattagttcttagtgtggtatctgattacgattggatttaaacaaacataatttaatgagttacatgacgttccattgtttttcagtctccataacatagcaggcactgttaagtgcacatctccatctttggttatgtttcggtctgcagttctaaatgcagggtatcggatctcaagcacccatgttaacccacttgggattaaatctgatgccccttgggatgttatttgggacatcatgcggtgctgggtgaagaatcatcctattaaggaacagccacgtgactcacctggcacggtgatcctttcaaaatcgccaaagctagaagcaaatttttcaagagcagttgctgccctcagcaaggctcagacaaataagattaaacgattccttccaaaccccgaacggcactggggtccgaaggtcagagcagggcggaagatcacgagcaaacatgtctctctgttgggccctgacgctatcaagggtgctgtgaacggtggtgactgccagaaagaaggaaacggtgctgagccagatagtacagcctcagaacccgaggggatcaaagacgttgaggatgagccctcaaacaaacgccaaaaaaccagcgacggcgaaccagcaagcgaaccttgatttgtttgtcaatctttcgcgtctccattgtgttgtgcctgtgcttttcttgtttgtaggtggtcgatggttatttataccacctgttggattttgaacgaacaaattgtggcaggtttttattaaacttttgttgcatgtgtgatgctcctcctagtcacagagggaaaagacctattaaagcataatatatagtatagctttctgcaatgtcgagac

SEQ ID NO: 1211 - DNA, 2267 bp, Zea Mays
ggaccacctaaccaaacaaggccacattgggtgcacgggaggaggcctgggctgccacaacccacaaggaggccagggaccaatcacagacagtcatcttctcccgttcacgtaacgtgcactagggtttatggtttagggcgaccgccgccgtcctacgtccagcggccaggttttcttctggccctctgcgctgactacaacccaccacctccggttttggatttggagacatggcggaagtggtggacaagctcaaggactacgatatcaagaaggagggagaagcagagatcctcctgcacaagaagaactccgtcttctttaatcccgtgcaggttcacaacagagacatgtccattgctgttttaaggacctttgttgccaagcgtaaggaagaacatgaagcgctggtggacaagaggaatacatcacataaaaaaaataaacaaagtgaaacatccagtcaaaatggagaggatgcgtcaactggccagcaagatgaaatggatgttgtttgtgaaaaggagctgaataaagctgaagatcaaattgatgatctgtcgaaagaagcaacagaaccttcttggaaagtaaccagagagcttaagccaccacttgttcttgaggctttggctgctactgggttgcggtctctccggtatgcccgtgaagttgagggcttaggaaaggtagttgctctggacaatgataaagcttctattgaagattgcaaacgaaacataaagttcaatggtgcttccgctactagtaaggtggaagcttacttggttgatgctcgaattcacatgctgacgcatccaaaagaatttgatgtggttgatcttgacccttatggatcaccatctatatttctcgactcagctgtacaggctgttgctgatggtggtctattgatgtgcactgccactgatttggcagttctttgtggtaccaatggagaagtttgttacgcgaagtatggttcattcccaaccaagggcaagtattgccatgaaatggctttgagaattctccttgccagtattgagagccatgctaatcggtacaagcgatatattgtgcctgttctctctgttttcatggatttttatatccgtgtttttgttcgagtattcacttctgcaagtgaaataaagaatacacctcttaaactttcttacatatatcagtgtgttggctgtgattctttccatcttcaatgtcttgcaaggactgttcagaagaagaataatggtgtgaagcatgcacctgctattggacctgttgttcctcaggagtgcagtgactgtggaaagaaatttaatgtaggtggaccaatatggtcagctcctattcatgaccaagactgggtactttctactttgacaggtgttaagtcaatgaaggatagataccctgcatatgataaaataacttcagttctaaatactatgtcagaggagttacatgacgttccattgtttttcagtctccataacatagcaggcactgttaagtgcacatctccatctttggttatgtttcggtctgcagttctaaatgcagggtatcggatctcaagcacccatgttaacccacttgggattaaatctgatgccccttgggatgttatttgggacatcatgcggtgctgggtgaagaatcatcctattaaggaacagccacgtgactcacctggcacggtgatcctttcaaaatcgccaaagctagaagcaaatttttcaagagcagttgctgccctcagcaaggctcagacaaataagattaaacgattccttccaaaccccgaacggcactggggtccgaaggtcagagcagggcggaagatcacgagcaaacatgtctctctgttgggccctgacgctatcaagggtgctgtgaacggtggtgactgccagaaagaaggaaacggtgctgagccagatagtacagcctcagaacccgaggggatcaaagacgttgaggatgagccctcaaacaaacgccaaaaaaccagcgacggcgaaccagcaagcgaaccttgatttgtttgtcaatctttcgcgtctccattgtgttgtgcctgtgcttttcttgtttgtaggtggtcgatggttatttataccacctgttggattttgaacgaacaaattgtggcaggtttttattaaacttttgttgcatgtgtgatgctcctcctagtcacagagggaaaagacctattaaagcataatatatagtatagctttctgcaatgtcgagac

SEQ ID NO: 1212 - DNA, 2216 bp, Zea Mays
ccaaacaaggccacattgggtgcacgggaggaggcctgggctgccacaacccacaaggaggccagggaccaatcacagacagtcatcttctcccgttcacgtaacgtgcactagggtttatggtttagggcgaccgccgccgtcctacgtccagcggccaggttttcttctggccctctgcgctgactacaacccaccacctccgggttaggttttggatttggagacatggcggaagtggtggacaagctcaaggactacgatatcaagaaggagggagaagcagagatcctcctgcacaagaagaactccgtcttctttaatcccgtgcaggttcacaacagagacatgtccattgctgttttaaggacctttgttgccaagcgtaaggaagaacatgaagcgctggtggacaagaggaatacatcacataaaaaaaataaacaaagtgaaacatccagtcaaaatggagaggatgcgtcaactggccagcaagatgaaatggatgttgtttgtgaaaaggagctgaataaagctgaagatcaaattgatgatctgtcgaaagaagcaacagaaccttcttggaaagtaaccagagagcttaagccaccacttgttcttgaggctttggctgctactgggttgcggtctctccggtatgcccgtgaagttgagggcttaggaaaggtagttgctctggacaatgataaagcttctattgaagattgcaaacgaaacataaagttcaatggtgcttccgctactagtaaggtggaagcttacttggttgatgctcgaattcacatgctgacgcatccaaaagaatttgatgtgctgtacaggctgttgctgatggtggtctattgatgtgcactgccactgatttggcagttctttgtggtaccaatggagaagtttgttacgcgaagtatggttcattcccaaccaagggcaagtattgccatgaaatggctttgagaattctccttgccagtattgagagccatgctaatcggtacaagcgatatattgtgcctgttctctctgttttcatggatttttatatccgtgtttttgttcgagtattcacttctgcaagtgaaataaagaatacacctcttaaactttcttacatatatcagtgtgttggctgtgattctttccatcttcaatgtcttgcaaggactgttcagaagaagaataatggtgtgaagcatgcacctgctattggacctgttgttcctcaggagtgcagtgactgtggaaagaaatttaatgtaggtggaccaatatggtcagctcctattcatgaccaagactgggtactttctactttgacaggtgttaagtcaatgaaggatagataccctgcatatgataaaataacttcagttctaaatactatgtcagaggagttacatgacgttccattgtttttcagtctccataacatagcaggcactgttaagtgcacatctccatctttggttatgtttcggtctgcagttctaaatgcagggtatcggatctcaagcacccatgttaacccacttgggattaaatctgatgccccttgggatgttatttgggacatcatgcggtgctgggtgaagaatcatcctattaaggaacagccacgtgactcacctggcacggtgatcctttcaaaatcgccaaagctagaagcaaatttttcaagagcagttgctgccctcagcaaggctcagacaaataagattaaacgattccttccaaaccccgaacggcactggggtccgaaggtcagagcagggcggaagatcacgagcaaacatgtctctctgttgggccctgacgctatcaagggtgctgtgaacggtggtgactgccagaaagaaggaaacggtgctgagccagatagtacagcctcagaacccgaggggatcaaagacgttgaggatgagccctcaaacaaacgccaaaaaaccagcgacggcgaaccagcaagcgaaccttgatttgtttgtcaatctttcgcgtctccattgtgttgtgcctgtgcttttcttgtttgtaggtggtcgatggttatttataccacctgttggattttgaacgaacaaattgtggcaggtttttattaaacttttgttgcatgtgtgatgctcctcctagtcacagagggaaaagacctattaaagcataatatatagtatagctttctgcaatgtcgagac

SEQ ID NO: 1213 - DNA, 1936 bp, Zea Mays
ctgggctgccacaacccacaaggaggccagggaccaatcacagacagtcatcttctcccgttcacgtaacgtgcactagggtttatggtttagggcgaccgccgccgtcctacgtccagcggccaggttttcttctggccctctgcgctgactacaacccaccacctccgggttaggttttggatttggagacatggcggaagtggtggacaagctcaaggactacgatatcaagaaggagggagaagcagagatcctcctgcacaagaagaactccgtcttctttaatcccgtgcaggctttggctgctactgggttgcggtctctccggtatgcccgtgaagttgagggcttaggaaaggtagttgctctggacaatgataaagcttctattgaagattgcaaacgaaacataaagttcaatggtgcttccgctactagtaaggtggaagcttacttggttgatgctcgaattcacatgctgacgcatccaaaagaatttgatgtggttgatcttgacccttatggatcaccatctatatttctcgactcagctgtacaggctgttgctgatggtggtctattgatgtgcactgccactgatttggcagttctttgtggtaccaatggagaagtttgttacgcgaagtatggttcattcccaaccaagggcaagtattgccatgaaatggctttgagaattctccttgccagtattgagagccatgctaatcggtacaagcgatatattgtgcctgttctctctgttttcatggatttttatatccgtgtttttgttcgagtattcacttctgcaagtgaaataaagaatacacctcttaaactttcttacatatatcagtgtgttggctgtgattctttccatcttcaatgtcttgcaaggactgttcagaagaagaataatggtgtgaagcatgcacctgctattggacctgttgttcctcaggagtgcagtgactgtggaaagaaatttaatgtaggtggaccaatatggtcagctcctattcatgaccaagactgggtactttctactttgacaggtgttaagtcaatgaaggatagataccctgcatatgataaaataacttcagttctaaatactatgtcagaggagttacatgacgttccattgtttttcagtctccataacatagcaggcactgttaagtgcacatctccatctttggttatgtttcggtctgcagttctaaatgcagggtatcggatctcaagcacccatgttaacccacttgggattaaatctgatgccccttgggatgttatttgggacatcatgcggtgctgggtgaagaatcatcctattaaggaacagccacgtgactcacctggcacggtgatcctttcaaaatcgccaaagctagaagcaaatttttcaagagcagttgctgccctcagcaaggctcagacaaataagattaaacgattccttccaaaccccgaacggcactggggtccgaaggtcagagcagggcggaagatcacgagcaaacatgtctctctgttgggccctgacgctatcaagggtgctgtgaacggtggtgactgccagaaagaaggaaacggtgctgagccagatagtacagcctcagaacccgaggggatcaaagacgttgaggatgagccctcaaacaaacgccaaaaaaccagcgacggcgaaccagcaagcgaaccttgatttgtttgtcaatctttcgcgtctccattgtgttgtgcctgtgcttttcttgtttgtaggtggtcgatggttatttataccacctgttggattttgaacgaacaaattgtggcaggtttttattaaacttttgttgcatgtgtgatgctcctcctagtcacagagggaaaagacctattaaagcataatatatagtatagctttctgcaatgtcgagac

SEQ ID NO: 1214 - DNA, 2171 bp, Zea Mays
gggctgccacaacccacaaggaggccagggaccaatcacagacagtcatcttctcccgttcacgtaacgtgcactagggtttatggtttagggcgaccgccgccgtcctacgtccagcggccaggttttcttctggccctctgcgctgactacaacccaccacctccgggttaggttttggatttggagacatggcggaagtggtggacaagctcaaggactacgatatcaagaaggagggagaagcagagatcctcctgcacaagaagaactccgtcttctttaatcccgtgcaggttcacaacagagacatgtccattgctgttttaaggacctttgttgccaagcgtaaggaagaacatgaagcgctggtggacaagaggaatacatcacataaaaaaaataaacaaagtgaaacatccagtcaaaatggagaggatgcgtcaactggccagcaagatgaaatggatgttgtttgtgaaaaggagctgaataaagctgaagatcaaattgatgatctgtcgaaagaagcaacagaaccttcttggaaagtaaccagagagcttaagccaccacttgttcttgaggctttggctgctactgggttgcggtctctccggtatgcccgtgaagttgagggcttaggaaaggtagttgctctggacaatgataaagcttctattgaagattgcaaacgaaacataaagttcaatggtgcttccgctactagtaaggtggaagcttacttggttgatgctcgaattcacatgctgacgcatccaaaagaatttgatgtggctgttgctgatggtggtctattgatgtgcactgccactgatttggcagttctttgtggtaccaatggagaagtttgttacgcgaagtatggttcattcccaaccaagggcaagtattgccatgaaatggctttgagaattctccttgccagtattgagagccatgctaatcggtacaagcgatatattgtgcctgttctctctgttttcatggatttttatatccgtgtttttgttcgagtattcacttctgcaagtgaaataaagaatacacctcttaaactttcttacatatatcagtgtgttggctgtgattctttccatcttcaatgtcttgcaaggactgttcagaagaagaataatggtgtgaagcatgcacctgctattggacctgttgttcctcaggagtgcagtgactgtggaaagaaatttaatgtaggtggaccaatatggtcagctcctattcatgaccaagactgggtactttctactttgacaggtgttaagtcaatgaaggatagataccctgcatatgataaaataacttcagttctaaatactatgtcagaggagttacatgacgttccattgtttttcagtctccataacatagcaggcactgttaagtgcacatctccatctttggttatgtttcggtctgcagttctaaatgcagggtatcggatctcaagcacccatgttaacccacttgggattaaatctgatgccccttgggatgttatttgggacatcatgcggtgctgggtgaagaatcatcctattaaggaacagccacgtgactcacctggcacggtgatcctttcaaaatcgccaaagctagaagcaaatttttcaagagcagttgctgccctcagcaaggctcagacaaataagattaaacgattccttccaaaccccgaacggcactggggtccgaaggtcagagcagggcggaagatcacgagcaaacatgtctctctgttgggccctgacgctatcaagggtgctgtgaacggtggtgactgccagaaagaaggaaacggtgctgagccagatagtacagcctcagaacccgaggggatcaaagacgttgaggatgagccctcaaacaaacgccaaaaaaccagcgacggcgaaccagcaagcgaaccttgatttgtttgtcaatctttcgcgtctccattgtgttgtgcctgtgcttttcttgtttgtaggtggtcgatggttatttataccacctgttggattttgaacgaacaaattgtggcaggtttttattaaacttttgttgcatgtgtgatgctcctcctagtcacagagggaaaagacctattaaagcataatatatagtatagctttctgcaatgtcgagac

SEQ ID NO: 1215 - DNA, 1808 bp, Zea Mays
gggctgccacaacccacaaggaggccagggaccaatcacagacagtcatcttctcccgttcacgtaacgtgcactagggtttatggtttagggcgaccgccgccgtcctacgtccagcggccaggttttcttctggccctctgcgctgactacaacccaccacctccggttttggatttggagacatggcggaagtggtggacaagctcaaggactacgatatcaagaaggagggagaagcagagatcctcctgcacaagaagaactccgtcttctttaatcccgtgcaggttcacaacagagacatgtccattgctgttttaaggacctttgttgccaagcgtaaggaagaacatgaagcgctggtggacaagaggaatacatcacataaaaaaaataaacaaagtgaaacatccagtcaaaatggagaggatgcgtcaactggccagcaagatgaaatggatgttgtttgtgaaaaggagctgaataaagctgaagatcaaattgatgatctgtcgaaagaagcaacagaaccttcttggaaagtaaccagagagcttaagccaccacttgttcttgaggctttggctgctactgggttgcggtctctccggtatgcccgtgaagttgagggcttaggaaaggtagttgctctggacaatgataaagcttctattgaagattgcaaacgaaacataaagttcaatggtgcttccgctactagtaaggtggaagcttacttggttgatgctcgaattcacatgctgacgcatccaaaagaatttgatgtggttgatcttgacccttatggatcaccatctatatttctcgactcagctgtacaggctgttgctgatggtggtctattgatgtgcactgccactgatttggcagttctttgtggtaccaatggagaagtttgttacgcgaagtatggttcattcccaaccaagggcaagtattgccatgaaatggctttgagaattctccttgccagtattgaggagttacatgacgttccattgtttttcagtctccataacatagcaggcactgttaagtgcacatctccatctttggttatgtttcggtctgcagttctaaatgcagggtatcggatctcaagcacccatgttaacccacttgggattaaatctgatgccccttgggatgttatttgggacatcatgcggtgctgggtgaagaatcatcctattaaggaacagccacgtgactcacctggcacggtgatcctttcaaaatcgccaaagctagaagcaaatttttcaagagcagttgctgccctcagcaaggctcagacaaataagattaaacgattccttccaaaccccgaacggcactggggtccgaaggtcagagcagggcggaagatcacgagcaaacatgtctctctgttgggccctgacgctatcaagggtgctgtgaacggtggtgactgccagaaagaaggaaacggtgctgagccagatagtacagcctcagaacccgaggggatcaaagacgttgaggatgagccctcaaacaaacgccaaaaaaccagcgacggcgaaccagcaagcgaaccttgatttgtttgtcaatctttcgcgtctccattgtgttgtgcctgtgcttttcttgtttgtaggtggtcgatggttatttataccacctgttggattttgaacgaacaaattgtggcaggtttttattaaacttttgttgcatgtgtgatgctcctcctagtcacagagggaaaagacctattaaagcataatatatagtatagctttctgcaatgtcgagac

SEQ ID NO: 1216 - DNA, 2085 bp, Zea Mays
gggctgccacaacccacaaggaggccagggaccaatcacagacagtcatcttctcccgttcacgtaacgtgcactagggtttatggtttagggcgaccgccgccgtcctacgtccagcggccaggttttcttctggccctctgcgctgactacaacccaccacctccgggttaggttttggatttggagacatggcggaagtggtggacaagctcaaggactacgatatcaagaaggagggagaagcagagatcctcctgcacaagaagaactccgtcttctttaatcccgtgcaggttcacaacagagacatgtccattgctgttttaaggacctttgttgccaagcgtaaggaagaacatgaagcgctggtggacaagaggaatacatcacataaaaaaaataaacaaagtgaaacatccagtcaaaatggagaggatgcgtcaactggccagcaagatgaaatggatgttgtttgtgaaaaggagctgaataaagctgaagatcaaattgatgatctgtcgaaagaagcaacagaaccttcttggaaagtaaccagagagcttaagccaccacttgttcttgaggctttggctgctactgggttgcggtctctccggtatgcccgtgaagttgagggcttaggaaaggtagttgctctggacaatgataaagcttctattgaagattgcaaacgaaacataaagttcaatggtgcttccgctactagtaaggtggaagcttacttggttgatgctcgaattcacatgctgacgcatccaaaagaatttgatgtggtatggttcattcccaaccaagggcaagtattgccatgaaatggctttgagaattctccttgccagtattgagagccatgctaatcggtacaagcgatatattgtgcctgttctctctgttttcatggatttttatatccgtgtttttgttcgagtattcacttctgcaagtgaaataaagaatacacctcttaaactttcttacatatatcagtgtgttggctgtgattctttccatcttcaatgtcttgcaaggactgttcagaagaagaataatggtgtgaagcatgcacctgctattggacctgttgttcctcaggagtgcagtgactgtggaaagaaatttaatgtaggtggaccaatatggtcagctcctattcatgaccaagactgggtactttctactttgacaggtgttaagtcaatgaaggatagataccctgcatatgataaaataacttcagttctaaatactatgtcagaggagttacatgacgttccattgtttttcagtctccataacatagcaggcactgttaagtgcacatctccatctttggttatgtttcggtctgcagttctaaatgcagggtatcggatctcaagcacccatgttaacccacttgggattaaatctgatgccccttgggatgttatttgggacatcatgcggtgctgggtgaagaatcatcctattaaggaacagccacgtgactcacctggcacggtgatcctttcaaaatcgccaaagctagaagcaaatttttcaagagcagttgctgccctcagcaaggctcagacaaataagattaaacgattccttccaaaccccgaacggcactggggtccgaaggtcagagcagggcggaagatcacgagcaaacatgtctctctgttgggccctgacgctatcaagggtgctgtgaacggtggtgactgccagaaagaaggaaacggtgctgagccagatagtacagcctcagaacccgaggggatcaaagacgttgaggatgagccctcaaacaaacgccaaaaaaccagcgacggcgaaccagcaagcgaaccttgatttgtttgtcaatctttcgcgtctccattgtgttgtgcctgtgcttttcttgtttgtaggtggtcgatggttatttataccacctgttggattttgaacgaacaaattgtggcaggtttttattaaacttttgttgcatgtgtgatgctcctcctagtcacagagggaaaagacctattaaagcataatatatagtatagctttctgcaatgtcgagac

SEQ ID NO: 1217 - DNA, 2060 bp, Zea Mays
gggctgccacaacccacaaggaggccagggaccaatcacagacagtcatcttctcccgttcacgtaacgtgcactagggtttatggtttagggcgaccgccgccgtcctacgtccagcggccaggttttcttctggccctctgcgctgactacaacccaccacctccgggttaggttttggatttggagacatggcggaagtggtggacaagctcaaggactacgatatcaagaaggagggagaagcagagatcctcctgcacaagaagaactccgtcttctttaatcccgtgcaggttcacaacagagacatgtccattgctgttttaaggacctttgttgccaagcgtaaggaagaacatgaagcgctggtggacaagaggaatacatcacataaaaaaaataaacaaagtgaaacatccagtcaaaatggagaggatgcgtcaactggccagcaagatgaaatggatgttgtttgtgaaaaggagctgaataaagctgaagatcaaattgatgatctgtcgaaagaagcaacagaaccttcttggaaagtaaccagagagcttaagccaccacttgttcttgaggctttggctgctactgggttgcggtctctccggtatgcccgtgaagttgagggcttaggaaaggtagttgctctggacaatgataaagcttctattgaagattgcaaacgaaacataaagttcaatggtgcttccgctactagtaaggtggaagcttacttggttgatgctcgaattcacatgctgacgcatccaaaagaatttgatgtggttgatcttgacccttatggatcaccatctatatttctcgactcagctgtacaggctgttgctgatggtggtctattgatgtgcactgccactgatttggcagttctttgtggtaccaatggagaagtttgttacgcgaagtatggttcattcccaaccaagggcaagtattgccatgaaatggctttgagaattctccttgccagtattgagagccatgctaatcggtacaagcgatatattgtgcctgttctctctgttttcatggatttttatatccgtgtttttgttcgagtattcacttctgcaagtgaaataaagaatacacctcttaaactttcttacatatatcagtgtgttggctgtgattctttccatcttcaatgtcttgcaaggactgttcagaagaagaataatggtgtgaagcatgcacctgctattggacctgttgttcctcaggagtgcagtgactgtggaaagaaatttaatgtaggtggaccaatatggtcagctcctattcatgaccaagactgggtactttctactttgacagttctaaatgcagggtatcggatctcaagcacccatgttaacccacttgggattaaatctgatgccccttgggatgttatttgggacatcatgcggtgctgggtgaagaatcatcctattaaggaacagccacgtgactcacctggcacggtgatcctttcaaaatcgccaaagctagaagcaaatttttcaagagcagttgctgccctcagcaaggctcagacaaataagattaaacgattccttccaaaccccgaacggcactggggtccgaaggtcagagcagggcggaagatcacgagcaaacatgtctctctgttgggccctgacgctatcaagggtgctgtgaacggtggtgactgccagaaagaaggaaacggtgctgagccagatagtacagcctcagaacccgaggggatcaaagacgttgaggatgagccctcaaacaaacgccaaaaaaccagcgacggcgaaccagcaagcgaaccttgatttgtttgtcaatctttcgcgtctccattgtgttgtgcctgtgcttttcttgtttgtaggtggtcgatggttatttataccacctgttggattttgaacgaacaaattgtggcaggtttttattaaacttttgttgcatgtgtgatgctcctcctagtcacagagggaaaagacctattaaagcataatatatagtatagctttctgcaatgtcgagac

SEQ ID NO: 1218 - DNA, 2107 bp, Zea Mays
gggctgccacaacccacaaggaggccagggaccaatcacagacagtcatcttctcccgttcacgtaacgtgcactagggtttatggtttagggcgaccgccgccgtcctacgtccagcggccaggttttcttctggccctctgcgctgactacaacccaccacctccgggttaggttttggatttggagacatggcggaagtggtggacaagctcaaggactacgatatcaagaaggagggagaagcagagatcctcctgcacaagaagaactccgtcttctttaatcccgtgcaggttcacaacagagacatgtccattgctgttttaaggacctttgttgccaagcgtaaggaagaacatgaagcgctggtggacaagaggaatacatcacataaaaaaaataaacaaagtgaaacatccagtcaaaatggagaggatgcgtcaactggccagcaagatgaaatggatgttgtttgtgaaaaggagctgaataaagctgaagatcaaattgatgatctgtcgaaagaagcaacagaaccttcttggaaagtaaccagagagcttaagccaccacttgttcttgaggctttggctgctactgggttgcggtctctccggtatgcccgtgaagttgagggcttaggaaaggtagttgctctggacaatgataaagcttctattgaagattgcaaacgaaacataaagttcaatggtgcttccgctactagtaaggtggaagcttacttggttgatgctcgaattcacatgctgacgcatccaaaagaatttgatgtggttgatcttgacccttatggatcaccatctatatttctcgactcagctgtacaggctgttgctgatggtggtctattgatgtgcactgccactgatttggcagttctttgtggtaccaatggagaagtttgttacgcgaagtatggttcattcccaaccaagggcaagtattgccatgaaatggctttgagaattctccttgccagtattgagagccatgctaatcggtacaagcgatatattgtgcctgttctctctgttttcatggatttttatatccgtgtttttgttcgagtattcacttctgcaagtgaaataaagaatacacctcttaaactttcttacatatatcagtgtgttggctgtgattctttccatcttcaatgtcttgcaaggactgttcagaagaagaataatggtgtgaagcatgcacctgctattggacctgttgttcctcaggagtgcagtgactgtggaaagaaatttaatgtaggtggaccaatatggagttacatgacgttccattgtttttcagtctccataacatagcaggcactgttaagtgcacatctccatctttggttatgtttcggtctgcagttctaaatgcagggtatcggatctcaagcacccatgttaacccacttgggattaaatctgatgccccttgggatgttatttgggacatcatgcggtgctgggtgaagaatcatcctattaaggaacagccacgtgactcacctggcacggtgatcctttcaaaatcgccaaagctagaagcaaatttttcaagagcagttgctgccctcagcaaggctcagacaaataagattaaacgattccttccaaaccccgaacggcactggggtccgaaggtcagagcagggcggaagatcacgagcaaacatgtctctctgttgggccctgacgctatcaagggtgctgtgaacggtggtgactgccagaaagaaggaaacggtgctgagccagatagtacagcctcagaacccgaggggatcaaagacgttgaggatgagccctcaaacaaacgccaaaaaaccagcgacggcgaaccagcaagcgaaccttgatttgtttgtcaatctttcgcgtctccattgtgttgtgcctgtgcttttcttgtttgtaggtggtcgatggttatttataccacctgttggattttgaacgaacaaattgtggcaggtttttattaaacttttgttgcatgtgtgatgctcctcctagtcacagagggaaaagacctattaaagcataatatatagtatagctttctgcaatgtcgagac

SEQ ID NO: 1219 - DNA, 334 bp, Zea Mays
cggacctccgtcatatcacatggtcgcccatttcttgcgagcactttggtcagttggtcttctctctcggatcgcggttggggggttgcggaatgggagcaaaggcggaggagtgtgaggtgccgccgctggctgcgaacgcggaggaggcagcttccaccaatcagtgcaccctcatcttcaaaggctgctgtaaagataaaccacaagctgaggatctcatgtgtcgttgtatatgatctgatattagccccagcccaccaaatgtcaggatcgggcatgttgttgcggttgagtacccatatgtgacagcacataatcaacaagtgatgtc

SEQ ID NO: 1220 - DNA, 217 bp, Zea Mays
ctccgtcatatcacatggtcgcccatttcttgcgagcactttggtcagttggtcttctctctcggatcgcggttggggggttgcggaatgggagcaaaggcggaggagtgtgaggtgccgccgctggctgcgaacgcggaggaggcagcttccaccaatcagtgcaccctcatcttcaaaggctgataaaccacaagctgaggatctcatgtgtcgt

SEQ ID NO: 1221 - DNA, 1740 bp, Zea Mays
gattggaatctctgggcgactcgacctgaacaaccccgcccgccgtcctgcccttgtgctctagtcctcccgcgaccgttccaaattcttcctcgcgttcgtattccacgcggcgacgtcgccatcgccatcgcggccgccgctccgcccctcttccttcgcatatacgtaggctgcttggttatgaaggccttgaagttattaaccccgatggaggcacagatgatgctgaagaagaagctttgaaggggagatggaagcaggaggaccgtgatagctactggaagatgatgcacaaatacataggatcagatgttacatcacttgtgacacttccagtcataatttttgagccaatgacaatgcttcagaaaatggccgagttgatggaatactgtgaattgttagacaaagcagatgaatgtgaggatccatacatgtgtatggtttatgcttctacatgggctgtttctgtgtactttgcatatcaacgcacatggaagccttttaatccgatccttggagagacttatgagatggttaaccaccagggcattacatttcttgctgagcaggtaagccatcatcccccaatgggtgttgctcactgcgagaatgaacattttacttacgatatcacgtctaagttgaagaccaagtttttgggaaattcagtggaaatttacccagttggaaggactcgagtgacactaaaaaaatctggtgtcgtgttggatttggtgccaccactaacaaaggttaacaacctgatatttgggcgcacttgggttgattctcctggagagatggtcatgacgaacctgacaactggagacaaagttgtgctatatttccagccatgcggctggtttggggctggccgttacgaggtggatgggtatgtgtacagtgcagcggaagaacccaaaatcatgattacagggaagtggaacaagtccctgagttgccaaccatgtgaccaagaaggcgatcctcttccaggcacggagctgaaggagatctggagagttgctcctgccccacagggcgacaagtatcagtacacacacttcgcacacaaaataaacagcttcgacacggcacctaagaagctgttggcatctgattcacggctgaggcctgatagatatgccctcgagaagggtgacatgtctaagtccggggcagagaagagcaggctcgaggaacaacagagagctgagaaacgaactcgagaggccaagggcgagcaatttactcctagatggttcaacctgacagatgtggtctcccctacaccgtggggtgacctggaaatttatgaatacaacggcaaatacacagagcaccgggctgccatagaccgctccgatgtcaccgacgagacagatgtcacttcagtcaagttcagcccatggcaatatggtagctcatcttcccaatgattctccgtggccagaagccgccatgcctacgcgcattgtgtaaaacacttccaggcctggctttgctggtttgttgtgccatcagcggtttccttgcccttgtagtattgtggccttcccccttttttcccttaaatgctacagttattcaggaagtggtgtagtccgtgtactgtcgcaagtctagcgagattgcagagttttgttgaaccgttgtgctgttgtatttatgcgagataactgataaccgaaggtaacgaacgacacagatacggatggaatcatggagctggag

SEQ ID NO: 1222 - DNA, 1824 bp, Zea Mays
gattggaatctctgggcgactcgacctgaacaaccccgcccgccgtcctgcccttgtgctctagtcctcccgcgaccgttccaaattcttcctcgcgttcgtattccacgcggcgacgtcgccatcgccatcgcggccgccgctccgcccctcttccttcgcatatacgtaggtaggcgcctccccaaaccctaagcctttatctcccacgcgcgcggctcgctctgctgcgccgcggctcgctcgaccccgcagatcgccggcgatgggatccaaggaccaggacggaggggctgcatcctcgggaggcggcttcttctcgtcgttcgccgccggcatgcgcagctggggcaccgccgtgcataaatccgtcaacgggctgcttggttatgaaggccttgaagttattaaccccgatggaggcacagatgatgctgaagaagaagctttgaaggggagatggaagcaggaggaccgtgatagctactggaagatgatgcacaaatacataggatcagatgttacatcacttgtgacacttccagtcataatttttgagccaatgacaatgcttcagaaaatggccgagttgatggaatactgtgaattgttagacaaagcagatgaatgtgaggatccatacatgtgtatggtttatgcttctacatgggctgtttctgtgtactttgcatatcaacgcacatggaagccttttaatccgatccttggagagacttatgagatggttaaccaccagggcattacatttcttgctgagcaggactcgagtgacactaaaaaaatctggtgtcgtgttggatttggtgccaccactaacaaaggttaacaacctgatatttgggcgcacttgggttgattctcctggagagatggtcatgacgaacctgacaactggagacaaagttgtgctatatttccagccatgcggctggtttggggctggccgttacgaggtggatgggtatgtgtacagtgcagcggaagaacccaaaatcatgattacagggaagtggaacaagtccctgagttgccaaccatgtgaccaagaaggcgatcctcttccaggcacggagctgaaggagatctggagagttgctcctgccccacagggcgacaagtatcagtacacacacttcgcacacaaaataaacagcttcgacacggcacctaagaagctgttggcatctgattcacggctgaggcctgatagatatgccctcgagaagggtgacatgtctaagtccggggcagagaagagcaggctcgaggaacaacagagagctgagaaacgaactcgagaggccaagggcgagcaatttactcctagatggttcaacctgacagatgtggtctcccctacaccgtggggtgacctggaaatttatgaatacaacggcaaatacacagagcaccgggctgccatagaccgctccgatgtcaccgacgagacagatgtcacttcagtcaagttcagcccatggcaatatggtagctcatcttcccaatgattctccgtggccagaagccgccatgcctacgcgcattgtgtaaaacacttccaggcctggctttgctggtttgttgtgccatcagcggtttccttgcccttgtagtattgtggccttcccccttttttcccttaaatgctacagttattcaggaagtggtgtagtccgtgtactgtcgcaagtctagcgagattgcagagttttgttgaaccgttgtgctgttgtatttatgcgagataactgataaccgaaggtaacgaacgacacagatacggatggaatcatggagctggag

SEQ ID NO: 1223 - DNA, 1521 bp, Zea Mays
tagtcctgtgacgtttgcaggcttgcttgttggtcatgaagtagcgagaccgtgatagctactggaagatgatgcacaaatacataggatcagatgttacatcacttgtgacacttccagtcataatttttgagccaatgacaatgcttcagaaaatggccgagttgatggaatactgtgaattgttagacaaagcagatgaatgtgaggatccatacatgtgtatggtttatgcttctacatgggctgtttctgtgtactttgcatatcaacgcacatggaagccttttaatccgatccttggagagacttatgagatggttaaccaccagggcattacatttcttgctgagcaggtaagccatcatcccccaatgggtgttgctcactgcgagaatgaacattttacttacgatatcacgtctaagttgaagaccaagtttttgggaaattcagtggaaatttacccagttggaaggactcgagtgacactaaaaaaatctggtgtcgtgttggatttggtgccaccactaacaaaggttaacaacctgatatttgggcgcacttgggttgattctcctggagagatggtcatgacgaacctgacaactggagacaaagttgtgctatatttccagccatgcggctggtttggggctggccgttacgaggtggatgggtatgtgtacagtgcagcggaagaacccaaaatcatgattacagggaagtggaacaagtccctgagttgccaaccatgtgaccaagaaggcgatcctcttccaggcacggagctgaaggagatctggagagttgctcctgccccacagggcgacaagtatcagtacacacacttcgcacacaaaataaacagcttcgacacggcacctaagaagctgttggcatctgattcacggctgaggcctgatagatatgccctcgagaagggtgacatgtctaagtccggggcagagaagagcaggctcgaggaacaacagagagctgagaaacgaactcgagaggccaagggcgagcaatttactcctagatggttcaacctgacagatgtggtctcccctacaccgtggggtgacctggaaatttatgaatacaacggcaaatacacagagcaccgggctgccatagaccgctccgatgtcaccgacgagacagatgtcacttcagtcaagttcagcccatggcaatatggtagctcatcttcccaatgattctccgtggccagaagccgccatgcctacgcgcattgtgtaaaacacttccaggcctggctttgctggtttgttgtgccatcagcggtttccttgcccttgtagtattgtggccttcccccttttttcccttaaatgctacagttattcaggaagtggtgtagtccgtgtactgtcgcaagtctagcgagattgcagagttttgttgaaccgttgtgctgttgtatttatgcgagataactgataaccgaaggtaacgaacgacacagatacggatggaatcatggagctggag

SEQ ID NO: 1224 - DNA, 754 bp, Zea Mays
tactttctttcactttctgctactatggataacatctggagagttgctcctgccccacagggcgacaagtatcagtacacacacttcgcacacaaaataaacagcttcgacacggcacctaagaagctgttggcatctgattcacggctgaggcctgatagatatgccctcgagaagggtgacatgtctaagtccggggcagagaagagcaggctcgaggaacaacagagagctgagaaacgaactcgagaggccaagggcgagcaatttactcctagatggttcaacctgacagatgtggtctcccctacaccgtggggtgacctggaaatttatgaatacaacggcaaatacacagagcaccgggctgccatagaccgctccgatgtcaccgacgagacagatgtcacttcagtcaagttcagcccatggcaatatggtagctcatcttcccaatgattctccgtggccagaagccgccatgcctacgcgcattgtgtaaaacacttccaggcctggctttgctggtttgttgtgccatcagcggtttccttgcccttgtagtattgtggccttcccccttttttcccttaaatgctacagttattcaggaagtggtgtagtccgtgtactgtcgcaagtctagcgagattgcagagttttgttgaaccgttgtgctgttgtatttatgcgagataactgataaccgaaggtaacgaacgacacagatacggatggaatcatggagctggag

SEQ ID NO: 1225 - DNA, 3084 bp, Zea Mays
aacccacaccaccgcaccacgcacctccaccaccagaagaaaaaaccaaggcggagggcggagaggagagcaaggagggtgaagggggaaaagggtaataaaaataaaagaggagaggagaagcaagacgaggaggaagagggagcacccagagatttgtgttggtgacaagccatgaacagcgcaaccaccagttgttaagtaaccctcctgtaaacttgaagcaaccgaagcggagagcagaaatggtgttccaaaagaggtcctcgtcagagttggaggcgtccggtggaggccaagtcgcggagatgccgcgcgttcccaagtctgcgaggggcaagagatcggtcaggaagaaggaggcccagaacccgccccagatgtcagcattcgaccttctcgcgacggtggcagggaagctgcttgatgagggggtgggctcgctggggaacatgagcgctggtgccccagctttgactgcatgcgcgaaggatgtccgtgtgaagaaggagcagtgtgacgaggaaatgaagcagttcaagcatgaggtgacagatcaggatagctgcaatgagagtgcaattctcccgcacattgtgttccagcgggcggtgaataatgctcggaatgaggatcctaaggcgaagtctgaggcccaggacaaggaatcctccatgatcagctgtaccaaggctgaactgggttgtaattttggtgtgattgcagataggtggtcgcctgaatccgtggaatcaggagccttcacaggagatgcagtggcgagcctgatgccacctgccccagcaggatttcataagaatgcacccgaaatgtataatttgcttgattcaatggatgtggatgtcaagcctcctcctttggtcagctctgacagcaccggcgagatgccattgtatggcgataaagttcaccgctcaacctccttaccaagggtctcgaagggagtggggttttttgctgtagatagagatgatgacgacgataagtcctctgggtgcactcatcccagcaccaccactaacaaggatttcaggtccaattgtacagctgagtatagtagggtaaggaagttgctcaccagtaagtacaggaaagttgctccagcgagggtttacaaatctgatctttcctatagtgatgttgatcggaagccttctttccggaacaaaaaaatgcattatacacgacagaggacacaaaggagtacattcaagcgtaggaagctctttgatcgccattcagttctagcatctgaatttggtaccgcacatggaaagggaaacacgaagaaggttaccggaagagactcccatgctgtgtctttggaagcaaacaaggggactagttcaacgccattccagaaatctcgtgggtcaaatgattgccatgtgaaacttaaaattaagtcttttaaggtgcctgaacttcttgttgaaatcccagaaagtgcaactgttggctcactaaagaaaactgttctcgaggcagtgactgcgattctcggaggtggtctacgtgttggtgttcttcaccatggaaagaaagttagagatgataataaaacgttgattcaggctggtattggtcaggaggatatgctggacaaccttggcttttcacttgaacccaactgtacacaaaacccacaagtccaagctcctgaagatatcagtttcctggaaaccattgatactgctgaacccctcgcaaggattgcacctgctgactcgtcttctaagcatggtgaagttgacctatcacaggagtttgcattaaccccattagcaatgaactaccagggcagtgatcatgattctgtgcactcccctgggggcgtctcatcgcccgataaagtctccacaaactcgcgagctttagttccagttccagctgcagatcccaatgcaggagctatagttccagcgaataagtctaagaggtcaccagagcaggggcaacgcagaatcaggcgcccgttctctgttgctgaagtagaagcacttgtgctcgcagtcgaaaagcttggaaccggaaggtggcgagatgttaaacttcgcgcgtttgacaatgcgaagcaccgtacctatgttgatcttaaggacaaatggaagacgctggtgcacaccgcgagcatctcgccgcagcagcggcgtggcgagccggtgcctcaggagctgctcgaccgggtcctggcggcccaggcctactggtcccagcagcaagccaagctccagcctaagacgcccccgctgctggctgaggctcgcttgctcacctaataaattcgatgatcctggctgatggcctcctccgaggccgttgcagcctttgtataaagtcagtaagtcagtcagtcccttcacaggaggtttaaggaagatatattaggaaaaaaaagaatacacatataaggtacaagaagcattgaccgatttgttgtaatatctactcaccaacagatattctttaagccaggattctctctccttgtgaatttaaccaaaggaaagggtatttctttggcaaattgtacatgttgatggtggaagaagaagatgatccatgaactgagatctggggtgccattgctcacaatttttgcagttgtgactgagaaattgaaggtcctgcttgaccaagctcggctccggctccggcttttggattctcctgcgaagaagttgttgcctcctcgcagaagctgagagccgaacagtgtatttggtttgaattgcagcctatagtataatttgattcacccgtacagacggccacaaaaagccgtaaagggagggtagcttcttttgttgagtctaggcttgcgagctgggccaaagcggcaccgaaagaaagcttcagattcttttgttcaattaaattcattcttttgttagtggacagtgacggaaggataggacattaggagggatggatctttggttctcttttccttttttttcttctattaaattagttgtactatgttatgtcaccaatcttgtagttaccctcaaatttgtaattgatgaaattaagaaattggaaggaaatgctttcgtacca

SEQ ID NO: 1226 - DNA, 2988 bp, Zea Mays
ccttgtccgaattctgcttgctttgctccgatccgccgctctgtgctcggataaagagatttgtgttggtgacaagccatgaacagcgcaaccaccagttgttaagtaaccctcctgtaaacttgaagcaaccgaagcggagagcagaaatggtgttccaaaagaggtcctcgtcagagttggaggcgtccggtggaggccaagtcgcggagatgccgcgcgttcccaagtctgcgaggggcaagagatcggtcaggaagaaggaggcccagaacccgccccagatgtcagcattcgaccttctcgcgacggtggcagggaagctgcttgatgagggggtgggctcgctggggaacatgagcgctggtgccccagctttgactgcatgcgcgaaggatgtccgtgtgaagaaggagcagtgtgacgaggaaatgaagcagttcaagcatgaggtgacagatcaggatagctgcaatgagagtgcaattctcccgcacattgtgttccagcgggcggtgaataatgctcggaatgaggatcctaaggcgaagtctgaggcccaggacaaggaatcctccatgatcagctgtaccaaggctgaactgggttgtaattttggtgtgattgcagataggtggtcgcctgaatccgtggaatcaggagccttcacaggagatgcagtggcgagcctgatgccacctgccccagcaggatttcataagaatgcacccgaaatgtataatttgcttgattcaatggatgtggatgtcaagcctcctcctttggtcagctctgacagcaccggcgagatgccattgtatggcgataaagttcaccgctcaacctccttaccaagggtctcgaagggagtggggttttttgctgtagatagagatgatgacgacgataagtcctctgggtgcactcatcccagcaccaccactaacaaggatttcaggtccaattgtacagctgagtatagtagggtaaggaagttgctcaccagtaagtacaggaaagttgctccagcgagggtttacaaatctgatctttcctatagtgatgttgatcggaagccttctttccggaacaaaaaaatgcattatacacgacagaggacacaaaggagtacattcaagcgtaggaagctctttgatcgccattcagttctagcatctgaatttggtaccgcacatggaaagggaaacacgaagaaggttaccggaagagactcccatgctgtgtctttggaagcaaacaaggggactagttcaacgccattccagaaatctcgtgggtcaaatgattgccatgtgaaacttaaaattaagtcttttaaggtgcctgaacttcttgttgaaatcccagaaagtgcaactgttggctcactaaagaaaactgttctcgaggcagtgactgcgattctcggaggtggtctacgtgttggtgttcttcaccatggaaagaaagttagagatgataataaaacgttgattcaggctggtattggtcaggaggatatgctggacaaccttggcttttcacttgaacccaactgtacacaaaacccacaagtccaagctcctgaagatatcagtttcctggaaaccattgatactgctgaacccctcgcaaggattgcacctgctgactcgtcttctaagcatggtgaagttgacctatcacaggagtttgcattaaccccattagcaatgaactaccagggcagtgatcatgattctgtgcactcccctgggggcgtctcatcgcccgataaagtctccacaaactcgcgagctttagttccagttccagctgcagatcccaatgcaggagctatagttccagcgaataagtctaagaggtcaccagagcaggggcaacgcagaatcaggcgcccgttctctgttgctgaagtagaagcacttgtgctcgcagtcgaaaagcttggaaccggaaggtggcgagatgttaaacttcgcgcgtttgacaatgcgaagcaccgtacctatgttgatcttaaggacaaatggaagacgctggtgcacaccgcgagcatctcgccgcagcagcggcgtggcgagccggtgcctcaggagctgctcgaccgggtcctggcggcccaggcctactggtcccagcagcaagccaagctccagcctaagacgcccccgctgctggctgaggctcgcttgctcacctaataaattcgatgatcctggctgatggcctcctccgaggccgttgcagcctttgtataaagtcagtaagtcagtcagtcccttcacaggaggtttaaggaagatatattaggaaaaaaaagaatacacatataaggtacaagaagcattgaccgatttgttgtaatatctactcaccaacagatattctttaagccaggattctctctccttgtgaatttaaccaaaggaaagggtatttctttggcaaattgtacatgttgatggtggaagaagaagatgatccatgaactgagatctggggtgccattgctcacaatttttgcagttgtgactgagaaattgaaggtcctgcttgaccaagctcggctccggctccggcttttggattctcctgcgaagaagttgttgcctcctcgcagaagctgagagccgaacagtgtatttggtttgaattgcagcctatagtataatttgattcacccgtacagacggccacaaaaagccgtaaagggagggtagcttcttttgttgagtctaggcttgcgagctgggccaaagcggcaccgaaagaaagcttcagattcttttgttcaattaaattcattcttttgttagtggacagtgacggaaggataggacattaggagggatggatctttggttctcttttccttttttttcttctattaaattagttgtactatgttatgtcaccaatcttgtagttaccctcaaatttgtaattgatgaaattaagaaattggaaggaaatgctttcgtacca

SEQ ID NO: 1227 - DNA, 3071 bp, Zea Mays
cttctcctctctctcactctcccttttgatcgcttggcgtgctggtttacctggcgaatttatttgcttgtgcattaaattcagtggcgaaaccatctcgcaagaaaaaacctgaggtcttaactcggatcacgggttgaaatttgtgttggtgacaagccatgaacagcgcaaccaccagttgttaagtaaccctcctgtaaacttgaagcaaccgaagcggagagcagaaatggtgttccaaaagaggtcctcgtcagagttggaggcgtccggtggaggccaagtcgcggagatgccgcgcgttcccaagtctgcgaggggcaagagatcggtcaggaagaaggaggcccagaacccgccccagatgtcagcattcgaccttctcgcgacggtggcagggaagctgcttgatgagggggtgggctcgctggggaacatgagcgctggtgccccagctttgactgcatgcgcgaaggatgtccgtgtgaagaaggagcagtgtgacgaggaaatgaagcagttcaagcatgaggtgacagatcaggatagctgcaatgagagtgcaattctcccgcacattgtgttccagcgggcggtgaataatgctcggaatgaggatcctaaggcgaagtctgaggcccaggacaaggaatcctccatgatcagctgtaccaaggctgaactgggttgtaattttggtgtgattgcagataggtggtcgcctgaatccgtggaatcaggagccttcacaggagatgcagtggcgagcctgatgccacctgccccagcaggatttcataagaatgcacccgaaatgtataatttgcttgattcaatggatgtggatgtcaagcctcctcctttggtcagctctgacagcaccggcgagatgccattgtatggcgataaagttcaccgctcaacctccttaccaagggtctcgaagggagtggggttttttgctgtagatagagatgatgacgacgataagtcctctgggtgcactcatcccagcaccaccactaacaaggatttcaggtccaattgtacagctgagtatagtagggtaaggaagttgctcaccagtaagtacaggaaagttgctccagcgagggtttacaaatctgatctttcctatagtgatgttgatcggaagccttctttccggaacaaaaaaatgcattatacacgacagaggacacaaaggagtacattcaagcgtaggaagctctttgatcgccattcagttctagcatctgaatttggtaccgcacatggaaagggaaacacgaagaaggttaccggaagagactcccatgctgtgtctttggaagcaaacaaggggactagttcaacgccattccagaaatctcgtgggtcaaatgattgccatgtgaaacttaaaattaagtcttttaaggtgcctgaacttcttgttgaaatcccagaaagtgcaactgttggctcactaaagaaaactgttctcgaggcagtgactgcgattctcggaggtggtctacgtgttggtgttcttcaccatggaaagaaagttagagatgataataaaacgttgattcaggctggtattggtcaggaggatatgctggacaaccttggcttttcacttgaacccaactgtacacaaaacccacaagtccaagctcctgaagatatcagtttcctggaaaccattgatactgctgaacccctcgcaaggattgcacctgctgactcgtcttctaagcatggtgaagttgacctatcacaggagtttgcattaaccccattagcaatgaactaccagggcagtgatcatgattctgtgcactcccctgggggcgtctcatcgcccgataaagtctccacaaactcgcgagctttagttccagttccagctgcagatcccaatgcaggagctatagttccagcgaataagtctaagaggtcaccagagcaggggcaacgcagaatcaggcgcccgttctctgttgctgaagtagaagcacttgtgctcgcagtcgaaaagcttggaaccggaaggtggcgagatgttaaacttcgcgcgtttgacaatgcgaagcaccgtacctatgttgatcttaaggacaaatggaagacgctggtgcacaccgcgagcatctcgccgcagcagcggcgtggcgagccggtgcctcaggagctgctcgaccgggtcctggcggcccaggcctactggtcccagcagcaagccaagctccagcctaagacgcccccgctgctggctgaggctcgcttgctcacctaataaattcgatgatcctggctgatggcctcctccgaggccgttgcagcctttgtataaagtcagtaagtcagtcagtcccttcacaggaggtttaaggaagatatattaggaaaaaaaagaatacacatataaggtacaagaagcattgaccgatttgttgtaatatctactcaccaacagatattctttaagccaggattctctctccttgtgaatttaaccaaaggaaagggtatttctttggcaaattgtacatgttgatggtggaagaagaagatgatccatgaactgagatctggggtgccattgctcacaatttttgcagttgtgactgagaaattgaaggtcctgcttgaccaagctcggctccggctccggcttttggattctcctgcgaagaagttgttgcctcctcgcagaagctgagagccgaacagtgtatttggtttgaattgcagcctatagtataatttgattcacccgtacagacggccacaaaaagccgtaaagggagggtagcttcttttgttgagtctaggcttgcgagctgggccaaagcggcaccgaaagaaagcttcagattcttttgttcaattaaattcattcttttgttagtggacagtgacggaaggataggacattaggagggatggatctttggttctcttttccttttttttcttctattaaattagttgtactatgttatgtcaccaatcttgtagttaccctcaaatttgtaattgatgaaattaagaaattggaaggaaatgctttcgtacca

SEQ ID NO: 1228 - DNA, 2097 bp, Zea Mays
gtgctggtttacctggcgaatttatttgcttgtgcattaaattcagtggcgaaaccatctcgcaagaaaaaacctgaggtcttaactcggatcacgggttgaaatttgtgttggtgacaagccatgaacagcgcaaccaccagttgttaagtaaccctcctgtaaacttgaagcaaccgaagcggagagcagaaatggtgttccaaaagaggtcctcgtcagagttggaggcgtccggtggaggccaagtcgcggagatgccgcgcgttcccaagtctgcgaggggcaagagatcggtcaggaagaaggaggcccagaacccgccccagatgtcagcattcgaccttctcgcgacggtggcagggaagctgcttgatgagggggtgggctcgctggggaacatgagcgctggtgccccagctttgactgcatgcgcgaaggatgtccgtgtgaagaaggagcagtgtgacgaggaaatgaagcagttcaagcatgaggtgacagatcaggatagctgcaatgagagtgcaattctcccgcacattgtgttccagcgggcggtgaataatgctcggaatgaggatcctaaggcgaagtctgaggcccaggacaaggaatcctccatgatcagctgtaccaaggctgaactgggttgtaattttggtgtgattgcagataggtggtcgcctgaatccgtggaatcaggagccttcacaggagatgcagtggcgagcctgatgccacctgccccagcaggatttcataagaatgcacccgaaatgtataatttgcttgattcaatggatgtggatgtcaagcctcctcctttggtcagctctgacagcaccggcgagatgccattgtatggcgataaagttcaccgctcaacctccttaccaagggtctcgaagggagtggggttttttgctgtagatagagatgatgacgacgataagtcctctgggtgcactcatcccagcaccaccactaacaaggatttcaggtccaattgtacagctgagtatagtagggtaaggaagttgctcaccagtaagtacaggaaagttgctccagcgagggtttacaaatctgatctttcctatagtgatgttgatcggaagccttctttccggaacaaaaaaatgcattatacacgacagaggacacaaaggagtacattcaagcgtaggaagctctttgatcgccattcagttctagcatctgaatttggtaccgcacatggaaagggaaacacgaagaaggttaccggaagagactcccatgctgtgtctttggaagcaaacaaggggactagttcaacgccattccagaaatctcgtgggtcaaatgattgccatgtgaaacttaaaattaagtcttttaaggtgcctgaacttcttgttgaaatcccagaaagtgcaactgttggctcactaaagaaaactgttctcgaggcagtgactgcgattctcggaggtggtctacgtgttggtgttcttcaccatggaaagaaagttagagatgataataaaacgttgattcaggctggtattggtcaggaggatatgctggacaaccttggcttttcacttgaacccaactgtacacaaaacccacaagtccaagctcctgaagatatcagtttcctggaaaccattgatactgctgaacccctcgcaaggattgcacctgctgactcgtcttctaagcatggtgaagttgacctatcacaggagtttgcattaaccccattagcaatgaactaccagggcagtgatcatgattctgtgcactcccctgggggcgtctcatcgcccgataaagtctccacaaactcgcgagctttagttccagttccagctgcagatcccaatgcaggagctatagttccagcgaataagtctaagaggtcaccagagcaggggcaacgcagaatcaggcgcccgttctctgttgctgaagtagaagcacttgtgctcgcagtcgaaaagcttggaaccggaaggtggcgagatgttaaacttcgcgcgtttgacaatgcgaagcaccgtacctatgttgatcttaaggcaatggattaaccgtgtcgaaattgtg

SEQ ID NO: 1229 - DNA, 1975 bp, Zea Mays
cgaaaccatctcgcaagaaaaaacctgaggtcttaactcggatcacgggttgaaatttgtgttggtgacaagccatgaacagcgcaaccaccagttgttaagtaaccctcctgtaaacttgaagcaaccgaagcggagagcagaaatggtgttccaaaagaggtcctcgtcagagttggaggcgtccggtggaggccaagtcgcggagatgccgcgcgttcccaagtctgcgaggggcaagagatcggtcaggaagaaggaggcccagaacccgccccagatgtcagcattcgaccttctcgcgacggtggcagggaagctgcttgatgagggggtgggctcgctggggaacatgagcgctggtgccccagctttgactgcatgcgcgaaggatgtccgtgtgaagaaggagcagtgtgacgaggaaatgaagcagttcaagcatgaggtgacagatcaggatagctgcaatgagagtgcaattctcccgcacattgtgttccagcgggcggtgaataatgctcggaatgaggatcctaaggcgaagtctgaggcccaggacaaggaatcctccatgatcagctgtaccaaggctgaactgggttgtaattttggtgtgattgcagataggtggtcgcctgaatccgtggaatcaggagccttcacaggagatgcagtggcgagcctgatgccacctgccccagcaggatttcataagaatgcacccgaaatgtataatttgcttgattcaatggatgtggatgtcaagcctcctcctttggtcagctctgacagcaccggcgagatgccattgtatggcgataaagttcaccgctcaacctccttaccaagggtctcgaagggagtggggttttttgctgtagatagagatgatgacgacgataagtcctctgggtgcactcatcccagcaccaccactaacaaggatttcaggtccaattgtacagctgagtatagtagggtaaggaagttgctcaccagtaagtacaggaaagttgctccagcgagggtttacaaatctgatctttcctatagtgatgttgatcggaagccttctttccggaacaaaaaaatgcattatacacgacagaggacacaaaggagtacattcaagcgtaggaagctctttgatcgccattcagttctagcatctgaatttggtaccgcacatggaaagggaaacacgaagaaggttaccggaagagactcccatgctgtgtctttggaagcaaacaaggggactagttcaacgccattccagaaatctcgtgggtcaaatgattgccatgtgaaacttaaaattaagtcttttaagtgactgcgattctcggaggtggtctacgtgttggtgttcttcaccatggaaagaaagttagagatgataataaaacgttgattcaggctggtattggtcaggaggatatgctggacaaccttggcttttcacttgaacccaactgtacacaaaacccacaagtccaagctcctgaagatatcagtttcctggaaaccattgatactgctgaacccctcgcaaggattgcacctgctgactcgtcttctaagcatggtgaagttgacctatcacaggagtttgcattaaccccattagcaatgaactaccagggcagtgatcatgattctgtgcactcccctgggggcgtctcatcgcccgataaagtctccacaaactcgcgagctttagttccagttccagctgcagatcccaatgcaggagctatagttccagcgaataagtctaagaggtcaccagagcaggggcaacgcagaatcaggcgcccgttctctgttgctgaagtagaagcacttgtgctcgcagtcgaaaagcttggaaccggaaggtggcgagatgttaaacttcgcgcgtttgacaatgcgaagcaccgtacctatgttgatcttaaggcaatggattaaccgtgtcgaaattgtg

SEQ ID NO: 1230 - DNA, 2038 bp, Zea Mays
cagccgctttggactccggttccctccgtcggcggtccaaaagtccatactctgcaggtttgtcccttgcgcactgagcaaaagcatctctaaatttttagaaaattagacttcaattacaagagatctgcatgccagtgccctccatattagcttcttacggtggggctctttcaagtcgcatttgatgcatctccctcccaaagcaggctctgcaactcctgtagcttgctgatatccgaagggatcaggctggacaggtaattctgtggcagatttagctcatagagatcactcagttttgtgaccgtcgtcgaaatcagacctgagatctggttgtgtgtgagattcagcatgttgccgagtttaggtggcactattccaggtttgctttcatcagttcaatttttcctagattttacagattcatgaatagcttcttattattagtgcaactaatattcagtctgctcaaatatcaatggcccacctaattttgtaaaaaagatgagcactacaccaaccattcctatattttgcgagctttgttttcgaacatgccttctagctttaccatgttaacaattgacaaccaattcaattggtcctttggcttcttcattccagcgttaagtagtacccctgctcctcaaggacaacatcagtgaggattctattttgtgtgcctacaaagcttcccatgctgacaaaaagcaatctactttcgtgtacatacgaccaacctcctacaacaaacaacatgccttgttttatctccgcgaccgctagccgtgaggatgagcctcctccgcaaccgccgccggcttacaacatcatcccgatccacgacgtggtgatgcaaggggagcacccgtcgctacggttcccggaggtgcgcgcggccgtggaggcgctggcgcacgcggcggacctgccgccgccgccgctcgcccgcggctgggacgccttccgtgccgacctcttcgactggctcggcgccacctgcggcttccagctcgacaacgtccgcaaccagcgggagcacctcgtgctcctcctcgccaacgcgcagctccgcgcaggcggcaccctccccaccgaccaccccgccgacgtgctgcaccactccatcgcgcgggacatccggaggaagctcctcaagaactacaagacctggtgctcctacctcggcaagaggccgcacgtccatgtgcccagcggcggacgccgtgtcgctcagggggtcggccctgacacacgccgcgacctactgtacaccgccctctacctcctcatctggggcgaggcggccaatttgaggttcatgccggagtgcctctgctacatcttccactacatgggcactcgatctcaaccatgtcatcgaccagtcgattgatatcgagactgggcgaccatcagttcctgcggtgcacggtgtggatgctttccttgacaaggttgtgaagccgatatatgacgtgctcgaggctgaggtgaagttcagccggaatgggaccaagccacactcggcctggaggaactatgatgatgtgaatgagtacttctggagccgcagagttttcaggcggctccagtggcccctgtcaccagcgaggagcttctttataaagccaggaaaccccgggcgtattggcaagactggttttgttgagcagaggtcgttctggaatgtgtaccgcagctttgatcgggtattggtgatgctcattctgttctttcaagcagcaatgatcgttgcatgggatggccacactccgtggtttagcctactctaccgtgacatccagatccgggtgctgtctgtgttcatcacctgggctgcgctgcgcattgtacaggcagtgcttgatgcaggcacacaatacagcctcgtgaggacggatactatatttctcgcagtacggatggtgctcaaggtgcttgttgctgttgggtggactatatcacattcattgtgctctatgttcgaatgtggaatcagaggtggcatgaccgcaggtggtctttttctgcc

SEQ ID NO: 1231 - DNA, 758 bp, Zea Mays
ctccatattagcttcttacggtggggctctttcaagtcgcatttgatgcatctccctcccaaagtccagcaggctctgcaactcctgtagcttgctgatatccgaagggatcaggctggacaggtaattctgtggcagatttagctcatagagatcactcagttttgtgaccgtcgtcgaaatcagacctgagatctggttgtgtgtgagattcagcatgttgccgagtttaggtggcactattccaggtttgctttcatcagttcaatttttcctagattttacagattcatgaatagcttcttattattagtgcaactaatattcagtctgctcaaatatcaatggcccacctaattttgtaaaaaagatgagcactacaccaaccattcctatattttgcgagctttgttttcgaacatgccttctagctttaccatgttaacaattgacaaccaattcaattggtcctttggcttcttcattccagcgttaagtagtacccctgctcctcaaggacaacatcagtgaggattctattttgtgtgcctacaaagcttcccatgctgacaaaaagcaatctactttcgtgtacatacgaccaacctcctacaacaaacaacatgccttgttttatgtatgctattgcacctcatataaaacatataatttctttttaatgaatattgcactgtatgtttatgttacaaccaaacttcatgtatgatacatgtcttatcaaactactctcaagtttg

SEQ ID NO: 1232 - DNA, 2843 bp, Zea Mays
gtcgcatttgatgcatctccctcccaaagcaggctctgcaactcctgtagcttgctgatatccgaagggatcaggctggacaggtaattctgtggcagatttagctcatagagatcactcagttttgtgaccgtcgtcgaaatcagacctgagatctggttgtgtgtgagattcagcatgttgccgagtttaggtggcactattccaggtttgctttcatcagttcaatttttcctagattttacagattcatgaatagcttcttattattagtgcaactaatattcagtctgctcaaatatcaatggcccacctaattttgtaaaaaagatgagcactacaccaaccattcctatattttgcgagctttgttttcgaacatgccttctagctttaccatgttaacaattgacaaccaattcaattggtcctttggcttcttcattccagcgttaagtagtacccctgctcctcaaggacaacatcagtgaggtaattacttcatcccttatcctattttatagaatgatatgattagttgtttgaatatcgtatcttccttaatttcttttgttccatttttcttgtcatctgtactgcagtcatgttcgtatatgcacattaagatcttcagtgacgtttgtatatgcacatcataagctttgctaactttgaagcattgtagttgacttttaataatatattccattgctggtcacaacaactcaagtagtgagtcatttttattagggacataaggtatgtatatttctgttatcaccacaacgtatagctactgcattgatttacacaacactctttgatactgcttttaccgtcacatattttttcttacatctactacatcaacgatacacctttaaaaattacactatgggaggactacacacattttttctattgacgaggtttacaacaacaaagaaagcaagcctataatcatattatttgtcaactatttaactaaacaatttaaaggttaaactccgaagatgttttgtttcacttttgcattagttctcctattaaacatgaaaccaacaatgctgcttctaatgtagggcaagtataattaagtggtacttcaacccagataccccattaactcatgcgtactacaacaggaatgtaaaaaaaaggataacatacttccttgctatgcacatctaatattcatttttaacacttatatcatgtttcctaaactatatattcacagttacctacatgttcaatttttcccatcatactattgctaatattgacatgctaatttccccttcctaacatataggtttttttttcaaattttcccatcatactactgctaacattgacatactaattaaaatacataaaactactcaattttacattatataaatgatacaccaacatcttgagtaccaaacaaagaatctaaccgcaattaacatttttttatgtctcacaggattctattttgtgtgcctacaaagcttcccatgctgacaaaaagcaatctactttcgtgtacatacgaccaacctcctacaacaaacaacatgccttgttttatctccgcgaccgctagccgtgaggatgagcctcctccgcaaccgccgccggcttacaacatcatcccgatccacgacgtggtgatgcaaggggagcacccgtcgctacggttcccggaggtgcgcgcggccgtggaggcgctggcgcacgcggcggacctgccgccgccgccgctcgcccgcggctgggacgccttccgtgccgacctcttcgactggctcggcgccacctgcggcttccagctcgacaacgtccgcaaccagcgggagcacctcgtgctcctcctcgccaacgcgcagctccgcgcaggcggcaccctccccaccgaccaccccgccgacgtgctgcaccactccatcgcgcgggacatccggaggaagctcctcaagaactacaagacctggtgctcctacctcggcaagaggccgcacgtccatgtgcccagcggcggacgccgtgtcgctcagggggtcggccctgacacacgccgcgacctactgtacaccgccctctacctcctcatctggggcgaggcggccaatttgaggttcatgccggagtgcctctgctacatcttccactacatgggcactcgatctcaaccatgtcatcgaccagtcgattgatatcgagactgggcgaccatcagttcctgcggtgcacggtgtggatgctttccttgacaaggttgtgaagccgatatatgacgtgctcgaggctgaggtgaagttcagccggaatgggaccaagccacactcggcctggaggaactatgatgatgtgaatgagtacttctggagccgcagagttttcaggcggctccagtggcccctgtcaccagcgaggagcttctttataaagccaggaaaccccgggcgtattggcaagactggttttgttgagcagaggtcgttctggaatgtgtaccgcagctttgatcgggtattggtgatgctcattctgttctttcaagcagcaatgatcgttgcatgggatggccacactccgtggtttagcctactctaccgtgacatccagatccgggtgctgtctgtgttcatcacctgggctgcgctgcgcattgtacaggcagtgcttgatgcaggcacacaatacagcctcgtgaggacggatactatatttctcgcagtacggatggtgctcaaggtgcttgttgctgttgggtggactatatcacattcattgtgctctatgttcgaatgtggaatcagaggtggcatgaccgcaggtggtctttttctgcc

SEQ ID NO: 1233 - DNA, 3491 bp, Zea Mays
accaagtcctacagggttcttttcctatgaaaatgtgaaaatgttctttatctaaacattcccacttcatatcagaagatgcacatctcgattcgtaataaaggttgctcctttttaaaaattcacaggggtgtatcaacgcttcttatgttttctacccaattttacacactcaatcctctgaaacctgtgtttgtcaatagtgtgttttcttcattagggtgtgtgttttccttcattagggtgtgtgtttttcttccatgcgaggaaccactgaattctcttggccacttgcatcaatgtgagtttttcttcattacgaggaattaaacaactattatttccctttcctctctgtcaaatggccatttcattactctaatgactattctattcactctgcaatagaaagaacctcattagaagataggtatgtatttcaaccttacttcaagagttacgcctcttccttttacgtagccttctattaattaaattacatttaatttttcaaatcattttctaaaaaagattatatacgttttaaatgaactgtgcattttcccgttgtaaatgtgtgtacctatacattttccacatatatattcatctctgaaccacttacattagtgtgtgtgtttcttcattgtgaggaattacacaactactgtttccctttcctctctatcaaacgaccattttgttactctagtgaccaacttattcactctaaaagaaaaaaaactcactggaagatatgtatgtatttgaaccttacttctagaattatgtctctttctttacgtagttttttgttaattaaatttgcattagttgtataattccttttccaaaacattatatatgttttcaatgaaatgttcttttttgtttcggtgcaaatgtgtgcacctatacattttttcacatatatattcatttactcttatatttgtttcttattgttacgactgttcaaaataaaaaactgcacaattatgttttgacatgcattctatatagaataatgaagaatgatcgcaacaatagccatctggccaactatgtataaaaacatactattttctgggcagtcgtccattcaacaagatacataatgcagtgaatttattaactaattatggttgtttgttaaaaccctttccatgttgtactgtctaacacatgctctcaagctttgtggcctacaataatggtattttattgcgatacaagcgatgccccatattttttcgcaacatgtactggtattttttctatttgaagttttgttgatcaaacattgttatcgatgtcatatcagatgagctatacatatcttaaaaattgctactacgcagtacacactactcgcccttccttattttccttcacctcctctcccagaatatccgctttcatctaatttgactattcattttattgaactaaaagagaggcattagtagaccaggatgaaagaatggcgctaatacatgtcaaactaaaagttaagactgcatcttagttcgattctatagtgggacacttcttttcttgactaattgcttcgtgcttctagattttttagttttaactttcagagatgtggctactgagattgttgtttctcaagtccagcaggctctgcaactcctgtagcttgctgatatccgaagggatcaggctggacaggtaattctgtggcagatttagctcatagagatcactcagttttgtgaccgtcgtcgaaatcagacctgagatctggttgtgtgtgagattcagcatgttgccgagtttaggtggcactattccaggtttgctttcatcagttcaatttttcctagattttacagattcatgaatagcttcttattattagtgcaactaatattcagtctgctcaaatatcaatggcccacctaattttgtaaaaaagatgagcactacaccaaccattcctatattttgcgagctttgttttcgaacatgccttctagctttaccatgttaacaattgacaaccaattcaattggtcctttggcttcttcattccagcgttaagtagtacccctgctcctcaaggacaacatcagtgaggtaattacttcatcccttatcctattttatagaatgatatgattagttgtttgaatatcgtatcttccttaatttcttttgttccatttttcttgtcatctgtactgcagtcatgttcgtatatgcacattaagatcttcagtgacgtttgtatatgcacatcataagctttgctaactttgaagcattgtagttgacttttaataatatattccattgctggtcacaacaactcaagtagtgagtcatttttattagggacataaggtatgtatatttctgttatcaccacaacgtatagctactgcattgatttacacaacactctttgatactgcttttaccgtcacatattttttcttacatctactacatcaacgatacacctttaaaaattacactatgggaggactacacacattttttctattgacgaggtttacaacaacaaagaaagcaagcctataatcatattatttgtcaactatttaactaaacaatttaaaggttaaactccgaagatgttttgtttcacttttgcattagttctcctattaaacatgaaaccaacaatgctgcttctaatgtagggcaagtataattaagtggtacttcaacccagataccccattaactcatgcgtactacaacaggaatgtaaaaaaaaggataacatacttccttgctatgcacatctaatattcatttttaacacttatatcatgtttcctaaactatatattcacagttacctacatgttcaatttttcccatcatactattgctaatattgacatgctaatttccccttcctaacatataggtttttttttcaaattttcccatcatactactgctaacattgacatactaattaaaatacataaaactactcaattttacattatataaatgatacaccaacatcttgagtaccaaacaaagaatctaaccgcaattaacatttttttatgtctcacaggattctattttgtgtgcctacaaagcttcccatgctgacaaaaagcaatctactttcgtgtacatacgaccaacctcctacaacaaacaacatgccttgttttatgtatgctattgcacctcatataaaacatataatttctttttaatgaatattgcactgtatgtttatgttacaaccaaacttcatgtatgatacatgtcttatcaaactactctcaagtttgtgttaagtgtgctacaacatttatctattctacaaccaaaattacttgcttaatcaccatcatagcacactatccaccacagtatcgctctatacatattcacttcgccacgcgcgcatgagcgcgcgtaatacactagtagaaagaataaatatgaaaccaaaaggaataaaaatgag

SEQ ID NO: 1234 - DNA, 1441 bp, Zea Mays
aaaaccccagccaagccatccctccggccgcgaacgccgcgaaccccgcgcgcgattcgcagcggcaaaagctgaagcaaacaaacgcaaacggctcatcccattcccatcacatgattcccaactcagcgccgcatcgcgtcaccgcaatctcgcagtcaccccccaaattcccatctccgcgaccgctagccgtgaggatgagcctcctccgcaaccgccgccggcttacaacatcatcccgatccacgacgtggtgatgcaaggggagcacccgtcgctacggttcccggaggtgcgcgcggccgtggaggcgctggcgcacgcggcggacctgccgccgccgccgctcgcccgcggctgggacgccttccgtgccgacctcttcgactggctcggcgccacctgcggcttccagctcgacaacgtccgcaaccagcgggagcacctcgtgctcctcctcgccaacgcgcagctccgcgcaggcggcaccctccccaccgaccaccccgccgacgtgctgcaccactccatcgcgcgggacatccggaggaagctcctcaagaactacaagacctggtgctcctacctcggcaagaggccgcacgtccatgtgcccagcggcggacgccgtgtcgctcagggggtcggccctgacacacgccgcgacctactgtacaccgccctctacctcctcatctggggcgaggcggccaatttgaggttcatgccggagtgcctctgctacatcttccactacatgggcactcgatctcaaccatgtcatcgaccagtcgattgatatcgagactgggcgaccatcagttcctgcggtgcacggtgtggatgctttccttgacaaggttgtgaagccgatatatgacgtgctcgaggctgaggtgaagttcagccggaatgggaccaagccacactcggcctggaggaactatgatgatgtgaatgagtacttctggagccgcagagttttcaggcggctccagtggcccctgtcaccagcgaggagcttctttataaagccaggaaaccccgggcgtattggcaagactggttttgttgagcagaggtcgttctggaatgtgtaccgcagctttgatcgggtattggtgatgctcattctgttctttcaagcagcaatgatcgttgcatgggatggccacactccgtggtttagcctactctaccgtgacatccagatccgggtgctgtctgtgttcatcacctgggctgcgctgcgcattgtacaggcagtgcttgatgcaggcacacaatacagcctcgtgaggacggatactatatttctcgcagtacggatggtgctcaaggtgcttgttgctgttgggtggactatatcacattcattgtgctctatgttcgaatgtggaatcagaggtggcatgaccgcaggtggtctttttctgcc

SEQ ID NO: 1235 - DNA, 1217 bp, Zea Mays
atcctttcacccttcagcccgcgtgccctctgtttctctcccggttcttcccctctcttgcgacgacagggttgggtaacgccgctcgccgccgccgccgccatacgcaggtgccgaggccttcgtcgatctcttagccgtcgacaagcacccaagagatgcaggatagaatgagacggcaggggcaatatggtgaagcggatattaactctatggttgctgcccagttgcatcactaccaggcacagcaaagggtacagaaacaccctgagaatagctacactggaagagatcctgcacaagcttctgcggagcatcagtacactccccctaaagcaagacagagtcaatgggatcgaggtggaccaaatgcgccaagccaggttccatcatatgcatataacgaagcccaaggtgctggaggtgcgcaatccttttatgatgggcagagatctgatacaaaggttggtctagaaaagcagcccagcaaggagtctagggagcaacctcgtactgaacgaactgaaacaagatacgagaattataatcttcctcggacattcgaaggtcttgaacaaagtttccatgaagacattattttgctatccaaggaactacaggaggcagaggatgctgaaaattctagacacatggagagattgaaggatataaatacacagtaccaggagaaactattagcacttagagctcggcaagcgaactatagagatgagttcctgcgcaaggaatctctagcacgccagcagcaataccagcacgccagcatgagccattacgctagcaattccacggctggggagcagcatggttataacccaacggcagcaggcacgcctcctgttgctgctggaggtgcttatggtgaggctcatcggggttatgcttctggccagtatgaatcatttagcgatcgtccagattatccagagttccatgatgggggcagaggtcgtggtcgtagttctgagcagcgtgctcaataccctggtggtcgtgcttataattccggtggccggcgattctagatatgctttgaactttgaaggacgatctatcactctgtcaagcgagctcatatcacctgatgtcagtgtgctgtaccgtgctatactcgaccgagaaacctaagcgctcataaaacttgttctacaattcagcggcggtcttttaagaagcatttcttacactctcaagaa

SEQ ID NO: 1236 - DNA, 2497 bp, Zea Mays
gtgggggcgggcgcgcgcgcgcggtggatccgcgggagcgcgcgcgggatccgcgggaggttggggatagcggggcagtctacacgtgactcttaataattaggtctaaatgtgatttaaaaaaaagacaaataaaaaaattcggacgacctacgcacacgctcagacaggtttacgcgctgacaagctgcccttccgcgaactacacgttcgacgaaatgccgccgcgagagtcgagacctcttcatcgtcaactgagattcgcctagcatcttctcggattccttccccaactttcgtccccatcagcggacctactcgagatcgacgagactcgtcggagcccggttcctaggcgtcccagcgcccgactggatctcctggctcgggccgccttgatggtccctggggtcggtccggggtggagttcgaggcgatgagcaggcttgcgtcggggctccagcgcttgcggaggtcgtcgtcgcagtgggaggtgctgtggtcggcgctcgcgtcatgcggcctagtgcttttctcgcagctcgccgtggcgatggttccccgtctcttccctttcctctccctcctcgcgatgctccccatcgcgggtcggtgctctctggttgctcgcttcctttttggttctctgcacagctgcactgcacccgattgcgggagtttctattttttaagcgccagagcgattctgatcttccttcgactgcgtgttgcatagggttggtgttcatcgcggctatcgtgctcggccgcctgtggaggaggttcatcggggtggcggcgtcggccccgctcttcgtgctcttcaacatcctcctattgtggggcgtttacgtattcgtaatccggagagaaacttcttctctgctggacatgctaataaatgcagagtgtgcacttcttctgtggggattctacaggattttatctggtgatcctggtattgttgcttgtgattcttcatatttggaagaagctggctgcaaggattttgtggaagctatatactcgagtgagaaactcccaatgctctcaagggtcaggcagtgtacctggtgcaaagcaaacattaggggctatgaccatcattgtcctgcatttggtacttgcataggacagaaaaatcatcgtctatttatggcccttttgacaggatttgttgttgctgaatcaacatatacgatgtgctcaacaaaatatattaccagatgcatcagttcagggactataagatcggaggtatctatgcccatatcttattctttgtgcatgaattgtaaggcaattttgtttggaaaatgtatgtctgtgccattgtctcagctagtatttcgatttttaccagttttttctgaaccatttacttggatgaaataattaaaaacagtggcaataatggaaacagtaattaacctgattgtacacacctacatctttcattttgtttccaagaatttcttgcagtttactgtttttgaaggtgctcagcttccttccaccccccatatttcttgaacacgcaggagaagctgaccttaggaaataagctaattgttaagtaaatgtgttcaaccatactcattattttttcctcttctaggactatttagatgttttagcatagtagctattcattctttttctcaaacacaacgctttttactgcatatgcatagtgagtgcatttgtatgtctttagtactttcaatggtaatatatttaaatcaggtcaaccatgatatagtggaaagcaattatattaagctatgttctgggccttttgagttggtcttccatgtttctgagaaacttacaacttcccttttgttttatttttccatcaaactgtacccttggtttctgatatctgtaagaatgaccgcaagatgcttactgagtgtactcatttactttccagaatcctgtatctttaaacatagtaatcagtacaacgctcttctctatcctccaggtcctctggcaggctgtgaactgaagtcatcagtaaaaagaggaagtgtgttcagcccggaattcgaaagcatgccacaagaaatacgacttcagtccacttaatcattgttatatttgggagtgttggctagatatattgaaatagtcatctgccatatgtgttgcatgtggcagaacttgaaatgtctttccaccaattcttttagcatttagagacaagacagtactcctatctacatttgcaattgctatgcctataccaagcacgctaattaaaactgcagccttatgttgtactccctctgatcccaaagataagtccatctgatctcccaaatgcaataaacatgagtccatgataactccattgaaccttttttgcttcgttcatccttgtctatccctacttaaatgtgattaatcaatgcaattcacttgccacctgtcttaactctagcaatgattgatgagtaatttagtcattgtatccccaccatagttccag

SEQ ID NO: 1237 - DNA, 1858 bp, Zea Mays
gtgggggcgggcgcgcgcgcgcggtggatccgcgggagcgcgcgcgggatccgcgggaggttggggatagcggggcagtctacacgtgactcttaataattaggtctaaatgtgatttaaaaaaaagacaaataaaaaaattcggacgacctacgcacacgctcagacaggtttacgcgctgacaagctgcccttccgcgaactacacgttcgacgaaatgccgccgcgagagtcgagacctcttcatcgtcaactgagattcgcctagcatcttctcggattccttccccaactttcgtccccatcagcggacctactcgagatcgacgagactcgtcggagcccggttcctaggcgtcccagcgcccgactggatctcctggctcgggccgccttgatggtccctggggtcggtccggggtggagttcgaggcgatgagcaggcttgcgtcggggctccagcgcttgcggaggtcgtcgtcgcagtgggaggtgctgtggtcggcgctcgcgtcatgcggcctagtgcttttctcgcagctcgccgtggcgatggttccccgtctcttccctttcctctccctcctcgcgatgctccccatcgcggggttggtgttcatcgcggctatcgtgctcggccgcctgtggaggaggttcatcggggtggcggcgtcggccccgctcttcgtgctcttcaacatcctcctattgtggggcgtttacgtattcgtaatccggagagaaacttcttctctgctggacatgctaataaatgcagagtgtgcacttcttctgtggggattctacaggattttatctggtgatcctggtattgttgcttgtgattcttcatatttggaagaagctggctgcaaggattttgtggaagctatatactcgaaaactcccaatgctctcaagggtcaggcagtgtacctggtgcaaagcaaacattaggggctatgaccatcattgtcctgcatttggtacttgcataggacagaaaaatcatcgtctatttatggcccttttgacaggatttgttgttgctgaatcaacatatacgatgtgctcaacaaaatatattaccagatgcatcagttcagggactataagatcggagaatcctgtatctttaaacatagtaatcagtacaacgctcttctctatcctccaggtcctctggcagattgtattcttgatgtggcacatatattgcatctgcttcaacatcaagacagatgagtgggtaatttcaaatttcccatgctttggagtcttcgttcatcaattgcaggtcgtcttctcgttagctgtttcttgtagctaaaaggtgagattttccagattaactggaagaaatatcctgaattccagatgaaggaacaacctcgatcagattctgaagtcaaatttgtgaacccatatgacaagggcatgctgtgtaacataagagaatttctaaagccggaatgatagatagccaattttgagtacgaagacctggaactagaaagatgggaagtctgaagtgcgttataactggatggaagcttgtttccttgttggctatagattttcaggaatctattctgatgttgtagccgtttagttgagattccagatttatgacagcgaatctggttcagtaaactgaaccaaacacactctgaggatcattgaactccctgtagtttaatgtgcaagtaacattcttttgtaaggttactttcacttatggaattcatatcgtggtcctgcatttttcaccgtttggtctgacgttctgtgggaaaagggtcgcacctgtagggatttgaaataatttgaagggaattgccgtgcttttgtctatga

SEQ ID NO: 1238 - DNA, 2572 bp, Zea Mays
gtgggggcgggcgcgcgcgcgcggtggatccgcgggagcgcgcgcgggatccgcgggaggttggggatagcggggcagtctacacgtgactcttaataattaggtctaaatgtgatttaaaaaaaagacaaataaaaaaattcggacgacctacgcacacgctcagacaggtttacgcgctgacaagctgcccttccgcgaactacacgttcgacgaaatgccgccgcgagagtcgagacctcttcatcgtcaactgagattcgcctagcatcttctcggattccttccccaactttcgtccccatcagcggacctactcgagatcgacgagactcgtcggagcccggttcctaggcgtcccagcgcccgactggatctcctggctcgggccgccttgatggtccctggggtcggtccggggtggagttcgaggcgatgagcaggcttgcgtcggggctccagcgcttgcggaggtcgtcgtcgcagtgggaggtgctgtggtcggcgctcgcgtcatgcggcctagtgcttttctcgcagctcgccgtggcgatggttccccgtctcttccctttcctctccctcctcgcgatgctccccatcgcgggtcggtgctctctggttgctcgcttcctttttggttctctgcacagctgcactgcacccgattgcgggagtttctattttttaagcgccagagcgattctgatcttccttcgactgcgtgttgcatagggttggtgttcatcgcggctatcgtgctcggccgcctgtggaggaggttcatcggggtggcggcgtcggccccgctcttcgtgctcttcaacatcctcctattgtggggcgtttacgtattcgtaatccggagagaaacttcttctctgctggacatgctaataaatgcagagtgtgcacttcttctgtggggattctacaggattttatctggtgatcctggtattgttgcttgtgattcttcatatttggaagaagctggctgcaaggattttgtggaagctatatactcgagtgagaaactcccaatgctctcaagggtcaggcagtgtacctggtgcaaagcaaacattaggggctatgaccatcattgtcctgcatttggtacttgcataggacagaaaaatcatcgtctatttatggcccttttgacaggatttgttgttgctgaatcaacatatacgatgtgctcaacaaaatatattaccagatgcatcagttcagggactataagatcggaggtatctatgcccatatcttattctttgtgcatgaattgtaaggcaattttgtttggaaaatgtatgtctgtgccattgtctcagctagtatttcgatttttaccagttttttctgaaccatttacttggatgaaataattaaaaacagtggcaataatggaaacagtaattaacctgattgtacacacctacatctttcattttgtttccaagaatttcttgcagtttactgtttttgaaggtgctcagcttccttccaccccccatatttcttgaacacgcaggagaagctgaccttaggaaataagctaattgttaagtaaatgtgttcaaccatactcattattttttcctcttctaggactatttagatgttttagcatagtagctattcattctttttctcaaacacaacgctttttactgcatatgcatagtgagtgcatttgtatgtctttagtactttcaatggtaatatatttaaatcaggtcaaccatgatatagtggaaagcaattatattaagctatgttctgggccttttgagttggtcttccatgtttctgagaaacttacaacttcccttttgttttatttttccatcaaactgtacccttggtttctgatatctgtaagaatgaccgcaagatgcttactgagtgtactcatttactttccagaatcctgtatctttaaacatagtaatcagtacaacgctcttctctatcctccaggtcctctggcagattgtattcttgatgtggcacatatattgcatctgcttcaacatcaagacagatgagtggattaactggaagaaatatcctgaattccagatgaaggaacaacctcgatcagattctgaagtcaaatttgtgaacccatatgacaagggcatgctgtgtaacataagagaatttctaaagccggaatgatagatagccaattttgagtacgaagacctggaactagaaagatgggaagtctgaagtgcgttataactggatggaagcttgtttccttgttggctatagattttcaggaatctattctgatgttgtagccgtttagttgagattccagatttatgacagcgaatctggttcagtaaactgaaccaaacacactctgaggatcattgaactccctgtagtttaatgtgcaagtaacattcttttgtaaggttactttcacttatggaattcatatcgtggtcctgcatttttcaccgtttggtctgacgttctgtgggaaaagggtcgcacctgtagggatttgaaataatttgaagggaattgccgtgcttttgtctatga

SEQ ID NO: 1239 - DNA, 1726 bp, Zea Mays
gtgggggcgggcgcgcgcgcgcggtggatccgcgggagcgcgcgcgggatccgcgggaggttggggatagcggggcagtctacacgtgactcttaataattaggtctaaatgtgatttaaaaaaaagacaaataaaaaaattcggacgacctacgcacacgctcagacaggtttacgcgctgacaagctgcccttccgcgaactacacgttcgacgaaatgccgccgcgagagtcgagacctcttcatcgtcaactgagattcgcctagcatcttctcggattccttccccaactttcgtccccatcagcggacctactcgagatcgacgagactcgtcggagcccggttcctaggcgtcccagcgcccgactggatctcctggctcgggccgccttgatggtccctggggtcggtccggggtggagttcgaggcgatgagcaggcttgcgtcggggctccagcgcttgcggaggtcgtcgtcgcagtgggaggtgctgtggtcggcgctcgcgtcatgcggcctagtgcttttctcgcagctcgccgtggcgatggttccccgtctcttccctttcctctccctcctcgcgatgctccccatcgcggggttggtgttcatcgcggctatcgtgctcggccgcctgtggaggaggttcatcggggtggcggcgtcggccccgctcttcgtgctcttcaacatcctcctattgtggggcgtttacgtattcgtaatccggagagaaacttcttctctgctggacatgctaataaatgcagagtgtgcacttcttctgtggggattctacaggattttatctggtgatcctggtattgttgcttgtgattcttcatatttggaagaagctggctgcaaggattttgtggaagctatatactcgagtgagaaactcccaatgctctcaagggtcaggcagtgtacctggtgcaaagcaaacattaggggctatgaccatcattgtcctgcatttggtacttgcataggatttgttgttgctgaatcaacatatacgatgtgctcaacaaaatatattaccagatgcatcagttcagggactataagatcggagaatcctgtatctttaaacatagtaatcagtacaacgctcttctctatcctccaggtcctctggcagattgtattcttgatgtggcacatatattgcatctgcttcaacatcaagacagatgagtggattaactggaagaaatatcctgaattccagatgaaggaacaacctcgatcagattctgaagtcaaatttgtgaacccatatgacaagggcatgctgtgtaacataagagaatttctaaagccggaatgatagatagccaattttgagtacgaagacctggaactagaaagatgggaagtctgaagtgcgttataactggatggaagcttgtttccttgttggctatagattttcaggaatctattctgatgttgtagccgtttagttgagattccagatttatgacagcgaatctggttcagtaaactgaaccaaacacactctgaggatcattgaactccctgtagtttaatgtgcaagtaacattcttttgtaaggttactttcacttatggaattcatatcgtggtcctgcatttttcaccgtttggtctgacgttctgtgggaaaagggtcgcacctgtagggatttgaaataatttgaagggaattgccgtgcttttgtctatga

SEQ ID NO: 1240 - DNA, 2941 bp, Zea Mays
gtgggggcgggcgcgcgcgcgcggtggatccgcgggagcgcgcgcgggatccgcgggaggttggggatagcggggcagtctacacgtgactcttaataattaggtctaaatgtgatttaaaaaaaagacaaataaaaaaattcggacgacctacgcacacgctcagacaggtttacgcgctgacaagctgcccttccgcgaactacacgttcgacgaaatgccgccgcgagagtcgagacctcttcatcgtcaactgagattcgcctagcatcttctcggattccttccccaactttcgtccccatcagcggacctactcgagatcgacgagactcgtcggagcccggttcctaggcgtcccagcgcccgactggatctcctggctcgggccgccttgatggtccctggggtcggtccggggtggagttcgaggcgatgagcaggcttgcgtcggggctccagcgcttgcggaggtcgtcgtcgcagtgggaggtgctgtggtcggcgctcgcgtcatgcggcctagtgcttttctcgcagctcgccgtggcgatggttccccgtctcttccctttcctctccctcctcgcgatgctccccatcgcgggtcggtgctctctggttgctcgcttcctttttggttctctgcacagctgcactgcacccgattgcgggagtttctattttttaagcgccagagcgattctgatcttccttcgactgcgtgttgcatagggttggtgttcatcgcggctatcgtgctcggccgcctgtggaggaggttcatcggggtggcggcgtcggccccgctcttcgtgctcttcaacatcctcctattgtggggcgtttacgtattcgtaatccggagagaaacttcttctctgctggacatgctaataaatgcagagtgtgcacttcttctgtggggattctacaggattttatctggtgatcctggtattgttgcttgtgattcttcatatttggaagaagctggctgcaaggattttgtggaagctatatactcgagtgagaaactcccaatgctctcaagggtcaggcagtgtacctggtgcaaagcaaacattaggggctatgaccatcattgtcctgcatttggtacttgcatagggatttgttgttgctgaatcaacatatacgatgtgctcaacaaaatatattaccagatgcatcagttcagggactataagatcggagaatcctgtatctttaaacatagtaatcagtacaacgctcttctctatcctccaggtcctctggcaggtttgctcctaacccttgtgatgtaatgtcagctctttctcttctgcttttatctgttattccatgattttttgtccttatagactctgcttttgaggtagattgtcacggttgttagagagctttagaaaatctatgtattatgtgtgttttacctcatgcctatgctgtatgctcccattgatcatccttattgaactattaaaaaaataccactcaaattaggcagcatgtggatatttactggagtttttttatggttttccatgtattaaactgacaagttttcaggctactgtgataccacattacaacttgccagtctggttggcatcaattcacaacatgtacaaatctaaatgagatttttcttattcatgtgaataaatactctcaggctgtgaactgaagtcatcagtaaaaagaggaagtgtgttcagcccggaattcgaaagcatgccacaagaaatacgacttcagtccacttaatcattgttatatttgggagtgttggctagatatattgaaatagtcatctgccatatgtgttgcatgtggcagaacttgaaatgtctttccaccaattcttttagcatttagagacaagacagtactcctatctacatttgcaattgctatgcctataccaagcacgctaattaaaactgcagccttatgttgtactccctctgatcccaaagataagtccatctgatctcccaaatgcaataaacatgagtccatgataactccattgaaccttttttgcttcgttcatccttgtctatccctacttaaatgtgattaatcaatgcaattcacttgccacctgtcttaactctagcaatgattgatgagtaatttagtcattgtatccccaccatagttccagtgccaaatccaaatggacatatatttgggattggagggagtattgcataagctagtgattgtattatttctaatagatcctccgtgctgttaccagattgtattcttgatgtggcacatatattgcatctgcttcaacatcaagacagatgagtgggtaatttcaaatttcccatgctttggagtcttcgttcatcaattgcaggtcgtcttctcgttagctgtttcttgtagctaaaaggtgagattttccagattaactggaagaaatatcctgaattccagatgaaggaacaacctcgatcagattctgaagtcaaatttgtgaacccatatgacaagggcatgctgtgtaacataagagaatttctaaagccggaatgatagatagccaattttgagtacgaagacctggaactagaaagatgggaagtctgaagtgcgttataactggatggaagcttgtttccttgttggctatagattttcaggaatctattctgatgttgtagccgtttagttgagattccagatttatgacagcgaatctggttcagtaaactgaaccaaacacactctgaggatcattgaactccctgtagtttaatgtgcaagtaacattcttttgtaaggttactttcacttatggaattcatatcgtggtcctgcatttttcaccgtttggtctgacgttctgtgggaaaagggtcgcacctgtagggatttgaaataatttgaagggaattgccgtgcttttgtctatga

SEQ ID NO: 1241 - DNA, 2876 bp, Zea Mays
gtgggggcgggcgcgcgcgcgcggtggatccgcgggagcgcgcgcgggatccgcgggaggttggggatagcggggcagtctacacgtgactcttaataattaggtctaaatgtgatttaaaaaaaagacaaataaaaaaattcggacgacctacgcacacgctcagacaggtttacgcgctgacaagctgcccttccgcgaactacacgttcgacgaaatgccgccgcgagagtcgagacctcttcatcgtcaactgagattcgcctagcatcttctcggattccttccccaactttcgtccccatcagcggacctactcgagatcgacgagactcgtcggagcccggttcctaggcgtcccagcgcccgactggatctcctggctcgggccgccttgatggtccctggggtcggtccggggtggagttcgaggcgatgagcaggcttgcgtcggggctccagcgcttgcggaggtcgtcgtcgcagtgggaggtgctgtggtcggcgctcgcgtcatgcggcctagtgcttttctcgcagctcgccgtggcgatggttccccgtctcttccctttcctctccctcctcgcgatgctccccatcgcgggtcggtgctctctggttgctcgcttcctttttggttctctgcacagctgcactgcacccgattgcgggagtttctattttttaagcgccagagcgattctgatcttccttcgactgcgtgttgcatagggttggtgttcatcgcggctatcgtgctcggccgcctgtggaggaggttcatcggggtggcggcgtcggccccgctcttcgtgctcttcaacatcctcctattgtggggcgtttacgtattcgtaatccggagagaaacttcttctctgctggacatgctaataaatgcagagtgtgcacttcttctgtggggattctacaggattttatctggtgatcctggtattgttgcttgtgattcttcatatttggaagaagctggctgcaaggattttgtggaagctatatactcgaaaactcccaatgctctcaagggtcaggcagtgtacctggtgcaaagcaaacattaggggctatgaccatcattgtcctgcatttggtacttgcataggacagaaaaatcatcgtctatttatggcccttttgacaggatttgttgttgctgaatcaacatatacgatgtgctcaacaaaatatattaccagatgcatcagttcagggactataagatcggagaatcctgtatctttaaacatagtaatcagtacaacgctcttctctatcctccaggtcctctggcaggtttgctcctaacccttgtgatgtaatgtcagctctttctcttctgcttttatctgttattccatgattttttgtccttatagactctgcttttgaggtagattgtcacggttgttagagagctttagaaaatctatgtattatgtgtgttttacctcatgcctatgctgtatgctcccattgatcatccttattgaactattaaaaaaataccactcaaattaggcagcatgtggatatttactggagtttttttatggttttccatgtattaaactgacaagttttcaggctactgtgataccacattacaacttgccagtctggttggcatcaattcacaacatgtacaaatctaaatgagatttttcttattcatgtgaataaatactctcaggctgtgaactgaagtcatcagtaaaaagaggaagtgtgttcagcccggaattcgaaagcatgccacaagaaatacgacttcagtccacttaatcattgttatatttgggagtgttggctagatatattgaaatagtcatctgccatatgtgttgcatgtggcagaacttgaaatgtctttccaccaattcttttagcatttagagacaagacagtactcctatctacatttgcaattgctatgcctataccaagcacgctaattaaaactgcagccttatgttgtactccctctgatcccaaagataagtccatctgatctcccaaatgcaataaacatgagtccatgataactccattgaaccttttttgcttcgttcatccttgtctatccctacttaaatgtgattaatcaatgcaattcacttgccacctgtcttaactctagcaatgattgatgagtaatttagtcattgtatccccaccatagttccagtgccaaatccaaatggacatatatttgggattggagggagtattgcataagctagtgattgtattatttctaatagatcctccgtgctgttaccagattgtattcttgatgtggcacatatattgcatctgcttcaacatcaagacagatgagtggattaactggaagaaatatcctgaattccagatgaaggaacaacctcgatcagattctgaagtcaaatttgtgaacccatatgacaagggcatgctgtgtaacataagagaatttctaaagccggaatgatagatagccaattttgagtacgaagacctggaactagaaagatgggaagtctgaagtgcgttataactggatggaagcttgtttccttgttggctatagattttcaggaatctattctgatgttgtagccgtttagttgagattccagatttatgacagcgaatctggttcagtaaactgaaccaaacacactctgaggatcattgaactccctgtagtttaatgtgcaagtaacattcttttgtaaggttactttcacttatggaattcatatcgtggtcctgcatttttcaccgtttggtctgacgttctgtgggaaaagggtcgcacctgtagggatttgaaataatttgaagggaattgccgtgcttttgtctatga

SEQ ID NO: 1242 - DNA, 2562 bp, Zea Mays
gtgggggcgggcgcgcgcgcgcggtggatccgcgggagcgcgcgcgggatccgcgggaggttggggatagcggggcagtctacacgtgactcttaataattaggtctaaatgtgatttaaaaaaaagacaaataaaaaaattcggacgacctacgcacacgctcagacaggtttacgcgctgacaagctgcccttccgcgaactacacgttcgacgaaatgccgccgcgagagtcgagacctcttcatcgtcaactgagattcgcctagcatcttctcggattccttccccaactttcgtccccatcagcggacctactcgagatcgacgagactcgtcggagcccggttcctaggcgtcccagcgcccgactggatctcctggctcgggccgccttgatggtccctggggtcggtccggggtggagttcgaggcgatgagcaggcttgcgtcggggctccagcgcttgcggaggtcgtcgtcgcagtgggaggtgctgtggtcggcgctcgcgtcatgcggcctagtgcttttctcgcagctcgccgtggcgatggttccccgtctcttccctttcctctccctcctcgcgatgctccccatcgcgggtcggtgctctctggttgctcgcttcctttttggttctctgcacagctgcactgcacccgattgcgggagtttctattttttaagcgccagagcgattctgatcttccttcgactgcgtgttgcatagggttggtgttcatcgcggctatcgtgctcggccgcctgtggaggaggttcatcggggtggcggcgtcggccccgctcttcgtgctcttcaacatcctcctattgtggggcgtttacgtattcgtaatccggagagaaacttcttctctgctggacatgctaataaatgcagagtgtgcacttcttctgtggggattctacaggattttatctggtgatcctggtattgttgcttgtgattcttcatatttggaagaagctggctgcaaggattttgtggaagctatatactcgagtgagaaactcccaatgctctcaagggtcaggcagtgtacctggtgcaaagcaaacattaggggctatgaccatcattgtcctgcatttggtacttgcataggacagaaaaatcatcgtctatttatggcccttttgacaggatttgttgttgctgaatcaacatatacgatgtgctcaacaaaatatattaccagatgcatcagttcagggactataagatcggaggtatctatgcccatatcttattctttgtgcatgaattgtaaggcaattttgtttggaaaatgtatgtctgtgccattgtctcagctagtatttcgatttttaccagttttttctgaaccatttacttggatgaaataattaaaaacagtggcaataatggaaacagtaattaacctgattgtacacacctacatctttcattttgtttccaagaatttcttgcagtttactgtttttgaaggtgctcagcttccttccaccccccatatttcttgaacacgcaggagaagctgaccttaggaaataagctaattgttaagtaaatgtgttcaaccatactcattattttttcctcttctaggactatttagatgttttagcatagtagctattcattctttttctcaaacacaacgctttttactgcatatgcatagtgagtgcatttgtatgtctttagtactttcaatggtaatatatttaaatcaggtcaaccatgatatagtggaaagcaattatattaagctatgttctgggccttttgagttggtcttccatgtttctgagaaacttacaacttcccttttgttttatttttccatcaaactgtacccttggtttctgatatctgtaagaatgaccgcaagatgcttactgagtgtactcatttactttccagaatcctgtatctttaaacatagtaatcagtacaacgctcttctctatcctccaggtcctctggcaggtcgtcttctcgttagctgtttcttgtagctaaaaggtgagattttccagattaactggaagaaatatcctgaattccagatgaaggaacaacctcgatcagattctgaagtcaaatttgtgaacccatatgacaagggcatgctgtgtaacataagagaatttctaaagccggaatgatagatagccaattttgagtacgaagacctggaactagaaagatgggaagtctgaagtgcgttataactggatggaagcttgtttccttgttggctatagattttcaggaatctattctgatgttgtagccgtttagttgagattccagatttatgacagcgaatctggttcagtaaactgaaccaaacacactctgaggatcattgaactccctgtagtttaatgtgcaagtaacattcttttgtaaggttactttcacttatggaattcatatcgtggtcctgcatttttcaccgtttggtctgacgttctgtgggaaaagggtcgcacctgtagggatttgaaataatttgaagggaattgccgtgcttttgtctatga

SEQ ID NO: 1243 - DNA, 3387 bp, Zea Mays
gtgggggcgggcgcgcgcgcgcggtggatccgcgggagcgcgcgcgggatccgcgggaggttggggatagcggggcagtctacacgtgactcttaataattaggtctaaatgtgatttaaaaaaaagacaaataaaaaaattcggacgacctacgcacacgctcagacaggtttacgcgctgacaagctgcccttccgcgaactacacgttcgacgaaatgccgccgcgagagtcgagacctcttcatcgtcaactgagattcgcctagcatcttctcggattccttccccaactttcgtccccatcagcggacctactcgagatcgacgagactcgtcggagcccggttcctaggcgtcccagcgcccgactggatctcctggctcgggccgccttgatggtccctggggtcggtccggggtggagttcgaggcgatgagcaggcttgcgtcggggctccagcgcttgcggaggtcgtcgtcgcagtgggaggtgctgtggtcggcgctcgcgtcatgcggcctagtgcttttctcgcagctcgccgtggcgatggttccccggttggtgttcatcgcggctatcgtgctcggccgcctgtggaggaggttcatcggggtggcggcgtcggccccgctcttcgtgctcttcaacatcctcctattgtggggcgtttacgtattcgtaatccggagagaaacttcttctctgctggacatgctaataaatgcagagtgtgcacttcttctgtggggattctacaggattttatctggtgatcctggtattgttgcttgtgattcttcatatttggaagaagctggctgcaaggattttgtggaagctatatactcgagtgagaaactcccaatgctctcaagggtcaggcagtgtacctggtgcaaagcaaacattaggggctatgaccatcattgtcctgcatttggtacttgcataggacagaaaaatcatcgtctatttatggcccttttgacaggatttgttgttgctgaatcaacatatacgatgtgctcaacaaaatatattaccagatgcatcagttcagggactataagatcggaggtatctatgcccatatcttattctttgtgcatgaattgtaaggcaattttgtttggaaaatgtatgtctgtgccattgtctcagctagtatttcgatttttaccagttttttctgaaccatttacttggatgaaataattaaaaacagtggcaataatggaaacagtaattaacctgattgtacacacctacatctttcattttgtttccaagaatttcttgcagtttactgtttttgaaggtgctcagcttccttccaccccccatatttcttgaacacgcaggagaagctgaccttaggaaataagctaattgttaagtaaatgtgttcaaccatactcattattttttcctcttctaggactatttagatgttttagcatagtagctattcattctttttctcaaacacaacgctttttactgcatatgcatagtgagtgcatttgtatgtctttagtactttcaatggtaatatatttaaatcaggtcaaccatgatatagtggaaagcaattatattaagctatgttctgggccttttgagttggtcttccatgtttctgagaaacttacaacttcccttttgttttatttttccatcaaactgtacccttggtttctgatatctgtaagaatgaccgcaagatgcttactgagtgtactcatttactttccagaatcctgtatctttaaacatagtaatcagtacaacgctcttctctatcctccaggtcctctggcaggtttgctcctaacccttgtgatgtaatgtcagctctttctcttctgcttttatctgttattccatgattttttgtccttatagactctgcttttgaggtagattgtcacggttgttagagagctttagaaaatctatgtattatgtgtgttttacctcatgcctatgctgtatgctcccattgatcatccttattgaactattaaaaaaataccactcaaattaggcagcatgtggatatttactggagtttttttatggttttccatgtattaaactgacaagttttcaggctactgtgataccacattacaacttgccagtctggttggcatcaattcacaacatgtacaaatctaaatgagatttttcttattcatgtgaataaatactctcaggctgtgaactgaagtcatcagtaaaaagaggaagtgtgttcagcccggaattcgaaagcatgccacaagaaatacgacttcagtccacttaatcattgttatatttgggagtgttggctagatatattgaaatagtcatctgccatatgtgttgcatgtggcagaacttgaaatgtctttccaccaattcttttagcatttagagacaagacagtactcctatctacatttgcaattgctatgcctataccaagcacgctaattaaaactgcagccttatgttgtactccctctgatcccaaagataagtccatctgatctcccaaatgcaataaacatgagtccatgataactccattgaaccttttttgcttcgttcatccttgtctatccctacttaaatgtgattaatcaatgcaattcacttgccacctgtcttaactctagcaatgattgatgagtaatttagtcattgtatccccaccatagttccagtgccaaatccaaatggacatatatttgggattggagggagtattgcataagctagtgattgtattatttctaatagatcctccgtgctgttaccagattgtattcttgatgtggcacatatattgcatctgcttcaacatcaagacagatgagtggattaactggaagaaatatcctgaattccagatgaaggaacaacctcgatcagattctgaagtcaaatttgtgaacccatatgacaagggcatgctgtgtaacataagagaatttctaaagccggaatgatagatagccaattttgagtacgaagacctggaactagaaagatgggaagtctgaagtgcgttataactggatggaagcttgtttccttgttggctatagattttcaggaatctattctgatgttgtagccgtttagttgagattccagatttatgacagcgaatctggttcagtaaactgaaccaaacacactctgaggatcattgaactccctgtagtttaatgtgcaagtaacattcttttgtaaggttactttcacttatggaattcatatcgtggtcctgcatttttcaccgtttggtctgacgttctgtgggaaaagggtcgcacctgtagggatttgaaataatttgaagggaattgccgtgcttttgtctatga

SEQ ID NO: 1244 - DNA, 1986 bp, Zea Mays
gtgggggcgggcgcgcgcgcgcggtggatccgcgggagcgcgcgcgggatccgcgggaggttggggatagcggggcagtctacacgtgactcttaataattaggtctaaatgtgatttaaaaaaaagacaaataaaaaaattcggacgacctacgcacacgctcagacaggtttacgcgctgacaagctgcccttccgcgaactacacgttcgacgaaatgccgccgcgagagtcgagacctcttcatcgtcaactgagattcgcctagcatcttctcggattccttccccaactttcgtccccatcagcggacctactcgagatcgacgagactcgtcggagcccggttcctaggcgtcccagcgcccgactggatctcctggctcgggccgccttgatggtccctggggtcggtccggggtggagttcgaggcgatgagcaggcttgcgtcggggctccagcgcttgcggaggtcgtcgtcgcagtgggaggtgctgtggtcggcgctcgcgtcatgcggcctagtgcttttctcgcagctcgccgtggcgatggttccccgtctcttccctttcctctccctcctcgcgatgctccccatcgcgggtcggtgctctctggttgctcgcttcctttttggttctctgcacagctgcactgcacccgattgcgggagtttctattttttaagcgccagagcgattctgatcttccttcgactgcgtgttgcatagggttggtgttcatcgcggctatcgtgctcggccgcctgtggaggaggttcatcggggtggcggcgtcggccccgctcttcgtgctcttcaacatcctcctattgtggggcgtttacgtattcgtaatccggagagaaacttcttctctgctggacatgctaataaatgcagagtgtgcacttcttctgtggggattctacaggattttatctggtgatcctggtattgttgcttgtgattcttcatatttggaagaagctggctgcaaggattttgtggaagctatatactcgagtgagaaactcccaatgctctcaagggtcaggcagtgtacctggtgcaaagcaaacattaggggctatgaccatcattgtcctgcatttggtacttgcatagaaaaatcatcgtctatttatggcccttttgacaggatttgttgttgctgaatcaacatatacgatgtgctcaacaaaatatattaccagatgcatcagttcagggactataagatcggagaatcctgtatctttaaacatagtaatcagtacaacgctcttctctatcctccaggtcctctggcagattgtattcttgatgtggcacatatattgcatctgcttcaacatcaagacagatgagtgggtaatttcaaatttcccatgctttggagtcttcgttcatcaattgcaggtcgtcttctcgttagctgtttcttgtagctaaaaggtgagattttccagattaactggaagaaatatcctgaattccagatgaaggaacaacctcgatcagattctgaagtcaaatttgtgaacccatatgacaagggcatgctgtgtaacataagagaatttctaaagccggaatgatagatagccaattttgagtacgaagacctggaactagaaagatgggaagtctgaagtgcgttataactggatggaagcttgtttccttgttggctatagattttcaggaatctattctgatgttgtagccgtttagttgagattccagatttatgacagcgaatctggttcagtaaactgaaccaaacacactctgaggatcattgaactccctgtagtttaatgtgcaagtaacattcttttgtaaggttactttcacttatggaattcatatcgtggtcctgcatttttcaccgtttggtctgacgttctgtgggaaaagggtcgcacctgtagggatttgaaataatttgaagggaattgccgtgcttttgtctatga

SEQ ID NO: 1245 - DNA, 1120 bp, Zea Mays
ccgattgtgattttggacgctatcgattgctgtggatatatgctatttttgtgttgatgcattgacttgagcaaagctgacgaagtttcctggtttagaaacttcttctctgctggacatgctaataaatgcagagtgtgcacttcttctgtggggattctacaggattttatctggtgatcctggtattgttgcttgtgattcttcatatttggaagaagctggctgcaaggattttgtggaagctatatactcgagtgagaaactcccaatgctctcaagggtcaggcagtgtacctggtgcaaagcaaacattaggggctatgaccatcattgtcctgcatttggtacttgcataggacagaaaaatcatcgtctatttatggcccttttgacaggatttgttgttgctgaatcaacatatacgatgtgctcaacaaaatatattaccagatgcatcagttcagggactataagatcggagaatcctgtatctttaaacatagtaatcagtacaacgctcttctctatcctccaggtcctctggcagattgtattcttgatgtggcacatatattgcatctgcttcaacatcaagacagatgagtggattaactggaagaaatatcctgaattccagatgaaggaacaacctcgatcagattctgaagtcaaatttgtgaacccatatgacaagggcatgctgtgtaacataagagaatttctaaagccggaatgatagatagccaattttgagtacgaagacctggaactagaaagatgggaagtctgaagtgcgttataactggatggaagcttgtttccttgttggctatagattttcaggaatctattctgatgttgtagccgtttagttgagattccagatttatgacagcgaatctggttcagtaaactgaaccaaacacactctgaggatcattgaactccctgtagtttaatgtgcaagtaacattcttttgtaaggttactttcacttatggaattcatatcgtggtcctgcatttttcaccgtttggtctgacgttctgtgggaaaagggtcgcacctgtagggatttgaaataatttgaagggaattgccgtgcttttgtctatga

SEQ ID NO: 1246 - DNA, 1711 bp, Zea Mays
ggatttgttgttgctgaatcaacatatacgatgtgctcaacaaaatatattaccagatgcatcagttcagggactataagatcggagaatcctgtatctttaaacatagtaatcagtacaacgctcttctctatcctccaggtcctctggcaggtttgctcctaacccttgtgatgtaatgtcagctctttctcttctgcttttatctgttattccatgattttttgtccttatagactctgcttttgaggtagattgtcacggttgttagagagctttagaaaatctatgtattatgtgtgttttacctcatgcctatgctgtatgctcccattgatcatccttattgaactattaaaaaaataccactcaaattaggcagcatgtggatatttactggagtttttttatggttttccatgtattaaactgacaagttttcaggctactgtgataccacattacaacttgccagtctggttggcatcaattcacaacatgtacaaatctaaatgagatttttcttattcatgtgaataaatactctcaggctgtgaactgaagtcatcagtaaaaagaggaagtgtgttcagcccggaattcgaaagcatgccacaagaaatacgacttcagtccacttaatcattgttatatttgggagtgttggctagatatattgaaatagtcatctgccatatgtgttgcatgtggcagaacttgaaatgtctttccaccaattcttttagcatttagagacaagacagtactcctatctacatttgcaattgctatgcctataccaagcacgctaattaaaactgcagccttatgttgtactccctctgatcccaaagataagtccatctgatctcccaaatgcaataaacatgagtccatgataactccattgaaccttttttgcttcgttcatccttgtctatccctacttaaatgtgattaatcaatgcaattcacttgccacctgtcttaactctagcaatgattgatgagtaatttagtcattgtatccccaccatagttccagtgccaaatccaaatggacatatatttgggattggagggagtattgcataagctagtgattgtattatttctaatagatcctccgtgctgttaccagattgtattcttgatgtggcacatatattgcatctgcttcaacatcaagacagatgagtggattaactggaagaaatatcctgaattccagatgaaggaacaacctcgatcagattctgaagtcaaatttgtgaacccatatgacaagggcatgctgtgtaacataagagaatttctaaagccggaatgatagatagccaattttgagtacgaagacctggaactagaaagatgggaagtctgaagtgcgttataactggatggaagcttgtttccttgttggctatagattttcaggaatctattctgatgttgtagccgtttagttgagattccagatttatgacagcgaatctggttcagtaaactgaaccaaacacactctgaggatcattgaactccctgtagtttaatgtgcaagtaacattcttttgtaaggttactttcacttatggaattcatatcgtggtcctgcatttttcaccgtttggtctgacgttctgtgggaaaagggtcgcacctgtagggatttgaaataatttgaagggaattgccgtgcttttgtctatga

SEQ ID NO: 1247 - DNA, 2531 bp, Zea Mays
cacgtatcggaacaaggcaagcgaacaagagggagtaagagatgcgcgcgtacccttgccgcggtgacgggaggagcgcttcctgggaaggaagccgagggagccgtgcctcgggtgctcgaacttacggttcttgatagagagaaaataatgaagactttccaggatgtcactgcaagacttgaacaagccttagctggtatctcgtttgatgaacttaatatatctgatgaagtaagagagcaggttgaattggtgcatactcagttcaaaagagctaaggaacggtcagattcatctgatgatgatctttttaatgagctgatgtctctatgtaattcaagcagcagtgatagtgttgacccagatactcttcgaaggttatctgagaagttgcagcttgtcacaatatatgacctcaatcatgaatctctgaccttgcatgagatggctagtggcggtgatcctggtgcagttgttgaaaagatgtcaatgctcctcaaaaggattaaggattttgtgcagacagaagaccctgagatgggtgcccaagcaagtacagcaaccatttctacaaaagacaattcagcatgtcctgttattcccgatgatttccgttgcccaatatcactggatttaatgaaagatccagttattgttgccactgggcagacttatgagcgggggtacatagagatgtggctggaggctggccatgatacctgtccgaagacacaacagaagcttgccaataaatccctgaccccaaattatgtcttacgtagtctcataactcaatggtgcgaggcaaatggtattgagcctccaaaacgccctgctcaacttagggatgcaccactgtcatgtagtgctgctgagcatagcaatgttcttgagcttcttcagaaattgtcttcccaaaaccttgaagatcaacgtggctctgctggtatgcttcgtcaacttgccaagcgcagtgctgaaaatcgtgcttgtattggagatgctggtgctattcctattcttgttagtctgctatcaaccactgatgttagcacccaggaacatgtggttactgctctcttgaatctttccatctacgaagagaacaaggcaagaataatatcttctggagctgttcctggaattgtgcatgtgttaaagaggggcagcatggaggctcgggagaattcagctgccacacttttcagcctatctattgtagatgagaacaaggtgactattgggtgttcaggggcaattcctgcacttgtgcagctattgagtaatggaagccaacggggtaaaaaggatgcggcaacagcactatttaacttgtgtatttaccagggcaacaaggggaaagctgtaagagctggattggtacctatactactagaactgctcatggagactgaaagtgggatggtagatgaggcccttgcaatattggcaatcctctcaggccatcctgaggggaagacagctatcggcgctgcttctgcaatacctgtacttgttggagttatcagaaatggatctccaaggaacaaggaaaatgctgctgctgttatggtgcatctatgcagtggtgagcagcagcaacagcatcttgctgaagcacaggagcagggcatcgtgtctttgctggaggagctagcagaaagtggcacggacagaggaaagaggaaagctgtgcagctgctcgaacgaatgaatcggttcctaaagcagcagagtcaagccgaagccgaagcagaggccatggcacaggctcatgcacaagcacaagcacaagcacaagcacaagcacaagcgcagcctcagatcctggttcaagctcaagcacatgcagatatgcaagctgaacgatcactacttcccacatcatctgacatttcggatagatgaggtttttgatcagcagcttgttttgtctagtaactggcttgttttttttaagctcaggctgtcaggtggaagattgcctgcaactgttattgtggaggtttctggtttctgttgaacactgcaaattaggaggtctgggcagcgtgatttaggtccatgagcatgttgacaggtgggttctgagtcagtttttaacctgcgtgtgttcgtaaaatgtaccggtgattgaaggtagtaagtatatcctcgagttttaggaggtatcgttgaacttgtacccggtacgagcccagtacaggactaattctggcgccctaggctaagtgcctgacaaagttgcaggaaagctttagttcagaaaaatgtttgttcatcgagtccggtgcagttggttcagctgtcttctgtgagttgtttgcgttgaaaaaaagcggttggttcagctgtcttgtgtgggttgtttgttgtgaaaaaactgccgcaagctgtatgctgtgaaaagttaaaaatcgtttggcttaagctgctgtgaaacagtagacttaacaagatttggctgtgttgtccctgagattgtttatatgcaaattgataatacaacgttttttgtgttgactaac

SEQ ID NO: 1248 - DNA, 2802 bp, Zea Mays
ctcccccctgctcggccacaaacccacaatcccgtgtctccggccaccgtgctgcgcaggccgaggcccgagcttgagcgtttggtctgctgccatggatgacgaatctaagtctgctcctaaatcggatgtgaacaccgacgctggcgcggaagccgcggcggccgccgctccgctgccgccctcgagctcagaaacggcggagacggaggcaagggttgaggcggcggatggggagagccaggtggttgagcggttggtcgagcttgtgagcgagatcgcggccatctcggacttcaggaactcgtaccggcgtcagttctgcaacctgtcgcggcggatccggctcctcgtgcccatgctggaggaggccaaggaagcgcccacgccacttacggtggcatcggaggccgcgctacggcggctcagggaggcgctccacgccgccagggatctgctccagctcggcagcagcggcagcaagatcttcctggttcttgatagagagaaaataatgaagactttccaggatgtcactgcaagacttgaacaagccttagctggtatctcgtttgatgaacttaatatatctgatgaagtaagagagcaggttgaattggtgcatactcagttcaaaagagctaaggaacggttatctgagaagttgcagcttgtcacaatatatgacctcaatcatgaatctctgaccttgcatgagatggctagtggcggtgatcctggtgcagttgttgaaaagatgtcaatgctcctcaaaaggattaaggattttgtgcagacagaagaccctgagatgggtgcccaagcaagtacagcaaccatttctacaaaagacaattcagcatgtcctgttattcccgatgatttccgttgcccaatatcactggatttaatgaaagatccagttattgttgccactgggcagacttatgagcgggggtacatagagatgtggctggaggctggccatgatacctgtccgaagacacaacagaagcttgccaataaatccctgaccccaaattatgtcttacgtagtctcataactcaatggtgcgaggcaaatggtattgagcctccaaaacgccctgctcaacttagggatgcaccactgtcatgtagtgctgctgagcatagcaatgttcttgagcttcttcagaaattgtcttcccaaaaccttgaagatcaacgtggctctgctggtatgcttcgtcaacttgccaagcgcagtgctgaaaatcgtgcttgtattggagatgctggtgctattcctattcttgttagtctgctatcaaccactgatgttagcacccaggaacatgtggttactgctctcttgaatctttccatctacgaagagaacaaggcaagaataatatcttctggagctgttcctggaattgtgcatgtgttaaagaggggcagcatggaggctcgggagaattcagctgccacacttttcagcctatctattgtagatgagaacaaggtgactattgggtgttcaggggcaattcctgcacttgtgcagctattgagtaatggaagccaacggggtaaaaaggatgcggcaacagcactatttaacttgtgtatttaccagggcaacaaggggaaagctgtaagagctggattggtacctatactactagaactgctcatggagactgaaagtgggatggtagatgaggcccttgcaatattggcaatcctctcaggccatcctgaggggaagacagctatcggcgctgcttctgcaatacctgtacttgttggagttatcagaaatggatctccaaggaacaaggaaaatgctgctgctgttatggtgcatctatgcagtggtgagcagcagcaacagcatcttgctgaagcacaggagcagggcatcgtgtctttgctggaggagctagcagaaagtggcacggacagaggaaagaggaaagctgtgcagctgctcgaacgaatgaatcggttcctaaagcagcagagtcaagccgaagccgaagcagaggccatggcacaggctcatgcacaagcacaagcacaagcacaagcacaagcacaagcgcagcctcagatcctggttcaagctcaagcacatgcagatatgcaagctgaacgatcactacttcccacatcatctgacatttcggatagatgaggtttttgatcagcagcttgttttgtctagtaactggcttgttttttttaagctcaggctgtcaggtggaagattgcctgcaactgttattgtggaggtttctggtttctgttgaacactgcaaattaggaggtctgggcagcgtgatttaggtccatgagcatgttgacaggtgggttctgagtcagtttttaacctgcgtgtgttcgtaaaatgtaccggtgattgaaggtagtaagtatatcctcgagttttaggaggtatcgttgaacttgtacccggtacgagcccagtacaggactaattctggcgccctaggctaagtgcctgacaaagttgcaggaaagctttagttcagaaaaatgtttgttcatcgagtccggtgcagttggttcagctgtcttctgtgagttgtttgcgttgaaaaaaagcggttggttcagctgtcttgtgtgggttgtttgttgtgaaaaaactgccgcaagctgtatgctgtgaaaagttaaaaatcgtttggcttaagctgctgtgaaacagtagacttaacaagatttggctgtgttgtccctgagattgtttatatgcaaattgataatacaacgttttttgtgttgactaac

SEQ ID NO: 1249 - DNA, 2878 bp, Zea Mays
ccctgctcggccacaaacccacaatcccgtgtctccggccaccgtgctgcgcaggccgaggcccgagcttgagcgtttggtctgctgccatggatgacgaatctaagtctgctcctaaatcggatgtgaacaccgacgctggcgcggaagccgcggcggccgccgctccgctgccgccctcgagctcagaaacggcggagacggaggcaagggttgaggcggcggatggggagagccaggtggttgagcggttggtcgagcttgtgagcgagatcgcggccatctcggacttcaggaactcgtaccggcgtcagttctgcaacctgtcgcggcggatccggctcctcgtgcccatgctggaggaggccaaggaagcgcccacgccacttacggtggcatcggaggccgcgctacggcggctcagggaggcgctccacgccgccagggatctgctccagctcggcagcagcggcagcaagatcttcctggttcttgatagagagaaaataatgaagactttccaggatgtcactgcaagacttgaacaagccttagctggtatctcgtttgatgaacttaatatatctgatgaagttgaattggtgcatactcagttcaaaagagctaaggaacggtcagattcatctgatgatgatctttttaatgagctgatgtctctatgtaattcaagcagcagtgatagtgttgacccagatactcttcgaaggttatctgagaagttgcagcttgtcacaatatatgacctcaatcatgaatctctgaccttgcatgagatggctagtggcggtgatcctggtgcagttgttgaaaagatgtcaatgctcctcaaaaggattaaggattttgtgcagacagaagaccctgagatgggtgcccaagcaagtacagcaaccatttctacaaaagacaattcagcatgtcctgttattcccgatgatttccgttgcccaatatcactggatttaatgaaagatccagttattgttgccactgggcagacttatgagcgggggtacatagagatgtggctggaggctggccatgatacctgtccgaagacacaacagaagcttgccaataaatccctgaccccaaattatgtcttacgtagtctcataactcaatggtgcgaggcaaatggtattgagcctccaaaacgccctgctcaacttagggatgcaccactgtcatgtagtgctgctgagcatagcaatgttcttgagcttcttcagaaattgtcttcccaaaaccttgaagatcaacgtggctctgctggtatgcttcgtcaacttgccaagcgcagtgctgaaaatcgtgcttgtattggagatgctggtgctattcctattcttgttagtctgctatcaaccactgatgttagcacccaggaacatgtggttactgctctcttgaatctttccatctacgaagagaacaaggcaagaataatatcttctggagctgttcctggaattgtgcatgtgttaaagaggggcagcatggaggctcgggagaattcagctgccacacttttcagcctatctattgtagatgagaacaaggtgactattgggtgttcaggggcaattcctgcacttgtgcagctattgagtaatggaagccaacggggtaaaaaggatgcggcaacagcactatttaacttgtgtatttaccagggcaacaaggggaaagctgtaagagctggattggtacctatactactagaactgctcatggagactgaaagtgggatggtagatgaggcccttgcaatattggcaatcctctcaggccatcctgaggggaagacagctatcggcgctgcttctgcaatacctgtacttgttggagttatcagaaatggatctccaaggaacaaggaaaatgctgctgctgttatggtgcatctatgcagtggtgagcagcagcaacagcatcttgctgaagcacaggagcagggcatcgtgtctttgctggaggagctagcagaaagtggcacggacagaggaaagaggaaagctgtgcagctgctcgaacgaatgaatcggttcctaaagcagcagagtcaagccgaagccgaagcagaggccatggcacaggctcatgcacaagcacaagcacaagcacaagcacaagcacaagcgcagcctcagatcctggttcaagctcaagcacatgcagatatgcaagctgaacgatcactacttcccacatcatctgacatttcggatagatgaggtttttgatcagcagcttgttttgtctagtaactggcttgttttttttaagctcaggctgtcaggtggaagattgcctgcaactgttattgtggaggtttctggtttctgttgaacactgcaaattaggaggtctgggcagcgtgatttaggtccatgagcatgttgacaggtgggttctgagtcagtttttaacctgcgtgtgttcgtaaaatgtaccggtgattgaaggtagtaagtatatcctcgagttttaggaggtatcgttgaacttgtacccggtacgagcccagtacaggactaattctggcgccctaggctaagtgcctgacaaagttgcaggaaagctttagttcagaaaaatgtttgttcatcgagtccggtgcagttggttcagctgtcttctgtgagttgtttgcgttgaaaaaaagcggttggttcagctgtcttgtgtgggttgtttgttgtgaaaaaactgccgcaagctgtatgctgtgaaaagttaaaaatcgtttggcttaagctgctgtgaaacagtagacttaacaagatttggctgtgttgtccctgagattgtttatatgcaaattgataatacaacgttttttgtgttgactaac

SEQ ID NO: 1250 - DNA, 430 bp, Zea Mays
ggcgcctcgcgccctcgcccctcttgctcccctcccgccgccagccccgttggggagaggaaaaggaggattaggaaattcttgtctgacgagtagcagaatttctctacgtcgttggctgttgcagcgaggtccgggccttcgtgggatttttcatactctacagtcgtatgattgattctacatattgaagaaaaaacagggccttcgctatgatgcgcaaaaaagaagaaaaaaaggagggaggtttccatctttgccatcagtggcggcgcctcctgcttcttcgttagtgaccacggtctccactgccattgcgctccatgttctcgttgtcgcacgcttctcatgtattttgcgtatttttaatgttacaatacacgcgcgcatgacgtgcacactatactctgtagttaccatatcaatgctg

SEQ ID NO: 1251 - DNA, 2545 bp, Zea Mays
ctcagttttatttgggacctgcagtgctggatctacaatgataggtcgagctctttgatgcctgcatatggaatccaagaatcatatcataataagaaacaagaaaatgggttaagaactagggctagtttggcaacgtcatttttctaaggaatttccattttcccaatggaaattagttcattttcccttcggaaaatggagttgttaaactagcccttaagaaccacaaattgacattgaaaacatatccttactctttccaaccaatattgattgtgtgctcaataaaattgagaccttttggcatgtaagagaggatatgaaggatgtctgataaatatgggggcaacaacataaatattagtttcaataattgttttttgggggggtgccagtttgtagagcacttcgaacaaacaattgttgtactacaaaacaacaggttgataacttttttgttttgaaaaaaaaaatatccatagatattaacaatcttaagacttttgagcaagtccagaagcttgaacaacttccgttttgcatccagtcctactaatattgagatccagcatttactgctcttgataattcagttggtgtcccttaggttacacattaagatggacccaactgtgatgggcttgatgctctggctgcactcatgttatgacattaagttgattaactcggtagttggtaccagggttagcaatttccaaatggaaattccgaaatttcggtggtttcggctgggggcgaaaaaaagcactttggccaaaaaaacgtgtaaatttgggctccacgccaaaacgggctgcaaaacagcccacaaatcccccaaaccctaaatcctgactcactccctccaatcccacccgaaatttgggcatttggcggcggctctccctccaatcccactctcgccacgcgctctgcccgctcgccgcgcgcctgctcgtcgctcgccactcacctgcaggcttggactggtatgtgagacaactctaggaggaccacactgcgcttctacacttacgccattgatatgcaggtgtttgagttttggttgtgatggaaatgccttgtttgcagttttgattgtgatggaaggaggcagtgtacgggacaagggaaaacagccatgtattggtgaatcatcatctgcccgtgaatgagtggttactaccgatggtaacgctttctagcattagattagcactattgagttctcacatgcaaactggaagtataaattttaattctctagtggaaagtcattttttagattagcactttgtttattgttttgcgtcatttatttttatattactaggaactcgcaaacaactacaaggttctattgatgactcatggagtcatggtgagaagtggaagaaacagggattcaagtgtgcttattgcgggtgtgctaaggagagtgaaggtaagacccgtctaaggtgtcatctagctggtttgtcaggagatgacaagtcatgcctgaaagtaccaaagcgtgtgaggggggtaattttgaatgactatgcaagagggaaaaaaggagggcagattataaagagcataaactctttgtggataaggcaattatagatttagcatatagtgatgctagaagagaacaaatacctagggatgaagctggacagatggcgtgggcactaagggaatcattgttggatcaaaagacatctagcaatagcccacctgtaggcagaagtagcactgggacaagcaataccaccccaccattagctacaggctctcgtagtcagagtaggatgtataggtactatcggagtccaagtgtgactcagaacatatgtgatatagatttgcaatgcagtaagatgtcaacacaacctaggatagacattatgctacatgggggtgccaaagagagacttggtaaaacttaggcaaaatggttccatgccaatgatattcctggaagcaaagcagactgtccatattttatagcagcagtaaaactatctcagcagcttggggaaggagtgcctgttccaaggggaagagatatagatgggtcattactaaatatgaactatgaggacctacaaactcgcatggaccgataaaaggaagattgaggttgctttagggtcactattatgtgtgattcatggacagggccaaccatgatgtgcattattaattttatgatttgttgcaatggtcgcatgttttttcataaaaccgtggatgcaactggtcaaatacaaaatgcagaatttatttatgattgcattaaggaagttgttaaagatgttggatagagttgtgttgttcaaattgtgaacgataatggttccaattacaagaaagcatgcaagcaacttatagccgagtatccacatattacttggcaggcatgtgccgctcacactattaatttaatattgaaggacatagcacgttgtgatgaggttgatgaactattgtatagtgctaagcggatatgcagatttttgtacaagcataataggtaatatttatattttgt

SEQ ID NO: 1252 - DNA, 871 bp, Zea Mays
ctccatgggtcatcaatagaaccttgcagttgtttgcgagttcctagtaatataaaaataaataacgcaaaacaataaacaaagtgctaatctaaaacaataaataacttttcactagagaactaaaatttctacttccagtttgaatgtgagaactcaatagtgctaatctaatgctagaaagcgttagcatcggtaataaccactcattcacaggctggctgcagcagatggtgattcaccaatacataactcttttcccttgtcacgtacattgcatcattccatcgtaatcaaaactgcaaacaagacatttccatcacaaccaaaactcaaacacctgcatatcaatggtgtaagtgtagaagcacagggtggtcctcctagagttgtactcacataccagtccaagcctccaggtgagtggcggccgagcaggtgagtggcgagcgacgagcaggcgagcgcggccgagcagaggagcggcgagcaggcgagcgcggccgagcagagggcgcggagcggcgagcagcaggcgagtggcgagcagagcgagcggctgcgcgcggcgagagtgggattggagggagagccgccgccaaatgcccaaattttgggtgggattggagagactgagtcaggatttagggttttgcggattcgtgggcagccaggcaggctggggcagcggcgtttcctgctggctagagaatatgtatatgaacagaattttgctgttgcggctgctgctttgtgtgtccttcaaggtccaaattccaaacctactcgagagtttcagatacagcagggagcaattagcaaggcgactgatcttggtaattagcagcggagagtaggaagttaatctttc

SEQ ID NO: 1253 - DNA, 2709 bp, Zea Mays
ctcctctttaactctcctcgcctccgttaccgtcttccccctttccacctccccccaccccgctgtgctcatccatcgaccgcgacgagcccccgcccgccgattcgactacgtttattttttttatttcatttgatttgattgcaaagcaccgcagcagcaggaggaggggaagggagggatcgttggaccgtcgttcggctggatggtggaggcggttcgtcgatttgagggcaccgggtttcttggacctgcgtaggtaaaaaacaccagccccatttccctctcggccggcggatggacgcgagggaggtgtgaagcctggtcgctaactgatgctcgtggagagattcggaggagaggagcgcgccgtgcggaggcggtggaggaggaagcgccgacgatttggacagcgcagcgacggaaggggagcagcaggcggacgaggagcgagccgccaggaggacgacggccgccgccgccgccgccgccatgggcgagtcgctgctcaccgcgctctccatggacaccgccacagcccaccacccgcaccagggcccctccaccttcctctccatggacaccgcctcccacgacgacttcgacctcttcctccagccacaggggcccttccgccgctgcctacatgccgcggcggtcgccccccctgacatcaaccttcccctagccgccgacccgtctccgccacctctggcgtcgctcgacgccaacgttgacatgctagatgtcggcctcggcggctcgcagcactacgactcggattcgcccgctgccgctgggccagtctcggccccggcagcagcagcgaccaccatggtcgccgtgtcccacaccaagggctccggttccagtgctgcgcgcaagtgtgtcaagaggaatgttagcatctggggagcgtggttcttcttcacccactacttcaagccagtcatgtctgcggacaaggctggcaaagcgaaggcagccaccaccaccggcgggaacggcaatagcgccacactggacgctttcctggtgcagcacgacatggagaacatctacatgtgggtgtttaaggagcgtccggagaatgccctggggaagatgcagctgaggagcttcatgaatgggcactcacgccttggggagccacagttcccattcagcgcagacaaagggtttgtgcgctcacaccggatgcagcgcaagcactaccgtggcctctctaacccacagtgtcttcatgggatcgaaatcgtgagggcgccaaatttggcgggtgtacctgaggctgatttaaagaggtggatgcagctcactgggagggacgccaatttctcggtcccaactgaggcgagtgattttgagtcctggaggaatctgccgagcacagactttgagctcgagaggccagcaaccgcggctcctgcaaagagcagttcacatggacaccacaagaagttgctgaacggttctggccttaacctctcgacgcaaccatccaatcacagttctggggatggcatggagatcacagccacctgtaacaagcgcaggaaggattcctcaccgaccgcaatggaagaggactgcagcaattcgaattcggacaaggcccaagacatggatgtgatccacaccttcgagccatcatggatgaatgacttctcaggtgtgatgcgccatgcttctggaccagtaaccgctgcaaaaacaatatacgaggacagcaagggctacttgatcatcgttagcctgcctttcgctgattttcagaaggttggcggatcctgctcctgagcattgcccgccgggagagtttgtccgggagatcccactccctacccgaatccctgaagacgccactctggaagcgtactgcgatgaaacagggacagggctggagattattgtcccgaagttccgcgttggccctgaagaacacgaagtgcatgtgtccatgaggccaccctcgtcctggtgccaatgaaacctgtttccaagcttgcggggggagacacacatacggtgtggaggtttgccgtaaggctaaggctactgcacaacaaatgcagctcagttttgctaattttgatgggaaacagtccttgattgattgaagcattctggtagttggccgccgcagcgtttggaacattttaggaaatatgctacgggtcgcaaggaacatgcttgcattacttagttcttgtatggggatacacctagtgtgttacatttcgtttccgttgtgtcgaaagactggttgtctgctcgatgtgctgcaatccgtgcatcgcccacccgtcacgagcaacaatctgtttgtgttgtacacagaatggcaactggatgtataggggcatttatagtcattttccatagattgaggtttgctttgtgggcatcgtgtaaaattcgtctcagattgatggaaactaggaagaaaaagaagatggcagtgtctttaggatttggcgaagttgtaatggggattaggcggtgctgtagcattctgtctagtttccaggaatttgtagaagacaaatgtaaatctgttgttccgtcatcaatatagaaaagtggtctgtgtctaccagcaaatgccttgtgtacgatcttaaccatccagcacgttttgtgccgtactttaatgaggcagagcccacgggtgttgttgcgttctggtctcaactcatgagatcattc

SEQ ID NO: 1254 - DNA, 2705 bp, Zea Mays
ctcctctttaactctcctcgcctccgttaccgtcttccccctttccacctccccccaccccgctgtgctcatccatcgaccgcgacgagcccccgcccgccgattcgactacgtttattttttttatttcatttgatttgattgcaaagcaccgcagcagcaggaggaggggaagggagggatcgttggaccgtcgttcggctggatggtggaggcggttcgtcgatttgagggcaccgggtttcttggacctgcgtaaaaaacaccagccccatttccctctcggccggcggatggacgcgagggaggtgtgaagcctggtcgctaactgatgctcgtggagagattcggaggagaggagcgcgccgtgcggaggcggtggaggaggaagcgccgacgatttggacagcgcagcgacggaaggggagcagcaggcggacgaggagcgagccgccaggaggacgacggccgccgccgccgccgccgccatgggcgagtcgctgctcaccgcgctctccatggacaccgccacagcccaccacccgcaccagggcccctccaccttcctctccatggacaccgcctcccacgacgacttcgacctcttcctccagccacaggggcccttccgccgctgcctacatgccgcggcggtcgccccccctgacatcaaccttcccctagccgccgacccgtctccgccacctctggcgtcgctcgacgccaacgttgacatgctagatgtcggcctcggcggctcgcagcactacgactcggattcgcccgctgccgctgggccagtctcggccccggcagcagcagcgaccaccatggtcgccgtgtcccacaccaagggctccggttccagtgctgcgcgcaagtgtgtcaagaggaatgttagcatctggggagcgtggttcttcttcacccactacttcaagccagtcatgtctgcggacaaggctggcaaagcgaaggcagccaccaccaccggcgggaacggcaatagcgccacactggacgctttcctggtgcagcacgacatggagaacatctacatgtgggtgtttaaggagcgtccggagaatgccctggggaagatgcagctgaggagcttcatgaatgggcactcacgccttggggagccacagttcccattcagcgcagacaaagggtttgtgcgctcacaccggatgcagcgcaagcactaccgtggcctctctaacccacagtgtcttcatgggatcgaaatcgtgagggcgccaaatttggcgggtgtacctgaggctgatttaaagaggtggatgcagctcactgggagggacgccaatttctcggtcccaactgaggcgagtgattttgagtcctggaggaatctgccgagcacagactttgagctcgagaggccagcaaccgcggctcctgcaaagagcagttcacatggacaccacaagaagttgctgaacggttctggccttaacctctcgacgcaaccatccaatcacagttctggggatggcatggagatcacagccacctgtaacaagcgcaggaaggattcctcaccgaccgcaatggaagaggactgcagcaattcgaattcggacaaggcccaagacatggatgtgatccacaccttcgagccatcatggatgaatgacttctcaggtgtgatgcgccatgcttctggaccagtaaccgctgcaaaaacaatatacgaggacagcaagggctacttgatcatcgttagcctgcctttcgctgattttcagaaggttggcggatcctgctcctgagcattgcccgccgggagagtttgtccgggagatcccactccctacccgaatccctgaagacgccactctggaagcgtactgcgatgaaacagggacagggctggagattattgtcccgaagttccgcgttggccctgaagaacacgaagtgcatgtgtccatgaggccaccctcgtcctggtgccaatgaaacctgtttccaagcttgcggggggagacacacatacggtgtggaggtttgccgtaaggctaaggctactgcacaacaaatgcagctcagttttgctaattttgatgggaaacagtccttgattgattgaagcattctggtagttggccgccgcagcgtttggaacattttaggaaatatgctacgggtcgcaaggaacatgcttgcattacttagttcttgtatggggatacacctagtgtgttacatttcgtttccgttgtgtcgaaagactggttgtctgctcgatgtgctgcaatccgtgcatcgcccacccgtcacgagcaacaatctgtttgtgttgtacacagaatggcaactggatgtataggggcatttatagtcattttccatagattgaggtttgctttgtgggcatcgtgtaaaattcgtctcagattgatggaaactaggaagaaaaagaagatggcagtgtctttaggatttggcgaagttgtaatggggattaggcggtgctgtagcattctgtctagtttccaggaatttgtagaagacaaatgtaaatctgttgttccgtcatcaatatagaaaagtggtctgtgtctaccagcaaatgccttgtgtacgatcttaaccatccagcacgttttgtgccgtactttaatgaggcagagcccacgggtgttgttgcgttctggtctcaactcatgagatcattc

SEQ ID NO: 1255 - DNA, 3305 bp, Zea Mays
aaaagccatataaaaaaaaaaagggaaactcccaatcagcacgcacgtttcagcatccagtagctagagctgcaggctgcagccgtcagccgcacccgaggccgagagcccagagccgagaggcgagttgggcggctgtgctggccggccatggcgaagccaggcggcagcgatgagtcgtgggagtacagtctgcgcaagtatctcctgctgctggccacgctggtggccacggtgacgtacggtgcggggttcaaccccccaggcggcgtctggcagactgccgaccccgccgtcgaccgcatcgccggcgaccccatcatccgcgacacgaactacgcccgctacctgtccttcttctacagcaacgccaccgccttcgcctcgtcgctcgtggtcatcgtcctcgtcctcatcctgtccgtgctgcacgacaacgggggaatcaccatgctcgcgccgctgctcggcgtcctccgggccgtcatggtgctggacctgctcagcctcatgggcgcctacgcggcggggacgttccgggacacgctcacggcggtctactccctggtgctgtcggccggcgtcgtcgcctacctcgtggcccacctggccctggcctcgagggcgccggcggccgaggacaagagggggcagagcgcgccggagcggctccgcaaggtgctcatgctcctcgccacgttcgccgcgagcgtcacgtacgtcgccggcctcagcgcgccgggcggcttctgggaccactccgaggacggccaccgcccgggcgacgcgatcctcaagggagggccccacgacgcgcgcctcaaggccttcttcgtctgcaacaccacggcgttcgtcgcgtccctgctcatcctcgtcatgctcctggagaagaagctctgcttcagccagaaggtgcgctcctacgagatctacggcttcatcgccgtcacgctcatcagcctcctgggggcgtatgctgccggcagcagccgccagatcgacacgaccatctatgtgagcgctcttgttggtgctgttgccgtgtgcattctcatccaagtggttttcgttttgctcttccaagcaaattcgaccgaggggcaacaaacacgaactcaaggtcccctaacaaataatggcaatggcagtgatgagcgtcagcagactcaaggtccgcaaacaagcatggacagtaatgacagcagcaacaaacccacggtctgcaaactagtgatgacaatgtcagtgaccaccaccagcagcagcaacaaactcagagtcctcaaactagcaatggcaatggcaatgccagcgatgagcatgagaagcaacaaaatccagcgctggagaaggctcgctctcttgtcctgctgctcgctactctcgcagcggcaatcacctaccaagcgggcctgaacccgccgggtggcctctggcagagcaacggccgcctctacaagatcggtgatccgatcctcttgaccacgaaccccagacggtacaaggcattctactactgcaactccgtcgccttcgtcgcctccttggtcgccgttatgctggttaggaagaagacactgcaccaccacaacgcgctggaggccgccatggtactggacctgttcggcctcatcggcgcttacgccgccgggagctgccgggacgtcagcacgtccatctacgccatggcccttgcaggcgccgtgctggtctacgtggtcatccatgtcgtcttcttgacgctggacgaaaaggacggcagcagcgcgagaaggaatgatgacgcttccttcgaggagagagagaaaaaggaggcgggcctggtggagaagaggcgcaaacgactgctcctattcgccatcttggccgcgaccatcacctaccaagccgggctgacaccgccgggcggctttctggtccaggacgataaccgtaccggccgccatgccggcgacgcggtcctgctcaacaactacccgcgccgttacacggctttcttctactgcaactcggtgagcttcatgctgtccatcgccctcatcatcctcctcgtgaaccccaacctgtaccgccctgccattcggagcaatgcgctgtctgtctgcacggcggccgggttgattggaatcatgggcggctacgcggccggctgcacgcagcatctgaagacatccatctatatcttcgtgttggcggccgtggttctgtccactgtggtctttctggctgcggtgttccttgtgatccatctgagaaaaaaaagacgataatgctaacagcaccaacagagcagcagcaagagaggcacctggggaagaacaagaagccaatgctggtgctggggtgccaaatgccatggggggcgagcaaagaggtccccaaggagccaaagctcgccgaaaagaaaagagggcacacgccaagcgcaagtatctgatgctgcttggaatcctcgtggcgagcgtgacctaccaggccgggctggcgccgccgggcggggcgtggcagtccaacgacggcacccacaccgcgggcgaccctgtgatgcacgactaccggagggcccggtaccttgccttcttctacagcaactccacctccttcgtggcgtccgtggtcgtcgtcgtgcttctgctgccggagtcgctgcacaagaagtggtggtggctcggggtcatgaacgcgacgatcgtgctggacctgctgggcctcttgatcgcctatgccgccgggtccagcaggacgtggaagacttctgtggttgtttccgctctcgttctcgctgtgctcgcctatttcgccatacatgtgctgctgtcaagctgcgtcaggagagggaagaagacagcccccgactctccgtctccgccccaggaccaggagaacagagaggaaaacgaagcggcaacgaaagaggtcgagctccagggtccagcttgctgaaactggagtgtacagtgcggagctgaatgtgtgtgcagtccagtacttgtagatttttttttcacgaccgtgttgtcgcattttttttttttgtcaagaggtgtagtgtttttgttgatccacgtagcgggcgggaacgattgatgtgcaatcaagtgttagatgtaagtgtacaaacaagtctgcgtgcaagcgaggcttctctgtctttttagatcatgtagtcttcgcgtgggtcataaatgacttcacgggtttggaacagtcttactgaatatcagcgtacctgatgactggatattactgtacgagctgattcctgaggagtcaaaatctcctgcgaaaagcatgaacagaag

SEQ ID NO: 1256 - DNA, 3004 bp, Zea Mays
acgtttcagcatccagtagctagagctgcaggctgcagccgtcagccgcacccgaggccgagagcccagagccgagaggcgagttgggcggctgtgctggccggccatggcgaagccaggcggcagcgatgagtcgtgggagtacagtctgcgcaagtatctcctgctgctggccacgctggtggccacggtgacgtacggtgcggggttcaaccccccaggcggcgtctggcagactgccgaccccgccgtcgaccgcatcgccggcgaccccatcatccgcgacacgaactacgcccgctacctgtccttcttctacagcaacgccaccgccttcgcctcgtcgctcgtggtcatcgtcctcgtcctcatcctgtccgtgctgcacgacaacgggggaatcaccatgctcgcgccgctgctcggcgtcctccgggccgtcatggtgctggacctgctcagcctcatgggcgcctacgcggcggggacgttccgggacacgctcacggcggtctactccctggtgctgtcggccggcgtcgtcgcctacctcgtggcccacctggccctggcctcgagggcgccggcggccgaggacaagagggggcagagcgcgccggagcggctccgcaaggtgctcatgctcctcgccacgttcgccgcgagcgtcacgtacgtcgccggcctcagcgcgccgggcggcttctgggaccactccgaggacggccaccgcccgggcgacgcgatcctcaagggagggccccacgacgcgcgcctcaaggccttcttcgtctgcaacaccacggcgttcgtcgcgtccctgctcatcctcgtcatgctcctggagaagaagctctgcttcagccagaaggtgcgctcctacgagatctacggcttcatcgccgtcacgctcatcagcctcctgggggcgtatgctgccggcagcagccgccagatcgacacgaccatctatgtgagcgctcttgttggtgctgttgccgtgtgcattctcatccaagtggttttcgttttgctcttccaagcaaattcgaccgaggggcaacaaacacgaactcaaggtcccctaacaaataatggcaatggcagtgatgagcgtcagcagactcaaggtccgcaaacaagcatggacagtaatgacagggatgagcagcagcaacaaacccacggtctgcaaactagtgatgacaatgtcagtgaccaccaccagcagcagcaacaaactcagagtcctcaaactagcaatggcaatggcaatgccagcgatgagcatgagaagcaacaaaatccagcgctggagaaggctcgctctcttgtcctgctgctcgctactctcgcagcggcaatcacctaccaagcgggcctgaacccgccgggtggcctctggcagagcaacggccgcctctacaagatcggtgatccgatcctcttgaccacgaaccccagacggtacaaggcattctactactgcaactccgtcgccttcgtcgcctccttggtcgccgttatgctggttaggaagaagacactgcaccaccacaacgcgctggaggccgccatggtactggacctgttcggcctcatcggcgcttacgccgccgggagctgccgggacgtcagcacgtccatctacgccatggcccttgcaggcgccgtgctggtctacgtggtcatccatgtcgtcttcttgacgctggacgaaaaggacggcagcagcgcgagaaggaatgatgacgcttccttcgaggagagagagaaaaaggaggcgggcctggtggagaagaggcgcaaacgactgctcctattcgccatcttggccgcgaccatcacctaccaagccgggctgacaccgccgggcggctttctggtccaggacgataaccgtaccggccgccatgccggcgacgcggtcctgctcaacaactacccgcgccgttacacggctttcttctactgcaactcgcaccaacagagcagcagcaagagaggcacctggggaagaacaagaagccaatgctggtgctggggtgccaaatgccatggggggcgagcaaagaggtccccaaggagccaaagctcgccgaaaagaaaagagggcacacgccaagcgcaagtatctgatgctgcttggaatcctcgtggcgagcgtgacctaccaggccgggctggcgccgccgggcggggcgtggcagtccaacgacggcacccacaccgcgggcgaccctgtgatgcacgactaccggagggcccggtaccttgccttcttctacagcaactccacctccttcgtggcgtccgtggtcgtcgtcgtgcttctgctgccggagtcgctgcacaagaagtggtggtggctcggggtcatgaacgcgacgatcgtgctggacctgctgggcctcttgatcgcctatgccgccgggtccagcaggacgtggaagacttctgtggttgtttccgctctcgttctcgctgtgctcgcctatttcgccatacatgtgctgctgtcaagctgcgtcaggagagggaagaagacagcccccgactctccgtctccgccccaggaccaggagaacagagaggaaaacgaagcggcaacgaaagaggtcgagctccagggtccagcttgctgaaactggagtgtacagtgcggagctgaatgtgtgtgcagtccagtacttgtagatttttttttcacgaccgtgttgtcgcattttttttttttgtcaagaggtgtagtgtttttgttgatccacgtagcgggcgggaacgattgatgtgcaatcaagtgttagatgtaagtgtacaaacaagtctgcgtgcaagcgaggcttctctgtctttttagatcatgtagtcttcgcgtgggtcataaatgacttcacgggtttggaacagtcttactgaatatcagcgtacctgatgactggatattactgtacgagctgattcctgaggagtcaaaatctcctgcgaaaagcatgaacagaag

SEQ ID NO: 1257 - DNA, 3327 bp, Zea Mays
acgtttcagcatccagtagctagagctgcaggctgcagccgtcagccgcacccgaggccgagagcccagagccgagaggcgagttgggcggctgtgctggccggccatggcgaagccaggcggcagcgatgagtcgtgggagtacagtctgcgcaagtatctcctgctgctggccacgctggtggccacggtgacgtacggtgcggggttcaaccccccaggcggcgtctggcagactgccgaccccgccgtcgaccgcatcgccggcgaccccatcatccgcgacacgaactacgcccgctacctgtccttcttctacagcaacgccaccgccttcgcctcgtcgctcgtggtcatcgtcctcgtcctcatcctgtccgtgctgcacgacaacgggggaatcaccatgctcgcgccgctgctcggcgtcctccgggccgtcatggtgctggacctgctcagcctcatgggcgcctacgcggcggggacgttccgggacacgctcacggcggtctactccctggtgctgtcggccggcgtcgtcgcctacctcgtggcccacctggccctggcctcgagggcgccggcggccgaggacaagagggggcagagcgcgccggagcggctccgcaaggtgctcatgctcctcgccacgttcgccgcgagcgtcacgtacgtcgccggcctcagcgcgccgggcggcttctgggaccactccgaggacggccaccgcccgggcgacgcgatcctcaagggagggccccacgacgcgcgcctcaaggccttcttcgtctgcaacaccacggcgttcgtcgcgtccctgctcatcctcgtcatgctcctggagaagaagctctgcttcagccagaaggtgcgctcctacgagatctacggcttcatcgccgtcacgctcatcagcctcctgggggcgtatgctgccggcagcagccgccagatcgacacgaccatctatgtgagcgctcttgttggtgctgttgccgtgtgcattctcatccaagtggttttcgttttgctcttccaagcaaattcgaccgaggggcaacaaacacgaactcaaggtcccctaacaaataatggcaatggcagtgatgagcgtcagcagactcaaggtccgcaaacaagcatggacagtaatgacagggatgagcagcagcaacaaacccacggtctgcaaactagtgatgacaatgtcagttcaaaactacttcccctgcaattttgacgggttggttttcactgtcatttatcagtgaccaccaccagcagcagcaacaaactcagagtcctcaaactagcaatggcaatggcaatgccagcgatgagcatgagaagcaacaaaatccagcgctggagaaggctcgctctcttgtcctgctgctcgctactctcgcagcggcaatcacctaccaagcgggcctgaacccgccgggtggcctctggcagagcaacggccgcctctacaagatcggtgatccgatcctcttgaccacgaaccccagacggtacaaggcattctactactgcaactccgtcgccttcgtcgcctccttggtcgccgttatgctggttaggaagaagacactgcaccaccacaacgcgctggaggccgccatggtactggacctgttcggcctcatcggcgcttacgccgccgggagctgccgggacgtcagcacgtccatctacgccatggcccttgcaggcgccgtgctggtctacgtggtcatccatgtcgtcttcttgacgctggacgaaaaggacggcagcagcgcgagaaggaatgatgacgcttccttcgaggagagagagaaaaaggaggcgggcctggtggagaagaggcgcaaacgactgctcctattcgccatcttggccgcgaccatcacctaccaagccgggctgacaccgccgggcggctttctggtccaggacgataaccgtaccggccgccatgccggcgacgcggtcctgctcaacaactacccgcgccgttacacggctttcttctactgcaactcggtgagcttcatgctgtccatcgccctcatcatcctcctcgtgaaccccaacctgtaccgccctgccattcggagcaatgcgctgtctgtctgcacggcggccgggttgattggaatcatgggcggctacgcggccggctgcacgcagcatctgaagacatccatctatatcttcgtgttggcggccgtggttctgtccactgtggtctttctggctgcggtgttccttgtgatccatctgagaaaaaaaagacgataatgctaacagcaccaacagagcagcagcaagagaggcacctggggaagaacaagaagccaatgctggtgctggggtgccaaatgccatggggggcgagcaaagaggtccccaaggagccaaagctcgccgaaaagaaaagagggcacacgccaagcgcaagtatctgatgctgcttggaatcctcgtggcgagcgtgacctaccaggccgggctggcgccgccgggcggggcgtggcagtccaacgacggcacccacaccgcgggcgaccctgtgatgcacgactaccggagggcccggtaccttgccttcttctacagcaactccacctccttcgtggcgtccgtggtcgtcgtcgtgcttctgctgccggagtcgctgcacaagaagtggtggtggctcggggtcatgaacgcgacgatcgtgctggacctgctgggcctcttgatcgcctatgccgccgggtccagcaggacgtggaagacttctgtggttgtttccgctctcgttctcgctgtgctcgcctatttcgccatacatgtgctgctgtcaagctgcgtcaggagagggaagaagacagcccccgactctccgtctccgccccaggaccaggagaacagagaggaaaacgaagcggcaacgaaagaggtcgagctccagggtccagcttgctgaaactggagtgtacagtgcggagctgaatgtgtgtgcagtccagtacttgtagatttttttttcacgaccgtgttgtcgcattttttttttttgtcaagaggtgtagtgtttttgttgatccacgtagcgggcgggaacgattgatgtgcaatcaagtgttagatgtaagtgtacaaacaagtctgcgtgcaagcgaggcttctctgtctttttagatcatgtagtcttcgcgtgggtcataaatgacttcacgggtttggaacagtcttactgaatatcagcgtacctgatgactggatattactgtacgagctgattcctgaggagtcaaaatctcctgcgaaaagcatgaacagaag

SEQ ID NO: 1258 - DNA, 3099 bp, Zea Mays
acgtttcagcatccagtagctagagctgcaggctgcagccgtcagccgcacccgaggccgagagcccagagccgagaggcgagttgggcggctgtgctggccggccatggcgaagccaggcggcagcgatgagtcgtgggagtacagtctgcgcaagtatctcctgctgctggccacgctggtggccacggtgacgtacggtgcggggttcaaccccccaggcggcgtctggcagactgccgaccccgccgtcgaccgcatcgccggcgaccccatcatccgcgacacgaactacgcccgctacctgtccttcttctacagcaacgccaccgccttcgcctcgtcgctcgtggtcatcgtcctcgtcctcatcctgtccgtgctgcacgacaacgggggaatcaccatgctcgcgccgctgctcggcgtcctccgggccgtcatggtgctggacctgctcagcctcatgggcgcctacgcggcggggacgttccgggacacgctcacggcggtctactccctggtgctgtcggccggcgtcgtcgcctacctcgtggcccacctggccctggcctcgagggcgccggcggccgaggacaagagggggcagagcgcgccggagcggctccgcaaggtgctcatgctcctcgccacgttcgccgcgagcgtcacgtacgtcgccggcctcagcgcgccgggcggcttctgggaccactccgaggacggccaccgcccgggcgacgcgatcctcaagggagggccccacgacgcgcgcctcaaggccttcttcgtctgcaacaccacggcgttcgtcgcgtccctgctcatcctcgtcatgctcctggagaagaagctctgcttcagccagaagcaaattcgaccgaggggcaacaaacacgaactcaaggtcccctaacaaataatggcaatggcagtgatgagcgtcagcagactcaaggtccgcaaacaagcatggacagtaatgacagggatgagcagcagcaacaaacccacggtctgcaaactagtgatgacaatgtcagtgaccaccaccagcagcagcaacaaactcagagtcctcaaactagcaatggcaatggcaatgccagcgatgagcatgagaagcaacaaaatccagcgctggagaaggctcgctctcttgtcctgctgctcgctactctcgcagcggcaatcacctaccaagcgggcctgaacccgccgggtggcctctggcagagcaacggccgcctctacaagatcggtgatccgatcctcttgaccacgaaccccagacggtacaaggcattctactactgcaactccgtcgccttcgtcgcctccttggtcgccgttatgctggttaggaagaagacactgcaccaccacaacgcgctggaggccgccatggtactggacctgttcggcctcatcggcgcttacgccgccgggagctgccgggacgtcagcacgtccatctacgccatggcccttgcaggcgccgtgctggtctacgtggtcatccatgtcgtcttcttgacgctggacgaaaaggacggcagcagcgcgagaaggaatgatgacgcttccttcgaggagagagagaaaaaggaggcgggcctggtggagaagaggcgcaaacgactgctcctattcgccatcttggccgcgaccatcacctaccaagccgggctgacaccgccgggcggctttctggtccaggacgataaccgtaccggccgccatgccggcgacgcggtcctgctcaacaactacccgcgccgttacacggctttcttctactgcaactcggtgagcttcatgctgtccatcgccctcatcatcctcctcgtgaaccccaacctgtaccgccctgccattcggagcaatgcgctgtctgtctgcacggcggccgggttgattggaatcatgggcggctacgcggccggctgcacgcagcatctgaagacatccatctatatcttcgtgttggcggccgtggttctgtccactgtggtctttctggctgcggtgttccttgtgatccatctgagaaaaaaaagacgataatgctaacagcaccaacagagcagcagcaagagaggcacctggggaagaacaagaagccaatgctggtgctggggtgccaaatgccatggggggcgagcaaagaggtccccaaggagccaaagctcgccgaaaagaaaagagggcacacgccaagcgcaagtatctgatgctgcttggaatcctcgtggcgagcgtgacctaccaggccgggctggcgccgccgggcggggcgtggcagtccaacgacggcacccacaccgcgggcgaccctgtgatgcacgactaccggagggcccggtaccttgccttcttctacagcaactccacctccttcgtggcgtccgtggtcgtcgtcgtgcttctgctgccggagtcgctgcacaagaagtggtggtggctcggggtcatgaacgcgacgatcgtgctggacctgctgggcctcttgatcgcctatgccgccgggtccagcaggacgtggaagacttctgtggttgtttccgctctcgttctcgctgtgctcgcctatttcgccatacatgtgctgctgtcaagctgcgtcaggagagggaagaagacagcccccgactctccgtctccgccccaggaccaggagaacagagaggaaaacgaagcggcaacgaaagaggtcgagctccagggtccagcttgctgaaactggagtgtacagtgcggagctgaatgtgtgtgcagtccagtacttgtagatttttttttcacgaccgtgttgtcgcattttttttttttgtcaagaggtgtagtgtttttgttgatccacgtagcgggcgggaacgattgatgtgcaatcaagtgttagatgtaagtgtacaaacaagtctgcgtgcaagcgaggcttctctgtctttttagatcatgtagtcttcgcgtgggtcataaatgacttcacgggtttggaacagtcttactgaatatcagcgtacctgatgactggatattactgtacgagctgattcctgaggagtcaaaatctcctgcgaaaagcatgaacagaag

SEQ ID NO: 1259 - DNA, 2198 bp, Zea Mays
tcgtcctccttgcgtacctaacgcatgcctaatcgcgggagtaaacaaacatcgctcggtgacagtggggcggggcggggcgggcgcgtcccgggcgcgctgcgctgtcgccatcgatcgcacgcggcacccgttggaatctcgcgcgcgggggggcaccagcacctttgcttccattggaagcgcaaatgtctgctccgcctcgtcgcccctgcacggattactggtttcttatatggaaaaagtggaggaattaattgtggagtcgggtggtgagatctgattttagattggttgattagcccggttggtagaagcagtcggtggtggtggtggtggtgcactgcttctacctcccctgcatctctgctcgggtgtgtgtgaagcgcgggctctatataagtacgactcagatctgagacgatgccacctcgtccgccccagtctagtccgattcaaacccgcccgttccccgtgtccgagccacgcaagcgcgctccacgcgatggcgcagaaggagaccaatggcagcaacggcgagcacatctccacccgcccgccgccgaccccgtcgcccctccgcttctccaagttcttccaggctaacctgcggatcctggtcactggtggggcgggcttcatcggctcgcacctcgtggacaggctcatggagaacgagaaacacgaggtcattgttgctgataactttttcactggttcaaaagataacctgaagaagtggatcggacacccaagatttgagctcatccgccatgatgtcaccgagccacttcttgtggaggttgaccagatctatcaccttgcttgccctgcttcaccaatcttctacaagcacaatcctgttaagaccatcaagacaaatgttattggtaccctgaacatgctgggccttgcaaagagagttggagctaggattttgttgacatcaacatctgaagtttatggtgatccgcttgagcatcctcaaaccgaggcctactggggcaatgttaacccaattggagtcaggagctgttatgatgagggtaagcgtgtagcagagacgctgatgttcgactatcacaggcagcatggcattgaaatccgaattgccaggattttcaacacctatggaccaaggatgaacattgacgatggccgtgttgttagcaacttcattgctcaggctgtgcgtggcgaaccccttactgtccagaagccaggaacacagactaggagcttctgctatgtcgccgatatggttgatggtcttattagactgatgaatggaaacaacactgggccgattaacttggggaacccaggtgaattcaccatgctggaacttgctgagaatgtgaaggagttgattaacccagatataacagtgacgatgaccgagaacactcctgatgatccccgccagaggaagccggacatcaccaaggcaaaggaagttctagggtgggagcccaagatcgtcctgaaggacggcttggtgctcatggaggatgatttccgggagcgcctggccgtgcccaagaaaaccaaggcctaaactgccctgcggtgggcgaagaatatccacgggggagcatactcatagttggcttgtcattattcgtggccacatttcattacggaatttgagttccaataaacggaatataccttcgtcgatcaccttgaaggattgtatcattagaattttcatacagggctggccttttgagtctctgcctacgcacgcagatgttgtggttcttgtgtttgtagcctatatgtactccctgagtcgattatagaaatgtttattccattttgagttttttgttccttccttttgctttgccgtctaagactgagatgacgccagctgcgctgcagatttgtgattgtaatggactggccatggcaaggtgtcgttgtctctctcaaattctgtaaaatggagtactactataaaccacagtctagtctggtttcggaggcttttccaacgagcgagaagctacagaatcacaatctagtctggttcggcgcttttccaacaagaagagctttgtttcggtgcttctccaacgagatgccacgagcagcagaagagcttccgggaaagtgcaggcgtagaaacacacagaacagaaccttctttacctcgatcgacaaaaacgcctccgtccatgacatgtgggccc

SEQ ID NO: 1260 - DNA, 898 bp, Zea Mays
gaattttaacttttgttactacacagtgaattcaccatgctggaacttgctgagaatgtgaaggagttgattaacccagatataacagtgacgatgaccgagaacactcctgatgatccccgccagaggaagccggacatcaccaaggcaaaggaagttctagggtgggagcccaagatcgtcctgaaggacggcttggtgctcatggaggatgatttccgggagcgcctggccgtgcccaagaaaaccaaggcctaaactgccctgcggtgggcgaagaatatccacgggggagcatactcatagttggcttgtcattattcgtggccacatttcattacggaatttgagttccaataaacggaatataccttcgtcgatcaccttgaaggattgtatcattagaattttcatacagggctggccttttgagtctctgcctacgcacgcagatgttgtggttcttgtgtttgtagcctatatgtactccctgagtcgattatagaaatgtttattccattttgagttttttgttccttccttttgctttgccgtctaagactgagatgacgccagctgcgctgcagatttgtgattgtaatggactggccatggcaaggtgtcgttgtctctctcaaattctgtaaaatggagtactactataaaccacagtctagtctggtttcggaggcttttccaacgagcgagaagctacagaatcacaatctagtctggttcggcgcttttccaacaagaagagctttgtttcggtgcttctccaacgagatgccacgagcagcagaagagcttccgggaaagtgcaggcgtagaaacacacagaacagaaccttctttacctcgatcgacaaaaacgcctccgtccatgacatgtgggccc

SEQ ID NO: 1261 - DNA, 4214 bp, Zea Mays
agcccgggcaccgcgtccgcgactccgcgtctccgcctgcaactgcaaagagtatagaaggcacgcggcgaagcggccaggagttcctcctcgccccgcgttgagttgccagcacggcccctccctctcgttctcctcgactcctccccgtcgcggcagccagccagcaggcatcgtgatcgtctgccctggttcccgccctcgctccatcccccggcacccccgcacgggacgcgcgtgtggacgttcttcgcctccgcgacaggcttgcgccccggctcggctcgggtctgcctccactgcggccttcctggatctcggccgccgctcctccatattataacatatcacagaactatcagacaaggatggcgacttacgagcccaagaacattctcatcaccggtgctgctggttttattgcatcgcatgtcaccaactgtctggttaggaactacccgcactacaagattgttgtcctcgacaagctcgattactgctccagcctaaagaacctcaacccctcacgggcttcaccaaatttgaagtttgtcaagggtgacattgcaagtgctgatctggtgaaccaccttctggtcacagagtcgattgacaccatcatgcactttgctgctcagactcatgtagataattcatttggcaattcatttgagttcacaaaaaacaatatatatggtacccacgtccttcttgaggcttgcaaggtcactggccagatcaggaggtttattcatgtcagtactgatgaggtctatggagaaactgatgaagatgctgtggttggtaatcatgaggcctcacagctgcttccaacaaatccgtattcagctacaaaagctggggctgaaatgcttgtgatggcatatggaagatcttatggtcttcctgtgataaccactcggggcaacaacgtgtatgggccaaatcagttccctgagaaacttattcccaaattcattcttttggccatgagaggtctgcctcttccaattcatggagatggttccaatgtcaggagctacctatattgtgaggatgtggctgaagcttttgaggttgttcttcacaaaggggaggttggacatgtgtataatattggtactgtgaaggagaggagggtgattgatgtggccaaagacatttgcaggctctttggcttggatactgagaaagtaatcaggtttgttgagaacaggcccttcaatgaccagaggtacttcttggatgatcagaagcttaagagactgggatgggcagagcgcacaccatgggaagagggcttgaagaagacaatcgagtggtacaccaccaatcctgattactggggagatgtcactggtgctttgctccctcacccaaggatgttgatgattcctggagttgaaaggcataactggactgaggatatcaaatctctgacttcttcaccagctgaagctagcacaacagctcctgcaaccagtgccaaaaggaccactgctgcccctcaaaagcctttgtacaagttcttaatctatggcaggactggatggattggtggcctccttgggaagatttgtgacaagcaagggataccatatgaatatgggaaaggacgcttggaggagcgctctcagctgttggaggacattagaaatgtgaagccaactcaagtttttaatgctgccggagtcactgggagaccaaatgttgattggtgtgagacccataaacaggacaccatccgcaccaatgttgtaggcatattgaatcttgctgatgtctgtcgcgagcaaggtctgctaatgattaattatgctacaggttgtatatttgagtatgatgccaagcacccggaaaggtctggtattggctttaaagaggaagacacacccaactttacgggttccttttattccaaaacaaaagcaatggtggaagagctgttgaaggagtatgataatgtctgtactcttagggtcaggatgcctatatcatcagatctaaacaatcctcgtaacttcatcacaaagatagctcgttacgacaaggtggtgaacattcccaacagcatgacaattttggatgagcttctgcccatctccattgagatggcaaaacgggactgcaggggcatatggaacttcaccaaccctggcgttgtcagccacaatgagattctggagatgtacaagaaatacatcaatcctgattttaagtggaccaacttcacactcgaagagcaatccaaggtcatagtcgcacctagaagcaacaatgagatggatgcgtcgaaattgaaggccgagttctctcaactgatgtccatcaaggattctttgatcaaatatgtctttgagcctaacaggaaggttccagctaattgaggatttaggataagaagggcatcgaggttgctggattgttgttggggatattgttcatccagatcccactgaagatagccagcgcccagcgtagccacatgttcaatcatcatccccgtcgttgatatggttctcagttgctgaattgtttgcttaaggcatgtttgtttgagtcctaccatttggaattttgtctcaaaatctgggttttgactttcagctgttttcttccctattggcttttataatactctctctatcccaaaatataatgcttaagacctctaattttttacctatataaatcatagacaagaaaataatttatctagaagtgcaactatggataggtgttaaaagtcgtctagagaaggggtgaatagacgaaaactaaaaattataaactttgaacacgcgcttcacccggggttagagttcgaaataaataataataaattatggagtgcagaagatagtttttcttgctatgagttgctcaatcaatgcggataactttgagagccaactcaaaaggttgtgagcaagagaactttagaaagagaggagagggaagaaacaaatcgagtgatgaagatcaacacaaatgaacatggtgatttgtttcccgaggttcggttccaaagaacctactccccgttgaggagtccacataggccgggtctatttcaaccctttctctctcaatcgatcacttagaccggtcgagtgcttcttcttaatcacacgggtcactaagaccctacaaggatcaccacacaattaagtgtctcttgcttgctttacaaatcacttagaaagtttagagagagataaagaaagcatgattaaaagtcaagcaacaagagcaataaaaaaagacacaaaatcatgctctctcaagtcactaatcactagcctttccgaagcagatcaaaaaatcaaggagtttgaaaagaaacaagagacagatgcgaagcgtattgttgatttagaatatgcactgtctattcaggtggatttgcacagatatgaagtgcaaggattggataagaatctcgatgaagtaattgaaaatttcaatgtagaacaaacaaaacgtgagatatctgatatggaacgattgagggtgcagaaaaatgttgaggagcttcgtcagactaaagagaaatgctataaggttgctatggaatgttgtaataatttgaaaaatagttttgctaaggttggcgcattctcttcggagcagaactttatctgtggtgatcctgatggggttatccagtggattagcggcgaagccaaagcttttgaggagatcctcggtgatagaggagacttctgcgccttcgccagcgcccgcggagctgtatcggtccttgagaaggttggttgcgaacatgccaaggttgtggttcagctaggattcccgctctcagccaacgacattaggaacccttcggccgaagctgccgcactaagtggaaagttttattccgaagtctggttgagaggtggccgagagatagctgacgaagctatcagaaagaacgagaaagagcctcatgatgccttggaagaggccagaaaaactaaagaaggtgctgaacctgcaaaacttatagctgagctctctccccctccggggccatataatcctgaagccgatctatctctgaaggaggcgcttgacgtaattagaatagctaacgaagatgttgacgaagctattaacatgttgctaaacgaagctgctaacaaagttttaaaagaagatgactagagcttgtctattgagacttaaggatttttgtatacaacttctttttt

SEQ ID NO: 1262 - DNA, 4217 bp, Zea Mays
agcccgggcaccgcgtccgcgactccgcgtctccgcctgcaactgcaaagagtatagaaggcacgcggcgaagcggccaggagttcctcctcgccccgcgttgagttgccagcacggcccctccctctcgttctcctcgactcctccccgtcgcggcagccagccagcaggcatcgtgatcgtctgccctggttcccgccctcgctccatcccccggcacccccgcacgggacgcgcgtgtggacgttcttcgcctccgcgacaggcttgcgccccggctcggctcgggtctgcctccactgcggccttcctggatctcggccgccgctcctccatattataacatatcacagaactatcagacaaggatggcgacttacgagcccaagaacattctcatcaccggtgctgctggttttattgcatcgcatgtcaccaactgtctggttaggaactacccgcactacaagattgttgtcctcgacaagctcgattactgctccagcctaaagaacctcaacccctcacgggcttcaccaaatttgaagtttgtcaagggtgacattgcaagtgctgatctggtgaaccaccttctggtcacagagtcgattgacaccatcatgcactttgctgctcagactcatgtagataattcatttggcaattcatttgagttcacaaaaaacaatatatatggtacccacgtccttcttgaggcttgcaaggtcactggccagatcaggaggtttattcatgtcagtactgatgaggtctatggagaaactgatgaagatgctgtggttggtaatcatgaggcctcacagctgcttccaacaaatccgtattcagctacaaaagctggggctgaaatgcttgtgatggcatatggaagatcttatggtcttcctgtgataaccactcggggcaacaacgtgtatgggccaaatcagttccctgagaaacttattcccaaattcattcttttggccatgagaggtctgcctcttccaattcatggagatggttccaatgtcaggagctacctatattgtgaggatgtggctgaagcttttgaggttgttcttcacaaaggggaggttggacatgtgtataatattggtactgtgaaggagaggagggtgattgatgtggccaaagacatttgcaggctctttggcttggatactgagaaagtaatcaggtttgttgagaacaggcccttcaatgaccagaggtacttcttggatgatcagaagcttaagagactgggatgggcagagcgcacaccatgggaagagggcttgaagaagacaatcgagtggtacaccaccaatcctgattactggggagatgtcactggtgctttgctccctcacccaaggatgttgatgattcctggagttgaaaggcataactggactgaggatatcaaatctctgacttcttcaccagctgaagctagcacaacagctcctgcaaccagtgccaaaaggaccactgctgcccctcaaaagcctttgtacaagttcttaatctatggcaggactggatggattggtggcctccttgggaagatttgtgacaagcaagggataccatatgaatatgggaaaggacgcttggaggagcgctctcagctgttggaggacattagaaatgtgaagccaactcaagtttttaatgctgccggagtcactgggagaccaaatgttgattggtgtgagacccataaacaggacaccatccgcaccaatgttgtaggcatattgaatcttgctgatgtctgtcgcgagcaaggtctgctaatgattaattatgctacaggttgtatatttgagtatgatgccaagcacccggaaaggtctggtattggctttaaagaggaagacacacccaactttacgggttccttttattccaaaacaaaagcaatggtggaagagctgttgaaggagtatgataatgtctgtactcttagggtcaggatgcctatatcatcagatctaaacaatcctcgtaacttcatcacaaagatagctcgttacgacaaggtggtgaacattcccaacagcatgacaattttggatgagcttctgcccatctccattgagatggcaaaacgggactgcaggggcatatggaacttcaccaaccctggcgttgtcagccacaatgagattctggagatgtacaagaaatacatcaatcctgattttaagtggaccaacttcacactcgaagagcaatccaaggtcatagtcgcacctagaagcaacaatgagatggatgcgtcgaaattgaaggccgagttctctcaactgatgtccatcaaggattctttgatcaaatatgtctttgagcctaacaggaaggttccagctaattgaggatttaggataagaagggcatcgagcaggttgctggattgttgttggggatattgttcatccagatcccactgaagatagccagcgcccagcgtagccacatgttcaatcatcatccccgtcgttgatatggttctcagttgctgaattgtttgcttaaggcatgtttgtttgagtcctaccatttggaattttgtctcaaaatctgggttttgactttcagctgttttcttccctattggcttttataatactctctctatcccaaaatataatgcttaagacctctaattttttacctatataaatcatagacaagaaaataatttatctagaagtgcaactatggataggtgttaaaagtcgtctagagaaggggtgaatagacgaaaactaaaaattataaactttgaacacgcgcttcacccggggttagagttcgaaataaataataataaattatggagtgcagaagatagtttttcttgctatgagttgctcaatcaatgcggataactttgagagccaactcaaaaggttgtgagcaagagaactttagaaagagaggagagggaagaaacaaatcgagtgatgaagatcaacacaaatgaacatggtgatttgtttcccgaggttcggttccaaagaacctactccccgttgaggagtccacataggccgggtctatttcaaccctttctctctcaatcgatcacttagaccggtcgagtgcttcttcttaatcacacgggtcactaagaccctacaaggatcaccacacaattaagtgtctcttgcttgctttacaaatcacttagaaagtttagagagagataaagaaagcatgattaaaagtcaagcaacaagagcaataaaaaaagacacaaaatcatgctctctcaagtcactaatcactagcctttccgaagcagatcaaaaaatcaaggagtttgaaaagaaacaagagacagatgcgaagcgtattgttgatttagaatatgcactgtctattcaggtggatttgcacagatatgaagtgcaaggattggataagaatctcgatgaagtaattgaaaatttcaatgtagaacaaacaaaacgtgagatatctgatatggaacgattgagggtgcagaaaaatgttgaggagcttcgtcagactaaagagaaatgctataaggttgctatggaatgttgtaataatttgaaaaatagttttgctaaggttggcgcattctcttcggagcagaactttatctgtggtgatcctgatggggttatccagtggattagcggcgaagccaaagcttttgaggagatcctcggtgatagaggagacttctgcgccttcgccagcgcccgcggagctgtatcggtccttgagaaggttggttgcgaacatgccaaggttgtggttcagctaggattcccgctctcagccaacgacattaggaacccttcggccgaagctgccgcactaagtggaaagttttattccgaagtctggttgagaggtggccgagagatagctgacgaagctatcagaaagaacgagaaagagcctcatgatgccttggaagaggccagaaaaactaaagaaggtgctgaacctgcaaaacttatagctgagctctctccccctccggggccatataatcctgaagccgatctatctctgaaggaggcgcttgacgtaattagaatagctaacgaagatgttgacgaagctattaacatgttgctaaacgaagctgctaacaaagttttaaaagaagatgactagagcttgtctattgagacttaaggatttttgtatacaacttctttttt

SEQ ID NO: 1263 - DNA, 576 bp, Zea Mays
caagaagctacatatttttgaagttactatgttgaaatttggtcgcgcaagttctgatctgcttgcatatggtgcggcagatggtagcttgacggcctactaggtttctgagccaccatctgttcttcaaaacataatggggcattctaaaaatagcataggttagaccacacaacaatgtaacatgaaaatacctttttgtgtagtccataattgtcacacccgggtttcgggggcaccaagacccggacgcgaacataatcaccaggtgtgctgggaccaagtctcacacatatgatgaatcatggcacaagatcgaatgtcacatctttaccacataacggttgttctatacaaaataaataaataattacattataaggagacaatggtccagcaacccaaagttgactgggagacgacggcctagacctctcacgaactcgtcacaacatcctccaagcgcctcatcctgcggtacctgttcttgacctgtgggggggtgtgagacagcaagagtgagctcacatacgttcattgctcaacaagttgtggggaataatgtgcatgaactcg

SEQ ID NO: 1264 - DNA, 1038 bp, Zea Mays
atcaacctaaagtcctaaagaggcaagccagagaaagtatgtagccgaacctccgcccgcccgcgacccaaaagccgaaagcccgaaaccagaggcgggtagggttctagctgcaggcgacggccatggccgcctccgccgccgccccggcgctgcttcgacgcctcttctgcagctctattccagcctcctcctccgtactgcgcgctaccttttgctcctccgccggcttcggctcgtcttctccgtcctccatattcggcgacgccaccgaggtcgccaacgtgccaccgctcaccacgcccaacctcttcgtcagtggcctttcaaggttaacgacagatgagaagctccagggtgcatttgctcctttcgggaggctccttgaagtgtgcttttgtgttactgtgtgcagcaaaagtggtgacggatagagtttctgggaggtcaaagggtttcggtttcgtgagatatgccaccatagaagaggccgagagagcgcggcaggagatgaacgccaagttcctggatggatgggtcatcttcgttgaccctgccaagccaaggcagccaaagcccgctcctcagcaggacactggttcatcgcatgctggcttcacgacgaacaagactgtaggatggtgcggctaggctcattgatctgtcgcgatatttcacggcacaaaacttggattgcaggggtggatctaggggtgttagtcacccggataaaatttataaattctttagaaaaacacagttaaagttcaagaaaatttgtatcatgtagcaaacctgaccttgctacccgataatatttttggttagattcgccatttattggatggtgggcagccgaaccgagagttcactttggcatggcatggccgggcaatgcagatagctgggacacagctctgctatgtttggcctcgttgtttttttttcattcggagatagcgcatgatgaccgaaacgttactaactgcaaacttcgtgcccatagtaaacgaccaggcataaaaatggatcataatg

SEQ ID NO: 1265 - DNA, 1476 bp, Zea Mays
atcaacctaaagtcctaaagaggcaagccagagaaagtatgtagccgaacctccgcccgcccgcgacccaaaagccgaaagcccgaaaccagaggcgggtagggttctagctgcaggcgacggccatggccgcctccgccgccgccccggcgctgcttcgacgcctcttctgcagctctattccagcctcctcctccgtactgcgcgctaccttttgctcctccgccggcttcggctcgtcttctccgtcctccatattcggcgacgccaccgaggtcgccaacgtgccaccgctcaccacgcccaacctcttcgtcagtggtaacgtctctccgcttcgccccgtcccaccaaactcgtcgcactaatacaaaacaggtgtgtgcgtgaatttaaagctgcgggcacttggataccttaatgctatgtttgtgagcaatccatttggggaactagggataaccagtaagctttatcgatgaagcacagcatttaaacctgttacagactcctagtttgcatcccatcctgcagctcttgtgccgtcaaatcctattgcacctgtgcgttttgcttgattttctttttaccagtgcataaaaatggccgtgttccatgtccatcggttgtagtttgccgctatgctcagtaataaacacttctctcagtaagaagcagctcccagttcattttcacctgtaggttttccataaaaataaactgctttgagggtcctgatttacattaacttgggcgcaggcctttcaaggttaacgacagatgagaagctccagggtgcatttgctcctttcgggaggctccttgaagtgtgcttttgtgttactgtgtgcagcaaaagtggtgacggatagagtttctgggaggtcaaagggtttcggtttcgtgagatatgccaccatagaagaggccgagagagcgcggcaggagatgaacgccaagttcctggatggatgggtcatcttcgttgaccctgccaagccaaggcagccaaagcccgctcctcagcaggacactggttcatcgcatgctggcttcacgacgaacaagactgtaggatggtgcggctaggctcattgatctgtcgcgatatttcacggcacaaaacttggattgcaggggtggatctaggggtgttagtcacccggataaaatttataaattctttagaaaaacacagttaaagttcaagaaaatttgtatcatgtagcaaacctgaccttgctacccgataatatttttggttagattcgccatttattggatggtgggcagccgaaccgagagttcactttggcatggcatggccgggcaatgcagatagctgggacacagctctgctatgtttggcctcgttgtttttttttcattcggagatagcgcatgatgaccgaaacgttactaactgcaaacttcgtgcccatagtaaacgaccaggcataaaaatggatcataatg

SEQ ID NO: 1266 - DNA, 2308 bp, Zea Mays
ctccccaccagacggctttgcttaattcaaatttcttcccaacggaaaacatcgcgggctccctactccgctttccccaatccacgcccttccgaagagcggcgaatccgccccagaacctcgcgatttccctcaaaccagttctcggatcagagcgtcgtgggtgtcgccgggggcatggcgcagacgccgaaccccagtaggaggtcgtgggtcggcccggcgccgatgccattcctcacgccgcggccggagcggcggcaccttgagatgcggtgggcggacggagtgtcccaaagcgctgctcgccgtagcggcgtcggcgccgttgccagggatggatgcgagagggatcaggaggtgaacgttcaggtcatgctgcggtgcaggccactcagtgaggaggagcagagagtgaatgcgcagagcgctatctcttgtaatgaatcaaagagggaggtcacagttctgcacagcctcttcaagcaagcagacaagacatttaccttcgacaaggtatttggaccacaatctcagcaaaggtcgatatataaccatgccgttgcaccattagtgactgaagtccttgaaggctataactgcactgtcttcgtgtttgggcagactggaaccggaaagacatataccatggagggagagatgagacagaaggttagtgaactaccggatactgccggtgtcattcctagagcagtgtgccatatctttgaaatacttacagcacggaaggctgattatagcatgaaggtaaccttcttagagctgtataatgaagatataacagacctattgtctttagaggaccaaagcagattccctgaaggtagacaaaaaaggcctataactcttatggaagatggcaaaggcggtgcggtaataagaggtcttgaagagattgttgtctatagtcctagcgacatatacagccttttggaacatgggtcagctaggagacgcactgctgacactgcactaaataagcaaagcaggttcttgatcattctgtttttaccttcttttggtacagaggtcgtcatctgtcaggggctaagcactcttcattatgttcatgcagccgatcacatgctgttttttctataaacatccaagtcaaagaaacaacagtaggaaatgaggaactcattaagtatgggaggttaaaccttgtagacttggcaggatcagaaaatattgctcgatcaggggcaagagagggtagagcaagagaaactggagaaatgaataagagcctactaactctgggacgtgtcatcaatgcacttgtggagcattcagttcatgtgccatacagggatagtaagctcaccagactgctaagagaatcattaggaggcaaagccaaaacatgcatcatagcaacggtgtctccatctgcccattccctggaagaaacgctggtcacacttgattatgctgctcgtgctaaaagcataagaaacaagccagaggcaaataaaaaaacatgcaaaactgttgtgctcaaggagctctaccaagaaatggaaagaatgaaacaagatgtcaaagctgcaagggaaaagaatggaatctacatctctcacgaaaggtttgcccaagacgaaacaaaaagaaagacaatgaaggaaaaaatagaacatttggagctcagtcttgaaaagcagaacaaagaagttcaaaaattcaaagccttgtacctagcagaacaggaatgccactgggactttgaaagtcagaacaacgatttgaaggtaaatcttgaaagcttgaagggcaagttcatagatcttgaagaagctcattgcagagctcacatgtccctgagggagaaggacttcattatatcaaatttacttcattctgagcacttaattattgaacgtgcaaaggatatgcggaacaccttggagaatgcaaccgaagatatcagtgtacttctgaataaacaagaaaggcaatcaaaaactgaagctgaaaacaaaaggttgctatctggttttcgggctgaattggatcgtagtcttggagttctgcatgctacagtcgttggatcagtatgtgaacagagtaaaattttggagtctataaatgaacaaacaaagttgtactttttagccagaaatgagtcagaaaaccaattggaaagaagaattgcaagagccaaagatatgtatgtctccggggtccaatgcatgaaggagctcgctaataccatgagacagcagtctatcatagattccgagcagatgaggcagaacatatctactaatgcaaatgctattggcaa

SEQ ID NO: 1267 - DNA, 5274 bp, Zea Mays
gcttaattcaaatttcttcccaacggaaaacatcgcgggctccctactccgctttccccaatccacgcccttccgaagagcggcgaatccgccccagaacctcgcgatttccctcaaaccagttctcggatcagagcgtcgtgggtgtcgccgggggcatggcgcagacgccgaaccccagtaggaggtcgtgggtcggcccggcgccgatgccattcctcacgccgcggccggagcggcggcaccttgagatgcggtgggcggacggagtgtcccaaagcgctgctcgccgtagcggcgtcggcgccgttgccagggatggatgcgagagggatcaggaggtgaacgttcaggtcatgctgcggtgcaggccactcagtgaggaggagcagagagtgaatgcgcagagcgctatctcttgtaatgaatcaaagagggaggtcacagttctgcacagcctcttcaagcaagcagacaagacatttaccttcgacaaggtatttggaccacaatctcagcaaaggtcgatatataaccatgccgttgcaccattagtgactgaagtccttgaaggctataactgcactgtcttcgtgtttgggcagactggaaccggaaagacatataccatggagggagagatgagacagaaggttagtgaactaccggatactgccggtgtcattcctagagcagtgtgccatatctttgaaatacttacagcacggaaggctgattatagcatgaaggtaaccttcttagagctgtataatgaagatataacagacctattgtctttagaggaccaaagcagattccctgaaggtagacaaaaaaggcctataactcttatggaagatggcaaaggcggtgcggtaataagaggtcttgaagagattgttgtctatagtcctagcgacatatacagccttttggaacatgggtcagctaggagacgcactgctgacactgcactaaataagcaaagcagccgatcacatgctgttttttctataaacatccaagtcaaagaaacaacagtaggaaatgaggaactcattaagtatgggaggttaaaccttgtagacttggcaggatcagaaaatattgctcgatcaggggcaagagagggtagagcaagagaaactggagaaatgaataagagcctactaactctgggacgtgtcatcaatgcacttgtggagcattcagttcatgtgccatacagggatagtaagctcaccagactgctaagagaatcattaggaggcaaagccaaaacatgcatcatagcaacggtgtctccatctgcccattccctggaagaaacgctggtcacacttgattatgctgctcgtgctaaaagcataagaaacaagccagaggcaaataaaaaaacatgcaaaactgttgtgctcaaggagctctaccaagaaatggaaagaatgaaacaagatgtcaaagctgcaagggaaaagaatggaatctacatctctcacgaaaggtttgcccaagacgaaacaaaaagaaagacaatgaaggaaaaaatagaacatttggagctcagtcttgaaaagcagaacaaagaagttcaaaaattcaaagccttgtacctagcagaacaggaatgccactgggactttgaaagtcagaacaacgatttgaaggtaaatcttgaaagcttgaagggcaagttcatagatcttgaagaagctcattgcagagctcacatgtccctgagggagaaggacttcattatatcaaatttacttcattctgagcacttaattattgaacgtgcaaaggatatgcggaacaccttggagaatgcaaccgaagatatcagtgtacttctgaataaacaagaaaggcaatcaaaaactgaagctgaaaacaaaaggttgctatctggttttcgggctgaattggatcgtagtcttggagttctgcatgctacagtcgttggatcagtatgtgaacagagtaaaattttggagtctataaatgaacaaacaaagttgtactttttagccagaaatgagtcagaaaaccaattggaaagaagaattgcaagagccaaagatatgtatgtctccggggtccaatgcatgaaggagctcgctaataccatgagacagcagtctatcatagattccgagcagatgaggcagaacatatctactaatgcaaatgctattggcaattttctagaagtgatgttttcagaagctgaacaagttctaaatgatgttctgaaatctacttcagatctcaaggaactattagccttttctgcagaactacaaaacactggattgagaaggaatcttgcttctgttcaagcaatgtcaaagcaatcaattgatttctttgaagatataaggatacatgtgtctcagctcatgacacttatggagcagaatcaaatggaaaggtcctccaagcttgttaaatttgagaatgagtttaaggaaacttgtgttaaagacgagcaagctgctctgaataagattgctgcaattttatcagagttgaccgccaagaaaactacaatggtttcatcatatatgggacagcttaatgagaggtatagtgaagatcagaagaacctgaaactggagatatccaacctacaacaggtttcagataatggcaaaaatgagtctgtggcttgtgttggagtgatagagagtcagttccaggaggatatgtcatcacatactaaatcaaatgatcaaatggaaggcatcttaaaacaatactcggagaaaggtagtcattttgtatcttactggtcacatatacaatcatctttgcatgatcttgttaagagctcaatcatggagactgacgattttattgaggaaagcagaaacaaaaatgaaaatatattccaggaagggcttctgttttcttcacagaatgatgcagagtttcatggcattacatctgacgtgctgactgtttcaaagaattccctcttactggatcatgaaacttgcaagatggtagagactaacactaccattttctcggatcatctggaactgctgaatgaaaagcacagcgaaggcgtggaatctacaagaaacatgatgagtgattgtcttgaaaaggattacatggctaatagtccggttcgaaaccatccacgggaactactgaccagtgcaaacagcttggaatcaattgacaaactaagagcttctctgccagatctggtggcaaagttcaggctcgagaacaagttgaatgaaatggataaggggaagcaatactcggatcaaaggacacgtgtacatggtaagttcaaaaccataataagtgctattgagcgcagagttctggaggagcaacttggctgggccagactggagcggcaaaagatcctcgctttgtctgcggaggctgacgatgcaatctggcatctggccacgctcgcacggaggaggatgcaagaaagggacgaggccaggaaccaggcgaggatgctgctcgcggacctccaggcaaggaacgcccggatgaaggcggcggttcccggagcatcgtgctccagagtcgcgcggcctgacgcgttcgccgccaccggctacgagcacatccaggcccaggcccaggcccaggcccaggcactcgctcctgccgcgttcgggccgcgggggcagcgtgcccgtgcgggaactggctactactgcgttgcgtcgtccagcggcttcggccacaggagcatcgactcgtctctggacacctgcgccgttcagccgtcgctgcttggcttcgcttcctcgagctcgagccaggagcatttcgaccctgacatgttcttggtggacgtcgcagaatcgccgcaggatgtcgttccggttccggccaccgcagactcaagccaggggagaagctccggctccggctccggcacttatggtcatagtttggcgagcaaaaggccttgcagtgaaaggaagtaataaatcatcagctcaagctgcagcacgtcctgccacgggccatggccatgctgcctaaatcctaggccggaaaaatcaaccaattagttaagaaaggaaactaacaaacaactatcaattagttaaaaaagggaactaattggaaaaaaacaaataaacctagctgcattatgcaacaggcttactagcattgaataattgtggccgttgttgtatatcgcttatcatggtgtcatgaaattatgtaacctggaaattttgtttttttggcataaaaatcactgtattcagaacaccagtgctctgtccaagacaaagaagcaagagtgctgaaatgagaggataatgagcatgctgacttggctgccttggcttccacccacacactcgataggggaaaagcgagcccttccacggttccaccacccactcgatagtggaaaagtgagctcgagcgtgtccagcagctatggataactgacgatgggggtaacaagcttcacagaactctccctcgagctcagcgctaccctgaacaactgaagccgaaatggcgagcctgcagaacctggtctgctccgtatccaaacaactggctgtgccaaattgcgcggcgactaccaaactgaacagggctcctccctcagctgtggcggcgagctcgatccaaggatctttggacgacaccaaggtcacgaagagacggctagctttgcttggtgctggagcgttagccactggcctactgaggacaagctctgctgcgttcgctgaagaggtgccgaagaattacaagtcgtacgtggacgcgaaagacgggtactcgtacctttatccagctgaatggagggatttcgacttcttgggtcatgattctgcgttcaaagaccgcaacctggcccttcagtgtgttcgtgtggggttcattcctaccgagaaaacagacatccgcgacctaggaccgatggatgaggccatcttcaacctggtaaacaacgtctacgctgccccgaaccaaataccgtcgatttacgacatgcaagagcgcaccgtggacggcaagaactactggacgtttgagtacgatctggaggctccgggctacagcgtttctgcgtttgcgacggtcgccattggaaacgttcggcttaccgcctcactgatcatgagctggacttcccgcggatggcgctttctgcagaacacgttgatggacgtgccctgctccttcgacatatagatcctgttcgtgcggtcctttgtttcttttttttcttttctcttttttctccacaaccttgcg

SEQ ID NO: 1268 - DNA, 5428 bp, Zea Mays
gcttaattcaaatttcttcccaacggaaaacatcgcgggctccctactccgctttccccaatccacgcccttccgaagagcggcgaatccgccccagaacctcgcgatttccctcaaaccagttctcggatcagagcgtcgtgggtgtcgccgggggcatggcgcagacgccgaaccccagtaggaggtcgtgggtcggcccggcgccgatgccattcctcacgccgcggccggagcggcggcaccttgagatgcggtgggcggacggagtgtcccaaagcgctgctcgccgtagcggcgtcggcgccgttgccagggatggatgcgagagggatcaggaggtgaacgttcaggtcatgctgcggtgcaggccactcagtgaggaggagcagagagtgaatgcgcagagcgctatctcttgtaatgaatcaaagagggaggtcacagttctgcacagcctcttcaagcaagcagacaagacatttaccttcgacaaggtatttggaccacaatctcagcaaaggtcgatatataaccatgccgttgcaccattagtgactgaagtccttgaaggctataactgcactgtcttcgtgtttgggcagactggaaccggaaagacatataccatggagggagagatgagacagaaggttagtgaactaccggatactgccggtgtcattcctagagcagtgtgccatatctttgaaatacttacagcacggaaggctgattatagcatgaaggtaaccttcttagagctgtataatgaagatataacagacctattgtctttagaggaccaaagcagattccctgaaggtagacaaaaaaggcctataactcttatggaagatggcaaaggcggtgcggtaataagaggtcttgaagagattgttgtctatagtcctagcgacatatacagccttttggaacatgggtcagctaggagacgcactgctgacactgcactaaataagcaaagcagccgatcacatgctgttttttctataaacatccaagtcaaagaaacaacagtaggaaatgaggaactcattaagtatgggaggttaaaccttgtagacttggcaggatcagaaaatattgctcgatcaggggcaagagagggtagagcaagagaaactggagaaatgaataagagcctactaactctgggacgtgtcatcaatgcacttgtggagcattcagttcatgtgccatacagggatagtaagctcaccagactgctaagagaatcattaggaggcaaagccaaaacatgcatcatagcaacggtgtctccatctgcccattccctggaagaaacgctggtcacacttgattatgctgctcgtgctaaaagcataagaaacaagccagaggcaaataaaaaaacatgcaaaactgttgtgctcaaggagctctaccaagaaatggaaagaatgaaacaagatgtcaaagctgcaagggaaaagaatggaatctacatctctcacgaaaggtttgcccaagacgaaacaaaaagaaagacaatgaaggaaaaaatagaacatttggagctcagtcttgaaaagcagaacaaagaagttcaaaaattcaaagccttgtacctagcagaacaggaatgccactgggactttgaaagtcagaacaacgatttgaaggtaaatcttgaaagcttgaagggcaagttcatagatcttgaagaagctcattgcagagctcacatgtccctgagggagaaggacttcattatatcaaatttacttcattctgagcacttaattattgaacgtgcaaaggatatgcggaacaccttggagaatgcaaccgaagatatcagtgtacttctgaataaacaagaaaggcaatcaaaaactgaagctgaaaacaaaaggttgctatctggttttcgggctgaattggatcgtagtcttggagttctgcatgctacagtcgttggatcagtatgtgaacagagtaaaattttggagtctataaatgaacaaacaaagttgtactttttagccagaaatgagtttctagaagtgatgttttcagaagctgaacaagttctaaatgatgttctgaaatctacttcagatctcaaggaactattagccttttctgcagaactacaaaacactggattgagaaggaatcttgcttctgttcaagcaatgtcaaagcaatcaattgatttctttgaagatataaggatacatgtgtctcagctcatgacacttatggagcagaatcaaatggaaaggtcctccaagcttgttaaatttgagaatgagtttaaggaaacttgtgttaaagacgagcaagctgctctgaataagattgctgcaattttatcagagttgaccgccaagaaaactacaatggtttcatcatatatgggacagcttaatgagaggtatagtgaagatcagaagaacctgaaactggagatatccaacctacaacaggtttcagataatggcaaaaatgagtctgtggcttgtgttggagtgatagagagtcagttccaggaggatatgtcatcacatactaaatcaaatgatcaaatggaaggcatcttaaaacaatactcggagaaaggtagtcattttgtatcttactggtcacatatacaatcatctttgcatgatcttgttaagagctcaatcatggagactgacgattttattgaggaaagcagaaacaaaaatgaaaatatattccaggaagggcttctgttttcttcacagaatgatgcagagtttcatggcattacatctgacgtgctgactgtttcaaagaattccctcttactggatcatgaaacttgcaagatggtagagactaacactaccattttctcggatcatctggaactgctgaatgaaaagcacagcgaaggcgtggaatctacaagaaacatgatgagtgattgtcttgaaaaggattacatggctaatagtccggttcgaaaccatccacgggaactactgaccagtgcaaacagcttggaatcaattgacaaactaagagcttctctgccagatctggtggcaaagttcaggctcgagaacaagttgaatgaaatggataaggggaagcaatactcggatcaaaggacacgtactccaagaagtcctttgacgcctgtcaaccagtaacctgagtggagaatgcgccaaattctgggatgctcaaatgttgtaaagatggcaagatatcttgccgatatgttaccaccttaatttagcgtgctcgtcagacgttaggatgctgcatgcaaagattctgattagggttagataagaaatccagcaatattggatttcaatttgtatcatgtaaaatcaacataatattctcacttatgccttccatttctgatcagtcatttgagtaaagtagcatgcaatgtcgaatttgtttctcgtccctgaatgtgtacatggtaagttcaaaaccataataagtgctattgagcgcagagttctggaggagcaacttggctgggccagactggagcggcaaaagatcctcgctttgtctgcggaggctgacgatgcaatctggcatctggccacgctcgcacggaggaggatgcaagaaagggacgaggccaggaaccaggcgaggatgctgctcgcggacctccaggcaaggaacgcccggatgaaggcggcggttcccggagcatcgtgctccagagtcgcgcggcctgacgcgttcgccgccaccggctacgagcacatccaggcccaggcccaggcccaggcccaggcactcgctcctgccgcgttcgggccgcgggggcagcgtgcccgtgcgggaactggctactactgcgttgcgtcgtccagcggcttcggccacaggagcatcgactcgtctctggacacctgcgccgttcagccgtcgctgcttggcttcgcttcctcgagctcgagccaggagcatttcgaccctgacatgttcttggtggacgtcgcagaatcgccgcaggatgtcgttccggttccggccaccgcagactcaagccaggggagaagctccggctccggctccggcacttatggtcatagtttggcgagcaaaaggccttgcagtgaaaggaagtaataaatcatcagctcaagctgcagcacgtcctgccacgggccatggccatgctgcctaaatcctaggccggaaaaatcaaccaattagttaagaaaggaaactaacaaacaactatcaattagttaaaaaagggaactaattggaaaaaaacaaataaacctagctgcattatgcaacaggcttactagcattgaataattgtggccgttgttgtatatcgcttatcatggtgtcatgaaattatgtaacctggaaattttgtttttttggcataaaaatcactgtattcagaacaccagtgctctgtccaagacaaagaagcaagagtgctgaaatgagaggataatgagcatgctgacttggctgccttggcttccacccacacactcgataggggaaaagcgagcccttccacggttccaccacccactcgatagtggaaaagtgagctcgagcgtgtccagcagctatggataactgacgatgggggtaacaagcttcacagaactctccctcgagctcagcgctaccctgaacaactgaagccgaaatggcgagcctgcagaacctggtctgctccgtatccaaacaactggctgtgccaaattgcgcggcgactaccaaactgaacagggctcctccctcagctgtggcggcgagctcgatccaaggatctttggacgacaccaaggtcacgaagagacggctagctttgcttggtgctggagcgttagccactggcctactgaggacaagctctgctgcgttcgctgaagaggtgccgaagaattacaagtcgtacgtggacgcgaaagacgggtactcgtacctttatccagctgaatggagggatttcgacttcttgggtcatgattctgcgttcaaagaccgcaacctggcccttcagtgtgttcgtgtggggttcattcctaccgagaaaacagacatccgcgacctaggaccgatggatgaggccatcttcaacctggtaaacaacgtctacgctgccccgaaccaaataccgtcgatttacgacatgcaagagcgcaccgtggacggcaagaactactggacgtttgagtacgatctggaggctccgggctacagcgtttctgcgtttgcgacggtcgccattggaaacgttcggcttaccgcctcactgatcatgagctggacttcccgcggatggcgctttctgcagaacacgttgatggacgtgccctgctccttcgacatatagatcctgttcgtgcggtcctttgtttcttttttttcttttctcttttttctccacaaccttgcg

SEQ ID NO: 1269 - DNA, 5751 bp, Zea Mays
gaaaacatcgcgggctccctactccgctttccccaatccacgcccttccgaagagcggcgaatccgccccagaacctcgcgatttccctcaaaccagttctcggatcagagcgtcgtgggtgtcgccgggggcatggcgcagacgccgaaccccagtaggaggtcgtgggtcggcccggcgccgatgccattcctcacgccgcggccggagcggcggcaccttgagatgcggtgggcggacggagtgtcccaaagcgctgctcgccgtagcggcgtcggcgccgttgccagggatggatgcgagagggatcaggaggtgaacgttcaggtcatgctgcggtgcaggccactcagtgaggaggagcagagagtgaatgcgcagagcgctatctcttgtaatgaatcaaagagggaggtcacagttctgcacagcctcttcaagcaagcagacaagacatttaccttcgacaaggtatttggaccacaatctcagcaaaggtcgatatataaccatgccgttgcaccattagtgactgaagtccttgaaggctataactgcactgtcttcgtgtttgggcagactggaaccggaaagacatataccatggagggagagatgagacagaaggttagtgaactaccggatactgccggtgtcattcctagagcagtgtgccatatctttgaaatacttacagcacggaaggctgattatagcatgaaggtaaccttcttagagctgtataatgaagatataacagacctattgtctttagaggaccaaagcagattccctgaaggtagacaaaaaaggcctataactcttatggaagatggcaaaggcggtgcggtaataagaggtcttgaagagattgttgtctatagtcctagcgacatatacagccttttggaacatgggtcagctaggagacgcactgctgacactgcactaaataagcaaagcagccgatcacatgctgttttttctataaacatccaagtcaaagaaacaacagtaggaaatgaggaactcattaagtatgggaggttaaaccttgtagacttggcaggatcagaaaatattgctcgatcaggggcaagagagggtagagcaagagaaactggagaaatgaataagagcctactaactctgggacgtgtcatcaatgcacttgtggagcattcagttcatgtgccatacagggatagtaagctcaccagactgctaagagaatcattaggaggcaaagccaaaacatgcatcatagcaacggtgtctccatctgcccattccctggaagaaacgctggtcacacttgattatgctgctcgtgctaaaagcataagaaacaagccagaggcaaataaaaaaacatgcaaaactgttgtgctcaaggagctctaccaagaaatggaaagaatgaaacaagatgtcaaagctgcaagggaaaagaatggaatctacatctctcacgaaaggtttgcccaagacgaaacaaaaagaaagacaatgaaggaaaaaatagaacatttggagctcagtcttgaaaagcagaacaaagaagttcaaaaattcaaagccttgtacctagcagaacaggaatgccactgggactttgaaagtcagaacaacgatttgaaggtaaatcttgaaagcttgaagggcaagttcatagatcttgaagaagctcattgcagagctcacatgtccctgagggagaaggacttcattatatcaaatttacttcattctgagcacttaattattgaacgtgcaaaggatatgcggaacaccttggagaatgcaaccgaagatatcagtgtacttctgaataaacaagaaaggcaatcaaaaactgaagctgaaaacaaaaggttgctatctggttttcgggctgaattggatcgtagtcttggagttctgcatgctacagtcgttggatcagtatgtgaacagagtaaaattttggagtctataaatgaacaaacaaagttgtactttttagccagaaatgagtcagaaaaccaattggaaagaagaattgcaagagccaaagatatgtatgtctccggggtccaatgcatgaaggagctcgctaataccatgagacagcagtctatcatagattccgagcagatgaggcagaacatatctactaatgcaaatgctattggcaattttctagaagtgatgttttcagaagctgaacaagttctaaatgatgttctgaaatctacttcagatctcaaggaactattagccttttctgcagaactacaaaacactggattgagaaggaatcttgcttctgttcaagcaatgtcaaagcaatcaattgatttctttgaagatataaggatacatgtgtctcagctcatgacacttatggagcagaatcaaatggaaaggtcctccaagcttgttaaatttgagaatgagtttaaggaaacttgtgttaaagacgagcaagctgctctgaataagattgctgcaattttatcagagttgaccgccaagaaaactacaatggtttcatcatatatgggacagcttaatgagaggtatagtgaagatcagaagaacctgaaactggagatatccaacctacaacaggtttcagataatggcaaaaatgagtctgtggcttgtgttggagtgatagagagtcagttccaggaggatatgtcatcacatactaaatcaaatgatcaaatggaaggcatcttaaaacaatactcggagaaaggtagtcattttgtatcttactggtcacatatacaatcatctttgcatgatcttgttaagagctcaatcatggagactgacgattttattgaggaaagcagaaacaaaaatgaaaatatattccaggaagggcttctgttttcttcacagaatgatgcagagtttcatggcattacatctgacgtgctgactgtttcaaagaattccctcttactggatcatgaaacttgcaagatggtagagactaacactaccattttctcggatcatctggaactgctgaatgaaaagcacagcgaaggcgtggaatctacaagaaacatgatgagtgattgtcttgaaaaggattacatggctaatagtccggttcgaaaccatccacgggaactactgaccagtgcaaacagcttggaatcaattgacaaactaagagcttctctgccagatctggtggcaaagttcaggctcgagaacaagttgaatgaaatggataaggggaagcaatactcggatcaaaggacacgtactccaagaagtcctttgacgcctgtcaaccagtaacctgagtggagaatgcgccaaattctgggatgctcaaatgttgtaaagatggcaagatatcttgccgatatgttaccaccttaatttagcgtgctcgtcagacgttaggatgctgcatgcaaagattctgattagggttagataagaaatccagcaatattggatttcaatttgtatcatgtaaaatcaacataatattctcacttatgccttccatttctgatcagtcatttgagtaaagtagcatgcaatgtcgaatttgtttctcgtccctgaatgtgtacatggtaagttcaaaaccataataagtgctattaaaagcttgctaacatggagatcacatgaggaaagcacagcacagagaatagagtgatacgcagaacggctcataaatcattttgggaaagagaaaggtgagaggtaaggatatgtgatgcagaacaacacagaggagcagggccttctgagggaagatcacgtttcatcgaccagcgatgcagaggagcgcagagttctggaggagcaacttggctgggccagactggagcggcaaaagatcctcgctttgtctgcggaggctgacgatgcaatctggcatctggccacgctcgcacggaggaggatgcaagaaagggacgaggccaggaaccaggcgaggatgctgctcgcggacctccaggcaaggaacgcccggatgaaggcggcggttcccggagcatcgtgctccagagtcgcgcggcctgacgcgttcgccgccaccggctacgagcacatccaggcccaggcccaggcccaggcccaggcactcgctcctgccgcgttcgggccgcgggggcagcgtgcccgtgcgggaactggctactactgcgttgcgtcgtccagcggcttcggccacaggagcatcgactcgtctctggacacctgcgccgttcagccgtcgctgcttggcttcgcttcctcgagctcgagccaggagcatttcgaccctgacatgttcttggtggacgtcgcagaatcgccgcaggatgtcgttccggttccggccaccgcagactcaagccaggggagaagctccggctccggctccggcacttatggtcatagtttggcgagcaaaaggccttgcagtgaaaggaagtaataaatcatcagctcaagctgcagcacgtcctgccacgggccatggccatgctgcctaaatcctaggccggaaaaatcaaccaattagttaagaaaggaaactaacaaacaactatcaattagttaaaaaagggaactaattggaaaaaaacaaataaacctagctgcattatgcaacaggcttactagcattgaataattgtggccgttgttgtatatcgcttatcatggtgtcatgaaattatgtaacctggaaattttgtttttttggcataaaaatcactgtattcagaacaccagtgctctgtccaagacaaagaagcaagagtgctgaaatgagaggataatgagcatgctgacttggctgccttggcttccacccacacactcgataggggaaaagcgagcccttccacggttccaccacccactcgatagtggaaaagtgagctcgagcgtgtccagcagctatggataactgacgatgggggtaacaagcttcacagaactctccctcgagctcagcgctaccctgaacaactgaagccgaaatggcgagcctgcagaacctggtctgctccgtatccaaacaactggctgtgccaaattgcgcggcgactaccaaactgaacagggctcctccctcagctgtggcggcgagctcgatccaaggatctttggacgacaccaaggtcacgaagagacggctagctttgcttggtgctggagcgttagccactggcctactgaggacaagctctgctgcgttcgctgaagaggtgccgaagaattacaagtcgtacgtggacgcgaaagacgggtactcgtacctttatccagctgaatggagggatttcgacttcttgggtcatgattctgcgttcaaagaccgcaacctggcccttcagtgtgttcgtgtggggttcattcctaccgagaaaacagacatccgcgacctaggaccgatggatgaggccatcttcaacctggtaaacaacgtctacgctgccccgaaccaaataccgtcgatttacgacatgcaagagcgcaccgtggacggcaagaactactggacgtttgagtacgatctggaggctccgggctacagcgtttctgcgtttgcgacggtcgccattggaaacgttcggcttaccgcctcactgatcatgagctggacttcccgcggatggcgctttctgcagaacacgttgatggacgtgccctgctccttcgacatatagatcctgttcgtgcggtcctttgtttcttttttttcttttctcttttttctccacaaccttgcg

SEQ ID NO: 1270 - DNA, 3223 bp, Zea Mays
acatcgcgggctccctactccgctttccccaatccacgcccttccgaagagcggcgaatccgccccagaacctcgcgatttccctcaaaccagttctcggatcagagcgtcgtgggtgtcgccgggggcatggcgcagacgccgaaccccagtaggaggtcgtgggtcggcccggcgccgatgccattcctcacgccgcggccggagcggcggcaccttgagatgcggtgggcggacggagtgtcccaaagcgctgctcgccgtagcggcgtcggcgccgttgccagggatggatgcgagagggatcaggaggtgaacgttcaggtcatgctgcggtgcaggccactcagtgaggaggagcagagagtgaatgcgcagagcgctatctcttgtaatgaatcaaagagggaggtcacagttctgcacagcctcttcaagcaagcagacaagacatttaccttcgacaaggtatttggaccacaatctcagcaaaggtcgatatataaccatgccgttgcaccattagtgactgaagtccttgaaggctataactgcactgtcttcgtgtttgggcagactggaaccggaaagacatataccatggagggagagatgagacagaaggttagtgaactaccggatactgccggtgtcattcctagagcagtgtgccatatctttgaaatacttacagcacggaaggctgattatagcatgaaggtaaccttcttagagctgtataatgaagatataacagacctattgtctttagaggaccaaagcagattccctgaaggtagacaaaaaaggcctataactcttatggaagatggcaaaggcggtgcggtaataagaggtcttgaagagattgttgtctatagtcctagcgacatatacagccttttggaacatgggtcagctaggagacgcactgctgacactgcactaaataagcaaagcagccgatcacatgctgttttttctataaacatccaagtcaaagaaacaacagtaggaaatgaggaactcattaagtatgggaggttaaaccttgtagacttggcaggatcagaaaatattgctcgatcaggggcaagagagggtagagcaagagaaactggagaaatgaataagagcctactaactctgggacgtgtcatcaatgcacttgtggagcattcagttcatgtgccatacagggatagtaagctcaccagactgctaagagaatcattaggaggcaaagccaaaacatgcatcatagcaacggtgtctccatctgcccattccctggaagaaacgctggtcacacttgattatgctgctcgtgctaaaagcataagaaacaagccagaggcaaataaaaaaacatgcaaaactgttgtgctcaaggagctctaccaagaaatggaaagaatgaaacaagatgtcaaagctgcaagggaaaagaatggaatctacatctctcacgaaaggtttgcccaagacgaaacaaaaagaaagacaatgaaggaaaaaatagaacatttggagctcagtcttgaaaagcagaacaaagaagttcaaaaattcaaagccttgtacctagcagaacaggaatgccactgggactttgaaagtcagaacaacgatttgaaggtaaatcttgaaagcttgaagggcaagttcatagatcttgaagaagctcattgcagagctcacatgtccctgagggagaaggacttcattatatcaaatttacttcattctgagcacttaattattgaacgtgcaaaggatatgcggaacaccttggagaatgcaaccgaagatatcagtgtacttctgaataaacaagtttctagaagtgatgttttcagaagctgaacaagttctaaatgatgttctgaaatctacttcagatctcaaggaactattagccttttctgcagaactacaaaacactggattgagaaggaatcttgcttctgttcaagcaatgtcaaagcaatcaattgatttctttgaagatataaggatacatgtgtctcagctcatgacacttatggagcagaatcaaatggaaaggtcctccaagcttgttaaatttgagaatgagtttaaggaaacttgtgttaaagacgagcaagctgctctgaataagattgctgcaattttatcagagttgaccgccaagaaaactacaatggtttcatcatatatgggacagcttaatgagaggtatagtgaagatcagaagaacctgaaactggagatatccaacctacaacaggtttcagataatggcaaaaatgagtctgtggcttgtgttggagtgatagagagtcagttccaggaggatatgtcatcacatactaaatcaaatgatcaaatggaaggcatcttaaaacaatactcggagaaaggtagtcattttgtatcttactggtcacatatacaatcatctttgcatgatcttgttaagagctcaatcatggagactgacgattttattgaggaaagcagaaacaaaaatgaaaatatattccaggaagggcttctgttttcttcacagaatgatgcagagtttcatggcattacatctgacgtgctgactgtttcaaagaattccctcttactggatcatgaaacttgcaagatggtagagactaacactaccattttctcggatcatctggaactgctgaatgaaaagcacagcgaaggcgtggaatctacaagaaacatgatgagtgattgtcttgaaaaggattacatggctaatagtccggttcgaaaccatccacgggaactactgaccagtgcaaacagcttggaatcaattgacaaactaagagcttctctgccagatctggtggcaaagttcaggctcgagaacaagttgaatgaaatggataaggggaagcaatactcggatcaaaggacacgtactccaagaagtcctttgacgcctgtcaaccagtaacctgagtggagaatgcgccaaattctgggatgctcaaatgttgtaaagatggcaagatatcttgccgatatgttaccaccttaatttagcgtgctcgtcagacgttaggatgctgcatgcaaagattctgattagggttagataagaaatccagcaatattggatttcaatttgtatcatgtaaaatcaacataatattctcacttatgccttccatttctgatcagtcatttgagtaaagtagcatgcaatgtcgaa

SEQ ID NO: 1271 - DNA, 5164 bp, Zea Mays
acatcgcgggctccctactccgctttccccaatccacgcccttccgaagagcggcgaatccgccccagaacctcgcgatttccctcaaaccagttctcggatcagagcgtcgtgggtgtcgccgggggcatggcgcagacgccgaaccccagtaggaggtcgtgggtcggcccggcgccgatgccattcctcacgccgcggccggagcggcggcaccttgagatgcggtgggcggacggagtgtcccaaagcgctgctcgccgtagcggcgtcggcgccgttgccagggatggatgcgagagggatcaggaggtgaacgttcaggtcatgctgcggtgcaggccactcagtgaggaggagcagagagtgaatgcgcagagcgctatctcttgtaatgaatcaaagagggaggtcacagttctgcacagcctcttcaagcaagcagacaagacatttaccttcgacaaggtatttggaccacaatctcagcaaaggtcgatatataaccatgccgttgcaccattagtgactgaagtccttgaaggctataactgcactgtcttcgtgtttgggcagactggaaccggaaagacatataccatggagggagagatgagacagaaggttagtgaactaccggatactgccggtgtcattcctagagcagtgtgccatatctttgaaatacttacagcacggaaggctgattatagcatgaaggtaaccttcttagagctgtataatgaagatataacagacctattgtctttagaggaccaaagcagattccctgaaggtagacaaaaaaggcctataactcttatggaagatggcaaaggcggtgcggtaataagaggtcttgaagagattgttgtctatagtcctagcgacatatacagccttttggaacatgggtcagctaggagacgcactgctgacactgcactaaataagcaaagcagccgatcacatgctgttttttctataaacatccaagtcaaagaaacaacagtaggaaatgaggaactcattaagtatgggaggttaaaccttgtagacttggcaggatcagaaaatattgctcgatcaggggcaagagagggtagagcaagagaaactggagaaatgaataagagcctactaactctgggacgtgtcatcaatgcacttgtggagcattcagttcatgtgccatacagggatagtaagctcaccagactgctaagagaatcattaggaggcaaagccaaaacatgcatcatagcaacggtgtctccatctgcccattccctggaagaaacgctggtcacacttgattatgctgctcgtgctaaaagcataagaaacaagccagaggcaaataaaaaaacatgcaaaactgttgtgctcaaggagctctaccaagaaatggaaagaatgaaacaagatgtcaaagctgcaagggaaaagaatggaatctacatctctcacgaaaggtttgcccaagacgaaacaaaaagaaagacaatgaaggaaaaaatagaacatttggagctcagtcttgaaaagcagaacaaagtaaatcttgaaagcttgaagggcaagttcatagatcttgaagaagctcattgcagagctcacatgtccctgagggagaaggacttcattatatcaaatttacttcattctgagcacttaattattgaacgtgcaaaggatatgcggaacaccttggagaatgcaaccgaagatatcagtgtacttctgaataaacaagaaaggcaatcaaaaactgaagctgaaaacaaaaggttgctatctggttttcgggctgaattggatcgtagtcttggagttctgcatgctacagtcgttggatcagtatgtgaacagagtaaaattttggagtctataaatgaacaaacaaagttgtactttttagccagaaatgagtcagaaaaccaattggaaagaagaattgcaagagccaaagatatgtatgtctccggggtccaatgcatgaaggagctcgctaataccatgagacagcagtctatcatagattccgagcagatgaggcagaacatatctactaatgcaaatgctattggcaattttctagaagtgatgttttcagaagctgaacaagttctaaatgatgttctgaaatctacttcagatctcaaggaactattagccttttctgcagaactacaaaacactggattgagaaggaatcttgcttctgttcaagcaatgtcaaagcaatcaattgatttctttgaagatataaggatacatgtgtctcagctcatgacacttatggagcagaatcaaatggaaaggtcctccaagcttgttaaatttgagaatgagtttaaggaaacttgtgttaaagacgagcaagctgctctgaataagattgctgcaattttatcagagttgaccgccaagaaaactacaatggtttcatcatatatgggacagcttaatgagaggtatagtgaagatcagaagaacctgaaactggagatatccaacctacaacaggtttcagataatggcaaaaatgagtctgtggcttgtgttggagtgatagagagtcagttccaggaggatatgtcatcacatactaaatcaaatgatcaaatggaaggcatcttaaaacaatactcggagaaaggtagtcattttgtatcttactggtcacatatacaatcatctttgcatgatcttgttaagagctcaatcatggagactgacgattttattgaggaaagcagaaacaaaaatgaaaatatattccaggaagggcttctgttttcttcacagaatgatgcagagtttcatggcattacatctgacgtgctgactgtttcaaagaattccctcttactggatcatgaaacttgcaagatggtagagactaacactaccattttctcggatcatctggaactgctgaatgaaaagcacagcgaaggcgtggaatctacaagaaacatgatgagtgattgtcttgaaaaggattacatggctaatagtccggttcgaaaccatccacgggaactactgaccagtgcaaacagcttggaatcaattgacaaactaagagcttctctgccagatctggtggcaaagttcaggctcgagaacaagttgaatgaaatggataaggggaagcaatactcggatcaaaggacacgtgtacatggtaagttcaaaaccataataagtgctattgagcgcagagttctggaggagcaacttggctgggccagactggagcggcaaaagatcctcgctttgtctgcggaggctgacgatgcaatctggcatctggccacgctcgcacggaggaggatgcaagaaagggacgaggccaggaaccaggcgaggatgctgctcgcggacctccaggcaaggaacgcccggatgaaggcggcggttcccggagcatcgtgctccagagtcgcgcggcctgacgcgttcgccgccaccggctacgagcacatccaggcccaggcccaggcccaggcccaggcactcgctcctgccgcgttcgggccgcgggggcagcgtgcccgtgcgggaactggctactactgcgttgcgtcgtccagcggcttcggccacaggagcatcgactcgtctctggacacctgcgccgttcagccgtcgctgcttggcttcgcttcctcgagctcgagccaggagcatttcgaccctgacatgttcttggtggacgtcgcagaatcgccgcaggatgtcgttccggttccggccaccgcagactcaagccaggggagaagctccggctccggctccggcacttatggtcatagtttggcgagcaaaaggccttgcagtgaaaggaagtaataaatcatcagctcaagctgcagcacgtcctgccacgggccatggccatgctgcctaaatcctaggccggaaaaatcaaccaattagttaagaaaggaaactaacaaacaactatcaattagttaaaaaagggaactaattggaaaaaaacaaataaacctagctgcattatgcaacaggcttactagcattgaataattgtggccgttgttgtatatcgcttatcatggtgtcatgaaattatgtaacctggaaattttgtttttttggcataaaaatcactgtattcagaacaccagtgctctgtccaagacaaagaagcaagagtgctgaaatgagaggataatgagcatgctgacttggctgccttggcttccacccacacactcgataggggaaaagcgagcccttccacggttccaccacccactcgatagtggaaaagtgagctcgagcgtgtccagcagctatggataactgacgatgggggtaacaagcttcacagaactctccctcgagctcagcgctaccctgaacaactgaagccgaaatggcgagcctgcagaacctggtctgctccgtatccaaacaactggctgtgccaaattgcgcggcgactaccaaactgaacagggctcctccctcagctgtggcggcgagctcgatccaaggatctttggacgacaccaaggtcacgaagagacggctagctttgcttggtgctggagcgttagccactggcctactgaggacaagctctgctgcgttcgctgaagaggtgccgaagaattacaagtcgtacgtggacgcgaaagacgggtactcgtacctttatccagctgaatggagggatttcgacttcttgggtcatgattctgcgttcaaagaccgcaacctggcccttcagtgtgttcgtgtggggttcattcctaccgagaaaacagacatccgcgacctaggaccgatggatgaggccatcttcaacctggtaaacaacgtctacgctgccccgaaccaaataccgtcgatttacgacatgcaagagcgcaccgtggacggcaagaactactggacgtttgagtacgatctggaggctccgggctacagcgtttctgcgtttgcgacggtcgccattggaaacgttcggcttaccgcctcactgatcatgagctggacttcccgcggatggcgctttctgcagaacacgttgatggacgtgccctgctccttcgacatatagatcctgttcgtgcggtcctttgtttcttttttttcttttctcttttttctccacaaccttgcg

SEQ ID NO: 1272 - DNA, 5002 bp, Zea Mays
acatcgcgggctccctactccgctttccccaatccacgcccttccgaagagcggcgaatccgccccagaacctcgcgatttccctcaaaccagttctcggatcagagcgtcgtgggtgtcgccgggggcatggcgcagacgccgaaccccagtaggaggtcgtgggtcggcccggcgccgatgccattcctcacgccgcggccggagcggcggcaccttgagatgcggtgggcggacggagtgtcccaaagcgctgctcgccgtagcggcgtcggcgccgttgccagggatggatgcgagagggatcaggaggtgaacgttcaggtcatgctgcggtgcaggccactcagtgaggaggagcagagagtgaatgcgcagagcgctatctcttgtaatgaatcaaagagggaggtcacagttctgcacagcctcttcaagcaagcagacaagacatttaccttcgacaaggtatttggaccacaatctcagcaaaggtcgatatataaccatgccgttgcaccattagtgactgaagtccttgaaggctataactgcactgtcttcgtgtttgggcagactggaaccggaaagacatataccatggagggagagatgagacagaaggttagtgaactaccggatactgccggtgtcattcctagagcagtgtgccatatctttgaaatacttacagcacggaaggctgattatagcatgaaggtaaccttcttagagctgtataatgaagatataacagacctattgtctttagaggaccaaagcagattccctgaaggtagacaaaaaaggcctataactcttatggaagatggcaaaggcggtgcggtaataagaggtcttgaagagattgttgtctatagtcctagcgacatatacagccttttggaacatgggtcagctaggagacgcactgctgacactgcactaaataagcaaagcagccgatcacatgctgttttttctataaacatccaagtcaaagaaacaacagtaggaaatgaggaactcattaagtatgggaggttaaaccttgtagacttggcaggatcagaaaatattgctcgatcaggggcaagagagggtagagcaagagaaactggagaaatgaataagagcctactaactctgggacgtgtcatcaatgcacttgtggagcattcagttcatgtgccatacagggatagtaagctcaccagactgctaagagaatcattaggaggcaaagccaaaacatgcatcatagcaacggtgtctccatctgcccattccctggaagaaacgctggtcacacttgattatgctgctcgtgctaaaagcataagaaacaagccagaggcaaataaaaaaacatgcaaaactgttgtgctcaaggagctctaccaagaaatggaaagaatgaaacaagatgtcaaagctgcaagggaaaagaatggaatctacatctctcacgaaaggtttgcccaagacgaaacaaaaagaaagacaatgaaggaaaaaatagaacatttggagctcagtcttgaaaagcagaacaaagtaaatcttgaaagcttgaagggcaagttcatagatcttgaagaagctcattgcagagctcacatgtccctgagggagaaggacttcattatatcaaatttacttcattctgagcacttaattattgaacgtgcaaaggatatgcggaacaccttggagaatgcaaccgaagatatcagtgtacttctgaataaacaagaaaggcaatcaaaaactgaagctgaaaacaaaaggttgctatctggttttcgggctgaattggatcgtagtcttggagttctgcatgctacagtcgttggatcagtatgtgaacagagtaaaattttggagtctataaatgaacaaacaaagttgtactttttagccagaaatgagtttctagaagtgatgttttcagaagctgaacaagttctaaatgatgttctgaaatctacttcagatctcaaggaactattagccttttctgcagaactacaaaacactggattgagaaggaatcttgcttctgttcaagcaatgtcaaagcaatcaattgatttctttgaagatataaggatacatgtgtctcagctcatgacacttatggagcagaatcaaatggaaaggtcctccaagcttgttaaatttgagaatgagtttaaggaaacttgtgttaaagacgagcaagctgctctgaataagattgctgcaattttatcagagttgaccgccaagaaaactacaatggtttcatcatatatgggacagcttaatgagaggtatagtgaagatcagaagaacctgaaactggagatatccaacctacaacaggtttcagataatggcaaaaatgagtctgtggcttgtgttggagtgatagagagtcagttccaggaggatatgtcatcacatactaaatcaaatgatcaaatggaaggcatcttaaaacaatactcggagaaaggtagtcattttgtatcttactggtcacatatacaatcatctttgcatgatcttgttaagagctcaatcatggagactgacgattttattgaggaaagcagaaacaaaaatgaaaatatattccaggaagggcttctgttttcttcacagaatgatgcagagtttcatggcattacatctgacgtgctgactgtttcaaagaattccctcttactggatcatgaaacttgcaagatggtagagactaacactaccattttctcggatcatctggaactgctgaatgaaaagcacagcgaaggcgtggaatctacaagaaacatgatgagtgattgtcttgaaaaggattacatggctaatagtccggttcgaaaccatccacgggaactactgaccagtgcaaacagcttggaatcaattgacaaactaagagcttctctgccagatctggtggcaaagttcaggctcgagaacaagttgaatgaaatggataaggggaagcaatactcggatcaaaggacacgtgtacatggtaagttcaaaaccataataagtgctattgagcgcagagttctggaggagcaacttggctgggccagactggagcggcaaaagatcctcgctttgtctgcggaggctgacgatgcaatctggcatctggccacgctcgcacggaggaggatgcaagaaagggacgaggccaggaaccaggcgaggatgctgctcgcggacctccaggcaaggaacgcccggatgaaggcggcggttcccggagcatcgtgctccagagtcgcgcggcctgacgcgttcgccgccaccggctacgagcacatccaggcccaggcccaggcccaggcccaggcactcgctcctgccgcgttcgggccgcgggggcagcgtgcccgtgcgggaactggctactactgcgttgcgtcgtccagcggcttcggccacaggagcatcgactcgtctctggacacctgcgccgttcagccgtcgctgcttggcttcgcttcctcgagctcgagccaggagcatttcgaccctgacatgttcttggtggacgtcgcagaatcgccgcaggatgtcgttccggttccggccaccgcagactcaagccaggggagaagctccggctccggctccggcacttatggtcatagtttggcgagcaaaaggccttgcagtgaaaggaagtaataaatcatcagctcaagctgcagcacgtcctgccacgggccatggccatgctgcctaaatcctaggccggaaaaatcaaccaattagttaagaaaggaaactaacaaacaactatcaattagttaaaaaagggaactaattggaaaaaaacaaataaacctagctgcattatgcaacaggcttactagcattgaataattgtggccgttgttgtatatcgcttatcatggtgtcatgaaattatgtaacctggaaattttgtttttttggcataaaaatcactgtattcagaacaccagtgctctgtccaagacaaagaagcaagagtgctgaaatgagaggataatgagcatgctgacttggctgccttggcttccacccacacactcgataggggaaaagcgagcccttccacggttccaccacccactcgatagtggaaaagtgagctcgagcgtgtccagcagctatggataactgacgatgggggtaacaagcttcacagaactctccctcgagctcagcgctaccctgaacaactgaagccgaaatggcgagcctgcagaacctggtctgctccgtatccaaacaactggctgtgccaaattgcgcggcgactaccaaactgaacagggctcctccctcagctgtggcggcgagctcgatccaaggatctttggacgacaccaaggtcacgaagagacggctagctttgcttggtgctggagcgttagccactggcctactgaggacaagctctgctgcgttcgctgaagaggtgccgaagaattacaagtcgtacgtggacgcgaaagacgggtactcgtacctttatccagctgaatggagggatttcgacttcttgggtcatgattctgcgttcaaagaccgcaacctggcccttcagtgtgttcgtgtggggttcattcctaccgagaaaacagacatccgcgacctaggaccgatggatgaggccatcttcaacctggtaaacaacgtctacgctgccccgaaccaaataccgtcgatttacgacatgcaagagcgcaccgtggacggcaagaactactggacgtttgagtacgatctggaggctccgggctacagcgtttctgcgtttgcgacggtcgccattggaaacgttcggcttaccgcctcactgatcatgagctggacttcccgcggatggcgctttctgcagaacacgttgatggacgtgccctgctccttcgacatatagatcctgttcgtgcggtcctttgtttcttttttttcttttctcttttttctccacaaccttgcg

SEQ ID NO: 1273 - DNA, 872 bp, Zea Mays
ggacctctcccatcgaggcgccgggcggcaggcggtgtcctcatccgtggcgcaagtatatgtaggatcgtccccgggtcgactctgcagtctgcacggcgccttatcatcacacacggaaccagattgcgggcagccatagacgaagagagaaagaaaggtcaacagggcactgcttgcctgctgcgtagtgactagtgtgcctcaaccaaaaggatccatggctcccggagacgactctaaccccgccgcctcctatatccacacgtgtggaaggagctggagaaggagaacaaggagttcttcgacaagtaccaggagtggatatcggagaagcgaagcgcaggcacctcctagcgcggtggcactgaactagctgctggctttgcttagattagccatgatgtgtattgtttggttattcttggattcgttacttaggcattgtttagttattcttggattcgttacttaggctttctctagtgctaaaatctagggagtgtttggtttatagggactaatgtttagtcccttcattttattctattttagtctataaattgccaaatatagaaactaaaatagagttctaatttctatatttggtaattttggaactaaaatagaataaaatgtagggactaaaaattagtcactagaaaccaaacacccccttagtatctaataaaatttagcatatgctaaactttagcgcttgctgtcccttggtgtccacgaggagcatgcaactaatggtaagaaagagataaagcggtattcaatgtaaaatggggttgaagactacttttggcacagtttagcatctttgatggagctaaattgctaatagatactatatataacgggcc

SEQ ID NO: 1274 - DNA, 1297 bp, Zea Mays
atacgcgttgcccgcccatctctctctctctctctcttcctgcgcccacacgcacgtttccactccgaccgggccagagccccgccgggcagtttccgttcgctgttgcgatccacctcctgcctgcacatcccctcccccgagttcgagccggagggccgaagagtagatctgcggcggcggccagaggatggccgtcaactgggagctgcggggctgctgcgaccacgaccagaggatcttcatcgccgccgtcggcgtctccaccgtcgtcatcctcctcctctggaggacgttcctgctcacgccgttcaagctcatcaccgtcttcctccacgagaccagccacgcgcttgcctgcaagctcacttgcggcgatgtagaaggcatgcaggtccatgcgaatgagggtggcgttactcaaacccggggtggcatatattggataatcttgcccgctggatatctgggttcatcattttggggaatggtcttcatacttgcatccacaaatctcctcactacaagaattgcagcgggttgtttcatacttgcattgtttattgttctttttgttgcagaaaattggtttcttcgctggctctgccttggtatgcatcaacatgacttagtctccatttaagcccttactctgcagcatgccagtacaccacttacgatgtcgttatccaggattcattgtgttcattgctgttgtttgggtcatacaagaatttacatctttccatgttctgaaatatgtgatcttattcataggtgtgatgaacagcttattttcagtttacggggattcatctcgtttatctttctctgcgcttcaatataccttggactggtcatattgtcttgagggttcgccattttgatctgacaatcgactctggttggctttttcgaagcttcgttgctcgaggttttggttcaagcttacaaggttctggtggttgtacagtatacatgtgcagggtaaacatgtacatccattataagttaatttggtggggattattcatgggattcttcgattttagtggttctatagagtaccattttacttaccattaccagttgcatttatggtctgtagcctcttcaatttatgtacctgtatatcatatattgctcatttatccatttcaaaacgtattcagagatgcaatattgtgcatcttaatctggcgccgttttgccataacgattgacgggctgatgtgctaccagtagcaggagttagttagtgcccagtgcagtttatagtttatcctggtaatttgag

(The sequence listing continues in the following parts.)

What is claimed is:

1. A recombinant DNA construct comprising a polynucleotide operably linked to at least one regulatory sequence wherein said polynucleotide comprises:
a. a nucleic acid sequence of at least 95% sequence identity, based on the Clustal V method of alignment, when compared to any of SEQ ID NOs:1-157,066 and 198,539-222,468;
b. a nucleic acid sequence encoding an amino acid sequence of at least 95% sequence identity, based on the Clustal V method of alignment, when compared to any of SEQ ID NOs:157,067-198,538 and 222,469-228,453; or
c. a nucleic acid sequence that is transcribed into an RNA molecule that suppresses the level of an endogenous polypeptide having an amino acid sequence of at least 95% sequence identity, based on the Clustal V method of alignment, when compared to any of SEQ ID NOs:157,067-198,538 and 222,469-228,453.

2. The recombinant DNA construct of claim 1, wherein said at least one regulatory sequence is a promoter functional in a plant cell.

3. A transgenic plant cell comprising the recombinant DNA construct of claim 1.

4. A transgenic plant comprising the transgenic plant cell of claim 3.

5. The transgenic plant of claim 4, wherein said transgenic plant is selected from the group consisting of: Arabidopsis, maize, soybean, sunflower, sorghum, canola, wheat, alfalfa, cotton, rice, barley, millet, sugar cane and switchgrass.

6. Transgenic seed produced from the transgenic plant of claim 4.

7. A method of producing a transgenic plant having an improved agronomic characteristic, wherein said method comprises:
a. transforming a plant cell with the recombinant DNA construct of claim 1; and
b. regenerating a plant from the transformed plant cell.

8. A method for introducing a polynucleotide of Interest into a target site in the genome of a plant cell, the method comprising:
a. introducing into a plant cell a first recombinant DNA construct capable of expressing a guide RNA and a second recombinant DNA construct capable of expressing a Cas endonuclease, wherein said guide RNA and Cas endonuclease are capable of forming a complex that enables the Cas endonuclease to introduce a double strand break at said target site;
b. contacting the plant cell of (a) with a donor DNA comprising a polynucleotide of interest, wherein said polynucleotide of interest is:
i. a nucleic acid sequence of at least 95% sequence identity, based on the Clustal V method of alignment, when compared to any of SEQ ID NOs:1-157,066 and 198,539-222,468; or
ii. a nucleic acid sequence encoding an amino acid sequence of at least 95% sequence identity, based on the Clustal V method of alignment, when compared to any of SEQ ID NOs:157,067-198,538 and 222,469-228,453; and
c. identifying at least one plant cell from (b) comprising in its genome the polynucleotide of Interest integrated at said target site.

9. A method of marker assisted selection of a maize plant, the method comprising:
a. analyzing for expression of one or more transcripts selected from a group consisting of nucleotide sequences, wherein the nucleotide sequences encode alternatively spliced isoforms;
b. correlating one or more transcripts with an improved agronomic characteristic; and
c. selecting for the improved agronomic characteristic in a maize plant by assaying one or more markers that detect the one or more transcripts associated with the improved agronomic characteristic.

10. The method of claim 9, wherein the expression analysis is performed with a plurality of isoform-specific probes derived from the group consisting of sequences SEQ ID NOs:1-157,066 and 198,539-222,468.
